United States Patent Application Publication US 2021/0199660 A1 - sequence listing, part 23

SEQ ID NO: 320299 - DNA, 120 bp, Artificial Sequence
  ENSG00000135540_27 (sequence is synthesized)
tgaaagacaccaggccgcctttcacaaattctggccagccagaatcctcccggggatccttgaggccgccttctaccaaggaggagaccagcaggccccccatgcccctgataaccacgg

SEQ ID NO: 320300 - DNA, 120 bp, Artificial Sequence
  ENSG00000135540_28 (sequence is synthesized)
aagcattgcagatggtgcagttgaggcccgtgagaaagaactcaggcgctgaggcggcacagttgtctgaacgaacagctcaggaacaacgaactccagttgctccacagtaccacttaa

SEQ ID NO: 320301 - DNA, 120 bp, Artificial Sequence
  ENSG00000135540_29 (sequence is synthesized)
agccatctgctttcctgaaatcccgaaatagcacaaatgaaatggagagtgaaagccagcctgcctctgtgacaagctcgcttccgacgcctgccaagagctcgagtcagggtgaccatg

SEQ ID NO: 320302 - DNA, 120 bp, Artificial Sequence
  ENSG00000135540_30 (sequence is synthesized)
gcagtgcggctgagcgtggtggccctgtgagccgcagccctggagctccaagcgctggggaggcagaggctcggcccagccccagcaccaccccactcccagactcttcacccagcagga

SEQ ID NO: 320303 - DNA, 120 bp, Artificial Sequence
  ENSG00000135540_31 (sequence is synthesized)
agccaccccccatttccaagaagcccaaactgttcctggtggtaccacctccgcagaaagattttgcagtggagcccgcagagaacgtgagcgaagccctccgagctgtgcccagcccca

SEQ ID NO: 320304 - DNA, 120 bp, Artificial Sequence
  ENSG00000135540_32 (sequence is synthesized)
cgacgggagaggagggctctgtgcacagcagggaggcaaaagagagttctgcagcccaagctggctctcatgccacgcaccctggcacctcggttcttgagggaggagctgcaggatcca

SEQ ID NO: 320305 - DNA, 120 bp, Artificial Sequence
  ENSG00000135540_33 (sequence is synthesized)
tgtctcccagcagagtggaagccaatgtccccatggttcagcctgatgtctcaccagcccccaagcaggaggagccagccgagaacagtgcggatactgggggcgatggggagagctgcc

SEQ ID NO: 320306 - DNA, 120 bp, Artificial Sequence
  ENSG00000135540_34 (sequence is synthesized)
tatctcaacaggacggagcagctggggtgccggagaccaacgcagccggttcatcctcagaggcctgtgacttcctcaaggaagacgggaatgatgaggtaatgacccccagtcgaccca

SEQ ID NO: 320307 - DNA, 120 bp, Artificial Sequence
  ENSG00000135540_35 (sequence is synthesized)
ggaccacagaagacctttttgcagctattcacagatccaaaaggaaagtcctcggccgtagagattcagatgatgaccactcccgaaaccattctccctccccgcccgtgacacccaccg

SEQ ID NO: 320308 - DNA, 120 bp, Artificial Sequence
  ENSG00000135540_36 (sequence is synthesized)
gcgctgccccaagcctggcctctccaaagcaagtggggtcgattcagagaagcatccgaaagagcagcaccagcagtgacaacttcaaagctctgctgctgaaaaagggcagtcgttcag

SEQ ID NO: 320309 - DNA, 120 bp, Artificial Sequence
  ENSG00000135540_37 (sequence is synthesized)
acaccagcgcccgcatgtctgcagcagagatgctcaagaacacagaccctagattccagaggtcgaggtcagagccttccccagatgcccccgagagcccgtcaagctgctccccaagca

SEQ ID NO: 320310 - DNA, 120 bp, Artificial Sequence
  ENSG00000135540_38 (sequence is synthesized)
agaacagaagggcgcaggaggagtgggccaagaacgaaggcttgatgcctcggagtctgtccttttccggccccaggtacggccgcagccgaacgccgccttctgccgccagcagcaggt

SEQ ID NO: 320311 - DNA, 120 bp, Artificial Sequence
  ENSG00000135540_39 (sequence is synthesized)
acagcatgcggaaccggatccagagcagccccatgaccgtcatctcggagggagaaggggaagccgtggagcctgtggacagcatagcccgcggggctctgggcgctgcggagggatgtt

SEQ ID NO: 320312 - DNA, 120 bp, Artificial Sequence
  ENSG00000135540_40 (sequence is synthesized)
ccctggacggactggcgagggaggagatggacgagggcggcctgctctgtggggaggggcctgccgcctccctgcagccccaggcccccggccctgtggatgggacagccagtgcagagg

SEQ ID NO: 320313 - DNA, 120 bp, Artificial Sequence
  ENSG00000135540_41 (sequence is synthesized)
gcagagagccctccccacagtgtggcggttctctgagcgaggagagttagggccaagaacgtaactctcccaggtgacacggggggagacgagcaatgcagcactctaggaagcctgcta

SEQ ID NO: 320314 - DNA, 120 bp, Artificial Sequence
  ENSG00000135540_42 (sequence is synthesized)
ggcgcccttccctggctcacccggggagcccactctgcttctgtgctgtgggccccggggttgccagccctgcagtgtgagtgaacggttatttaggactcacctggcacttgccctgtg

SEQ ID NO: 320315 - DNA, 88 bp, Artificial Sequence
  ENSG00000135540_43 (sequence is synthesized)
gtgaacggttatttaggactcacctggcacttgccctgtggcttaagaacaagtagaagcttaaacttctgaaagtgcttcccgggga

SEQ ID NO: 320316 - DNA, 120 bp, Artificial Sequence
  ENSG00000135540_44 (sequence is synthesized)
ttttaaaaaatacacatatacacaaacaacatgtacagaaatagaagaaagcaagccagacttaagcttggtagagtaacggagtcctctggtctaggcggtaattgctttcagagaatt

SEQ ID NO: 320317 - DNA, 120 bp, Artificial Sequence
  ENSG00000135540_45 (sequence is synthesized)
acgtttatagaaatcagcgagttttgtaagaaaggagaagatgttacttcaagaaagaggcagtagagttgctggttcttaatgcacagaacacacagatatatgcacacgtgtgctgct

SEQ ID NO: 320318 - DNA, 120 bp, Artificial Sequence
  ENSG00000135540_46 (sequence is synthesized)
gaggtgaggcaggtctggtgagcacggagaggctgggaaggggctaagtgactaattggttcaggtacttttttctgggggaggtagactttgcttcttttttgtaaaaatgacaaacgt

SEQ ID NO: 320319 - DNA, 120 bp, Artificial Sequence
  ENSG00000135540_47 (sequence is synthesized)
agaagtggcaatgctgtaacctggtgcctgctgctgtgcagccacatacacacaattgtagcctgatttttagaagtgtgggtaattttttaatgaatttcctccttgagtagcagctga

SEQ ID NO: 320320 - DNA, 120 bp, Artificial Sequence
  ENSG00000135540_48 (sequence is synthesized)
ggtcattgacaactgaagtgatggtgtggacatagagagaggggaagggttggaaaggagtaagtgatacactgctggaatttgtttcctgcctatgaaataaaattatttttcagaatt

SEQ ID NO: 320321 - DNA, 120 bp, Artificial Sequence
  ENSG00000135540_49 (sequence is synthesized)
aaatttgaaaacttgcactacagaactatgggtggagcttttccttttacaacagtttttttttttttttttttttaaccagagtttaaacttccattaggcaatttcctgtcacttgaa

SEQ ID NO: 320322 - DNA, 120 bp, Artificial Sequence
  ENSG00000135540_50 (sequence is synthesized)
atgtcaacatttgctaacttttggatatccttttggttacaccaaagaaaaagttatggctatttttttttccttgaactgcctacagtatcatgtcctaattcagaaagatttatcaaa

SEQ ID NO: 320323 - DNA, 120 bp, Artificial Sequence
  ENSG00000135540_51 (sequence is synthesized)
atctattatatattatcttactttgaagaaaatgctgaatagctcttgttagtcaaataaactgataaaaattggtagggcctggctatcaattagccctgggaaatgaatttttagatt

SEQ ID NO: 320324 - DNA, 120 bp, Artificial Sequence
  ENSG00000135540_52 (sequence is synthesized)
aaaaaggtttttttgcatcatttggtttgtgcatttttatatttgtttataaataattgagttgctaattacttctaatcttctccaatcagattttcaacaattttagacatgggacac

SEQ ID NO: 320325 - DNA, 120 bp, Artificial Sequence
  ENSG00000135540_53 (sequence is synthesized)
acgtgtgtgaagtctttattttaatgtaataatctcattacccccacccttactcccttaacttccatgtacttagactcctttatttgttaaataaactagagtattgtcttcttcatt

SEQ ID NO: 320326 - DNA, 120 bp, Artificial Sequence
  ENSG00000135540_54 (sequence is synthesized)
gagcgcttcacagacgggaaggagagcaagtgggcggtttatgattctgccctgtgctggggcgagtgagctgagctctttgatttctcccaagtaaccgtgtgggtgaactgtaaactg

SEQ ID NO: 320327 - DNA, 120 bp, Artificial Sequence
  ENSG00000135540_55 (sequence is synthesized)
ggtgcctggcttgaccctgactctttttctctagggtgaggagttacttcaccagggcagctggctttctgccctggtggggaaagatgcccaggagaggagtaggattacaatttggga

SEQ ID NO: 320328 - DNA, 120 bp, Artificial Sequence
  ENSG00000135540_56 (sequence is synthesized)
tgctagggacacgccaaagagtcggggtgccttggctttgtgttttgcaaagtcctgacaagtactcctgaaatgaacacgctgcttcattttttaaattatacttttatttgtttatta

SEQ ID NO: 320329 - DNA, 120 bp, Artificial Sequence
  ENSG00000135540_57 (sequence is synthesized)
ttttttggccgtggatatcgcggatctagaaacggagtccacaatgtggctagggtaaaacatttttcttttctttcttaacccctccttttccctttctttttaattgggtgacacaga

SEQ ID NO: 320330 - DNA, 120 bp, Artificial Sequence
  ENSG00000135540_58 (sequence is synthesized)
agccgtctttttggataatgcggtgcctgactgtcagcgttgtctaagagggaaacagcaggctcgtggagaggacctgggccaacgcaaaaaacccagcgttttgtttgctgggctgtt

SEQ ID NO: 320331 - DNA, 120 bp, Artificial Sequence
  ENSG00000135540_59 (sequence is synthesized)
ctttgtctctagttgattttgaaaagaagatgaaaaaggaaggctcttcaggttccttcagactccagccgaatacaggttctctctcacgtgctgtaagttggataaatttctcctcct

SEQ ID NO: 320332 - DNA, 120 bp, Artificial Sequence
  ENSG00000135540_60 (sequence is synthesized)
tgtccaggcagacaaagaggctgtttcgcagtgatggagagctctcggtttgtgggcagcaggtggaagtggatgacgaaaactggatatacagagcccagcccagaaaagcggtttcca

SEQ ID NO: 320333 - DNA, 120 bp, Artificial Sequence
  ENSG00000135540_61 (sequence is synthesized)
cgactaccacctgccagcttttggggggtatggaaatactatctaaaagttggactgcatgggtcaaatcattatgagacttataaactaaaactttagatacccatatagaaatgtctt

SEQ ID NO: 320334 - DNA, 120 bp, Artificial Sequence
  ENSG00000135540_62 (sequence is synthesized)
tgaggcaaaaacaaacctaaagaatgaaggctctttcccttctctgaaaaaaacaaaacactgctcttcacacaaccggaagtcaagaccagagatttggagcaattgtctactaatttg

SEQ ID NO: 320335 - DNA, 120 bp, Artificial Sequence
  ENSG00000135540_63 (sequence is synthesized)
gcacaaagatcgtttctttagaaaagtggcattggcttttgaatatgaaatcttctcatagctgcctaaaaaagactagaatgtatatggatatcagaaacctttaataatacataattt

SEQ ID NO: 320336 - DNA, 120 bp, Artificial Sequence
  ENSG00000135540_64 (sequence is synthesized)
aaaggtgaatagctgtggtccaacttcatgctctttgtttaatgagaggaatattaaaactacatatgtgtgtgcatataaaatgtctactgcttgttgggttcgaagactatgtcgcca

SEQ ID NO: 320337 - DNA, 120 bp, Artificial Sequence
  ENSG00000135540_65 (sequence is synthesized)
ttctatcactcccccttcatgatttttgcccccattaggagtttcttttgaaatgtttgtttttgtattggaattcggcgtcatttgtttacatgtctaaaataaaaatgctcttcctca

SEQ ID NO: 320338 - DNA, 120 bp, Artificial Sequence
  ENSG00000135540_66 (sequence is synthesized)
agaatatagagttatcctgttgacgagcagttagaattgtattaacgaagaagaagagggaggttactgagcaaagaagtgaattttatcctattttaacatgggacatcgtgccggaac

SEQ ID NO: 320339 - DNA, 120 bp, Artificial Sequence
  ENSG00000135541_0 (sequence is synthesized)
acagagccgcggcttgctttcaggacacgggtcgctggcgggttaggtggctgcgtggccgcctcacttcgcgcacgcgccgctaggctgggggagttgatttgcactgctccgggtgtc

SEQ ID NO: 320340 - DNA, 120 bp, Artificial Sequence
  ENSG00000135541_1 (sequence is synthesized)
ggctccggcgggacgggcggttctgcgtacccctctccagtgtcaacctggggctgaatcttcaacctgtcaaagccttcttaattatgtctgagaaaagtactaaaataggtgccattt

SEQ ID NO: 320341 - DNA, 120 bp, Artificial Sequence
  ENSG00000135541_2 (sequence is synthesized)
taaattcccagacaaggaaaaaccaaggattagaaattaagtagcttgcccaaggccacacatcagatcctgattgagtcaatgctttgcattctcagtcctctgcataaagctgagaga

SEQ ID NO: 320342 - DNA, 120 bp, Artificial Sequence
  ENSG00000135541_3 (sequence is synthesized)
tgcctacagctgagagtgaagcaaaagtaaaaaccaaagttcgctttgaagaattgcttaagacccacagtgatctaatgcgtgaaaagaaaaaactgaagaaaaaacttgtcaggtctg

SEQ ID NO: 320343 - DNA, 120 bp, Artificial Sequence
  ENSG00000135541_4 (sequence is synthesized)
aagaaaacatctcacctgacactattagaagcaatcttcactatatgaaagaaactacaagtgatgatcccgacactattagaagcaatcttccccatattaaagaaactacaagtgatg

SEQ ID NO: 320344 - DNA, 120 bp, Artificial Sequence
  ENSG00000135541_5 (sequence is synthesized)
atgtaagtgctgctaacactaacaacctgaagaagagcacgagagtcactaaaaacaaattgaggaacacacagttagcaactgaaaatcctaatggtgatgctagtgtagaggaagaca

SEQ ID NO: 320345 - DNA, 120 bp, Artificial Sequence
  ENSG00000135541_6 (sequence is synthesized)
aacaaggaaagccaaataaaaaggtgataaagacggtgccccagttgactacacaagacctgaaaccggaaactcctgagaataaggttgattctacacaccagaaaacacatacaaagc

SEQ ID NO: 320346 - DNA, 120 bp, Artificial Sequence
  ENSG00000135541_7 (sequence is synthesized)
cacagccaggcgttgatcatcagaaaagtgagaaggcaaatgagggaagagaagagactgatttagaagaggatgaagaattgatgcaagcatatcagtgccatgtaactgaagaaatgg

SEQ ID NO: 320347 - DNA, 120 bp, Artificial Sequence
  ENSG00000135541_8 (sequence is synthesized)
caaaggagattaagaggaaaataagaaagaaactgaaagaacagttgacttactttccctcagatactttattccatgatgacaaactaagcagtgaaaaaaggaaaaagaaaaaggaag

SEQ ID NO: 320348 - DNA, 120 bp, Artificial Sequence
  ENSG00000135541_9 (sequence is synthesized)
ttccagtcttctctaaagctgaaacaagtacattgaccatctctggtgacacagttgaaggtgaacaaaagaaagaatcttcagttagatcagtttcttcagattctcatcaagatgatg

SEQ ID NO: 320349 - DNA, 120 bp, Artificial Sequence
  ENSG00000135541_10 (sequence is synthesized)
aaataagctcaatggaacaaagcacagaagacagcatgcaagatgatacaaaacctaaaccaaaaaaaacaaaaaagaagactaaagcagttgcagataataatgaagatgttgatggtg

SEQ ID NO: 320350 - DNA, 120 bp, Artificial Sequence
  ENSG00000135541_11 (sequence is synthesized)
atggtgttcatgaaataacaagccgagatagcccggtttatcccaaatgtttgcttgatgatgaccttgtcttgggagtttacattcaccgaactgatagacttaagtcagattttatga

SEQ ID NO: 320351 - DNA, 120 bp, Artificial Sequence
  ENSG00000135541_12 (sequence is synthesized)
tttctcacccaatggtaaaaattcatgtggttgatgagcatactggtcaatatgtcaagaaagatgatagtggacggcctgtttcatcttactatgaaaaagagaatgtggattatattc

SEQ ID NO: 320352 - DNA, 120 bp, Artificial Sequence
  ENSG00000135541_13 (sequence is synthesized)
ttcctattatgacccagccatatgattttaaacagttaaaatcaagacttccagagtgggaagaacaaattgtatttaatgaaaattttccctatttgcttcgaggctctgatgagagtc

SEQ ID NO: 320353 - DNA, 120 bp, Artificial Sequence
  ENSG00000135541_14 (sequence is synthesized)
ctaaagtcatcctgttctttgagattcttgatttcttaagcgtggatgaaattaagaataattctgaggttcaaaaccaagaatgtggctttcggaaaattgcctgggcatttcttaagc

SEQ ID NO: 320354 - DNA, 120 bp, Artificial Sequence
  ENSG00000135541_15 (sequence is synthesized)
ttctgggagccaatggaaatgcaaacatcaactcaaaacttcgcttgcagctatattacccacctactaagcctcgatccccattaagtgttgttgaggcatttgaatggtggtcaaaat

SEQ ID NO: 320355 - DNA, 120 bp, Artificial Sequence
  ENSG00000135541_16 (sequence is synthesized)
gtccaagaaatcattacccatcaacactgtacgtaactgtaagaggactgaaagttccagactgtataaagccatcttaccgctctatgatggctcttcaggaggaaaaaggtaaaccag

SEQ ID NO: 320356 - DNA, 120 bp, Artificial Sequence
  ENSG00000135541_17 (sequence is synthesized)
tgcattgtgaacgtcaccatgagtcaagctcagtagacacagaacctggattagaagagtcaaaggaagtaataaagtggaaacgactccctgggcaggcttgccgtatcccaaacaaac

SEQ ID NO: 320357 - DNA, 120 bp, Artificial Sequence
  ENSG00000135541_18 (sequence is synthesized)
acctcttctcactaaatgcaggagaacgaggatgtttttgtcttgatttctcccacaatggaagaatattagcagcagcttgtgccagccgggatggatatccaattattttatatgaaa

SEQ ID NO: 320358 - DNA, 120 bp, Artificial Sequence
  ENSG00000135541_19 (sequence is synthesized)
ttccttctggacgtttcatgagagaattgtgtggccacctcaatatcatttatgatctttcctggtcaaaagatgatcactacatccttacttcatcatctgatggcactgccaggatat

SEQ ID NO: 320359 - DNA, 120 bp, Artificial Sequence
  ENSG00000135541_20 (sequence is synthesized)
ggaaaaatgaaataaacaatacaaatactttcagagttttacctcatccttcttttgtttacacggctaaattccatccagctgtaagagagctagtagttacaggatgctatgattcca

SEQ ID NO: 320360 - DNA, 120 bp, Artificial Sequence
  ENSG00000135541_21 (sequence is synthesized)
tgatacggatatggaaagttgagatgagagaagattctgccatattggtccgacagtttgatgttcacaaaagttttatcaactcactttgttttgatactgaaggtcatcatatgtatt

SEQ ID NO: 320361 - DNA, 120 bp, Artificial Sequence
  ENSG00000135541_22 (sequence is synthesized)
caggagattgtacaggggtgattgttgtttggaatacctatgtcaagattaatgatttggaacattcagtgcaccactggactataaataaggaaattaaagaaactgagtttaagggaa

SEQ ID NO: 320362 - DNA, 120 bp, Artificial Sequence
  ENSG00000135541_23 (sequence is synthesized)
ttccaataagttatttggagattcatcccaatggaaaacgtttgttaatccataccaaagacagtactttgagaattatggatctccggatattagtagcaaggaagtttgtaggagcag

SEQ ID NO: 320363 - DNA, 120 bp, Artificial Sequence
  ENSG00000135541_24 (sequence is synthesized)
caaattatcgggagaagattcatagtactttgactccatgtgggacttttctgtttgctggaagtgaggatggtatagtgtatgtttggaacccagaaacaggagaacaagtagccatgt

SEQ ID NO: 320364 - DNA, 120 bp, Artificial Sequence
  ENSG00000135541_25 (sequence is synthesized)
ttgcattctgtgcatttgggcaaaatgagccaattcttctgtatatttacgatttccatgttgcccagcaggaggctgaaatgttcaaacgctacaatggaacatttccattacctggaa

SEQ ID NO: 320365 - DNA, 120 bp, Artificial Sequence
  ENSG00000135541_26 (sequence is synthesized)
tacaccaaagtcaagatgccctatgtacctgtccaaaactaccccatcaaggctcttttcagattgatgaatttgtccacactgaaagttcttcaacgaagatgcagctagtaaaacaga

SEQ ID NO: 320366 - DNA, 120 bp, Artificial Sequence
  ENSG00000135541_27 (sequence is synthesized)
ggcttgaaactgtcacagaggtgatacgttcctgtgctgcaaaagtcaacaaaaatctctcatttacttcaccaccagcagtttcctcacaacagtctaagttaaagcagtcaaacatgc

SEQ ID NO: 320367 - DNA, 120 bp, Artificial Sequence
  ENSG00000135541_28 (sequence is synthesized)
tgaccgctcaagagattctacatcagtttggtttcactcagaccgggattatcagcatagaaagaaagccttgtaaccatcaggtagatacagcaccaacggtagtggctctttatgact

SEQ ID NO: 320368 - DNA, 120 bp, Artificial Sequence
  ENSG00000135541_29 (sequence is synthesized)
acacagcgaatcgatcagatgaactaaccatccatcgcggagacattatccgagtgtttttcaaagataatgaagactggtggtatggcagcataggaaagggacaggaaggttattttc

SEQ ID NO: 320369 - DNA, 120 bp, Artificial Sequence
  ENSG00000135541_30 (sequence is synthesized)
cagctaatcatgtggctagtgaaacactgtatcaagaactgcctcctgagataaaggagcgatcccctcctttaagccctgaggaaaaaactaaaatagaaaaatctccagctcctcaaa

SEQ ID NO: 320370 - DNA, 120 bp, Artificial Sequence
  ENSG00000135541_31 (sequence is synthesized)
agcaatcaatcaataagaacaagtcccaggacttcagactaggctcagaatctatgacacattctgaaatgagaaaagaacagagccatgaggaccaaggacacataatggatacacgga

SEQ ID NO: 320371 - DNA, 120 bp, Artificial Sequence
  ENSG00000135541_32 (sequence is synthesized)
tgaggaagaacaagcaagcaggcagaaaagtcactctaatagagtaaagaattgaagaaaagttaagagctgccgaaatgcacagaggtgaaaatgacaaaccaaatggaatttctcttc

SEQ ID NO: 320372 - DNA, 120 bp, Artificial Sequence
  ENSG00000135541_33 (sequence is synthesized)
agagttcagaattttcagatactaaggaggaagaaaggatccactacttcttgttcttatgaatgactctagaaaaatcagaatcaagttgtgggtggaaaaatcaacgtggcctttgag

SEQ ID NO: 320373 - DNA, 120 bp, Artificial Sequence
  ENSG00000135541_34 (sequence is synthesized)
ttcagttgttataaaccattgtgactattgttggtcaaagtattggtacttatattgttagtaattgcatcataattacattaccagtgttggaaaactaatgaagaaaacactgtaatt

SEQ ID NO: 320374 - DNA, 120 bp, Artificial Sequence
  ENSG00000135541_35 (sequence is synthesized)
gctactcagcaaatgtgaataaaaggtgtttgcgttattaggatgtctgttaagtaatcatttaatattattatattggtaatggttgtatgtgtgatgctatgcccagaatatgaagta

SEQ ID NO: 320375 - DNA, 120 bp, Artificial Sequence
  ENSG00000135541_36 (sequence is synthesized)
aatggttgtatgtgtgatgctatgcccagaatatgaagtatctgtttttgaaattcactttatttaaaagataagcagctgactgggcacggtgcctcatgcctgtaatcctagcacctt

SEQ ID NO: 320376 - DNA, 62 bp, Artificial Sequence
  ENSG00000135541_37 (sequence is synthesized)
ctcatggcaggcacctgtaatcccatctactgaggcaggagaattgcttgacccaggaggca

SEQ ID NO: 320377 - DNA, 90 bp, Artificial Sequence
  ENSG00000135541_38 (sequence is synthesized)
atctccaaaaaacaaaaaagataagcagctttagaatatggcgcattcaaaacagtctcagtaacaaagacattaaaagaaaacaattta

SEQ ID NO: 320378 - DNA, 120 bp, Artificial Sequence
  ENSG00000135541_39 (sequence is synthesized)
aacagtctcagtaacaaagacattaaaagaaaacaatttactttctaattaaaattttgtgtttcttaagatcaaatcatataggtaacttcatagacctaaattaaaagtgatttttgg

SEQ ID NO: 320379 - DNA, 120 bp, Artificial Sequence
  ENSG00000135541_40 (sequence is synthesized)
ctggactggcaacaatgttcccaatgtctttactttttaaaaaaggcttttcatatttaagcacatacctattttgtagacttacattgtttaatatttattttaatcttaatattttta

SEQ ID NO: 320380 - DNA, 120 bp, Artificial Sequence
  ENSG00000135541_41 (sequence is synthesized)
attatattgcattatttattttttctaagttccagaataatagtgtcattattatagactatatgttttgaagtttgatattataatgggatattcattttttgttcttttcttgactcc

SEQ ID NO: 320381 - DNA, 120 bp, Artificial Sequence
  ENSG00000135541_42 (sequence is synthesized)
ctcctttctcaagtgtgtgataaggtctgctgataaaatatttaaccccaagaaagtgaaaactaatataaaattagaaagacctatccaaattagacagtcaattccattaaaataaga

SEQ ID NO: 320382 - DNA, 120 bp, Artificial Sequence
  ENSG00000135541_43 (sequence is synthesized)
agtgagaaaaacaatgttgggcattgaggtgtaaattttgcccagatgtatacccagtgtgaaatatcttctaataaaaatatatttggctcttatccctgcacatgtagaggcataaaa

SEQ ID NO: 320383 - DNA, 120 bp, Artificial Sequence
  ENSG00000135541_44 (sequence is synthesized)
attggtaaacatgtcccgctgtgtagaactttaaaaaaaaggcatttttgaaagtgttgagtggcactgataactggtgaagcctacagccatccgcccaaaagtctgttctgatggcac

SEQ ID NO: 320384 - DNA, 120 bp, Artificial Sequence
  ENSG00000135541_45 (sequence is synthesized)
tgagttttcattgttctggatgtataagtctgtgtgtcaggtacagctgggcccagccagcttgagtcactcttgtacaagcttgtttttttctgtcttgtgaatgcacttgataattta

SEQ ID NO: 320385 - DNA, 120 bp, Artificial Sequence
  ENSG00000135541_46 (sequence is synthesized)
aaaataaaaatatctgtttctctgcagtttcagctaataattttgagatatgtgttgattttctgattgaatcaccaagaatttcaacaagtttagaaataatttaagatgaatgaaaaa

SEQ ID NO: 320386 - DNA, 120 bp, Artificial Sequence
  ENSG00000135541_47 (sequence is synthesized)
tatgtcagggggagctaagcatttgctaagctcttgatgtttatatgaaaaataaagggttgtttttatattgcaactactaaagagaaaaatagcagttgaagcaaacaccaggaaaat

SEQ ID NO: 320387 - DNA, 120 bp, Artificial Sequence
  ENSG00000135541_48 (sequence is synthesized)
ttggctctactgaaagcccagtccttttcccctttgtctcgctgacaaagtaagactagggttatgttcatgaatagattaataaaagatgtttctttaccacacaatctgagatgagat

SEQ ID NO: 320388 - DNA, 120 bp, Artificial Sequence
  ENSG00000135541_49 (sequence is synthesized)
ggggtgggggagatcatgacagtgccctccaagcaatagatccagctgataatcaagcagaaaatcagacaccagaatccatttgatgatgtacggcattaaacatttccttataacaaa

SEQ ID NO: 320389 - DNA, 120 bp, Artificial Sequence
  ENSG00000135541_50 (sequence is synthesized)
aaactaaaatagaaaaatctccagctcctcaaaaggtaaatgtttttgagcatacgtattacatatgtactttgattttcactctctctggataaaatattactttattttttatgctta

SEQ ID NO: 320390 - DNA, 120 bp, Artificial Sequence
  ENSG00000135541_51 (sequence is synthesized)
tttttttttttttttttggtcacatacctgaaagctgactttacttataaatgagtgtttgaactctctggagaactacttccttggtttttcatgggagcaaatatattgtcctgatag

SEQ ID NO: 320391 - DNA, 120 bp, Artificial Sequence
  ENSG00000135541_52 (sequence is synthesized)
acaatatatgttcaggacaggcatagatattcctgttcagaacaggcatattctctccccattcaggaagttggtgggttttcagcatgtgaatattgactgtgttgtcttttctcattt

SEQ ID NO: 320392 - DNA, 120 bp, Artificial Sequence
  ENSG00000135541_53 (sequence is synthesized)
gaacattttaccagggtgaaaattcaaggttgaggtagagggagctacaaagattaaggcaccctggaagcacagaagagaagttcttaaatgcccttcaaggtgagaatgctctctaga

SEQ ID NO: 320393 - DNA, 120 bp, Artificial Sequence
  ENSG00000135541_54 (sequence is synthesized)
gaagatatcatttgcctttaaaggatagtgaggagtttgttagagagacaaaggaggaagcacatttttcaggggaggggatatgtgtgtaatgatacaaaagcaagagagaacttggca

SEQ ID NO: 320394 - DNA, 120 bp, Artificial Sequence
  ENSG00000135541_55 (sequence is synthesized)
taaaatgcagatatggctgcattttatgttaaaattctaaggaattttgaaaattaaaaacagtaacactatgtcatggtcaataacatgtggtaaaaataaagtttatattagaatcaa

SEQ ID NO: 320395 - DNA, 120 bp, Artificial Sequence
  ENSG00000135541_56 (sequence is synthesized)
tacaatggcatgatcttgtgtgaagaacgttttataatttttatttggaagttccatattacaaatacatctcctttgtttcgataggatcctgattgagtcaatgctttgcattctcag

SEQ ID NO: 320396 - DNA, 120 bp, Artificial Sequence
  ENSG00000135541_57 (sequence is synthesized)
tgctgaattcaacacatgtatattatggtggaaaaagcactagactcagggtcagccagccagaagaactgagccgacctgggatcccaccacttcctaactgttttgttaggtagttca

SEQ ID NO: 320397 - DNA, 120 bp, Artificial Sequence
  ENSG00000135541_58 (sequence is synthesized)
ctttctctcttcggataaatgtctccacatttcctacttcatagaattgtcagaatcaacacaatacatttaatactttgaaactcataaaatattgggagaataaacagtatgaggtta

SEQ ID NO: 320398 - DNA, 120 bp, Artificial Sequence
  ENSG00000135541_59 (sequence is synthesized)
atgaatagtgccaaatcttgctgaagaatgatcttgcagaaatctgattgtgaagaaggaaatctaaaaaggccaaacaagcttcagtagagataacaccaggaaagcagttactcaaac

SEQ ID NO: 320399 - DNA, 120 bp, Artificial Sequence
  ENSG00000135541_60 (sequence is synthesized)
tgccatcgttctgaaactgccgtgtgttttctaaggacaaccaggtgttaagcctttctctttagaagaaggacagtaacctttctgttaaagaattgaagaaaagttaagagctgccga

SEQ ID NO: 320400 - DNA, 120 bp, Artificial Sequence
  ENSG00000135541_61 (sequence is synthesized)
ttaagtagcttgcccaaggccacacatcatggcagatacataactataagagagcattggcttggtcctccaaagctagcagtttggtgggagttacagaacattttaccagggtgaaaa

SEQ ID NO: 320401 - DNA, 120 bp, Artificial Sequence
  ENSG00000135541_62 (sequence is synthesized)
ttcaaggttgaggtagagggagctacaaagattaaggcaccctggaagcacagaagagaagttcttaaatgcccttcaaggatcctgattgagtcaatgctttgcattctcagtcctctg

SEQ ID NO: 320402 - DNA, 120 bp, Artificial Sequence
  ENSG00000135541_63 (sequence is synthesized)
gctgctgagaccaaggaatgagtgagtaaaggtgtttggaagtcaaatattggtcctagttaagtaagtgtccttttcaagtaagtggtaaactttgtaatgtggacccccttctaactt

SEQ ID NO: 320403 - DNA, 120 bp, Artificial Sequence
  ENSG00000135541_64 (sequence is synthesized)
aggattcatataatttgaacacaggctaagctgcctctgcatcattaaaaaggatttgggtatgccagtgataggaatacacagtagaaaagatggcagggaccatgtttaacataccta

SEQ ID NO: 320404 - DNA, 120 bp, Artificial Sequence
  ENSG00000135541_65 (sequence is synthesized)
agacaaactttctgaggatatcacagcatccatttcacatgaacaggcttagcagaattggcaagacctgcacatggcaacatattattcatttttcaggataacaaaaaataattaaaa

SEQ ID NO: 320405 - DNA, 120 bp, Artificial Sequence
  ENSG00000135541_66 (sequence is synthesized)
ggtgagcccctttcttactttgacaattcttttaaatgttcagatgcttgttgtgttgatgaatatcacttatttctttagaaataaagctcataatggtcggtttttacacttgacaaa

SEQ ID NO: 320406 - DNA, 120 bp, Artificial Sequence
  ENSG00000135541_67 (sequence is synthesized)
ggacttcagactaggctcagaatctatgacacaaagagagctgaatgagaaggcaggaggaatatgcatagctagagaaggcctctagataaagttctgaaatgagaaaagaacagagcc

SEQ ID NO: 320407 - DNA, 120 bp, Artificial Sequence
  ENSG00000135541_68 (sequence is synthesized)
agaatctttggcagcacacttgaaggaattaaaaatacagtgctcaaagactaagcaaatcagcaactaactacaacctgatccccttggaatcataaagagtctgtattggcatccaca

SEQ ID NO: 320408 - DNA, 120 bp, Artificial Sequence
  ENSG00000135541_69 (sequence is synthesized)
gttaatgctctatgccctctttatacctatctccctacttgagttgcactttttactactttgaccattatctcttctgtcctcacagaaaaaaataaacaggctcttgtgtaaatggta

SEQ ID NO: 320409 - DNA, 80 bp, Artificial Sequence
  ENSG00000135547_0 (sequence is synthesized)
gaaagagccgctaggagcagaccgcgccgccgccggagccgcgcctgcccaggcccggggagggaggaggcgggcgtcag

SEQ ID NO: 320410 - DNA, 120 bp, Artificial Sequence
  ENSG00000135547_1 (sequence is synthesized)
tgtgccccgcgcggtcttcgccgggatgaagcgcccctgcgaggagacgacctccgagagcgacatggacgagaccatcgacgtggggagcgagaacaattactcggggcaaagtactag

SEQ ID NO: 320411 - DNA, 120 bp, Artificial Sequence
  ENSG00000135547_2 (sequence is synthesized)
ctctgtgattagattgaattctccaacaacaacatctcagattatggcaagaaagaaaaggagagggattatagagaaaaggcgtcgggatcggataaataacagtttatctgagttgag

SEQ ID NO: 320412 - DNA, 120 bp, Artificial Sequence
  ENSG00000135547_3 (sequence is synthesized)
aagacttgtgccaactgcttttgaaaaacaaggatctgcaaagttagaaaaagctgaaatattgcaaatgacagtggatcatttgaagatgcttcaggcaacagggggtaaaggctactt

SEQ ID NO: 320413 - DNA, 120 bp, Artificial Sequence
  ENSG00000135547_4 (sequence is synthesized)
tgacgcacacgctcttgccatggacttcatgagcataggattccgagagtgcctaacagaagttgcgcggtacctgagctccgtggaaggcctggactcctcggatccgctgcgggtgcg

SEQ ID NO: 320414 - DNA, 120 bp, Artificial Sequence
  ENSG00000135547_5 (sequence is synthesized)
gcttgtgtctcatctcagcacttgcgccacccagcgggaggcggcggccatgacatcctccatggcccaccaccatcatccgctccacccgcatcactgggccgccgccttccaccacct

SEQ ID NO: 320415 - DNA, 120 bp, Artificial Sequence
  ENSG00000135547_6 (sequence is synthesized)
gcccgcagccctgctccagcccaacggcctccatgcctcagagtcaaccccttgtcgcctctccacaacttcagaagtgcctcctgcccacggctctgctctcctcacggccacgtttgc

SEQ ID NO: 320416 - DNA, 120 bp, Artificial Sequence
  ENSG00000135547_7 (sequence is synthesized)
ccatgcggattcagccctccgaatgccatccacgggcagcgtcgccccctgcgtgccacctctctccacctctctcttgtccctctctgccaccgtccacgccgcagccgcagcagccac

SEQ ID NO: 320417 - DNA, 120 bp, Artificial Sequence
  ENSG00000135547_8 (sequence is synthesized)
cgcggctgcacacagcttccctctgtccttcgcgggggcattccccatgcttcccccaaacgcagcagcagcagtggccgcggccacagccatcagcccgcccttgtcagtatcagccac

SEQ ID NO: 320418 - DNA, 120 bp, Artificial Sequence
  ENSG00000135547_9 (sequence is synthesized)
gtccagtcctcagcagaccagcagtggaacaaacaataaaccttaccgaccctgggggacagaagttggagctttttaaatttttcttgaacttcttgcaatagtaactgaatgtcctcc

SEQ ID NO: 320419 - DNA, 120 bp, Artificial Sequence
  ENSG00000135547_10 (sequence is synthesized)
gaaatgtggtattctcttttttttctctcccttttttgtttggttcaaggcagctcggtaactgacatcagcaacttttgaaaacttcacacttgttaccatttagaagtttcctggaaa

SEQ ID NO: 320420 - DNA, 120 bp, Artificial Sequence
  ENSG00000135547_11 (sequence is synthesized)
atatatggaccgtaccatccagcagtgcatcagtatgtctgaattggggaagtaaaatgccctgactgaattctcttgagactagatgggacatacatatatagagagagagtgagagag

SEQ ID NO: 320421 - DNA, 120 bp, Artificial Sequence
  ENSG00000135547_12 (sequence is synthesized)
tcgtgtttcgtaagtgcctgagcttaggaagttttcttctggatatataacattgcacaagggaagacgagtgtggaggataggttaagaaaggaaagggacagaagtcttgcaataggc

SEQ ID NO: 320422 - DNA, 120 bp, Artificial Sequence
  ENSG00000135547_13 (sequence is synthesized)
tgcagacattttaataccatgccagagaagagtattctgctgaaaccaacaggttttactggtcaaaatgactgctgaaaataattttcaagttgaaagatctagttttatcttagtttg

SEQ ID NO: 320423 - DNA, 120 bp, Artificial Sequence
  ENSG00000135547_14 (sequence is synthesized)
ccttctttgtacagacatgccaagaggtgacatttagcagtgcattggtataagcaattatttcatcagttctcagattaacaagcatttctgctctgcctgcaggcccccaggcacttt

SEQ ID NO: 320424 - DNA, 120 bp, Artificial Sequence
  ENSG00000135547_15 (sequence is synthesized)
tttttttggatggctcaaaatatggtgctgctttatataaaccttacatttatatagtgcacctatgagcagttgcctaccatgtgtccaccagaggctatttaattcatgccaacttga

SEQ ID NO: 320425 - DNA, 120 bp, Artificial Sequence
  ENSG00000135547_16 (sequence is synthesized)
aaactctccagtttgtaggagtttggtttaatttattcagtttcattaggactatttttatatatttatcctcttcattttctcctaatgatgcaacatctattcttgtcaccctttggg

SEQ ID NO: 320426 - DNA, 120 bp, Artificial Sequence
  ENSG00000135547_17 (sequence is synthesized)
agaagttacatttctggaggtgatgaagcaaggagggagcactaggaagagaaaagctacaatttttaaagctctttgtcaagttagtgattgcatttgatcccaaaacaagatgaatgt

SEQ ID NO: 320427 - DNA, 120 bp, Artificial Sequence
  ENSG00000135547_18 (sequence is synthesized)
atgcaatgggatgtacataagttatttttgcccatgcctaaactagtgctatgtaatggggttgtggttttgtttttttcgatttcgtttaatgacaaaataatctcttaatatgctgaa

SEQ ID NO: 320428 - DNA, 120 bp, Artificial Sequence
  ENSG00000135547_19 (sequence is synthesized)
atcaagcacgtgagagtttttgtttaaaagataagagacacagcatgtattatgcacttcatttctctactgtgtggagaaagcaataaacattatgagaatgttaaacgttatgcaaaa

SEQ ID NO: 320429 - DNA, 120 bp, Artificial Sequence
  ENSG00000135547_20 (sequence is synthesized)
ttatacttttaaatatttgttttgaaattactgtacctagtcttttttgcattactttgtaacctttttctatgcaagagtctttacataccactaattaaatgaagtcctttttgacta

SEQ ID NO: 320430 - DNA, 120 bp, Artificial Sequence
  ENSG00000135549_0 (sequence is synthesized)
gggttatttttagcaatctggctcacactgagggcttcctgctctattcagcaaatgtgcaaatggatgctgcaggaccgtaacagtagacattgatgaagatgttgctatgaggacaga

SEQ ID NO: 320431 - DNA, 120 bp, Artificial Sequence
  ENSG00000135549_1 (sequence is synthesized)
ttcatcaaaaatgactgacgtggagtctggggtcgccaattttgcatcttcagcaagggcaggccgccggaatgccttaccagacatccagagttcagctgccacagacggaacctcaga

SEQ ID NO: 320432 - DNA, 120 bp, Artificial Sequence
  ENSG00000135549_2 (sequence is synthesized)
tttgcccctcaaactggaggctctctccgtgaaggaagatgcaaaagagaaagatgaaaaaacaacacaagaccaattggaaaagcctcaaaatgaagaaaaatgaaggctcataatcta

SEQ ID NO: 320433 - DNA, 120 bp, Artificial Sequence
  ENSG00000135549_3 (sequence is synthesized)
tcaagagtgctgaatttctgcatgttgaaagacttagtggttctgttttcttgagacatttaatctggtggtaactgtggtaacattgcagccctaagcagcatgtgtatattagataat

SEQ ID NO: 320434 - DNA, 120 bp, Artificial Sequence
  ENSG00000135549_4 (sequence is synthesized)
gaaggaaaaggttaagaataatacatgatcacagaaatgcataccactgtctgtaaacccaacaaaattcactgttctcttttggatttatttagcctgatgtatttttaattcaatttt

SEQ ID NO: 320435 - DNA, 120 bp, Artificial Sequence
  ENSG00000135549_5 (sequence is synthesized)
tatggtgatgggcaaatcattcttggtaaatgtaaatcaaacatgattgatttaaaacttcatggaatttgtagaaaattatggacatttttggtgagaaagaacaatagtcaaaactca

SEQ ID NO: 320436 - DNA, 120 bp, Artificial Sequence
  ENSG00000135549_6 (sequence is synthesized)
catggatagagtgtgtttgttttttgccaaaaatgccccagactttttcccaaacctcaaaaacgtcttggaaaaattgtaaaagtttgataacagaaacatctttaggatatttttgtc

SEQ ID NO: 320437 - DNA, 120 bp, Artificial Sequence
  ENSG00000135549_7 (sequence is synthesized)
tgacatattttgcttctagtatgtgcctactgtgatttttttcatgtggaaaatgcaaaatttgtaacaaaatggttatatggaacatgcctattaaatgaattttactatcttccctaa

SEQ ID NO: 320438 - DNA, 120 bp, Artificial Sequence
  ENSG00000135549_8 (sequence is synthesized)
gaaaaaagctaccgtggcacgtgccccggggagtgatgcggtggcccggtttgcacggagagcgggacaccgcctggggagccgcgctcgtagcctgggggcgggacgcggcggccgctc

SEQ ID NO: 320439 - DNA, 120 bp, Artificial Sequence
  ENSG00000135549_9 (sequence is synthesized)
cctccgcccccgagtagctgccaccgcctggctgcgccccagcccagtagctcagacgcggccgcatcccggtggactgtagaggcggcagcgagctagagcccgagtcgcagctccggg

SEQ ID NO: 320440 - DNA, 120 bp, Artificial Sequence
  ENSG00000135549_10 (sequence is synthesized)
ccgcagagcgctgggcgagcgcgagcgccagggcaccggcagggcaggcagctgcgcgcggctggagtcatgctatactgaaaagacacttcatcaagataactctgggagaagcagaaa

SEQ ID NO: 320441 - DNA, 120 bp, Artificial Sequence
  ENSG00000135549_11 (sequence is synthesized)
accctgtgccagggacaggaaagataggagaaagaaagtttatcagaattttttaaacctgtctcagaaataacaacatattttaatcagagatttcacctgtgccacaggccaccatgg

SEQ ID NO: 320442 - DNA, 120 bp, Artificial Sequence
  ENSG00000135549_12 (sequence is synthesized)
atctgcacctcgatgcccttcggagtcatgagagtgcaagcaatagcagctcaggaagcagcagcagaggagaccagaaaggtcactacctttgcatgaacaacaatggcaaccaggata

SEQ ID NO: 320443 - DNA, 120 bp, Artificial Sequence
  ENSG00000135549_13 (sequence is synthesized)
tttggtctgtgtatgtgtgtgtgttttactttaatatgaattatacaaaatactagttgttttacactctcttttcttattcttagggcttttgtgtatgtctgacttgtttttaaataa

SEQ ID NO: 320444 - DNA, 120 bp, Artificial Sequence
  ENSG00000135549_14 (sequence is synthesized)
cttcctcagcaatgcagaccttaatttttatatttttttaaagtagctaacatagcagtaggcacttaagcatttagtcaatgatattggtagaaatagtaaaatacatcctttaaatat

SEQ ID NO: 320445 - DNA, 120 bp, Artificial Sequence
  ENSG00000135549_15 (sequence is synthesized)
tttattttcattttcagaaatatatgcatgcagttatgttttatttgattgttgacttaggctatgtctgtatacagtaaccaaataaactctttcactattaaagagatttcttactga

SEQ ID NO: 320446 - DNA, 120 bp, Artificial Sequence
  ENSG00000135549_16 (sequence is synthesized)
gtcactagacgacacggctgtcttctttcctggagaatttctcaaggactgctggctggaaacttaacggctaatgtggatctgaccgtagtttgccaaattaagaaaacgtttttaccc

SEQ ID NO: 320447 - DNA, 120 bp, Artificial Sequence
  ENSG00000135549_17 (sequence is synthesized)
tgttgaagatttgctttaacttcaaaagtgatgacaagaaagtatggacaccccttcaggaccaacctgataagtcactggtttttctttcgtttaaagatgacacactctgaaattaat

SEQ ID NO: 320448 - DNA, 120 bp, Artificial Sequence
  ENSG00000135549_18 (sequence is synthesized)
tatccgcacaggctctagaacttggtttcttgaagaagttgtaggaaagaaagtttatcagaattttttaaacctgtctcagaaataacaacatattttaatcagagatttgctgaagct

SEQ ID NO: 320449 - DNA, 120 bp, Artificial Sequence
  ENSG00000135549_19 (sequence is synthesized)
ggttatttttagcaatctggctcacactgagggcttcctgctctattcagcaaatgtgcaaatggatgctgcaggaccgtaacagtagacattgatgaaggttgtgatcaatgattagac

SEQ ID NO: 320450 - DNA, 120 bp, Artificial Sequence
  ENSG00000135549_20 (sequence is synthesized)
tctcaagcctgttgtgtttttgatctagccatgcctttcaaccactgtggtgaacatttacttctgaataggctcatcttcttcatatgcacattctatttgtagatgttgctatgagga

SEQ ID NO: 320451 - DNA, 120 bp, Artificial Sequence
  ENSG00000135549_21 (sequence is synthesized)
tggacaccccttcaggaccaacctgataagtcactgggtttttgtaatctcgcaatattgaaatcaagagacatcacagaacacagcagcaaagagacggggtttcaccgtgttagccag

SEQ ID NO: 320452 - DNA, 120 bp, Artificial Sequence
  ENSG00000135549_22 (sequence is synthesized)
aaggtaacatctttttggtagtgatcacgttttgtcatgtttatgtgcctagcagctaatagaatgcctggtgcataataaacattcccataactgaattaaacaagttgatacaattga

SEQ ID NO: 320453 - DNA, 120 bp, Artificial Sequence
  ENSG00000135549_23 (sequence is synthesized)
gagccaccgcgccccggcagcaaagggaccattaaaaatctttaattgtgccagatgtttctgactaccgagtcaacattcactgattgagccatgaagattgaggtttttctttcgttt

SEQ ID NO: 320454 - DNA, 120 bp, Artificial Sequence
  ENSG00000135549_24 (sequence is synthesized)
gggaagtgaatgagatcagtgctcttataaattggctccagagagctccttcgtccctttcaccatgtgaggacacagctagaagacaccatctgtgaaccagaaagtgagtccttatca

SEQ ID NO: 320455 - DNA, 120 bp, Artificial Sequence
  ENSG00000135549_25 (sequence is synthesized)
gacactgaatctgctggcaccttgacttcttagccttcagaaatgtgagaattaaatttctgttgtttataagatacacaatttatgatatgttgttataacagcccaaacatatatgat

SEQ ID NO: 320456 - DNA, 120 bp, Artificial Sequence
  ENSG00000135569_0 (sequence is synthesized)
atgagagctgtcttcatccaaggtgctgaagagcaccctgcggcattctgctaccaggtgaatgggtcttgccccaggacagtacatactctgggcatccagttggtcatctacctggcc

SEQ ID NO: 320457 - DNA, 120 bp, Artificial Sequence
  ENSG00000135569_1 (sequence is synthesized)
tgtgcagcaggcatgctgattatcgtgctagggaatgtatttgtggcatttgctgtgtcctacttcaaagcgcttcacacgcccaccaacttcctgctgctctccctggccctggctgac

SEQ ID NO: 320458 - DNA, 120 bp, Artificial Sequence
  ENSG00000135569_2 (sequence is synthesized)
atgtttctgggtctgctggtgctgcccctcagcaccattcgctcagtggagagctgctggttcttcggggacttcctctgccgcctgcacacctacctggacaccctcttctgcctcacc

SEQ ID NO: 320459 - DNA, 120 bp, Artificial Sequence
  ENSG00000135569_3 (sequence is synthesized)
tccatcttccatctctgtttcatttccattgaccgccactgtgccatctgtgaccccctgctctatccctccaagttcacagtgagggtggctctcaggtacatcctggcaggatggggg

SEQ ID NO: 320460 - DNA, 120 bp, Artificial Sequence
  ENSG00000135569_4 (sequence is synthesized)
ctcagccagtggctggaagagatgccttgtgtgggcagttgccagctgctgctcaataaattttggggctggttaaacttccctttgttctttgtcccctgcctcattatgatcagcttg

SEQ ID NO: 320461 - DNA, 120 bp, Artificial Sequence
  ENSG00000135569_5 (sequence is synthesized)
tatgtgaagatctttgtggttgctaccagacaggctcagcagattaccacattgagcaaaagcctggctggggctgccaagcatgagagaaaagctgccaagaccctgggcattgctgtg

SEQ ID NO: 320462 - DNA, 120 bp, Artificial Sequence
  ENSG00000135569_6 (sequence is synthesized)
ggcatatacctcttgtgctggctgcccttcaccatagacacgatggtcgacagcctccttcactttatcacacccccactggtctttgacatctttatctggtttgcttacttcaactca

SEQ ID NO: 320463 - DNA, 120 bp, Artificial Sequence
  ENSG00000135569_7 (sequence is synthesized)
gcctgcaaccccatcatctatgtcttttcctaccagtggtttcggaaggcactgaaactcacactgagccagaaggtcttctcaccgcagacacgcactgttgatttgtaccaagaatga

SEQ ID NO: 320464 - DNA, 120 bp, Artificial Sequence
  ENSG00000135577_0 (sequence is synthesized)
gtgctgtgaggcttgccccgcggacagtaaacttgcaggggcgagagggagggacatcgattaaacctaaatcgtgggcgttcagtcctcagggcaccggagcgcgtgaaaactccagcg

SEQ ID NO: 320465 - DNA, 120 bp, Artificial Sequence
  ENSG00000135577_1 (sequence is synthesized)
gactctgctggaaaggagatcatgccctctaagtctctttccaacctctcggtgaccaccggcgcgaatgagagcggttccgttcccgaggggtgggaaagggatttcctgccggcctcg

SEQ ID NO: 320466 - DNA, 120 bp, Artificial Sequence
  ENSG00000135577_2 (sequence is synthesized)
gacgggaccaccacggagttggtgatccgctgtgtgatcccgtccctctacctgctcatcatcaccgtgggcttgctgggcaacatcatgctggtgaagatcttcatcaccaacagcgcc

SEQ ID NO: 320467 - DNA, 120 bp, Artificial Sequence
  ENSG00000135577_3 (sequence is synthesized)
atgaggagcgtccccaacatcttcatctctaacctggcggccggggacttgctgctgctgctcacctgcgtcccggtggacgcctcgcgctacttcttcgacgagtggatgtttggcaag

SEQ ID NO: 320468 - DNA, 120 bp, Artificial Sequence
  ENSG00000135577_4 (sequence is synthesized)
gtgggctgcaaactgatccctgtcatccagctcacttccgtgggggtttccgtgttcactctcactgccctcagcgccgacaggtacagagccatcgttaaccccatggacatgcagacg

SEQ ID NO: 320469 - DNA, 120 bp, Artificial Sequence
  ENSG00000135577_5 (sequence is synthesized)
tgggtatctgggtggtctccgtgttgctggcagttcccgaagcggtgttttcagaagtggctcgcatcagtagcttggataatagcagcttcacagcatgtatcccataccctcaaacag

SEQ ID NO: 320470 - DNA, 120 bp, Artificial Sequence
  ENSG00000135577_6 (sequence is synthesized)
atgaattacatccaaagattcattcagtgctcattttcttggtctatttcctcataccacttgctattattagcatttattattatcatattgcaaagaccttaattaaaagcgcacaca

SEQ ID NO: 320471 - DNA, 120 bp, Artificial Sequence
  ENSG00000135577_7 (sequence is synthesized)
atcttcctggagaatacaatgaacataccaaaaaacagatggaaacacggaaacgcctggctaaaattgtgcttgtctttgtgggctgtttcatcttctgttggtttccaaaccacatcc

SEQ ID NO: 320472 - DNA, 120 bp, Artificial Sequence
  ENSG00000135577_8 (sequence is synthesized)
tttacatgtatcggtctttcaactataatgagattgatccatctctaggccacatgattgtcaccttagttgcccgggttctcagttttggcaattcttgtgtcaacccatttgctcttt

SEQ ID NO: 320473 - DNA, 120 bp, Artificial Sequence
  ENSG00000135577_9 (sequence is synthesized)
acctactcagtgaaagcttcaggaggcatttcaacagccaactctgctgtgggaggaagtcctatcaagagagaggaaccagctacctactcagctcttcagcggtgcgtatgacatctc

SEQ ID NO: 320474 - DNA, 120 bp, Artificial Sequence
  ENSG00000135577_10 (sequence is synthesized)
tgaaaagcaatgctaagaacatggtgaccaattctgttttactaaatgggcacagcatgaagcaggaaatggcactgtgattttggccattcaactcactacctggagagaacttagtaa

SEQ ID NO: 320475 - DNA, 120 bp, Artificial Sequence
  ENSG00000135577_11 (sequence is synthesized)
tgttcttgatctggagagactgtttcattaactcacagaaaatgaaggtgaagataaacatggctggtctgttattcttttttactttcttatgtcaagtaataaaaaagcaaaaataaa

SEQ ID NO: 320476 - DNA, 120 bp, Artificial Sequence
  ENSG00000135587_0 (sequence is synthesized)
cctcaactttgcgcctgttgctgggccgccggcgcgcgggcggccgcgaccgccggggacgagcttggaggaaaaggaaccgggagccgcccacccgggggcgctctccggacccccagg

SEQ ID NO: 320477 - DNA, 120 bp, Artificial Sequence
  ENSG00000135587_1 (sequence is synthesized)
gtcctagcgcgcggcccttaccgagcctgggcgcccggatttcggcagcggatcgcctttccgggttggcggcccgcctgattgggaacagccggccggttgccgggggaacgcgggagt

SEQ ID NO: 320478 - DNA, 120 bp, Artificial Sequence
  ENSG00000135587_2 (sequence is synthesized)
gagtcgggcccgacctgagccacgcgggcttggtgcccacctgtgcgcgccgcctgcgaagaaggaacggtctggggagaaggcgccgccggccgcccccgtccccaccgcggccgtcgc

SEQ ID NO: 320479 - DNA, 120 bp, Artificial Sequence
  ENSG00000135587_3 (sequence is synthesized)
gagttcgagccgcctagcgcccctggagctccccaaccatgaagcccaacttctccctgcgactgcggatcttcaacctcaactgctggggcattccgtacttgagcaagcaccgggccg

SEQ ID NO: 320480 - DNA, 120 bp, Artificial Sequence
  ENSG00000135587_4 (sequence is synthesized)
accgcatgaggcgcctgggagactttctgaaccaggagagcttcgacctggctttgctggaggaggtgtggagtgagcaggacttccagtacctgagacagaagctgtcacctacctacc

SEQ ID NO: 320481 - DNA, 120 bp, Artificial Sequence
  ENSG00000135587_5 (sequence is synthesized)
cagctgcacaccacttccggagcggaatcattggcagtggcctctgtgtcttctccaaacatccaatccaggagcttacccagcacatctacactctcaatggctacccctacatgatcc

SEQ ID NO: 320482 - DNA, 120 bp, Artificial Sequence
  ENSG00000135587_6 (sequence is synthesized)
atcatggtgactggttcagtgggaaggctgtggggctgctggtgctccatctaagtggcatggtgctcaacgcctatgtgacccatctccatgccgaatacaatcgacagaaggacatct

SEQ ID NO: 320483 - DNA, 120 bp, Artificial Sequence
  ENSG00000135587_7 (sequence is synthesized)
agcacatcgtgtggcccaagcttgggaattggcccagttcatccaccacacatccaagaaggcagacgtggttctgttgtgtggagacctcaacatgcacccagaagacctgggctgctg

SEQ ID NO: 320484 - DNA, 120 bp, Artificial Sequence
  ENSG00000135587_8 (sequence is synthesized)
cctgctgaaggagtggacagggcttcatgatgcctatcttgaaactcgggacttcaagggctctgaggaaggcaacacaatggtacccaagaactgctacgtcagccagcaggagctgaa

SEQ ID NO: 320485 - DNA, 120 bp, Artificial Sequence
  ENSG00000135587_9 (sequence is synthesized)
gccatttccctttggtgtccgcattgactacgtgctttacaaggcagtttctgggttttacatctcctgtaagagttttgaaaccactacaggctttgaccctcacaggggcacccccct

SEQ ID NO: 320486 - DNA, 120 bp, Artificial Sequence
  ENSG00000135587_10 (sequence is synthesized)
ctctgatcatgaagccctgatggctactctgtttgtgaggcacagccccccacagcagaaccccagctctacccacggaccagcagagaggtcgccgttgatgtgtgtgctaaaggaggc

SEQ ID NO: 320487 - DNA, 120 bp, Artificial Sequence
  ENSG00000135587_11 (sequence is synthesized)
ctggacggagctgggtctgggcatggctcaggctcgctggtgggccaccttcgctagctatgtgattggcctggggctgcttctcctggcactgctgtgtgtcctggcggctggaggagg

SEQ ID NO: 320488 - DNA, 120 bp, Artificial Sequence
  ENSG00000135587_12 (sequence is synthesized)
ggccggggaagctgccatactgctctggacccccagtgtagggctggtgctgtgggcaggtgcattctacctcttccacgtacaggaggtcaatggcttatatagggcccaggctgagct

SEQ ID NO: 320489 - DNA, 120 bp, Artificial Sequence
  ENSG00000135587_13 (sequence is synthesized)
ccagcatgtgctaggaagggcaagggaggcccaggatctgggcccagagcctcagccagccctactcctggggcagcaggagggggacagaactaaagaacaataaagcttggcccttta

SEQ ID NO: 320490 - DNA, 120 bp, Artificial Sequence
  ENSG00000135587_14 (sequence is synthesized)
acatctacctagcacatcgtgtggcccaagcttgggaattggcccagttcatccagtgtgtgagcctgggcttgaaatgggaagtgggatgggacccaggggctgagggtgaacaaggcc

SEQ ID NO: 320491 - DNA, 120 bp, Artificial Sequence
  ENSG00000135587_15 (sequence is synthesized)
catgcagcccagtcctgggacagagagatggtacttctctagctctcatacctggggatgaggtgtgggggcaagatcttataaggaagcaatgggcaaggcttatccattgtataccaa

SEQ ID NO: 320492 - DNA, 120 bp, Artificial Sequence
  ENSG00000135587_16 (sequence is synthesized)
acaccatgccaagtgacagacacaggcttgattcagacatacccctgggaccctcagtcttatctgctgtgatctcatctatcttgctcagctccatgccgaatacaatcgacagaagga

SEQ ID NO: 320493 - DNA, 120 bp, Artificial Sequence
  ENSG00000135596_0 (sequence is synthesized)
agacctggttgccagcccaacaggaagcggcccctcccggcttcggagccgccgccactcatctctgcccagctgctgccctccccaggaggcctccatggcttcacctacctccaccaa

SEQ ID NO: 320494 - DNA, 120 bp, Artificial Sequence
  ENSG00000135596_1 (sequence is synthesized)
cccagcgcatgcccactttgagagcttcctgcaggcccagctgtgccaggacgtgctgagcagcttccaggagctgtgtggggccctggggctggaacccggtggggggctgccccagta

SEQ ID NO: 320495 - DNA, 120 bp, Artificial Sequence
  ENSG00000135596_2 (sequence is synthesized)
ccacaagatcaaggaccagctcaactactggagcgccaagtcactgtggaccaagctggacaagcgagcaggccagcctgtctaccagcagggccgggcctgcaccagcaccaagtgcct

SEQ ID NO: 320496 - DNA, 120 bp, Artificial Sequence
  ENSG00000135596_3 (sequence is synthesized)
ggtggtgggtgctggaccttgcgggctgcgggtcgctgtggagctggcgctgctgggggcccgagtggtgctggtggaaaagcgcaccaagttctctcgccacaacgtgctccacctctg

SEQ ID NO: 320497 - DNA, 120 bp, Artificial Sequence
  ENSG00000135596_4 (sequence is synthesized)
gcccttcaccatccacgacctgcgggcactcggtgctaagaagttctacgggcgcttctgcaccggcaccctggaccacatcagcatcaggcagctccagctgcttctgctgaaggtagc

SEQ ID NO: 320498 - DNA, 120 bp, Artificial Sequence
  ENSG00000135596_5 (sequence is synthesized)
attgctgctgggggtggaaattcactggggtgtcactttcactggcctccagccccctcctaggaaggggagtggctggcgtgcccagctccaacccaacccccctgcccagctggccaa

SEQ ID NO: 320499 - DNA, 120 bp, Artificial Sequence
  ENSG00000135596_6 (sequence is synthesized)
ctatgaatttgacgtccttatctcggctgcaggaggtaaattcgtccctgaaggcttcaaagttcgagaaatgcgaggcaaactggccattggcatcacagccaactttgtgaatggacg

SEQ ID NO: 320500 - DNA, 120 bp, Artificial Sequence
  ENSG00000135596_7 (sequence is synthesized)
caccgtggaggagacacaggtgccggagatcagtggtgtagccaggatctacaaccagagcttcttccagagccttctcaaagccacaggcattgatctggagaacattgtgtactacaa

SEQ ID NO: 320501 - DNA, 120 bp, Artificial Sequence
  ENSG00000135596_8 (sequence is synthesized)
ggacgacacccactactttgtgatgacagccaagaagcagtgcctgctgcggctgggggtgctgcgccaggactggccagacaccaatcggctgctgggcagtgccaatgtggtgcccga

SEQ ID NO: 320502 - DNA, 120 bp, Artificial Sequence
  ENSG00000135596_9 (sequence is synthesized)
ggctctgcagcgctttacccgggcagctgctgactttgccacccatggcaagctcgggaaactagagtttgcccaggatgcccatgggcagcctgatgtctctgcctttgacttcacgag

SEQ ID NO: 320503 - DNA, 120 bp, Artificial Sequence
  ENSG00000135596_10 (sequence is synthesized)
catgatgcgggcagagagttctgctcgtgtgcaagagaagcatggcgcccgcctgctgctgggactggtgggggactgcctggtggagcccttctggcccctgggcactggagtggcacg

SEQ ID NO: 320504 - DNA, 120 bp, Artificial Sequence
  ENSG00000135596_11 (sequence is synthesized)
gggcttcctggcagcctttgatgcagcctggatggtgaagcggtgggcagagggcgctgagtccctagaggtgttggctgagcgtgagagcctgtaccagcttctgtcacagacatcccc

SEQ ID NO: 320505 - DNA, 120 bp, Artificial Sequence
  ENSG00000135596_12 (sequence is synthesized)
agaaaacatgcatcgcaatgtggcccagtatgggctggacccagccacccgctaccccaacctgaacctccgggcagtgacccccaatcaggtacgagacctgtatgatgtgctagccaa

SEQ ID NO: 320506 - DNA, 120 bp, Artificial Sequence
  ENSG00000135596_13 (sequence is synthesized)
ggagcctgtgcagaggaacaacgacaagacagatacagggatgccagccaccgggtcggcaggcacccaggaggagctgctacgctggtgccaggagcagacagctgggtacccgggagt

SEQ ID NO: 320507 - DNA, 120 bp, Artificial Sequence
  ENSG00000135596_14 (sequence is synthesized)
cctggcctgctggaaccctcagagctgcaggggctgggagctctggaagcaactgcttgggcactaaaggtggcagagaatgagctgggcatcacaccggtggtgtctgcacaggccgtg

SEQ ID NO: 320508 - DNA, 120 bp, Artificial Sequence
  ENSG00000135596_15 (sequence is synthesized)
gtagcagggagtgacccactgggcctcattgcctacctcagccacttccacagtgccttcaagagcatggcccacagcccaggccctgtcagccaggcctccccagggacctccagtgct

SEQ ID NO: 320509 - DNA, 120 bp, Artificial Sequence
  ENSG00000135596_16 (sequence is synthesized)
gtattattccttagtaaacttcagaggaccctgcagcgatcccgggccaaggaaaatgcagaggatgctggtggcaagaagctgcgcttggagatggaggccgagaccccaagtactgag

SEQ ID NO: 320510 - DNA, 120 bp, Artificial Sequence
  ENSG00000135596_17 (sequence is synthesized)
gtgccacctgacccagagcctggtgtacccctgacacccccatcccaacaccaggaggccggtgctggggacctgtgtgcactttgtggggaacacctctatgtcctggaacgcctctgt

SEQ ID NO: 320511 - DNA, 120 bp, Artificial Sequence
  ENSG00000135596_18 (sequence is synthesized)
gtcaacggccatttcttccaccggagctgcttccgctgccatacctgtgaggccacactgtggccaggtggctacgagcagcacccaggagatggacatttctactgcctccagcacctg

SEQ ID NO: 320512 - DNA, 120 bp, Artificial Sequence
  ENSG00000135596_19 (sequence is synthesized)
ccccagacagaccacaaagcggaaggcagcgatagaggccctgagagtccggagctccccacaccaagtgagaatagcatgccaccaggcctctcaactcccacagcctcgcaggagggg

SEQ ID NO: 320513 - DNA, 120 bp, Artificial Sequence
  ENSG00000135596_20 (sequence is synthesized)
gccggtcctgttccagatcccagccagcccacccgtcggcagatccgcctctccagcccggagcgccagcggttgtcctcccttaaccttacccctgacccggaaatggagcctccaccc

SEQ ID NO: 320514 - DNA, 120 bp, Artificial Sequence
  ENSG00000135596_21 (sequence is synthesized)
aagcctccccgcagctgctccgccttggcccgccacgccctggagagcagctttgtgggctggggcctgccagtccagagccctcaagctcttgtggccatggagaaggaggaaaaagag

SEQ ID NO: 320515 - DNA, 120 bp, Artificial Sequence
  ENSG00000135596_22 (sequence is synthesized)
agtcccttctccagtgaagaggaagaagaagatgtgcctttggactcagatgtggaacaggccctgcagacctttgccaagacctcaggcaccatgaataactacccaacatggcgtcgg

SEQ ID NO: 320516 - DNA, 120 bp, Artificial Sequence
  ENSG00000135596_23 (sequence is synthesized)
actctgctgcgccgtgcgaaggaggaggagatgaagaggttctgcaaggcccagaccatccaacggcgactaaatgagattgaggctgccttgagggagctagaggccgagggcgtgaag

SEQ ID NO: 320517 - DNA, 120 bp, Artificial Sequence
  ENSG00000135596_24 (sequence is synthesized)
ctggagctggccttgaggcgccagagcagttccccagaacagcaaaagaaactatgggtaggacagctgctacagctcgttgacaagaaaaacagcctggtggctgaggaggccgagctc

SEQ ID NO: 320518 - DNA, 120 bp, Artificial Sequence
  ENSG00000135596_25 (sequence is synthesized)
atgatcacggtgcaggaattgaatctggaggagaaacagtggcagctggaccaggagctacgaggctacatgaaccgggaagaaaacctaaagacagctgctgatcggcaggctgaggac

SEQ ID NO: 320519 - DNA, 120 bp, Artificial Sequence
  ENSG00000135596_26 (sequence is synthesized)
caggtcctgaggaagctggtggatttggtcaaccagagagatgccctcatccgcttccaggaggagcgcaggctcagcgagctggccttggggacaggggcccagggctagacgagggtg

SEQ ID NO: 320520 - DNA, 120 bp, Artificial Sequence
  ENSG00000135596_27 (sequence is synthesized)
ggccgtctgctttcgttcccacaaagaaagcacctcaccccagcacagtgccacccctgttcatctgggctgcctggcagagagccttgctgtttacaattaaaatgtttctgccacaaa

SEQ ID NO: 320521 - DNA, 120 bp, Artificial Sequence
  ENSG00000135596_28 (sequence is synthesized)
tttagctacaagtacttcagatccagctcagcacctgcagctgacacaggagcctggtccgccaccacccactcaccacgtgccccagccaacgccacttggccaggagcagagctgacc

SEQ ID NO: 320522 - DNA, 120 bp, Artificial Sequence
  ENSG00000135596_29 (sequence is synthesized)
tgtaaacacgtttgactgcttgattgggctcttcttataagccagctctgactggattttgaacgcttgaaatcaggctctccacaccattgacttgcagatgcttctgtgagagctgtg

SEQ ID NO: 320523 - DNA, 120 bp, Artificial Sequence
  ENSG00000135596_30 (sequence is synthesized)
ggttttgcactgccatgcgaccaggtggtgcaggtctcccaaatgccacccccctccaagcttccctctttgctctaagtcctcaggcctcctgggcctgggacagatggttgtttgtgt

SEQ ID NO: 320524 - DNA, 120 bp, Artificial Sequence
  ENSG00000135596_31 (sequence is synthesized)
catcaggactcgtggggttctatgcgtggagcactcaccgcagcctaagctgggatcccagctcagaggtcaggccatgttgggatgtttagggaaggtgatgcattatcaggagacata

SEQ ID NO: 320525 - DNA, 120 bp, Artificial Sequence
  ENSG00000135596_32 (sequence is synthesized)
cgcagctgcggtcgctcgggaaccacgcctggcagtcagtcgcaacatcctcccgccgtttgttgaggcagtttggtggagggaagtggaacctacgcggacagaggctgtttctctgtc

SEQ ID NO: 320526 - DNA, 120 bp, Artificial Sequence
  ENSG00000135596_33 (sequence is synthesized)
aggaggcaagcacgagtgctgaggaaaactttgcccttgccatgagacacttctcagacacagcgtggcactgaggccatcaaggggcgccggcacagggacgcttggagggagatgggg

SEQ ID NO: 320527 - DNA, 120 bp, Artificial Sequence
  ENSG00000135596_34 (sequence is synthesized)
ctcactgcaaggaactccacacttttctgtttttttggtctcagcagcaaaggagaaggaacctgtcccctcagggattaagcaagcacagccctagttgatcacccagcatgaaaagtc

SEQ ID NO: 320528 - DNA, 120 bp, Artificial Sequence
  ENSG00000135596_35 (sequence is synthesized)
ctgcctagtatggaggaggggataaaaaggtctgcctgcagaggggaggagctaagggctgcctggtgtggggatggccccttctgctgtgacctgggtggatatctgggcttgggatgc

SEQ ID NO: 320529 - DNA, 120 bp, Artificial Sequence
  ENSG00000135596_36 (sequence is synthesized)
ccagtcgctgccctttggggtcaatcctacccccggcaggcccttacccctggactcaggggctgtgtggccagcctgccttgagacctgagcggggctgccttaggtacgagacctgta

SEQ ID NO: 320530 - DNA, 120 bp, Artificial Sequence
  ENSG00000135596_37 (sequence is synthesized)
tgatgtgctagccaaggagcctgtgcagaggaacaacgacaagacagatacagggatgccagccaccggtgagcaggccttcctcccaaggggtgaccaaaatatgtactacccagcgag

SEQ ID NO: 320531 - DNA, 120 bp, Artificial Sequence
  ENSG00000135596_38 (sequence is synthesized)
gcccaggtggtccctgcaaagcagctgcagcctcaggacaggagcagcgtgccggagcactcattgttggctggtgggttggttgggggcctgctggaggaacggaggggcagcaccgca

SEQ ID NO: 320532 - DNA, 120 bp, Artificial Sequence
  ENSG00000135596_39 (sequence is synthesized)
caggcagcagttggctgccagtctgaatgtaagcgcgttagtgtttgaaccaccgttacagccatagtggtgctggcaacctcccctgcccccagtttagtctgctgccctctatgtggc

SEQ ID NO: 320533 - DNA, 120 bp, Artificial Sequence
  ENSG00000135596_40 (sequence is synthesized)
cagttgcgatttcactttattcactcctctactttattccaaagagattttttttaaaagagaattgggatggagagctgctgatagtcagctttaggctggtgccctagtagaggtggg

SEQ ID NO: 320534 - DNA, 120 bp, Artificial Sequence
  ENSG00000135596_41 (sequence is synthesized)
tccctgactcctcctcccctacagaacccccacatgcagcagctgggctccctatatgcctgggatgggcagagggggccttgggcacagcacagccttctttcccagggtcggcaggca

SEQ ID NO: 320535 - DNA, 120 bp, Artificial Sequence
  ENSG00000135596_42 (sequence is synthesized)
tgcagcctggcctgctgtgagtccctggcagacccacctctctctcatgatctcagtgtaggagttagcatatccagttgaatcctagagacagtgtgcttccctgcatctgccgacagt

SEQ ID NO: 320536 - DNA, 120 bp, Artificial Sequence
  ENSG00000135596_43 (sequence is synthesized)
cttgtgagactctaatgcattcagatagtggagagctttgtgaatggcacaggcccccaaagccaggagtagtgtcactgggttgggcactgggtagcagagactacacacctaccttca

SEQ ID NO: 320537 - DNA, 120 bp, Artificial Sequence
  ENSG00000135596_44 (sequence is synthesized)
agccttcttgtaccccagctgctgcttgctgtccctcccctcctgctgcccttcctcccctcagtggggctaggttcttgtctctagttggcttttctccctgacatcccacagggaacc

SEQ ID NO: 320538 - DNA, 120 bp, Artificial Sequence
  ENSG00000135596_45 (sequence is synthesized)
tgtgtgtgtgtgtgacagagggagaaggcggtgtgtgtgtgtgtgtgtgtcagaaagaggaagaaggcgccctctgagggccagcctgggagaggtgtccttctgggttggagagtgact

SEQ ID NO: 320539 - DNA, 120 bp, Artificial Sequence
  ENSG00000135596_46 (sequence is synthesized)
gtctgttctgagagtacagtattggcaccccccatccacactgatgccctggctctccccgcaggccctgtcagccaggcctccccagggacctccagtgctgtattattccttagtaaa

SEQ ID NO: 320540 - DNA, 120 bp, Artificial Sequence
  ENSG00000135596_47 (sequence is synthesized)
agcagggaggagtgggcaggggggtacccagtggagatcctggggtgatggtgaggacattcagaaagtggggaggactgggacctcaaaacatcacacttagagctgttaggacttatt

SEQ ID NO: 320541 - DNA, 120 bp, Artificial Sequence
  ENSG00000135596_48 (sequence is synthesized)
gcaggaaaatgcagaggatgctggtggcaagaagctgcgcttggaggtgaatgcaggcaggggcgggtcggtctcctaccccacattttatcccctttcctggtactgtcttccctattt

SEQ ID NO: 320542 - DNA, 120 bp, Artificial Sequence
  ENSG00000135596_49 (sequence is synthesized)
ctcatcccatgtcttgttccccaccccaggtcctgtaacccccccatccagcctccctgcctagtctcactccccttcccttcagccccttgtgttcatctgtacgcatcccctcccagc

SEQ ID NO: 320543 - DNA, 120 bp, Artificial Sequence
  ENSG00000135596_50 (sequence is synthesized)
tggccctgcccctctaccctccctgcctgagcacttacctccttagatggaggccgagaccccaagtactgaggtgccacctgacccagagcctggtgtacccctgacacccccatccca

SEQ ID NO: 320544 - DNA, 120 bp, Artificial Sequence
  ENSG00000135596_51 (sequence is synthesized)
acaccaggaggtgagagccaggctttgtgtgcaggcagaggcccggggagggcagggcaggggcgtttcatgggagggaaagaactttggagctggccttggctccacctgaccctgtgt

SEQ ID NO: 320545 - DNA, 120 bp, Artificial Sequence
  ENSG00000135596_52 (sequence is synthesized)
ctgagagtccggtaaagactgaaggcgtgtatgtatattggggcatgggaagaggaagagggtctcgtcaaaccagcgctttgctgggggtaactgaatgtcgtcttctactagcatgta

SEQ ID NO: 320546 - DNA, 120 bp, Artificial Sequence
  ENSG00000135596_53 (sequence is synthesized)
agctctgtgaaggcagggatgcctgtctgcttacacttcttgttctctcaagtatctaaaacacagccagacactgtttgtaaatggttttaagtgaatgaatgccaaggctcacctttg

SEQ ID NO: 320547 - DNA, 120 bp, Artificial Sequence
  ENSG00000135596_54 (sequence is synthesized)
gccggtaagtcgtccagcggagccggctgcgagccccgcggccgggtggggtgaggtggggtgcgcttccggggaaacgcagctgcggtcgctcgggaaccacgcctggcagccactcat

SEQ ID NO: 320548 - DNA, 120 bp, Artificial Sequence
  ENSG00000135597_0 (sequence is synthesized)
ccgccgctgtcactgttggtgcgggcgcgtcggggccgggccggggcactgtaaatggcggcggagggaggcggagcggcggccacgctcagcccagatcccccgaaactttaggttcga

SEQ ID NO: 320549 - DNA, 120 bp, Artificial Sequence
  ENSG00000135597_1 (sequence is synthesized)
agccccacaactttccgggaagcgctgccgctccggaggcgtggacggaaggggaagccgaggcgggaagtctgggggaatcggcagggagccggggagactcgaacccgcggcgggggc

SEQ ID NO: 320550 - DNA, 120 bp, Artificial Sequence
  ENSG00000135597_2 (sequence is synthesized)
gagactcgaacccgcggcgggggcggagtccgccagtgcctcgcgcctccgcggcccccgcctctttctctgcaccctccccgcggccggagccggagccggagccggagccgtagtcgc

SEQ ID NO: 320551 - DNA, 120 bp, Artificial Sequence
  ENSG00000135597_3 (sequence is synthesized)
cagccgggccccctcctcgcgacctccgggccctgttgctcgggcgcacctggcgcgtgtgaggccggggccggcgttttcgggaagctagcaggaggccgggccacgcgcagcccctgc

SEQ ID NO: 320552 - DNA, 120 bp, Artificial Sequence
  ENSG00000135597_4 (sequence is synthesized)
aggaggccgggccacgcgcagcccctgccggcccaggttcctggggccgggccccgagtagtgcatgcggggcggggcggccgtgagccggaggcgaagatggaaggcttaacgctgagc

SEQ ID NO: 320553 - DNA, 120 bp, Artificial Sequence
  ENSG00000135597_5 (sequence is synthesized)
gatgcggagcagaaatactattcagatctcttctcctactgcgacattgagagcaccaagaaggtggtggtcaacgggcgggtgctggagctgttccgggccgcgcagctgccgaacgac

SEQ ID NO: 320554 - DNA, 120 bp, Artificial Sequence
  ENSG00000135597_6 (sequence is synthesized)
gtggtcctacagatcatggagctttgtggtgcaacaagacttggttattttggaagaagtcagttctacattgctttgaaacttgtagctgttgcccagtctggtttccctttaagagtg

SEQ ID NO: 320555 - DNA, 120 bp, Artificial Sequence
  ENSG00000135597_7 (sequence is synthesized)
gaaagtataaatacagtaaaggaccttcctctgccaagatttgttgcttcaaagaatgaacaggaatctcgccatgcagcctcatattcttcagattctgaaaatcaagggtcgtattct

SEQ ID NO: 320556 - DNA, 120 bp, Artificial Sequence
  ENSG00000135597_8 (sequence is synthesized)
ggtgtaattcccccaccacctggcagggggcaagtgaaaaagggatccgtaagccatgatacggttcagcctcgtacatctgcagatgcacaggaacctgcatccccagtagtttcacca

SEQ ID NO: 320557 - DNA, 120 bp, Artificial Sequence
  ENSG00000135597_9 (sequence is synthesized)
cagcaatccccaccaacttctccacacacatggaggaagcacagccgtcatcccagcggtgggaatagtgagaggcctctcgcgggacctgggccattttggtctccctttggtgaagca

SEQ ID NO: 320558 - DNA, 120 bp, Artificial Sequence
  ENSG00000135597_10 (sequence is synthesized)
caatcaggttcttctgctggtgatgcagtgtggtcagggcattccccacctccacctcaagaaaactgggtcagttttgcagatactccaccaaccagtactcttttaaccatgcatcct

SEQ ID NO: 320559 - DNA, 120 bp, Artificial Sequence
  ENSG00000135597_11 (sequence is synthesized)
gcttctgtccaggaccagacaacagtacgaactgtagcatcagctacaactgccattgaaattcgtaggcaatccagtagttatgatgatccctggaaaataacagatgaacaaagacag

SEQ ID NO: 320560 - DNA, 120 bp, Artificial Sequence
  ENSG00000135597_12 (sequence is synthesized)
tattatgtaaatcagtttaaaaccattcagcctgatctaaacggatttattccaggatctgcagctaaagagttttttacaaaatcaaaacttcctattcttgaactttctcatatttgg

SEQ ID NO: 320561 - DNA, 120 bp, Artificial Sequence
  ENSG00000135597_13 (sequence is synthesized)
tgagttttgtgctgcttttcatctggtggttgctaggaagaatggctatgatttaccagaaaaacttcctgaaagcttaatgcccaaactgattgatttggaagattcagcagatgttgg

SEQ ID NO: 320562 - DNA, 120 bp, Artificial Sequence
  ENSG00000135597_14 (sequence is synthesized)
ggatcagccaggtgaggtaggttattcaggctctcctgctgaagctcctccaagcaagtcaccatcgatgccatcactaaaccagacatggcctgagctgaatcagagcagtgagcagtg

SEQ ID NO: 320563 - DNA, 120 bp, Artificial Sequence
  ENSG00000135597_15 (sequence is synthesized)
ggagacatttagtgaacgctcttcaagctcacaaactctgacccaatttgattctaacattgcaccagctgatcctgatactgctattgttcatccagttcccattcgtatgactccaag

SEQ ID NO: 320564 - DNA, 120 bp, Artificial Sequence
  ENSG00000135597_16 (sequence is synthesized)
caaaatccacatgcaggaaatggaacttaaaagaactggcagcgatcatacaaatcccactagcccattacttgtgaaaccatctgaccttttagaagaaaataagataaattcatcggt

SEQ ID NO: 320565 - DNA, 120 bp, Artificial Sequence
  ENSG00000135597_17 (sequence is synthesized)
gaaattcgcttctggtaatactgtagatggttacagtagttcagactcttttacttctgacccagaacagatcgggagcaatgtaactcgtcaaaggtctcattcaggaacgtcgcctga

SEQ ID NO: 320566 - DNA, 120 bp, Artificial Sequence
  ENSG00000135597_18 (sequence is synthesized)
taacactgcaccaccacctccccctccaaggccacagccctctcattctagatcatcatctttagatatgaatcggacctttacagtcaccacaggacaacaacaggctggagttgttgc

SEQ ID NO: 320567 - DNA, 120 bp, Artificial Sequence
  ENSG00000135597_19 (sequence is synthesized)
ccatcctcctgcagtgcctccaagaccacagccctcacaggctcctggtcctgctgtgcatcgcccagtggatgccgatggcctcataactcacactagtacctcacctcagcagatacc

SEQ ID NO: 320568 - DNA, 120 bp, Artificial Sequence
  ENSG00000135597_20 (sequence is synthesized)
agagcaaccaaattttgcagatttcagtcagtttgaagtatttgctgcatcaaatgtaaacgacgaacaagatgatgaagccgagaaacatccagaagtcctgccggctgaaaaagcttc

SEQ ID NO: 320569 - DNA, 120 bp, Artificial Sequence
  ENSG00000135597_21 (sequence is synthesized)
tgatcctgcaagttctcttcgagttgccaaaacagatagtaaaactgaagaaaagacagctgctagtgctcctgccaatgtgagcaaaggcacaacaccacttgctccaccacctaaacc

SEQ ID NO: 320570 - DNA, 120 bp, Artificial Sequence
  ENSG00000135597_22 (sequence is synthesized)
tgttcgaagaagattaaaatcagaagatgaattaaggccagaagttgatgaacatacacaaaagacgggtgtcttagctgctgttcttgcatcacaaccttctattcccagatctgttgg

SEQ ID NO: 320571 - DNA, 120 bp, Artificial Sequence
  ENSG00000135597_23 (sequence is synthesized)
gaaagataagaaagctattcaggcatcaattagacgtaataaggaaaccaacaccgttttggccagattgaatagcgaattgcagcaacaattaaaggatgttcttgaggagagaatttc

SEQ ID NO: 320572 - DNA, 120 bp, Artificial Sequence
  ENSG00000135597_24 (sequence is synthesized)
cctggaagttcaactggaacaacttcgaccattctctcacctataagccaattgccgttaactgtgaacatacttgtttttaagtggttttgggttcaaagccaatttggagacctagac

SEQ ID NO: 320573 - DNA, 120 bp, Artificial Sequence
  ENSG00000135597_25 (sequence is synthesized)
attcagctcactgcttaactcaacattaaattttatgattctgttttgccctatatgttcaccgttgtatttaagtatcttttattttttaatttcgacaataaaaaggtcaggatggcg

SEQ ID NO: 320574 - DNA, 120 bp, Artificial Sequence
  ENSG00000135597_26 (sequence is synthesized)
ctgggatatgcaatgcttctatggctaataccacacaccaatttaatttatagaatgggctcctcatttacatctcagtcacagactcagaaataaattgtcagtttgtccttttatgtt

SEQ ID NO: 320575 - DNA, 120 bp, Artificial Sequence
  ENSG00000135597_27 (sequence is synthesized)
taatattttacataaagcatctattctataaaaatctttagaaagagtttcccatttaattttgattttaaagaattatattggataaggtggttttcaccataagctaatttactctct

SEQ ID NO: 320576 - DNA, 120 bp, Artificial Sequence
  ENSG00000135597_28 (sequence is synthesized)
gcagccgtctacattcttcacaaatcatgtggtacattgaagcctcttttacatgtcaacttgtgacaaatacaaacatgtgagattttatattttccttgtggaaatgtgatcaacttc

SEQ ID NO: 320577 - DNA, 120 bp, Artificial Sequence
  ENSG00000135597_29 (sequence is synthesized)
atcagcgacttcgaactattttatgagattcaataattcagcagtcatgtaaacttatgaaataggtatgagtaatggcctttcttaatttttttaagtattgttttaaaacttctgagg

SEQ ID NO: 320578 - DNA, 120 bp, Artificial Sequence
  ENSG00000135597_30 (sequence is synthesized)
atatcagttattcccagaataaagggaaattccttaggatttctagtttacctttagccatcttgtcactcattcttttgctatacagacaagtttttcctattaatgagtttctggagt

SEQ ID NO: 320579 - DNA, 120 bp, Artificial Sequence
  ENSG00000135597_31 (sequence is synthesized)
atgccttattcaggacaatatgctgttttagattttgtttaatattaaatgatatatacatttcgatccattgctaacagcagatattccctttaagatttattctgtctataggatcat

SEQ ID NO: 320580 - DNA, 120 bp, Artificial Sequence
  ENSG00000135597_32 (sequence is synthesized)
agattttaaactgcatggatatatcttggcagaatcagaagtgtggttttacaccaataaaacagcataatattttaacttttgttcatctttttaacaagatttaaagttttaagaaat

SEQ ID NO: 320581 - DNA, 120 bp, Artificial Sequence
  ENSG00000135597_33 (sequence is synthesized)
agaagattttgtattttcatttctgaaagaaaaaatgtttaaatactatagattcacagtcctaaactgcaccgatagactttgttactgtaaacaagaatttgaagaacaagggaaact

SEQ ID NO: 320582 - DNA, 120 bp, Artificial Sequence
  ENSG00000135597_34 (sequence is synthesized)
gacaacctcaagcttccaagattaatacaatttttacctgacaatatctaggtaaaaatatacatcagctgaagtttccaagtggctttcagtatggctttagttgttaaataataaatt

SEQ ID NO: 320583 - DNA, 120 bp, Artificial Sequence
  ENSG00000135597_35 (sequence is synthesized)
taaagcattaaaggcccaggaaactactcaacacctgtttttctgagtgtctttgttttcaaagaaacatttttactcagctgtatttcattacaagcaagttttgctgtttccatttag

SEQ ID NO: 320584 - DNA, 120 bp, Artificial Sequence
  ENSG00000135597_36 (sequence is synthesized)
ccatttagttttgttttttaaaatatgctttttaaaaatagccttctaatttaacaatgtcaaaaatatttgttaaagcttcttagaatttagccttccaataaataacacttaaaaatt

SEQ ID NO: 320585 - DNA, 120 bp, Artificial Sequence
  ENSG00000135597_37 (sequence is synthesized)
aaaagaaattttgcttaataactttattaaaaaaattgttagccacataaaataatcagttgtttagggtacatcataaacagtgctatcttaatttattgtaacacttacatacttgag

SEQ ID NO: 320586 - DNA, 120 bp, Artificial Sequence
  ENSG00000135597_38 (sequence is synthesized)
tgttgagaaaatgtcatgctaataagatcctttgctgcttagccaagtgtaaatgtttaaaaagaaaaaagctctgatatcagtagtatgaccaattatcatggggtgaattttgcaggt

SEQ ID NO: 320587 - DNA, 120 bp, Artificial Sequence
  ENSG00000135597_39 (sequence is synthesized)
tgcataattgagagaacatatcagatatactatgataaatgtttgtaattatgtgactttttcgaggttttcaaagtatatattctgtcatttgatttccaccacttatccccattaaaa

SEQ ID NO: 320588 - DNA, 120 bp, Artificial Sequence
  ENSG00000135597_40 (sequence is synthesized)
ccttgtgagtttagagaggcagattcagaaagtttaaccatcaaaaggtaaatgacttggccaagatctcatatccagtgagggacgagagctaggatttgaacgtaagtcctttgatat

SEQ ID NO: 320589 - DNA, 120 bp, Artificial Sequence
  ENSG00000135597_41 (sequence is synthesized)
ctagtcaactgccacatccactgtgtcacactgccttctcagtcctgtaaacaaggtatgtaatagtacatttgggatcttagcattggaaatgataaaataagtgactgattcagtttc

SEQ ID NO: 320590 - DNA, 120 bp, Artificial Sequence
  ENSG00000135597_42 (sequence is synthesized)
catatgaagaaagtatgttttacaacctgaaaactctgtataattagttttcttcaatatagaatgtttagccatattaactgcattaagatgtgtcatatatgaccaagcacagtatgc

SEQ ID NO: 320591 - DNA, 120 bp, Artificial Sequence
  ENSG00000135597_43 (sequence is synthesized)
aaaatggaatttgggacacatgcactgttccccaatttatttgaaattccattatgtaaagcatcaaaagggccactgatcagaataagggaagaggacctgaggccctgcctcccctaa

SEQ ID NO: 320592 - DNA, 120 bp, Artificial Sequence
  ENSG00000135597_44 (sequence is synthesized)
aacacctgcttaggcccctctgttaaattttagtgccctggagagctccatttggaaaccattgctgtagcctattagagcagttttctttgtgaacaagttacgtttttttcttatttt

SEQ ID NO: 320593 - DNA, 120 bp, Artificial Sequence
  ENSG00000135597_45 (sequence is synthesized)
ttttctttttgtagcatgtaggaaatgctaaaaatacaaaagtttgttcactttcaggaagaaattttaagcttctgtcctttccatgccttttaaagccagaaaaatgctggattaaag

SEQ ID NO: 320594 - DNA, 120 bp, Artificial Sequence
  ENSG00000135597_46 (sequence is synthesized)
agcatgctagatattaataattttggacagttggaaaacagaactaactggtggttttatactatttcctgctttatgacataattgcagccaggatacttgtgtctgagacattataac

SEQ ID NO: 320595 - DNA, 120 bp, Artificial Sequence
  ENSG00000135597_47 (sequence is synthesized)
atcacaccatccatcctactattggatgcaaaaccattaatacaagtgtttttctagatgaagggattacaccttgaaagaatttgctaatagagagggtttatggaaagtaaggtaatt

SEQ ID NO: 320596 - DNA, 120 bp, Artificial Sequence
  ENSG00000135597_48 (sequence is synthesized)
gttgagacactactatttttgctgcatctattcatcttgtgtcttttttaaaaaccagtattacattaaaagaatatttgtattccattgatatcagtttgtaaataaaaacattctttc

SEQ ID NO: 320597 - DNA, 120 bp, Artificial Sequence
  ENSG00000135597_49 (sequence is synthesized)
taaagcatctcaaatctaaagcccatgttcattctaaataaaatcgtatgtgatcattagagacagaaatggaagtcccttctaaattcaggtagtagtacttgcattttccctacttaa

SEQ ID NO: 320598 - DNA, 120 bp, Artificial Sequence
  ENSG00000135597_50 (sequence is synthesized)
atattcccataaagttttatttatagtatttggtaatgaggtcatgaatgtcataattttttttcgatatgtgaaaaatcaaaatgttaataaatcattgattttgagacatctaatgat

SEQ ID NO: 320599 - DNA, 120 bp, Artificial Sequence
  ENSG00000135597_51 (sequence is synthesized)
atttctaaaaatatctagttaggatatggaatttagattacattttaattgtcttccagaaagcactagtaatctttcaacatagatttatttagcacctgtggttacggataagacagt

SEQ ID NO: 320600 - DNA, 120 bp, Artificial Sequence
  ENSG00000135597_52 (sequence is synthesized)
ataggagatgaccctaataatctctaacctttatggagcacttttgatatgtcagttctgtttaaaaaacaatacaaaaacaaactctttatatatattaactcctttagtcctctgaac

SEQ ID NO: 320601 - DNA, 120 bp, Artificial Sequence
  ENSG00000135597_53 (sequence is synthesized)
aagtttgcacagcgtaactgggattccagtagtctggttccacagctgtgagcccttaaaaattaagtatgaagatgataagagagtccctttgtcctccaggtaacttacatgcagtct

SEQ ID NO: 320602 - DNA, 120 bp, Artificial Sequence
  ENSG00000135597_54 (sequence is synthesized)
tgtgaaacaaagttaaacttcatgccacccaaatgaggtacacaagtaaataccttctttttggcaaaaatcttctgtaaacttttctccacagttagttaattaggattttaaaacttc

SEQ ID NO: 320603 - DNA, 120 bp, Artificial Sequence
  ENSG00000135597_55 (sequence is synthesized)
cttctgtgtccctgtaacaataattattgaggaaaaaactaattatattaacagatattgataagtaactttcctgaagtgatgccgcatgataaaagtaattattgtgggattcttaat

SEQ ID NO: 320604 - DNA, 120 bp, Artificial Sequence
  ENSG00000135597_56 (sequence is synthesized)
tcatgaaatactttggatcagtatttctcagaatatcttaattttcatatgaaaactaatctgtaggaaaagtcgttgaattattgtattagccgtttttgtaggtaattttcaccagtg

SEQ ID NO: 320605 - DNA, 120 bp, Artificial Sequence
  ENSG00000135597_57 (sequence is synthesized)
tgctcatttgctaatatttaatttttacatatcttctcaacttaaatgtcactattttaaatagtaagttgaactttgaagcataaaaatgtatactttcccaaagaggattttggttta

SEQ ID NO: 320606 - DNA, 120 bp, Artificial Sequence
  ENSG00000135597_58 (sequence is synthesized)
tggggtagttttgtctttgtgtaaatattcgtgtgtatacattgtatgtgtgtagatgttttttcctctttagaggataactgataattcttaagaatcagatttaaatgataattttaa

SEQ ID NO: 320607 - DNA, 120 bp, Artificial Sequence
  ENSG00000135597_59 (sequence is synthesized)
tgcaattttaatgtaaaaattctataccattttattactaagatctccaaaacaaatggaatttactgtaattaatattgacttatcactccacctgttttaagaggtatgatttttttt

SEQ ID NO: 320608 - DNA, 120 bp, Artificial Sequence
  ENSG00000135597_60 (sequence is synthesized)
gtgtacctcttttagaagagtagtatttcatatcaaaatacatctgtatataactcatgctcagatgcttgatttgctctcattgtggccgcattctgatttttctagcatggggtaggg

SEQ ID NO: 320609 - DNA, 120 bp, Artificial Sequence
  ENSG00000135597_61 (sequence is synthesized)
agtggggaagcgggggtgtctgattggcagttctgtcttgtggtctggcatggccctgtttgtagtgctgattgcaggggttgacttgctacagattgacataagctctacatatattaa

SEQ ID NO: 320610 - DNA, 120 bp, Artificial Sequence
  ENSG00000135597_62 (sequence is synthesized)
ttccagaattctttgcattttatctcaattatattttattaaatatctatacatatgtgtaaaatatgtgcacgtacataatagaatcatctttcaggggtcgcactggcaagtcgcact

SEQ ID NO: 320611 - DNA, 120 bp, Artificial Sequence
  ENSG00000135597_63 (sequence is synthesized)
gacttgctttgttttgaacaaaactttgattcattaggatcacaaaatcagtacattaacatttgaatgttcaaagaagaatttgatgttattctttctttctttagtcaaggcatgcct

SEQ ID NO: 320612 - DNA, 120 bp, Artificial Sequence
  ENSG00000135597_64 (sequence is synthesized)
ctttagcatttttacttggtggacatttatatcacttagactttgctcctgtattgtgttttattttaactctgtaaggctttaaatctcttccatagagattgcaataaatcattacta

SEQ ID NO: 320613 - DNA, 120 bp, Artificial Sequence
  ENSG00000135597_65 (sequence is synthesized)
tacttttgattgtgaactcctcaccttacattacaagtgacccagaataaatataaaatgttgacggaaaaatagaaattactgaattttgttaaacctatgaaacacaacttgcagtgc

SEQ ID NO: 320614 - DNA, 120 bp, Artificial Sequence
  ENSG00000135597_66 (sequence is synthesized)
atatagtttctgaatctttataatgttccttatcttagtaaagaaacctaaagagaaggaatgtgacctcagatacctccaagatcacatatatggttctcttctctaattttctagatg

SEQ ID NO: 320615 - DNA, 120 bp, Artificial Sequence
  ENSG00000135597_67 (sequence is synthesized)
agagcaaatggcttaaagaaagcaaatggtgttgcaaagtgctaactatgaatgtcttcaaaaatgcttattattaatggaattcttgtcttaaagagcaaaggcacaacaccacttgct

SEQ ID NO: 320616 - DNA, 120 bp, Artificial Sequence
  ENSG00000135597_68 (sequence is synthesized)
tagtatagtcagtctagctcagaacaaagtctgcctatttaatggagatgatattctgtaatctatgttaagtatgtgtcacaggttctcaaaatttaagtggttattgcattcttccca

SEQ ID NO: 320617 - DNA, 120 bp, Artificial Sequence
  ENSG00000135597_69 (sequence is synthesized)
ctatataaggtagaacttctttataggtgaaattcagtttcttttattgtagtcttcaatataataaagaaaaattatcagccctctaaggttgttattattccctgttctcttaacttg

SEQ ID NO: 320618 - DNA, 120 bp, Artificial Sequence
  ENSG00000135597_70 (sequence is synthesized)
ttctaatacttaacaaacattcttagaaatctttatcatgtagtcacattcattcagcctatttcttctattaacaaagtgattatacagttactaaaaagaagaacttttgtattcatg

SEQ ID NO: 320619 - DNA, 120 bp, Artificial Sequence
  ENSG00000135597_71 (sequence is synthesized)
gttaaaatagaaaagttagggcagaggatgatgaagttatgttttagtcactgtgagtttagaatggtgaggaaaagtgaagtgttaagtgaaagggaaaatttggaagttttcatttga

SEQ ID NO: 320620 - DNA, 120 bp, Artificial Sequence
  ENSG00000135597_72 (sequence is synthesized)
tacctaaacagcagtcagagatacacgaagaaaatcaagattgtttgctattatgggaataggcaggagtatgccaggagggcttcatgtaatagaggtaagaagcaaagtgagatctga

SEQ ID NO: 320621 - DNA, 120 bp, Artificial Sequence
  ENSG00000135604_0 (sequence is synthesized)
agatgcggccgcggcggcgcggagctcgggcggccgtggaggaactcagcctcggccgcaggaggcgccgggagcggagccgccgggagtcgcgcaacaggtttccttctccatcgctgc

SEQ ID NO: 320622 - DNA, 120 bp, Artificial Sequence
  ENSG00000135604_1 (sequence is synthesized)
gcccacaggggacgcgcgccctgccgggagaggggcttctcggttcgcactctcgctcccagtccaggcaaaatgaaagaccggctagcagaacttctggacttgtccaagcaatatgac

SEQ ID NO: 320623 - DNA, 120 bp, Artificial Sequence
  ENSG00000135604_2 (sequence is synthesized)
cagcagttcccagacggggacgatgagtttgactcgccccacgaggacatcgtgttcgagacggaccacatcctggagtccctgtaccgagacatccgggacattcaggatgaaaaccag

SEQ ID NO: 320624 - DNA, 120 bp, Artificial Sequence
  ENSG00000135604_3 (sequence is synthesized)
ctgctggtggccgacgtgaagcggctgggaaagcagaacgcccgcttcctcacgtccatgcggcgcctcagcagcatcaagcgcgacaccaactccatcgccaaggccatcaaggcccgg

SEQ ID NO: 320625 - DNA, 120 bp, Artificial Sequence
  ENSG00000135604_4 (sequence is synthesized)
ggcgaggtcatccactgcaagctgcgcgccatgaaggagctgagcgaggcggctgaggcccagcacggcccgcactcggcagtggcgcgcatttcgcgggcgcagtacaacgcgctcacc

SEQ ID NO: 320626 - DNA, 120 bp, Artificial Sequence
  ENSG00000135604_5 (sequence is synthesized)
ctcaccttccagcgcgccatgcacgactacaaccaggccgagatgaagcagcgcgacaactgcaagatccgcatccagcgccagctggagatcatgggcaaggaagtctcgggcgaccag

SEQ ID NO: 320627 - DNA, 120 bp, Artificial Sequence
  ENSG00000135604_6 (sequence is synthesized)
atcgaggacatgttcgagcagggtaagtgggacgtgttttccgagaacttgctggccgacgtgaagggcgcgcgggccgccctcaacgagatcgagagccgccaccgcgaactgctgcgc

SEQ ID NO: 320628 - DNA, 120 bp, Artificial Sequence
  ENSG00000135604_7 (sequence is synthesized)
ctggagagccgcatccgcgacgtacacgagctcttcttgcagatggcggtgctggtggagaagcaggccgacaccctgaacgtcatcgagctcaacgtacaaaagacggtcgactacacc

SEQ ID NO: 320629 - DNA, 120 bp, Artificial Sequence
  ENSG00000135604_8 (sequence is synthesized)
ggccaggccaaggcgcaggtgcggaaggccgtgcagtacgaggagaagaacccctgccggaccctctgctgcttctgctgtccctgcctcaagtagcaggccggcccgggccgccaccgc

SEQ ID NO: 320630 - DNA, 120 bp, Artificial Sequence
  ENSG00000135604_9 (sequence is synthesized)
ccatcccagaccatggagcgcgctgggaaggacgcaccaaagccgggagctctgccctgcagggagttgccccaaccctttccggaactcagtctttagaaaagaaacgccaggttcaag

SEQ ID NO: 320631 - DNA, 120 bp, Artificial Sequence
  ENSG00000135604_10 (sequence is synthesized)
aattgcaaaccagcctgtgcttggaaagatggttagttgataccgtccgatgattcttcagtaaagatagattcccacaaagttgtgcaatgtcattatatgacaccttgcactcttacc

SEQ ID NO: 320632 - DNA, 120 bp, Artificial Sequence
  ENSG00000135604_11 (sequence is synthesized)
gtcttgacagaagccaagtaaggaactgaagttgtatctgactgtagggtgaatgtctgaggcctgcctcctaataaagactcaaggaggaagtcaattgggcatctgctaatagaatga

SEQ ID NO: 320633 - DNA, 120 bp, Artificial Sequence
  ENSG00000135604_12 (sequence is synthesized)
actcatgatggaaacttcagttcatttactttgtcctgaaaattccctggttctgttccattttgagcgaaattggccttgggaaaaaccacgttcttcctttccgattcttcatccggt

SEQ ID NO: 320634 - DNA, 120 bp, Artificial Sequence
  ENSG00000135604_13 (sequence is synthesized)
ctacgctatgcaattcctccccaaatatagatcttatttctgctcatttcccctacttattaaaatcacaccaaacacttactattttcttatctctttcactttttaaatatctttcac

SEQ ID NO: 320635 - DNA, 120 bp, Artificial Sequence
  ENSG00000135604_14 (sequence is synthesized)
caggttatattttggtattatttttccaaacatttttaagcactgaatatcgaacaagcactcaaattgaagtatcagtcatgttttgtgtatttttcgctgataaaaattatttaacat

SEQ ID NO: 320636 - DNA, 120 bp, Artificial Sequence
  ENSG00000135604_15 (sequence is synthesized)
ttgattacatatgcacatgtatgtaaatgtaaaatactaatattcactaatatatgtacataatgatcaattggtttaacttcttttatgtaagtatggtatataaatttcaagacgaac

SEQ ID NO: 320637 - DNA, 120 bp, Artificial Sequence
  ENSG00000135604_16 (sequence is synthesized)
ttcaagacgaacacttttctggctcttggtattggtttgcttgttttgagtttgtttcactccagtttgccccttcctagtccagtttgggtcaaacttcatgttaaacaactctgcatt

SEQ ID NO: 320638 - DNA, 120 bp, Artificial Sequence
  ENSG00000135604_17 (sequence is synthesized)
ggttatggcggtagacatatggcggtagaaaatgtatacggagctagagacaactaacattcttggaaatactgcttttgttttactgtggaccattccttccatgcattgaaatggaga

SEQ ID NO: 320639 - DNA, 120 bp, Artificial Sequence
  ENSG00000135604_18 (sequence is synthesized)
aattcaaagtaaaagaattctgtttttcaagcaagcttaataaacattacattatacacatatttttatacatttctggcttgaccatttagtttactttctcaattattgttaaaattt

SEQ ID NO: 320640 - DNA, 74 bp, Artificial Sequence
  ENSG00000135604_19 (sequence is synthesized)
ttgcaacctctgtctcccaggttcgagcgattctcctgactcagcctcctgagaagttgggactctgggcgcgt

SEQ ID NO: 320641 - DNA, 120 bp, Artificial Sequence
  ENSG00000135604_20 (sequence is synthesized)
aggttcgagcgattctcctgactcagcctcctgagaagttgggactctgggcgcgtgccacaatgtctggctaattttttatgtttttagtaaagacggtgtttcaccgtgttagccagg

SEQ ID NO: 320642 - DNA, 84 bp, Artificial Sequence
  ENSG00000135604_21 (sequence is synthesized)
ccccccttttgagacagggtctccctttgtcacccaggctgaagtgcagtggcataatcatggcttactgcagccttaaactcc

SEQ ID NO: 320643 - DNA, 85 bp, Artificial Sequence
  ENSG00000135604_22 (sequence is synthesized)
agattgtagagacagggtttgccatgtggcccaggctggtctcaaacttgtgagcttgagcaatccgcccaccttggcctcccaa

SEQ ID NO: 320644 - DNA, 120 bp, Artificial Sequence
  ENSG00000135604_23 (sequence is synthesized)
gcctgagccactgaccctggccaaattttttttctactagctactgaggctgccacatctggatggaactgagtggagggggaaaagaatgaaaaactcaaaagaattcccatgagggtg

SEQ ID NO: 320645 - DNA, 120 bp, Artificial Sequence
  ENSG00000135604_24 (sequence is synthesized)
tcttgctttctctcctgagttacaatactttagcaaaatcatgaggctttagagatatggtgtagtctgcaaacttcttaatgcccttacccacatttaccatgtttcctggccttcctc

SEQ ID NO: 320646 - DNA, 120 bp, Artificial Sequence
  ENSG00000135604_25 (sequence is synthesized)
tgtgtcaactcttagctcttcctaatcattatttaatacatgagtgagtttagtagtgatcatatttctcaggtcctttagaagctggaattttaaaagaattagaaggaggagtatgtg

SEQ ID NO: 320647 - DNA, 120 bp, Artificial Sequence
  ENSG00000135604_26 (sequence is synthesized)
aattctttggagctcactgcctgacttgcttatgaccaggaaaatctatcccctgtatctaattttaatttcatggttaaatttgagaattgtggaaaccaagttccacaaggctattct

SEQ ID NO: 320648 - DNA, 120 bp, Artificial Sequence
  ENSG00000135604_27 (sequence is synthesized)
catatttctcccaatttctttttcagccaactccaaggatatgtatcacctttgacttaatttgctttctctaagggaaaggggaaaaaatgttcacatagctccactgcaatgtttttt

SEQ ID NO: 320649 - DNA, 120 bp, Artificial Sequence
  ENSG00000135604_28 (sequence is synthesized)
ataatagaggagagatattgtaaatagagactgccagccagtttccacaaaaaaacgaagagttcataaatttgacatgtttgaacccataaagcattttctttgcttggaaccattata

SEQ ID NO: 320650 - DNA, 120 bp, Artificial Sequence
  ENSG00000135604_29 (sequence is synthesized)
aaagtaagtgagttttcaggctctatatacattttaattcctcacgttttatattggagagttcggtacagactgtccattactgcaccaaaagaatgagtgaactgttacctataggga

SEQ ID NO: 320651 - DNA, 120 bp, Artificial Sequence
  ENSG00000135604_30 (sequence is synthesized)
aagaacacttcttcttcctgctgtttgggaaccatctcagtgtggcgtaatggttaggagtacagattccagatcctgtttcttagatttaaatcttgactctgccacatactagctgtc

SEQ ID NO: 320652 - DNA, 120 bp, Artificial Sequence
  ENSG00000135604_31 (sequence is synthesized)
tgactgaaccttggtttttctgtgcttcagtttcctcatctgtaaaacggagataacagtacttacctcatagagctgttgtgaaaagtgatgactgaatatgtaaaagcacctagaaca

SEQ ID NO: 320653 - DNA, 120 bp, Artificial Sequence
  ENSG00000135604_32 (sequence is synthesized)
gtgcctggcacatgctaagtgctttgttcattattgttgttattatgtaattttctctcagactgagagcactgttagtgacccaagtaaatttatagtttttaagtacagaggaaaaat

SEQ ID NO: 320654 - DNA, 120 bp, Artificial Sequence
  ENSG00000135604_33 (sequence is synthesized)
aaagcctattttttgttaacagtcttaataaataataaaatggaataaagaaaccaagaccccatcttctgtgaatattagggcttttttttttttgacagtcataaagatgttttcact

SEQ ID NO: 320655 - DNA, 120 bp, Artificial Sequence
  ENSG00000135604_34 (sequence is synthesized)
atggcatttctatccctgtgtatatccaaacatgtcctgaagaagaaatgagatgttccaccaaaaacacgtaagcaggaagcagctgttctgctcagcttggcaggtgttctttcctaa

SEQ ID NO: 320656 - DNA, 120 bp, Artificial Sequence
  ENSG00000135604_35 (sequence is synthesized)
ttcttcccaagctgtgagtcagaaagtcctggaaggagttgtaggaagttgtagaggctgggtcactgacctaagagaaggcatcatttggcccactgcacgtcctggcctattcaccaa

SEQ ID NO: 320657 - DNA, 120 bp, Artificial Sequence
  ENSG00000135604_36 (sequence is synthesized)
agcccttcctggctctgactgccacaccaggcagtgggtgaaatgctggctttttccttaagaaattgtgttctagtgccaccaagagatgctgtagagctggctttaccaatctcatga

SEQ ID NO: 320658 - DNA, 120 bp, Artificial Sequence
  ENSG00000135604_37 (sequence is synthesized)
tgcttgcttggcaactctgaaaggtgactttggccaagaagaccttgtggcaattctgcaaattttatacactcatatcttttagggtacaaaatgaaagaacaaatcacaaagaacaat

SEQ ID NO: 320659 - DNA, 120 bp, Artificial Sequence
  ENSG00000135604_38 (sequence is synthesized)
agatccttcaggagctgaaggtaagaatcttttatagctattttaacatatacagtgactactttctactagccaaatatcaaattttacaactaccaccaagccacagattataggtgg

SEQ ID NO: 320660 - DNA, 120 bp, Artificial Sequence
  ENSG00000135604_39 (sequence is synthesized)
taacaactccagaaatgtcctaactaggaaaggtgctcatctagtatgcatcggtatccaggataatatgagttagaattttaaaaatgtcagtcattcaaaaatatttgaactgtgaca

SEQ ID NO: 320661 - DNA, 120 bp, Artificial Sequence
  ENSG00000135604_40 (sequence is synthesized)
tcacagaagtaattttatggccttttaaggtaacaacttaaaaagagaacagtactctttttatatcaatgcctttacatttatttaaaaacagtcctaatgctttatagttaaatgtca

SEQ ID NO: 320662 - DNA, 120 bp, Artificial Sequence
  ENSG00000135604_41 (sequence is synthesized)
tatgcagatatgttcaggctctaacatataaagttcctaacttgacaggaaactactgaagattgtgtacagcttaaaaaaaaaaatagggtaactatagtcttgatttttatgtataaa

SEQ ID NO: 320663 - DNA, 120 bp, Artificial Sequence
  ENSG00000135604_42 (sequence is synthesized)
ttctatcattctatattttaccatcagacatatttctactcctttctttgaagtatgcgaagtatctccaactgcagcatgcaactcattcatttgtaatcaagacgatagtttgaaaca

SEQ ID NO: 320664 - DNA, 120 bp, Artificial Sequence
  ENSG00000135604_43 (sequence is synthesized)
cccaattgtaatcagagcaacagttgacttccttttgatagcggagttgaaaatcattgcaattaataaaatggggctattagaaatggaaaacgaataggatctagaatgtaacttcat

SEQ ID NO: 320665 - DNA, 120 bp, Artificial Sequence
  ENSG00000135604_44 (sequence is synthesized)
catataaatgatgagtgtctttgttatcaacacgttattaagaatgggcaagatgtccttatatactagaagcttttgtaaagtcatgtgtctattgataataaagattttcggaactga

SEQ ID NO: 320666 - DNA, 120 bp, Artificial Sequence
  ENSG00000135605_0 (sequence is synthesized)
actctggggcgctaggctccggactccgcggcgcagactgcacctcgcagtctccccaggtccgcccagcagccgcgcttcagccagaatactgggatcttcagtggcaggaggagtaat

SEQ ID NO: 320667 - DNA, 120 bp, Artificial Sequence
  ENSG00000135605_1 (sequence is synthesized)
cagaagacggagatgaattttaacactattttggaggagattcttattaaaaggtcacagcagaaaaagaagacatcgcccttaaactacaaagagagactttttgtacttacaaagtcc

SEQ ID NO: 320668 - DNA, 120 bp, Artificial Sequence
  ENSG00000135605_2 (sequence is synthesized)
atgctaacctactatgagggtcgagcagagaagaaatacagaaaggggtttattgatgtttcaaaaatcaagtgtgtggaaatagtgaagaatgatgatggtgtcattccctgtcaaaat

SEQ ID NO: 320669 - DNA, 120 bp, Artificial Sequence
  ENSG00000135605_3 (sequence is synthesized)
aagtatccatttcaggttgttcatgatgctaacacactttacatttttgcacctagtccacaaagcagggacctgtgggtgaagaagttaaaagaagaaataaagaacaacaataatatt

SEQ ID NO: 320670 - DNA, 120 bp, Artificial Sequence
  ENSG00000135605_4 (sequence is synthesized)
atgattaaatatcatcctaaattctggacagatggaagttatcagtgttgtagacaaactgaaaaattagcacccggatgtgaaaaatacaatctttttgagagcagtataagaaaagca

SEQ ID NO: 320671 - DNA, 120 bp, Artificial Sequence
  ENSG00000135605_5 (sequence is synthesized)
ctacctccagcaccagaaacaaagaagcgaaggcctcccccaccaattccactagaagaagaagataatagtgaagaaatcgttgtagccatgtatgatttccaagcagcagaaggacat

SEQ ID NO: 320672 - DNA, 120 bp, Artificial Sequence
  ENSG00000135605_6 (sequence is synthesized)
gatctcagattagagagaggccaagagtatctcattttagaaaagaatgatgttcattggtggagagcaagagataaatatgggaatgaaggatatatcccaagtaattacgtaacggga

SEQ ID NO: 320673 - DNA, 120 bp, Artificial Sequence
  ENSG00000135605_7 (sequence is synthesized)
aagaaatcaaacaacttagatcaatatgaatggtattgcagaaatatgaatagaagcaaggcagagcaactcctccgcagtgaagataaagaaggtggttttatggtaagggattccagt

SEQ ID NO: 320674 - DNA, 120 bp, Artificial Sequence
  ENSG00000135605_8 (sequence is synthesized)
caaccaggcttgtacacagtctccctttataccaagtttggaggagaaggttcatcgggttttaggcattatcatataaaggaaacaacaacatctccaaagaagtattacctagctgaa

SEQ ID NO: 320675 - DNA, 120 bp, Artificial Sequence
  ENSG00000135605_9 (sequence is synthesized)
aaacatgcttttggctccattcctgagattattgaatatcataagcacaatgcagcaggacttgtcaccaggcttcggtacccagttagtgtgaaagggaagaatgcacccaccactgca

SEQ ID NO: 320676 - DNA, 120 bp, Artificial Sequence
  ENSG00000135605_10 (sequence is synthesized)
ggattcagctatgagaaatgggagattaacccttcagaactgacctttatgagggaattgggaagtggactgtttggagtggtgaggcttggcaaatggcgagcccagtacaaagtcgca

SEQ ID NO: 320677 - DNA, 120 bp, Artificial Sequence
  ENSG00000135605_11 (sequence is synthesized)
atcaaagctattcgggaaggtgcaatgtgcgaggaggactttatagaagaagctaaagtgatgatgaaactgacacacccgaagttagtgcagctttatggtgtgtgcacccagcagaaa

SEQ ID NO: 320678 - DNA, 120 bp, Artificial Sequence
  ENSG00000135605_12 (sequence is synthesized)
ccaatatacattgttactgagttcatggaaaggggctgccttctgaatttcctccgacagagacaaggtcatttcagtagagacgtactgctgagcatgtgtcaggatgtgtgtgaaggg

SEQ ID NO: 320679 - DNA, 120 bp, Artificial Sequence
  ENSG00000135605_13 (sequence is synthesized)
atggagtatctggagagaaacagcttcatccacagagatctggctgccagaaattgtctagtaagtgaggcgggagttgtaaaagtatctgattttggaatggccaggtatgttctggat

SEQ ID NO: 320680 - DNA, 120 bp, Artificial Sequence
  ENSG00000135605_14 (sequence is synthesized)
gatcagtacacaagttcttctggtgctaagtttcctgtgaagtggtgtccacctgaagtgtttaattacagccgcttcagcagcaaatcagatgtctggtcatttggtgttttaatgtgg

SEQ ID NO: 320681 - DNA, 120 bp, Artificial Sequence
  ENSG00000135605_15 (sequence is synthesized)
tggttactcgaggccaccgactctaccagccgaagttggcgtccaactatgtgtatgaggtgatgctgagatgttggcaggagaaaccagagggaaggccttctttcgaagatctgctgc

SEQ ID NO: 320682 - DNA, 120 bp, Artificial Sequence
  ENSG00000135605_16 (sequence is synthesized)
gcacaatagatgaactagttgaatgtgaagaaacttttggaagataagtgatgtgtgaccagtggctcccagattcccaagcacaaggaaggatgggcattttgtggcttttaatttatt

SEQ ID NO: 320683 - DNA, 120 bp, Artificial Sequence
  ENSG00000135605_17 (sequence is synthesized)
gagcacttggacatgtagatcattttacttatacagtggaaacacataaataatttgcttctagaccagcctctgtctagacttgcttctagacagaatctcccagagtgtggaaatgtt

SEQ ID NO: 320684 - DNA, 120 bp, Artificial Sequence
  ENSG00000135605_18 (sequence is synthesized)
gccttagaaatggtgattaaaatcactcatttctattcattcctcaggcacttgagtgacagttgtttaccaggcactgtgtgtagccccagggtttggccattcaggggtgcacacatg

SEQ ID NO: 320685 - DNA, 120 bp, Artificial Sequence
  ENSG00000135605_19 (sequence is synthesized)
ggaccatgttagctgatgccagttgaaggccagggtatttgggaaggggaagggtattagagtcatgaccaagcaacccttctttttccctttgacttctacagaaatctgggcctgaga

SEQ ID NO: 320686 - DNA, 120 bp, Artificial Sequence
  ENSG00000135605_20 (sequence is synthesized)
cattgtctacaattgggttctagatacatcaggaacccatcttggataaataaatacctatcttttgttttgaaaacatctcagttttcaagactgctcttagtattacatgaacaatat

SEQ ID NO: 320687 - DNA, 120 bp, Artificial Sequence
  ENSG00000135605_21 (sequence is synthesized)
tatattgtaaatatatataatatataaagttatatatttatgagaaacacgaattgtcttttaattgaaacttttaatcctgtagtataggagttcaccttcttaggactagagactgtg

SEQ ID NO: 320688 - DNA, 120 bp, Artificial Sequence
  ENSG00000135605_22 (sequence is synthesized)
ctagagactgtgccttatagctgttaattcatttccccctgaacatcaaatatgcctgaagagaagaaagtctagattcttctatgagtaacgccccctcctcactcaggtaaatgtgtc

SEQ ID NO: 320689 - DNA, 120 bp, Artificial Sequence
  ENSG00000135605_23 (sequence is synthesized)
tggggatgcctgtccagcttaaccacgtgcatttggcctatgtaatcctgcccatggtggccgcagctaatcagaatcagatggaaaattaaaccgggtaatctacttctaagccttaag

SEQ ID NO: 320690 - DNA, 120 bp, Artificial Sequence
  ENSG00000135605_24 (sequence is synthesized)
aatattccctgggacacagacactataattggaagtgctgagctctggggcagaaggatcaggtgaccttcgcaacaaagtttgcccccacctcacataggacccggaagcagcctgagc

SEQ ID NO: 320691 - DNA, 120 bp, Artificial Sequence
  ENSG00000135605_25 (sequence is synthesized)
tgtggcggaggatccaggaagctacggagagaagcagccagcatggtgttccgtgcctcccggacgtttttcaggaggcctggttggacttgggttcctggatggtgggattgttgtaca

SEQ ID NO: 320692 - DNA, 120 bp, Artificial Sequence
  ENSG00000135605_26 (sequence is synthesized)
gcctctcaggagaccctgctgtcaagactgtgtgtgtggatttctcacccttagaagctctactaagacatcaacggaattagggccttcctttttgccttgtgagcgccaaggaaaaga

SEQ ID NO: 320693 - DNA, 120 bp, Artificial Sequence
  ENSG00000135605_27 (sequence is synthesized)
aactatctcggtcacgtgagcgccagcgaaaagaaactgtatcagtcatccagagaccgtttattgcccaacacgttattcttgctgttggtggggtaactagccgaggaagacacagcg

SEQ ID NO: 320694 - DNA, 120 bp, Artificial Sequence
  ENSG00000135605_28 (sequence is synthesized)
ccttcccttcaggagttgcgtctcctctgcaggccacgatggtctgctctggagcattgggtgaacacacaggctggctgctctgggcagcgccttcactctgaccctggagaaccattt

SEQ ID NO: 320695 - DNA, 120 bp, Artificial Sequence
  ENSG00000135605_29 (sequence is synthesized)
catttcatcctggtcagtctagagtctgtgcaccaggcagtccatccactgaaggctgtgtttattcttttcctgtgcccctcataatggaagaaagtaaactgcttatcccgagcctta

SEQ ID NO: 320696 - DNA, 120 bp, Artificial Sequence
  ENSG00000135605_30 (sequence is synthesized)
agagtagcagtcttctgcacaggatgttgtccattcaccttggaactgccatccacaaacctagcaactcttggtaggataaagaaggtggttttatggtaagggattccagtcaaccag

SEQ ID NO: 320697 - DNA, 120 bp, Artificial Sequence
  ENSG00000135605_31 (sequence is synthesized)
aagaaaagaaaaaaaaaagacaattggtaaagattatgtaataatgccttattgcaaatacaactttctgacctgcctattcatttttttcaaatacacaatggaaatacttccataggg

SEQ ID NO: 320698 - DNA, 120 bp, Artificial Sequence
  ENSG00000135617_0 (sequence is synthesized)
gtcaggctgaagtcctgcgagcgacgcgcggcggggcggcgagaggaaacgcggcgccgggccgggcccggccctggagatggtccccggcgccgcgggctggtgttgtctcgtgctctg

SEQ ID NO: 320699 - DNA, 120 bp, Artificial Sequence
  ENSG00000135617_1 (sequence is synthesized)
gctccccgcgtgcgtcgcggcccacggcttccgtatccatgattatttgtactttcaagtgctgagtcctggggacattcgatacatcttcacagccacacctgccaaggactttggtgg

SEQ ID NO: 320700 - DNA, 120 bp, Artificial Sequence
  ENSG00000135617_2 (sequence is synthesized)
tatctttcacacaaggtatgagcagattcaccttgtccccgctgaacctccagaggcctgcggggaactcagcaacggtttcttcatccaggaccagattgctctggtggagaggggggg

SEQ ID NO: 320701 - DNA, 120 bp, Artificial Sequence
  ENSG00000135617_3 (sequence is synthesized)
ctgctccttcctctccaagactcgggtggtccaggagcacggcgggcgggcggtgatcatctctgacaacgcagttgacaatgacagcttctacgtggagatgatccaggacagtaccca

SEQ ID NO: 320702 - DNA, 120 bp, Artificial Sequence
  ENSG00000135617_4 (sequence is synthesized)
gacatccccgccctcttcctgctcggccgagacggctacatgatccgccgctctctggaacagcatgggctgccatgggccatcatttccatcccagtcaatgtcaccagcatccccacc

SEQ ID NO: 320703 - DNA, 120 bp, Artificial Sequence
  ENSG00000135617_5 (sequence is synthesized)
tttgagctgctgcaaccgccctggaccttctggtagaagagtttgtcccacattccagccataagtgactctgagctgggaaggggaaacccaggaattttgctacttggaatttggaga

SEQ ID NO: 320704 - DNA, 120 bp, Artificial Sequence
  ENSG00000135617_6 (sequence is synthesized)
tagcatctggggacaagtggagccaggtagaggaaaagggtttgggcgttgctaggctgaaagggaagccacaccactggccttcccttccccagggcccccaagggtgtctcatgctac

SEQ ID NO: 320705 - DNA, 120 bp, Artificial Sequence
  ENSG00000135617_7 (sequence is synthesized)
aagaagaggcaagagacaggccccagggcttctggctagaacccgaaacaaaaggagctgaaggcaggtggcctgagagccatctgtgacctgtcacactcacctggctccagcctcccc

SEQ ID NO: 320706 - DNA, 120 bp, Artificial Sequence
  ENSG00000135617_8 (sequence is synthesized)
tacccagggtctctgcacagtgaccttcacagcagttgttggagtggtttaaagagctggtgtttggggactcaataaaccctcactgactttttagcaataaagcttctcatcagggtt

SEQ ID NO: 320707 - DNA, 120 bp, Artificial Sequence
  ENSG00000135617_9 (sequence is synthesized)
atcccacctgagtgctgggacagggaagggagcagaatcagctctgccttccatgagctgcagcacagaaaggaagctcttccagctactcccctgagtataatataaacctaggcacca

SEQ ID NO: 320708 - DNA, 120 bp, Artificial Sequence
  ENSG00000135617_10 (sequence is synthesized)
tggagggacaagttgtctttttaggggacatgaagtgaaaagccaagagcaccagcttcctctgccagctctacctgtgaactatgtgacttaaggcacatcacttcctctctctggatc

SEQ ID NO: 320709 - DNA, 120 bp, Artificial Sequence
  ENSG00000135622_0 (sequence is synthesized)
gtttcatccctcagcctcaggctgagccggaccgagccgagaggacccgagtggggccgaggccagtagccccggggccctgagcagaggccgtagcttgcgccgcacccgcggccaggc

SEQ ID NO: 320710 - DNA, 120 bp, Artificial Sequence
  ENSG00000135622_1 (sequence is synthesized)
ggagccaaagatgccggcctctgctgcgcggccccgcccgggtcccgggcagcctacagcctcgcccttcccgctactgctgctggcggtgctgagcggcccggtatccggccgcgtccc

SEQ ID NO: 320711 - DNA, 120 bp, Artificial Sequence
  ENSG00000135622_2 (sequence is synthesized)
ccgctcggtgcccagaacctcgcttccaatctctgaggctgactcctgtctcacccggttcgcagtccctcacacatacaattactctgttctccttgtggatcctgcctcccacacact

SEQ ID NO: 320712 - DNA, 120 bp, Artificial Sequence
  ENSG00000135622_3 (sequence is synthesized)
ttatgttggcgcccgggacaccatcttcgctttatccctgcccttctcaggggagagaccccgcaggattgactggatggttcctgaggctcacagacagaactgtaggaagaaaggcaa

SEQ ID NO: 320713 - DNA, 120 bp, Artificial Sequence
  ENSG00000135622_4 (sequence is synthesized)
gaaagaggacgaatgtcacaattttgtccagattctcgccattgccaatgcctctcacctcctcacttgtggcaccttcgcttttgatccgaagtgcggggttattgatgtgtccaggtt

SEQ ID NO: 320714 - DNA, 120 bp, Artificial Sequence
  ENSG00000135622_5 (sequence is synthesized)
ccagcaggttgaaagacttgagagtggccgggggaaatgtccttttgagccagctcagcggtcagcagctgtaatggctgggggggtcctctatgctgccactgtgaaaaactacctggg

SEQ ID NO: 320715 - DNA, 120 bp, Artificial Sequence
  ENSG00000135622_6 (sequence is synthesized)
gacggagccaattatcaccagagcagtgggtcgtgccgaggactggattcggacagataccttgccttcctggctgaacgccccagcctttgtcgcagccgtggccttgagcccagccga

SEQ ID NO: 320716 - DNA, 120 bp, Artificial Sequence
  ENSG00000135622_7 (sequence is synthesized)
atggggggatgaagatggagacgacgaaatctacttcttctttacggagacttcccgagcatttgactcatacgagcgcattaaagtcccacgggtggcccgtgtgtgtgcgggggacct

SEQ ID NO: 320717 - DNA, 120 bp, Artificial Sequence
  ENSG00000135622_8 (sequence is synthesized)
cgggggccggaagaccctccagcagagatggacgacgtttttgaaagctgacctgctctgtccagggcctgagcatggccgggcctccagtgtcctgcaggatgttgctgtgcttcgacc

SEQ ID NO: 320718 - DNA, 120 bp, Artificial Sequence
  ENSG00000135622_9 (sequence is synthesized)
tgagcttggggcagggactcccatcttttatggcatcttttcttcccagtgggagggggctactatctctgctgtctgtgccttccgaccacaagacattcggacagtgctgaatggtcc

SEQ ID NO: 320719 - DNA, 120 bp, Artificial Sequence
  ENSG00000135622_10 (sequence is synthesized)
cttcagagaactaaaacatgactgcaacagaggactgcctgtcgtggacaatgatgtgccccagcccagacctggagagtgcatcaccaacaacatgaagctccggcactttggctcatc

SEQ ID NO: 320720 - DNA, 120 bp, Artificial Sequence
  ENSG00000135622_11 (sequence is synthesized)
tctctccctgcctgaccgcgtactcaccttcatccgggaccacccactcatggacaggccagtgtttccagctgatggccaccccctgctggtcactacagatacagcctatctcagagt

SEQ ID NO: 320721 - DNA, 120 bp, Artificial Sequence
  ENSG00000135622_12 (sequence is synthesized)
cgtggcccacagggtgaccagcctctcagggaaagagtatgatgtgctctacctggggacagaggatggacacctccaccgagcagtgcggatcggagctcagctcagcgttcttgaaga

SEQ ID NO: 320722 - DNA, 120 bp, Artificial Sequence
  ENSG00000135622_13 (sequence is synthesized)
tctggccttattcccagagccacagccagttgagaacatgaaattgtaccacagctggctcctggttggctcccgtactgaggtgacacaagtgaatacaaccaactgtggccgtctcca

SEQ ID NO: 320723 - DNA, 120 bp, Artificial Sequence
  ENSG00000135622_14 (sequence is synthesized)
gagctgctcagagtgcatcctggcccaggacccagtctgtgcctggagcttccggctggatgagtgtgtggcccatgccggggagcaccgagggttggtccaagacatagagtcagcaga

SEQ ID NO: 320724 - DNA, 120 bp, Artificial Sequence
  ENSG00000135622_15 (sequence is synthesized)
tgtctcctctttgtgtcctaaagagcctggagaacgtccagtagtgtttgaagttcccgtggctacagctgcgcatgtggtcttgccatgttctccaagctcagcatgggcatcctgtgt

SEQ ID NO: 320725 - DNA, 120 bp, Artificial Sequence
  ENSG00000135622_16 (sequence is synthesized)
gtggcaccagcccagtggagtgactgcactcaccccccggcgggatggactggaggtggtggtgaccccaggggccatgggcgcttatgcctgtgaatgtcaggagggtggggcagccca

SEQ ID NO: 320726 - DNA, 120 bp, Artificial Sequence
  ENSG00000135622_17 (sequence is synthesized)
tgtggtagcagcttacagcttggtatggggcagccagcgagatgctccgagccgggcccacacagtgggggcgggactggctggcttcttcttggggattctcgcagcatccctgactct

SEQ ID NO: 320727 - DNA, 120 bp, Artificial Sequence
  ENSG00000135622_18 (sequence is synthesized)
cattctgattggtcggcgtcagcagcgacggcgacagagggaacttctggctagagacaaggtgggcctggacctgggggctccaccttctgggaccacaagctacagccaagaccctcc

SEQ ID NO: 320728 - DNA, 120 bp, Artificial Sequence
  ENSG00000135622_19 (sequence is synthesized)
ctccccctctcctgaagatgagcggttgccgctggccctggccaagaggggcagtggctttggtggattctcaccacccttcctgcttgatccttgcccaagcccagcccacattcggct

SEQ ID NO: 320729 - DNA, 120 bp, Artificial Sequence
  ENSG00000135622_20 (sequence is synthesized)
aactggggctcctctagccacatgtgatgaaacatccatctagagctgggcaaatgaccactagtgtataagtgatcactggaacggagtgaccactgagatgctgggggtcactgggcc

SEQ ID NO: 320730 - DNA, 120 bp, Artificial Sequence
  ENSG00000135622_21 (sequence is synthesized)
tggaagaccatcccagcctctgagttctctttgagtatgagtgattacttggattttagtatctgttctctctgagcctggatgggcttggggccagacctttgcctgattcctgattcc

SEQ ID NO: 320731 - DNA, 120 bp, Artificial Sequence
  ENSG00000135622_22 (sequence is synthesized)
catgagaaatcagaactgctttctgcagcaaatcagggcttccccctaacatctgaactcctgtaaaccttcatccctggccccctatcttgggcccattagttttggggatggggcaca

SEQ ID NO: 320732 - DNA, 120 bp, Artificial Sequence
  ENSG00000135622_23 (sequence is synthesized)
gggcatagctatgactttgctttctggttggagcctggccggaaggaagagccctggaggtggttgggggcaaatgtgccctgagtccttggggtggttctgcttattcttcaagtttat

SEQ ID NO: 320733 - DNA, 120 bp, Artificial Sequence
  ENSG00000135622_24 (sequence is synthesized)
ctgaatctgtggggagtgcatgatccccatgttgcaatatggagtctctgccctgagatcttccccatctcagttttccttccatgaaagagtacgtgtaaatacatagtgttcataaga

SEQ ID NO: 320734 - DNA, 120 bp, Artificial Sequence
  ENSG00000135622_25 (sequence is synthesized)
gaatgggggcgttgcctgcagaactttagaccctgtagccatagagggaatggcgttcctttctaaaaggaactgaaacactgcccctctccccattgccccacaaccttactctaaatt

SEQ ID NO: 320735 - DNA, 120 bp, Artificial Sequence
  ENSG00000135622_26 (sequence is synthesized)
tgagtagagaaaagctcctaaagtgaccttccgggtgggaagggcagcagtacacatgaccccatccttttctttgtttttaccccctggctgccaccactgccatgtcacagctgcttt

SEQ ID NO: 320736 - DNA, 120 bp, Artificial Sequence
  ENSG00000135622_27 (sequence is synthesized)
ctctggctggagtgtaggctgtaccccatttccttggctcccattaaaaatcaacaacattctaatgattagggaacaacagaaggggaacagtcataggatatacgagcagtataaaga

SEQ ID NO: 320737 - DNA, 120 bp, Artificial Sequence
  ENSG00000135622_28 (sequence is synthesized)
tacgtttgcaatcagtgactactcagggtgacacccttgccctaaagcaggagtcccccctacctggggtccatggactccctgaaattgtatgcaaaatgttgtttgtacatgtgtgtc

SEQ ID NO: 320738 - DNA, 120 bp, Artificial Sequence
  ENSG00000135622_29 (sequence is synthesized)
tgtatgtctctgtggggaggttttatggcttttgtcagattttcaaggccttaacaaagttaaaggaccactgccctgaggttactgcactgaggccaagttaggatggcatcactctgt

SEQ ID NO: 320739 - DNA, 120 bp, Artificial Sequence
  ENSG00000135622_30 (sequence is synthesized)
ggcagctctccctggacttgccctgcctggaacagggtgatttgctggaatggagttaccactgagatgccaaaggttgctgggtctggaagactgttgtggcctctcagttctctttga

SEQ ID NO: 320740 - DNA, 120 bp, Artificial Sequence
  ENSG00000135622_31 (sequence is synthesized)
gtctgactgactgtggccagtccctggactggtagctgctggaggccttcttgtttctccagtccctggaagctgagctctatgtgtatttgatgacattgtcagctcttaccaaacgtc

SEQ ID NO: 320741 - DNA, 120 bp, Artificial Sequence
  ENSG00000135622_32 (sequence is synthesized)
aagacctcttcctgcttgaccactcgcacatggctctaggcttctcctgctgagtcctggtcttggcctgtgaatgtgcctcgttcatccctggtgcttgagcccctcaagctccagtca

SEQ ID NO: 320742 - DNA, 120 bp, Artificial Sequence
  ENSG00000135622_33 (sequence is synthesized)
atgatccagtccttcccctttgaagttttctgctctactttccttggcagcagcctgtgaactactcaaaagagtccccttgggtttggaattatcagtggctttgccactagtaaatgt

SEQ ID NO: 320743 - DNA, 120 bp, Artificial Sequence
  ENSG00000135622_34 (sequence is synthesized)
gtgatcttcggcaagtaacctaacctagggacatcagtttactcatctgcgaagtggggataataaaacctacctcagggttgcttcaaggattaaatgagaaaatatgtcaacaataaa

SEQ ID NO: 320744 - DNA, 120 bp, Artificial Sequence
  ENSG00000135622_35 (sequence is synthesized)
gacctgtctgtaccaatagatgttgttattgcaaaaatgggcttactatccataaccatatagcttaactatatgataaccatgacattcgtaggctgggcatggtggcttacgcctgta

SEQ ID NO: 320745 - DNA, 120 bp, Artificial Sequence
  ENSG00000135622_36 (sequence is synthesized)
actccgtctcaaaaaaaaaaaaaaaagataaccatgacactcgcaatcatattaagcctcactcagtaaaggacagtcattgtttcacagatatcctgttctgggtcacctctggacagc

SEQ ID NO: 320746 - DNA, 120 bp, Artificial Sequence
  ENSG00000135622_37 (sequence is synthesized)
cagctcatagctgctggtttctaggttttaggaggcagatctatgatttttgtaatcctcagacctgtctgaccttagtggcctgagatccctttgtatagaatggaggaaggctgtgtg

SEQ ID NO: 320747 - DNA, 120 bp, Artificial Sequence
  ENSG00000135622_38 (sequence is synthesized)
ttctttggtttaccctcagcctatctttcaaccccactcacttgaggttgtggcctagttcctctttgggggagggaggaaggtggggagatgtcaaaggggactgggcttcctgtgggg

SEQ ID NO: 320748 - DNA, 120 bp, Artificial Sequence
  ENSG00000135622_39 (sequence is synthesized)
agtgggagagaagagtttttcaaggaggagagagaccagggctcttatactctgggccactatctgcctgctctaatcacctagggccaggcaccagacaactagggatggcctctttac

SEQ ID NO: 320749 - DNA, 120 bp, Artificial Sequence
  ENSG00000135622_40 (sequence is synthesized)
cccaaagcctgctgaaattactcaaactagccaatcctaagtctgcctaccctgcctcagtcattccttccaatggaaaccacaataagcactcttgcccacgttttccctgctccctct

SEQ ID NO: 320750 - DNA, 120 bp, Artificial Sequence
  ENSG00000135622_41 (sequence is synthesized)
gcatcccaactgaccctggtgcttccccatgtggcccctgtatagtgtgctttgcctcctgtttctagggacctgtgagtatcagctttctcgatgacagtcatttctgtgtctatgtgt

SEQ ID NO: 320751 - DNA, 120 bp, Artificial Sequence
  ENSG00000135622_42 (sequence is synthesized)
cttattataccttattaaaacaaacctgggtacatttgtaagacagcagggattctctgaagattaatgattgagaaggatgattggacctgtctagtcagggaggctgaggcctcaggc

SEQ ID NO: 320752 - DNA, 120 bp, Artificial Sequence
  ENSG00000135622_43 (sequence is synthesized)
cttcattaggcacgttgcatgtctgtcaagtaagggccactaatcacctcacatgggttcatctgaactttatgccagcccaaaacacgaggacgtgccacccatcctcagcactctcaa

SEQ ID NO: 320753 - DNA, 120 bp, Artificial Sequence
  ENSG00000135622_44 (sequence is synthesized)
gacacacttaagtgtgtttgatacgtaagctccaattccttcctccataagaagagagaaggcagaagtggctttccccgaggtgaggacggggatgggagttttttcttttgagtgatg

SEQ ID NO: 320754 - DNA, 120 bp, Artificial Sequence
  ENSG00000135622_45 (sequence is synthesized)
tagacctatgccctgcttccatgccacttcctcagatgtgacagacctctgctgggatggaatgtgtgtttgctggagacagctgtggcatagaggattgtgagaaagggtccccatgct

SEQ ID NO: 320755 - DNA, 120 bp, Artificial Sequence
  ENSG00000135622_46 (sequence is synthesized)
tggtgtggaaggagggagctgctcaccctctgtatgggcttggatgaggagcttctcagcggcagtcataagaaccagaggattttctgccctttgctgggagccacatgagccccctgg

SEQ ID NO: 320756 - DNA, 120 bp, Artificial Sequence
  ENSG00000135622_47 (sequence is synthesized)
attcatgtggaattcttgggagagggatgaccaccctgaagatggctgagatcaaatatctcatcagatgactggatgcttagaatcgggttaacttgattaaataaataaatagaaata

SEQ ID NO: 320757 - DNA, 120 bp, Artificial Sequence
  ENSG00000135622_48 (sequence is synthesized)
gaccacaagacattcggacagtgctgaatggtcccttcagagaactaaaacatgactgcaacagaggactgcctgtcgtggacaatgatgtgccccagcccagacctggagagaggatgg

SEQ ID NO: 320758 - DNA, 120 bp, Artificial Sequence
  ENSG00000135624_0 (sequence is synthesized)
attgtgggttgctgggcggcccggtctcggagaagaggggagagtggcgggccgctgaataagcttccaaaatgatgcccacaccagttatcctattgaaagaggggactgatagctccc

SEQ ID NO: 320759 - DNA, 120 bp, Artificial Sequence
  ENSG00000135624_1 (sequence is synthesized)
aaggcatcccccagcttgtgagtaacatcagtgcctgccaggtgattgctgaggctgtaagaactaccctgggtccccgtggcatggacaagcttattgtagatggcagaggcaaagcaa

SEQ ID NO: 320760 - DNA, 120 bp, Artificial Sequence
  ENSG00000135624_2 (sequence is synthesized)
caatttctaatgatggggccacaattctgaaacttcttgatgttgtccatcctgcagcaaagactttggtagacattgccaaatcccaagatgctgaggtgggtgatggcaccacctcag

SEQ ID NO: 320761 - DNA, 120 bp, Artificial Sequence
  ENSG00000135624_3 (sequence is synthesized)
tgaccttgctggctgcagagtttctgaagcaggtgaaaccctatgtggaggaaggtttacacccccagatcatcattcgagctttccgcacagccacccagctggcagttaacaagatca

SEQ ID NO: 320762 - DNA, 120 bp, Artificial Sequence
  ENSG00000135624_4 (sequence is synthesized)
aagagattgctgtgaccgtgaagaaggcagataaagtggagcagaggaagctgctggaaaagtgtgccatgaccgctctgagctccaagctgatctcccagcagaaagctttctttgcta

SEQ ID NO: 320763 - DNA, 120 bp, Artificial Sequence
  ENSG00000135624_5 (sequence is synthesized)
agatggtggtggatgcagtgatgatgctcgatgatttgctgcagcttaaaatgattggaatcaagaaggtacagggtggagccctcgaggattctcagctggtagctggtgttgcattca

SEQ ID NO: 320764 - DNA, 120 bp, Artificial Sequence
  ENSG00000135624_6 (sequence is synthesized)
agaagactttctcttacgctgggtttgaaatgcaacccaaaaagtaccacaatcccaagattgcccttttgaatgtcgagctcgagttgaaagctgagaaagacaatgctgagataagag

SEQ ID NO: 320765 - DNA, 120 bp, Artificial Sequence
  ENSG00000135624_7 (sequence is synthesized)
attctctatgacaagttagagaagatccatcattctggagccaaagttgtcttgtccaaactccccattggggatgtggccacccagtactttgctgacagggacatgttctgtgctggc

SEQ ID NO: 320766 - DNA, 120 bp, Artificial Sequence
  ENSG00000135624_8 (sequence is synthesized)
cgagtacctgaggaggatctgaagaggacaatgatggcctgtggaggctcaatccagaccagtgtgaatgctctgtcagcagatgtgctgggtcgatgccaggtgtttgaagagacccag

SEQ ID NO: 320767 - DNA, 120 bp, Artificial Sequence
  ENSG00000135624_9 (sequence is synthesized)
attggaggcgagaggtacaatttttttactggctgccccaaggccaagacatgcaccttcattctccgtggcggcgccgagcagtttatggaggagacagagcggtccctgcatgatgcc

SEQ ID NO: 320768 - DNA, 120 bp, Artificial Sequence
  ENSG00000135624_10 (sequence is synthesized)
atcatgatcgtcaggagggccatcaagaatgattcagtggtggctggtggcggggccattgagatggaactctccaagtacctgcgggattactcaaggactattccaggaaaacagcag

SEQ ID NO: 320769 - DNA, 120 bp, Artificial Sequence
  ENSG00000135624_11 (sequence is synthesized)
ctgttgattggggcatatgccaaggccttggagattatcccacgccagctgtgtgacaatgctggctttgatgccacaaacattctcaacaagctgcgggctcggcatgcccaggggggt

SEQ ID NO: 320770 - DNA, 120 bp, Artificial Sequence
  ENSG00000135624_12 (sequence is synthesized)
acatggtatggagtagacatcaacaacgaggacattgctgacaactttgaagctttcgtgtgggagccagctatggtgcggatcaatgcgctgacagcagcctctgaggctgcgtgcctg

SEQ ID NO: 320771 - DNA, 120 bp, Artificial Sequence
  ENSG00000135624_13 (sequence is synthesized)
atcgtgtctgtagatgaaaccatcaagaacccccgctcgactgtggatgctcccacagcagcaggccggggccgtggtcgtggccgcccccactgagaggcaccccacccatcacatggc

SEQ ID NO: 320772 - DNA, 120 bp, Artificial Sequence
  ENSG00000135624_14 (sequence is synthesized)
tggctggctgctgggtgcacttaccctccttggcttggttacttcattttacaaggaaggggtagtaattggcccactctcttcttactggaggctatttaaataaaatgtaagacttca

SEQ ID NO: 320773 - DNA, 120 bp, Artificial Sequence
  ENSG00000135624_15 (sequence is synthesized)
aagatgactcactctgaagcagttccaattcttatattgtcctgactgctgagcccgtgtgggactatatgagagaacctaggctcaggagcctgttgcctcatagggagacgtggccta

SEQ ID NO: 320774 - DNA, 120 bp, Artificial Sequence
  ENSG00000135624_16 (sequence is synthesized)
gaaacatgaaatagaaccatctggagtttcctgtgttcacttccattgttatcaagatgagaaaattcctgtttatatcttggtatattaattgatgtgtgagggtatcaactgtggtaa

SEQ ID NO: 320775 - DNA, 120 bp, Artificial Sequence
  ENSG00000135624_17 (sequence is synthesized)
atactctccgggtcctcgctggcggtgggcgggccagggaggacaagcactggagaaggtgccagggactgggccagctgaagagccagaaagaatgctgggagtatagagaagccattt

SEQ ID NO: 320776 - DNA, 120 bp, Artificial Sequence
  ENSG00000135624_18 (sequence is synthesized)
attgtgggttgctgggcggcccggtctcggagaagaggggagagtggcgggccgctgaataagcttccaaaatgatgcattgctcattcttgaagtcgtcttcatcttctgtgcagaggc

SEQ ID NO: 320777 - DNA, 120 bp, Artificial Sequence
  ENSG00000135624_19 (sequence is synthesized)
aaccggccttcgcctcagccccgccccagcatactctccgggtcctcgctggcggtgggcgggccagggaggacaagcactggagcccacaccagttatcctattgaaagaggggactga

SEQ ID NO: 320778 - DNA, 120 bp, Artificial Sequence
  ENSG00000135624_20 (sequence is synthesized)
gaagaaggcagataaagtgtaagtctgtagtgggtttttttttttttttttaaagagacggagccttgctgtattgcccaggctagtcttgaactactggctcaagtgatctcccacctg

SEQ ID NO: 320779 - DNA, 120 bp, Artificial Sequence
  ENSG00000135624_21 (sequence is synthesized)
gggattacaggtgtgagtcaccgtgtcaggcctttgtcagaaccttgactgacttcctgtggccaaattggatgcagaagcatgctgcaatccctctatgtgcctggggctgtttggctc

SEQ ID NO: 320780 - DNA, 120 bp, Artificial Sequence
  ENSG00000135624_22 (sequence is synthesized)
tggggctgtttggctcctgccagacccttggctgtgtcccagcccacagagcacaaaagaagctgtcgactgtagtttaaaagctgccacatatgagatctttgactgcagtcaccatct

SEQ ID NO: 320781 - DNA, 120 bp, Artificial Sequence
  ENSG00000135624_23 (sequence is synthesized)
gtcactgataatctgccctaaagatacaaaaggtgaagttggagagggctgagtttagagactggaagggaactacctccacactgtagtagaatcagataagagggatttggttttcaa

SEQ ID NO: 320782 - DNA, 120 bp, Artificial Sequence
  ENSG00000135624_24 (sequence is synthesized)
agccccgccccagcatactctccgggtcctcgctggcggtgggcgggccagggaggacaagcactggagggcaaaggtgctgtttgtttctctgcctgttttcctacactgcagctgaac

SEQ ID NO: 320783 - DNA, 120 bp, Artificial Sequence
  ENSG00000135624_25 (sequence is synthesized)
atcactgttacataaagctgactgcctaggcatctctaggacaacacctcaagctcttggcatcttgcattttgcatcagtgtcccatctgcttctctaagattgagctgtaacacagac

SEQ ID NO: 320784 - DNA, 120 bp, Artificial Sequence
  ENSG00000135624_26 (sequence is synthesized)
aacagctacaaccggccttcgcctcagccccgccccagcatactctccgggtcctcgctggcggtgggcgggccagggaggacaagcactggagcattgctcattcttgaagtcgtcttc

SEQ ID NO: 320785 - DNA, 120 bp, Artificial Sequence
  ENSG00000135624_27 (sequence is synthesized)
cagttacaagacctagaagtgttttttcagctgtagagtagaaatgcttaggatttgggagtgaacagactcaggactattgagagattgaggtccacttcagcagtttgtctttagcat

SEQ ID NO: 320786 - DNA, 120 bp, Artificial Sequence
  ENSG00000135625_0 (sequence is synthesized)
cgggagtccccggcacacatcctgtgtccatgtttgggcatttacgtcacggcggcagggccggggcctcccaaaatggcagtggcccggggagtcggaagcccggagccagcgccgccg

SEQ ID NO: 320787 - DNA, 120 bp, Artificial Sequence
  ENSG00000135625_1 (sequence is synthesized)
cagctatataagtgggggggctgtgggctgggggagcccggcagcgctttggagaggcgaggagccgccgcccgaggccggtgcgggcgagcgagggcgccgcggctccccgactccttt

SEQ ID NO: 320788 - DNA, 120 bp, Artificial Sequence
  ENSG00000135625_2 (sequence is synthesized)
ctttcccagaggtgagtgcccgaagccaggagcccgggcgcctaggtctgtgcgctgcggggaacccctaccgccagcctccccgccacccgcgcgcccccaagcccagcgggcgaggcc

SEQ ID NO: 320789 - DNA, 120 bp, Artificial Sequence
  ENSG00000135625_3 (sequence is synthesized)
gcgccccacagccggcgccgcgccatgctccaccttagcgagttttccgaacccgacgcgctcctcgtcaagtccactgaaggctgttgcgccgaacccagcgctgaattgccccggctg

SEQ ID NO: 320790 - DNA, 120 bp, Artificial Sequence
  ENSG00000135625_4 (sequence is synthesized)
cctgccagggacgctcccgcggccaccggctaccctggagcaggcgacttcttgagctgggctttgaacagctgcggcgcaagtggggacttagccgactcctgcttcctggaggggcct

SEQ ID NO: 320791 - DNA, 120 bp, Artificial Sequence
  ENSG00000135625_5 (sequence is synthesized)
gcgcccacaccccctcccggcctcagctacagcggtagcttcttcattcaggcagtgcccgaacacccgcacgacccggaggcactcttcaacctcatgtcgggcatcttaggcctggca

SEQ ID NO: 320792 - DNA, 120 bp, Artificial Sequence
  ENSG00000135625_6 (sequence is synthesized)
cccttccccggtccagaggcagcagcgtccagatccccgctggatgccccttttcctgcggggtccgatgccttgctgccgggtccgccggacctttactccccggatctgggcgctgcc

SEQ ID NO: 320793 - DNA, 120 bp, Artificial Sequence
  ENSG00000135625_7 (sequence is synthesized)
cctttcccagaggcgttctgggaggcctcgccttgcgcgggtgccccctcgcagtgcctgtatgagcctcagctctccccgcccgacgtcaagcccggcctccgggcgcctcccgcctcg

SEQ ID NO: 320794 - DNA, 120 bp, Artificial Sequence
  ENSG00000135625_8 (sequence is synthesized)
ccagcgctggacgctgtctctgccttcaagggtccctacgcgccctgggagctgctttctgtgggggccccagggaactgtgggtcacagggagactaccaggccgccccggaggctcgt

SEQ ID NO: 320795 - DNA, 120 bp, Artificial Sequence
  ENSG00000135625_9 (sequence is synthesized)
cggggcctatgacgctttcccgctggccccgggtgacttaggggagggggctgagggcctccctgggctcctgacccctcctagtggggagggagggagtagcggcgacggcggagagtt

SEQ ID NO: 320796 - DNA, 120 bp, Artificial Sequence
  ENSG00000135625_10 (sequence is synthesized)
tctggccagtacgcagcctcagctttccccgctgggccttcgcagcgccgccgcggcggacttccctaaacctctggtggcggacatccctggaagcagtggcgtggctgcaccacccgt

SEQ ID NO: 320797 - DNA, 120 bp, Artificial Sequence
  ENSG00000135625_11 (sequence is synthesized)
cgccgcccacccctttcccccaggccaaggcgcgacgcaaggggcgccgcggcggcaaatgcagcacgcgctgcttctgcccgcggccgcacgccaaggccttcgcttgcccggtggaga

SEQ ID NO: 320798 - DNA, 120 bp, Artificial Sequence
  ENSG00000135625_12 (sequence is synthesized)
ggtggagagttgtgtgcggagctttgcgcgctccgacgagctcaatcgccacctgcgcatccacacgggccacaaacccttccagtgccgcatctgcctccgcaacttcagccgcagcga

SEQ ID NO: 320799 - DNA, 120 bp, Artificial Sequence
  ENSG00000135625_13 (sequence is synthesized)
ccacctcaccacgcacgtgcgcacccacaccggcgagaagccttttgcttgcgacgtgtgcggccgccgcttcgcgcgcagcgatgagaagaaacggcacagcaaggtgcacctcaagca

SEQ ID NO: 320800 - DNA, 120 bp, Artificial Sequence
  ENSG00000135625_14 (sequence is synthesized)
gaaggcgcgcgccgaggagcggctcaagggcctcggcttttactcgctgggcctctccttcgcttctctctgagcaagagatgggtttatgggttggggcgccgccgttcggcgcgcacg

SEQ ID NO: 320801 - DNA, 120 bp, Artificial Sequence
  ENSG00000135625_15 (sequence is synthesized)
agttccgggccgttcccctccccgctcttcttccaactcctcctcgcacgcccgagggccggcctccggtcccgcttccagtttccttgaagcgcccgccgcacacgccctattcagcac

SEQ ID NO: 320802 - DNA, 120 bp, Artificial Sequence
  ENSG00000135625_16 (sequence is synthesized)
cagctccgcggacagttcccgcggtccaggcgctgtcacccttgtcagccgcgctttgggggaagtcttctgagaccacccagtgaataggcactaccctgggattcaagacagtctttt

SEQ ID NO: 320803 - DNA, 120 bp, Artificial Sequence
  ENSG00000135625_17 (sequence is synthesized)
gtaactggcacacgccccacgccttcctctataacccccagagacaggctggggcagcgccaaggcggtctcgcgcgggactttgtacagcagtgtcttatccagcagccattggatgta

SEQ ID NO: 320804 - DNA, 120 bp, Artificial Sequence
  ENSG00000135625_18 (sequence is synthesized)
acgttttgctttgggttttttttccttttgttgttgttaatttttgtaaagcagacgctactctcaagcagttgacaaaactgtttatttttgcaattaaaattattgtgctaaaagctt

SEQ ID NO: 320805 - DNA, 80 bp, Artificial Sequence
  ENSG00000135631_0 (sequence is synthesized)
ccggtgaggcggggaggcggcggccggtcggcccggcccagcccagcccgcagctgcggcggcgctcagagttggttcct

SEQ ID NO: 320806 - DNA, 120 bp, Artificial Sequence
  ENSG00000135631_1 (sequence is synthesized)
agcccgcagctgcggcggcgctcagagttggttcctgaccgccttctgccgcggccgggtttgtcaccaggtcctggggtctgcaccggctcggccagacctcgccccccgcttctccgc

SEQ ID NO: 320807 - DNA, 120 bp, Artificial Sequence
  ENSG00000135631_2 (sequence is synthesized)
gccggcggcggggccttcccgctggctgcccacgcacgtccaggtgacggtgctgcgggcccgcgggctgcggggcaagagctcgggagcgggcagcaccagcgacgcgtacacggtgat

SEQ ID NO: 320808 - DNA, 120 bp, Artificial Sequence
  ENSG00000135631_3 (sequence is synthesized)
caccagcgacgcgtacacggtgatccaggtgggccgcgagaagtacagtacgtcggtggtggagaagacgcacggctgccccgagtggcgtgaggagtgctccttcgagctgccgccggg

SEQ ID NO: 320809 - DNA, 120 bp, Artificial Sequence
  ENSG00000135631_4 (sequence is synthesized)
ctggatggcctgctgcgggcgcaggaggccgacgcgggcccggcgccctgggccgcgagctccgccgccgcctgcgagctggtgctcaccaccatgcaccgctcgctcatcggcgtcgac

SEQ ID NO: 320810 - DNA, 120 bp, Artificial Sequence
  ENSG00000135631_5 (sequence is synthesized)
cgacaagttcctgggccaggccacggtggcgctggacgaggtcttcggcgcaggccgcgcccagcacacgcagtggtacaagctgcactccaagccaggcaagaaggagaaggaacgcgg

SEQ ID NO: 320811 - DNA, 120 bp, Artificial Sequence
  ENSG00000135631_6 (sequence is synthesized)
cgagattgaagtcaccatccagttcacgcgcaacaacctgagcgccagtatgtttgacctgtccatgaaggacaagccaaggtctcccttcagcaagatcagggacaagatgaagggcaa

SEQ ID NO: 320812 - DNA, 120 bp, Artificial Sequence
  ENSG00000135631_7 (sequence is synthesized)
gaagaagtatgatctggaatctgcctctgccatcctcccaagcagcgccatagaggatcctgacctgggcagcctgggcaagatgggcaaagccaaaggcttcttcctccgcaacaagct

SEQ ID NO: 320813 - DNA, 120 bp, Artificial Sequence
  ENSG00000135631_8 (sequence is synthesized)
gcgcaagtcgtccctgacccagtccaacacctcgctgggctcggacagcaccctgtcctcagccagcgggagcttggcctaccagggacctggcgccgaactcctcacccgctcaccaag

SEQ ID NO: 320814 - DNA, 120 bp, Artificial Sequence
  ENSG00000135631_9 (sequence is synthesized)
ccgtagcagctggctgtccactgaagggggcagggactctgcacagtcccccaagctgttcacccataagaggacctacagcgatgaggccaaccagatgcgagtggctcctcctcgggc

SEQ ID NO: 320815 - DNA, 120 bp, Artificial Sequence
  ENSG00000135631_10 (sequence is synthesized)
ccttctggaccttcagggccacctggatgctgcctcccgctcttcgctctgtgtcaatgggagccacatttacaatgaggagccccagggccctgtgcggcaccgcagctccatctcggg

SEQ ID NO: 320816 - DNA, 120 bp, Artificial Sequence
  ENSG00000135631_11 (sequence is synthesized)
ctcgcttccatcctctggctccttgcaagctgtctcttcccggttctccgaggaggggcctcgttccacagatgacacctggcccagaggcagtcgtagcaacagcagctcagaggcagt

SEQ ID NO: 320817 - DNA, 120 bp, Artificial Sequence
  ENSG00000135631_12 (sequence is synthesized)
gcttggacaggaggagctgagtgctcaggctaaagtcctggcccctggggccagccaccctggagaggaggagggggcccggctaccagagggcaagccagtccaggttgccacacccat

SEQ ID NO: 320818 - DNA, 120 bp, Artificial Sequence
  ENSG00000135631_13 (sequence is synthesized)
agtggcctcctctgaggctgtggcagagaaggagggagcccggaaggaggaacgcaagccccggatgggtctcttccaccaccaccaccaaggcctaagtcggagcgagttgggtcgccg

SEQ ID NO: 320819 - DNA, 120 bp, Artificial Sequence
  ENSG00000135631_14 (sequence is synthesized)
aagctctctgggggaaaaggggggtcccatcctgggggcctccccacatcactcatccagtggggaggaaaaggccaagagtagctggtttggcttgagagaagccaaggacccgactca

SEQ ID NO: 320820 - DNA, 120 bp, Artificial Sequence
  ENSG00000135631_15 (sequence is synthesized)
gaaacccagtccccaccccgtgaagcccctcagtgccgcccctgtggagggcagccccgacaggaagcagtcccgctccagtctgagcatagccctgagcagtgggctggagaagctcaa

SEQ ID NO: 320821 - DNA, 120 bp, Artificial Sequence
  ENSG00000135631_16 (sequence is synthesized)
aacagtcacatctgggagcattcagcctgtgacccaggccccccaggctggccagatggtggacaccaaaaggctgaaggactcagctgtgctggaccagtcggccaagtactaccacct

SEQ ID NO: 320822 - DNA, 120 bp, Artificial Sequence
  ENSG00000135631_17 (sequence is synthesized)
gacccacgatgagctcatcagcctgctcctgcagcgggagcgggagctgagccagcgggacgagcatgtgcaggagctggagagctacatcgaccggctgctggtgcggatcatggagac

SEQ ID NO: 320823 - DNA, 120 bp, Artificial Sequence
  ENSG00000135631_18 (sequence is synthesized)
cccccgggcccccccaaatagccttcctcaccctacccccaggagggttggcatggacctattgctgcctgccctctctcctcctgaactctctcatctgcagtggggcatcgtctgtct

SEQ ID NO: 320824 - DNA, 120 bp, Artificial Sequence
  ENSG00000135631_19 (sequence is synthesized)
tgccttgtcactccttgctcctctccctcctgcctcaactggggctgctggaagggggccctctggattccctttggaggcatcaggttctgtgcacaacttgtgtgtctttgggagccc

SEQ ID NO: 320825 - DNA, 120 bp, Artificial Sequence
  ENSG00000135631_20 (sequence is synthesized)
tgggtctttcccacctgcctgttttcatatccctcagctttgggggccccagggaattggaactcttcccccaagacagagcaggggtgaactgtagcttgatgcagtaatctgggacaa

SEQ ID NO: 320826 - DNA, 120 bp, Artificial Sequence
  ENSG00000135631_21 (sequence is synthesized)
gactggttgctagcacatactttattatcccccaaggatggtcagccatttcttcccacagccaaagccccatccccttcatttccctccagtccctggaggggcttctagtattactgg

SEQ ID NO: 320827 - DNA, 120 bp, Artificial Sequence
  ENSG00000135631_22 (sequence is synthesized)
gacaatgaccacgctgcctgtttgtctgtgagttacgggcaaccagcctcttcagcctcacacccattcccctgagagcaagaagcctgtgtggtctgggccagtctctgccatgtcctg

SEQ ID NO: 320828 - DNA, 120 bp, Artificial Sequence
  ENSG00000135631_23 (sequence is synthesized)
agtctgcttcagtctggagctgtttgtggggcgagtgccatgtggacagtggtggatgatgtgtgtgcttcaggctgctccctgacccctctgacctttccacgagtgtcacatgggaat

SEQ ID NO: 320829 - DNA, 120 bp, Artificial Sequence
  ENSG00000135631_24 (sequence is synthesized)
gtgtggggcgcaggggcgggtgcggagagagcacctttttgcttttcgagctcttgaccacctccaatgtgtaggtccctccaggctggggcttgggactgcttatgatttggggatcaa

SEQ ID NO: 320830 - DNA, 120 bp, Artificial Sequence
  ENSG00000135631_25 (sequence is synthesized)
gcctccatgtctattcttgttgcctgtccagatgccaaaactctgtgttgctgcagggtttgaacttttggaaaccaattaaaatgtgcctttggtgggcggggtcaagagcccctggat

SEQ ID NO: 320831 - DNA, 120 bp, Artificial Sequence
  ENSG00000135631_26 (sequence is synthesized)
gtcgacctctcccgctgtgtggcgtccccctcccacctgttgaatacatagggatggctctctcagggccctgggaatgggaatggacagcactgctgtgggctgttcccctcccctaaa

SEQ ID NO: 320832 - DNA, 120 bp, Artificial Sequence
  ENSG00000135631_27 (sequence is synthesized)
gttaatctcttggtctggccaagttgctgctccctcaaccttcctgctgtcttcccctccctcaaccccaataggaggatcccaggataaacactgctgggcaggcgggcaggcaggcct

SEQ ID NO: 320833 - DNA, 120 bp, Artificial Sequence
  ENSG00000135631_28 (sequence is synthesized)
ggggctgccctgctcactctcattgtctggcctcaggacttagccatactagaccagtcagcttgcctggaagagggaggtcccactatgcctttgggagacacctatacttaggaaaaa

SEQ ID NO: 320834 - DNA, 120 bp, Artificial Sequence
  ENSG00000135631_29 (sequence is synthesized)
gcctttgttgtcctcccatccatccattaagctgctatctcagcctgtcccttctgccccaggggcttgcctggcttggctgcagtgcactttgaaatgaagtatctgtcctttggccca

SEQ ID NO: 320835 - DNA, 120 bp, Artificial Sequence
  ENSG00000135631_30 (sequence is synthesized)
gcccctggtttgcttgtagaaaacatggtaggcttccccaaggcatctgcagggaactttggcagcttggggcaccctgaattagcaaaaatggggggtgatgaggtgctgaagaaggat

SEQ ID NO: 320836 - DNA, 120 bp, Artificial Sequence
  ENSG00000135631_31 (sequence is synthesized)
acttaacagcttagtgaggaggcaagagctcctctgggaccaccacttcttcaggagagggcctgtgggcttgcttttggaaggcctcaggcagacacgtgccctctgggtgatgtctgt

SEQ ID NO: 320837 - DNA, 120 bp, Artificial Sequence
  ENSG00000135631_32 (sequence is synthesized)
ctgctgccaggatggagcagaggagcgccacacatggaggaaagcccctgtaacgttacctaccttaaactccactcatcaaatctgagaaaagtatccactggtccccagggtttcagt

SEQ ID NO: 320838 - DNA, 120 bp, Artificial Sequence
  ENSG00000135631_33 (sequence is synthesized)
catgcttttgggggtcattgggtattagagaagtaagtatcttttctgagagagggggagtcaccccccctactggggattcctctgggctttattcactcccagccctggccctgacct

SEQ ID NO: 320839 - DNA, 120 bp, Artificial Sequence
  ENSG00000135631_34 (sequence is synthesized)
ttgtgggcctccctaatgcccagggcatggatggcttcagaggagtttttgaatcgaagcccagggtccttgttgatgtttcttctcctagccacacttggaggaaagttgcaggtgggt

SEQ ID NO: 320840 - DNA, 120 bp, Artificial Sequence
  ENSG00000135631_35 (sequence is synthesized)
tgggcagggagcaggcatggttctgctttgctgtttgtcttcctagttaaggctctttataaagagcttgttcttcatgttttaagcactttatgaagaataaaacattcatgtactgca

SEQ ID NO: 320841 - DNA, 120 bp, Artificial Sequence
  ENSG00000135631_36 (sequence is synthesized)
cccatgctaagcactaacctttttgcagccgcctcccccgctgctgccactgctgccgctgccgccaccaccgccgcccctgaagccaccccacctggattattgggtcttaccaacccg

SEQ ID NO: 320842 - DNA, 120 bp, Artificial Sequence
  ENSG00000135631_37 (sequence is synthesized)
ttcctcacctctttgcagagcaaccccttcttcgaggagctcatagccgacatagcactaaactctccttcacctgctccctctctccccagtgcctcgagggccagccccacccccctg

SEQ ID NO: 320843 - DNA, 120 bp, Artificial Sequence
  ENSG00000135631_38 (sequence is synthesized)
gcctcccctgggaaagccctgcctgagtgggacaacaccttcaacgtctttgctgccagcaggctgcgtccagaggccaggagcgagatcctggcccctgcaggagtggggctggaggcg

SEQ ID NO: 320844 - DNA, 120 bp, Artificial Sequence
  ENSG00000135631_39 (sequence is synthesized)
cctgcaggagtggggctggaggcggcagggctgcaagacccaggccctggggccatgactgcgaaggcagctgagccccagggagagcctgggggaggaggaggaggaggaggaggagga

SEQ ID NO: 320845 - DNA, 120 bp, Artificial Sequence
  ENSG00000135631_40 (sequence is synthesized)
tggctggagcccagggttcctctggacttgggaccgaaccaccagagcgcgagcgcggctgacccagggctcctcgggtcggtaggggctggcctgccctcctcgtcagcccagctacag

SEQ ID NO: 320846 - DNA, 120 bp, Artificial Sequence
  ENSG00000135631_41 (sequence is synthesized)
ctgagagcctcaggctcagaaccagacagggaactgccagccccggaagtggaagcagggcagagtccggcagacagtgggacatctctatttagctccccagaagtgatcagtgtgtgg

SEQ ID NO: 320847 - DNA, 120 bp, Artificial Sequence
  ENSG00000135631_42 (sequence is synthesized)
gagaggctgccgggcccagagagcgctgctgagggccaggacgatgagtcctcccgaggcgaaaatcagctttgccctgacgtcgagacagctgatgatgcctggccttgggatgtggtc

SEQ ID NO: 320848 - DNA, 120 bp, Artificial Sequence
  ENSG00000135631_43 (sequence is synthesized)
accatttctcctgcagctgagacagcctcactagtctttcggggagagtctgatgagcctgctccccaggtgcagcctgaatcaccagaaactgtgagccccaaggggagcgaggggctt

SEQ ID NO: 320849 - DNA, 120 bp, Artificial Sequence
  ENSG00000135631_44 (sequence is synthesized)
cccccaccggagcccgagcctaaacccgagtgggtgtctgacaaggggctgcagcccagcaccccacctcccaagccaccgcgcctcttcacaccctcaagatcccaggaggaggaggag

SEQ ID NO: 320850 - DNA, 120 bp, Artificial Sequence
  ENSG00000135631_45 (sequence is synthesized)
gagaaggccgcagtggggctgagtaacagggggccggagacagagggagaagatgcctccccaagtgcactggttgtcggtcccccggagaccaaggaggagggagagaagcgtgagtcg

SEQ ID NO: 320851 - DNA, 120 bp, Artificial Sequence
  ENSG00000135631_46 (sequence is synthesized)
gaggagtctgacagctgctcctctgcaaccctgctgggccagcctggcctggaagagctagtggaggatgccagcccccctgtgtctgggccctgcctgtctgcacccgccagctgccct

SEQ ID NO: 320852 - DNA, 120 bp, Artificial Sequence
  ENSG00000135631_47 (sequence is synthesized)
gagggtcctgcccccataccctgtcactcaaagagcttggctcttcagagtcagcacatctgggggactccagaggttggagaaggccctgaggctcctgaggcccagggccaggatcca

SEQ ID NO: 320853 - DNA, 120 bp, Artificial Sequence
  ENSG00000135631_48 (sequence is synthesized)
gtaggagaggggcttgggtccttgtcagccacctcccagcaggctgatgtgtgggtctccaaggaagatgccttgaaccccttcttgtttcaggggagccgagatcctcccagcctctca

SEQ ID NO: 320854 - DNA, 120 bp, Artificial Sequence
  ENSG00000135631_49 (sequence is synthesized)
tctgcatccccgccagggtcgagggaatcttctattcattctggtccagaagagctgcccactcccccagagcctgactttccaccgccccctctcccgccttgggccagccaccaccgt

SEQ ID NO: 320855 - DNA, 120 bp, Artificial Sequence
  ENSG00000135631_50 (sequence is synthesized)
ggggggcccagccctccatgctctcccctgtctgaagcctggcccctgactacctcctctgcaccaccaggggagccagccttactccctggcccccatgagccctccccacctgggggc

SEQ ID NO: 320856 - DNA, 120 bp, Artificial Sequence
  ENSG00000135631_51 (sequence is synthesized)
agatgtaggggagatggggcagaggagaggtctctgagcaccaggagaaggtcctggggtgggaggaggcatggtgtggtaaccgccgccctacctggtggcacccgaggagcttcccca

SEQ ID NO: 320857 - DNA, 120 bp, Artificial Sequence
  ENSG00000135631_52 (sequence is synthesized)
ctcaggatgtggttttctccatcatggaaatgttttggatagtttctcagctgcatctgaagcctggaagcccaggccgatgggtcagagcaggagcctttggggagaggctatcagtgg

SEQ ID NO: 320858 - DNA, 120 bp, Artificial Sequence
  ENSG00000135631_53 (sequence is synthesized)
ctctcagagcaaggaggggtctgggcagtgcctggtaccgggcgggagccaggctccctgggcccgtgactgagttctgcctgctcccctcttctcacaggtggtacaagctgcactcca

SEQ ID NO: 320859 - DNA, 120 bp, Artificial Sequence
  ENSG00000135631_54 (sequence is synthesized)
agtggcagcggaacagaggggtagcgccagaagactgcaagccccagtcaggagaccaggcaggaggctggagcatgagacctggtggtacaagctgcactccaagccaggcaagaagga

SEQ ID NO: 320860 - DNA, 120 bp, Artificial Sequence
  ENSG00000135631_55 (sequence is synthesized)
tttgttctcagagcatgacctgcaaagacaagcatacgtgggaatatgttcctgacctgggccaggtggagtgggagggagatgttttgaagtgagaaccttcagaatgtgcacttggtg

SEQ ID NO: 320861 - DNA, 120 bp, Artificial Sequence
  ENSG00000135631_56 (sequence is synthesized)
tggagcaaggaagaggaaggcatgaaggagggatgtgttaccagataggaggatggacagatgccctcagaagtactgctggctctgtaaagcctgccaggcctggtgcttggagtccct

SEQ ID NO: 320862 - DNA, 120 bp, Artificial Sequence
  ENSG00000135632_0 (sequence is synthesized)
ataaggcggaggcgcgcccaagatggcggcctccatgtgcgacgtgttctccttctgcgtgggcgtggcgggccgcgcgcgggtctccgtggaagtccgtttcgtgagcagcgccaaggg

SEQ ID NO: 320863 - DNA, 120 bp, Artificial Sequence
  ENSG00000135632_1 (sequence is synthesized)
aaaggggctgtttgccacacagctcatccggaagggggagaccatcttcgtagaacggcccctggtggctgcacagtttctctggaatgcactttatcgctaccgagcctgtgaccactg

SEQ ID NO: 320864 - DNA, 120 bp, Artificial Sequence
  ENSG00000135632_2 (sequence is synthesized)
ccttagggcactagagaaggcagaggagaatgcccagaggctgaccgggaaaccaggccaggttctgcctcacccagagctgtgcactgtgcgcaaagacctccaccagaactgtcccca

SEQ ID NO: 320865 - DNA, 120 bp, Artificial Sequence
  ENSG00000135632_3 (sequence is synthesized)
ttgccaagtgatgtactgcagtgcagaatgtcggttggcagccactgagcaataccaccaggtcctgtgcccaggcccctcccaggatgaccccttgcatcctctcaataagcttcagga

SEQ ID NO: 320866 - DNA, 120 bp, Artificial Sequence
  ENSG00000135632_4 (sequence is synthesized)
ggcatggaggagtattcactacccacctgagactgcaagcatcatgttgatggctaggatggtggccacagtgaagcaggcgaaggacaaggaccgttggatcagactcttttcccagtt

SEQ ID NO: 320867 - DNA, 120 bp, Artificial Sequence
  ENSG00000135632_5 (sequence is synthesized)
ttgtaacaaaacagccaatgaagaggaggaaattgtccataaacttctgggagacaaattcaagggccaactggaacttctgcggagactcttcacagaggccctctatgaggaagcagt

SEQ ID NO: 320868 - DNA, 120 bp, Artificial Sequence
  ENSG00000135632_6 (sequence is synthesized)
cagccagtggttcactccagatggattccggtctctctttgctcttgttgggaccaatggccaaggaatcgggaccagctccctaagccagtgggtccatgcctgtgacactctggagtt

SEQ ID NO: 320869 - DNA, 120 bp, Artificial Sequence
  ENSG00000135632_7 (sequence is synthesized)
gaagcctcaggaccgtgagcagcttgacgccttcattgaccagctatacaaggacatcgaggcagcaactggagagtttcttaactgtgaaggatctggcctctttgtgcttcagagctg

SEQ ID NO: 320870 - DNA, 120 bp, Artificial Sequence
  ENSG00000135632_8 (sequence is synthesized)
ctgcaaccacagttgtgtgcccaatgcagagacctcctttccagaaaacaacttccttttgcatgtcactgctctggaggatattaagccaggagaggaaatttgtatcagctacttgga

SEQ ID NO: 320871 - DNA, 120 bp, Artificial Sequence
  ENSG00000135632_9 (sequence is synthesized)
ctgctgtcagcgggagcgcagccgccacagccgccacaagatcctcagggagaactatctatttgtctgttcctgtcccaaatgcctggcagaggctgatgaacccaatgtgacctcaga

SEQ ID NO: 320872 - DNA, 120 bp, Artificial Sequence
  ENSG00000135632_10 (sequence is synthesized)
gagccagaagatgcagagctgggggatgagatgactgatgtgtgatgttgccctgcccagaaagggccctgccctagaccctgccagaaaagggggctcttcccccagagaagtggcttg

SEQ ID NO: 320873 - DNA, 120 bp, Artificial Sequence
  ENSG00000135632_11 (sequence is synthesized)
gagggaacttcccactcccattgcctgctttccccattccagccctctctgctagagggtaggagagagcctggatctctggccccaacccccaccagacctcatgccctggacactgct

SEQ ID NO: 320874 - DNA, 120 bp, Artificial Sequence
  ENSG00000135632_12 (sequence is synthesized)
gctgagttggctcagactctgcactggcactgagcctttcacaactggcctccccttgaggttcctccactctagggtttgaggggctggaatcagggccagggcctaacagtgtttctt

SEQ ID NO: 320875 - DNA, 120 bp, Artificial Sequence
  ENSG00000135632_13 (sequence is synthesized)
cccctcggccccacggcccatactcaccccttcacctgaggcttctcccctctcaacttgctgttgatttcttttgaggggtaaaagaaagaccgagttcattgaagcagagatgggagg

SEQ ID NO: 320876 - DNA, 120 bp, Artificial Sequence
  ENSG00000135632_14 (sequence is synthesized)
tggtgaggcgtcctcacctccccccaccacagctgtggctggtaaggcaactgcttgaccactggcccagcaagcagaggcgggcaggaggatctgggcatcctgagccccttccctgag

SEQ ID NO: 320877 - DNA, 120 bp, Artificial Sequence
  ENSG00000135632_15 (sequence is synthesized)
gctgtctcctgggaatgctggaccagggggattacttcccccacccacacccccatttggacatctggggaagtggagattaacccctcccccagactcgtgccttgcctctcaggacct

SEQ ID NO: 320878 - DNA, 120 bp, Artificial Sequence
  ENSG00000135632_16 (sequence is synthesized)
ggcacagtggctggccttatggagtatggaaaaggcctctgccttcctcaggagggacacatagtgggtcatcaccctttctcacacctgcttcccaatgagcactcagcagcatggctg

SEQ ID NO: 320879 - DNA, 120 bp, Artificial Sequence
  ENSG00000135632_17 (sequence is synthesized)
agacctggggcttgacaggcctgcgctccttagattaggatgctctggtattcctggggccagttaaaatgggtcagtgaggggctctcctggcctcaatctccatctttagggtctcca

SEQ ID NO: 320880 - DNA, 120 bp, Artificial Sequence
  ENSG00000135632_18 (sequence is synthesized)
cagactaacattgaagtcttccagaaacctcgaggagctgggctagatacttcgagagtagccctgtcttgtcccctcctacccccagattagcaccacccctctcactcttgggttgga

SEQ ID NO: 320881 - DNA, 120 bp, Artificial Sequence
  ENSG00000135632_19 (sequence is synthesized)
tgctatgggaattacaacccatcactcccaatgcctccctttcctggaggagcctgctgcattctcctgctgagggatcccagagagggcaggtgcccaccccacaggccctttcctgga

SEQ ID NO: 320882 - DNA, 120 bp, Artificial Sequence
  ENSG00000135632_20 (sequence is synthesized)
ccatggagccaggtgaaacctgtctggccccttacccattgggttcttactccttcacaacggtcagcactcctctcccagcccccctgcccactgttctcaataaaatgtgagtggtga

SEQ ID NO: 320883 - DNA, 120 bp, Artificial Sequence
  ENSG00000135632_21 (sequence is synthesized)
gtcaaatgcagatatgtaatttctaagaaagcaggagatagctctttgtgggtttagggtcttgtctgttagtgcaggcacagtgcctggttgaatcttcttgagggcaagtagcatcat

SEQ ID NO: 320884 - DNA, 120 bp, Artificial Sequence
  ENSG00000135632_22 (sequence is synthesized)
accaagacctctgatcccagctgcagaccttggccattgactggctttcaccacggcctgaggccaaccagtctcctctgtctcaggcacaggctgttggagccttatagtggcctgcct

SEQ ID NO: 320885 - DNA, 120 bp, Artificial Sequence
  ENSG00000135632_23 (sequence is synthesized)
ggaattcggccagcccgcgggaggcccttctgtggctgctcggggcggggctagggggctttgctgctgtatccctggaacggtgggcggggatgtgccgggcagagagaactgagggaa

SEQ ID NO: 320886 - DNA, 120 bp, Artificial Sequence
  ENSG00000135632_24 (sequence is synthesized)
atttactcactttccaaacctttatgaaacactagaatggtgcctggcacatagcagctgctctgtagggctgtgaaagggatagatgtggcctctgctctcaagatattgttgtgtctg

SEQ ID NO: 320887 - DNA, 120 bp, Artificial Sequence
  ENSG00000135632_25 (sequence is synthesized)
ctccgtgcgcatttcctcccagcggaattcggccagcccgcgggaggcccttctgtggctgctcggggcggggctagggggctttgctgctgtatccctggaacggtgggcggggatgtg

SEQ ID NO: 320888 - DNA, 120 bp, Artificial Sequence
  ENSG00000135636_0 (sequence is synthesized)
acttctccgcggaggagcagcgaaggcgacagctctcttggcgcggctgcctgggagccgggcgcttgctgggtgggtgctcgggcccggtgctcccgctcccgccctgactgcgcgcct

SEQ ID NO: 320889 - DNA, 120 bp, Artificial Sequence
  ENSG00000135636_1 (sequence is synthesized)
gtgtgccgccggggctgcccagccatgctgtgctgcctgctggtgagggccagcaacctccccagtgcgaagaaggaccggcgcagcgaccctgtcgcaagcctgactttccgaggggtg

SEQ ID NO: 320890 - DNA, 120 bp, Artificial Sequence
  ENSG00000135636_2 (sequence is synthesized)
aagaagagaaccaaagtcatcaagaacagcgtgaaccctgtatggaatgagggatttgaatgggacctcaagggcatccccctggaccagggctctgagcttcatgtggtggtcaaagac

SEQ ID NO: 320891 - DNA, 120 bp, Artificial Sequence
  ENSG00000135636_3 (sequence is synthesized)
catgagacgatggggaggaacaggttcctgggggaagccaaggtcccactccgagaggtcctcgccacccctagtctgtccgccagcttcaatgcccccctgctggacaccaagaagcag

SEQ ID NO: 320892 - DNA, 120 bp, Artificial Sequence
  ENSG00000135636_4 (sequence is synthesized)
cccacaggggcctcgctggtcctgcaggtgtcctacacaccgctgcctggagctgtgcccctgttcccgccccctactcctctggagccctccccgactctgcctgacctggatgtagtg

SEQ ID NO: 320893 - DNA, 120 bp, Artificial Sequence
  ENSG00000135636_5 (sequence is synthesized)
gcaggcgggggacagagccgggccgagacttggtccctgctcagtgacagcaccatggacacgagatactctggaaagaagtggccggcccccacggacacaggaggagaggaagacaca

SEQ ID NO: 320894 - DNA, 120 bp, Artificial Sequence
  ENSG00000135636_6 (sequence is synthesized)
gaggaccagggactcactggagatgaggcggagccattcctggatcaaagcggaggcccgggggctcccaccaccccaaggaaactaccttcacgtcctccgccccactaccccgggatc

SEQ ID NO: 320895 - DNA, 120 bp, Artificial Sequence
  ENSG00000135636_7 (sequence is synthesized)
aaaagaaagcgaagtgcgcctacatctagaaagctgctgtcagacaaaccgcaggatttccagatcagggtccaggtgatcgaggggcgccagctgccgggggtgaacatcaagcctgtg

SEQ ID NO: 320896 - DNA, 120 bp, Artificial Sequence
  ENSG00000135636_8 (sequence is synthesized)
gtcaaggttaccgctgcagggcagaccaagcggacgcggatccacaagggaaacagcccactcttcaatgagactcttttcttcaacttgtttgactctcctggggagctgtttgatgag

SEQ ID NO: 320897 - DNA, 120 bp, Artificial Sequence
  ENSG00000135636_9 (sequence is synthesized)
cccatctttatcacggtggtagactctcgttctctcaggacagatgctctcctcggggagttccggatggacgtgggcaccatttacagagagccccggcacgcctatctcaggaagtgg

SEQ ID NO: 320898 - DNA, 120 bp, Artificial Sequence
  ENSG00000135636_10 (sequence is synthesized)
ctgctgctctcagaccctgatgacttctctgctggggccagaggctacctgaaaacaagcctttgtgtgctggggcctggggacgaagcgcctctggagagaaaagacccctctgaagac

SEQ ID NO: 320899 - DNA, 120 bp, Artificial Sequence
  ENSG00000135636_11 (sequence is synthesized)
aaggaggacattgaaagcaacctgctccggcccacaggcgtagccctgcgaggagcccacttctgcctgaaggtcttccgggccgaggacttgccgcagatggacgatgccgtgatggac

SEQ ID NO: 320900 - DNA, 120 bp, Artificial Sequence
  ENSG00000135636_12 (sequence is synthesized)
aacgtgaaacagatctttggcttcgagagtaacaagaagaacttggtggacccctttgtggaggtcagctttgcggggaaaatgctgtgcagcaagatcttggagaagacggccaaccct

SEQ ID NO: 320901 - DNA, 120 bp, Artificial Sequence
  ENSG00000135636_13 (sequence is synthesized)
cagtggaaccagaacatcacactgcctgccatgtttccctccatgtgcgaaaaaatgaggattcgtatcatagactgggaccgcctgactcacaatgacatcgtggctaccacctacctg

SEQ ID NO: 320902 - DNA, 120 bp, Artificial Sequence
  ENSG00000135636_14 (sequence is synthesized)
agtatgtcgaaaatctctgcccctggaggagaaatagaagtggatgactacctgggcttcctccccacttttgggccctgctacatcaacctctatggcagtcccagagagttcacaggc

SEQ ID NO: 320903 - DNA, 120 bp, Artificial Sequence
  ENSG00000135636_15 (sequence is synthesized)
ttcccagacccctacacagagctcaacacaggcaagggggaaggtgtggcttatcgtggccggcttctgctctccctggagaccaagctggtggagcacagtgaacagaaggtggaggac

SEQ ID NO: 320904 - DNA, 120 bp, Artificial Sequence
  ENSG00000135636_16 (sequence is synthesized)
cttcctgcggatgacatcctccgggtggagaagtaccttaggaggcgcaagtactccctgtttgcggccttctactcagccaccatgctgcaggatgtggatgatgccatccagtttgag

SEQ ID NO: 320905 - DNA, 120 bp, Artificial Sequence
  ENSG00000135636_17 (sequence is synthesized)
gtcagcatcgggaactacgggaacaagttcgacatgacctgcctgccgctggcctccaccactcagtacagccgtgcagtctttgacgggtgccactactactacctaccctggggtaac

SEQ ID NO: 320906 - DNA, 120 bp, Artificial Sequence
  ENSG00000135636_18 (sequence is synthesized)
gtgaaacctgtggtggtgctgtcatcctactgggaggacatcagccatagaatcgagactcagaaccagctgcttgggattgctgaccggctggaagctggcctggagcaggtccacctg

SEQ ID NO: 320907 - DNA, 120 bp, Artificial Sequence
  ENSG00000135636_19 (sequence is synthesized)
gccctgaaggcgcagtgctccacggaggacgtggactcgctggtggctcagctgacggatgagctcatcgcaggctgcagccagcctctgggtgacatccatgagacaccctctgccacc

SEQ ID NO: 320908 - DNA, 120 bp, Artificial Sequence
  ENSG00000135636_20 (sequence is synthesized)
cacctggaccagtacctgtaccagctgcgcacccatcacctgagccaaatcactgaggctgccctggccctgaagctcggccacagtgagctccctgcagctctggagcaggcggaggac

SEQ ID NO: 320909 - DNA, 120 bp, Artificial Sequence
  ENSG00000135636_21 (sequence is synthesized)
tggctcctgcgtctgcgtgccctggcagaggagccccagaacagcctgccggacatcgtcatctggatgctgcagggagacaagcgtgtggcataccagcgggtgcccgcccaccaagtc

SEQ ID NO: 320910 - DNA, 120 bp, Artificial Sequence
  ENSG00000135636_22 (sequence is synthesized)
ctcttctcccggcggggtgccaactactgtggcaagaattgtgggaagctacagacaatctttctgaaatatccgatggagaaggtgcctggcgcccggatgccagtgcagatacgggtc

SEQ ID NO: 320911 - DNA, 120 bp, Artificial Sequence
  ENSG00000135636_23 (sequence is synthesized)
aagctgtggtttgggctctcagtggatgagaaggagttcaaccagtttgctgaggggaagctgtctgtctttgctgaaacctatgagaacgagactaagttggcccttgttgggaactgg

SEQ ID NO: 320912 - DNA, 120 bp, Artificial Sequence
  ENSG00000135636_24 (sequence is synthesized)
ggcacaacgggcctcacctaccccaagttttctgacgtcacgggcaagatcaagctacccaaggacagcttccgcccctcggccggctggacctgggctggagattggttcgtgtgtccg

SEQ ID NO: 320913 - DNA, 120 bp, Artificial Sequence
  ENSG00000135636_25 (sequence is synthesized)
gagaagactctgctccatgacatggacgccggtcacctgagcttcgtggaagaggtgtttgagaaccagacccggcttcccggaggccagtggatctacatgagtgacaactacaccgat

SEQ ID NO: 320914 - DNA, 120 bp, Artificial Sequence
  ENSG00000135636_26 (sequence is synthesized)
gtgaacggggagaaggtgcttcccaaggatgacattgagtgcccactgggctggaagtgggaagatgaggaatggtccacagacctcaaccgggctgtcgatgagcaaggctgggagtat

SEQ ID NO: 320915 - DNA, 120 bp, Artificial Sequence
  ENSG00000135636_27 (sequence is synthesized)
agcatcaccatccccccggagcggaagccgaagcactgggtccctgctgagaagatgtactacacacaccgacggcggcgctgggtgcgcctgcgcaggagggatctcagccaaatggaa

SEQ ID NO: 320916 - DNA, 120 bp, Artificial Sequence
  ENSG00000135636_28 (sequence is synthesized)
ctctttttggctggaagttccacctcgagtaccgcaagacagatgccttccgccgccgccgctggcgccgtcgcatggagccactggagaagacggggcctgcagctgtgtttgcccttg

SEQ ID NO: 320917 - DNA, 120 bp, Artificial Sequence
  ENSG00000135636_29 (sequence is synthesized)
agggggccctgggcggcgtgatggatgacaagagtgaagattccatgtccgtctccaccttgagcttcggtgtgaacagacccacgatttcctgcatattcgactatgggaaccgctacc

SEQ ID NO: 320918 - DNA, 120 bp, Artificial Sequence
  ENSG00000135636_30 (sequence is synthesized)
atctacgctgctacatgtaccaggcccgggacctggctgcgatggacaaggactctttttctgatccctatgccatcgtctccttcctgcaccagagccagaagacggtggtggtgaaga

SEQ ID NO: 320919 - DNA, 120 bp, Artificial Sequence
  ENSG00000135636_31 (sequence is synthesized)
acacccttaaccccacctgggaccagacgctcatcttctacgagatcgagatctttggcgagccggccacagttgctgagcaaccgcccagcattgtggtggagctgtacgaccatgaca

SEQ ID NO: 320920 - DNA, 120 bp, Artificial Sequence
  ENSG00000135636_32 (sequence is synthesized)
cttatggtgcagacgagtttatgggtcgctgcatctgtcaaccgagtctggaacggatgccacggctggcctggttcccactgacgaggggcagccagccgtcgggggagctgctggcct

SEQ ID NO: 320921 - DNA, 120 bp, Artificial Sequence
  ENSG00000135636_33 (sequence is synthesized)
cttttgagctcatccagagagagaagccggccatccaccatattcctggttttgaggtgcaggagacatcaaggatcctggatgagtctgaggacacagacctgccctacccaccacccc

SEQ ID NO: 320922 - DNA, 120 bp, Artificial Sequence
  ENSG00000135636_34 (sequence is synthesized)
agagggaggccaacatctacatggttcctcagaacatcaagccagcgctccagcgtaccgccatcgagatcctggcatggggcctgcggaacatgaagagttaccagctggccaacatct

SEQ ID NO: 320923 - DNA, 120 bp, Artificial Sequence
  ENSG00000135636_35 (sequence is synthesized)
cctcccccagcctcgtggtagagtgtgggggccagacggtgcagtcctgtgtcatcaggaacctccggaagaaccccaactttgacatctgcaccctcttcatggaagtgatgctgccca

SEQ ID NO: 320924 - DNA, 120 bp, Artificial Sequence
  ENSG00000135636_36 (sequence is synthesized)
gggaggagctctactgcccccccatcaccgtcaaggtcatcgataaccgccagtttggccgccggcctgtggtgggccagtgtaccatccgctccctggagagcttcctgtgtgacccct

SEQ ID NO: 320925 - DNA, 120 bp, Artificial Sequence
  ENSG00000135636_37 (sequence is synthesized)
actcggcggagagtccatccccacagggtggcccagacgatgtgagcctactcagtcctggggaagacgtgctcatcgacattgatgacaaggagcccctcatccccatccagcttgcag

SEQ ID NO: 320926 - DNA, 120 bp, Artificial Sequence
  ENSG00000135636_38 (sequence is synthesized)
acggtctgtcgagcttggcccccactaacacggcttctcctccatccagtcctcatgaggaagagttcatcgattggtggagcaaattctttgcctccataggggagagggaaaagtgcg

SEQ ID NO: 320927 - DNA, 120 bp, Artificial Sequence
  ENSG00000135636_39 (sequence is synthesized)
gctcctacctggagaaggattttgacaccctgaaggtctatgacacacagctggagaatgtggaggcctttgagggcctgtctgacttttgtaacaccttcaagctgtaccggggcaaga

SEQ ID NO: 320928 - DNA, 120 bp, Artificial Sequence
  ENSG00000135636_40 (sequence is synthesized)
cgcaggaggagacagaagatccatctgtgattggtgaatttaagggcctcttcaaaatttatcccctcccagaagacccagccatccccatgcccccaagacagttccaccagctggccg

SEQ ID NO: 320929 - DNA, 120 bp, Artificial Sequence
  ENSG00000135636_41 (sequence is synthesized)
cccagggaccccaggagtgcttggtccgtatctacattgtccgagcatttggcctgcagcccaaggaccccaatggaaagtgtgatccttacatcaagatctccatagggaagaaatcag

SEQ ID NO: 320930 - DNA, 120 bp, Artificial Sequence
  ENSG00000135636_42 (sequence is synthesized)
tgagtgaccaggataactacatcccctgcacgctggagcccgtatttggaaagatgttcgagctgacctgcactctgcctctggagaaggacctaaagatcactctctatgactatgacc

SEQ ID NO: 320931 - DNA, 120 bp, Artificial Sequence
  ENSG00000135636_43 (sequence is synthesized)
tcctctccaaggacgaaaagatcggtgagacggtcgtcgacctggagaacaggctgctgtccaagtttggggctcgctgtggactcccacagacctactgtgtctctggaccgaaccagt

SEQ ID NO: 320932 - DNA, 120 bp, Artificial Sequence
  ENSG00000135636_44 (sequence is synthesized)
ggcgggaccagctccgcccctcccagctcctccacctcttctgccagcagcatagagtcaaggcacctgtgtaccggacagaccgtgtaatgtttcaggataaagaatattccattgaag

SEQ ID NO: 320933 - DNA, 120 bp, Artificial Sequence
  ENSG00000135636_45 (sequence is synthesized)
agatagaggctggcaggatcccaaacccacacctgggcccagtggaggagcgtctggctctgcatgtgcttcagcagcagggcctggtcccggagcacgtggagtcacggcccctctaca

SEQ ID NO: 320934 - DNA, 120 bp, Artificial Sequence
  ENSG00000135636_46 (sequence is synthesized)
gccccctgcagccagacatcgagcaggggaagctgcagatgtgggtcgacctatttccgaaggccctggggcggcctggacctcccttcaacatcaccccacggagagccagaaggtttt

SEQ ID NO: 320935 - DNA, 120 bp, Artificial Sequence
  ENSG00000135636_47 (sequence is synthesized)
tcctgcgttgtattatctggaataccagagatgtgatcctggatgacctgagcctcacgggggagaagatgagcgacatttatgtgaaaggttggatgattggctttgaagaacacaagc

SEQ ID NO: 320936 - DNA, 120 bp, Artificial Sequence
  ENSG00000135636_48 (sequence is synthesized)
aaaagacagacgtgcattatcgttccctgggaggtgaaggcaacttcaactggaggttcattttccccttcgactacctgccagctgagcaagtctgtaccattgccaagaaggatgcct

SEQ ID NO: 320937 - DNA, 120 bp, Artificial Sequence
  ENSG00000135636_49 (sequence is synthesized)
tctggaggctggacaagactgagagcaaaatcccagcacgagtggtgttccagatctgggacaatgacaagttctcctttgatgattttctgggctccctgcagctcgatctcaaccgca

SEQ ID NO: 320938 - DNA, 120 bp, Artificial Sequence
  ENSG00000135636_50 (sequence is synthesized)
tgcccaagccagccaagacagccaagaagtgctccttggaccagctggatgatgctttccacccagaatggtttgtgtccctttttgagcagaaaacagtgaagggctggtggccctgtg

SEQ ID NO: 320939 - DNA, 120 bp, Artificial Sequence
  ENSG00000135636_51 (sequence is synthesized)
tagcagaagagggtgagaagaaaatactggcgggcaagctggaaatgaccttggagattgtagcagagagtgagcatgaggagcggcctgctggccagggccgggatgagcccaacatga

SEQ ID NO: 320940 - DNA, 120 bp, Artificial Sequence
  ENSG00000135636_52 (sequence is synthesized)
accctaagcttgaggacccaaggcgccccgacacctccttcctgtggtttacctccccatacaagaccatgaagttcatcctgtggcggcgtttccggtgggccatcatcctcttcatca

SEQ ID NO: 320941 - DNA, 120 bp, Artificial Sequence
  ENSG00000135636_53 (sequence is synthesized)
tcctcttcatcctgctgctgttcctggccatcttcatctacgccttcccgaactatgctgccatgaagctggtgaagcccttcagctgaggactctcctgccctgtagaaggggccgtgg

SEQ ID NO: 320942 - DNA, 120 bp, Artificial Sequence
  ENSG00000135636_54 (sequence is synthesized)
ggtcccctccagcatgggactggcctgcctcctccgcccagctcggcgagctcctccagacctcctaggcctgattgtcctgccagggtgggcagacagacagatggaccggcccacact

SEQ ID NO: 320943 - DNA, 120 bp, Artificial Sequence
  ENSG00000135636_55 (sequence is synthesized)
cccagagttgctaacatggagctctgagatcaccccacttccatcatttccttctcccccaacccaacgcttttttggatcagctcagacatatttcagtataaaacagttggaaccaca

SEQ ID NO: 320944 - DNA, 120 bp, Artificial Sequence
  ENSG00000135636_56 (sequence is synthesized)
gggtggaagatgagcagaagcccctgttctcggaacgccggctgacaagcggggtgagcgcagccggggcggggacccagcctagcccactggagcagccgggggtggcccgttcccctt

SEQ ID NO: 320945 - DNA, 120 bp, Artificial Sequence
  ENSG00000135636_57 (sequence is synthesized)
taagagcaactgctctaagccaggagccagagattcgagccggcctcgcccagccagccctctccagcgaggggacccacaagcggcgcctcggccctcccgacctttccgagccctctt

SEQ ID NO: 320946 - DNA, 120 bp, Artificial Sequence
  ENSG00000135636_58 (sequence is synthesized)
tgcgccctgggcgcacggggccctacacgcgccaagcatgctgagggtcttcatcctctatgccgagaacgtccacacacccgacaccgacatcagcgatgcctactgctccgcggtgtt

SEQ ID NO: 320947 - DNA, 120 bp, Artificial Sequence
  ENSG00000135636_59 (sequence is synthesized)
agatgataacccggaagggtctgagccaggaggcaggagaaccaggctggcgggcaggcacatggtcctctctgggactgagaggggctgaagtggatctgccaggatggaataggcagt

SEQ ID NO: 320948 - DNA, 120 bp, Artificial Sequence
  ENSG00000135636_60 (sequence is synthesized)
agactgaataggagtagggctgctctgggtgaagtgtctggaggaatgggcacagtgccagcctagcatcccttctaccctcaaggaatagaggctgcaaaccatggactgtctgatcac

SEQ ID NO: 320949 - DNA, 120 bp, Artificial Sequence
  ENSG00000135636_61 (sequence is synthesized)
gcacagatgcagacctgcatgcccacagacacatgcatgtgtgcacacagcatgcacagacacctgggactcactggaggtgctcacagatcacacccagcatacccaaagatcacaccc

SEQ ID NO: 320950 - DNA, 120 bp, Artificial Sequence
  ENSG00000135636_62 (sequence is synthesized)
ctagtgcgccttgatactaatagagaactttttccccttccaacccctctcaccatctcctggatgtgccacatcccatggctgtgggccaggtgcaggagacatcaaggatcctggatg

SEQ ID NO: 320951 - DNA, 120 bp, Artificial Sequence
  ENSG00000135636_63 (sequence is synthesized)
cagatggtccagacggtgaccagagcagtagggagccagtatgagttgttgacaagaagagtgctctggtcagagctaggctttaggaccatcagtcaagcagccatggaggatgcttgg

SEQ ID NO: 320952 - DNA, 120 bp, Artificial Sequence
  ENSG00000135636_64 (sequence is synthesized)
agactgtcctgagggatcactgaaactaggcgtgaagtcagcagccatgggcgggtgatggattgtaattcacctgtgacttgcctatgatacatggaagagaccaaagtggcaaagccc

SEQ ID NO: 320953 - DNA, 120 bp, Artificial Sequence
  ENSG00000135636_65 (sequence is synthesized)
cgagtcctgggacagcttggctggcagagagaaccagaaagggaggcggtggcttcagagggcagatcccacagacctgcagctggaggaccagagagttttggaaggtttagggcggcg

SEQ ID NO: 320954 - DNA, 120 bp, Artificial Sequence
  ENSG00000135637_0 (sequence is synthesized)
aagcctcccattacggagcacgagagagtccatgaaggtccccgcgactcccggactggagaaaacggctcttgcgatggggcgaagtccgagctgcggcgggcgttggtccgtgcaggg

SEQ ID NO: 320955 - DNA, 120 bp, Artificial Sequence
  ENSG00000135637_1 (sequence is synthesized)
aagtgggaatcgttaggttcgttctggacccgccgccccatggcccaggcgtctcgctcaggtagcctgcctccactcgttatcgtgcccccgctgagggcgcaacccgggggcactggg

SEQ ID NO: 320956 - DNA, 120 bp, Artificial Sequence
  ENSG00000135637_2 (sequence is synthesized)
gaggagcagtgggagagaagtcgaacgggcggtcttcgctgggaggttcactgctggccgagcggaacttctggagggacgccgtggtggccgacgccggcggatgtgagcgaggactac

SEQ ID NO: 320957 - DNA, 120 bp, Artificial Sequence
  ENSG00000135637_3 (sequence is synthesized)
gaggctgatgctgcggcctggaggcgggggcccgcaggtggcggcccgatccctcccgcgctgcagcgtctccgggcggtgttgctgcggctgcatcgcgagcgggagcagctcctccag

SEQ ID NO: 320958 - DNA, 120 bp, Artificial Sequence
  ENSG00000135637_4 (sequence is synthesized)
gcccgagactgcgcctaccacctacagtcggctgtgcgactcatgaagaccctgagtcctggctcgccatccggcggccctagccccttgccccagtggtgccgcgacctgcagctgcac

SEQ ID NO: 320959 - DNA, 120 bp, Artificial Sequence
  ENSG00000135637_5 (sequence is synthesized)
ccttcccaaggggcggttctgcgaatcggccctggggagactctcgagccgctgctgctagcgcgccccatcggactagccgcccagtgcctggaggctgtcatcgagatgcagcttcgc

SEQ ID NO: 320960 - DNA, 120 bp, Artificial Sequence
  ENSG00000135637_6 (sequence is synthesized)
gctctcggccgggagcccgccagcccgggcctgtcgtcccaactcgccgagctgctctttgcacttcccgcctaccacacactacagagaaaagccttgagccacgtcccaggggccgca

SEQ ID NO: 320961 - DNA, 120 bp, Artificial Sequence
  ENSG00000135637_7 (sequence is synthesized)
cgtcctttccccacgtcccgtgtgctccgcctcttgacgggggagcggggttgccaggtggcaagtcggctggacgaggcgctccaaggatcggcgttgagggaccagctccgcaggcgg

SEQ ID NO: 320962 - DNA, 120 bp, Artificial Sequence
  ENSG00000135637_8 (sequence is synthesized)
tgccaagaggagggggatctgctaccagggctgctgggcctggtcgggggcgtggcgggttcagccagctgtggactagggctcggaggggctggggccttgtggagccaatactggacc

SEQ ID NO: 320963 - DNA, 120 bp, Artificial Sequence
  ENSG00000135637_9 (sequence is synthesized)
ctgctgtgggcagcctgtgctcagagtctggacctaaatctgggaccctggagggaccccagggcaacagcgcaacagctgagtcaggcactgggtcaggcatccctgcctcaggagtgt

SEQ ID NO: 320964 - DNA, 120 bp, Artificial Sequence
  ENSG00000135637_10 (sequence is synthesized)
gagaaggagctggcatctttgtgtcacagactacttcatcagtcgcttatctggagctgggaccaaggtttctgccaggccttgggatcagctcttgggggtcagagcagccttcccaca

SEQ ID NO: 320965 - DNA, 120 bp, Artificial Sequence
  ENSG00000135637_11 (sequence is synthesized)
cggattttctgccagcctgcaggtctctgtacccttcagaccaccttgctctggttcctgggcagagctcagcagtacttggcagcatgggacccagcttccttcctgctcctgatccaa

SEQ ID NO: 320966 - DNA, 120 bp, Artificial Sequence
  ENSG00000135637_12 (sequence is synthesized)
aaggacttacctcctctgttgcatgaggcagaagctttgtatagcctggcctcagaggaaagcttagctctggaagtggagcagcagctgggcctggagatccagaagctgactgcacag

SEQ ID NO: 320967 - DNA, 120 bp, Artificial Sequence
  ENSG00000135637_13 (sequence is synthesized)
atccagctcctgcctgaagagtcactaagtgtcttttctcaagaatgtcataaacaagccatgcaaggtttcaagctctacatgccacggggtcggtactggcggcttcgtctctgtcct

SEQ ID NO: 320968 - DNA, 120 bp, Artificial Sequence
  ENSG00000135637_14 (sequence is synthesized)
gaacctcccagtgctcctagtgagtatgctggtttagtggtccgcaccgtactggagcctgtgttgcaaggattgcaagggttgccacctcaagcccaggcccctgcccttggtcaggct

SEQ ID NO: 320969 - DNA, 120 bp, Artificial Sequence
  ENSG00000135637_15 (sequence is synthesized)
ctgacggccatcgtgggtgcctggcttgaccacattcttacccatgggattcggttcagcctgcagggagcgctgcagctcaaacaagactttggagtggtcagggagttgctggaagag

SEQ ID NO: 320970 - DNA, 120 bp, Artificial Sequence
  ENSG00000135637_16 (sequence is synthesized)
gagcagtggagcctgtcccctgatctccgccagaccctgctcatgctcagcatcttccagcagctggatggggccctgctgtgtctgttgcagcagcccctgcccaagtctcaagtccac

SEQ ID NO: 320971 - DNA, 120 bp, Artificial Sequence
  ENSG00000135637_17 (sequence is synthesized)
aggaggcccccctgttgctgtgcttgtcaggaggtccagaccacgaaattgcccagcagctgcctcaatagcctggagagcttggagcccccgctccagcctggaacatctccagcccag

SEQ ID NO: 320972 - DNA, 120 bp, Artificial Sequence
  ENSG00000135637_18 (sequence is synthesized)
acaggtcagctgcaaagcacactaggaggaaggggacctagcccggagggctacctggtgggaaatcagcaggcctggcttgccctcaggcaacaccagcgaccccgttggcacctgccg

SEQ ID NO: 320973 - DNA, 120 bp, Artificial Sequence
  ENSG00000135637_19 (sequence is synthesized)
tttttttcctgcctgggaaccagtcctgaatcctaaggagcctgggaccaggagccagaaagttaagagctccccatctctagctggaaaatccagacatttggaattgcatattaagga

SEQ ID NO: 320974 - DNA, 120 bp, Artificial Sequence
  ENSG00000135637_20 (sequence is synthesized)
gcatattaaggaagcccagaactggaagcttggaggaaagcatactggagaataagctacaaagagcctgggcttaagaatccaagattaggggctgggcgaggtggctcacgcctgtaa

SEQ ID NO: 320975 - DNA, 120 bp, Artificial Sequence
  ENSG00000135637_21 (sequence is synthesized)
aaaaaaaaaaaaaaaaaaaatccaagatcactccagcacctggaatccagagtaaagagcaagaccatagcctggaacctgaaggtcagacccttgggaggttcaggcctagttctccat

SEQ ID NO: 320976 - DNA, 120 bp, Artificial Sequence
  ENSG00000135637_22 (sequence is synthesized)
gacccttgggaggttcaggcctagttctccatcactgaagatatctcagggataaagagttgagtgctcggccaggtgagggggctcacgcctgctcacgcctgtaatcccagcactttg

SEQ ID NO: 320977 - DNA, 120 bp, Artificial Sequence
  ENSG00000135637_23 (sequence is synthesized)
cttcaacttaagtcctgggagctacgctaattcatggagaaccacagaggtttaataggcatttctatacctggatcagccccaaggacagtattaccctgtactgcccttcctattact

SEQ ID NO: 320978 - DNA, 120 bp, Artificial Sequence
  ENSG00000135637_24 (sequence is synthesized)
attttcagtcatttactaatattgggctgtagtactttcacgtttaagctttggctattcagagctcactacgtttaatcttcagttacctgaatggtgtttaccttctggtgtggatca

SEQ ID NO: 320979 - DNA, 120 bp, Artificial Sequence
  ENSG00000135637_25 (sequence is synthesized)
tcccggcttgtgttagtgctctctctttggaagaagccaggatttaagatcgagttagcctagatgtggcccagcagggtacagaaggggaaaggctgcagaaaacgggcgtattttcgt

SEQ ID NO: 320980 - DNA, 120 bp, Artificial Sequence
  ENSG00000135637_26 (sequence is synthesized)
gcaaagaggtttttgcgccatttatttatggttttcaccgtcgtatgagaggactattcatgataggctgtatttgctgacagcctactttgggctcccccatgcgttgtgccgaaacca

SEQ ID NO: 320981 - DNA, 120 bp, Artificial Sequence
  ENSG00000135637_27 (sequence is synthesized)
gctgtgagttactccccttcgctcactgctttgtgtgtcccaaaccctattctcaccattaatctggcttcagtatatccccagcagccacctaccttccactcctgccttaccaggtgc

SEQ ID NO: 320982 - DNA, 120 bp, Artificial Sequence
  ENSG00000135637_28 (sequence is synthesized)
cttcgccgtaatcctctggaccgaattccttgcaaagtttgggtgcagcagcgacctccagtgggcagctgggccgtagagagcagtctacaggaaaggaaggcggagcctcgtcagcgg

SEQ ID NO: 320983 - DNA, 120 bp, Artificial Sequence
  ENSG00000135637_29 (sequence is synthesized)
gctcgggacagatgggctagagtcctccccactctaccctcgactctccgccctctgcataaaatcctactcgaaacgttcagaccacaggtggacccaagaggggctgcctctgccctc

SEQ ID NO: 320984 - DNA, 120 bp, Artificial Sequence
  ENSG00000135637_30 (sequence is synthesized)
ctagacccccactggtcttgtcataccgctcacctagcttgatccgccccacagtctttggaatcggcgccatcgcatctacagtgacccggaaatgaaaggtttctgccaggccttggg

SEQ ID NO: 320985 - DNA, 120 bp, Artificial Sequence
  ENSG00000135637_31 (sequence is synthesized)
gagctgcggttcgcaggcctgctaagcagccggcggccggaagtctatcccgcagaagcgcagccattcacggcctcacgcaatgcgacacttccgcctgcacgagttcttccggggcgg

SEQ ID NO: 320986 - DNA, 120 bp, Artificial Sequence
  ENSG00000135637_32 (sequence is synthesized)
aggtcaccatggcagctgccttggctcggcttggtctgcggcctgtcaaacaggttcgggttcagttctgtcccttcgagaaaaacgtggaatcgacgaggaccttcctgcagacggtga

SEQ ID NO: 320987 - DNA, 120 bp, Artificial Sequence
  ENSG00000135637_33 (sequence is synthesized)
gcagtgagaaggtccgctccactaatctcaactgctcagtgattgcggacgtgaggcatgacggctccgagccctgcgtggacgtgctgttcggagacgggcatcgcctgattatgcgcg

SEQ ID NO: 320988 - DNA, 120 bp, Artificial Sequence
  ENSG00000135637_34 (sequence is synthesized)
gcgctcatctcaccgctctggaaatgctcaccgccttcgcctcccacatccgggccagggacgcggcgggcagcggggacaagccgggcgctgatactggtcgctgacagcgccaaagag

SEQ ID NO: 320989 - DNA, 120 bp, Artificial Sequence
  ENSG00000135637_35 (sequence is synthesized)
accaacaagatgattttagcgtggactaggacacttaacctaagaagagtttcacttaatcattcaaatcactatctgaagggtcacggagcgcaaaataaagtttaaaaccctgctacc

SEQ ID NO: 320990 - DNA, 120 bp, Artificial Sequence
  ENSG00000135637_36 (sequence is synthesized)
aagggggtaatagtgtctcagcccttccaaattccggttcccctccactgtctccatccttgtcctcagcttctgtacccttccctcctgaaatcctaccctcttctcccaaacactcca

SEQ ID NO: 320991 - DNA, 120 bp, Artificial Sequence
  ENSG00000135637_37 (sequence is synthesized)
tttaggggttcaatggatctccacagccttatattctgtcttctctattccagaacctcccagtgctcctagtgagtatgctggtttagtggtccgcaccgtactggagcctgtgttgca

SEQ ID NO: 320992 - DNA, 120 bp, Artificial Sequence
  ENSG00000135637_38 (sequence is synthesized)
cagactatagcttctgagctttcaaggcaaagtcttgctttccaccccagtcccgagtcttggaggaagcatgccttcttgcctcatcattgagtgggcaggggttgtggaaagtgagac

SEQ ID NO: 320993 - DNA, 120 bp, Artificial Sequence
  ENSG00000135638_0 (sequence is synthesized)
aactcgcgcctcgcagcgctgggcggccggggctgggcagggcagtgcggggacaccgggggctggggtcggtcccagcgggactccgaaaggagggagacgagctcaaccctcgggcct

SEQ ID NO: 320994 - DNA, 120 bp, Artificial Sequence
  ENSG00000135638_1 (sequence is synthesized)
ctcaaccctcgggccttactggcagctcgcagcctagcacggagcccgcgcctgtgcgggcgcctggagctgcccgctccgccgcagcagccgccgcgcctggccgtacgctgtggccgg

SEQ ID NO: 320995 - DNA, 80 bp, Artificial Sequence
  ENSG00000135638_2 (sequence is synthesized)
ggggccgagcgcgagcgggcgggcgggggaggtgaggggtgcgggcgggtgtgcatgtgcctggctgggtgcacaccccg

SEQ ID NO: 320996 - DNA, 120 bp, Artificial Sequence
  ENSG00000135638_3 (sequence is synthesized)
caaggcggcggcgccaggacgcggagcgctccccagagcccggctgcctcgcacagctcccgcggctgcgaccatgttccagcccgcggccaagcgcggctttaccatagagtccttggt

SEQ ID NO: 320997 - DNA, 120 bp, Artificial Sequence
  ENSG00000135638_4 (sequence is synthesized)
tttaccatagagtccttggtggccaaggacggcggcaccggcgggggcactggcggcgggggcgcgggctcccatctcctggcggcggccgcctccgaggaaccgctccggcccacggcg

SEQ ID NO: 320998 - DNA, 120 bp, Artificial Sequence
  ENSG00000135638_5 (sequence is synthesized)
cgcggccgaggcggccttcgtgagtggcttccctgccgcggccgccgcgggcgcgggccgctcgctctacggtgggcccgagctcgtgttccccgaggccatgaaccaccccgcgctgac

SEQ ID NO: 320999 - DNA, 120 bp, Artificial Sequence
  ENSG00000135638_6 (sequence is synthesized)
cgtgcatccggcgcaccagctgggcgcctccccgctgcagcccccgcactccttcttcggcgcccagcaccgggaccctctccatttctacccctgggtcctgcggaaccgcttcttcgg

SEQ ID NO: 321000 - DNA, 120 bp, Artificial Sequence
  ENSG00000135638_7 (sequence is synthesized)
ccaccgcttccaggccagcgacgtgccccaggacgggctgcttctgcacggccccttcgcacgcaagcccaagcggatccgcacggccttctcgccctcgcagctgctgcggctggagcg

SEQ ID NO: 321001 - DNA, 120 bp, Artificial Sequence
  ENSG00000135638_8 (sequence is synthesized)
ggacaaagtacaaacggcagaagctggaggaggaagggcctgagtccgagcagaagaagaagggctcccatcacatcaaccggtggcgcattgccacgaagcaggccaatggggaggaca

SEQ ID NO: 321002 - DNA, 120 bp, Artificial Sequence
  ENSG00000135638_9 (sequence is synthesized)
tcgatgtcacctccaatgactagggtgggcaaccacaaacccacgagggcagagtgctgcttgctgctggccaggcccctgcgtgggcccaagctggactctggccactccctggccagg

SEQ ID NO: 321003 - DNA, 120 bp, Artificial Sequence
  ENSG00000135638_10 (sequence is synthesized)
ctttggggaggcctggagtcatggccccacagggcttgaagcccggggccgccattgacagagggacaagcaatgggctggctgaggcctgggaccacttggccttctcctcggagagcc

SEQ ID NO: 321004 - DNA, 120 bp, Artificial Sequence
  ENSG00000135638_11 (sequence is synthesized)
tgcctgcctgggcgggcccgcccgccaccgcagcctcccagctgctctccgtgtctccaatctcccttttgttttgatgcatttctgttttaatttattttccaggcaccactgtagttt

SEQ ID NO: 321005 - DNA, 120 bp, Artificial Sequence
  ENSG00000135638_12 (sequence is synthesized)
agtgatccccagtgtcccccttccctatgggaataataaaagtctctctcttaatgacacgggcatccagctccagccccagagcctggggtggtagattccggctctgagggccagtgg

SEQ ID NO: 321006 - DNA, 120 bp, Artificial Sequence
  ENSG00000135638_13 (sequence is synthesized)
gggctggtagagcaaacgcgttcagggcctgggagcctggggtggggtactggtggagggggtcaagggtaattcattaactcctctcttttgttgggggaccctggtctctacctccag

SEQ ID NO: 321007 - DNA, 120 bp, Artificial Sequence
  ENSG00000135638_14 (sequence is synthesized)
ctccacagcaggagaaacaggctagacatagggaagggccatcctgtatcttgagggaggacaggcccaggtctttcttaacgtattgagaggtgggaatcaggcccaggtagttcaatg

SEQ ID NO: 321008 - DNA, 120 bp, Artificial Sequence
  ENSG00000135638_15 (sequence is synthesized)
ggagagggagagtgcttccctctgcctagagactctggtggcttctccagttgaggagaaaccagaggaaaggggaggattggggtctgggggagggaacaccattcacaaaggctgacg

SEQ ID NO: 321009 - DNA, 120 bp, Artificial Sequence
  ENSG00000135638_16 (sequence is synthesized)
gttccagtccgaagtcgtgggcccaccaggatgctcacctgtccttggagaaccgctgggcaggttgagactgcagagacagggcttaaggctgagcctgcaaccagtccccagtgactc

SEQ ID NO: 321010 - DNA, 120 bp, Artificial Sequence
  ENSG00000135638_17 (sequence is synthesized)
attcagggatgaagcagggatgaagcttttcccaccagacagtacttggagtctccagtgtgtgtgttgggatagggggttgggggcttaccctagaggctgggtctctggaccgccaag

SEQ ID NO: 321011 - DNA, 120 bp, Artificial Sequence
  ENSG00000135638_18 (sequence is synthesized)
gcctgggggagagagaggtggagaaaggggaagaaggagcctgactttccacttccaggtgctgcctggaccactgacctagccactggcctatttataccccctgcaagacagagctag

SEQ ID NO: 321012 - DNA, 120 bp, Artificial Sequence
  ENSG00000135638_19 (sequence is synthesized)
gagttgcgcggcgcacggaccccgtggccttggggcgtcaggaggcccaacccagatctgcgcgcccaggcagcgctcaggccgctagaatggaccccggcagcggcgaggaagcggaac

SEQ ID NO: 321013 - DNA, 120 bp, Artificial Sequence
  ENSG00000135638_20 (sequence is synthesized)
tctctgcggctccctctccgcagtgcgccggcaaggtccaggtcccagcctccccaccgccgcccgcgccctcctaggcctcggagcggcgcctttctgcggcctcgaaggtggggtggg

SEQ ID NO: 321014 - DNA, 120 bp, Artificial Sequence
  ENSG00000135638_21 (sequence is synthesized)
aaagtttggggagtcccggctctcacagcctgtcgtgagaactgcccccggggaattcgtccgccgtacggaaaaactggccggagcagagtcgtccgcggttccgcggtcgcgggtgga

SEQ ID NO: 321015 - DNA, 120 bp, Artificial Sequence
  ENSG00000135638_22 (sequence is synthesized)
aggtgaaggtcgagggaggtcaggctgcttctgcgtgtcctgacggctggcgtgttctcttgagatgggctcgggctacttggccagcttcaatttaagccacagtgtctccgaggccct

SEQ ID NO: 321016 - DNA, 120 bp, Artificial Sequence
  ENSG00000135638_23 (sequence is synthesized)
gacctggtccggcccgccgacacttgagcccccagagcctcagagaaggcgagggggtggatctcccagtgccgaggcccgccgtcctggtccaagccggtcgcggcaccgtgtctgggc

SEQ ID NO: 321017 - DNA, 120 bp, Artificial Sequence
  ENSG00000135638_24 (sequence is synthesized)
actggagctgcttccagccccgcgaacagctggagggtggcagtgggaccgctccggcggcttctcccgcgcagtgccccgcctggccccttgtgaagggagtgagcgtcccctttccag

SEQ ID NO: 321018 - DNA, 120 bp, Artificial Sequence
  ENSG00000135638_25 (sequence is synthesized)
ctagcagcgggttctgtgcccccagggatagtctggctgtccaggcactgctcttgatataaacaccacctcctagttatgaaaccatgcccattctgcctctctgtatggaaaagagca

SEQ ID NO: 321019 - DNA, 120 bp, Artificial Sequence
  ENSG00000135638_26 (sequence is synthesized)
tggggctggcccgtggggtggtgtccactttaggccctgtgggagatcatgggaacccacgcagtgggtcataggctctctcatttactactcacatccactctgtgaagaagcgattat

SEQ ID NO: 321020 - DNA, 120 bp, Artificial Sequence
  ENSG00000135638_27 (sequence is synthesized)
gatctctcctctagaaactcgtagagtcccatgtctgccggcttccagagcctgcactcctccaccttggcttggctttgctggggctagaggagctaggatgcacagcagctctgtgac

SEQ ID NO: 321021 - DNA, 120 bp, Artificial Sequence
  ENSG00000135638_28 (sequence is synthesized)
cctttgtttgagaggaacaggaaaaccacccttctctctggcccactgtgtcctcttcctgccctgccatccccttctgtgaatgttagacccatgggagcagctggtcagaggggaccc

SEQ ID NO: 321022 - DNA, 120 bp, Artificial Sequence
  ENSG00000135638_29 (sequence is synthesized)
cggcctggggcccctaaccctatgtagcctcagtcttcccatcaggctctcagctcagcctgagtgttgaggccccagtggctgctctgggggcctcctgagtttctcatctgtgcccct

SEQ ID NO: 321023 - DNA, 120 bp, Artificial Sequence
  ENSG00000135638_30 (sequence is synthesized)
ctgacaagcaaatctgcattcctaagtctttcccttacgacatccagacccctctctttcttcttcacctcccatgtgctcatgaaacctctgctctttggcctccatgccaccattctg

SEQ ID NO: 321024 - DNA, 120 bp, Artificial Sequence
  ENSG00000135638_31 (sequence is synthesized)
ccggtgctaatgacagtcaccaaccacagtcactggccacccccttgtggccaaactcaaccacttcctgttgggttcacctgctccctgatctgttggctatgccctcctggattctcc

SEQ ID NO: 321025 - DNA, 120 bp, Artificial Sequence
  ENSG00000135638_32 (sequence is synthesized)
caccccgctctgccttcatttcggtagctctgactcctccttcagcctgagttcattcagtgtgatccatgccttgtcacctctggccacccccaggtcagtccttgctctccctgactc

SEQ ID NO: 321026 - DNA, 120 bp, Artificial Sequence
  ENSG00000135638_33 (sequence is synthesized)
ctcattatgtcctttgccttgtggggatcacatccacttccaggacttctctttggctccctggcctgtgtctttagctgacctctgctgagctgcagacccgtcaagccagctgcctgc

SEQ ID NO: 321027 - DNA, 120 bp, Artificial Sequence
  ENSG00000135638_34 (sequence is synthesized)
tccaccccctgcccctcagcacctcaaagcccatacatccacagccggacgcacctacccatctgtgcttctccaggatcacccacctcgacaaacagcattagacatgtacacagtttc

SEQ ID NO: 321028 - DNA, 120 bp, Artificial Sequence
  ENSG00000135638_35 (sequence is synthesized)
ccaagctacaggaaatctgggaatcttcctcaagcttcctctcctcttccccagccccatccattcccatctagtgggttgagtctagactggcttcccaaccacacctccctaatgcag

SEQ ID NO: 321029 - DNA, 120 bp, Artificial Sequence
  ENSG00000135638_36 (sequence is synthesized)
caccccctacccccctgcccagctccctctgccaccggcctggcctgggccctgctcctctagggaggtttctgtgaatgtcaaggatgaggtccacttcaaaggaggccctccatgttg

SEQ ID NO: 321030 - DNA, 120 bp, Artificial Sequence
  ENSG00000135638_37 (sequence is synthesized)
cagctaggtttctcttccttgcacccaaacagggcagactcacccccttctgagcccctttgccccatcttcttgccttgctcccggtaccctttgcttcagcatccccatccctgtccc

SEQ ID NO: 321031 - DNA, 120 bp, Artificial Sequence
  ENSG00000135638_38 (sequence is synthesized)
tgagtgagccacaggttttccctgtgctgtgccttcgctcatgctgttcttcccacctggaatgtcgggtgcttgatcaatgtggaactcactggaaagatgtcagagacccagccttgc

SEQ ID NO: 321032 - DNA, 120 bp, Artificial Sequence
  ENSG00000135638_39 (sequence is synthesized)
gcctctccgagacgcaggtccgacgtgttggagtggggctcagcgaccctcagcctagctgctgccctggaggtggatttcagtctctgcgtgccggccggctcccagagttgcgagagg

SEQ ID NO: 321033 - DNA, 120 bp, Artificial Sequence
  ENSG00000135638_40 (sequence is synthesized)
aggcattgtgaatgtgggtccacgcctcgtccggcctgccccatctcttggcttaacagagggatctggagagctgttattccccgcgttcccccgcggagtggctctcgagtgcgggga

SEQ ID NO: 321034 - DNA, 120 bp, Artificial Sequence
  ENSG00000135638_41 (sequence is synthesized)
ggtgttgcggaggggagtggacttagggaaggggcggcaaaagggcaaagggagaaatggcgtgtgtgtgcgtgtcaaggaatggagagggcagggcgcttgggagcagggcgcgaggcc

SEQ ID NO: 321035 - DNA, 120 bp, Artificial Sequence
  ENSG00000135643_0 (sequence is synthesized)
agacactcctagccttggggcagctgccgggcgagtcagcggagtagcggccagcgggcgatggagacagagagacacccgacgagaggaggcggggtgggggaggcggggagagtgcgg

SEQ ID NO: 321036 - DNA, 120 bp, Artificial Sequence
  ENSG00000135643_1 (sequence is synthesized)
gtgggggaggcggggagagtgcgggggcggaggctggcagggggcgctggaagctggagcggtccgtgcgctccccgcgcccgagggtgcaggaggctctgaagcggctgctgcaccgcg

SEQ ID NO: 321037 - DNA, 80 bp, Artificial Sequence
  ENSG00000135643_2 (sequence is synthesized)
cctcggcccctttgttctcgcgcgctccccctcgccgcccactcccctgctgtcgcgcggcggcggcggtggcggcggcg

SEQ ID NO: 321038 - DNA, 120 bp, Artificial Sequence
  ENSG00000135643_3 (sequence is synthesized)
gctcctcccgcccgaggcagtcgggctcggcgccgggggcgggagggggcggggggagcacgccagccgccgagagtggggggcgatggcgaagctccgggtggcttacgagtacacgga

SEQ ID NO: 321039 - DNA, 120 bp, Artificial Sequence
  ENSG00000135643_4 (sequence is synthesized)
agccgaggacaagagcatccggctcggcttgtttctcatcatctccggcgtcgtgtcgctcttcatcttcggcttctgctggctgagtcccgcgctgcaggatctgcaagccacggaggc

SEQ ID NO: 321040 - DNA, 120 bp, Artificial Sequence
  ENSG00000135643_5 (sequence is synthesized)
caattgcacggtgctgtcggtgcagcagatcggcgaggtgttcgagtgcaccttcacctgtggcgccgactgcaggggcacctcgcagtacccctgcgtccaggtctacgtgaacaactc

SEQ ID NO: 321041 - DNA, 120 bp, Artificial Sequence
  ENSG00000135643_6 (sequence is synthesized)
tgagtccaactctagggcgctgctgcacagcgacgagcaccagctcctgaccaaccccaagtgctcctatatccctccctgtaagagagaaaatcagaagaatttggaaagtgtcatgaa

SEQ ID NO: 321042 - DNA, 120 bp, Artificial Sequence
  ENSG00000135643_7 (sequence is synthesized)
ttggcaacagtactggaaagatgagattggttcccagccatttacttgctattttaatcaacatcaaagaccagatgatgtgcttctgcatcgcactcatgatgagattgtcctcctgca

SEQ ID NO: 321043 - DNA, 120 bp, Artificial Sequence
  ENSG00000135643_8 (sequence is synthesized)
ttgcttcctctggcccctggtgacatttgtggtgggcgttctcattgtggtcctgaccatctgtgccaagagcttggcggtcaaggcggaagccatgaagaagcgcaagttctcttaaag

SEQ ID NO: 321044 - DNA, 120 bp, Artificial Sequence
  ENSG00000135643_9 (sequence is synthesized)
gggaaggaggcttgtagaaagcaaagtacagaagctgtactcatcggcacgcgtccacctgcggaacctgtgtttcctggcgcaggagatggacagggccacgacagggctctgagaggc

SEQ ID NO: 321045 - DNA, 120 bp, Artificial Sequence
  ENSG00000135643_10 (sequence is synthesized)
tcatccctcagtggcaacagaaacaggcacaactggaagacttggaacctcaaagcttgtattccatctgctgtagcaatggctaaagggtcaagatcttagctgtatggagtaactatt

SEQ ID NO: 321046 - DNA, 120 bp, Artificial Sequence
  ENSG00000135643_11 (sequence is synthesized)
tcagaaaaccctataagaagttcattttctttcaaaagtaacagtatattatttgtacagtgtagtatacaaaccattatgatttatgctacttaaaaatattaaaatagagtggtctgt

SEQ ID NO: 321047 - DNA, 120 bp, Artificial Sequence
  ENSG00000135643_12 (sequence is synthesized)
gttattttctatttccttttttatgcttagaacaccagggtttaaaaaaaaaaaaaaggtgaggacatctgggtctcatttgcttctgctaggttaaacttttacttgacaacaaggatt

SEQ ID NO: 321048 - DNA, 120 bp, Artificial Sequence
  ENSG00000135643_13 (sequence is synthesized)
cctgctgaagtctgaaccttactgtgtaaccctcagtttccactattaaagagtatcttttgacgtctgcttggaaaatgaatagtatactggtaactcagtctccagtcacctctgtgt

SEQ ID NO: 321049 - DNA, 120 bp, Artificial Sequence
  ENSG00000135643_14 (sequence is synthesized)
ctcttaagcaagagattctaaaagattgggaaaacatatcctccaacacctgcctttgcctaaccattatttttcaccagattacttcttaagagagggaggtgattctgaagaaggctt

SEQ ID NO: 321050 - DNA, 120 bp, Artificial Sequence
  ENSG00000135643_15 (sequence is synthesized)
ctatctcaaaaagcactgggcttccttattcatctgttcttgttgtttttgacggagttaaaaaagtttgtgtgcaatacaatatacatgatgtgaaggacactcttcagcttagtgaaa

SEQ ID NO: 321051 - DNA, 120 bp, Artificial Sequence
  ENSG00000135643_16 (sequence is synthesized)
cgctgttttcatttttttttttttttgtaggtcagaaaaaaacaacaaaatcagttcaagcatttttttttctttgtccttgccttgatgttatgagtattaaaaccaggaggattgctg

SEQ ID NO: 321052 - DNA, 120 bp, Artificial Sequence
  ENSG00000135643_17 (sequence is synthesized)
ccattgtgcagtttgcttagacaaacctggagatgcaacccagctcacatcattgctactgatgagctttctgtgcctttatcaaaagttgattgagaagaccatatttctttgtatctt

SEQ ID NO: 321053 - DNA, 120 bp, Artificial Sequence
  ENSG00000135643_18 (sequence is synthesized)
tttataaactcaaattccaagtatcaaatcgcaggtctcagtgaacatcaaacctatttactacatagaatcaaacctttgtttaggtgagatgtacatcgttagtggaggaaaaactga

SEQ ID NO: 321054 - DNA, 120 bp, Artificial Sequence
  ENSG00000135643_19 (sequence is synthesized)
gacatgcctctattagaataaaggtaaactggaatttaaagacaagttcccctcagttatttccatggagctgtaatatgtatatatggagtgatggtttcctgacctttagtccacata

SEQ ID NO: 321055 - DNA, 120 bp, Artificial Sequence
  ENSG00000135643_20 (sequence is synthesized)
cacctcccaaagtgctgggattacaggccaatgttttcttaatcttagaatgtgaataactgaaaatcatagtctgtggaaaggtgttgaattgagtataatcttcttctgtttattttt

SEQ ID NO: 321056 - DNA, 120 bp, Artificial Sequence
  ENSG00000135643_21 (sequence is synthesized)
tgagtataatcttcttctgtttatttttgtgttttgttttttaacagatgggtatcttgctatgttgcccaggatggagtgcagtagctattcacaggtatgatcatagcacactgcagc

SEQ ID NO: 321057 - DNA, 120 bp, Artificial Sequence
  ENSG00000135643_22 (sequence is synthesized)
ctcaagctcctgggctcaagcgatccccctccctcagcctcccaagtatctggggttactggtgtgcaccaccgtgcttggctccaataattttttttctaattcaaaagttacagtttc

SEQ ID NO: 321058 - DNA, 120 bp, Artificial Sequence
  ENSG00000135643_23 (sequence is synthesized)
actgtgaaaaaggccttgaacacactatttatgacatcttttgaggcagctccagtgccttgacttcaatcccagtttccggttgcagcatccttgttgtcttagcaacacagtgaacta

SEQ ID NO: 321059 - DNA, 120 bp, Artificial Sequence
  ENSG00000135643_24 (sequence is synthesized)
ttctgaagcatagagtaacacgaaactgggagtccgagaaataatcatctctgcatcacattatgggagacgaagtctgctttatccattttatctttattcagttgtctatgattaatt

SEQ ID NO: 321060 - DNA, 120 bp, Artificial Sequence
  ENSG00000135643_25 (sequence is synthesized)
gattacagagtagtagattagaatagtgcatggatatacatttgtgttgaaaaaaggggaagttgatatatatcaatcttagttttcatttatcagtttgatattcatgcatttacacta

SEQ ID NO: 321061 - DNA, 120 bp, Artificial Sequence
  ENSG00000135643_26 (sequence is synthesized)
aacgcttccatttatcccgaaaaagtatatgcaactgtattctgtaggttgatttttggaaaaggggagaagcacactgaattcataaggtcacatgtagtcttaaggtcttacttgctt

SEQ ID NO: 321062 - DNA, 120 bp, Artificial Sequence
  ENSG00000135643_27 (sequence is synthesized)
acagccaattaaatttgaagcaccttatttatacttgttaaaggtaaaacccaaaagaacaagcagaggacattttaaggtcataaaaggtaaataagcttaccttcttaatgttttcat

SEQ ID NO: 321063 - DNA, 120 bp, Artificial Sequence
  ENSG00000135643_28 (sequence is synthesized)
tctctttttgtataaatcagaaaatgatctaaactgctgtaacaaagagaccccaaaatatgatggctcatgtaagataatttatttttttctcacatagcaatccagaagtggcttcat

SEQ ID NO: 321064 - DNA, 120 bp, Artificial Sequence
  ENSG00000135643_29 (sequence is synthesized)
ttcacaaggtattcaagggatataggagtcatctaccttgttagttctcttaatacccaagggtattgttctttccatggtcaaagctggctcaagacttcctagcctgtgaaaaaagaa

SEQ ID NO: 321065 - DNA, 120 bp, Artificial Sequence
  ENSG00000135643_30 (sequence is synthesized)
gaaggtggagcaagccatttcctttttaggaaattacagccatcacttctgcccaccgtccattcatgaatacttactatatagctatacctagcttcaagaaagcctgggacgtgtctc

SEQ ID NO: 321066 - DNA, 120 bp, Artificial Sequence
  ENSG00000135643_31 (sequence is synthesized)
taactagatggacatgtgccctactaaaactccagggaaagggttctattactaaagctaaaaagaggggaatgaatactagagttaaagacaaaaatgatagcagccaatggcccatgc

SEQ ID NO: 321067 - DNA, 120 bp, Artificial Sequence
  ENSG00000135643_32 (sequence is synthesized)
cgtgataatctgctgagcaggcatgatggagatcccttgcccagcagaaagtgttccttggtgaaatcatgaatctgctatctaggagaaactcccttgtccattgtcttctgtggccac

SEQ ID NO: 321068 - DNA, 120 bp, Artificial Sequence
  ENSG00000135643_33 (sequence is synthesized)
tagtttgacctctaggaaagtcttgctcgtcagcttctgtggccccgtctgaaacttttgagggacatcgcagcttttgcagcccctgcttgctggtgcagacttttagacctagattgc

SEQ ID NO: 321069 - DNA, 120 bp, Artificial Sequence
  ENSG00000135643_34 (sequence is synthesized)
cttagagactgaaaaatatacgcttttataggccggggttttagttcatttgactgtaataaagacgtcaatgccgtttttaatgtttgactgctgacatctttcaagactcacctttcc

SEQ ID NO: 321070 - DNA, 120 bp, Artificial Sequence
  ENSG00000135643_35 (sequence is synthesized)
cttctcccttatgctgcacatctgggcaagctgatggaagcatgggtgcctcctcctttggccccagcaggaagttcaaatcacgcaagccctggcatgcatgcaggaagcttcacccca

SEQ ID NO: 321071 - DNA, 120 bp, Artificial Sequence
  ENSG00000135643_36 (sequence is synthesized)
gcctcacactctaagacggataaaagccaaaccaattaagccgtttctcgaccctcctgggagcctgccctatctccctggaaagtctcagtatgtgagtaataaacctttttataccca

SEQ ID NO: 321072 - DNA, 120 bp, Artificial Sequence
  ENSG00000135655_0 (sequence is synthesized)
gtgggacgccattcccataatgctctggggcgtgccgccgccgtcgctgccacctcccctaccgctagtggaagaagatggcggaaggcggagcggcggatctggacacccagcggtctg

SEQ ID NO: 321073 - DNA, 120 bp, Artificial Sequence
  ENSG00000135655_1 (sequence is synthesized)
acatcgcgacgctgctcaaaacctcgctccggaaaggggacacctggtacctagtcgatagtcgctggttcaaacagtggaaaaaatatgttggctttgacagttgggacaaataccaga

SEQ ID NO: 321074 - DNA, 120 bp, Artificial Sequence
  ENSG00000135655_2 (sequence is synthesized)
tgggagatcaaaatgtgtatcctggacccattgataactctggacttctcaaagatggtgatgcccagtcacttaaggaacaccttattgatgaattggattacatactgttgccaactg

SEQ ID NO: 321075 - DNA, 120 bp, Artificial Sequence
  ENSG00000135655_3 (sequence is synthesized)
aaggttggaataaacttgtcagctggtacacattgatggaaggtcaagagccaatagcacgaaaggtggttgaacagggtatgtttgtaaagcactgcaaagtagaagtatatctcacag

SEQ ID NO: 321076 - DNA, 120 bp, Artificial Sequence
  ENSG00000135655_4 (sequence is synthesized)
aattgaagctatgtgaaaatggaaacatgaataatgttgtaactcgaagatttagcaaagctgacacaatagatacaattgaaaaggaaataagaaaaatcttcagtattccagatgaaa

SEQ ID NO: 321077 - DNA, 120 bp, Artificial Sequence
  ENSG00000135655_5 (sequence is synthesized)
aggagaccagattgtggaacaaatacatgagtaacacatttgaaccactgaataaaccagacagcaccattcaggatgctggtttataccaaggacaggtattagtgatagaacagaaaa

SEQ ID NO: 321078 - DNA, 120 bp, Artificial Sequence
  ENSG00000135655_6 (sequence is synthesized)
atgaagatggaacatggccaaggggtccttctactcctaatgtgaaaaactcaaattactgtcttccatcatataccgcttataagaactatgattattcggaacctggaagaaacaatg

SEQ ID NO: 321079 - DNA, 120 bp, Artificial Sequence
  ENSG00000135655_7 (sequence is synthesized)
aacagccaggcctctgtggcctaagtaacttgggaaatacgtgtttcatgaactcagctattcagtgtttgagcaacacacctccacttactgagtatttcctcaatgataagtatcaag

SEQ ID NO: 321080 - DNA, 120 bp, Artificial Sequence
  ENSG00000135655_8 (sequence is synthesized)
aagaactgaattttgacaatcccttaggaatgagaggtgaaatagctaaatcttatgccgaactgatcaagcaaatgtggtctggaaagtttagctacgtcaccccaagagcctttaaga

SEQ ID NO: 321081 - DNA, 120 bp, Artificial Sequence
  ENSG00000135655_9 (sequence is synthesized)
cacaggtaggacgttttgcacctcagttctctggatatcagcagcaagactgtcaagaactgttagctttcctattagatggattacatgaggatttgaatagaattaggaaaaaaccat

SEQ ID NO: 321082 - DNA, 120 bp, Artificial Sequence
  ENSG00000135655_10 (sequence is synthesized)
atatacaattaaaagatgcagatggaaggccagataaggtggttgccgaagaagcctgggaaaaccatttaaaacgaaatgattctatcatagtagatatatttcatggccttttcaaat

SEQ ID NO: 321083 - DNA, 120 bp, Artificial Sequence
  ENSG00000135655_11 (sequence is synthesized)
caactttagtttgtcctgagtgtgctaagatttcagtaacatttgatcctttttgttacttgacacttccattgcccatgaaaaaagaacgcaccttggaagtttacttagttagaatgg

SEQ ID NO: 321084 - DNA, 120 bp, Artificial Sequence
  ENSG00000135655_12 (sequence is synthesized)
atccacttaccaaacctatgcagtacaaagtggttgtccccaaaattggaaacatattagatctttgtacagcattgtctgctttgtcaggaatacctgcagataagatgatagttactg

SEQ ID NO: 321085 - DNA, 120 bp, Artificial Sequence
  ENSG00000135655_13 (sequence is synthesized)
atatatacaatcatagatttcacagaatattcgctatggatgaaaaccttagtagtattatggaacgggatgatatttatgtgtttgaaattaacatcaataggacagaagatacagagc

SEQ ID NO: 321086 - DNA, 120 bp, Artificial Sequence
  ENSG00000135655_14 (sequence is synthesized)
acgtgattattcctgtttgcctaagagaaaaattcagacactcgagttatacccaccatactggttcttcactttttggtcagccctttcttatggctgtaccacgaaacaatactgaag

SEQ ID NO: 321087 - DNA, 120 bp, Artificial Sequence
  ENSG00000135655_15 (sequence is synthesized)
acaaactttataatctcctgctcttgagaatgtgccgatatgtcaaaatatctactgaaactgaagaaactgaaggatccctacactgctgtaaggaccaaaatattaatgggaatggcc

SEQ ID NO: 321088 - DNA, 120 bp, Artificial Sequence
  ENSG00000135655_16 (sequence is synthesized)
caaatggcatacatgaagaaggctcaccaagtgaaatggaaacagatgagccagatgatgaatccagccaggatcaagaacttccctcagagaatgaaaacagtcagtctgaagattcag

SEQ ID NO: 321089 - DNA, 120 bp, Artificial Sequence
  ENSG00000135655_17 (sequence is synthesized)
ttggaggagataatgattctgaaaatggattatgtactgaggatacttgcaaaggtcaactcacgggacacaaaaaacgattgtttacattccagttcaacaacttaggcaatactgata

SEQ ID NO: 321090 - DNA, 120 bp, Artificial Sequence
  ENSG00000135655_18 (sequence is synthesized)
tcaactacatcaaagatgataccaggcatataagatttgatgataggcagcttaggctagatgaaagatcttttcttgctttggattgggatcctgatttgaaaaaaagatattttgatg

SEQ ID NO: 321091 - DNA, 120 bp, Artificial Sequence
  ENSG00000135655_19 (sequence is synthesized)
aaaatgctgctgaggactttgaaaaacatgaaagtgtggagtataaacctcctaaaaaaccctttgtgaaattaaaagattgcattgaactttttacaacaaaagaaaagctaggtgctg

SEQ ID NO: 321092 - DNA, 120 bp, Artificial Sequence
  ENSG00000135655_20 (sequence is synthesized)
aagatccctggtattgtccgaattgtaaagaacatcagcaagccacaaagaaattggatttatggtccctgcctccagtacttgtagtacatctcaagcgattttcttacagtcgataca

SEQ ID NO: 321093 - DNA, 120 bp, Artificial Sequence
  ENSG00000135655_21 (sequence is synthesized)
tgagagacaagttggataccttagttgattttcctatcaatgacttggatatgtcggaattcttaattaatccaaatgcaggtccttgccgctataatctgattgctgtttccaaccact

SEQ ID NO: 321094 - DNA, 120 bp, Artificial Sequence
  ENSG00000135655_22 (sequence is synthesized)
atggagggatgggaggaggacactatactgcttttgcaaaaaataaagatgatggaaaatggtactattttgatgacagtagtgtctccactgcatctgaagaccaaattgtgtccaaag

SEQ ID NO: 321095 - DNA, 120 bp, Artificial Sequence
  ENSG00000135655_23 (sequence is synthesized)
cagcatatgtactcttctaccagagacaagacactttcagtggaactggcttttttcctcttgaccgagaaactaaaggtgcttcagctgccactggcatcccattagaaagtgatgaag

SEQ ID NO: 321096 - DNA, 120 bp, Artificial Sequence
  ENSG00000135655_24 (sequence is synthesized)
atagcaatgataatgacaatgatatagaaaatgaaaactgtatgcacactaactaatgaaagtcctagaagccataaaagagacactttcctgctggtggtatctatggaaatgatgaag

SEQ ID NO: 321097 - DNA, 120 bp, Artificial Sequence
  ENSG00000135655_25 (sequence is synthesized)
ttacccaccacattaaaacaaaagtctgagatggggagtttcagataaccgaatgtaaatcctttatcagattttaacttgtgcagtacttgaagtgaaacacaatgaaaactttaacag

SEQ ID NO: 321098 - DNA, 120 bp, Artificial Sequence
  ENSG00000135655_26 (sequence is synthesized)
aaattgtctcttaatacatttacagtcttgtatttacaagctaaatatatataggaaatcacaaataaatcccttttaagtttgctgctgttttgattaattatgtttcctttaattttt

SEQ ID NO: 321099 - DNA, 120 bp, Artificial Sequence
  ENSG00000135655_27 (sequence is synthesized)
tggatgtgagttgatgacaaatgttaaatttgtggatgttggtcatttattttgctctaataatactgcaagaaaactatggctgaacttagtttttggataatctagttcatgtgcatt

SEQ ID NO: 321100 - DNA, 120 bp, Artificial Sequence
  ENSG00000135655_28 (sequence is synthesized)
aggctgccgtatatactactatgatatttagctgcagtatcaatgtggcataaatactgcggcagcattcttcgaaaaccgcattttcaaatttatccccgtaatcaatgtgggcctatt

SEQ ID NO: 321101 - DNA, 120 bp, Artificial Sequence
  ENSG00000135655_29 (sequence is synthesized)
aaaaaaccaaatcatgatacaagaaacaaccttggaaaagttatttccctttgtaatacctttaaaaatccagagtattatattcattttactgccactgtggaaacaggttctagattt

SEQ ID NO: 321102 - DNA, 120 bp, Artificial Sequence
  ENSG00000135655_30 (sequence is synthesized)
catactccatctaaagtcatttttcagttacatgtaagtattatttactgctattgggatctattcttcagatattcaaaaacattttttgctttaaaatgcatatctttaattgggtgt

SEQ ID NO: 321103 - DNA, 120 bp, Artificial Sequence
  ENSG00000135655_31 (sequence is synthesized)
tggtccaaaattaaaatttttgctgtctgtttttctctaccccattttgtggtaatttggcaacttgagctctcccaattattgtaatataaggacagacataatagtattctgtaccca

SEQ ID NO: 321104 - DNA, 120 bp, Artificial Sequence
  ENSG00000135655_32 (sequence is synthesized)
tagtaataattgcatcaagcttagatgagaaatttttttcatatactggcctttaaatcattaatggacaattggctataaaggtaggtctgttaactttctttgtgtgttcctgatgga

SEQ ID NO: 321105 - DNA, 120 bp, Artificial Sequence
  ENSG00000135655_33 (sequence is synthesized)
attcaccatagccttacagcttttctcagaaggtaacttgttataagagaaatggcatttgcatgttccagagtcagaacctgtacagtatataaagcataaacaccttgaatttgattt

SEQ ID NO: 321106 - DNA, 120 bp, Artificial Sequence
  ENSG00000135655_34 (sequence is synthesized)
tagttcaccacattcaaggatccaggatgccaaaaatatgtgtgaacatttgaaacatttttatttgctgctttttccctttgatatagttgaaagaatgtattgtaaattggcatacaa

SEQ ID NO: 321107 - DNA, 120 bp, Artificial Sequence
  ENSG00000135655_35 (sequence is synthesized)
tactgcctttaatagaaaacctaaatgctggggcacatttcacatatcgactacctgagaaattgctttgtgtcccactgttattaaagcaaaaagtataatgttcttcacttgaactaa

SEQ ID NO: 321108 - DNA, 120 bp, Artificial Sequence
  ENSG00000135655_36 (sequence is synthesized)
tcaaatacaatagattataaattgtgtattgtaaataaaagttcactctgtgagtgcacattttggtaaattatttatttatgttagcatttaaaagtttaaaaaaaatgcatttgacca

SEQ ID NO: 321109 - DNA, 120 bp, Artificial Sequence
  ENSG00000135655_37 (sequence is synthesized)
tttgaccaggataaatgaggtatgttgatcatggctttgctttatatcttgatattaaagctggtttatcatcctggtattttaaaagctgctttggggttttttttttctttttttttt

SEQ ID NO: 321110 - DNA, 120 bp, Artificial Sequence
  ENSG00000135655_38 (sequence is synthesized)
taaactaacctcctgcatgacagaggttaaaattttgtctgcacttgagttcacttgagtttacatttgaaatgtgcatgtttatttatatagatttcaataaagctattcaaggcctta

SEQ ID NO: 321111 - DNA, 120 bp, Artificial Sequence
  ENSG00000135655_39 (sequence is synthesized)
tttagtcttttatttcttactcttaatcttttaataaaaatcccctactttatggttagatgactatatgctagactttttagttataaatagttaatactagaaaggaaattatgtcag

SEQ ID NO: 321112 - DNA, 120 bp, Artificial Sequence
  ENSG00000135655_40 (sequence is synthesized)
agcaaaatgaatcctactattaaggacgttttaaagttgatttttgtccactttaatatttattcattaaacatatgtttgtgtaccaatcactgttgtagagtctggagatacagcagt

SEQ ID NO: 321113 - DNA, 120 bp, Artificial Sequence
  ENSG00000135655_41 (sequence is synthesized)
aaacaaatatccttaccttcacagagcttacattctttctgccatctaccaactaatgaactatatttccatttttctgaagatttaaagaaaagtcaaagctaaatcttttaaacctat

SEQ ID NO: 321114 - DNA, 120 bp, Artificial Sequence
  ENSG00000135655_42 (sequence is synthesized)
attgtggtctccatcctaattcttcagagaccactttctttttaatgcctgtcattaacttctgttcccactaaaagaagtgatgttaataatgccattgaaactgccaaactcaaatgt

SEQ ID NO: 321115 - DNA, 120 bp, Artificial Sequence
  ENSG00000135655_43 (sequence is synthesized)
aaactcaaatgtcatttttcagctgcaagaagtatactttaaaaatagtgcaaaaggataatacatattctaattaaaagtaggcattcagactgggcacggtggttcatgcctgtaatc

SEQ ID NO: 321116 - DNA, 120 bp, Artificial Sequence
  ENSG00000135655_44 (sequence is synthesized)
gagcccaggagtttgagaccagcctgagtaacatagtgagaacctcatctgtacaaatatatgtatttttttttaattagctgggtgtgcacacacctgtgttcccagctactggggagg

SEQ ID NO: 321117 - DNA, 120 bp, Artificial Sequence
  ENSG00000135655_45 (sequence is synthesized)
ctgtgttcccagctactggggaggctgaggtgagagaattgcttgagcccaggcagtcaaggccgcagttagccgaaatcacacccctgcactccagcctgtgcaacatagcaagactct

SEQ ID NO: 321118 - DNA, 120 bp, Artificial Sequence
  ENSG00000135655_46 (sequence is synthesized)
gtctcaaaaaaaaaaaagatattcataggtaatacagggtaatgggaatatatctagactagaatttctacttctagctttgccacttagcaatcatatgactttgaacttaatctttga

SEQ ID NO: 321119 - DNA, 120 bp, Artificial Sequence
  ENSG00000135655_47 (sequence is synthesized)
tagtgtttctttacctgtagaataatgatgataatagccagcatttattgagcacttactatggaccaggcactatattaaagtgtttatatgcattctctcatttaatcccacaacagc

SEQ ID NO: 321120 - DNA, 120 bp, Artificial Sequence
  ENSG00000135655_48 (sequence is synthesized)
tatgaggtagggatagttgtcatccccatttttcatatgaagaaaccaagatacaaagcatttaagtaatattcccaagctcacacaattgctatggggtagagccaatattctatcctc

SEQ ID NO: 321121 - DNA, 120 bp, Artificial Sequence
  ENSG00000135655_49 (sequence is synthesized)
agatatatactacctctcactgtgttatagtgtctgcctcataggattgttgagagctcaaatgagatcatgtattttatgggaagagctttgtaaactttattacacactcactgattt

SEQ ID NO: 321122 - DNA, 120 bp, Artificial Sequence
  ENSG00000135655_50 (sequence is synthesized)
cttcagtctaaatagaaagacatcttgaagtctaataactttgcttctaaaagtatatttagctcagtattcgagcattgaataagaaagtacccactggaatattgactaacccattcc

SEQ ID NO: 321123 - DNA, 120 bp, Artificial Sequence
  ENSG00000135655_51 (sequence is synthesized)
cttttaaaaattaatttcatttaatttatatacctttattacaattttaattaaatggtaaatacaatgtgacatttttttcttaccttttcatctaacttgtgtccccttctttccatt

SEQ ID NO: 321124 - DNA, 120 bp, Artificial Sequence
  ENSG00000135655_52 (sequence is synthesized)
catttccccaaatgcaaccctgaatttcaggactttgtaaactctactctagttttgctttctgtttgtttgtttgtttgtttagagacaaggtctccctctgtcgcccaggctggagtg

SEQ ID NO: 321125 - DNA, 120 bp, Artificial Sequence
  ENSG00000135655_53 (sequence is synthesized)
gacataatcatagttcactgtaaccttgaactcctgggttaaagtgatcctcctgcctcagccttataatttagttttaattaacctccttgaaaaagttgcagcctggtgctttattta

SEQ ID NO: 321126 - DNA, 120 bp, Artificial Sequence
  ENSG00000135655_54 (sequence is synthesized)
aatatcttgctttctcataatctgtgttattttagtagtcctgtatttatccttgctttcctgacaactggatataaaactacacaaaacattgatttgggcacaaagaaaatcagtaag

SEQ ID NO: 321127 - DNA, 120 bp, Artificial Sequence
  ENSG00000135655_55 (sequence is synthesized)
taccaaaatagatacaacataaaggtggtggggttttttatgaactaatttgattgaagtgagtttatcttataaaataagccgggagactgaaatggagtctccttcagtggtacacca

SEQ ID NO: 321128 - DNA, 120 bp, Artificial Sequence
  ENSG00000135655_56 (sequence is synthesized)
aagggagtgtagggtgtagtaggagctctctgcctccgagaggaggaatatattagactgataacgtttaagtctgatgtatggtgacaagaaaaaggccaattttttgttttgttattt

SEQ ID NO: 321129 - DNA, 120 bp, Artificial Sequence
  ENSG00000135655_57 (sequence is synthesized)
ttaagttacctacagataatgcatttcattattgcctacttccaactctccctatgtagtatgtttctgatcttctgtgcttgtgcagtgtagatgagctcaccgctttaatttttaaga

SEQ ID NO: 321130 - DNA, 120 bp, Artificial Sequence
  ENSG00000135655_58 (sequence is synthesized)
tagaaatgtggaaaactcttgaatcatagactaggggaaggaaccagaggtcctctaaaatatcagaggagtgagaaggaaaggaagagctcctttctagggccatagaataagagtaga

SEQ ID NO: 321131 - DNA, 120 bp, Artificial Sequence
  ENSG00000135655_59 (sequence is synthesized)
agtttttgctcattttttttgtttgtttttactttacaaaaaaataaaaaattttttgctctttgaataacttaacatgaggaatttggaaacaacctctcttgaaaatatattggtatt

SEQ ID NO: 321132 - DNA, 120 bp, Artificial Sequence
  ENSG00000135655_60 (sequence is synthesized)
cattcccaaataattcttctaagtaccacttgaccagaggatagggaaaggaggaaaaggtgagtgtatttatatccttgctagtttttgttatatattcagttgcagatctatattata

SEQ ID NO: 321133 - DNA, 120 bp, Artificial Sequence
  ENSG00000135655_61 (sequence is synthesized)
tatcattttattatcagattttctagtgagaaatatatatgatggttttttaataatcattttaggtttggaggccatttcaattcaatatgtatgtgttttacgtgtttaattcgtatt

SEQ ID NO: 321134 - DNA, 120 bp, Artificial Sequence
  ENSG00000135655_62 (sequence is synthesized)
aagctacatagaatacatcaaaattttataagctgcatagaataggctttaaaatatcagaattaggaaaataaaatatagatggtaaaaattcaaatatttatcaagacttttttcttc

SEQ ID NO: 321135 - DNA, 120 bp, Artificial Sequence
  ENSG00000135655_63 (sequence is synthesized)
actaatgatggggtaaagaatttttaaatggataatataaaacagacagttcaaaaattatttttggaaaatatatgcatcgggaaacataccccacacggtgccatggtttaattattc

SEQ ID NO: 321136 - DNA, 120 bp, Artificial Sequence
  ENSG00000135655_64 (sequence is synthesized)
cccagctctacttttgggagcctggaacttgtcagggttgtgaaatagatctcagactattaaggacattcagaaactggctaagccattcaaggaaaatcaggaatttacgtaatatat

SEQ ID NO: 321137 - DNA, 120 bp, Artificial Sequence
  ENSG00000135655_65 (sequence is synthesized)
tggactacagtctcaaaggacagagagaaaatcagtcaaatgggttttgatatttttttttcctagaaatgtgtagcaaatgtgattttacaaagcagctaaaaatacaactatctctct

SEQ ID NO: 321138 - DNA, 120 bp, Artificial Sequence
  ENSG00000135655_66 (sequence is synthesized)
ggaattgaaaatgtgtaaaataagaccacacactttcaatatgcacaaaatatattttaaatgtttaagttgtattggtaatttactatgttctcctgtagaaaatcataattaaagttg

SEQ ID NO: 321139 - DNA, 120 bp, Artificial Sequence
  ENSG00000135655_67 (sequence is synthesized)
gtgctcgtgttgctaaagttttttttctcatgtcaggaacttgcagcttgttctatatagtttggtgaaacaaacaaaacagtttttatctgctgtgacatttaagtttgttgttagctg

SEQ ID NO: 321140 - DNA, 120 bp, Artificial Sequence
  ENSG00000135655_68 (sequence is synthesized)
gagttaaatctacatacataaaagtaaaacaataaatatggaaacatcccaacagtctttcccacaatgtgtattattacattattctcagtaatgacacatacttaacatttcccaagc

SEQ ID NO: 321141 - DNA, 120 bp, Artificial Sequence
  ENSG00000135655_69 (sequence is synthesized)
tgttgttttaaaccttaaacatcaccacatttctaatttttatttaaaatctttcagaattcttagattttgtaacatatcaagcacaagtctctcattaaaatttttttttaatagtat

SEQ ID NO: 321142 - DNA, 120 bp, Artificial Sequence
  ENSG00000135655_70 (sequence is synthesized)
ttgcttttcttttaaactccataaaggagtattcgatgttaacagacgtaactctttaatgctcctctgttcatgattaagtatgctaagttttaagtaatttagactaatgtattaaag

SEQ ID NO: 321143 - DNA, 120 bp, Artificial Sequence
  ENSG00000135655_71 (sequence is synthesized)
tgttcacttatgtctagtcatatgcatacctactctcttctaaccttgagtcatttctattaaatacagcatttaatcttctttcaagtgagaaccatctttccattatatcaagtgggc

SEQ ID NO: 321144 - DNA, 120 bp, Artificial Sequence
  ENSG00000135655_72 (sequence is synthesized)
aatatttaaattgtctgataagttcatccaaattaatcccatcatgcctgtttaactcatttccccaaaaagaccgcgacctccagccagtcattcagttcttgaactccctaatagaag

SEQ ID NO: 321145 - DNA, 120 bp, Artificial Sequence
  ENSG00000135655_73 (sequence is synthesized)
caccaaggattatctatttgtaatcacattgtggtgaattatcagtctcccaagaattatgtaaagcaaataggaattattttagagttgcccttattttaaaaaacaaaaaaaaagtaa

SEQ ID NO: 321146 - DNA, 120 bp, Artificial Sequence
  ENSG00000135655_74 (sequence is synthesized)
agatgggaaaattacttatagtatttttttttaatttgagaaagaattcctgtaggtctcccttaaatagtgactttggtaaagctttttaatttctagaactcagagctatattcactt

SEQ ID NO: 321147 - DNA, 120 bp, Artificial Sequence
  ENSG00000135655_75 (sequence is synthesized)
ttgagctatgtacctattgtataagttgaagtaatactgcaaattcaaacagtaaacatcattaatcctagatatttgggtactacctacagtgagatatggtaggaaacattctacact

SEQ ID NO: 321148 - DNA, 120 bp, Artificial Sequence
  ENSG00000135655_76 (sequence is synthesized)
tacaacaacttccaccatagctagctccaaacaggtcattaacctctgaattactgttttcacaaccataaaattatgctggtctcttgaaagtattagtttatgggtgtggagaggaag

SEQ ID NO: 321149 - DNA, 120 bp, Artificial Sequence
  ENSG00000135655_77 (sequence is synthesized)
agaggaaggcttaaatttcatttttgaagctgtcgttaaaagtatatatttttagcaaaggaattaataactaatagcattgatgagtcaagttaatatttgtttttgtttttttttttt

SEQ ID NO: 321150 - DNA, 120 bp, Artificial Sequence
  ENSG00000135655_78 (sequence is synthesized)
tgggcctcactcctataaaagacttggaacagaagtcttagtatgatggtaaacttgaaaattaaaattttatcagggatattagaatccaattatatgagactgcatcctcaacaggca

SEQ ID NO: 321151 - DNA, 120 bp, Artificial Sequence
  ENSG00000135655_79 (sequence is synthesized)
ccttggttgcaacaccatgaaagaccttgatccagaggttctcagcaagccacacctgaattcctaacccacaaaaactgtgagataacagatgtttgtgtttttagctgctaagcttta

SEQ ID NO: 321152 - DNA, 120 bp, Artificial Sequence
  ENSG00000135655_80 (sequence is synthesized)
atttgtttatgcagaaataagggaaaaggaccctagagatccttgaggaatcccactttacagatgtagaagctgagggctagaaggagaaaagtcatgtacacaaagtctggagacaac

SEQ ID NO: 321153 - DNA, 120 bp, Artificial Sequence
  ENSG00000135655_81 (sequence is synthesized)
tcagatagtcactacatcctcttgctctttctcatttttactctttaactggctcctcactttttagatggatggcactgggctctggagcaaaccatctgttctgtatctgttaaggcc

SEQ ID NO: 321154 - DNA, 120 bp, Artificial Sequence
  ENSG00000135655_82 (sequence is synthesized)
tctagagcttcattcattccttcatcaaatattttttgagtgtccactatgtgccaggcactattctagattcaagatataaagtaatatacaaaaacaaaatccagttacaaatataat

SEQ ID NO: 321155 - DNA, 120 bp, Artificial Sequence
  ENSG00000135655_83 (sequence is synthesized)
ttttaaagctatttgtgagcataacttcgtaacacatttagaacctttgccttcagctgacatgaattatgttgtctttttgttttttggtccagtttcattagtcattaaagtcatttg

SEQ ID NO: 321156 - DNA, 120 bp, Artificial Sequence
  ENSG00000135655_84 (sequence is synthesized)
aattaaagacaataatccagactccagaggttatggcttttatgtgtttggatactgtcatagtctgctcaggctgccataacaaacacagactgggtggcttaaataacagaaatttat

SEQ ID NO: 321157 - DNA, 120 bp, Artificial Sequence
  ENSG00000135655_85 (sequence is synthesized)
attttcacagttctggaggctgggaatctgagatcagggtaccagtatactgggtttctggtgagggtgcctttcctggcttacagatggctgccttctcactgtgttcttgcatggtag

SEQ ID NO: 321158 - DNA, 120 bp, Artificial Sequence
  ENSG00000135655_86 (sequence is synthesized)
cagaggagggtcagagaggagagcaagctctgaggcatctcttttttataagggcactaatcccgtcatgaagccctcaccctcatgacctcatctaaacctaattatctcctaaagact

SEQ ID NO: 321159 - DNA, 120 bp, Artificial Sequence
  ENSG00000135655_87 (sequence is synthesized)
tcctctccaaatactatttaaggcttcaacctgaatttggaggtgacacagttgagcccatagcagatatatttagtaacaactgtgggtacaggcatgcctcagatattgcaggttcgg

SEQ ID NO: 321160 - DNA, 120 bp, Artificial Sequence
  ENSG00000135655_88 (sequence is synthesized)
attttttggtttcccagtgcatataaaaggcatatttaccctatactgtagtctattaactgcaataacattgtgcctaaaaaagatgtacatgccttaattttcaaactattgccaaaa

SEQ ID NO: 321161 - DNA, 120 bp, Artificial Sequence
  ENSG00000135655_89 (sequence is synthesized)
aaaagatgtacatgccttaattttcaaactattgccaaaaaatgctaaataaccatcagagccttcagcaagtagtaatgtttttgctgatggacagtcttgcctcattttgatagatac

SEQ ID NO: 321162 - DNA, 120 bp, Artificial Sequence
  ENSG00000135655_90 (sequence is synthesized)
tcaccaggatggtggttgctgaaggttagggtggccgtggcaattttttacaataagacagtagtgaagtttgcttcatcaattgactcttccttttacaagagatttctctggcatgca

SEQ ID NO: 321163 - DNA, 120 bp, Artificial Sequence
  ENSG00000135655_91 (sequence is synthesized)
gtgctatttgataatatttgatacccacagtagaacttctttccgaacttctttcacaattggagttaatcttctaaagccccgccactgcttcatcaactaagtttatggaatattcta

SEQ ID NO: 321164 - DNA, 120 bp, Artificial Sequence
  ENSG00000135655_92 (sequence is synthesized)
acaatgttcacagcatcttcaccaggagaagactttccccccttcttttcacagatgttgagattgtcaagaaactactttccttgcccacccataagaagcaacttatcatctgttcaa

SEQ ID NO: 321165 - DNA, 120 bp, Artificial Sequence
  ENSG00000135655_93 (sequence is synthesized)
gcaacttatcatctgttcaagttttatcataagattgcagcaatccagacacatcttcaggctccacttgtagttctcttgctattttcaccgcatctgcagttactgccgccactgagg

SEQ ID NO: 321166 - DNA, 120 bp, Artificial Sequence
  ENSG00000135655_94 (sequence is synthesized)
ttttgaacttctcaaagtcatgaaagttgtaattaacttctttcaaactcttgttaatgttgatattttgactcccatgaatcacaaatattctgaatgaatggcatccagaatagcaaa

SEQ ID NO: 321167 - DNA, 120 bp, Artificial Sequence
  ENSG00000135655_95 (sequence is synthesized)
tccttttcagaaggtttttattttgcccagatccatcagaggaatcactatctatgaaagcttttgccttataaaatgtatttcttggatgataagacttgaaagctgaagttattcttt

SEQ ID NO: 321168 - DNA, 120 bp, Artificial Sequence
  ENSG00000135655_96 (sequence is synthesized)
cagaatggatgttgtgttagcaggcagaaaaacactaatctcatacatctccatagagctcttgggtgaccaggtgcacttgtcaatgagcagtaatattttgaaaggaatctttttctg

SEQ ID NO: 321169 - DNA, 120 bp, Artificial Sequence
  ENSG00000135655_97 (sequence is synthesized)
aatctttttctgagcaatagatctccgcagtgggcttaaaatatttagtaaaccttcctataaacggatgtgctaccatccaggctttatggttccttttatagagcaaaaacattatat

SEQ ID NO: 321170 - DNA, 120 bp, Artificial Sequence
  ENSG00000135655_98 (sequence is synthesized)
ttagtttaattttaaggaccctaggatttttggaatgataaatgaacattagttagcattgcattggcccctaacaagaaatcagtctctcgtttgaagccaagcatcaacttttctcta

SEQ ID NO: 321171 - DNA, 120 bp, Artificial Sequence
  ENSG00000135655_99 (sequence is synthesized)
caagcatcaacttttctctagctatgaaagtcctggatgacatcttccaacataagactttcatctacattgaaagtttgtttttagtgtaactaccttcatcaatgatcttagctagat

SEQ ID NO: 321172 - DNA, 120 bp, Artificial Sequence
  ENSG00000135655_100 (sequence is synthesized)
gtttctactttagcagttgctgcttcaccttatgcttgtctgttgtggagacagcttgtttccttaaactccatgaatcaaccactgctagcttcagacttttcttctgcagcttcctta

SEQ ID NO: 321173 - DNA, 120 bp, Artificial Sequence
  ENSG00000135655_101 (sequence is synthesized)
ccttagcctccatagaattgaagagagagggccttgctctgcgttaggctttggcttaagatagtgttgtggctgatttgatctattaaaaaaaaaaaaactcaggctttctctatacca

SEQ ID NO: 321174 - DNA, 120 bp, Artificial Sequence
  ENSG00000135655_102 (sequence is synthesized)
cttttcttatgattcatgtgttcacttgagtagcacttttaatttcaggaactcttcctttggatatacaacttggctgtttggctcaagaggcctagctttcagcttgccttggctttc

SEQ ID NO: 321175 - DNA, 120 bp, Artificial Sequence
  ENSG00000135655_103 (sequence is synthesized)
aacatgctttcctcactaagctccaatcatttatagcatttgattgagagagagagagagatgtacagctcttcacctgaacatttagaggccattggatggttattaactggcctggtt

SEQ ID NO: 321176 - DNA, 120 bp, Artificial Sequence
  ENSG00000135655_104 (sequence is synthesized)
ttaatagtgttatgtctcagggaatagggaggcacatggagagggagagagatggggaatggccagtggagcagttggaacacacacgtctgtgccctcaaacaaaacagtaacatcaaa

SEQ ID NO: 321177 - DNA, 120 bp, Artificial Sequence
  ENSG00000135655_105 (sequence is synthesized)
gattactgatcacagatcaccgtaacagatacaataataatgaagacatttgaaatgtgagaagtaccaagatatgacacacacacagtaagcacattctgttaggaaaataacacctat

SEQ ID NO: 321178 - DNA, 120 bp, Artificial Sequence
  ENSG00000135655_106 (sequence is synthesized)
agatgtgctcaatgtaggcttgccacaagccttgtttgtaaaaaaacaaaaacaattatcttcaaagcatgataataaagtgaagcagaataaaacaaggtatgcctggtttttgttttg

SEQ ID NO: 321179 - DNA, 120 bp, Artificial Sequence
  ENSG00000135655_107 (sequence is synthesized)
agctgggtctacaggcatgtgccaccacaccacacctggctaatttttgtagagaccaggtttcaccatgttacccaggctggttttgaagtcttgaactcaggcgatccatccacctcg

SEQ ID NO: 321180 - DNA, 120 bp, Artificial Sequence
  ENSG00000135655_108 (sequence is synthesized)
ggattacaggcatgaaccacagcacctggccatgtattttcatttaaccagtactaaataactacatgtctttggcagcctataatgtagcatcccatttttaaaaatagaagtgtgtat

SEQ ID NO: 321181 - DNA, 120 bp, Artificial Sequence
  ENSG00000135655_109 (sequence is synthesized)
aaatagaagtgtgtattcagggtgcactcaataggattacatctggctggcagtcccttcctacttcagtccattatcctgctaccagaatgatcttcatggtttcatttaaaaaaaaaa

SEQ ID NO: 321182 - DNA, 120 bp, Artificial Sequence
  ENSG00000135655_110 (sequence is synthesized)
aaaatgagatcctgtttctgtcttaaagttctcttctaattccttgtattaatcaggattctccagagaaacaagaccaataggatgcatatgtgtatacacatatatgtatagctctct

SEQ ID NO: 321183 - DNA, 120 bp, Artificial Sequence
  ENSG00000135655_111 (sequence is synthesized)
ccctcatatatacacatatcatgtatatacatatatatcatatatgtacatatatatatatatatatgagggagagaaagatttataaggaattagttcatgcacttaggctgagaagtc

SEQ ID NO: 321184 - DNA, 120 bp, Artificial Sequence
  ENSG00000135655_112 (sequence is synthesized)
tcatgatcttcagtcagcaggctggagacccaggaatgccaatggtgtagttcaagtccgagtccaaagggttgagaaccaggaaaaccaatgataaaagttccagtccacaagctacct

SEQ ID NO: 321185 - DNA, 120 bp, Artificial Sequence
  ENSG00000135655_113 (sequence is synthesized)
ggctaaagacccaggaagactgaatgtttcagttttagtgcaaaggcaggaaaagactgatgtcccagttcaatcaggcaagagaaattatccttacttgagccttttttgttctattca

SEQ ID NO: 321186 - DNA, 120 bp, Artificial Sequence
  ENSG00000135655_114 (sequence is synthesized)
ggccttcaattcatgagagccaccaacattagagagggcaatctgccttactcagtctactgacttaaatgttaatctcatccaaaaacaccctcatagatatgcccagaataatgtttg

SEQ ID NO: 321187 - DNA, 120 bp, Artificial Sequence
  ENSG00000135655_115 (sequence is synthesized)
accacatatctgggcaccctgtggcccagtcaacacattaaataaaccatcacatcccttcatgtagaaaagagtggtttggaccataggctcaggagttaaaccacctctgagcctacc

SEQ ID NO: 321188 - DNA, 120 bp, Artificial Sequence
  ENSG00000135655_116 (sequence is synthesized)
acttttgtgcaactcacctcacctctctgcctttcacctctctgtaaactagagcagctcccgaatgtccatctaggaaggcttggggtgagcaacctgattagaagggaacaatgtgac

SEQ ID NO: 321189 - DNA, 120 bp, Artificial Sequence
  ENSG00000135655_117 (sequence is synthesized)
ttaaaactgcatatttgcttagcaaacctatgacttttctcagaatatacagtttgcttgtgatggagggctattaatatttataaggaaaccaaatccccattcacttaagccatccac

SEQ ID NO: 321190 - DNA, 120 bp, Artificial Sequence
  ENSG00000135655_118 (sequence is synthesized)
tcctaccactgtaattgaatattacctacctttcagaataattgcaaggttttgtgtcttgatcattatgaaaaatgtggcaggtattattactaataaagaagtacccaactatgggaa

SEQ ID NO: 321191 - DNA, 120 bp, Artificial Sequence
  ENSG00000135655_119 (sequence is synthesized)
tgattgttccttccttatgaatgagagcagctctctgttcaatacgattcatactcaagttctaataaactttctttagcaagagagcaaagagtatggtacagtcagtccacccaggtt

SEQ ID NO: 321192 - DNA, 120 bp, Artificial Sequence
  ENSG00000135655_120 (sequence is synthesized)
gcctgttaacctggtgcttgaaggaaaaaaagtaagaatttgccctcatctaattcctcacttgccctcaaacatgtcatactacttgacaatggggctttcccacatttgtcccacatt

SEQ ID NO: 321193 - DNA, 120 bp, Artificial Sequence
  ENSG00000135655_121 (sequence is synthesized)
tgcatggtctgccttatctcttacctggcgaactcctacactccttcaagacttgctccaaaatgcacttgctagatcttctgacatcaactgccaccttgggctataagttacgtgtgt

SEQ ID NO: 321194 - DNA, 120 bp, Artificial Sequence
  ENSG00000135655_122 (sequence is synthesized)
ctcttcccccactagacaattacctgatggaagaatattgttcttaagatgttaagatggtgtatgtgtggcatagtatttgttcctaaatgtaaaagttattaaacaagttttctgaaa

SEQ ID NO: 321195 - DNA, 120 bp, Artificial Sequence
  ENSG00000135655_123 (sequence is synthesized)
ttctggagcacctgaacagaaagggagtggttcatattcagcattacaaaagacaactttctctttttgaaggggattactttggctattttccagtgtttgagcaacacacctccactt

SEQ ID NO: 321196 - DNA, 120 bp, Artificial Sequence
  ENSG00000135655_124 (sequence is synthesized)
ttagcgcaaataagttgataaagttttgcattacagattttacctaatgaactcattattctaataagttattaaaaattttattagttattattctgtatgacaagttttgtttttcat

SEQ ID NO: 321197 - DNA, 120 bp, Artificial Sequence
  ENSG00000135655_125 (sequence is synthesized)
tgacaagttttgtttttcatttatgatgtaataaggttttattgttgtttaaacccttaaatgaagaactgatttcttcatttaaagatttcattattaagtaatcattatttaatgatt

SEQ ID NO: 321198 - DNA, 120 bp, Artificial Sequence
  ENSG00000135655_126 (sequence is synthesized)
gtgtagactgacaaaatgtaaatgttgtgagtaagtcttaagatggactgttgaaaacattaataataatttttatggagttgaaaatgtgtatagaattaactacacaatagtgttagc

SEQ ID NO: 321199 - DNA, 120 bp, Artificial Sequence
  ENSG00000135655_127 (sequence is synthesized)
atgtaagttaagataatattctctactatgttccctggtgatccccagctcctcatatccatattcttgggcactcttcttccatgttgtactgaggttggtctgtgtggccaatagcat

SEQ ID NO: 321200 - DNA, 120 bp, Artificial Sequence
  ENSG00000135655_128 (sequence is synthesized)
atagcagtactcatggtacatcgctttcgagattaggttataaaaaaacaccgcggcttacatcttgggtgcacacgcactctagctgtctctctttctcatttctcactcggggaattc

SEQ ID NO: 321201 - DNA, 120 bp, Artificial Sequence
  ENSG00000135655_129 (sequence is synthesized)
attttaataataactgactataaatattatttttcttgattagttcacattttattattaattcaatgaattgtgaagtttcatcacttatcttagagaaaaagccagcaaaataaccgt

SEQ ID NO: 321202 - DNA, 120 bp, Artificial Sequence
  ENSG00000135655_130 (sequence is synthesized)
gtaagtatgtattattgattaatcctctatatatagagagaaaactctgtaaggtaagtagtaggaaatgaggataaaaagttaggatctagttattttagaaagtcatatcaggataca

SEQ ID NO: 321203 - DNA, 120 bp, Artificial Sequence
  ENSG00000135655_131 (sequence is synthesized)
gactttggcaacctgaccctgttttctgtgctgcactgtttttgataaaacaattagaaaacaatgaagaaactaaaagttgaagcaatgttttttggaacataaaaattttttaaactt

SEQ ID NO: 321204 - DNA, 120 bp, Artificial Sequence
  ENSG00000135655_132 (sequence is synthesized)
gaaaatgtagattttttttcatatcctttaacattttaaaattgtagtctagaaacattaagaataaccaatttcgtttttttagggaactaaaaagcaataagtaagggtgttgctgta

SEQ ID NO: 321205 - DNA, 120 bp, Artificial Sequence
  ENSG00000135655_133 (sequence is synthesized)
gtagaataccaaatattcaaggtaaatgagtgaaccttacacatgtatttgatcatttattgtaggaggggtgggaggctgagaagggaccaaaatctcttggcataattttgtatctgg

SEQ ID NO: 321206 - DNA, 120 bp, Artificial Sequence
  ENSG00000135655_134 (sequence is synthesized)
tgctattagatatttaattagaattatctttgtatatgctacttggatgataaccattttaaggatttatatatagacatttgatttccagctttgatacaatgtcttagagttaaatta

SEQ ID NO: 321207 - DNA, 120 bp, Artificial Sequence
  ENSG00000135655_135 (sequence is synthesized)
acaatatcatttttatttattccaacaactttagtacttggctttgtgtgaaagaaaacagaattccctatgtaatacccaacacaccatactcatgcaataaatattggtgaatacagg

SEQ ID NO: 321208 - DNA, 120 bp, Artificial Sequence
  ENSG00000135655_136 (sequence is synthesized)
attatgcagtgcatgactgtatacagatggtcctcaacttaatgatggagttacagcctgctaaactcattagaaattgaaaatattgtacctagtcgatagtcgctggttcaaacagtg

SEQ ID NO: 321209 - DNA, 120 bp, Artificial Sequence
  ENSG00000135655_137 (sequence is synthesized)
tccttctttaacagatttctgtctacatgtgattcctggaatggcacagtggcatcttgggactgggcttgaagtgtgaaggtgtgttaaccttgagtatattcttttactttagtcttt

SEQ ID NO: 321210 - DNA, 120 bp, Artificial Sequence
  ENSG00000135655_138 (sequence is synthesized)
atgcctgataaccaaaactgtattcatctggggtggaaaatggccttttttctacttacttttatccctaaagcccacaagctttgcattgtaatatttgaacattaaaaacaaaaaaaa

SEQ ID NO: 321211 - DNA, 120 bp, Artificial Sequence
  ENSG00000135655_139 (sequence is synthesized)
gccaatagcacgaaagtgtcaacactcaaagaatggacgaaaagaaagcaaggatataagcagaaaatacgatggaatcaaaatccaagagaaacagcagacaatagaaacagacccata

SEQ ID NO: 321212 - DNA, 120 bp, Artificial Sequence
  ENSG00000135655_140 (sequence is synthesized)
agaaacccaggtaattgagttagtagattttagaatagtgggcttattatgcttaaaaaaaaaaaaaaaggcagatgagaagtagggcaaaactattaaagaagaagcaaatagaattct

SEQ ID NO: 321213 - DNA, 120 bp, Artificial Sequence
  ENSG00000135655_141 (sequence is synthesized)
gcaatgcctgtgttccaataaagctttctttaaagccactagagcagagttgctagtgaacagtttaatttccacatacgtcacagaaagagagctaaagggctctggttatcatccaca

SEQ ID NO: 321214 - DNA, 120 bp, Artificial Sequence
  ENSG00000135655_142 (sequence is synthesized)
gactgaccagtcaacccctaaataacctgatattaactccacaaatgttagctagattggaccatgtgtaatctgagtcagaagtcggaatcagaagagataaatgatgcgttatcactc

SEQ ID NO: 321215 - DNA, 120 bp, Artificial Sequence
  ENSG00000135655_143 (sequence is synthesized)
accacatccatccttagctctctgatcaccttactatttaaggacagtccctctactctacctgtagtatttatctcaatgcttcctggtccttgctttttcttttattatctcctctct

SEQ ID NO: 321216 - DNA, 120 bp, Artificial Sequence
  ENSG00000135655_144 (sequence is synthesized)
cttttctaatgtcatcttccccctcagcctatgaatataaacacatcttcatctttaaaaccaaaaaccatatacttcctccatttaccatccttaagcttttttttctttgacagccac

SEQ ID NO: 321217 - DNA, 120 bp, Artificial Sequence
  ENSG00000135655_145 (sequence is synthesized)
ctacatttaaaaggctatacttaatgttgcttgccacccattcaggatttaacaaagttcttatttgtctttcttttaacctagtttatttgacctgtctttagtatttctttttgataa

SEQ ID NO: 321218 - DNA, 120 bp, Artificial Sequence
  ENSG00000135655_146 (sequence is synthesized)
ccatcttctaaagaaattctctgaatttgaatgcatgatacgaccttttatgccaaggactttgcctctctgaccagtcctttgtctgtctagctcggttcctctttagggttgccacat

SEQ ID NO: 321219 - DNA, 120 bp, Artificial Sequence
  ENSG00000135655_147 (sequence is synthesized)
ttagttttgcaaattgtgcacagctctaggaggcatcattcatatcatatgtagtctatgtgataggccctccttggcacggtgcagtgcagcttcactaactgtttgcagcagctctac

SEQ ID NO: 321220 - DNA, 120 bp, Artificial Sequence
  ENSG00000135655_148 (sequence is synthesized)
tcagaccttaaatgcattgacattcactaaatttctgtcagaagacctcttttatcataccatagtaggtgttcaaaattaggtgattctatgctaatcctctcccccagctcaaactga

SEQ ID NO: 321221 - DNA, 120 bp, Artificial Sequence
  ENSG00000135655_149 (sequence is synthesized)
cacaaaatatgccattctgtatttctagactagaccacttttctgaattccagatttttcataaatttcatgtaggactcaccacctcaaattaaaccaaatctttttacccctccttct

SEQ ID NO: 321222 - DNA, 120 bp, Artificial Sequence
  ENSG00000135655_150 (sequence is synthesized)
cccatcccctcaacctaaactgtcttcatttcctgtattgcctatttcaagtaccatccaagagccatcctgagttcctcctccagcctttcttctcttgtctagttagtcagcaagtct

SEQ ID NO: 321223 - DNA, 120 bp, Artificial Sequence
  ENSG00000135655_151 (sequence is synthesized)
tgcagattctgcctcctcacctgaagttttcaaacagtacccctttacattcttgaaaattattaaagatccaaagaacttctgttatatgggttatagctgttaatatttgtcatattc

SEQ ID NO: 321224 - DNA, 120 bp, Artificial Sequence
  ENSG00000135655_152 (sequence is synthesized)
attcgaaattgaaataagattttaaggtattttaaaataacagtacaaaaccattgtattttgacatgaataacacttttatgaaaataactatattccaaaacaataaaattaccaaaa

SEQ ID NO: 321225 - DNA, 120 bp, Artificial Sequence
  ENSG00000135677_0 (sequence is synthesized)
gtctgactccagccaccggccttcaaggcacggctttttattccttcggctggtcggcctctcgcccttcagctacctgtgcgtccctccgtcccgtcccgtcccggggtcaccccggag

SEQ ID NO: 321226 - DNA, 120 bp, Artificial Sequence
  ENSG00000135677_1 (sequence is synthesized)
cctgtccgctatgcggctcctgcctctagccccaggtcggctccggcggggcagcccccgccacctgccctcctgcagcccagcgctgctactgctggtgctgggcggctgcctgggggt

SEQ ID NO: 321227 - DNA, 120 bp, Artificial Sequence
  ENSG00000135677_2 (sequence is synthesized)
cttcggggtggctgcgggaacccggaggcccaacgtggtgctgctcctcacggacgaccaggacgaagtgctcggcggcatgacaccgctaaagaaaaccaaagctctcatcggagagat

SEQ ID NO: 321228 - DNA, 120 bp, Artificial Sequence
  ENSG00000135677_3 (sequence is synthesized)
ggggatgactttttccagtgcttatgtgccaagtgctctctgctgccccagcagagccagtatcctgacaggaaagtacccacataatcatcacgttgtgaacaacactctggaggggaa

SEQ ID NO: 321229 - DNA, 120 bp, Artificial Sequence
  ENSG00000135677_4 (sequence is synthesized)
ctgcagtagtaagtcctggcagaagatccaagaaccaaatactttcccagcaattctcagatcaatgtgtggttatcagaccttttttgcagggaaatatttaaatgagtacggagcccc

SEQ ID NO: 321230 - DNA, 120 bp, Artificial Sequence
  ENSG00000135677_5 (sequence is synthesized)
agatgcaggtggactagaacacgttcctctgggttggagttactggtatgccttggaaaagaattctaagtattataattacaccctgtctatcaatgggaaggcacggaagcatggtga

SEQ ID NO: 321231 - DNA, 120 bp, Artificial Sequence
  ENSG00000135677_6 (sequence is synthesized)
aaactatagtgtggactacctgacagatgttttggctaatgtctccttggactttctggactacaagtccaactttgagcccttcttcatgatgatcgccactccagcgcctcattcgcc

SEQ ID NO: 321232 - DNA, 120 bp, Artificial Sequence
  ENSG00000135677_7 (sequence is synthesized)
ttggacagctgcacctcagtaccagaaggctttccagaatgtctttgcaccaagaaacaagaacttcaacatccatggaacgaacaagcactggttaattaggcaagccaagactccaat

SEQ ID NO: 321233 - DNA, 120 bp, Artificial Sequence
  ENSG00000135677_8 (sequence is synthesized)
gactaattcttcaatacagtttttagataatgcatttaggaaaaggtggcaaactctcctctcagttgatgaccttgtggagaaactggtcaagaggctggagttcactggggagctcaa

SEQ ID NO: 321234 - DNA, 120 bp, Artificial Sequence
  ENSG00000135677_9 (sequence is synthesized)
caacacttacatcttctatacctcagacaatggctatcacacaggacagttttccttgccaatagacaagagacagctgtatgagtttgatatcaaagttccactgttggttcgaggacc

SEQ ID NO: 321235 - DNA, 120 bp, Artificial Sequence
  ENSG00000135677_10 (sequence is synthesized)
tgggatcaaaccaaatcagacaagcaagatgctggttgccaacattgacttgggtcctactattttggacattgctggctacgacctaaataagacacagatggatgggatgtccttatt

SEQ ID NO: 321236 - DNA, 120 bp, Artificial Sequence
  ENSG00000135677_11 (sequence is synthesized)
gcccattttgagaggtgccagtaacttgacctggcgatcagatgtcctggtggaataccaaggagaaggccgtaacgtcactgacccaacatgcccttccctgagtcctggcgtatctca

SEQ ID NO: 321237 - DNA, 120 bp, Artificial Sequence
  ENSG00000135677_12 (sequence is synthesized)
atgcttcccagactgtgtatgtgaagatgcttataacaatacctatgcctgtgtgaggacaatgtcagcattgtggaatttgcagtattgcgagtttgatgaccaggaggtgtttgtaga

SEQ ID NO: 321238 - DNA, 120 bp, Artificial Sequence
  ENSG00000135677_13 (sequence is synthesized)
agtctataatctgactgcagacccagaccagatcactaacattgctaaaaccatagacccagagcttttaggaaagatgaactatcggttaatgatgttacagtcctgttctgggccaac

SEQ ID NO: 321239 - DNA, 120 bp, Artificial Sequence
  ENSG00000135677_14 (sequence is synthesized)
ctgtcgcactccaggggtttttgaccccggatacaggtttgacccccgtctcatgttcagcaatcgcggcagtgtcaggactcgaagattttccaaacatcttctgtagcgacctcacac

SEQ ID NO: 321240 - DNA, 120 bp, Artificial Sequence
  ENSG00000135677_15 (sequence is synthesized)
agcctctgcagatggatccctgcacgcctctttctgatgaagtgattgtagtaggtgtctgtagctagtcttcaagaccacacctggaagagtttctgggctggctttaagtcctgtttg

SEQ ID NO: 321241 - DNA, 120 bp, Artificial Sequence
  ENSG00000135677_16 (sequence is synthesized)
aaaaagcaacccagtcagctgacttcctcgtgcaatgtgttaaactgtgaactctgcccatgtgtcaggagtggctgtctctggtctcttcctttagctgacaaggacactcctgaggtc

SEQ ID NO: 321242 - DNA, 120 bp, Artificial Sequence
  ENSG00000135677_17 (sequence is synthesized)
tttgttctcactgtattctttttatcctggggccacagttcttgattattcctcttgtggttaaagactgaatttgtaaacccattcagataaatggcagtactttaggacacacacaaa

SEQ ID NO: 321243 - DNA, 120 bp, Artificial Sequence
  ENSG00000135677_18 (sequence is synthesized)
cacacagacacaccttttgatatgtaagcttgacctaaagtcaaaggacctgtgtagcatttcagattgagcacttcactatcaaaaatactaacatcacatggcttgaagagtaaccat

SEQ ID NO: 321244 - DNA, 120 bp, Artificial Sequence
  ENSG00000135677_19 (sequence is synthesized)
cagagctgaatcatccaagtaagaacaagtaccattgttgattgataagtagagatacattttttatgatgttcatcacagtgtggtaaggttgcaaattcaaaacatgtcacccaagct

SEQ ID NO: 321245 - DNA, 120 bp, Artificial Sequence
  ENSG00000135677_20 (sequence is synthesized)
ctgttcatgtttttgtgaattctaggctggtgctgcactgaaatagagcagtaagcttgtgataaaggccaattccaggtagctcttgaaggtgatagccatctactttccagtggctgc

SEQ ID NO: 321246 - DNA, 120 bp, Artificial Sequence
  ENSG00000135677_21 (sequence is synthesized)
aaggtcccttctcttgagactcccctctgagatctgaaaaatgaagtggcttaggaacatcagcagtgaagaactgccaagagttggtgaaggttgtctcttccgagggccttctgaaga

SEQ ID NO: 321247 - DNA, 120 bp, Artificial Sequence
  ENSG00000135677_22 (sequence is synthesized)
cagggctcttgaacagacaagtggaagggctgtaccagggataaaggaaagaagtgcctgtccagcagggagcttgaatttaagttccatgtatgaagtcattggctctatctgcatttt

SEQ ID NO: 321248 - DNA, 120 bp, Artificial Sequence
  ENSG00000135677_23 (sequence is synthesized)
tctgtcattctcttcatttgttttaaggtggaaaattttcttacagttgatgcaaagtatcaactactttaccctaccttctccccttttagatgggttcttcctgagttttggagtctt

SEQ ID NO: 321249 - DNA, 120 bp, Artificial Sequence
  ENSG00000135677_24 (sequence is synthesized)
gtatgattatcagtattcccctgtcaaaatcaaatctattcaggtttcttcactgttgagaacacctaaatgtttttatttttgagaagtggggacagagtctcactatgtcacccaggc

SEQ ID NO: 321250 - DNA, 120 bp, Artificial Sequence
  ENSG00000135677_25 (sequence is synthesized)
ccacgcttggctaagaacacctaaatttttatgtttcttggctcaaaaaccagttccatttctaatgttgtcctcacaagaaggctaattggtggtgagacagcaggggaggaggaagag

SEQ ID NO: 321251 - DNA, 120 bp, Artificial Sequence
  ENSG00000135677_26 (sequence is synthesized)
ctgtggtttgtaacttgttcaactcaggcaataagcgattttagctttatttaaagtcttctgtccagctttaagcactttgtaagacatggctgaaagtagcttttctatcagaattgc

SEQ ID NO: 321252 - DNA, 120 bp, Artificial Sequence
  ENSG00000135677_27 (sequence is synthesized)
agatagtcatgttgggctaacagtcaattggatatattcctttacctcacatgaccccagcaactgtggtggtatctagaggtgaaacaggcaagtgaaatggacacctctgctgtgaat

SEQ ID NO: 321253 - DNA, 120 bp, Artificial Sequence
  ENSG00000135677_28 (sequence is synthesized)
gttttagagaaggaaattcaaaaaatgttgtaactgaaagcactgttgaatatgggtatcggctttctttttcactttgactcttaacattatcagtcaacttccacattaatgaaagtt

SEQ ID NO: 321254 - DNA, 120 bp, Artificial Sequence
  ENSG00000135677_29 (sequence is synthesized)
gaccatagttatttccaaataaaaagaaaccaactcttaccaggtcttggactgtgatgtcatattattcagttttatgcttgttcctgagcagaactcataagagtgacatagtcagct

SEQ ID NO: 321255 - DNA, 120 bp, Artificial Sequence
  ENSG00000135677_30 (sequence is synthesized)
gctgacggcacctcagccacgccactcttactcagttcagtgggtgtgcttgcgtggtaggatgtggtgcagccctctctacgctcttctatttttggtatatttcctatctaaccttca

SEQ ID NO: 321256 - DNA, 120 bp, Artificial Sequence
  ENSG00000135677_31 (sequence is synthesized)
aatagcttccaattctttttttcttggactggcttcattctgaatttgtgctaaaataatctttcataaagagacctcagtttatagcgtaacagactacacaatgcactgatgttttca

SEQ ID NO: 321257 - DNA, 120 bp, Artificial Sequence
  ENSG00000135677_32 (sequence is synthesized)
taatgtttaagggacccactgcaagaagcttgctgcctccttttaattgtattcatttagattttgattttccatgttaagaaggtgaggtccatgttggtgcccttcagagtagagaac

SEQ ID NO: 321258 - DNA, 120 bp, Artificial Sequence
  ENSG00000135677_33 (sequence is synthesized)
catgtaaacattaggaatgaacagaggccttaggaatgaatagagagtttgccttatacaatttcctgttacaaagctctccctctcatgcaaagtagggaacaccttttgagcatcttt

SEQ ID NO: 321259 - DNA, 120 bp, Artificial Sequence
  ENSG00000135677_34 (sequence is synthesized)
ctcatgcaaagtagggaacaccttttgagcatctttgaatttgacaaatggtgctgttgcaaacactttttttttgagatgaagtctcgcggttgtcacccgggctggagtgcagtggcg

SEQ ID NO: 321260 - DNA, 67 bp, Artificial Sequence
  ENSG00000135677_35 (sequence is synthesized)
tacaggcgcctgccaccccacctggctaactcctgacctcaggtgatccacctttctcggcctccca

SEQ ID NO: 321261 - DNA, 81 bp, Artificial Sequence
  ENSG00000135677_36 (sequence is synthesized)
tgcaaacacattttaattgacaacactagggctgttgtacaaaatagtaatgatagccatggaagttttaccttattctgt

SEQ ID NO: 321262 - DNA, 120 bp, Artificial Sequence
  ENSG00000135677_37 (sequence is synthesized)
aaatagtaatgatagccatggaagttttaccttattctgtgagaagtgttcttaaacttattaagtgtctaaactaaggtttagtgcttttttaaaggaaagttgtcccaggattcatcc

SEQ ID NO: 321263 - DNA, 120 bp, Artificial Sequence
  ENSG00000135677_38 (sequence is synthesized)
taaagaaagcaaaagttaattcaactgatccaccaatggaattagatgggtagagttgggttcttgagttttaccaccacttagttcccactgaattttgtaacttcctgtgtttgcatc

SEQ ID NO: 321264 - DNA, 120 bp, Artificial Sequence
  ENSG00000135677_39 (sequence is synthesized)
ctctgttcctattctgcccttgctctgtgtcatctcagtcatttgacttagaaagtgcccttcaaaaggaccctgttcactgctgcacttttcaatgaattaaaatttatttctgttcta

SEQ ID NO: 321265 - DNA, 120 bp, Artificial Sequence
  ENSG00000135677_40 (sequence is synthesized)
gctgaccatttgggaataaaagattgagtaagatgtaacaaaacaggaattctgggctgtgtgtctcaatttattggaagaaattgtttaatggataattacttacttttacagacaccg

SEQ ID NO: 321266 - DNA, 120 bp, Artificial Sequence
  ENSG00000135677_41 (sequence is synthesized)
tctcatgggcggggtggggggaagagaactttagtataggtagaaaaggaaaatgagaccagctgtgttctagattgtttttccctcattctcatagatgctggttgccaacattgactt

SEQ ID NO: 321267 - DNA, 120 bp, Artificial Sequence
  ENSG00000135677_42 (sequence is synthesized)
gcaagcattttgacttcctgcacttttatacaggatggagctggccggaaccaaacttgtctctagaatcatacaagactctctttggctgttgcttagagctgaccatttgggaataaa

SEQ ID NO: 321268 - DNA, 120 bp, Artificial Sequence
  ENSG00000135677_43 (sequence is synthesized)
taggctgtgtggggtaggctgtgtggactttttctgtagtgggtcagatagtaaacatttcaggccttgcaggccatatgtctctgttgctactattcagctctgccactgtagcgtgaa

SEQ ID NO: 321269 - DNA, 120 bp, Artificial Sequence
  ENSG00000135677_44 (sequence is synthesized)
agcagccacagacactgcactatgtaaatgaatgtggctgtgttccaataaaactctttatcgctgttaaaatttgaattttatgtaattgtcacatttcacaaaatattcttattttga

SEQ ID NO: 321270 - DNA, 120 bp, Artificial Sequence
  ENSG00000135677_45 (sequence is synthesized)
ttaacttttatattttaaaattgttaaattcttagcttgctgttcatacaaaagtcatcaggccagatttggctcactggctgtagtttgccaactcctgctttagaagttcctaggatt

SEQ ID NO: 321271 - DNA, 120 bp, Artificial Sequence
  ENSG00000135677_46 (sequence is synthesized)
attagcgtttatttttgactagtgtctatttggggaaattaggtacctactatgtttcaggcactggtctaaaaagattgtaaaatttcctgtttctttctggtctggtcatatctaagg

SEQ ID NO: 321272 - DNA, 120 bp, Artificial Sequence
  ENSG00000135677_47 (sequence is synthesized)
ggtgctggttgccatgtgtcaaatattgaaacctttcatctgagtcctgttcctttgtcactgactgtgagtggttagtagatggacaaaggtaaatccagtgatcttggaaatgatgct

SEQ ID NO: 321273 - DNA, 120 bp, Artificial Sequence
  ENSG00000135678_0 (sequence is synthesized)
ccctcatgtgttctcaggttcttcttatttttattcatctctagaacatggacttcccgtgcctctggctagggctgttgctgcctttggtagctgcgctggatttcaactaccaccgcc

SEQ ID NO: 321274 - DNA, 120 bp, Artificial Sequence
  ENSG00000135678_1 (sequence is synthesized)
aggaagggatggaagcgtttttgaagactgttgcccaaaactacagttctgtcactcacttacacagtattgggaaatctgtgaaaggtagaaacctgtgggttcttgttgtggggcggt

SEQ ID NO: 321275 - DNA, 120 bp, Artificial Sequence
  ENSG00000135678_2 (sequence is synthesized)
ttccaaaggaacacagaattgggattccagagttcaaatacgtggcaaatatgcatggagatgagactgttgggcgggagctgctgctccatctgattgactatctcgtaaccagtgatg

SEQ ID NO: 321276 - DNA, 120 bp, Artificial Sequence
  ENSG00000135678_3 (sequence is synthesized)
gcaaagaccctgaaatcacaaatctgatcaatagtacccggatacacatcatgccttccatgaacccagatggatttgaagccgtcaaaaagcctgactgttattacagcatcggaaggg

SEQ ID NO: 321277 - DNA, 120 bp, Artificial Sequence
  ENSG00000135678_4 (sequence is synthesized)
aaaattataaccagtatgacttgaatcgaaatttccccgatgcttttgaatataataatgtctcaaggcagcctgaaactgtggcagtcatgaagtggctgaaaacagagacgtttgtcc

SEQ ID NO: 321278 - DNA, 120 bp, Artificial Sequence
  ENSG00000135678_5 (sequence is synthesized)
tctctgcaaacctccatggtggtgccctcgtggccagttacccatttgataatggtgttcaagcaactggggcattatactcccgaagcttaacgcctgatgatgatgtttttcaatatc

SEQ ID NO: 321279 - DNA, 120 bp, Artificial Sequence
  ENSG00000135678_6 (sequence is synthesized)
ttgcacatacctatgcttcaagaaatcccaacatgaagaaaggagacgagtgtaaaaacaaaatgaactttcctaatggtgttacaaatggatactcttggtatccactccaaggtggaa

SEQ ID NO: 321280 - DNA, 120 bp, Artificial Sequence
  ENSG00000135678_7 (sequence is synthesized)
tgcaagattacaactacatctgggcccagtgttttgaaattacgttggagctgtcatgctgtaaatatcctcgtgaggagaagcttccatccttttggaataataacaaagcctcattaa

SEQ ID NO: 321281 - DNA, 120 bp, Artificial Sequence
  ENSG00000135678_8 (sequence is synthesized)
ttgaatatataaagcaggtgcacctaggtgtaaagggtcaagtttttgatcagaatggaaatccattacccaatgtaattgtggaagtccaagacagaaaacatatctgcccctatagaa

SEQ ID NO: 321282 - DNA, 120 bp, Artificial Sequence
  ENSG00000135678_9 (sequence is synthesized)
ccaacaaatatggagagtattatctccttctcttgcctgggtcttatataataaatgttacagtccctggacatgatccacacatcacaaaggtgattattccggagaaatcccagaact

SEQ ID NO: 321283 - DNA, 120 bp, Artificial Sequence
  ENSG00000135678_10 (sequence is synthesized)
tcagtgctcttaaaaaggatattctacttccattccaagggcaattggattctatcccagtatcaaatccttcatgcccaatgattcctctatacagaaatttgccagaccactcagctg

SEQ ID NO: 321284 - DNA, 120 bp, Artificial Sequence
  ENSG00000135678_11 (sequence is synthesized)
caacaaagcctagtttgttcttatttttagtgagtcttttgcacatattcttcaaataaagtaaaatgtgaaactcaacccacatcaccacctggaatcagggattgctcactccaggtt

SEQ ID NO: 321285 - DNA, 120 bp, Artificial Sequence
  ENSG00000135678_12 (sequence is synthesized)
actgcaaccctaactcactctagtgggaccttgactggagaaactccacgatcttcctgaagaagagaaatggatgtttccaaattccacaataagcaatatgtggtgataatgaaaaga

SEQ ID NO: 321286 - DNA, 120 bp, Artificial Sequence
  ENSG00000135678_13 (sequence is synthesized)
atgattcagtcttgacggtgaatggaagacacttacctaacaagtactgctcatttacactcaaattaatcttgaagtagtcttaaaatgtgtaagaagttaaaacttgagaagcaaaaa

SEQ ID NO: 321287 - DNA, 120 bp, Artificial Sequence
  ENSG00000135678_14 (sequence is synthesized)
aatgcctgcaaaaagaagatcattttgtatacagagaaccggatgaatataagcaatgaagatgaacatttattgatcttctacatacaagacttcaccataaggccaggagcagtggct

SEQ ID NO: 321288 - DNA, 74 bp, Artificial Sequence
  ENSG00000135678_15 (sequence is synthesized)
ctacatacaagacttcaccataaggccaggagcagtggctcacatgaggttaggagttcaaaaccagcctgacc

SEQ ID NO: 321289 - DNA, 85 bp, Artificial Sequence
  ENSG00000135678_16 (sequence is synthesized)
tcgcagccttagaggcggagtttgcagtgagccgagatagtgccattgtactccagcttgggcaacagagtaagactctgtctca

SEQ ID NO: 321290 - DNA, 120 bp, Artificial Sequence
  ENSG00000135678_17 (sequence is synthesized)
aaaacaaaaacaaacaaacaaaaaaaacacctcaccatgagtgctacatgtgaatagatattaagtgccatatataattagttctcagaagaagggagaaatgatcataggactgggaat

SEQ ID NO: 321291 - DNA, 120 bp, Artificial Sequence
  ENSG00000135678_18 (sequence is synthesized)
agggagaaatgatcataggactgggaattgttttgcaaacgttctaggagatgtgagagaaaatatgtaaccacatcttagtggcccaagaaaatacaggcctgaagggataagattgtg

SEQ ID NO: 321292 - DNA, 120 bp, Artificial Sequence
  ENSG00000135678_19 (sequence is synthesized)
tctctatagagcttcaaagcatacaggtcaattaagaaagcccctctctctccagagccgtttccctagcttttggcacctggatgccacagtcctccattaggctgatgactccaaaga

SEQ ID NO: 321293 - DNA, 120 bp, Artificial Sequence
  ENSG00000135678_20 (sequence is synthesized)
tgtaactctagcctcttgcctgagcttcagactcgcgtcccactgcccacaggacacatccacctggatgtgactcacaggtacctccaacccatcatgtggagatactcatcctgttcc

SEQ ID NO: 321294 - DNA, 120 bp, Artificial Sequence
  ENSG00000135678_21 (sequence is synthesized)
ccctagagctgctcttcctgctgcattctctctctcaattactgggaccaccaagctaggaacctgggagtcatccttgatactttctcttcctccttaatcctgtgtattcagcaagta

SEQ ID NO: 321295 - DNA, 120 bp, Artificial Sequence
  ENSG00000135678_22 (sequence is synthesized)
gcagtgagccgggattgcgccattgtactccagcctgggtgaagaagtgagactctgtcttaaaaaaaaaaattggtgctgataaatattgatgaattctgctctctgctctctatggtt

SEQ ID NO: 321296 - DNA, 120 bp, Artificial Sequence
  ENSG00000135678_23 (sequence is synthesized)
gtcaacactgcagagttgaggcctcatatctcacctgcactgctgcaacagcttactggtcccttgctcccagccttctcctcttcagtccatcgtccacacagcactggggaaggggag

SEQ ID NO: 321297 - DNA, 120 bp, Artificial Sequence
  ENSG00000135678_24 (sequence is synthesized)
ccacttgaaacaaaagtcaacaactggttgtagttcataaacacagagctgtttgtgtcccctgtatctggaatgccattatgacccactacattttttctttcctacccctcttaaaac

SEQ ID NO: 321298 - DNA, 120 bp, Artificial Sequence
  ENSG00000135678_25 (sequence is synthesized)
tgaccataatcccattcaattccatttcacctcttcgcaggcagtctggggttagggaccctttctctttgctccccaaaataaactggttatctctactattggatttacaacattgta

SEQ ID NO: 321299 - DNA, 120 bp, Artificial Sequence
  ENSG00000135678_26 (sequence is synthesized)
ttataatcttctccatgtgtgccttctctagtagaatgtgagctctttgaggccaaggtctatttaatttgtttgaaaaattcattgttatatcctcaaagcctagcacatagtaggtac

SEQ ID NO: 321300 - DNA, 120 bp, Artificial Sequence
  ENSG00000135678_27 (sequence is synthesized)
tgaatgaatgaatgaacaaggggtgccaggagactgctactcccagtccttcccagaaactgcctagggctttgagtcattttatgaagctaggtcttaatgcgtaggcaacctcccagc

SEQ ID NO: 321301 - DNA, 120 bp, Artificial Sequence
  ENSG00000135678_28 (sequence is synthesized)
tcactatgaacgctgacagaagagtgttttcatgtctataatcaagaattccagatacattccttttactgaaccttgaattgatcctaagattggtagtaaaggtattatgttacctcc

SEQ ID NO: 321302 - DNA, 120 bp, Artificial Sequence
  ENSG00000135678_29 (sequence is synthesized)
taacagcactacaaagtacctttttttatcagaaaaaaattttaccattaggactcaatttgaagtactaatgcttctcaagttctccactatgagagttaccctgtattagaccgttac

SEQ ID NO: 321303 - DNA, 120 bp, Artificial Sequence
  ENSG00000135678_30 (sequence is synthesized)
ctataagaattaaggggtaaagcactaaacagaaaagaaaaaaaaaatagcaactctggtgagcagatttctttcctttcttccttccttctcctcttcctaccttcctccctcctttcc

SEQ ID NO: 321304 - DNA, 120 bp, Artificial Sequence
  ENSG00000135678_31 (sequence is synthesized)
ctctcctccccttctctccctttccctccccttcccttccttttcttctttcctccgctcccctccccttccctccccttcccatccttctttctcttttttttacttaatccccagtgt

SEQ ID NO: 321305 - DNA, 120 bp, Artificial Sequence
  ENSG00000135678_32 (sequence is synthesized)
gacagtaatataggctgatttctagaagtgtggtgtattactcatggaaagtgagttgccttggttattactttcaattgaaagttctatgggatctagaaatgagacatactggcatgg

SEQ ID NO: 321306 - DNA, 120 bp, Artificial Sequence
  ENSG00000135678_33 (sequence is synthesized)
agagtgagaacgacaaaggaatgaagagctacaggagcatttaggccatttctatgccaagcttattctacatgcacaaaatcatacatgttaataaatataaacaaattggaggcttat

SEQ ID NO: 321307 - DNA, 120 bp, Artificial Sequence
  ENSG00000135678_34 (sequence is synthesized)
ttaaaccaattatgaaatctggtaatttgtgcagcagcaatagatgataaccaaaaaaaactcataataatctgaatatcttgatcatttgtatttaaagaagcagtaattatatacttg

SEQ ID NO: 321308 - DNA, 120 bp, Artificial Sequence
  ENSG00000135678_35 (sequence is synthesized)
aaagtacataatatagtattgcaaaaatgactttggtatattacaaattaaaagtatataagatgaaacttgatttgctatcaagccccaagcaatttttcaactgggcattgaattcta

SEQ ID NO: 321309 - DNA, 120 bp, Artificial Sequence
  ENSG00000135678_36 (sequence is synthesized)
acttttctaagatagcaatttttgaagagacacgaacaaaaatctgaattagttcatgagccttaatgtaaatctcttgctgaaatagtttttaaaatcagaatttagttatctatcaga

SEQ ID NO: 321310 - DNA, 120 bp, Artificial Sequence
  ENSG00000135678_37 (sequence is synthesized)
ctcaaaatcatttaaagactaacaaaacacaatcatgatattctaactgtggtcaaaccaggtacccaagccacctccctgcccaacgcctttccggcttttcccctccctcttgggctg

SEQ ID NO: 321311 - DNA, 120 bp, Artificial Sequence
  ENSG00000135678_38 (sequence is synthesized)
gtggttatgctcctccagctctagttcagctataattccttttatagagaaaccaacctgatacacactttcatgatgggagaaaaatgtgggagtgaaatggtatttagaaagcagcag

SEQ ID NO: 321312 - DNA, 82 bp, Artificial Sequence
  ENSG00000135678_39 (sequence is synthesized)
cctctgtcgcagaagccctggattcaaatccgccacacattcagtttctttatctgtaaaatggagaccaccccccgccacg

SEQ ID NO: 321313 - DNA, 120 bp, Artificial Sequence
  ENSG00000135678_40 (sequence is synthesized)
agtttctttatctgtaaaatggagaccaccccccgccacgctgaacggtgattctgtgactggtaagagatgctacatttttggtgcttgttcaggtggaggaaagatgatagttaacac

SEQ ID NO: 321314 - DNA, 120 bp, Artificial Sequence
  ENSG00000135678_41 (sequence is synthesized)
tcaggtaataagtattttgaaggcagtataatataccttcttaaagagtatacctactcaaatgttggtaaatgttgacatgattgaatctaaatggcaaagagtattttagaaaaacat

SEQ ID NO: 321315 - DNA, 120 bp, Artificial Sequence
  ENSG00000135678_42 (sequence is synthesized)
taagtccctgcagataaatgacagtgttgatttggatgcttaattacattcagacatgaactgttggatgtatctgaaatgttaaaagctttttctcaacatttccaaaagtctttccaa

SEQ ID NO: 321316 - DNA, 120 bp, Artificial Sequence
  ENSG00000135678_43 (sequence is synthesized)
gaaatcaatgttatgttttgttccagaagcaaatttgcatttgtgatctgtttctaaaaatggtacaagttagctctgtttagaaagtaaaaatatctgatgttagattggaagtatctc

SEQ ID NO: 321317 - DNA, 120 bp, Artificial Sequence
  ENSG00000135678_44 (sequence is synthesized)
ttcctggggaatccagaaagataagcatagcatattgtcttactgcaatagataagttgcttattgagaagtctggttgttattctatatggtaacaatacagttgatgtatattttatg

SEQ ID NO: 321318 - DNA, 120 bp, Artificial Sequence
  ENSG00000135678_45 (sequence is synthesized)
atagatcctttatattttcctcatgactttagaagggggaagggggagaaaattatgatgaccagactagttaaagagcattgaaagtccacagtactgtagctaaagtagaagtttggg

SEQ ID NO: 321319 - DNA, 120 bp, Artificial Sequence
  ENSG00000135678_46 (sequence is synthesized)
tttgttatagactttacattatatcaactaataagcagatactgtacagtattgctcaccattttatcatacttttgcatatgaactactccattgccttttatagatgttttatagctg

SEQ ID NO: 321320 - DNA, 72 bp, Artificial Sequence
  ENSG00000135678_47 (sequence is synthesized)
atgaactactccattgccttttatagatgttttatagctgatcttaccagttttcctggaacacccaggttg

SEQ ID NO: 321321 - DNA, 65 bp, Artificial Sequence
  ENSG00000135678_48 (sequence is synthesized)
tgcctgcctactttctttaatactataactaagaatttattaaaatgcacaaattgtctaagact

SEQ ID NO: 321322 - DNA, 120 bp, Artificial Sequence
  ENSG00000135678_49 (sequence is synthesized)
aatttattaaaatgcacaaattgtctaagactgtaaagtttattggggagaggccatgactacctctgaatttagtaaatttaaaatatttctgattctcaataaagaactaatatccat

SEQ ID NO: 321323 - DNA, 120 bp, Artificial Sequence
  ENSG00000135678_50 (sequence is synthesized)
agattcttcttggcctctctgagcagcatttcttccttctgcgtatgggacaggaccctttctggaatgggggtcttatgacctacaatcaaacaagaacatggacttcccgtgcctctg

SEQ ID NO: 321324 - DNA, 120 bp, Artificial Sequence
  ENSG00000135678_51 (sequence is synthesized)
gtgcaatggcgtgctctcaactcactgcaacctccacttctccggttcaagtgattctcctgcctcaacctgctgaatagctggtattacagcgacacgccaccgcgcccagctaatttt

SEQ ID NO: 321325 - DNA, 66 bp, Artificial Sequence
  ENSG00000135678_52 (sequence is synthesized)
cgacacgccaccgtggctggtcttcgaactcctggcctcctgtgatccgcccacctcagcctccca

SEQ ID NO: 321326 - DNA, 78 bp, Artificial Sequence
  ENSG00000135678_53 (sequence is synthesized)
tttcttccttctgcgtatgggacaggaccctttctggaatgggggtcttatgacctacaatcaaacaagtatctaaca

SEQ ID NO: 321327 - DNA, 120 bp, Artificial Sequence
  ENSG00000135678_54 (sequence is synthesized)
atgggggtcttatgacctacaatcaaacaagtatctaacatccaattaaaagaggagtcatggctcaatcctcaagaaagaaacatgattatatggagtctttgccttatgtggacacag

SEQ ID NO: 321328 - DNA, 120 bp, Artificial Sequence
  ENSG00000135678_55 (sequence is synthesized)
cctgcaacaggggtcaagatgagttttgcctgacttctttgatgtcctgaactttccgtagtcctttttcttgaatttgttcattataaatatagcttggcatttgtttgatcttttcaa

SEQ ID NO: 321329 - DNA, 120 bp, Artificial Sequence
  ENSG00000135679_0 (sequence is synthesized)
atgcattttcccagctgtgttcagtggcgattggagggtagacctgtgggcacggacgcacgccactttttctctgctgatccaggcaaatgtgcaataccaacatgtctgtacctactg

SEQ ID NO: 321330 - DNA, 120 bp, Artificial Sequence
  ENSG00000135679_1 (sequence is synthesized)
atggtgctgtaaccacctcacagattccagcttcggaacaagagaccctggttagaccaaagccattgcttttgaagttattaaagtctgttggtgcacaaaaagacacttatactatga

SEQ ID NO: 321331 - DNA, 120 bp, Artificial Sequence
  ENSG00000135679_2 (sequence is synthesized)
aagaggttcttttttatcttggccagtatattatgactaaacgattatatgatgagaagcaacaacatattgtatattgttcaaatgatcttctaggagatttgtttggcgtgccaagct

SEQ ID NO: 321332 - DNA, 120 bp, Artificial Sequence
  ENSG00000135679_3 (sequence is synthesized)
tctctgtgaaagagcacaggaaaatatataccatgatctacaggaacttggtagtagtcaatcagcaggaatcatcggactcaggtacatctgtgagtgagaacaggtgtcaccttgaag

SEQ ID NO: 321333 - DNA, 120 bp, Artificial Sequence
  ENSG00000135679_4 (sequence is synthesized)
gtgggagtgatcaaaaggaccttgtacaagagcttcaggaagagaaaccttcatcttcacatttggtttctagaccatctacctcatctagaaggagagcaattagtgagacagaagaaa

SEQ ID NO: 321334 - DNA, 120 bp, Artificial Sequence
  ENSG00000135679_5 (sequence is synthesized)
attcagatgaattatctggtgaacgacaaagaaaacgccacaaatctgatagtatttccctttcctttgatgaaagcctggctctgtgtgtaataagggagatatgttgtgaaagaagca

SEQ ID NO: 321335 - DNA, 120 bp, Artificial Sequence
  ENSG00000135679_6 (sequence is synthesized)
gtagcagtgaatctacagggacgccatcgaatccggatcttgatgctggtgtaagtgaacattcaggtgattggttggatcaggattcagtttcagatcagtttagtgtagaatttgaag

SEQ ID NO: 321336 - DNA, 120 bp, Artificial Sequence
  ENSG00000135679_7 (sequence is synthesized)
ttgaatctctcgactcagaagattatagccttagtgaagaaggacaagaactctcagatgaagatgatgaggtatatcaagttactgtgtatcaggcaggggagagtgatacagattcat

SEQ ID NO: 321337 - DNA, 120 bp, Artificial Sequence
  ENSG00000135679_8 (sequence is synthesized)
ttgaagaagatcctgaaatttccttagctgactattggaaatgcacttcatgcaatgaaatgaatcccccccttccatcacattgcaacagatgttgggcccttcgtgagaattggcttc

SEQ ID NO: 321338 - DNA, 120 bp, Artificial Sequence
  ENSG00000135679_9 (sequence is synthesized)
ctgaagataaagggaaagataaaggggaaatctctgagaaagccaaactggaaaactcaacacaagctgaagagggctttgatgttcctgattgtaaaaaaactatagtgaatgattcca

SEQ ID NO: 321339 - DNA, 120 bp, Artificial Sequence
  ENSG00000135679_10 (sequence is synthesized)
agtcatgtgttgaggaaaatgatgataaaattacacaagcttcacaatcacaagaaagtgaagactattctcagccatcaacttctagtagcattatttatagcagccaagaagatgtga

SEQ ID NO: 321340 - DNA, 120 bp, Artificial Sequence
  ENSG00000135679_11 (sequence is synthesized)
aagagtttgaaagggaagaaacccaagacaaagaagagagtgtggaatctagtttgccccttaatgccattgaaccttgtgtgatttgtcaaggtcgacctaaaaatggttgcattgtcc

SEQ ID NO: 321341 - DNA, 120 bp, Artificial Sequence
  ENSG00000135679_12 (sequence is synthesized)
atggcaaaacaggacatcttatggcctgctttacatgtgcaaagaagctaaagaaaaggaataagccctgcccagtatgtagacaaccaattcaaatgattgtgctaacttatttcccct

SEQ ID NO: 321342 - DNA, 120 bp, Artificial Sequence
  ENSG00000135679_13 (sequence is synthesized)
agttgacctgtctataagagaattatatatttctaactatataaccctaggaatttagacaacctgaaatttattcacatatatcaaagtgagaaaatgcctcaattcacatagatttct

SEQ ID NO: 321343 - DNA, 120 bp, Artificial Sequence
  ENSG00000135679_14 (sequence is synthesized)
tctctttagtataattgacctactttggtagtggaatagtgaatacttactataatttgacttgaatatgtagctcatcctttacaccaactcctaattttaaataatttctactctgtc

SEQ ID NO: 321344 - DNA, 120 bp, Artificial Sequence
  ENSG00000135679_15 (sequence is synthesized)
ttctactctgtcttaaatgagaagtacttggtttttttttttcttaaatatgtatatgacatttaaatgtaacttattattttttttgagaccgagtcttgctctgttacccaggctgga

SEQ ID NO: 321345 - DNA, 80 bp, Artificial Sequence
  ENSG00000135679_16 (sequence is synthesized)
ttacaggcatgagccaccgcgtccggcctaaatgtcacttagtacctttgatataaagagaaaatgtgtgaaagatttag

SEQ ID NO: 321346 - DNA, 84 bp, Artificial Sequence
  ENSG00000135679_17 (sequence is synthesized)
ttgttttgagattgatctagcagtctccgcttcccgggttcaagccattctcctggctcagcctctggagcagctgggattaca

SEQ ID NO: 321347 - DNA, 120 bp, Artificial Sequence
  ENSG00000135679_18 (sequence is synthesized)
cagtgccttttgcaatttgttgtgtgggtttttttttttttaaagccacacaataattttggaaaacaatgtatgggtagaacatgtgtctgttaattgcacacaaaaccacttttaatg

SEQ ID NO: 321348 - DNA, 120 bp, Artificial Sequence
  ENSG00000135679_19 (sequence is synthesized)
ggtacagagttaaatttgaaggaataagttctagctgaagtattatgaactccaaataatgctttgaggacctccaaagggattagtagtttacctgtggaggtcctccaagcattattt

SEQ ID NO: 321349 - DNA, 120 bp, Artificial Sequence
  ENSG00000135679_20 (sequence is synthesized)
aggtcctcgaagcattatttggagttgataatacttcagcttcaatttggagttgataatatttcagctagaacctagtagaatctgtttttttcctttggaggtcctcaaagcattatt

SEQ ID NO: 321350 - DNA, 120 bp, Artificial Sequence
  ENSG00000135679_21 (sequence is synthesized)
ggagttcataatactgaagctagaaccaagcagaatctgtttttttctgaggagtatcggtagcataaatgtgattataaacatagtacacttgatatatggaggcagtgacagctattt

SEQ ID NO: 321351 - DNA, 120 bp, Artificial Sequence
  ENSG00000135679_22 (sequence is synthesized)
ttacaaaatttaaatctgcaaatggattcaacatgtttatgggttattaaaattgtctgatttcttaggttctttatagtacacgtgttgaaaataaatgattaagaattgtttcaagaa

SEQ ID NO: 321352 - DNA, 120 bp, Artificial Sequence
  ENSG00000135679_23 (sequence is synthesized)
agacttagaacctctaaattattgacttattttttatataaggtcactccgatgaaaggtgattacaaaatcatctacattgctgtcctccaagcattatttggagttgataatacttca

SEQ ID NO: 321353 - DNA, 120 bp, Artificial Sequence
  ENSG00000135679_24 (sequence is synthesized)
acccctctgaccgagatcctgctgctttcgcagccaggagcaccgtccctccccggattagtgcgtacgagcgcccagtgccctggcccggagagtggaatgatccccgaggcccagggc

SEQ ID NO: 321354 - DNA, 120 bp, Artificial Sequence
  ENSG00000135679_25 (sequence is synthesized)
gtcgtgcttccgcgcgccccgtgaaggaaactggggagtcttgagggacccccgactccaagcgcgaaaaccccggatggtgaggagcaggcaaatgtgcaataccaacatgtctgtacc

SEQ ID NO: 321355 - DNA, 120 bp, Artificial Sequence
  ENSG00000135679_26 (sequence is synthesized)
aatgtgcaataccaacatgtctgtacctactgatggtgctgtaaccacctcacagattccagcttcggaacaagagaccctgaatcatcggactcaggtacatctgtgagtgagaacagg

SEQ ID NO: 321356 - DNA, 120 bp, Artificial Sequence
  ENSG00000135679_27 (sequence is synthesized)
gggacgccatcgaatccggatcttgatgctggtgtatatcaagttactgtgtatcaggcaggggagagtgatacagattcatttgaagaagatcctgaaatttccttagctgactattgg

SEQ ID NO: 321357 - DNA, 88 bp, Artificial Sequence
  ENSG00000135679_28 (sequence is synthesized)
acctcaagtgaggtgcagatgtgagccaccatgtccagccaagaattagtatttaaattttagatactcttttttttttttttttttt

SEQ ID NO: 321358 - DNA, 60 bp, Artificial Sequence
  ENSG00000135679_29 (sequence is synthesized)
gggattgcagatgtgagccaccatgtccagccaagaattagtatttaaattttatgctag

SEQ ID NO: 321359 - DNA, 66 bp, Artificial Sequence
  ENSG00000135679_30 (sequence is synthesized)
gctcactgcaacttccgccttatgtaccaccataccagctgatttttttgtatttttagtaaagac

SEQ ID NO: 321360 - DNA, 84 bp, Artificial Sequence
  ENSG00000135679_31 (sequence is synthesized)
gcacctggcctcagatttttgatactcttaaaccttctgatccttagtttctctctccaaaatactctttctaggttaaaaaaa

SEQ ID NO: 321361 - DNA, 120 bp, Artificial Sequence
  ENSG00000135679_32 (sequence is synthesized)
tagtttctctctccaaaatactctttctaggttaaaaaaaaaaaggctcttatatttggtgctatgtaaatgaaaatgttttttaggttttcttgatttaacaatagagacagggtctcc

SEQ ID NO: 321362 - DNA, 120 bp, Artificial Sequence
  ENSG00000135679_33 (sequence is synthesized)
tcgaactcctgggctcaagagatcctcctgtcttggcctcgcaaagtgctaagtaggattacaggcgttagccaccacacccggctgtaaaaatgtacttattctccagcctcttttgta

SEQ ID NO: 321363 - DNA, 120 bp, Artificial Sequence
  ENSG00000135679_34 (sequence is synthesized)
attctccagcctcttttgtataaaccatagtaagggatgggagtaatgatgttatctgtgaaaatagccaccatttacccgtaagacaaaacttgttaaagcctcctgagtctaacctag

SEQ ID NO: 321364 - DNA, 120 bp, Artificial Sequence
  ENSG00000135679_35 (sequence is synthesized)
attacatcaggccctttttcacacacaaaaaaatcctttatgggatttaatggaatctgttgtttccccctaagttgaaaaacaactctaagacactttaaagtaccttcttggcctggg

SEQ ID NO: 321365 - DNA, 120 bp, Artificial Sequence
  ENSG00000135679_36 (sequence is synthesized)
ttacatggttcccagcctaggtttcagacttttgcttaaggccagttttagaaacccgtgaattcagaaaagttaattcagaaatttgataaacagaattgttatttaaaaactaactgg

SEQ ID NO: 321366 - DNA, 120 bp, Artificial Sequence
  ENSG00000135679_37 (sequence is synthesized)
aaagattgttaagttctttctgaattattcagaaattatgcatcattttccttcaagaatgacagggtcagcatgtggaattccaagatacctcttgacttcctctcaagctccgtgttt

SEQ ID NO: 321367 - DNA, 120 bp, Artificial Sequence
  ENSG00000135679_38 (sequence is synthesized)
ggtcagtggaggcccatccgagctcagcactgagaagtgttagtttctttgggacccatctaccctgaccacatcatgatgttcatctgcagctgttgcaaggtgttcagattgtataaa

SEQ ID NO: 321368 - DNA, 120 bp, Artificial Sequence
  ENSG00000135679_39 (sequence is synthesized)
cataaatgtcacaaaaactttaaaagaagtgcaattctcaaaaggttaggtggactaaagcattctgtaaagcaactgctaataatgagcttacagtggatttgaatttgaaaaatatag

SEQ ID NO: 321369 - DNA, 120 bp, Artificial Sequence
  ENSG00000135679_40 (sequence is synthesized)
taacaagcctgtcaaatatctgcaagaactatggaataaaactactgatgcagtgaagacagttgaaaagatcaaacaaatgccaagctatatttataatgaacaaattcaagaaaaagg

SEQ ID NO: 321370 - DNA, 120 bp, Artificial Sequence
  ENSG00000135679_41 (sequence is synthesized)
actacggaaagttcaggacatcaaagaagtcaggcaaaactcatcttgacccctgttgcaggcaaaggaacgcagctggaagaaaagatgatataacagttaacaggatgcagacatggc

SEQ ID NO: 321371 - DNA, 120 bp, Artificial Sequence
  ENSG00000135679_42 (sequence is synthesized)
agaggtttcctaaaaatctcattatctataaccatttctatatttacatttgaaaatctcctttggagacttagaacctctaaattattgacttattttttatataaggtcactccgatg

SEQ ID NO: 321372 - DNA, 120 bp, Artificial Sequence
  ENSG00000135679_43 (sequence is synthesized)
aaaggtgattacaaaatcatctacattgctgtctacaaaacagataatatggatgtttgatcgcatctcattgttaactctttactgatatgtttgtaaatacagaagtgaaatgtggac

SEQ ID NO: 321373 - DNA, 120 bp, Artificial Sequence
  ENSG00000135679_44 (sequence is synthesized)
ataaaatagttacgctatttggttaatggtactagacaacatgtaattaatgacattcaaaaatttatggctagtgatatatataaagtaaaattttctttgcagtaaaatatgcccttt

SEQ ID NO: 321374 - DNA, 120 bp, Artificial Sequence
  ENSG00000135679_45 (sequence is synthesized)
attatagaagggaggatataaggaaccaacagtttgtatgaaaatagctcaaataatatcttttattttgattttaatatttcttattttggtttattagtgtcttagaacaaaatggcc

SEQ ID NO: 321375 - DNA, 120 bp, Artificial Sequence
  ENSG00000135679_46 (sequence is synthesized)
ttatataatgaagcctagttatgctggactgttttgatctcttttaattgttctgacagatagttggggatgagagccgaataaggtttgcctgaaataactgacactatataatttctg

SEQ ID NO: 321376 - DNA, 120 bp, Artificial Sequence
  ENSG00000135679_47 (sequence is synthesized)
tgtattgaatgttcttgctacaaataaatgatatttgagctgatgggtgtgctaattacactgatttgatcaatacccattgtatgtgaaacagtacatacaccatatttacaattatgt

SEQ ID NO: 321377 - DNA, 120 bp, Artificial Sequence
  ENSG00000135679_48 (sequence is synthesized)
atttaacatttaaaatttctaatataagtatctctcaaactgtggattaacttcttgatttatatttaaatatgaatcttaagcaaaacagtgaaaataaccatcttgatttagtgtttt

SEQ ID NO: 321378 - DNA, 120 bp, Artificial Sequence
  ENSG00000135679_49 (sequence is synthesized)
tctcccatatgtgaattgtatatacttaggtgaagacaataaaatcaactgaactgtaagcttagaataggactgaggtaattctgcacagcaactttactaatggtacattgttgcttc

SEQ ID NO: 321379 - DNA, 120 bp, Artificial Sequence
  ENSG00000135679_50 (sequence is synthesized)
acaaatatcactgggcagcttgaagcagttgggagcctccaatgagagcaacttgagagaatgatgttgcaagttagtaggagtaagaaatgctgtgttctccctgtcttctcttaggtc

SEQ ID NO: 321380 - DNA, 120 bp, Artificial Sequence
  ENSG00000135679_51 (sequence is synthesized)
acatggcagcctggcctaagtgatcgtgaatggtctataagggaggtagctgggacagggaggggagtttgggctagccaccgtaccacttgtcagcgtgaaaagtaagattgtaattgc

SEQ ID NO: 321381 - DNA, 120 bp, Artificial Sequence
  ENSG00000135679_52 (sequence is synthesized)
ctgtttagttttctgcctcatctttgaaagttccaccaagctgggaacctcttgattgtgaggcacaaatgtaagtacatcagaaaaaaacaaaaaaactggctttaaagcaggagcttg

SEQ ID NO: 321382 - DNA, 120 bp, Artificial Sequence
  ENSG00000135679_53 (sequence is synthesized)
ggagcttgtgggcccctaagccagacggggactagcttttggcattatataattaagattttttaaatccttaataagggttttattttatttttatttattttttgagacggagtcttg

SEQ ID NO: 321383 - DNA, 120 bp, Artificial Sequence
  ENSG00000135679_54 (sequence is synthesized)
tggctcactgcaacctctgcctcctggctgtgttcaagtggttctgcttcagcctcccaagtagctggggttagagcaccctgtcaccacgccccgctaatttttgtatttctagcagag

SEQ ID NO: 321384 - DNA, 81 bp, Artificial Sequence
  ENSG00000135679_55 (sequence is synthesized)
cctcccaagtagctggggttagagcaccctgtcaccacgccccgctaatttttgtatttctagcagagatgaagtttcact

SEQ ID NO: 321385 - DNA, 120 bp, Artificial Sequence
  ENSG00000135679_56 (sequence is synthesized)
cgtgagccgccacgcccagcctaataagggttttaaagataattagtgtgtaggtctgtaggcttatgatggtaaccacaagttgttaatggcattgtgaaaagtttttagttgcgcttt

SEQ ID NO: 321386 - DNA, 120 bp, Artificial Sequence
  ENSG00000135679_57 (sequence is synthesized)
atgggtggatgctgaattacattttgatttgatacttataaaaagaaaaagtatttcttcagcttaaaaaattgtttaaaagtttgtgatcatattgtctaccatgtagccagctttcaa

SEQ ID NO: 321387 - DNA, 120 bp, Artificial Sequence
  ENSG00000135679_58 (sequence is synthesized)
ttatatgtaagagggactttttgacatttacaaataatactttgaggtagatatctgaaagcaccagcacttggaaggtgttcagaagtaacaaattataaaatgagctaacaaacgaaa

SEQ ID NO: 321388 - DNA, 120 bp, Artificial Sequence
  ENSG00000135679_59 (sequence is synthesized)
ggcaaaataaaaccgtaaagcaagcagatgggaggcgtgttcagtaacttattcataatgcatctgaaatgattgctgtactcaaatatttaacgttagagtaatagtattttgaatgaa

SEQ ID NO: 321389 - DNA, 120 bp, Artificial Sequence
  ENSG00000135679_60 (sequence is synthesized)
aaccatagttgattgtctttagagagaggagtggtactgaaacatacttgaattcgtattgctttcctttaaagctctcctttaaagactttaaaaaaaattcgataggcattttcatgt

SEQ ID NO: 321390 - DNA, 120 bp, Artificial Sequence
  ENSG00000135679_61 (sequence is synthesized)
ttcagtcctacaatcccacatctctgctgccttcagaatgctacaacttagatgtccagccaacagcttaaagccaatttataaaaatagcatctttcctaattccaaaatttcaccttt

SEQ ID NO: 321391 - DNA, 87 bp, Artificial Sequence
  ENSG00000135679_62 (sequence is synthesized)
ataaaaatagcatctttcctaattccaaaatttcaccttttgtttgttttgttttgagatgcgctgcaaacatgactcactacagcc

SEQ ID NO: 321392 - DNA, 120 bp, Artificial Sequence
  ENSG00000135679_63 (sequence is synthesized)
ccaagtagctggggaccacaggtgcaagccaccaggtccagctaaccttccccccacctcccccgaccccgctgccacccgccctgagacagagtcttgctctttcacccagactggagt

SEQ ID NO: 321393 - DNA, 79 bp, Artificial Sequence
  ENSG00000135679_64 (sequence is synthesized)
gtgcccggcctaatttttgtattttttgtagagagtcaagtgatctgcccgtcttggcttcccaaagtgctgagattac

SEQ ID NO: 321394 - DNA, 120 bp, Artificial Sequence
  ENSG00000135679_65 (sequence is synthesized)
gtaagccaccacgccaagcccaaaatttcaccttttaaatttattccatttattttgtaggtgaatttcatttatttctcagggttaaattttagcgcttttgcctgtgtctatttttgg

SEQ ID NO: 321395 - DNA, 120 bp, Artificial Sequence
  ENSG00000135679_66 (sequence is synthesized)
ttcacacctccccagcccactgtcctgtattaagtaggccttccttcaagatcacagtaatatctccctaaatggatttcactacgtttggtcctatttttggttcagttatagtttaca

SEQ ID NO: 321396 - DNA, 120 bp, Artificial Sequence
  ENSG00000135679_67 (sequence is synthesized)
gataccatcatgttgcttccctgatttaaatattgggggaaaaacttgctttttggattttatctctgatgttctactggattattttagacttttagaacactatgaaatgggtgcttg

SEQ ID NO: 321397 - DNA, 120 bp, Artificial Sequence
  ENSG00000135679_68 (sequence is synthesized)
cttttcacttttcaaaccttttttgcttaaacaaagttcataagcttattgtagtgggaagttcaaagtcacagatctggtacttactcgcctagtgaccttagagacaataaatctata

SEQ ID NO: 321398 - DNA, 120 bp, Artificial Sequence
  ENSG00000135679_69 (sequence is synthesized)
gagcctagtatggggtctggcaggtagtaagcacttttaatgaatggaagtttaatattctgtttgcatccactcgaccataatcaccccaaatccagcttaggtagccttgaattaacc

SEQ ID NO: 321399 - DNA, 87 bp, Artificial Sequence
  ENSG00000135679_70 (sequence is synthesized)
tagtggcgcaaacatgactcactgcagcctcctgagtagctgggaacacaggcctgttgccaccatgcctggctaatatatatatta

SEQ ID NO: 321400 - DNA, 120 bp, Artificial Sequence
  ENSG00000135679_71 (sequence is synthesized)
gaacacaggcctgttgccaccatgcctggctaatatatatattatatataatatacatatattacatatatatatataatacatatgtgtttatgtatgtatgtgtgtgtacattatata

SEQ ID NO: 321401 - DNA, 71 bp, Artificial Sequence
  ENSG00000135679_72 (sequence is synthesized)
atgtatgtatgtgtgtgtacattatatatatatatatactttttttagaggcagagtccgtgtcttgacct

SEQ ID NO: 321402 - DNA, 120 bp, Artificial Sequence
  ENSG00000135679_73 (sequence is synthesized)
agccactgcatctggtgaattaagccttttttatacactcaactctgaggtattctgttcataccaatatgttcctttgtatcttcttgccatagcaggttgtaacatccttttgtatct

SEQ ID NO: 321403 - DNA, 120 bp, Artificial Sequence
  ENSG00000135679_74 (sequence is synthesized)
acaggcgtgagccaccgcgcccagccgtatctcctttcaaatgtcaaataaatacattgtgtatacagtagtaaaggatgttgattggcattgaaagcaactatcaagttcttgttgatt

SEQ ID NO: 321404 - DNA, 120 bp, Artificial Sequence
  ENSG00000135679_75 (sequence is synthesized)
ttgattggcattgaaagcaactatcaagttcttgttgatttagaagacaaaaagacaattttaaaataacatcctgggccaggctctgtgactcacgcctgtaatctcaacactttggga

SEQ ID NO: 321405 - DNA, 79 bp, Artificial Sequence
  ENSG00000135679_76 (sequence is synthesized)
aggagtttgagatcagcctgggcaacataatgacaccctgtatccaaaaaattgtggtggcatgccaatgttacaatga

SEQ ID NO: 321406 - DNA, 120 bp, Artificial Sequence
  ENSG00000135679_77 (sequence is synthesized)
tgagcccaggagtccaatgttacaatgagctatgattgcgccactacactctgcttaggagacagatggagacttgtctcttaaaaaaataaaaaataacagtatgttcattaaacatta

SEQ ID NO: 321407 - DNA, 90 bp, Artificial Sequence
  ENSG00000135679_78 (sequence is synthesized)
ttaaaaaaataaaaaataacagtatgttcattaaacattaatctcactgattgtgattttttgtttgtttttttgagatggcatggcgtg

SEQ ID NO: 321408 - DNA, 120 bp, Artificial Sequence
  ENSG00000135679_79 (sequence is synthesized)
ctgggattacaggcattgagccactgtgcctggcctgattatgattttttaaagtccccccccaaattattgtttgtgcaataaatggcaaaaaagaagcattctaagaaaaaagtagtc

SEQ ID NO: 321409 - DNA, 120 bp, Artificial Sequence
  ENSG00000135679_80 (sequence is synthesized)
aagcattctaagaaaaaagtagtcttaaaagttgatatggtgtcagaattgtaagagagagggtcttggctgaaaagcctttttagaaaaaattgctccctacaaaaaaggccttttcta

SEQ ID NO: 321410 - DNA, 120 bp, Artificial Sequence
  ENSG00000135679_81 (sequence is synthesized)
ccttttctcacatttgtttctttttataggaggcatctgagaagaccaaatctcttcaaagttaagctttttgtttttttgggggggacgaagtctcgttctgtcacccaggctggagtg

SEQ ID NO: 321411 - DNA, 120 bp, Artificial Sequence
  ENSG00000135679_82 (sequence is synthesized)
ccgcacccagcccaaagttaagcattttttaaccacaaggtgggaggtggaagtatctcgttggaagactaaaggtgtccactaacggtagacccttttttttttttttttgagatggag

SEQ ID NO: 321412 - DNA, 120 bp, Artificial Sequence
  ENSG00000135679_83 (sequence is synthesized)
tacaggtgtgagccactgcgcctggccgtttttttttttgttgttgttgttgtttgttcgtttgtttgttttgagacagtctctcactccaggttggagtgcagtggcactatctcagct

SEQ ID NO: 321413 - DNA, 90 bp, Artificial Sequence
  ENSG00000135679_84 (sequence is synthesized)
gcagtggcactaggtcaaatgattctcctgcctcagcctcccagtagttggaattacaggcgcatgccaccatgcatggctaattttttg

SEQ ID NO: 321414 - DNA, 120 bp, Artificial Sequence
  ENSG00000135679_85 (sequence is synthesized)
agtgctgggattacagatgtgagtcactacgcttggtagactcttaacagcgctgagagaccactccaagagagcagagaaataatagttctattctcagttgtcaaacagcaaacaaaa

SEQ ID NO: 321415 - DNA, 84 bp, Artificial Sequence
  ENSG00000135679_86 (sequence is synthesized)
ctgagagaccactccaagagagcagagaaataatagttctattctcagttgtcaaacagcaaacaaaaaacccttggctggggg

SEQ ID NO: 321416 - DNA, 120 bp, Artificial Sequence
  ENSG00000135679_87 (sequence is synthesized)
ccaacctgggcaacatggtgcaaccctgtcttaactaaaaatacaaaaattagccaggcgtcatggcatgtgcctgttaattccagctgctcgagaggctgaggcatgagaattacttga

SEQ ID NO: 321417 - DNA, 83 bp, Artificial Sequence
  ENSG00000135679_88 (sequence is synthesized)
ccaaaaaaaaaaaaaaaagctgcaaatttaaacgttgaagtctaggtaaatataccagggaacttctgcttaagaggcttcta

SEQ ID NO: 321418 - DNA, 120 bp, Artificial Sequence
  ENSG00000135679_89 (sequence is synthesized)
aggtaaatataccagggaacttctgcttaagaggcttctatgtaatgaaattctcttgaaaacagagaaactatttcctgtttattttctaaattgagacgtcactttttaaaaattggt

SEQ ID NO: 321419 - DNA, 120 bp, Artificial Sequence
  ENSG00000135679_90 (sequence is synthesized)
acctgtaatttagccatttcctactcagcaatgtctcatttaaactattatttgtttagcgtgtttcaaagagcagatgtaagcttgagcccatcctctgtcctatgactaagtcgatat

SEQ ID NO: 321420 - DNA, 120 bp, Artificial Sequence
  ENSG00000135679_91 (sequence is synthesized)
tagcaggggttaggactgttagttttccagttcctactggaggcaaattctttgtttaccactgttctctgtatttcaaaagcacctggaaatcaataaaatttgttattcagaacaaaa

SEQ ID NO: 321421 - DNA, 120 bp, Artificial Sequence
  ENSG00000135679_92 (sequence is synthesized)
accactcatttattcacccaagttggaatcttggaatcatcttaactcctttcttccttgccttctatatcaaataccagaatcatcggactcaggtacatctgtgagtgagaacaggtg

SEQ ID NO: 321422 - DNA, 120 bp, Artificial Sequence
  ENSG00000135679_93 (sequence is synthesized)
catgtctgtacctactgatggtgctgtaaccacctcacagattccagcttcggaacaagagaccctggaaaatatataccatgatctacaggaacttggtagtagtcaatcagcagggac

SEQ ID NO: 321423 - DNA, 120 bp, Artificial Sequence
  ENSG00000135679_94 (sequence is synthesized)
catttagtatgaggatgccacctggaaaatacatgtttaatgtttattgaaaggttaaattgcataagggtttgtgttagactgatagcatatctactgagtagcgccccgccgcccccc

SEQ ID NO: 321424 - DNA, 120 bp, Artificial Sequence
  ENSG00000135686_0 (sequence is synthesized)
gggctggccgggggtctcctgaacccgggccccgccgccccgaccgcccggccccgccgccggggctgtccccgccgcgtccgtagcgcgtcctgccagggctgaaatctctttaatgat

SEQ ID NO: 321425 - DNA, 120 bp, Artificial Sequence
  ENSG00000135686_1 (sequence is synthesized)
ccgtagcgcgtcctgccagggctgaaatctctttaatgatggagggaagcaggcagacgcgagtgtctcggccatacaagatcagcgaatcatcaaaggtataccgctgggccgaccact

SEQ ID NO: 321426 - DNA, 120 bp, Artificial Sequence
  ENSG00000135686_2 (sequence is synthesized)
caagcacggtgctgcagcggctgaacgagcagcgtctccgcgggctcttctgcgacgtcgtcctggtggccgatgagcagcgtgtgccagcccatcgcaacctgctggccgtgtgcagcg

SEQ ID NO: 321427 - DNA, 120 bp, Artificial Sequence
  ENSG00000135686_3 (sequence is synthesized)
actacttcaactccatgttcaccatcggcatgcgggaagctttccagaaggaggtggagctgatcggcgcctcctacattgggctcaaggccgtggtggacttcctgtacggcggggagc

SEQ ID NO: 321428 - DNA, 120 bp, Artificial Sequence
  ENSG00000135686_4 (sequence is synthesized)
tggtgctggatggcggcaacattgactacgtcctggagacggctcacctgctgcagatctggacggtggtagacttctgctgtgagtacctggagcaggaggtgagcgaggacaactacc

SEQ ID NO: 321429 - DNA, 120 bp, Artificial Sequence
  ENSG00000135686_5 (sequence is synthesized)
tgtacctgcaggagctggcctccatctacagcctcaagcggcttgatgccttcatcgatggcttcatcctgaaccacttcggcacgctgtcctttacgcccgacttcctgcagaacgtct

SEQ ID NO: 321430 - DNA, 120 bp, Artificial Sequence
  ENSG00000135686_6 (sequence is synthesized)
ccatgcagaagctgtgtgtctacctgagcagcagcgaggtgcagcgggagtgtgagcacgacctcctgcaggccgccctgcagtggctgacgcagcagcccgagcgcgaggcccacgccc

SEQ ID NO: 321431 - DNA, 120 bp, Artificial Sequence
  ENSG00000135686_7 (sequence is synthesized)
gccaggtgctggagaacatccacttcccgctcatccccaagaacgacctgctgcaccgcgtcaagccggccgtgtgctcgctgctgcccaaggaggccaactgcgagggcttcatcgagg

SEQ ID NO: 321432 - DNA, 120 bp, Artificial Sequence
  ENSG00000135686_8 (sequence is synthesized)
aggccgtgcgctaccacaacaacctggcggcccagcccgtcatgcagaccaagcgcacggcgctgcgcaccaaccaggagcgcctgctgtttgtgggcggcgaggtctccgagcggtgtc

SEQ ID NO: 321433 - DNA, 120 bp, Artificial Sequence
  ENSG00000135686_9 (sequence is synthesized)
tggagctcagtgacgacacctgctacctggacgccaagagcgagcagtgggtcaaagagacgccgctgcccgcccggcggagccaccactgtgtcgcggtgctggggggcttcatcttca

SEQ ID NO: 321434 - DNA, 120 bp, Artificial Sequence
  ENSG00000135686_10 (sequence is synthesized)
tcgccggcggcagcttctcacgggacaacggaggggatgcggcctccaatcttctttataggtatgacccccgctgtaaacagtggatcaaggtggcctccatgaaccagcgccgtgtgg

SEQ ID NO: 321435 - DNA, 120 bp, Artificial Sequence
  ENSG00000135686_11 (sequence is synthesized)
atttctaccttgcctccatcgaagacatgctggtggccatcggcggccggaatgagaacggagcgctctcttcagtagagacgtacagtcccaagactgactcctggtcctatgtggccg

SEQ ID NO: 321436 - DNA, 120 bp, Artificial Sequence
  ENSG00000135686_12 (sequence is synthesized)
gcttgccaaggttcacgtacggccacgcgggcaccatctacaaagacttcgtgtacatctcggggggccacgactaccaaattggcccctaccgcaagaacctgctatgctacgaccacc

SEQ ID NO: 321437 - DNA, 120 bp, Artificial Sequence
  ENSG00000135686_13 (sequence is synthesized)
ggacagacgtgtgggaggagcggcggcccatgaccacggcgcgcggctggcacagcatgtgcagcctgggtgacagcatctactccatcgggggcagcgatgacaacatcgagtccatgg

SEQ ID NO: 321438 - DNA, 120 bp, Artificial Sequence
  ENSG00000135686_14 (sequence is synthesized)
agcgcttcgacgtgctgggcgtggaggcctacagcccgcagtgcaaccagtggacccgcgtggcgccgctgctgcacgccaacagcgagtcgggcgtggcagtgtgggagggccgcatct

SEQ ID NO: 321439 - DNA, 120 bp, Artificial Sequence
  ENSG00000135686_15 (sequence is synthesized)
acatcctgggcggctacagctgggagaacactgccttctccaagaccgtgcaggtgtacgaccgcgaggccgacaagtggagcaggggcgtcgacctgcccaaggccatcgctggcgggt

SEQ ID NO: 321440 - DNA, 120 bp, Artificial Sequence
  ENSG00000135686_16 (sequence is synthesized)
ccgcctgtgtctgcgccctggagccacggccagaggacaagaagaagaaaggcaaaggcaagaggcaccaggaccggggccagtgaccctagctgcgcctcttgggaccatcctcaccgt

SEQ ID NO: 321441 - DNA, 120 bp, Artificial Sequence
  ENSG00000135686_17 (sequence is synthesized)
cacctcccagggctctgtagaccagcagcaacttcttagtattccggaaacattatgtacaacttagcagctttttttacttttatgattcttggtatttctatgatatcacagtaacca

SEQ ID NO: 321442 - DNA, 120 bp, Artificial Sequence
  ENSG00000135686_18 (sequence is synthesized)
attaaatactatctgtaactttacatatcttgcttgaataactaaccctgggcccaggcagtgagcaaccccttgtatcttcacaggtctttgccccgtgttatgattcctcatgggtcc

SEQ ID NO: 321443 - DNA, 120 bp, Artificial Sequence
  ENSG00000135686_19 (sequence is synthesized)
ttgctgactgtccccctgagagtagctggcacgtgggtaacacagaaatttctgtagtgaagcttgggcctcaaagggttctcttaggccacctagtccaagcctccccaaacctggctg

SEQ ID NO: 321444 - DNA, 120 bp, Artificial Sequence
  ENSG00000135686_20 (sequence is synthesized)
aacttttaagaatacagatgcgtgagccccgctcagaattatggaatccaaaaccaccaggaacggggaggaggtggtgcccagaagctgtattttaactagttcttggaattctgggta

SEQ ID NO: 321445 - DNA, 120 bp, Artificial Sequence
  ENSG00000135686_21 (sequence is synthesized)
ttagtcacatctgggaatcactggcaaggtccagtgtgtttgttttataaatgagtgcacagagaccacccatgagggtgagtgagtgagtgaccaggggccacgcagctcgctagactg

SEQ ID NO: 321446 - DNA, 120 bp, Artificial Sequence
  ENSG00000135686_22 (sequence is synthesized)
tcagatgagacatgatgacttcccgctggggagctgttctccgtatcaggtgaacgctgtttctgaataattccgtctttcctcattggaaaccttcttgaattctaaaacgttacaggt

SEQ ID NO: 321447 - DNA, 120 bp, Artificial Sequence
  ENSG00000135686_23 (sequence is synthesized)
aaccaaaaacgaaaaaaggtatgaagctctttatacatatttttttgtaatttgtgcatttttttccttttttttttttctgaacccactgtcttttatattactgatgtactgagctcc

SEQ ID NO: 321448 - DNA, 120 bp, Artificial Sequence
  ENSG00000135686_24 (sequence is synthesized)
caaatctgtttatttctcaggaaagaaaaagtgagtgctatggaatttgccatcgttctctgtgactctatcttgaggcgctgttgaaagttcctgcacagaggagcacatgtggatccc

SEQ ID NO: 321449 - DNA, 120 bp, Artificial Sequence
  ENSG00000135686_25 (sequence is synthesized)
tgagaaggcagtggagggctccctaactcccacgccaggtcctgccccagttttctgcttctaagtagtttcgtgctgctgggcaaattctcgaacaagtccgtgtgttccctcatccac

SEQ ID NO: 321450 - DNA, 120 bp, Artificial Sequence
  ENSG00000135686_26 (sequence is synthesized)
cccgcttagccacaggattagatggaataccctccaggctcctcccgggtgatagggccattcagcctctgagctgttcgtacccggatggcatccccttcaggatgtggagctggcctg

SEQ ID NO: 321451 - DNA, 120 bp, Artificial Sequence
  ENSG00000135686_27 (sequence is synthesized)
cactgactcctgcaaacagttcctaaagcaggtgtcagggtcgcttgccctttaagagggctcttagctgcccgagtggatgagaaacgtgcagaactatgggaggataggagtgtgatg

SEQ ID NO: 321452 - DNA, 120 bp, Artificial Sequence
  ENSG00000135686_28 (sequence is synthesized)
ggttttaagcatgagccaaggaaggcatgaatgagctgtacctcacccagcatccgatggcagagatcagtaaacttcaagatgtgcttcatcttcaatcctagtctaacaccagtcttc

SEQ ID NO: 321453 - DNA, 120 bp, Artificial Sequence
  ENSG00000135686_29 (sequence is synthesized)
ctgcagacagttccgagagcaggtctcgatgtcacttgccctttaagagggctctcagctgctcgagtggatgaggatcaatgtgttaagattgatattagactaggaaaaaaatcttag

SEQ ID NO: 321454 - DNA, 120 bp, Artificial Sequence
  ENSG00000135686_30 (sequence is synthesized)
ttaactttaatttccatttcttctgcttctttgctgcccctcctttcccttcccttcagggtttactgtggttctcactggtctgtttatgtagccatccagaagagatgagagcatttt

SEQ ID NO: 321455 - DNA, 120 bp, Artificial Sequence
  ENSG00000135686_31 (sequence is synthesized)
agaggttctgcgaggcatacaaacaaacagaccaaaaggctggaaactctgcttggagctctgcagcattccggtgtatgaaaggttccgagaagtctcaacccagcatttccaaacttc

SEQ ID NO: 321456 - DNA, 120 bp, Artificial Sequence
  ENSG00000135686_32 (sequence is synthesized)
tttgagcctaaaagtcgtttgtctcatacctagtcccagacccccacaaaacatgttttgcagaacttctgccaactttgggatagcttacccccttcctattcgggaaaggttttattg

SEQ ID NO: 321457 - DNA, 120 bp, Artificial Sequence
  ENSG00000135686_33 (sequence is synthesized)
cttgtagacccctcagaaggcagggtagggtgtacgtgggctgttctccccatctcagcctgggtcatgaacaaacgggcagttgtttggcctgaatctcggggcaagttggggagagca

SEQ ID NO: 321458 - DNA, 120 bp, Artificial Sequence
  ENSG00000135686_34 (sequence is synthesized)
catagaaagactctgtgagtgatttggggagtgggatagctttgaccttggagagaggagagccattggttttcagcctaagccagctcttttatgttttgcttctgggacttgtccctg

SEQ ID NO: 321459 - DNA, 120 bp, Artificial Sequence
  ENSG00000135686_35 (sequence is synthesized)
gaaatgtgtgagcttctggcctctattctgattttcttgtgcctcatgagttacatacgacgtcctgcgcttcatattttgtggtgtctctcctgatactatgaaggtggtttgtaattg

SEQ ID NO: 321460 - DNA, 120 bp, Artificial Sequence
  ENSG00000135686_36 (sequence is synthesized)
acatggctttgaccctaatattactaaggttgggaccacccttttaaagggaggataaacaagtttcatcttgtgggtcaacttctaatatttgatggtggctacactgtgacaagaaag

SEQ ID NO: 321461 - DNA, 120 bp, Artificial Sequence
  ENSG00000135686_37 (sequence is synthesized)
gtttttgagcttgttggggtcagtggatgggcacaagggcacccagtggtggtgcccgggccaggtttttgttacttgtctttttaagttgaaaattcaccctactgtgcatgaaaatgg

SEQ ID NO: 321462 - DNA, 78 bp, Artificial Sequence
  ENSG00000135686_38 (sequence is synthesized)
aacaaaagattagccagggatggtggggcatgcagtagtcccagctgcttaggaggctgaggtgggagaatcacctga

SEQ ID NO: 321463 - DNA, 88 bp, Artificial Sequence
  ENSG00000135686_39 (sequence is synthesized)
agtgagctatgaccacaccactgcactctaagaataaaatgttttttaactcagatgggcagagtttgggctgtgcttatgcagtggc

SEQ ID NO: 321464 - DNA, 120 bp, Artificial Sequence
  ENSG00000135686_40 (sequence is synthesized)
actcagatgggcagagtttgggctgtgcttatgcagtggccatttgaaccgcacagtcacgaatgtggggttttaaactagagtgatgaaggcacaggtgcttgcaggctgccattttga

SEQ ID NO: 321465 - DNA, 120 bp, Artificial Sequence
  ENSG00000135686_41 (sequence is synthesized)
gagggaaacagccacacatgtcatcatgttaaactttcagtgtttcaagctattctgcttgaattttgaagacacctggatctttttttttttttaacatttcaaaataagcatggcagg

SEQ ID NO: 321466 - DNA, 120 bp, Artificial Sequence
  ENSG00000135686_42 (sequence is synthesized)
cttctattgaggtttggacttctctcatttctaaagaattagagttgtaacttcatattagttgtaagtttggggtttggtcctcacccaagttggaaagctgtttgcttaagacataga

SEQ ID NO: 321467 - DNA, 120 bp, Artificial Sequence
  ENSG00000135686_43 (sequence is synthesized)
tgtattataataatagaagggagggagtagaaagctgatgaacccttgttacttatagcaaacttcctgctgttttaaatgcacagagattattttatcaactgtggttagcacgcaatt

SEQ ID NO: 321468 - DNA, 120 bp, Artificial Sequence
  ENSG00000135686_44 (sequence is synthesized)
ggtatttttattgttctgccattttattgaggctatcaagtgggacttcagacctggctctgagcaggaccacacgtgtgtatttatattgagtgccctcactcatgataaggtgacttc

SEQ ID NO: 321469 - DNA, 120 bp, Artificial Sequence
  ENSG00000135686_45 (sequence is synthesized)
atggagacccagaaactcaccctaaggggtgttcacctttgaggtgggcatccagatgctgaggggaagtggggtccatcctctgaggtccaggggcctactttgtgagctcagttgtgt

SEQ ID NO: 321470 - DNA, 120 bp, Artificial Sequence
  ENSG00000135686_46 (sequence is synthesized)
tcacctgtggttcagtgtacctcggcccctaagccaagtgatcgttcagtgacttgcagcaatgtgggaagtgaggggacccctgccacaccccccaccaccccctgtagagtcactgac

SEQ ID NO: 321471 - DNA, 120 bp, Artificial Sequence
  ENSG00000135686_47 (sequence is synthesized)
cttcatccttcaccctggtcctccatggtgcagcagcatctcatgggccttgtggctgtcagagcccgtggttggaaccccgtccactggtcccaaacctggaggggcagctgcagatga

SEQ ID NO: 321472 - DNA, 120 bp, Artificial Sequence
  ENSG00000135686_48 (sequence is synthesized)
ggtttagacctcctggtgtctccgtggattctgagtgcccaggaggggaggggagggggtggcatcctggcctctaggataaatgcctggagtatagggcagcgccacgggcacttggag

SEQ ID NO: 321473 - DNA, 120 bp, Artificial Sequence
  ENSG00000135686_49 (sequence is synthesized)
accctgtcctgcgcatctgccaagcctggcagtttttagagttttttgaaatgttttgatactttttgatacaatttgctaataactgttttgtagaatgcctgccggggttttccacct

SEQ ID NO: 321474 - DNA, 120 bp, Artificial Sequence
  ENSG00000135686_50 (sequence is synthesized)
catccctttcctccggccccttgatttgtgctggacaacaaatggcagcaccaggacctcgcctcatgtggctttgtcttggatcttgcccttctccatcgctgatgtgatacagctcta

SEQ ID NO: 321475 - DNA, 120 bp, Artificial Sequence
  ENSG00000135686_51 (sequence is synthesized)
gaatttcgtgaagttgcatgcaaagttgcatgcagcccgtgggtatgactgtctcaggcccccagctcatttgccaagaggaaaccttaacccccctgagagggtctgcgtttcttctag

SEQ ID NO: 321476 - DNA, 120 bp, Artificial Sequence
  ENSG00000135686_52 (sequence is synthesized)
agctcctacctcagtggtgtgcacagagttggagacacctgagggctggtccacgtctcacctttgccatacgggtcatttcttgatcaaatatatgactggggtcctggtttactcccg

SEQ ID NO: 321477 - DNA, 120 bp, Artificial Sequence
  ENSG00000135686_53 (sequence is synthesized)
cccaccctttcttttaaagtattcttaacatgaaatccacaaaagcggaaacaatgaaccattcttgcactttacagaatcattgtccttagctttagaggttgttaatttcttgttttt

SEQ ID NO: 321478 - DNA, 120 bp, Artificial Sequence
  ENSG00000135686_54 (sequence is synthesized)
aacatgaacagaatgtgtggttctgaaggtgtgtgggggtctcaagaaattgtcctttggggccgggcgcagtggctcacgcctgtactcccagcactctgggaggccaagggggacgga

SEQ ID NO: 321479 - DNA, 120 bp, Artificial Sequence
  ENSG00000135686_55 (sequence is synthesized)
ttgtcctttggttgccttagttaccagagttgaatgaatgtacacatttcggtagtgggggggcagagcggataaccccttccttgtctgtttcctttgagaaaggacactccacctttt

SEQ ID NO: 321480 - DNA, 120 bp, Artificial Sequence
  ENSG00000135686_56 (sequence is synthesized)
caaaggtacttaaagccatctttacagattgcttgtaatgtaaggaaagagtcatgtcctttggattgattgaggttaaatcatcaaccactagccccctttcaaaatcagcgagatatt

SEQ ID NO: 321481 - DNA, 120 bp, Artificial Sequence
  ENSG00000135686_57 (sequence is synthesized)
tgatgattaagtgattcattgggtatgttctggctactgatgttactgaaatctgcaatcgtgtatgttttttaatttgttgcttttgtatttgtaattttatgacatttcgaagtttct

SEQ ID NO: 321482 - DNA, 120 bp, Artificial Sequence
  ENSG00000135686_58 (sequence is synthesized)
gtgtcttaactctttttaattaattttctgcacgttgcttttttctctttgtttttaattccatacagagtattcaattcttgaaacacattaaaataatttgcttgctagggtatggtt

SEQ ID NO: 321483 - DNA, 120 bp, Artificial Sequence
  ENSG00000135686_59 (sequence is synthesized)
tattttataattacattcctagtcttgtgtggttattgtaatgatgtctggtcctaatttctctgcccgtatgaaaaagaaccccttgcctgttgatcctaaatataatttggaaattaa

SEQ ID NO: 321484 - DNA, 80 bp, Artificial Sequence
  ENSG00000135686_60 (sequence is synthesized)
ctgtccccgccgcgtccgtagcgcgtcctgccaggtgggcctccgcgcgcgcccaccctccagcccgggaccgccaggaa

SEQ ID NO: 321485 - DNA, 120 bp, Artificial Sequence
  ENSG00000135686_61 (sequence is synthesized)
gagttccgcctgggctgcggggtccgagcgaacgacagcggcgtccccggagaccccgccggcgagccggtgtcagcagcgtcgctttctccaacgctgaggtcgggagggagcttgggg

SEQ ID NO: 321486 - DNA, 120 bp, Artificial Sequence
  ENSG00000135686_62 (sequence is synthesized)
aggaggcgctctgggaaacccccggccggacggggcctgcggtcccatgtttactggaagaccttttccagtgacctgggattgtcactgtgcttgggggtggccttgacccttcacctg

SEQ ID NO: 321487 - DNA, 120 bp, Artificial Sequence
  ENSG00000135686_63 (sequence is synthesized)
gcctcctcgccgccggctggagcctgctgggcggccgttgcgctgagttccgcctgggctgcggggtccgagcgaacgacagcggcgtccccggagaccccgccggcgagccggtgtcag

SEQ ID NO: 321488 - DNA, 120 bp, Artificial Sequence
  ENSG00000135686_64 (sequence is synthesized)
gagcgtctccatcccacttttggggattcagagcatcttggtgaaacctcgggggctcagagctcccacctgaagaagccctctttattcaggtgcagttccctttcccaaacattctcc

SEQ ID NO: 321489 - DNA, 120 bp, Artificial Sequence
  ENSG00000135686_65 (sequence is synthesized)
ggggttgtgcattccgcagacacatttgggaaccgcagcgccagatgttgatgctgtcccgggttcggggaagggaaggtacaggtatctcaactccacaggtggcctccatgaaccagc

SEQ ID NO: 321490 - DNA, 120 bp, Artificial Sequence
  ENSG00000135686_66 (sequence is synthesized)
cttctttataggtatgacccccgctgtaaacagtggatcaaggtgagattaaagccagattatttcttttctcttgaggactctctcggtttccttaacctagccttgactttccttacc

SEQ ID NO: 321491 - DNA, 120 bp, Artificial Sequence
  ENSG00000135686_67 (sequence is synthesized)
tctctggggccttgacaactatcctgcttctgaatgaggtgtgatgataaagtgacgagcagaataccccggggcctacatcctggacagggagagggagagccgacccaccccttcgag

SEQ ID NO: 321492 - DNA, 120 bp, Artificial Sequence
  ENSG00000135686_68 (sequence is synthesized)
gggtccgtcatcgttcagagcagcactgcctggcggggctttctgtgcagatggaagggtctgtctgtacttcccgatacggtagccacagccgcatgtggcgactgagcacttgaaatg

SEQ ID NO: 321493 - DNA, 120 bp, Artificial Sequence
  ENSG00000135686_69 (sequence is synthesized)
tggccagtgcgactgaagaagtcaattttcaattttatttcactttaaccgattgacgtgtaagtgtatgtggccgcacgaggcgtggctaccctattggacagtagcatgggtctagat

SEQ ID NO: 321494 - DNA, 120 bp, Artificial Sequence
  ENSG00000135686_70 (sequence is synthesized)
gtttgatccatggttcaacatccccaggtcctggagtctctgtggggctcctctggaagcattttgggagatagtttaaggagaccactagtgctcacgcctggcccttgggcatgtatt

SEQ ID NO: 321495 - DNA, 120 bp, Artificial Sequence
  ENSG00000135686_71 (sequence is synthesized)
gtgtcctgattctgggaagagcgtgggccttgatgtcagacctgaggtctcatcccagcctggctaagtcatagctaggaaatttcagattcttgtcctctccacattttggattcccct

SEQ ID NO: 321496 - DNA, 120 bp, Artificial Sequence
  ENSG00000135686_72 (sequence is synthesized)
tctgggaatacgtgggggacagggagtgcagtagctcatgttgactggcaagcccctggcgtagggaaggtgtctcctttctgctgggagcgctctccagccactcggtccccgggacag

SEQ ID NO: 321497 - DNA, 120 bp, Artificial Sequence
  ENSG00000135686_73 (sequence is synthesized)
tccatctcagcctctatactcacacctcagcgtcgcgcccagctcagtgctgttctcagctcaaaacccagtcagaatggactccagctgaccttttgattttactctcagaaatctgag

SEQ ID NO: 321498 - DNA, 120 bp, Artificial Sequence
  ENSG00000135686_74 (sequence is synthesized)
actgccctccaaggtcgaagtgtcaccactggaaagggtccctggctttggagcctcctcccgaagcctggcagcagtggcagcagtgtgtttgccttggattcgtttaaaaaaagaaaa

SEQ ID NO: 321499 - DNA, 120 bp, Artificial Sequence
  ENSG00000135686_75 (sequence is synthesized)
cagcagtgtgtttgccttggattcgtttaaaaaaagaaaaaaaaaagttggctcttctactttttgtgtgtgtgtgtgtgagacagagttgttctgtcacccaagctggagtgcagtggc

SEQ ID NO: 321500 - DNA, 72 bp, Artificial Sequence
  ENSG00000135686_76 (sequence is synthesized)
catgttggccaggctggtctcgaactccgtgacctcaggtaatccacccaccttggctctgtttaatttcct

SEQ ID NO: 321501 - DNA, 120 bp, Artificial Sequence
  ENSG00000135686_77 (sequence is synthesized)
gtcgaatgccacgtcctgctctgttaacacggagtggcagagcagcactaactttacaaatctgatgtggggagaggaaagatgaatttttatttcataaagccactagatcagcaattc

SEQ ID NO: 321502 - DNA, 120 bp, Artificial Sequence
  ENSG00000135686_78 (sequence is synthesized)
tgacccctgtgaccacagagttcccatccacgcggctaacgacatgaccagagaagttcgggggttcagagcatctccatcccccttttggggactcagagcgtctccatcccacttttg

SEQ ID NO: 321503 - DNA, 120 bp, Artificial Sequence
  ENSG00000135697_0 (sequence is synthesized)
gtgaatgtaaagagatccagggctcttggagagggacaagtgagagccagccaaaaaggaaaaagcaaaggcagaaacggcatcaggagagacagagatgtgaaggagggaaggagcagg

SEQ ID NO: 321504 - DNA, 120 bp, Artificial Sequence
  ENSG00000135697_1 (sequence is synthesized)
agagcaggaaggaaacgcaggaggagggagcagcatctcctgtgaacacagaggagcacctgtttgctgttaaaatcgatctccctcggcaccctgagcaatggatataatatttggcag

SEQ ID NO: 321505 - DNA, 120 bp, Artificial Sequence
  ENSG00000135697_2 (sequence is synthesized)
gaataggaaagaacagctggagcctgtgagggccaaagtgacaggcaagattccagcatggctgcagggaaccctgctccgcaatgggcctgggatgcacacagttggggagtccagata

SEQ ID NO: 321506 - DNA, 120 bp, Artificial Sequence
  ENSG00000135697_3 (sequence is synthesized)
caaccattggttcgacggccttgccctgctccacagcttcaccatcagagacggtgaagtctattacaggagcaaatacctgagaagcgatacctacaacaccaatattgaggcaaacag

SEQ ID NO: 321507 - DNA, 120 bp, Artificial Sequence
  ENSG00000135697_4 (sequence is synthesized)
gattgtggtgtctgagtttggaacaatggcctatccggacccctgcaaaaacatattttccaaagctttctcctacttgtctcacaccatccccgatttcaccgacaactgcctgatcaa

SEQ ID NO: 321508 - DNA, 120 bp, Artificial Sequence
  ENSG00000135697_5 (sequence is synthesized)
catcatgaagtgcggagaagacttctacgcgacctcagagaccaattacatcaggaaaatcaacccacagactctggaaaccctggagaaggttgattatcgtaaatacgtggcggtaaa

SEQ ID NO: 321509 - DNA, 120 bp, Artificial Sequence
  ENSG00000135697_6 (sequence is synthesized)
tctggcaacgtcacatccccattatgatgaggctggaaatgttctaaacatgggcacatccattgtggaaaaggggaagacaaagtatgtgatttttaagatccctgccacagtaccaga

SEQ ID NO: 321510 - DNA, 120 bp, Artificial Sequence
  ENSG00000135697_7 (sequence is synthesized)
gggcaagaagcaggggaagagcccctggaagcacacagaggtgttctgctccatcccatcccgctccctgctctccccaagctactaccacagctttggagtcaccgagaactatgtcat

SEQ ID NO: 321511 - DNA, 120 bp, Artificial Sequence
  ENSG00000135697_8 (sequence is synthesized)
cttccttgagcagcctttcaggttggatattctcaagatggcaaccgcatacatccggagaatgagctgggcctcctgcctggctttccacagggaggagaagacttatatccacatcat

SEQ ID NO: 321512 - DNA, 120 bp, Artificial Sequence
  ENSG00000135697_9 (sequence is synthesized)
cgaccaaaggaccaggcagcctgtgcagaccaagttttacacagacgccatggtggtcttccatcacgtcaacgcctacgaagaggacggctgcatcgtgtttgacgtcattgcctacga

SEQ ID NO: 321513 - DNA, 120 bp, Artificial Sequence
  ENSG00000135697_10 (sequence is synthesized)
tggccaacctgaaccaggacttcaaggagaactccaggctcacctcggtccccaccctcaggaggtttgccgtgcccctccacgtggacaagaatgcagaagtgggcacaaatttaatca

SEQ ID NO: 321514 - DNA, 120 bp, Artificial Sequence
  ENSG00000135697_11 (sequence is synthesized)
aagtggcatctacaacagccacggccctgaaggaagaagatggccaagtctactgccagccggaatttctttatgaaggcttagagcttccacgggtcaattatgctcacaatggaaagc

SEQ ID NO: 321515 - DNA, 120 bp, Artificial Sequence
  ENSG00000135697_12 (sequence is synthesized)
aataccgatatgtctttgctacaggagttcagtggagtccaatcccaaccaagataataaaatatgacattctcacaaagtcatccttaaaatggagagaggacgactgctggccagcgg

SEQ ID NO: 321516 - DNA, 120 bp, Artificial Sequence
  ENSG00000135697_13 (sequence is synthesized)
aacccctgtttgtgcccgcgccaggtgccaaggatgaggatgacggagtaatcttatcagccattgtctctactgatccccaaaagctgccttttctgctcattctggatgccaaaagct

SEQ ID NO: 321517 - DNA, 120 bp, Artificial Sequence
  ENSG00000135697_14 (sequence is synthesized)
ttacggaattggcccgtgcctctgttgatgtcgatatgcacatggatctccatggattattcattacagacatggactgggacacaaaaaagcaggccgcttctgaggaacagcgggaca

SEQ ID NO: 321518 - DNA, 120 bp, Artificial Sequence
  ENSG00000135697_15 (sequence is synthesized)
gggcttccgactgccacggggctcctctgacctgatggtgttggggtttgggtaggggaggggagctcggctgtcagaactccatggatatgtttctttggatggaggggagggcctttg

SEQ ID NO: 321519 - DNA, 120 bp, Artificial Sequence
  ENSG00000135697_16 (sequence is synthesized)
ttaccttttgcacttattctttctgtgggtgctttgacaagggcatggcaagagagcttgtcagtatcatttctttcattttattttggctgtaaaaattttgtttgaaagtcaaacatt

SEQ ID NO: 321520 - DNA, 120 bp, Artificial Sequence
  ENSG00000135697_17 (sequence is synthesized)
tgaacatcaaatatgtattgattagatccagtccttctaagaaacctcctttcctttaacaaaaagaccttgaccatgaatcagagattgtattcaatgacattatcatcatttttagaa

SEQ ID NO: 321521 - DNA, 120 bp, Artificial Sequence
  ENSG00000135697_18 (sequence is synthesized)
cgagccactaacctattagagaagaggcagataattatttatcattgtgccttcctctgtctctttctctttcctttgctccctcccatgtttctggtggactaaattgtgtatctggga

SEQ ID NO: 321522 - DNA, 120 bp, Artificial Sequence
  ENSG00000135697_19 (sequence is synthesized)
gttctcactttctagccaggcctgatgagttaagttacatgaccaggaaggttatgccactttgtggtcattccatgcaagtcatggcgtaatataaaataataaaaactttaaagtctg

SEQ ID NO: 321523 - DNA, 120 bp, Artificial Sequence
  ENSG00000135697_20 (sequence is synthesized)
agcatcacttcctgactcaagaaagggagagtcggcgacggccggggtgaggttgctcagcctgcaagcagcttaccaggggagcccctcctctaacaccgttggatcccgtgccctagc

SEQ ID NO: 321524 - DNA, 120 bp, Artificial Sequence
  ENSG00000135697_21 (sequence is synthesized)
gccacacttactgctagatgctaggcagggactgtgttgtttttatcttcgtgtctgtatcagtttcctggggctgatgtaaccaagtcctacaaaaaagattgctttaaacaacagaaa

SEQ ID NO: 321525 - DNA, 120 bp, Artificial Sequence
  ENSG00000135698_0 (sequence is synthesized)
atgtgcggtgaggctcgcggccggagtgcggcgctgggcggaagctaccatggcggccgagcgaaagacaaggttgtccaagaatctactgcgcatgaagtttatgcaaaggggactgga

SEQ ID NO: 321526 - DNA, 120 bp, Artificial Sequence
  ENSG00000135698_1 (sequence is synthesized)
ctcagaaaccaagaaacaactagaagaagaagaaaagaaaatcattagtgaagagcactggtacttggatttgccagagcttaaagagaaagagagtttcataatagaagagcagagttt

SEQ ID NO: 321527 - DNA, 120 bp, Artificial Sequence
  ENSG00000135698_2 (sequence is synthesized)
cttactatgtgaagatcttctctatggaagaatgtcattcagaggatttaatcctgaggttgagaaattgatgcttcagatgaatgctaagcacaaagcagaagaagttgaagatgaaac

SEQ ID NO: 321528 - DNA, 120 bp, Artificial Sequence
  ENSG00000135698_3 (sequence is synthesized)
agtagagcttgatgtgtcagatgaagagatggctagaagatatgagaccttggtggggacaattgggaaaaagtttgccagaaagagagaccatgccaattatgaagaagatgaaaatgg

SEQ ID NO: 321529 - DNA, 120 bp, Artificial Sequence
  ENSG00000135698_4 (sequence is synthesized)
aaagaagatgttcttaaagccccaggattaagatggatgccttaagcgatggcccaggggtgcttggtggaagtcagcagggcatctggagctcatcccaatggtgtctctatagttatt

SEQ ID NO: 321530 - DNA, 120 bp, Artificial Sequence
  ENSG00000135698_5 (sequence is synthesized)
aatactgtaacgtttacttgtaaagagattatcattttagaaacatgctgtttttgaaacagatgtgtgatggatgttgtacatcctttgcttcttggtattcattcagagtggattttt

SEQ ID NO: 321531 - DNA, 120 bp, Artificial Sequence
  ENSG00000135698_6 (sequence is synthesized)
agcccctgatctacaaatgtacattgttacagggctgcttcctaaagattttttttacctcaggtttctcttaatatagttctccagtcactgaccttgaattgacttacataaactact

SEQ ID NO: 321532 - DNA, 120 bp, Artificial Sequence
  ENSG00000135698_7 (sequence is synthesized)
gccaatgtttaaattgcccttatgtttatatttattatgtcaagccaattcgtacatacaatttggaatcaaatgtcataagaatttattatataaatttatcaagaataaaaatgcctc

SEQ ID NO: 321533 - DNA, 120 bp, Artificial Sequence
  ENSG00000135698_8 (sequence is synthesized)
tccagccttaagtatttacatgctcccaggtcattgtcagtttatggtattatgttgttttatttaaagcattgaattgatagaaaaatttgctctgtaataaaaatctactttcacata

SEQ ID NO: 321534 - DNA, 120 bp, Artificial Sequence
  ENSG00000135698_9 (sequence is synthesized)
cgctgggcggaagctaccatggcggccgagcgaaagacaaggttgtccaagaatctactgcgcatgaagtcatcatattgggacagatgaaggagatgacccagacacccagtccttaag

SEQ ID NO: 321535 - DNA, 120 bp, Artificial Sequence
  ENSG00000135698_10 (sequence is synthesized)
aaagcccatgaaattgtttctgttcagtttattgatttagtagcacaactaaaaaatattaaacctatagaagttgtacatggatttatacatttttactactccccctcccagccacta

SEQ ID NO: 321536 - DNA, 120 bp, Artificial Sequence
  ENSG00000135698_11 (sequence is synthesized)
accatttctactcattatatagaaaataacaagtcttgaaatatcgccatagctatttaaagaaattggaggcattgcagtctagttttatggtagagaaattgatgcttcagatgaatg

SEQ ID NO: 321537 - DNA, 120 bp, Artificial Sequence
  ENSG00000135698_12 (sequence is synthesized)
ggctcgcggccggagtgcggcgctgggcggaagctaccatggcggccgagcgaaagacaaggttgtccaagaatctactgcgcatgaagatgggactgtctagtttcaggaaaacaagct

SEQ ID NO: 321538 - DNA, 120 bp, Artificial Sequence
  ENSG00000135698_13 (sequence is synthesized)
caggtcttccactgattcttcattgtgtttatgcaaaggggactggactcagaaaccaagaaacaactagaagaagaagaaaagaaaatcattagtgaagagcactggtacttggatttg

SEQ ID NO: 321539 - DNA, 120 bp, Artificial Sequence
  ENSG00000135698_14 (sequence is synthesized)
ttcaaattaaaaatttttccaattgaatttttttctgctaataattgggcttaggtgtttctccaccaggtaccatttctactcattatatagaaaataacaagtcttgaaatatcgcca

SEQ ID NO: 321540 - DNA, 120 bp, Artificial Sequence
  ENSG00000135698_15 (sequence is synthesized)
tagctatttaaagaaattggaggcattgcagtctagttttatggtagaggtgagtagataatttcatatagcagtatacagcccttgacagagccaccataaatattaaaatttcaagtt

SEQ ID NO: 321541 - DNA, 120 bp, Artificial Sequence
  ENSG00000135698_16 (sequence is synthesized)
ggtgaggctcgcggccggagtgcggcgctgggcggaagctaccatggcggccgagcgaaagacaaggttgtccaagaatctactgcgcatgaagaaatacaggtattcatgctagtgaga

SEQ ID NO: 321542 - DNA, 120 bp, Artificial Sequence
  ENSG00000135698_17 (sequence is synthesized)
gactggcagcaggactgttatttactgccatattttgagtcaactttctgcagatttgataagagcagctcaagagtttagcagcatttcagaggaaaaataaaaacgaagagcagactt

SEQ ID NO: 321543 - DNA, 120 bp, Artificial Sequence
  ENSG00000135698_18 (sequence is synthesized)
ggcgctgggcggaagctaccatggcggccgagcgaaagacaaggttgtccaagaatctactgcgcatgaaggtgcggggacgctgagagcgccactccgggcgtttatgcaaaggggact

SEQ ID NO: 321544 - DNA, 120 bp, Artificial Sequence
  ENSG00000135702_0 (sequence is synthesized)
ctctggctgctgctccagctctggcagacacgccaagctttgagaaagctcccagtgaggaactggtcttctggagactctgtgtggcatagagtgattcaaccaccttaagaagacctc

SEQ ID NO: 321545 - DNA, 120 bp, Artificial Sequence
  ENSG00000135702_1 (sequence is synthesized)
tggctttcctggaacacagatgtcgagacatctcccatggatttgtgatcagcgttgcagctctcccagcagccctggacggtggtgagtcccctcagctggccaggacagtactctgct

SEQ ID NO: 321546 - DNA, 120 bp, Artificial Sequence
  ENSG00000135702_2 (sequence is synthesized)
ctcacctctctgcttcttgggctccatcccagctccccatcaactgatcttcttgcaaacccacagggctccaggacaccctccttctggagcccatgctgcctacagcacttcactccc

SEQ ID NO: 321547 - DNA, 120 bp, Artificial Sequence
  ENSG00000135702_3 (sequence is synthesized)
cccatgctgcctacagcacttcactccccaccagtgatgacaacagttgctgttctttgtccactttatttacttgtttatctttaatgacaaaagttttttttttgttgtttttttttt

SEQ ID NO: 321548 - DNA, 120 bp, Artificial Sequence
  ENSG00000135702_4 (sequence is synthesized)
tgagccaccgcgcctggctgacaaaagttttatacctgcctgttaaaaaaattatataatacagaagcacaccttgtaaaaggtgcaatcctcagttatgggcatgactgcgtgttccct

SEQ ID NO: 321549 - DNA, 120 bp, Artificial Sequence
  ENSG00000135702_5 (sequence is synthesized)
tcccccatcttcattataataaccccccaatccccccagatcctgtgagccaggtaccggaattatccctctttcacacacgggtaaagtgatccgtcacagagagatttaagtgatctt

SEQ ID NO: 321550 - DNA, 120 bp, Artificial Sequence
  ENSG00000135702_6 (sequence is synthesized)
cataagcaagatcataggctaggaagtggcagagccaggattcaacctcggcgagcctggtggtgctctgacatccaccgaagcccccatcaagcccttttagctccacaacctaaaagg

SEQ ID NO: 321551 - DNA, 120 bp, Artificial Sequence
  ENSG00000135702_7 (sequence is synthesized)
gtctctctaagaggtatcctgaagcaaaagacaggagttctctttgaaacatagtatttctctctacagatagatagcctgtaggtatgtaagtaggtgggtgggtgggtaggtagacag

SEQ ID NO: 321552 - DNA, 120 bp, Artificial Sequence
  ENSG00000135702_8 (sequence is synthesized)
tttgatgatatcccacattattctgcaactggacttctgctgtgagcacagactatattctggcctatgtcttgactccgtattcctgggaaagtgctcgactgagaccttgggagtctt

SEQ ID NO: 321553 - DNA, 120 bp, Artificial Sequence
  ENSG00000135702_9 (sequence is synthesized)
gggaagtccaatgggtagggtagccgaatctgagggctgatccctgagggcactgggcagtaattggggcatgggatgggcatgagggcccgggtccctaaagttgcccactccacccga

SEQ ID NO: 321554 - DNA, 120 bp, Artificial Sequence
  ENSG00000135702_10 (sequence is synthesized)
aggcccccagccgcccgcatgtggctgccacggttctccagcaagacagtgacagtgctcctcctggcacagaccacctgcctcctgctcttcatcatctcccggccagggccctcatcc

SEQ ID NO: 321555 - DNA, 120 bp, Artificial Sequence
  ENSG00000135702_11 (sequence is synthesized)
cggcggcgaggatcgtgtgcacgtgctggtgctgtcctcgtggcgctcgggctcatccttcttgggccagctcttcagccagcaccccgacgtcttctacctgatggagcccgcgtggca

SEQ ID NO: 321556 - DNA, 120 bp, Artificial Sequence
  ENSG00000135702_12 (sequence is synthesized)
tgtgtggaccaccctgtcgcagggcagcgcggcaacgctgcacatggccgtgcgcgacctgatgcgctctatctttttgtgcgacatggacgtgtttgatgcctacatgccacagagccg

SEQ ID NO: 321557 - DNA, 120 bp, Artificial Sequence
  ENSG00000135702_13 (sequence is synthesized)
aaacctgtccgcctttttcaactgggcaacgagccgcgcgctgtgctcgccgcccgcctgcagcgcctttccccgaggcaccatcagcaagcaggacgtatgcaagacactgtgcacgcg

SEQ ID NO: 321558 - DNA, 120 bp, Artificial Sequence
  ENSG00000135702_14 (sequence is synthesized)
gcagccattcagcctggcccgggaggcctgccgctcctacagccacgtggtgctcaaggaggtgcgcttcttcaacctgcaggtgctctacccgctgctcagcgaccccgcgctcaacct

SEQ ID NO: 321559 - DNA, 120 bp, Artificial Sequence
  ENSG00000135702_15 (sequence is synthesized)
gcgcatcgtgcacctggtgcgcgacccgcgggccgtgctgcgctcccgggaggcggcgggcccgatactggcacgcgacaacggcatcgtgctgggcaccaacggcaagtgggtggaggc

SEQ ID NO: 321560 - DNA, 120 bp, Artificial Sequence
  ENSG00000135702_16 (sequence is synthesized)
cgaccctcacctgcgcctgattcgcgaggtgtgccgcagccacgtgcgcatcgccgaggccgccacactcaagccgccacccttcctgcgcggccgctaccgcctggtgcgcttcgagga

SEQ ID NO: 321561 - DNA, 120 bp, Artificial Sequence
  ENSG00000135702_17 (sequence is synthesized)
cctggcgcgggagccgctggcagagatccgcgcactctacgccttcaccggcctgaccctcacgccacagctcgaggcctggatccacaacatcacccacgggtcggggatcggcaagcc

SEQ ID NO: 321562 - DNA, 120 bp, Artificial Sequence
  ENSG00000135702_18 (sequence is synthesized)
aatcgaggccttccatacttcgtctaggaatgcgcgcaacgtctcccaggcctggcgccacgcgttgcccttcactaagatcctgcgcgtgcaggaggtgtgcgccggcgcgctgcagct

SEQ ID NO: 321563 - DNA, 120 bp, Artificial Sequence
  ENSG00000135702_19 (sequence is synthesized)
gctgggctaccggcctgtgtactctgcggaccagcagcgtgacctcaccctggatctggtgctgccacgaggcccagaccacttcagctgggcatcgcctgactgagaactctgggcctt

SEQ ID NO: 321564 - DNA, 120 bp, Artificial Sequence
  ENSG00000135702_20 (sequence is synthesized)
agagcaggccccgaactgtggtcgccaggcccaggaggcgactgcatggtggagagggagctggggcgcatggggaagcaggtccctactatcaaccgggagtttggggtcctcccctga

SEQ ID NO: 321565 - DNA, 120 bp, Artificial Sequence
  ENSG00000135702_21 (sequence is synthesized)
agtaggcaaggactgcacgtttctttctctcctgattctcggttttcctttgagtcttctggagctgccttctcatcaggtgcactcttcatggaaagcaactcttgcccctacctcttc

SEQ ID NO: 321566 - DNA, 83 bp, Artificial Sequence
  ENSG00000135702_22 (sequence is synthesized)
tgcactcttcatggaaagcaactcttgcccctacctcttctgggcgcagggagtaagttactgctaaattaaattaaatgtgt

SEQ ID NO: 321567 - DNA, 63 bp, Artificial Sequence
  ENSG00000135702_23 (sequence is synthesized)
catagtgaaaccccctctctactaaaaatgcaaaaattagtccacttggactccagaggtgga

SEQ ID NO: 321568 - DNA, 79 bp, Artificial Sequence
  ENSG00000135702_24 (sequence is synthesized)
aatcacttggactcccctagcttgggtggcagagcaagactctatcaaaaaaataagtaataaatttgttcaaaagtcc

SEQ ID NO: 321569 - DNA, 120 bp, Artificial Sequence
  ENSG00000135709_0 (sequence is synthesized)
gccgcggcgccgggaaaggacccggctgctcgcgggcggcgcagtcgccgcagcagccgagtctgacggcgccggttcgctgcccggtccgcccgcggtgagagatgccgtagggccagg

SEQ ID NO: 321570 - DNA, 120 bp, Artificial Sequence
  ENSG00000135709_1 (sequence is synthesized)
caggtgagctgctgtgaaggactcattcttggtagccggcagttactggcaacttgtgagcttggtgggctcctactaacgcacctgggacaccaggctgctgggctcccctctaggcag

SEQ ID NO: 321571 - DNA, 120 bp, Artificial Sequence
  ENSG00000135709_2 (sequence is synthesized)
cctcccctccaggcagcctcaccagcagctcccctgagccatggagaccccagaggtccccgtgggctcgctaatcgactttgggcctgaggcacccacctcttctcccctggaggcacc

SEQ ID NO: 321572 - DNA, 120 bp, Artificial Sequence
  ENSG00000135709_3 (sequence is synthesized)
accccctgtgctgcaggacggcgatggctccctgggggacggtgcatcagagagtgagaccactgagtctgcggacagtgagaatgacatgggcgagtcgccctcgcacccgtcctggga

SEQ ID NO: 321573 - DNA, 120 bp, Artificial Sequence
  ENSG00000135709_4 (sequence is synthesized)
ccaagaccgccgttcctcctccaacgagtccttctcctccaaccagagcaccgagtctacccaggatgaagagaccctggcactcagggacttcatgcgtggctacgtggagaagatctt

SEQ ID NO: 321574 - DNA, 120 bp, Artificial Sequence
  ENSG00000135709_5 (sequence is synthesized)
ctctggaggggaggacttggatcaggaggagaaagccaagtttggagagtactgcagcagtgaaaatggaaaaggccgggagtggtttgctcgatacgtgagtgcccagcgctgcaactc

SEQ ID NO: 321575 - DNA, 120 bp, Artificial Sequence
  ENSG00000135709_6 (sequence is synthesized)
caagtgtgtctcagaggcaaccttctaccgcctggtgcagtcttttgcagtggtgctgttcgagtgtcatcagatggatgactttgggcctgccaagaacctcatgaccatgtgcttcac

SEQ ID NO: 321576 - DNA, 120 bp, Artificial Sequence
  ENSG00000135709_7 (sequence is synthesized)
ctactaccacatcggaaaaccacagctgctgcccccggagtcccgggagaagcccgcgggcagcatcgactcctacctgaaatccgcaaacagctggctggccgaaaagaaggacatcgc

SEQ ID NO: 321577 - DNA, 120 bp, Artificial Sequence
  ENSG00000135709_8 (sequence is synthesized)
cgagcggctgctgaagaacacctcggccaggactgagaatgtcaagggcttcttcggggggctggagaccaagctgaaggggcccctggccaggaggaacgaggaagacgagaacaaacc

SEQ ID NO: 321578 - DNA, 120 bp, Artificial Sequence
  ENSG00000135709_9 (sequence is synthesized)
ccaggagaagcggcccagggctgtgaccgcgtacagccccgaggacgaaaagaagggggagaagatctacctgtacacgcacctgaagcaacagcccatctggcacactctgaggttctg

SEQ ID NO: 321579 - DNA, 120 bp, Artificial Sequence
  ENSG00000135709_10 (sequence is synthesized)
gaatgcagccttttttgacgctgtccattgtgagaggacaaagcgatctcccactaccagggagaagtggtgccacatgacccaggaggagcgcgacgacagcctccggttcaacgagaa

SEQ ID NO: 321580 - DNA, 120 bp, Artificial Sequence
  ENSG00000135709_11 (sequence is synthesized)
catcaccttcgggcagctgggcacattcacgcacaacatgctggcctttggactgaacaagaagctgtgcaatgacttcctgaagaagcaggctgtgattggcaacctggatgaagagca

SEQ ID NO: 321581 - DNA, 120 bp, Artificial Sequence
  ENSG00000135709_12 (sequence is synthesized)
atacaagctgcttagtgaccacattgagcaaatggccactgagtaggccccagaggtcgcactccgcaggaggactgaggccatgtgccattctcccgggcccagcgcccggccgtcacc

SEQ ID NO: 321582 - DNA, 120 bp, Artificial Sequence
  ENSG00000135709_13 (sequence is synthesized)
ccacccgatgacctgcatgaagccagcagcacccagagccactcctgctgccctagaactagcggttagaagaatccgctgttcctccctcatctcctctgcctgtgtctgcgaccccca

SEQ ID NO: 321583 - DNA, 120 bp, Artificial Sequence
  ENSG00000135709_14 (sequence is synthesized)
tccatgtgccaaagtgtcccttgggtcacacagctaaagccgaggtgaccagttgtaccccgagtgccaggcttgtgagatgagaccaagagggaggaggggaaggactccatgggccat

SEQ ID NO: 321584 - DNA, 120 bp, Artificial Sequence
  ENSG00000135709_15 (sequence is synthesized)
cgtgggccaagggctggcgagggtgggggcgggcaagggatgcaggcaggacagccatgaggtggggctgcagccggcacacccagtggtggagggccggcgctgccactcacggtgggt

SEQ ID NO: 321585 - DNA, 120 bp, Artificial Sequence
  ENSG00000135709_16 (sequence is synthesized)
ggccgtgggccaccttccctgcaatgggtgcacacgcggctcccatccagccctctcagcgtggggctgtggctggtcctcactattccccagtctcccgctgtggggcaggaacaggaa

SEQ ID NO: 321586 - DNA, 120 bp, Artificial Sequence
  ENSG00000135709_17 (sequence is synthesized)
gtgacgggaaccttgaggaggaaacgcctgtgttagggagagagtgggtgcggtgtagaggatgctcttggccggctggagcaagacctggctcccaccagagggacgtgtgtgtgcctg

SEQ ID NO: 321587 - DNA, 120 bp, Artificial Sequence
  ENSG00000135709_18 (sequence is synthesized)
cagacggcccgggagctgtgtgtctccgccagagtcacagcagtgccgaggtgtccgcggcagaccacacagaccgtctgaaatgcgcccgcctggcggacagctcccttctgaagcaga

SEQ ID NO: 321588 - DNA, 120 bp, Artificial Sequence
  ENSG00000135709_19 (sequence is synthesized)
gaagcctccatggtcacgaagcagcgttgtgctgtgtgtccctcgcaagaagcacaggaaagagaagtttctttagtagccactagacaaccaccctttctgaaagcaaacagtgctgct

SEQ ID NO: 321589 - DNA, 120 bp, Artificial Sequence
  ENSG00000135709_20 (sequence is synthesized)
ctttattccagacaaggcaggaaagtctgagttgggagtgacagtggctggagagaagcagatctgtgcaacgtgcagggcaagccagtggcgtggcctctgcctctaagcgctgagcat

SEQ ID NO: 321590 - DNA, 120 bp, Artificial Sequence
  ENSG00000135709_21 (sequence is synthesized)
tgggccccttccccaccagacctttgtagctcctccagcctctgcagagactcccttcacctcgcacttactgcctgggaaccacggcccttctcttctgtgggtctgtaccaggtactc

SEQ ID NO: 321591 - DNA, 120 bp, Artificial Sequence
  ENSG00000135709_22 (sequence is synthesized)
caggccagcccatgggcccggggcctgaccccaacacctgcatgctgggtccagagccttctgtttcaccgtgcgtggacactgctaggccgcctggggtcccctgcctcctgcctgtcg

SEQ ID NO: 321592 - DNA, 120 bp, Artificial Sequence
  ENSG00000135709_23 (sequence is synthesized)
ctgccgtggtccctgactgcgaaataggcccgcggggctctccctcctcctgccatcctcccctcccgcccttcctggctacctcctctgacatgcggtcagataagtcccgtcttgttt

SEQ ID NO: 321593 - DNA, 120 bp, Artificial Sequence
  ENSG00000135709_24 (sequence is synthesized)
gtgagtaccacagaaacgcctgagagtcacttacccggccactgcttggaaggtttccctccggggaatgcctccctggaatgttccagagacggaacattctctagagacaacagtctg

SEQ ID NO: 321594 - DNA, 120 bp, Artificial Sequence
  ENSG00000135709_25 (sequence is synthesized)
tgctgcagattggttggatcacagaatgtgtgtctggggcattatctgaaacgtggtgtcatctgatgcatttggaccatatgctgccagactgcagaacgggggagccggggctcaggg

SEQ ID NO: 321595 - DNA, 120 bp, Artificial Sequence
  ENSG00000135709_26 (sequence is synthesized)
cccctgactgcatggtgcatgagtgatctcagcctagcgatgccgctggccagaccgtgaccatgctgccagtgtgctcgccatgagctgggtcagggctggggagttgtgcaggctggg

SEQ ID NO: 321596 - DNA, 120 bp, Artificial Sequence
  ENSG00000135709_27 (sequence is synthesized)
gtgacccttcccccatcattgggccccaacgggcatgtctccaccgaatccatttagagaaatgtcagagcgagggttgtgtggacacccctcgctctgatgccaactgcagataataca

SEQ ID NO: 321597 - DNA, 120 bp, Artificial Sequence
  ENSG00000135709_28 (sequence is synthesized)
cacctcctgcagcgtccagccacggctccagggcactgctctcctccttgcaccggtgaaactcaggccacactcaagggctgactgtccaggcgctcccttcagccgcctcgtcgtcag

SEQ ID NO: 321598 - DNA, 120 bp, Artificial Sequence
  ENSG00000135709_29 (sequence is synthesized)
cgttcttagtcatgcattattcgtgttagctgaaatgcattcagactttgttctgcggtgcccacaggacttacccctgtatgtacaggatttttgtatgaaagttttgtttgattctga

SEQ ID NO: 321599 - DNA, 120 bp, Artificial Sequence
  ENSG00000135709_30 (sequence is synthesized)
ttcgttgggcttttttccaagcactttaacttcagaaatggtcttgacacttttttctccacatagactcttgaaatagccatttcaggggaggaaagggttggggttttctttgtttgt

SEQ ID NO: 321600 - DNA, 120 bp, Artificial Sequence
  ENSG00000135709_31 (sequence is synthesized)
ttgtttgtttccccctttactacctgttcttgtagatctagctcctcagagttggaggaaggctgacagagaaggtctcctctgtgctccatccacacaggatgccggagagacagcccc

SEQ ID NO: 321601 - DNA, 120 bp, Artificial Sequence
  ENSG00000135709_32 (sequence is synthesized)
ttgtgctgtgagcagagcaggcagtggctctggaggctgcctgtggtctccttccggctgtggctgacagtggctctggccagggttgcttggagaaggctcagtgtgcctgggacaggg

SEQ ID NO: 321602 - DNA, 120 bp, Artificial Sequence
  ENSG00000135709_33 (sequence is synthesized)
cttaccacctgccaccaaggtttcctctcttcccccaggacctgggcagagcaggcatgagctgggctgtggtgcagagcaagcagacccagccacactgctcaaaggtccctgcgtggg

SEQ ID NO: 321603 - DNA, 120 bp, Artificial Sequence
  ENSG00000135709_34 (sequence is synthesized)
gaggtgtcacaccaggggcacacccagggccacctgggtgtaggagagctctggtggcccctccgtaaactcaggaagtgtcaggtgatttcctagggagaggttcccagtcccagcagg

SEQ ID NO: 321604 - DNA, 120 bp, Artificial Sequence
  ENSG00000135709_35 (sequence is synthesized)
cagaatgcccaaaaccaggagcacgaaggcctgtcatccatggggccattgcaggcactctgccgcccgaccttgagggctgtgccaatcctagtgaaccaaaatgcaaacaactcacac

SEQ ID NO: 321605 - DNA, 120 bp, Artificial Sequence
  ENSG00000135709_36 (sequence is synthesized)
aagtgaaaagctccctgctttgaaaacaggacatgttgacaggcagcatggtatgtttttagcctttgttacagttttagcaacattgatgtctaagaggggccgtggtaatagattgca

SEQ ID NO: 321606 - DNA, 120 bp, Artificial Sequence
  ENSG00000135709_37 (sequence is synthesized)
tctgccctgtgcatgcgcatgtttaaccacaggccagagaactcaattctgatgtcgtaagttctctgtaagtgaaatggggtagactgtatgattttcctattgccaaaagaaagaaag

SEQ ID NO: 321607 - DNA, 120 bp, Artificial Sequence
  ENSG00000135709_38 (sequence is synthesized)
ggggccaaacagctctgaaatttccaaaaaatggctagagggagagtccagtttctgagctctgtacccaaattaaaatcctgatgttcaggttaatccaagcaacacgcattgggttta

SEQ ID NO: 321608 - DNA, 120 bp, Artificial Sequence
  ENSG00000135709_39 (sequence is synthesized)
aaaccagcaccgaggcccagtgggggaatcacagacatcaccaagtctcgtcttctttccttcctgtgagttgaaaccaaacaggcctctcgctcactcctcccagcccagtaatgctga

SEQ ID NO: 321609 - DNA, 120 bp, Artificial Sequence
  ENSG00000135709_40 (sequence is synthesized)
ggagttcagttgtgaggaaagaaggctggagctgtgagattcgcttttccctaggctgttccgcgtgggttaccttatcaccctggagcacttggtattccagacccctgacatgaggaa

SEQ ID NO: 321610 - DNA, 120 bp, Artificial Sequence
  ENSG00000135709_41 (sequence is synthesized)
tgcaggttcacactgtaaagagtttgtgaaaggtttcagtctaactggggttccttagctggaagccagggctggaagctacaggcctgaccttcctgggtcccactatctgttggcatt

SEQ ID NO: 321611 - DNA, 120 bp, Artificial Sequence
  ENSG00000135709_42 (sequence is synthesized)
aagtgctgggattacaggcgtgaggcatcacacctgcctctgttggctttttagttaggaaggatccagctaggcccgtgtggttagatcagctttgttactgaattacctaaaaccaga

SEQ ID NO: 321612 - DNA, 120 bp, Artificial Sequence
  ENSG00000135709_43 (sequence is synthesized)
gttactgaattacctaaaaccagaccacagcacagccagggagcccagtagtgtttccaagaacagtgtggagcttgagaaagagaactttaaaaattagagggtccctttctgcagagg

SEQ ID NO: 321613 - DNA, 120 bp, Artificial Sequence
  ENSG00000135709_44 (sequence is synthesized)
aagggatgctcgcagggtggcagtggcccagccccagcctcagggacggggagggagagccccctctgggcccagcaggcaggtgttctgaggctggtccctcctcagtttccgcagcca

SEQ ID NO: 321614 - DNA, 120 bp, Artificial Sequence
  ENSG00000135709_45 (sequence is synthesized)
caaggcgaaacggccagattctcactcaaggtcgttctcactccttttcctgtcccgtttccagtcccactgagccattcacttctgctgaaccatttttcttaggatgcagccgtctca

SEQ ID NO: 321615 - DNA, 120 bp, Artificial Sequence
  ENSG00000135709_46 (sequence is synthesized)
ctcccttgtcctgtaaatcgtgtattcatgttgatgattcttggagataggtttcactttttcccagctgcgtccacaggaaaggggagtcggatgccagctgcaccccgcctggctcgc

SEQ ID NO: 321616 - DNA, 120 bp, Artificial Sequence
  ENSG00000135709_47 (sequence is synthesized)
acaggctaagaccacagacagagcagggcttcccggagccacacaggccacgcaccccaggaacccttgctgccgcgggccaggaacaggaatgtgttggtgcctgagacaccaaatgga

SEQ ID NO: 321617 - DNA, 120 bp, Artificial Sequence
  ENSG00000135709_48 (sequence is synthesized)
agaagcacatcaagactgttctcctgcggccaacactggcccggaagccgccctccatacaggccctcagggggcctgccttctgcgcctcagtcccccgtgcatccctgggcctgggta

SEQ ID NO: 321618 - DNA, 120 bp, Artificial Sequence
  ENSG00000135709_49 (sequence is synthesized)
tcacatgctctccaggaaagggacggaatcaatcctgtgaccgatgggctcgcaaggatgggtgccgccgtgggagccctgcctctggtgctggcaagggattgggtttgtgtgggtgtc

SEQ ID NO: 321619 - DNA, 120 bp, Artificial Sequence
  ENSG00000135709_50 (sequence is synthesized)
tctagcctgcagagtgcagtgagtgagagtccttgggagcgcggcgctgcctgtagctgtgcctggggatgcacgtggccacgggatttcagtgggacagcgctcccacaggggctgggg

SEQ ID NO: 321620 - DNA, 120 bp, Artificial Sequence
  ENSG00000135709_51 (sequence is synthesized)
gtgggggtggggtttcttagttactgttggaaagggaaaaattcaccatatccaaggggagagacgatgggctgggtttgtttactccaacttcccttctacacccctcctgcaggacag

SEQ ID NO: 321621 - DNA, 120 bp, Artificial Sequence
  ENSG00000135709_52 (sequence is synthesized)
tacgatttggggagaacccagctccccactttatctgcagactctgggacctgacaaaacagtcagagcctgagtgcactgcagcctgaactcccttgagcagcgctataagggactttg

SEQ ID NO: 321622 - DNA, 120 bp, Artificial Sequence
  ENSG00000135709_53 (sequence is synthesized)
cactttaaaaaggggatgcctgtcagtaaatcccctgtgcattgactagaactggggggctgcgcccgctccctccttaatcctagatgatttgctcatgaaatagaggtgggggacgac

SEQ ID NO: 321623 - DNA, 120 bp, Artificial Sequence
  ENSG00000135709_54 (sequence is synthesized)
cgcatgcactctgggaggtgcagccctaaggggtggactccagatctccctgcaagagacagcttggcttggctttggctgttggggaggagtccctgccatcccggtgagcctggggct

SEQ ID NO: 321624 - DNA, 120 bp, Artificial Sequence
  ENSG00000135709_55 (sequence is synthesized)
gttgcttagggtcttctgggtggacacgtggagaaagagaaggcaaacgttggaacactaggaaaagctagaaattcagacaacacacatggatccccttaaaacatgtaaatgtgtcag

SEQ ID NO: 321625 - DNA, 120 bp, Artificial Sequence
  ENSG00000135709_56 (sequence is synthesized)
aacacggttgacctgccgccttcttgaacctggtggcccccgttggaactatcagtggcgtctcccatgcacacgccctctgctttctctttcctagactcgcggtgctcacatccagac

SEQ ID NO: 321626 - DNA, 120 bp, Artificial Sequence
  ENSG00000135709_57 (sequence is synthesized)
attaccttgttggtagcccccaagtggcgtgcagtgacaccagtatcttctctgttgcatttttgcaatcttgtgtcccgctcggtgatgttctacaaactctgttttaaggttgagaaa

SEQ ID NO: 321627 - DNA, 120 bp, Artificial Sequence
  ENSG00000135709_58 (sequence is synthesized)
gtttcaagggtgaagatctcaaaacagtgctaaaatcaaaggtgtttgctgtgaagaaaaacatgtgtatatattgcaccttgagttgtcagaaggtagaaactgaaataaactaacttt

SEQ ID NO: 321628 - DNA, 120 bp, Artificial Sequence
  ENSG00000135709_59 (sequence is synthesized)
agtgagagttgctggtggctaattaggcagcagtgcgttttagtttctgctgacaattccaggcaggccatggtgggcgtcccagagacaagggcccagctccccggccctttcccctgg

SEQ ID NO: 321629 - DNA, 120 bp, Artificial Sequence
  ENSG00000135709_60 (sequence is synthesized)
caagagtgcctgaggctggatcagaaatagccacgatcgtccagtttgattgattgattgattgatttagttgtgatggagtctcgctgtatttcccaggctggagtgcagaggcacgat

SEQ ID NO: 321630 - DNA, 120 bp, Artificial Sequence
  ENSG00000135709_61 (sequence is synthesized)
cttttttgacgctgtccattgtgagaggacaaagcgatctcccactaccagaggggatgctggagaggaggaggagaagagggagaagtggtgccacatgacccaggaggagcgcgacga

SEQ ID NO: 321631 - DNA, 120 bp, Artificial Sequence
  ENSG00000135709_62 (sequence is synthesized)
tcttactgacggggccagcagtcactccccgggatcacttctagctgcctttgtccccatcagaatggcagaattctcacactcaccagagtggcagaataaaaagatgaacactcacag

SEQ ID NO: 321632 - DNA, 120 bp, Artificial Sequence
  ENSG00000135709_63 (sequence is synthesized)
gcgttggtgaggatgtggagaaactggagctctcctgtatggctaggagcaatgtaaatgagcagccgctgagaaacagtctggcagttcctttaaaggtgaaacacaagagttactctg

SEQ ID NO: 321633 - DNA, 120 bp, Artificial Sequence
  ENSG00000135709_64 (sequence is synthesized)
tgacccagcagctccactcctaggagtcgcccaagagaaaaacatgtcctcacaaaaccttgtacacaaatgtctgtagcaacgtcgtttattatggccccgaggtggaaaccaccttca

SEQ ID NO: 321634 - DNA, 120 bp, Artificial Sequence
  ENSG00000135709_65 (sequence is synthesized)
tggctgtccagtgatgaatgggtaaacaaaatgtggtccatccgttgcatggactattagccagccatgaaaagcaatggcatgctgctccacgctgtagcagggatagacctgggaaac

SEQ ID NO: 321635 - DNA, 120 bp, Artificial Sequence
  ENSG00000135709_66 (sequence is synthesized)
atcgtgaaactcagtggaagaagccagacacagaagcccaagtattgtatcatccctatgaaatgtccagaactgcagattcctagagacacagcagatgacagattgcccgggcagagg

SEQ ID NO: 321636 - DNA, 120 bp, Artificial Sequence
  ENSG00000135709_67 (sequence is synthesized)
gtggggaatggggagcagggcgtgactgctgatggggatggggcttctttatggggtgagagaatgttctggaaatggtggtggctgcacaactctgtgaatacactaaaaatcactgaa

SEQ ID NO: 321637 - DNA, 120 bp, Artificial Sequence
  ENSG00000135709_68 (sequence is synthesized)
gacgagaacaaaccccaggagaagcggcccagggctgtgaccgcgtacagccccgaggacgaaaagaagggggagaagatctacctgtacacgcacctgaagcaacagcccatctgggag

SEQ ID NO: 321638 - DNA, 120 bp, Artificial Sequence
  ENSG00000135720_0 (sequence is synthesized)
gtggctgcagttggcaagatggcgccggtgggggtggagaagaagctgctgctaggtcccaacgggcccgcggtggcggccgccggcgacctgaccagtgaggaggaggaaggccagagc

SEQ ID NO: 321639 - DNA, 120 bp, Artificial Sequence
  ENSG00000135720_1 (sequence is synthesized)
ctatggtcctccattctgagcgaagtgtccacccgcgccaggtccaagctgccgtccggcaagaacatcctggtcttcggtgaagatggttctggtaaaacaaccctcatgactaaacta

SEQ ID NO: 321640 - DNA, 120 bp, Artificial Sequence
  ENSG00000135720_2 (sequence is synthesized)
caaggagctgagcatggcaaaaaaggaagaggcctagaatatctctacctcagtgtccatgatgaggaccgagatgatcacacgcgctgcaacgtgtggattctggatggagacttgtac

SEQ ID NO: 321641 - DNA, 120 bp, Artificial Sequence
  ENSG00000135720_3 (sequence is synthesized)
cacaaaggcctgctgaaatttgcagtttctgctgaatccttgccagagaccctcgtcatttttgttgcagacatgtctagaccttggactgtgatggaatctctgcagaaatgggctagt

SEQ ID NO: 321642 - DNA, 120 bp, Artificial Sequence
  ENSG00000135720_4 (sequence is synthesized)
gttttacgtgagcacattgataaaatgaaaattccaccagaaaaaatgagggagctggaacggaagtttgtgaaagattttcaagactatatggaacctgaagaaggttgtcaaggttcc

SEQ ID NO: 321643 - DNA, 120 bp, Artificial Sequence
  ENSG00000135720_5 (sequence is synthesized)
ccacagagaagaggccctctgacctcaggctccgatgaagaaaatgttgccctgcctctgggtgacaatgtgctgactcataacctggggatcccggtgttggtggtgtgcacaaagtgt

SEQ ID NO: 321644 - DNA, 120 bp, Artificial Sequence
  ENSG00000135720_6 (sequence is synthesized)
gatgcggtgagtgtcctggagaaggagcacgattacagggatgagcatttggactttatccagtcacacctgcggaggttctgccttcagtatggagctgccttgatttacacatcagtg

SEQ ID NO: 321645 - DNA, 120 bp, Artificial Sequence
  ENSG00000135720_7 (sequence is synthesized)
aaagaagagaaaaacctcgacttgttgtataagtatattgttcataaaacatacggtttccacttcaccacacctgccttagttgtggaaaaggatgccgtttttatacctgcaggctgg

SEQ ID NO: 321646 - DNA, 120 bp, Artificial Sequence
  ENSG00000135720_8 (sequence is synthesized)
gacaatgaaaagaaaatagctattttacatgaaaattttacaaccgtgaagccggaagatgcatatgaagactttattgtgaaacctcccgtgagaaagctggtccacgacaaagagttg

SEQ ID NO: 321647 - DNA, 120 bp, Artificial Sequence
  ENSG00000135720_9 (sequence is synthesized)
gcagcagaagatgagcaggtgttcctaatgaagcaacagtcactccttgccaagcaaccagccactcccacgagagcttctgaatctcctgcaagaggaccctctggctctccaaggacc

SEQ ID NO: 321648 - DNA, 120 bp, Artificial Sequence
  ENSG00000135720_10 (sequence is synthesized)
cagggtcggggagggccagccagtgtgcctagctcctccccaggcacgtcagtaaaaaagccggacccaaacatcaaaaataatgcagcaagtgaaggggtgttggccagcttcttcaac

SEQ ID NO: 321649 - DNA, 120 bp, Artificial Sequence
  ENSG00000135720_11 (sequence is synthesized)
agtctgttgagtaaaaagacaggctctcctggaagtcctggtgctggtggggtgcagagcacagccaagaagtcaggacaaaagactgtgttgtcaaatgttcaggaagaactggataga

SEQ ID NO: 321650 - DNA, 120 bp, Artificial Sequence
  ENSG00000135720_12 (sequence is synthesized)
atgactcgaaagccagactctatggtaacaaactcttcaacagaaaatgaagcctgaacctccttaaaaagtgcatatgtcgaatgaccaaataactatgtatattgatctgctaagacc

SEQ ID NO: 321651 - DNA, 120 bp, Artificial Sequence
  ENSG00000135720_13 (sequence is synthesized)
aggatttttctgatatggcacatgctatcagttttttggggcaggggagatgaactttaaaaaaaaaaaaaaaacttcattggcttgtccgagtgtgaaatgcacatttaggaaggttac

SEQ ID NO: 321652 - DNA, 120 bp, Artificial Sequence
  ENSG00000135720_14 (sequence is synthesized)
atgtcagaccctttgttaaggataacccttggactctggggcatgtggctcttttgtgggaggcaagcacatctgggcttcttgtggaggggaaggtagagtgaaagaaagagggcccac

SEQ ID NO: 321653 - DNA, 120 bp, Artificial Sequence
  ENSG00000135720_15 (sequence is synthesized)
tttctaacagggtggagcaaatgagaccaagaaatcattggtaagatgatggttagtctgaccagtttcatgttagtaaattcacttgttcttgggaagcagattaagtagcagaaagtc

SEQ ID NO: 321654 - DNA, 120 bp, Artificial Sequence
  ENSG00000135720_16 (sequence is synthesized)
caggaaagaaagaccagaaggagtaatgagacaagtgatggtggggaagctgaatgttgagggaggtggaggaaggaggagatgagcagtgtcagtaaatactgtgcattcagtagaagt

SEQ ID NO: 321655 - DNA, 120 bp, Artificial Sequence
  ENSG00000135720_17 (sequence is synthesized)
tgaagaatcattgttagaagcatttccaaacaaaacactaagcaaaatgggaattaggcttattttgaatgcatctttaacttacgaaagatgtactaattgtgggggtgcctgagtcag

SEQ ID NO: 321656 - DNA, 120 bp, Artificial Sequence
  ENSG00000135720_18 (sequence is synthesized)
ctgacccaggggtgggaacgatggcagctgcccaggacccatgtgcttggcccaggctatgtcctcgtgagaggtactggggtccacggatatgtgttgtggggcagacagtcactgtgg

SEQ ID NO: 321657 - DNA, 120 bp, Artificial Sequence
  ENSG00000135720_19 (sequence is synthesized)
gatgtcttcaaagtcagcagttacagaattagtttactttgaattttgttgtctaaatagctcctgctttattttttaaattaaattttttgtttttactatcacaggctggcctaacta

SEQ ID NO: 321658 - DNA, 120 bp, Artificial Sequence
  ENSG00000135720_20 (sequence is synthesized)
atacaaaataggtgatgaacctctggttttaccataatgcaatgtgccacggaaagtttgggggaggtttttaatgtaattgcactctggttaattggctcgtaccaagccctgccttat

SEQ ID NO: 321659 - DNA, 120 bp, Artificial Sequence
  ENSG00000135720_21 (sequence is synthesized)
gacttgtggaaagcttcaaggagttccactgatgcaaaagggtcttttcctagcttcctggtctgatcagtgctatgagatggacagataagtgtgaatgttttatacagaaaatggaaa

SEQ ID NO: 321660 - DNA, 120 bp, Artificial Sequence
  ENSG00000135720_22 (sequence is synthesized)
tgatacatttctcttgttaggtgttttcataaaatgtagcattttttttcttatggaaataagagtttcaggtgtctccccacctagggcaaattcatgcacattgtcatgttataccac

SEQ ID NO: 321661 - DNA, 120 bp, Artificial Sequence
  ENSG00000135720_23 (sequence is synthesized)
cattctggaaatgatttctgtggatttgaaattgcacttttaattttatatatgacagcatttaaatgcaaacactaccatgaatttaatgtataaaatgttgtcaaaccaagggaaaaa

SEQ ID NO: 321662 - DNA, 120 bp, Artificial Sequence
  ENSG00000135720_24 (sequence is synthesized)
accacagttcaccatgtggagtttactttttttatatgaatgtttgttgtactgtgtctaagcataacttccctaatgtcattacttttacataccagatttgactgaccactaatgtag

SEQ ID NO: 321663 - DNA, 120 bp, Artificial Sequence
  ENSG00000135720_25 (sequence is synthesized)
tactggggataacttaatatcctatgttgtgtcaagactctttgaagactttcttgaattgctttcgtaaaggtctgaacactgttaaggagaaagctgagtatcaacttgcctttctga

SEQ ID NO: 321664 - DNA, 120 bp, Artificial Sequence
  ENSG00000135720_26 (sequence is synthesized)
tagaaatgtttcttgtgccagttttattgttgagatatactatttttttccttttttaattcagttttttaaaaaaacaaatgtattgtggcttccagttaccaggttgtctaggtaatg

SEQ ID NO: 321665 - DNA, 120 bp, Artificial Sequence
  ENSG00000135720_27 (sequence is synthesized)
acagtaaactgactgtagaatgataattgtggtatagtgaccaatagatgccaaacagcttgtggcctcactaaaggtggggtcgcttagtccccgggagtaaaatgagtgacctcagaa

SEQ ID NO: 321666 - DNA, 120 bp, Artificial Sequence
  ENSG00000135720_28 (sequence is synthesized)
acaagaattcctggaaaggcacatgccgaagaggaatatggtataattttaaattttaatgcaaaattttaatttgtctttattttttatcatttgaactgataagcactttttgtgtca

SEQ ID NO: 321667 - DNA, 120 bp, Artificial Sequence
  ENSG00000135720_29 (sequence is synthesized)
atataaaatatactaaaactgatgaaatgctaagacatgtcttgtgaaggaaggtttcttggagaccacttttatttactcatgagaagtggaagctcctagtatcagaagaagctgata

SEQ ID NO: 321668 - DNA, 120 bp, Artificial Sequence
  ENSG00000135720_30 (sequence is synthesized)
catagtgtcatgtgctcagtggttgccaaagtctaccaactttggggagctgcagggttctttttgggaggtgggaggaagggagatgagttttgttattttggggttttcaagcattgg

SEQ ID NO: 321669 - DNA, 120 bp, Artificial Sequence
  ENSG00000135720_31 (sequence is synthesized)
aaccaaaggccaaataataaacagcctttagtttttaaagtaaaattcattttatttgcagagtacacttgtatggtagactgttaaagacaattttatgactatttatgcacattataa

SEQ ID NO: 321670 - DNA, 120 bp, Artificial Sequence
  ENSG00000135720_32 (sequence is synthesized)
tggttacatctgctttttgtctttaaaataaaaaaaaaaatcagagaaaagcccacctttgaatacgtggctgaagataacagccaagaattggtctttcctaaaaatgcaacagataat

SEQ ID NO: 321671 - DNA, 120 bp, Artificial Sequence
  ENSG00000135720_33 (sequence is synthesized)
gctgctagattgttattttgtttgcacttttttttgattggcattttaaaatcggtatttaaactgaagacattgtcatgttttattaatttaacaaagttgaaagtgactgctctgtac

SEQ ID NO: 321672 - DNA, 120 bp, Artificial Sequence
  ENSG00000135720_34 (sequence is synthesized)
atcatgaccttaacaatgttaatgctgtaagtgaaagttcactgtcgtctgtatactaaatttattggtgtttctaacttaaaagtaagactgcagattatcccccaccagccttagtcc

SEQ ID NO: 321673 - DNA, 120 bp, Artificial Sequence
  ENSG00000135720_35 (sequence is synthesized)
aggggtgtggctctgtccgggtgcagtatgcagtcatgtggaaccttgctttctagtcctgggaaaaaaagatgtctctaattactggcttcaataaacacgaatccagactgcttacaa

SEQ ID NO: 321674 - DNA, 120 bp, Artificial Sequence
  ENSG00000135720_36 (sequence is synthesized)
agttggcaagatggcgccggtgggggtggagaagaagctgctgctaggtcccaacgggcccgcggtggcggccgccggcgacctgaccagtgaggaggaggaaggccagagcctatgccc

SEQ ID NO: 321675 - DNA, 120 bp, Artificial Sequence
  ENSG00000135720_37 (sequence is synthesized)
agttggcaagatggcgccggtgggggtggagaagaagctgctgctaggtcccaacgggcccgcggtggcggccgccggcgacctgaccagtgaggaggaggaaggccagagcctatgctg

SEQ ID NO: 321676 - DNA, 79 bp, Artificial Sequence
  ENSG00000135720_38 (sequence is synthesized)
gctaccctcaaagttctgggattacaggcgcgagccaccatgcctggccatctggataatttttgtatttttagtagag

SEQ ID NO: 321677 - DNA, 83 bp, Artificial Sequence
  ENSG00000135720_39 (sequence is synthesized)
caccatgcctggccatgcatgttggccaggctattctcgaattcctgacctcaagtaatctgccctccttggcctcccaaagt

SEQ ID NO: 321678 - DNA, 120 bp, Artificial Sequence
  ENSG00000135720_40 (sequence is synthesized)
tacaggcgtgagccactgtgtctgcccacttttaattaatgctatacatttgataagctttcctattaagaatttaatgtgatcattttatcatcaaattacttttatcatactgtctta

SEQ ID NO: 321679 - DNA, 120 bp, Artificial Sequence
  ENSG00000135720_41 (sequence is synthesized)
gaaatatttttaaactttgcttttatgtagaaaaggtcaattaccaaacagggtattgttttataggctactggtgtttcccatatgtttatgttttgtgctgtccatgatagagaggtg

SEQ ID NO: 321680 - DNA, 120 bp, Artificial Sequence
  ENSG00000135720_42 (sequence is synthesized)
gtgtctgtagtcttttgagtcctgttaactataaaaagccaatagcagttggtgccgtggttccacaccctggggtggaggtgagagatgagttcctgccatcttttttgggatggccca

SEQ ID NO: 321681 - DNA, 120 bp, Artificial Sequence
  ENSG00000135720_43 (sequence is synthesized)
ttagcctgttggcacccatccctcaaaagatgggtttaatgataaatttggtcgcatgtaggcatctgtctgggaaggaatctgtgtaccttgatactctgagagtgttttcctgggcta

SEQ ID NO: 321682 - DNA, 120 bp, Artificial Sequence
  ENSG00000135720_44 (sequence is synthesized)
acctcagagccaatactttacttctcaggaagtaatctgtgggatcaagacaacaatttacacgttaaaaaataaactctacagcccactagcatcaacatagctttatgcttttgactt

SEQ ID NO: 321683 - DNA, 120 bp, Artificial Sequence
  ENSG00000135720_45 (sequence is synthesized)
cattcatctgctactatgacctttttacttttttatttatttatttatttttaccagtgtgcagtatgcctatgtaatactataagcgttttagtttttaaaattgtaatgctttctgtt

SEQ ID NO: 321684 - DNA, 120 bp, Artificial Sequence
  ENSG00000135720_46 (sequence is synthesized)
gctcatatattgatcaaaaactgatcaacctatgagtagtactttgaggttgtatgtgttcgattttgtctcctcctgcagtgaattgatttttcttgagcagattgattagatggagct

SEQ ID NO: 321685 - DNA, 120 bp, Artificial Sequence
  ENSG00000135720_47 (sequence is synthesized)
gtttttatgtgagttattttgagctgatgctttgaaactcttctttttaaagtacatttgctttttacattttaccccttcaaggaaggtgccttctgtctgtgtcttctacagccagct

SEQ ID NO: 321686 - DNA, 120 bp, Artificial Sequence
  ENSG00000135720_48 (sequence is synthesized)
ctctcactgcaccttctctctgttcctttccggattatgaggcatctgcctgagggaagtgggtggtgtggtcaggggtgctgcctttcttcctcgagagcaagttgccaaaacctaagc

SEQ ID NO: 321687 - DNA, 120 bp, Artificial Sequence
  ENSG00000135720_49 (sequence is synthesized)
cagccatttttggcactcactgtcaactctggtaaaatactggctggggagggaatatagggaattgtgcttgggggatcctgaatgtcttctattaaagcgcctgctttatctgtgtgt

SEQ ID NO: 321688 - DNA, 120 bp, Artificial Sequence
  ENSG00000135720_50 (sequence is synthesized)
tggcagggatgactgcaaacatcctctcggcatctctgtcagcatgggctttcgctatattaagtgcttactgtgcttctggcatttcacattttgggagccaccgggattgattgtcct

SEQ ID NO: 321689 - DNA, 120 bp, Artificial Sequence
  ENSG00000135720_51 (sequence is synthesized)
cgatagagacttggatacctgttttcctaagctggtgtctttctctcactggagaatcatagtgttgctggatgcataaatatgaagctgtggtctctgacaagacttgtgttagcagat

SEQ ID NO: 321690 - DNA, 120 bp, Artificial Sequence
  ENSG00000135720_52 (sequence is synthesized)
tgatgttcaggcttcagtatcctcctgacttaacaaacaattacattattcattcaggaaaccttattcagcacccactaggtgctcaggttctctgcaaaggacacagaaatgaatgat

SEQ ID NO: 321691 - DNA, 120 bp, Artificial Sequence
  ENSG00000135720_53 (sequence is synthesized)
acatacacagctgaagaagggaagggcagtgatggggttatggaggaagtatggcagggaaagcaggagggtgatgctggaagacaaatggtagatcccaggcggactggaaagaattgc

SEQ ID NO: 321692 - DNA, 120 bp, Artificial Sequence
  ENSG00000135720_54 (sequence is synthesized)
aatagggggagccggggagtgcagtctgtgagaggctggaaatgtgaaagccaggagctctcagggatttgggttgcctcctgcacagtcaaggagagtgtcactcaggctagtcataga

SEQ ID NO: 321693 - DNA, 120 bp, Artificial Sequence
  ENSG00000135720_55 (sequence is synthesized)
tggcatacctacaggcttgggctgattttagatagttgttcagagcagtcaggcaggcgccagaggcacaagccctgtgagaggtgtgtttggaatcacttggtatccaaatcacatgtc

SEQ ID NO: 321694 - DNA, 120 bp, Artificial Sequence
  ENSG00000135720_56 (sequence is synthesized)
atccctaggagcaaggagaccggttggatttggggctggtctggaatgaagaagcatctctcagcttccgaaggctgcatggctcacggcagtatctcaatcatgccctgcccgtttgca

SEQ ID NO: 321695 - DNA, 120 bp, Artificial Sequence
  ENSG00000135720_57 (sequence is synthesized)
catttggtcctgttggtagttacctctctggtgactggcaaagtcagcaaggatattggggtggagcaccctggctaagcaccctcttgattatagagctatggagtagaagacagatgg

SEQ ID NO: 321696 - DNA, 120 bp, Artificial Sequence
  ENSG00000135720_58 (sequence is synthesized)
agaatgagaggcctgtgagaacaatcagtcagttgccatctttcagagctgctcgagttcaaaagtgtgtcatacagggtattttaccattgctacctttaagggattcaggtgggaacc

SEQ ID NO: 321697 - DNA, 120 bp, Artificial Sequence
  ENSG00000135720_59 (sequence is synthesized)
ctaggctgtggcttcacataatggaacttgggtgccatcctaccctgtgatgttgagctggccagcactggtgtaggaacctcaaggactctgtgcttctctggtttggggcctaggata

SEQ ID NO: 321698 - DNA, 120 bp, Artificial Sequence
  ENSG00000135720_60 (sequence is synthesized)
aacacaggccctgcttgccccttggttctaggacacatcttcccatgccagcaaagttaatgaaccagtctacaagataactgttgaaagaattcttagagaaacaacccacaggagggg

SEQ ID NO: 321699 - DNA, 120 bp, Artificial Sequence
  ENSG00000135720_61 (sequence is synthesized)
agccatgtcagagcccaagaaaaccatcccatcctgagctctgccttctgtgctgctctctgcatcctattctctgtcggaacaggaccccactgtgtccttgctcttctaggcagagtt

SEQ ID NO: 321700 - DNA, 120 bp, Artificial Sequence
  ENSG00000135720_62 (sequence is synthesized)
gtgggagagtgctaaatgcttttgagtggggcagcctgtggaatgggatctcatactggctccttagaccttgggcccatgaactcagtatggagcaggacctgcgatgttctgatggat

SEQ ID NO: 321701 - DNA, 120 bp, Artificial Sequence
  ENSG00000135720_63 (sequence is synthesized)
tatacccacagtgtattttggcacatctgccaaaagctacaaacaacccccaacaactacacactatatcttgtgagaagtgtcctacccaggagtcctgaatgtgatctgagtatgctc

SEQ ID NO: 321702 - DNA, 120 bp, Artificial Sequence
  ENSG00000135720_64 (sequence is synthesized)
cttgccaagcaaccagccactcccacgagagcttctgtgagtaccttacactaaacagagggtcaaggcccagtgttgtgggtgtcatcaaactttataccattatttgtgagagcgtat

SEQ ID NO: 321703 - DNA, 120 bp, Artificial Sequence
  ENSG00000135720_65 (sequence is synthesized)
atttgtgtgggttttgtattttcagtgggaatttggtttccctaaagacccatgaccagaaacataaaagaaactcaagaagtttctgatgaaagaatacaactctgggaattagagtga

SEQ ID NO: 321704 - DNA, 120 bp, Artificial Sequence
  ENSG00000135720_66 (sequence is synthesized)
ctttgggcgctgtgtggggcctgggtcacaggctttcttccaaatggggcatcttcaaagagataaagcacctcccaaacccagaatagtgttctgccaaagagaatttgtatatatctt

SEQ ID NO: 321705 - DNA, 120 bp, Artificial Sequence
  ENSG00000135720_67 (sequence is synthesized)
tttactaggtttatgttttactgtatcggagttttaggtttattaacttgtgtctacctttgatcactcatttatttgtttgtttgtttgtttgttttaagatggtgtttcaccactttg

SEQ ID NO: 321706 - DNA, 120 bp, Artificial Sequence
  ENSG00000135720_68 (sequence is synthesized)
ctggtccacgacaaagagttggcagcagaagatgagcaggtgttcctaatgaagcaacagtcactccttgccaagcaaccagccactcccacgagagcttctgacaaaagactgtgttgt

SEQ ID NO: 321707 - DNA, 120 bp, Artificial Sequence
  ENSG00000135722_0 (sequence is synthesized)
gcgcgtcccgccccgcgggctcccggtggctgcttcccgtccgctgtcctctgctgccagtcccctgccccgggcaaagcccatctggtccgccgagcaggccggagctattgggagtgg

SEQ ID NO: 321708 - DNA, 120 bp, Artificial Sequence
  ENSG00000135722_1 (sequence is synthesized)
cggatcctcccaccccagccggatctgggccatggccgagcctggagagggactgccagaggaggtgctggcactcatcttccgccacctgtccctgagagaccgtgctgccgccgccag

SEQ ID NO: 321709 - DNA, 120 bp, Artificial Sequence
  ENSG00000135722_2 (sequence is synthesized)
ggtctgcagggcctgggccgccgctgctacctgcagcgccgtgtggcacgacacaaaaatcagttgcgaatgtgagctggaaggcatgctgccaccttatctgtccgcctgcctcgacca

SEQ ID NO: 321710 - DNA, 120 bp, Artificial Sequence
  ENSG00000135722_3 (sequence is synthesized)
cattcacaacctacggctggaatttgagccatcgaggaagccgagccgccgggcggccatcgagctgctgatggttctggcgggccgtgccccggggctgcgaggcctgcgcctggagtg

SEQ ID NO: 321711 - DNA, 120 bp, Artificial Sequence
  ENSG00000135722_4 (sequence is synthesized)
ccgcggagaaaaaccgctcttcgacgcgggccgcgacgtcctggaggctgtgcacgctgtatgcggggcggccagccagctacgccacctcgacctgcggcgcttgtccttcacactgga

SEQ ID NO: 321712 - DNA, 120 bp, Artificial Sequence
  ENSG00000135722_5 (sequence is synthesized)
cgacgcgctggtgctgcaggcggcgcgcagctgtcccgagctccacagcctttttctggacaacagtaccctagtgggcagcgtgggtcccggctcagtgctcgagctactggaggcctg

SEQ ID NO: 321713 - DNA, 120 bp, Artificial Sequence
  ENSG00000135722_6 (sequence is synthesized)
ccagaccgagcgcctttcgcgctcttggctctgcggtgcgcgtgccccgaagatgcacgcgcgtccccgctgcccaacgaagcctgggtcgcgttgcgccgccgccaccctgggctggca

SEQ ID NO: 321714 - DNA, 120 bp, Artificial Sequence
  ENSG00000135722_7 (sequence is synthesized)
gtggagctggagctggagcccgcgctgcccgctgagagcgtgacgcgcgtcctgcagccagccgtccccgtggctgcgctgcgcctcaacctctcaggcgacaccgtaggcccagtgcgc

SEQ ID NO: 321715 - DNA, 120 bp, Artificial Sequence
  ENSG00000135722_8 (sequence is synthesized)
ttcgcagcacaccactacgccgcaaccctgtgcgcgctcgaggtgcgcgcagccgcttcggccgagctgaacgccgcgctggaggagctggcggcgcgctgcgcggccctgcgcgaggtg

SEQ ID NO: 321716 - DNA, 120 bp, Artificial Sequence
  ENSG00000135722_9 (sequence is synthesized)
cattgtttctgcgtggtgagccactcggtgctggacgccttccgcgcgcactgcccgcgcctgcgcacctataccctcaagctcacgcgcgagccgcatccctggaggcctacgctcgtg

SEQ ID NO: 321717 - DNA, 120 bp, Artificial Sequence
  ENSG00000135722_10 (sequence is synthesized)
gcgtgattgggcgacttctctcccccgtccccgtggacgtaagcgctctgagagggaacggggggggtgtccaggcgcgccccgagtgctagtgccttcttttgggattgttgccccccg

SEQ ID NO: 321718 - DNA, 120 bp, Artificial Sequence
  ENSG00000135722_11 (sequence is synthesized)
ggtctttaccgagttgggaactgtgatggcatcgggaccagtcctgggcgccctgagaccactcgctgctctcaccctctgcagacgccccacccgctcggtcctggacacactgccccc

SEQ ID NO: 321719 - DNA, 120 bp, Artificial Sequence
  ENSG00000135722_12 (sequence is synthesized)
ctctcttgcctccacccctctgcggactctgcagctccgcggccccggcgcagggagagggagggcacgggcgcgggccgggcctcaagggtgagtgtgaaataaacaaatcctgcagtg

SEQ ID NO: 321720 - DNA, 120 bp, Artificial Sequence
  ENSG00000135722_13 (sequence is synthesized)
gcccacaccaggtcgcgcaccggcgatttctcctgtagaacaaagaaggaaatagagggaccgagaggggtgggactcgaacccaagtctcccactcatctcaccccaccccaccccact

SEQ ID NO: 321721 - DNA, 120 bp, Artificial Sequence
  ENSG00000135722_14 (sequence is synthesized)
gtctgaacagagacgtggggagggaggcaggaaatgggatggcagctggaaccccagctaaggggtgggtagaggcttctccgctggtcgcagggactcagctgaggccttttctgcacg

SEQ ID NO: 321722 - DNA, 120 bp, Artificial Sequence
  ENSG00000135722_15 (sequence is synthesized)
gctctaacccaagttgcgaatgtgagctggaaggcatgctgccaccttatctgtccgcctgcctcgaccacattcacaacctacggctggaatttgagccatcgaggaagccgagccgcc

SEQ ID NO: 321723 - DNA, 64 bp, Artificial Sequence
  ENSG00000135722_16 (sequence is synthesized)
cgatcgcttgagcctaggagttcgaggccggagctattgggagtggcggatcctcccaccccag

SEQ ID NO: 321724 - DNA, 120 bp, Artificial Sequence
  ENSG00000135722_17 (sequence is synthesized)
gggaacgcgcggggtaccggaggagccatcccggcagaggttgggtttcctcaagagcctctggacgacacagctgcggggggtcagggtcggggcactcacacccttggaatgactacg

SEQ ID NO: 321725 - DNA, 120 bp, Artificial Sequence
  ENSG00000135722_18 (sequence is synthesized)
tcccggggttcggcgggagggggcgtgcttccctgcccccccttcctatctgcttgccctgcctggggcttcactgtgcctctggccattaccttctaggacttgcccagcccacaccag

SEQ ID NO: 321726 - DNA, 120 bp, Artificial Sequence
  ENSG00000135722_19 (sequence is synthesized)
acactcctctccccaccgcccactcaccttctccgtggagtcgtgggctaggtagatattcaggttgactcccccatattaaaaaataattgctggccgggcgtggtggctcatgcctgt

SEQ ID NO: 321727 - DNA, 120 bp, Artificial Sequence
  ENSG00000135722_20 (sequence is synthesized)
ggcgacagagtaacagtttatctcaaaataataataataattgctgacgtattgactgcctagtatataccaaccattgtttttaagtgccttacatatattaactaatttaatccttat

SEQ ID NO: 321728 - DNA, 120 bp, Artificial Sequence
  ENSG00000135722_21 (sequence is synthesized)
gaaaaccttgtgtggtagataggtattatcattacctccattgcccagataggaaactgaggcaaagagacttaatcacttcccacgggtcactcagctagggaatggcagaggcagaat

SEQ ID NO: 321729 - DNA, 120 bp, Artificial Sequence
  ENSG00000135722_22 (sequence is synthesized)
tcgaacctagcagtccggaggccatgccaagactccttagagacagctgagaaagcccagttcctaaaatatcattggctctccatgtccaggtttcatcctgtggcagacgccactgaa

SEQ ID NO: 321730 - DNA, 120 bp, Artificial Sequence
  ENSG00000135723_0 (sequence is synthesized)
agtgtgctttgagtagaagctgcactggggccgggactcggaggcgcgctgcgtgagccggccgcagagccatggcgggcggggaagaccgcggggacggagagccggtatcagtggtga

SEQ ID NO: 321731 - DNA, 120 bp, Artificial Sequence
  ENSG00000135723_1 (sequence is synthesized)
ccgtgagggtgcagtacctggaagacaccgaccccttcgcatgtgccaactttccggagccgcgccgggcccccacctgcagcctggacggggcgctgcccttgggcgcgcagatacccg

SEQ ID NO: 321732 - DNA, 120 bp, Artificial Sequence
  ENSG00000135723_2 (sequence is synthesized)
cggtgcaccgcctgctgggagcgccgctcaagttggaggattgtgctctgcaagtgtctccctccggatactacctggacaccgagctgtccctggaagagcagcgggagatgctggagg

SEQ ID NO: 321733 - DNA, 120 bp, Artificial Sequence
  ENSG00000135723_3 (sequence is synthesized)
gcttctatgaagagatcagcaaagggcggaagcccacgctgatccttcggacccagctctctgtgagggtcaacgctatcttggaaaagctgtatagctccagtggtcctgagctccgcc

SEQ ID NO: 321734 - DNA, 120 bp, Artificial Sequence
  ENSG00000135723_4 (sequence is synthesized)
gctccctcttctcactgaagcagatcttccaggaggacaaagacctggtgcctgaatttgtgcattcagaggggctgagctgcctgatccgtgtgggtgctgctgccgaccacaactacc

SEQ ID NO: 321735 - DNA, 120 bp, Artificial Sequence
  ENSG00000135723_5 (sequence is synthesized)
agagctacatccttagagcgctcggccagctgatgctctttgtggatggaatgctgggggtggtggcccacagtgacactattcagtggctgtacacattgtgtgccagcctgtcccgct

SEQ ID NO: 321736 - DNA, 120 bp, Artificial Sequence
  ENSG00000135723_6 (sequence is synthesized)
tggtggtgaagacagccctgaagctgctgttggtgtttgtagaatactccgaaaacaacgcaccgctgttcatccgtgcagtgaactctgtggccagcaccaccggtgctcctccctggg

SEQ ID NO: 321737 - DNA, 120 bp, Artificial Sequence
  ENSG00000135723_7 (sequence is synthesized)
ccaatctggtgtccatcctggaggagaagaatggcgctgaccctgagttgttggtgtacacggtcaccctcatcaacaagacgctggcggcgctcccggaccaggactccttctacgatg

SEQ ID NO: 321738 - DNA, 120 bp, Artificial Sequence
  ENSG00000135723_8 (sequence is synthesized)
tgacggatgcactggagcagcagggcatggaagcgctggtccagcgccacctgggcactgcgggcactgacgtcgacctgcgcacgcagcttgtgctctacgagaacgccctgaaattgg

SEQ ID NO: 321739 - DNA, 120 bp, Artificial Sequence
  ENSG00000135723_9 (sequence is synthesized)
aggatggagacatcgaagaagccccaggcgctggtgggcggcgggaacgacgaaagccttcttctgaggagggcaagaggagccgccgttctctggaaggcgggggctgccccgcgcgtg

SEQ ID NO: 321740 - DNA, 120 bp, Artificial Sequence
  ENSG00000135723_10 (sequence is synthesized)
ccccggaacctggccccacaggccccgcctcaccggtaggccccacctcttccaccggccccgccctgctgacaggccccgcctccagccctgtgggccctccctccggtctccaagctt

SEQ ID NO: 321741 - DNA, 120 bp, Artificial Sequence
  ENSG00000135723_11 (sequence is synthesized)
cagtgaacctttttcctaccatctctgtggcaccctcagctgacacctccagcgagaggagcatctacaaagcccggttcctggagaatgtggcggcagcagaaacagagaagcaggttg

SEQ ID NO: 321742 - DNA, 120 bp, Artificial Sequence
  ENSG00000135723_12 (sequence is synthesized)
cgctggcccagggccgggcagagacacttgccggggccatgcccaatgaggcgggtggacacccagatgcccggcaactctgggactccccagagacagcccctgcagccagaacacccc

SEQ ID NO: 321743 - DNA, 120 bp, Artificial Sequence
  ENSG00000135723_13 (sequence is synthesized)
agagccctgccccctgtgtcctgctccgggcccagcgaagccttgcaccagagcccaaggagccactgataccagcaagccccaaggctgagcccatctgggagctccctacccgtgcac

SEQ ID NO: 321744 - DNA, 120 bp, Artificial Sequence
  ENSG00000135723_14 (sequence is synthesized)
ccaggctctctattggggacctggacttttcagatctaggggaggatgaagaccaggacatgctgaatgtagagtctgtggaggctgggaaagacatcccagctccctcacccccactgc

SEQ ID NO: 321745 - DNA, 120 bp, Artificial Sequence
  ENSG00000135723_15 (sequence is synthesized)
cccctcttccccattcagtgcctgacagctcagccctccccactaagaggaagacagtaaaacttttctggcgtgagctgaagctggctgggggccatggagtctctgcaagccgctttg

SEQ ID NO: 321746 - DNA, 120 bp, Artificial Sequence
  ENSG00000135723_16 (sequence is synthesized)
ggccctgcgccaccctctgggcttcactggaccctgtctcagtggacacggcccgactggaacacctctttgagtctcgtgccaaagaggtgctgccctccaagaaagctggagagggcc

SEQ ID NO: 321747 - DNA, 120 bp, Artificial Sequence
  ENSG00000135723_17 (sequence is synthesized)
gccggacaatgaccacagtgctggaccccaagcgcagcaacgccatcaacatcggcctaaccacactgccacctgtgcatgtcattaaggctgctctgctcaactttgatgagtttgctg

SEQ ID NO: 321748 - DNA, 120 bp, Artificial Sequence
  ENSG00000135723_18 (sequence is synthesized)
tcagcaaggatggcattgagaagctactgaccatgatgcccacggaggaagagcggcagaagattgaggaagcccagctggccaaccctgacatacccctgggcccagccgagaacttcc

SEQ ID NO: 321749 - DNA, 120 bp, Artificial Sequence
  ENSG00000135723_19 (sequence is synthesized)
tgatgactcttgcctccattggcggcctcgctgctcgtctacaactctgggccttcaagctggactatgacagcatggagcgggaaattgctgagccactgtttgacctgaaagtgggta

SEQ ID NO: 321750 - DNA, 120 bp, Artificial Sequence
  ENSG00000135723_20 (sequence is synthesized)
tggaacagctggtacagaatgccaccttccgctgcatcctggctaccctcctagcggtgggcaacttcctcaatggctcccagagcagcggctttgagctgagctacctggagaaggtgt

SEQ ID NO: 321751 - DNA, 120 bp, Artificial Sequence
  ENSG00000135723_21 (sequence is synthesized)
cagaggtgaaggacacggtgcgtcgacagtcactgctacaccatctctgctccctagtgctccagacccggcctgagtcctctgacctctattcagaaatccctgccctgacccgctgtg

SEQ ID NO: 321752 - DNA, 120 bp, Artificial Sequence
  ENSG00000135723_22 (sequence is synthesized)
ccaaggtggactttgaacagctgactgagaacctggggcagctggagcgccggagccgggcagccgaggagagcctgcggagcttggccaagcatgagctggccccagccctgcgtgccc

SEQ ID NO: 321753 - DNA, 120 bp, Artificial Sequence
  ENSG00000135723_23 (sequence is synthesized)
gcctcacccacttcctggaccagtgtgcccgccgtgttgccatgctaaggatagtgcaccgccgtgtctgcaataggttccatgccttcctgctctacctgggctacaccccgcaggcgg

SEQ ID NO: 321754 - DNA, 120 bp, Artificial Sequence
  ENSG00000135723_24 (sequence is synthesized)
cccgtgaagtgcgcatcatgcagttctgccacacgctgcgggaatttgcgcttgagtatcggacttgccgggaacgagtgctacagcagcagcagaagcaggccacataccgtgagcgca

SEQ ID NO: 321755 - DNA, 120 bp, Artificial Sequence
  ENSG00000135723_25 (sequence is synthesized)
acaagacccggggacgcatgatcaccgagacagagaagttctcaggtgtggctggggaagcccccagcaacccctctgtcccagtagcagtgagcagcgggccaggccggggagatgctg

SEQ ID NO: 321756 - DNA, 120 bp, Artificial Sequence
  ENSG00000135723_26 (sequence is synthesized)
acagtcatgctagtatgaagagtctgctgaccagcaggcctgaggacaccacacacaatcgccgcagcagaggcatggtccagagcagctccccaatcatgcccacagtggggccctcca

SEQ ID NO: 321757 - DNA, 120 bp, Artificial Sequence
  ENSG00000135723_27 (sequence is synthesized)
ctgcatccccagaagaacccccaggctccagtttacccagtgatacatcagatgagatcatggaccttctggtgcagtcagtgaccaagagcagtcctcgtgccttagctgctagggaac

SEQ ID NO: 321758 - DNA, 120 bp, Artificial Sequence
  ENSG00000135723_28 (sequence is synthesized)
gcaagcgttcccgcggcaaccgcaagtctttgagaaggacgttgaagagtgggctcggagatgacctggtgcaggcactgggactaagcaagggtcctggcctggaggtgtgaaggtgct

SEQ ID NO: 321759 - DNA, 120 bp, Artificial Sequence
  ENSG00000135723_29 (sequence is synthesized)
gtatcccggaaatctatctggaccctggactgcagtgcaggagatgacagagtgaggagggcccagagcagaattctggccccagaactctgtgcccaggagccatgccttgagcagtat

SEQ ID NO: 321760 - DNA, 120 bp, Artificial Sequence
  ENSG00000135723_30 (sequence is synthesized)
tagccgtgtgtgtatgcatgtgagtgtgtgtgtatgtgtgtgtgtgcatgcatatgcatgtgcatgtgtgtgagctccttgaacgcacggagcaaaataaaattttcttagctaatccaa

SEQ ID NO: 321761 - DNA, 120 bp, Artificial Sequence
  ENSG00000135723_31 (sequence is synthesized)
ggacagtgaacatgaacgaggttgcaagttagatgttaagtagatcctctccctgtgttttcacctgggaatgctgggttggtagtaatcctccccagatgtggaggactgaagaggggc

SEQ ID NO: 321762 - DNA, 120 bp, Artificial Sequence
  ENSG00000135723_32 (sequence is synthesized)
tggccttggggggggtgtggttctggtctgctcagcgcatggactgttccctgtgtgtctgtgcgtgcctgcaattgggggtggtgtccaggggctcagcaaggcatgtacacctgggct

SEQ ID NO: 321763 - DNA, 120 bp, Artificial Sequence
  ENSG00000135723_33 (sequence is synthesized)
cccagctatgggtgttggggggaggtctggccttctcctttggtaggtgggcatttcctgtccctctggtggtgggcatgggcttggcatttctgcagggcagtccccagacactggggc

SEQ ID NO: 321764 - DNA, 120 bp, Artificial Sequence
  ENSG00000135723_34 (sequence is synthesized)
ctcccctagatgactgaggggtcaagaccaatgcctcaggcctcaggcctgcattgagggggccatgtcaggctctggctacatcctcagaagctactgaccatgatgcccacggaggaa

SEQ ID NO: 321765 - DNA, 120 bp, Artificial Sequence
  ENSG00000135723_35 (sequence is synthesized)
gctccagccacctgggtgtgagctatgccctctgccagaaatgctctttcctctattggcctggccacacctactcagtctttgggtctgtttaactgccacttcccccagtaaaccttc

SEQ ID NO: 321766 - DNA, 120 bp, Artificial Sequence
  ENSG00000135723_36 (sequence is synthesized)
tgctccccattcacatcagatggacttgtgtctcttgcactagtctatgagatttggatgtctgtgtccttagggcccaagctggccactctggcccagaagcagcctcgggccatgtct

SEQ ID NO: 321767 - DNA, 120 bp, Artificial Sequence
  ENSG00000135723_37 (sequence is synthesized)
ttttcctaccatctctgtggcaccctcagctgacacctccagcgagaggagcatctacaaacttcaccaaactgcttccgtttgagcccggttcctggagaatgtggcggcagcagaaac

SEQ ID NO: 321768 - DNA, 120 bp, Artificial Sequence
  ENSG00000135723_38 (sequence is synthesized)
tggctcaccttcaggcctgtgctgaacagtgagcaaagtaggtttagctgtatgtgctccttcctctccctatcctgacctcttcttccagggccatggtgggagtggagggggattcaa

SEQ ID NO: 321769 - DNA, 120 bp, Artificial Sequence
  ENSG00000135723_39 (sequence is synthesized)
gaatgttagaatagaccaggcgtggtagctcatgcctccaatgccagtgctttgagaggtcaaggtgggagaattgcttgaggctaggagtttgaggttgcagtgagctatgactgtgcc

SEQ ID NO: 321770 - DNA, 120 bp, Artificial Sequence
  ENSG00000135723_40 (sequence is synthesized)
ctgagtgacagagtgagaccctgtctctcagaccaaaacatatatattagactattctttggtggagagttgtggttgtatccaagcagaggaagacagtgagtctgtgtccatcaaggg

SEQ ID NO: 321771 - DNA, 120 bp, Artificial Sequence
  ENSG00000135723_41 (sequence is synthesized)
gagtctgtgtccatcaagggttttataccctaccttttgcagaaaagctgtatagctccagtggtcctgagctccgccgctccctcttctcactgaagcagatcttccaggtgaggcccc

SEQ ID NO: 321772 - DNA, 120 bp, Artificial Sequence
  ENSG00000135736_0 (sequence is synthesized)
gcagctgcacggtgcccgctctaccccgccgcagcggctgggacgtacggagcccgcaagtcccggcccgaggtccgaggaggcgtcctccgcccggtggcccagagggaagcggggcac

SEQ ID NO: 321773 - DNA, 120 bp, Artificial Sequence
  ENSG00000135736_1 (sequence is synthesized)
ggcgtcatcatgcacagttgtatcgcgcccgccgcgcgtccccggagccgcccctgagcccgaccgcgagttcgagctcagggcccgcccggccgcaccatgagccacgggcccagcccc

SEQ ID NO: 321774 - DNA, 120 bp, Artificial Sequence
  ENSG00000135736_2 (sequence is synthesized)
cggctggccgagtccccgcagctgtccaagggcagcctcctgaccatcctgggcagcccgtcgccggagcgcatggggcctgccgactccttgccgcccacgccgcccagcggcacgccc

SEQ ID NO: 321775 - DNA, 120 bp, Artificial Sequence
  ENSG00000135736_3 (sequence is synthesized)
ccccgcgcccgcgctgctggccgacggcgactgggagagccgcgaggagctgcggctgcgggagctggaggaggcgcgggcgcgggcggcgcagatggagaagaccatgcgccggtggtc

SEQ ID NO: 321776 - DNA, 120 bp, Artificial Sequence
  ENSG00000135736_4 (sequence is synthesized)
gcgcagatggagaagaccatgcgccggtggtcggactgcactgccaattggcgcgagaaatggagcaaggtgcgcgctgagcgcaaccgcgcgcgcgaggaggtgcgccagctgcgccag

SEQ ID NO: 321777 - DNA, 80 bp, Artificial Sequence
  ENSG00000135736_5 (sequence is synthesized)
cgcctggacgcgctcaccaaggagctggcgggcgcacggcgcgagcgccaagaggcgcagggcgagtgcgaggcacgggg

SEQ ID NO: 321778 - DNA, 120 bp, Artificial Sequence
  ENSG00000135736_6 (sequence is synthesized)
gaccagacgcgcgacggccccgagccggaagcggagcgcgagccagtgcgtgacgtcgggtccgagaggccgccaggcagccaggaactggagctggtggagagcctgctgaagagcatg

SEQ ID NO: 321779 - DNA, 120 bp, Artificial Sequence
  ENSG00000135736_7 (sequence is synthesized)
ccagaggagtctgaggactgctgggaggcgcgcagcctgggggctgggggcccgcggggcagctcaggccgccaggagcgcagccggctaccctgggaggacacagctgccacggaggag

SEQ ID NO: 321780 - DNA, 120 bp, Artificial Sequence
  ENSG00000135736_8 (sequence is synthesized)
gaggcctccaagttgaccgccctgcggctacggctggatgagtcccagaaggtgctgctcaaggagcgagaggataaactggcgttgagcaggaacattgagaagctagagggggagctc

SEQ ID NO: 321781 - DNA, 120 bp, Artificial Sequence
  ENSG00000135736_9 (sequence is synthesized)
agccagtggaagatcaagtatgaggagctgagcaagaccaagcaggagatgctcaagcagctcagcatcctgaaggaggcgcaccaggacgagctgggccgcatgtctgaggacctggaa

SEQ ID NO: 321782 - DNA, 120 bp, Artificial Sequence
  ENSG00000135736_10 (sequence is synthesized)
gaaaatggccgagctgaggggcgagatggagcggctgcaggccgaaaacgctgcggagtggggccgccgggagcggctggagacagagaaactgggccttgagcgggagaacaagaagct

SEQ ID NO: 321783 - DNA, 120 bp, Artificial Sequence
  ENSG00000135736_11 (sequence is synthesized)
gcgggcacaggtcggagacctggaggaggcgctggcccggcggcggcggcaaacagccagcgcactggactgcgacctgagggccagccaggccgcgctcttcgagaagaacaaggagct

SEQ ID NO: 321784 - DNA, 120 bp, Artificial Sequence
  ENSG00000135736_12 (sequence is synthesized)
ggcagacctgaagcatgtgcatggcaagctgaagaagcagttccaggagaaggtggcagagctggcacatgccaaccggcgggtggagcagcacgaggctgaggtgaagaagctgcggct

SEQ ID NO: 321785 - DNA, 120 bp, Artificial Sequence
  ENSG00000135736_13 (sequence is synthesized)
gcgggtggaggagctcaagaaggagctggcccaggctgaggacgagctggacgaggcccacaaccaggcacgtaagctgcagcggtcgctggacgagcagacggagcagagcgagaacct

SEQ ID NO: 321786 - DNA, 120 bp, Artificial Sequence
  ENSG00000135736_14 (sequence is synthesized)
gcaagtgcaactggagcacctgcagtccaggctccgcaggcagcagcagaacgctcccctcttcgggaagatccgcagtgctcgctttggcaccgaggaggccgaggatggaaccagtga

SEQ ID NO: 321787 - DNA, 120 bp, Artificial Sequence
  ENSG00000135736_15 (sequence is synthesized)
cctggacgaggacgaggacctgcaaatccaggtggcctagagcttcctgtggctgggcaggatgggccgccccatacctgcccagggtccaggctaaccagccactcaaactgatgcagt

SEQ ID NO: 321788 - DNA, 120 bp, Artificial Sequence
  ENSG00000135736_16 (sequence is synthesized)
gcctaggctcactctgggaccagtccctgccacagccgactttcttctctcccagggatggcgtcaacagtcccacctaccaacgccctgtggaaaggaagcctatgttttatatatata

SEQ ID NO: 321789 - DNA, 120 bp, Artificial Sequence
  ENSG00000135736_17 (sequence is synthesized)
tatacacacacgcgcgcgcgcgcgcgcacacccagaagtctttggacccatttggttttataaatacaggacagctccaaggcccagtccagatgacctcacccacccaggacttcatgc

SEQ ID NO: 321790 - DNA, 120 bp, Artificial Sequence
  ENSG00000135736_18 (sequence is synthesized)
agggctgggcatgttgggggcagttgttggagccccaccctgggctgcctctctaggcttcgctgttcatcatacaatgcagtgaacccagttatttgtaataaatgaagttcaagttct

SEQ ID NO: 321791 - DNA, 120 bp, Artificial Sequence
  ENSG00000135736_19 (sequence is synthesized)
tggggcatctgaaagtatggcagatgtgggcgggggttgtgggggacggcatcggcctgcacctgacgctgaaccagagctcaggaatgtcaagtaacttaataaatgagtgaatgtgaa

SEQ ID NO: 321792 - DNA, 120 bp, Artificial Sequence
  ENSG00000135736_20 (sequence is synthesized)
ctgggaaggagagacacccagcatccctagaactgcctgacctcgtgggactccctggcatggcgcccaagctgatactgattccctcctccctcccaccccatccctgtgccctgtagg

SEQ ID NO: 321793 - DNA, 120 bp, Artificial Sequence
  ENSG00000135740_0 (sequence is synthesized)
ctgggcaggcggcaggatgctgcgcgccgccctgtccctgctcgcgctgcccctggcgggggcggccgaagagcccacccagaagccagagtccccgggcgagcctcccccaggcttaga

SEQ ID NO: 321794 - DNA, 120 bp, Artificial Sequence
  ENSG00000135740_1 (sequence is synthesized)
gagcctcccccaggcttagagctcttccgctggcagtggcacgaggtggaggcgccctacctggtggccctgtggatcctggtggccagtctggccaaaatcgtgtttcacctgtctcgg

SEQ ID NO: 321795 - DNA, 120 bp, Artificial Sequence
  ENSG00000135740_2 (sequence is synthesized)
aaagtaacatctctggtccctgagagctgcctgctgattttgctgggcctggtgctagggggaattgttttggctgtggccaagaaagctgagtaccagctggagccaggcaccttcttc

SEQ ID NO: 321796 - DNA, 120 bp, Artificial Sequence
  ENSG00000135740_3 (sequence is synthesized)
ctcttcctgctgcctcctattgtgttggactcaggctatttcatgcctagcaggctgttctttgacaacttgggtgccatcctcacctatgccgtggtaggcacactctggaatgccttc

SEQ ID NO: 321797 - DNA, 120 bp, Artificial Sequence
  ENSG00000135740_4 (sequence is synthesized)
acaacaggcgctgccctctggggcttgcagcaggctggacttgtagcccctagggtgcaggctggcttactggacttcctgctgtttgggagcctcatctcggcggtggaccccgtggcc

SEQ ID NO: 321798 - DNA, 120 bp, Artificial Sequence
  ENSG00000135740_5 (sequence is synthesized)
gtgctagctgtctttgaggaggtgcacgtcaatgagactctctttatcatcgtctttggcgagtccctgctcaacgatgctgtcaccgtggtgctgtacaaggtctgcaactcctttgtg

SEQ ID NO: 321799 - DNA, 120 bp, Artificial Sequence
  ENSG00000135740_6 (sequence is synthesized)
gagatgggctctgccaatgtgcaggccactgactacctgaagggagtcgcctccctgtttgtggtcagtctgggcggggcagccgtgggcttagtctttgccttcctcctggccctgacc

SEQ ID NO: 321800 - DNA, 120 bp, Artificial Sequence
  ENSG00000135740_7 (sequence is synthesized)
acacgcttcaccaagcgggtccgcatcatcgagccgctgctggtcttcctcctcgcctacgcagcctacctcactgctgaaatggcctcgctctccgccattcttgcggtgaccatgtgt

SEQ ID NO: 321801 - DNA, 120 bp, Artificial Sequence
  ENSG00000135740_8 (sequence is synthesized)
ggcctgggctgtaagaagtacgtggaggccaacatctcccataagtcacgcacaactgtcaaatatacaatgaagactctagccagctgtgctgagaccgtgatcttcatgctgcttggc

SEQ ID NO: 321802 - DNA, 120 bp, Artificial Sequence
  ENSG00000135740_9 (sequence is synthesized)
atctcagccgtggactcttctaagtgggcctgggattctgggctggtgctgggcaccctcatcttcatcctgttcttccgagccctcggcgtagtcctgcagacctgggtgctgaatcag

SEQ ID NO: 321803 - DNA, 120 bp, Artificial Sequence
  ENSG00000135740_10 (sequence is synthesized)
ttccggctagtccctctggacaagattgaccaagtggtgatgtcctatgggggcctgcggggggctgtggcctttgctctcgtcatcctactggataggaccaaggtccctgccaaggac

SEQ ID NO: 321804 - DNA, 120 bp, Artificial Sequence
  ENSG00000135740_11 (sequence is synthesized)
tactttgtagccaccactattgtagtggtcttcttcacagtcatcgtgcagggcttgaccatcaagccactggtcaaatggctgaaggtgaagaggagtgagcatcacaaacccaccctg

SEQ ID NO: 321805 - DNA, 120 bp, Artificial Sequence
  ENSG00000135740_12 (sequence is synthesized)
aaccaggagctgcatgaacacacttttgaccacattctggctgcagtggaggacgttgtggggcaccatggctaccactactggagggacaggtgggagcagtttgacaagaaatacctg

SEQ ID NO: 321806 - DNA, 120 bp, Artificial Sequence
  ENSG00000135740_13 (sequence is synthesized)
agtcagctgctgatgcgacgatcagcctaccgcatccgggaccagatctgggatgtgtactacaggcttaacatccgggatgccatcagctttgtggaccagggaggccacgtcttgtct

SEQ ID NO: 321807 - DNA, 120 bp, Artificial Sequence
  ENSG00000135740_14 (sequence is synthesized)
tccacaggtctcactctgccttctatgcccagccgcaattctgtggcagaaacttctgtcaccaacctgctgagggagagtggcagtggagcgtgtctggatctgcaggtgattgacaca

SEQ ID NO: 321808 - DNA, 120 bp, Artificial Sequence
  ENSG00000135740_15 (sequence is synthesized)
tcagaggatgcgcaggagcggcaggacaaggaggtcttccagcagaacatgaagcggcggctggagtcctttaagtccaccaagcacaacatctgcttcaccaagagcaagccacgaccc

SEQ ID NO: 321809 - DNA, 120 bp, Artificial Sequence
  ENSG00000135740_16 (sequence is synthesized)
cgcaagactggccgcaggaagaaggatggtgtggcgaatgctgaggctacaaatgggaaacatcgaggcctgggctttcaggacacagctgctgtgatattaaccgtggagtctgaggag

SEQ ID NO: 321810 - DNA, 120 bp, Artificial Sequence
  ENSG00000135740_17 (sequence is synthesized)
gaggaggaggagagcgacagttcagagacagagaaggaggacgatgaggggatcatctttgtggctcgtgccaccagtgaggttctccaagagggcaaggtctcaggaagccttgaggtg

SEQ ID NO: 321811 - DNA, 120 bp, Artificial Sequence
  ENSG00000135740_18 (sequence is synthesized)
tgcccaagcccacgaatcattcccccctccccaacctgtgcagaaaaggagctcccctggaagagtgggcagggggacctggcagtgtacgtgtcctcggaaaccaccaagattgtgcct

SEQ ID NO: 321812 - DNA, 120 bp, Artificial Sequence
  ENSG00000135740_19 (sequence is synthesized)
gtggacatgcagacgggttggaaccagagcatctcatccctggagagcctagcgtcccctccctgtaaccaggccccaattctgacctgcctgcctccccatccacggggcactgaagag

SEQ ID NO: 321813 - DNA, 120 bp, Artificial Sequence
  ENSG00000135740_20 (sequence is synthesized)
ccccaggtccctctccacctaccttctgatccacgctctagcttcgccttcccaccgagcctggccaaggctggccgctctcgcagtgagagcagcgctgacctcccccagcagcaggag

SEQ ID NO: 321814 - DNA, 120 bp, Artificial Sequence
  ENSG00000135740_21 (sequence is synthesized)
ctgcagcccctcatgggccacaaggaccacacccatctcagcccaggcaccgctacctcccactggtgcatccagttcaacagaggcagccggctgtagctcaaggcctcggggaggagc

SEQ ID NO: 321815 - DNA, 120 bp, Artificial Sequence
  ENSG00000135740_22 (sequence is synthesized)
aggaggtggaatccctgtgggaagtgctccctgggtgatgggtagagccctcgaaacttgacatggggccagaagggcctgggttgaagtagtaattgggcttccttggagctagtcaga

SEQ ID NO: 321816 - DNA, 120 bp, Artificial Sequence
  ENSG00000135740_23 (sequence is synthesized)
ggggtcacctaagctggtcctcacaggggcctttctcaccacctccctgctcctaacccctgccactttctgtttcattaaggcctctactctggctcaggacccagtccaggccttcta

SEQ ID NO: 321817 - DNA, 120 bp, Artificial Sequence
  ENSG00000135740_24 (sequence is synthesized)
cgggctaggcccagagacttgggttgctggtcccccttccctagtgggttttcccggggactctataggcagctgctcctgcccgcaaagcaagagcatcattcctattcttcagtggat

SEQ ID NO: 321818 - DNA, 120 bp, Artificial Sequence
  ENSG00000135740_25 (sequence is synthesized)
gccagccttccctgccccaactccctccccagcactgggtcagtggtgtcctggcagtgaggctccgtgaggggctggcccttagaggaactggggtgggaggtggggcaggcctcaccc

SEQ ID NO: 321819 - DNA, 120 bp, Artificial Sequence
  ENSG00000135740_26 (sequence is synthesized)
ttgggctttgctgccctgttgggtcagctacccatagtccatttttttagggcagtgggaacctctgcctccacttcctgctttagccccttccctttgctgccaggtattggggtaata

SEQ ID NO: 321820 - DNA, 120 bp, Artificial Sequence
  ENSG00000135740_27 (sequence is synthesized)
tttcctccttttccaagaccaaggccaagaggctgggccaggcttcagttcaggcctgttgcttaactggggtcaccctgggatctgctgctctgggtctaagtctagacctttctgatc

SEQ ID NO: 321821 - DNA, 120 bp, Artificial Sequence
  ENSG00000135740_28 (sequence is synthesized)
cttgggtctgggttttttgaggaggggacatagtggcctctgggctgccatgtcaccacctgaacattccccaaacagagaaggaacccagcatctcagggccactgctccattgctctg

SEQ ID NO: 321822 - DNA, 120 bp, Artificial Sequence
  ENSG00000135740_29 (sequence is synthesized)
ggggctgggatgcctggctaagcaggggctgacagggtggcaggtgactttctagggatcagcacctgccctgtgttttgtaccttgaacctaagatatattaaacatctctcagatgga

SEQ ID NO: 321823 - DNA, 120 bp, Artificial Sequence
  ENSG00000135740_30 (sequence is synthesized)
ctggccgcaggaaggatggtgtggcgaatgctgaggctacaaatgggaaacatcgaggcctgggctttcaggacacaggcaagcagggagcagtgtgggattgaggatgggagggaggag

SEQ ID NO: 321824 - DNA, 120 bp, Artificial Sequence
  ENSG00000135740_31 (sequence is synthesized)
gcacggatgaacagcggtgcgttgttttcggagtattctacaaacaccaacagcagcttcagggctgtcttcaccaccaagcgggactgaggagagaggtcagtacatatgagtggggct

SEQ ID NO: 321825 - DNA, 120 bp, Artificial Sequence
  ENSG00000135740_32 (sequence is synthesized)
taggccagacctgtgccagctgttgctggggaaggggaagggctgctggggctggacccagagagaatctaggcagaatgaccctggccccaggcccaggcactgaagtgccttataggc

SEQ ID NO: 321826 - DNA, 120 bp, Artificial Sequence
  ENSG00000135740_33 (sequence is synthesized)
ttacagaggcctcagactcactcccttccagctcactttgcagaacaggaaactgaggcccagagagaagcaacaggcaaagggtataaggctgagtggagagccacttaccaggctggc

SEQ ID NO: 321827 - DNA, 120 bp, Artificial Sequence
  ENSG00000135740_34 (sequence is synthesized)
acacaatgtgtacagccactgaatagtgtcactgtgggccaccacccccagcattccatccacaaagagcatcagctggccgagcgctggggaaacagggatgggcagagtcagcgaggg

SEQ ID NO: 321828 - DNA, 120 bp, Artificial Sequence
  ENSG00000135740_35 (sequence is synthesized)
tcgctggagcagaggtcatgggagaggggcggggctgacctctaaggatgtagctctggtagttgtggtcggcagcagcacccacacggatcaggcagctcagcccctctgaatgcacaa

SEQ ID NO: 321829 - DNA, 120 bp, Artificial Sequence
  ENSG00000135740_36 (sequence is synthesized)
attcaggcaccaggtctttgtcctcctagaggcaccatgggggagtttagggaagcttgggctacacacttacccccagcccactgcggggcctcacctggaagatctgcttcagtgaga

SEQ ID NO: 321830 - DNA, 120 bp, Artificial Sequence
  ENSG00000135740_37 (sequence is synthesized)
gtcagtatttccccgctcccagctggcattggaggtctgcctcccctgggttgctgaggccctcccaccccgcatcaggacagaagaggctattcgggttgcctcatctcctctatagag

SEQ ID NO: 321831 - DNA, 120 bp, Artificial Sequence
  ENSG00000135740_38 (sequence is synthesized)
aaatggggtctgggaggggcttgccagggatcctggctctggggttttgagcccctgggagtgcggtgggcatcatccctcactccctgccaggcagcagtcttgtcagcccgggtaggg

SEQ ID NO: 321832 - DNA, 120 bp, Artificial Sequence
  ENSG00000135740_39 (sequence is synthesized)
gccgcgccgtagggatagagctgaggacagagccctgtggcatgctactaaagactttcctccagactgacatggatcaagcatttttgggtacaaagccagctgcagtcgccacttcat

SEQ ID NO: 321833 - DNA, 120 bp, Artificial Sequence
  ENSG00000135740_40 (sequence is synthesized)
aagccaccctggcagaccgacggcgagtggaactcgagcacctccccaggtgcgcctaattcgaagggcagtcagaatggcggagccaagttcctggcacccctcttcagtttcccctca

SEQ ID NO: 321834 - DNA, 120 bp, Artificial Sequence
  ENSG00000135740_41 (sequence is synthesized)
acttgagaggggactcccccgcaggcggggcagagtggaccctgggaccccagcccaagacttttccggagaagaacactcgctccagcctcttcccgcggagcacctcccaccagtttt

SEQ ID NO: 321835 - DNA, 120 bp, Artificial Sequence
  ENSG00000135740_42 (sequence is synthesized)
catggcgcccaccctgaacccccgatcgccccaacctttctccggcctccctcaccttgagcggcgctcccagcaggcggtgcaccgcgggtatctgcgcgcccaagggcagcgccccgt

SEQ ID NO: 321836 - DNA, 120 bp, Artificial Sequence
  ENSG00000135744_0 (sequence is synthesized)
gaagaagctgccgttgttctgggtactacagcagaagggtatgcggaagcgagcaccccagtctgagatggctcctgccggtgtgagcctgagggccaccatcctctgcctcctggcctg

SEQ ID NO: 321837 - DNA, 120 bp, Artificial Sequence
  ENSG00000135744_1 (sequence is synthesized)
ggctggcctggctgcaggtgaccgggtgtacatacaccccttccacctcgtcatccacaatgagagtacctgtgagcagctggcaaaggccaatgccgggaagcccaaagaccccacctt

SEQ ID NO: 321838 - DNA, 120 bp, Artificial Sequence
  ENSG00000135744_2 (sequence is synthesized)
catacctgctccaattcaggccaagacatcccctgtggatgaaaaggccctacaggaccagctggtgctagtcgctgcaaaacttgacaccgaagacaagttgagggccgcaatggtcgg

SEQ ID NO: 321839 - DNA, 120 bp, Artificial Sequence
  ENSG00000135744_3 (sequence is synthesized)
gatgctggccaacttcttgggcttccgtatatatggcatgcacagtgagctatggggcgtggtccatggggccaccgtcctctccccaacggctgtctttggcaccctggcctctctcta

SEQ ID NO: 321840 - DNA, 120 bp, Artificial Sequence
  ENSG00000135744_4 (sequence is synthesized)
tctgggagccttggaccacacagctgacaggctacaggcaatcctgggtgttccttggaaggacaagaactgcacctcccggctggatgcgcacaaggtcctgtctgccctgcaggctgt

SEQ ID NO: 321841 - DNA, 120 bp, Artificial Sequence
  ENSG00000135744_5 (sequence is synthesized)
acagggcctgctagtggcccagggcagggctgatagccaggcccagctgctgctgtccacggtggtgggcgtgttcacagccccaggcctgcacctgaagcagccgtttgtgcagggcct

SEQ ID NO: 321842 - DNA, 120 bp, Artificial Sequence
  ENSG00000135744_6 (sequence is synthesized)
ggctctctatacccctgtggtcctcccacgctctctggacttcacagaactggatgttgctgctgagaagattgacaggttcatgcaggctgtgacaggatggaagactggctgctccct

SEQ ID NO: 321843 - DNA, 120 bp, Artificial Sequence
  ENSG00000135744_7 (sequence is synthesized)
gatgggagccagtgtggacagcaccctggctttcaacacctacgtccacttccaagggaagatgaagggcttctccctgctggccgagccccaggagttctgggtggacaacagcacctc

SEQ ID NO: 321844 - DNA, 120 bp, Artificial Sequence
  ENSG00000135744_8 (sequence is synthesized)
caagtgcccttcactgagagcgcctgcctgctgctgatccagcctcactatgcctctgacctggacaaggtggagggtctcactttccagcaaaactccctcaactggatgaagaaacta

SEQ ID NO: 321845 - DNA, 120 bp, Artificial Sequence
  ENSG00000135744_9 (sequence is synthesized)
tctccccggaccatccacctgaccatgccccaactggtgctgcaaggatcttatgacctgcaggacctgctcgcccaggctgagctgcccgccattctgcacaccgagctgaacctgcaa

SEQ ID NO: 321846 - DNA, 120 bp, Artificial Sequence
  ENSG00000135744_10 (sequence is synthesized)
aaattgagcaatgaccgcatcagggtgggggaggtgctgaacagcattttttttgagcttgaagcggatgagagagagcccacagagtctacccaacagcttaacaagcctgaggtcttg

SEQ ID NO: 321847 - DNA, 120 bp, Artificial Sequence
  ENSG00000135744_11 (sequence is synthesized)
gaggtgaccctgaaccgcccattcctgtttgctgtgtatgatcaaagcgccactgccctgcacttcctgggccgcgtggccaacccgctgagcacagcatgaggccagggccccagaaca

SEQ ID NO: 321848 - DNA, 120 bp, Artificial Sequence
  ENSG00000135744_12 (sequence is synthesized)
cagtgcctggcaaggcctctgcccctggcctttgaggcaaaggccagcagcagataacaaccccggacaaatcagcgatgtgtcacccccagtctcccaccttttcttctaatgagtcga

SEQ ID NO: 321849 - DNA, 120 bp, Artificial Sequence
  ENSG00000135744_13 (sequence is synthesized)
ctttgagctggaaagcagccgtttctccttggtctaagtgtgctgcatggagtgagcagtagaagcctgcagcggcacaaatgcacctcccagtttgctgggtttattttagagaatggg

SEQ ID NO: 321850 - DNA, 120 bp, Artificial Sequence
  ENSG00000135744_14 (sequence is synthesized)
ggtggggaggcaagaaccagtgtttagcgcgggactactgttccaaaaagaattccaaccgaccagcttgtttgtgaaacaaaaaagtgttcccttttcaagttgagaacaaaaattggg

SEQ ID NO: 321851 - DNA, 120 bp, Artificial Sequence
  ENSG00000135744_15 (sequence is synthesized)
ttttaaaattaaagtatacatttttgcattgccttcggtttgtatttagtgtcttgaatgtaagaacatgacctccgtgtagtgtctgtaataccttagttttttccacagatgcttgtg

SEQ ID NO: 321852 - DNA, 120 bp, Artificial Sequence
  ENSG00000135744_16 (sequence is synthesized)
atttttgaacaatacgtgaaagatgcaagcacctgaatttctgtttgaatgcggaaccatagctggttatttctcccttgtgttagtaataaacgtcttgccacaataagcctccaaaaa

SEQ ID NO: 321853 - DNA, 120 bp, Artificial Sequence
  ENSG00000135749_0 (sequence is synthesized)
ctccctcggacatggcgctcacctgcccggccgcagcagccggctccggcgccgcggttcgcgggtccgggcggaagagcagctccagcttcaaacgtggggtggaaggaggcggcgggg

SEQ ID NO: 321854 - DNA, 120 bp, Artificial Sequence
  ENSG00000135749_1 (sequence is synthesized)
cgcgggcccgggtgttagacctgagggagcctggagatccggccggggcgcgcagggtgcagcggggcgctcaccagccccggggcgcagccggcatggtgtcccaggtgctgcagctgc

SEQ ID NO: 321855 - DNA, 120 bp, Artificial Sequence
  ENSG00000135749_2 (sequence is synthesized)
agccggcatggtgtcccaggtgctgcagctgctccggcagggcgtgtgggccgcgctcaccgggggctggtaccacgacccggagcagagcaagttcaccaacagctgccacctctacct

SEQ ID NO: 321856 - DNA, 120 bp, Artificial Sequence
  ENSG00000135749_3 (sequence is synthesized)
gtggctgttcctcctgctgctgcccctggccctgcacctggcttttcctccaaatgcgatcattgtatttttctactgcagtgcagtgactatattcttcacaataatcaaactggtcag

SEQ ID NO: 321857 - DNA, 120 bp, Artificial Sequence
  ENSG00000135749_4 (sequence is synthesized)
ttatcgcctacacctcatgtttgacaaaggagaagtaattcagcaaaagccctccagaaaggaagaaaagccaaataaagacaaggaggccaaaggtgaacacataactaatcacagaaa

SEQ ID NO: 321858 - DNA, 120 bp, Artificial Sequence
  ENSG00000135749_5 (sequence is synthesized)
tccaagcaataataggcagattcacaatggcaaaaaggaagaggccagtcgaaacctctccacgcctcccctccgctgcagctccagagggcaaagcataacctctcatcactcttctgg

SEQ ID NO: 321859 - DNA, 120 bp, Artificial Sequence
  ENSG00000135749_6 (sequence is synthesized)
gccattggagttgtcagcacaggaaactgtagaagatctcaaaggtgtcattctattagaagaccatcccatagcaccagtgtcatctacctcacctggtatcaaagtggaaagcttacc

SEQ ID NO: 321860 - DNA, 120 bp, Artificial Sequence
  ENSG00000135749_7 (sequence is synthesized)
tgcgtctcaagcacacatgctggaaaccacgaccaagtcagtaatacctgtaaaaccagttgccacagaaactctcatcaatggtaaaggaaaggaaagaggaggcaaggggcagcctcc

SEQ ID NO: 321861 - DNA, 120 bp, Artificial Sequence
  ENSG00000135749_8 (sequence is synthesized)
tttgcgccacagatccgagggtggcttagtggataagggacccttgaagaagttgccccacctgtctttgtctcagtatgacttactagaaacagacgtttctttccagccgtgggggag

SEQ ID NO: 321862 - DNA, 120 bp, Artificial Sequence
  ENSG00000135749_9 (sequence is synthesized)
tgagaattcagtcctgattccagaacctgtcagttgtccccggggctccataagggaacgggtacaaagcaagtcacctcaggacagcctgagcagcagctgccctcaatgtgacaccat

SEQ ID NO: 321863 - DNA, 120 bp, Artificial Sequence
  ENSG00000135749_10 (sequence is synthesized)
cgtggccaagcctgtggaggagccagcagacacatcctgtcaggtagatacctcctgccagggggacctgcccttgcaccaggaagtggactcctcagatagtgaggtagctgttactct

SEQ ID NO: 321864 - DNA, 120 bp, Artificial Sequence
  ENSG00000135749_11 (sequence is synthesized)
catcgatacttctcaacccggagacccactgagtctacatgagcccataaaaattgttatcacgatgagcagtaccccaaactccatgacagatttggaaagctccctccacctgagggt

SEQ ID NO: 321865 - DNA, 120 bp, Artificial Sequence
  ENSG00000135749_12 (sequence is synthesized)
ggttggcacagagaagaccagtgtaaagtctgacgctgagcccactaacccaggggcggccggttctccaaatgccgagcagatctcaattcctgtaatcaccctggacctgcctgaggg

SEQ ID NO: 321866 - DNA, 120 bp, Artificial Sequence
  ENSG00000135749_13 (sequence is synthesized)
tgggggaggaggtgttccctgtcccgaaggcaatggaagtgaaaggactccagagagactgaagacgagggtatccaccaatcagtgttctggctacggatctggggaggggggaaatgc

SEQ ID NO: 321867 - DNA, 120 bp, Artificial Sequence
  ENSG00000135749_14 (sequence is synthesized)
catcaaggatcacagttcttcatcacgggaaccctgggaatcggtgtcccggcttacacctgatacaggctccgagtctaaggtggggaaggaaggccagactaaccttgacccatcgtc

SEQ ID NO: 321868 - DNA, 120 bp, Artificial Sequence
  ENSG00000135749_15 (sequence is synthesized)
ttgtaagtccagccatgaaaagaggcatgcccgggtgctcagtgtggacagtgggacagatgtcttcttgagtaaaagttctgcagaaattgttaacgatacagagaaaacaatgccaac

SEQ ID NO: 321869 - DNA, 120 bp, Artificial Sequence
  ENSG00000135749_16 (sequence is synthesized)
ttccaaatctgacctagaggctaaggaaggacaaatgccaaatgagtccaacttcctggaatttgtctccctgttagaatccattaatacttccaagatgacggcatccagtcaactgaa

SEQ ID NO: 321870 - DNA, 120 bp, Artificial Sequence
  ENSG00000135749_17 (sequence is synthesized)
tggctcagctgagcagaatgaagaaagtgggcttctccgagataactgttcccaggaaaaaaaggaggaaatcctggaaaatgaaaagcccagtggacacagttctaagcaaggaaaacc

SEQ ID NO: 321871 - DNA, 120 bp, Artificial Sequence
  ENSG00000135749_18 (sequence is synthesized)
agatttgcaaagtcaagaccatactagcaccggccccgcatgcactcagcctgccaagaccacagccttttttcagggcaatagacaaagacagataatctacagggtaacttcccaaca

SEQ ID NO: 321872 - DNA, 120 bp, Artificial Sequence
  ENSG00000135749_19 (sequence is synthesized)
agatagttctgtcttgcaagtcatcagtgggcctgaaacatctgtacaagaagagatatctgtggatgctatgcatgtcttcattgatgaacatggggaaattagatcctgttatttaaa

SEQ ID NO: 321873 - DNA, 120 bp, Artificial Sequence
  ENSG00000135749_20 (sequence is synthesized)
atctggaaatcagaaagaaggccctttacagcctctaccatcaaataatgactgtctctctcaggctcgagagatgcaggtcagctcctccagtaccacaacttctgagagtcaagatcc

SEQ ID NO: 321874 - DNA, 120 bp, Artificial Sequence
  ENSG00000135749_21 (sequence is synthesized)
gtcttctggggaccctgccgtcagtgcccttcagcaacagctgttactgatggtggctcgcaggacccagtcggaaaccccacggcatgtgagtcaggatctggaagcctcgtcatgttc

SEQ ID NO: 321875 - DNA, 120 bp, Artificial Sequence
  ENSG00000135749_22 (sequence is synthesized)
ttcaacacaaggaaaatttaaccgagagcagttttacaaatttatcattttccctggcaagtggattaaagtctggtatgatcgactgaccttgctggcattacttgatcgaactgaaga

SEQ ID NO: 321876 - DNA, 120 bp, Artificial Sequence
  ENSG00000135749_23 (sequence is synthesized)
catcaaggagaatgtactggcgattttactcattgtcctggtttccctccttggatttctgaccttgagccaaggcttttgcaaagatatgtgggtgctcctcttctgcctcgtcatggc

SEQ ID NO: 321877 - DNA, 120 bp, Artificial Sequence
  ENSG00000135749_24 (sequence is synthesized)
cagctgccagtactccctgctaaagagtgttcagcctgaccccgcctcaccaatacacggacacaaccaaatcataacatatagcagaccaatctatttttgtgtgctgtgtggccttat

SEQ ID NO: 321878 - DNA, 120 bp, Artificial Sequence
  ENSG00000135749_25 (sequence is synthesized)
tttgcttcttgatacaggggccaaagccaggcaccctcccagttacgttgtgtatggcctgaagctcttctctccagtgtttctacaatcagctagggactacttaatagtatttttata

SEQ ID NO: 321879 - DNA, 120 bp, Artificial Sequence
  ENSG00000135749_26 (sequence is synthesized)
ttgcttccctgctatttccctccttgggctcttcccgcaaatcaacactttctgcacttatcttttggagcaaattgacatgctgttttttggtggttctgctgtgtctgggataacctc

SEQ ID NO: 321880 - DNA, 120 bp, Artificial Sequence
  ENSG00000135749_27 (sequence is synthesized)
ggctgtttacagtgtggcccggagcgtcttggctgccgccctgctccacgcagtctgcttcagtgcagtgaaggaaccgtggagcatgcaacacatcccggcactgttttcggccttctg

SEQ ID NO: 321881 - DNA, 120 bp, Artificial Sequence
  ENSG00000135749_28 (sequence is synthesized)
tggcctcttggtcgccctttcttaccatctgagccgtcagagcagtgacccatctgtactcatgtccttcatccaatgcaggctgtttcctaaatttttacatcaaaatctggcagagtc

SEQ ID NO: 321882 - DNA, 120 bp, Artificial Sequence
  ENSG00000135749_29 (sequence is synthesized)
agctgctgaccctctccccaagaagatgaaagattcagtgacggatgtcttaaaatgggatctcatcgtctgcgcagtggttgctgtcctctcatttgcagtcagcgccagcactgtatt

SEQ ID NO: 321883 - DNA, 120 bp, Artificial Sequence
  ENSG00000135749_30 (sequence is synthesized)
cctgtcattgcgaccatttctcagcatcgtgctgtttgccttggctggagccgtggggtttgtaacacattacgtgctccctcagctccgcaagcatcatccctggatgtggatttcaca

SEQ ID NO: 321884 - DNA, 120 bp, Artificial Sequence
  ENSG00000135749_31 (sequence is synthesized)
gtgttttgaaaaatacatcttgtacccagcgctaattttgaatgccctcactattgatgcatttttaataagcaatcaccggagacttggtacccactgggacatttttctgatgatcat

SEQ ID NO: 321885 - DNA, 120 bp, Artificial Sequence
  ENSG00000135749_32 (sequence is synthesized)
tgctggcatgaagctgttgcggacatcattctgcaacccggtttaccagtttattaacttgagcttcactgtcatctttttccactttgactacaaagatatttcagagagcttcttact

SEQ ID NO: 321886 - DNA, 120 bp, Artificial Sequence
  ENSG00000135749_33 (sequence is synthesized)
ggatttcttcatggtgtccattttatttagcaagctcggggacctgcttcacaagttacagttcgtcctgacatatgtggctccttggcagatggcttggggttcttcgtttcacgtgtt

SEQ ID NO: 321887 - DNA, 120 bp, Artificial Sequence
  ENSG00000135749_34 (sequence is synthesized)
tgctcagctctttgccattcctcattctgccatgcttttctttcagacgattgccacatcaatcttttctaccccattgagcccatttcttgggagtgtcattttcatcacatcatatgt

SEQ ID NO: 321888 - DNA, 120 bp, Artificial Sequence
  ENSG00000135749_35 (sequence is synthesized)
caggccagtgaaattctgggagaaaaactacaatacaaggcgagtggataattccaacacaagactggcagtccaaattgaaagagatccagggaatgatgacaacaatctcaattccat

SEQ ID NO: 321889 - DNA, 120 bp, Artificial Sequence
  ENSG00000135749_36 (sequence is synthesized)
tttttatgaacacttgacaaggaccctccaggagtccctctgtggagacttagttcttggacgttggggcaactacagctctggcgattgctttattttggcttcagatgacctcaatgc

SEQ ID NO: 321890 - DNA, 120 bp, Artificial Sequence
  ENSG00000135749_37 (sequence is synthesized)
ctttgttcacctgattgaaattggaaatggtcttgtcacctttcaacttcgaggactggaattccgaggaacctactgccagcagagggaggtagaagccatcatggagggcgacgagga

SEQ ID NO: 321891 - DNA, 120 bp, Artificial Sequence
  ENSG00000135749_38 (sequence is synthesized)
ggacagaggctgctgctgctgcaaaccaggccacttgcctcacctgctgtcctgcaacgctgcctttcacctccgctggctcacctgggaaatcacgcagacccagtacatcctggaggg

SEQ ID NO: 321892 - DNA, 120 bp, Artificial Sequence
  ENSG00000135749_39 (sequence is synthesized)
ctacagcatcctggacaacaacgcggccaccatgctgcaggtgtttgacctccgaaggatcctcatccgctactacatcaagagtataatatactatatggtaacgtctcccaaactcct

SEQ ID NO: 321893 - DNA, 120 bp, Artificial Sequence
  ENSG00000135749_40 (sequence is synthesized)
ctcctggatcaaaaatgaatcacttctgaagtccctgcagccctttgccaagtggcattacattgagcgtgaccttgcaatgttcaacattaacattgatgatgactacgtcccgtgtct

SEQ ID NO: 321894 - DNA, 120 bp, Artificial Sequence
  ENSG00000135749_41 (sequence is synthesized)
ccaggggatcacacgagctagcttctgcaatgtttatctagaatggattcaacactgtgcacggaaaagacaagagccttcaacgaccctggacagtgacgaggactctcccttggtgac

SEQ ID NO: 321895 - DNA, 120 bp, Artificial Sequence
  ENSG00000135749_42 (sequence is synthesized)
tctgtccttcgccctgtgcaccctggggaggagagctctgggaacagccgctcacaatatggccatcagcctggattctttcctgtatggcctccatgtcctcttcaaaggtgacttcag

SEQ ID NO: 321896 - DNA, 120 bp, Artificial Sequence
  ENSG00000135749_43 (sequence is synthesized)
aataacagcacgtgacgagtgggtatttgctgacatggacctactgcataaagttgtagctccagctatcaggatgtccctgaaacttcaccaggaccagttcacttgccctgacgagta

SEQ ID NO: 321897 - DNA, 120 bp, Artificial Sequence
  ENSG00000135749_44 (sequence is synthesized)
tgaagacccagcagtcctctacgaggccatccagtccttcgagaagaaggtggtcatctgccacgagggcgacccggcctggcggggcgcagtgctgtccaacaaggaagagctgctcac

SEQ ID NO: 321898 - DNA, 120 bp, Artificial Sequence
  ENSG00000135749_45 (sequence is synthesized)
cctgcggcacgtggtggacgagggtgccgacgagtacaaggtcatcatgctccacagaagcttcctgagcttcaaggtgatcaaggttaacaaagaatgcgtccgaggactttgggccgg

SEQ ID NO: 321899 - DNA, 120 bp, Artificial Sequence
  ENSG00000135749_46 (sequence is synthesized)
gcagcagcaggagcttatatttcttcgcaaccgcaatccggagcgcggcagtatccagaacaataagcaggtcctgcggaacttgattaactcctcctgcgatcagcccctggggtaccc

SEQ ID NO: 321900 - DNA, 120 bp, Artificial Sequence
  ENSG00000135749_47 (sequence is synthesized)
catgtatgtctccccactaaccacatcctacctagggacacacaggcagctgaagaacatctggggtggacccatcactttggacagaattaggacctggttctggaccaagtgggtaag

SEQ ID NO: 321901 - DNA, 120 bp, Artificial Sequence
  ENSG00000135749_48 (sequence is synthesized)
gatgcggaaggattgcaatgcccgccagcacagtggcggcaacattgaagacgtggacggaggaggggccccgacgacaggtggcaacaatgccccgagtggtggcagccaggagagcag

SEQ ID NO: 321902 - DNA, 120 bp, Artificial Sequence
  ENSG00000135749_49 (sequence is synthesized)
cgcagaacagcccagaaaaggcggtgctcagcacggggtgtcatcctgtgaagggacacagagaacaggcaggaggaaaggcaggagccagtccgtgcaggcacactcagcgctaagcca

SEQ ID NO: 321903 - DNA, 120 bp, Artificial Sequence
  ENSG00000135749_50 (sequence is synthesized)
aaggccgcccatgctgagctcatctggccccatcttagagagccgccaaacattcctccagacgtccacctcagtgcacgagctggcccagaggctctcgggcagccggctctccttgca

SEQ ID NO: 321904 - DNA, 120 bp, Artificial Sequence
  ENSG00000135749_51 (sequence is synthesized)
cgcctcggccacgtccctgcactctcagcccccgcccgtcaccaccaccggccacctgagtgtccgtgagcgggccgaggcgctcatcaggtccagcctgggctcctccaccagctccac

SEQ ID NO: 321905 - DNA, 120 bp, Artificial Sequence
  ENSG00000135749_52 (sequence is synthesized)
cctgagcttcctcttcggcaagaggagcttttccagcgcgctcgtcatttccggactctctgctgcggaggggggcaataccagtgacacccagtcatccagcagcgtcaacatcgtgat

SEQ ID NO: 321906 - DNA, 120 bp, Artificial Sequence
  ENSG00000135749_53 (sequence is synthesized)
gggcccctcagccagggctgccagccaggccactcggcacctctccgagccatgtgagccccctgatgccaccgagcaggggcagcttcatgaccgatgtctggctgaggctgtggcgga

SEQ ID NO: 321907 - DNA, 120 bp, Artificial Sequence
  ENSG00000135749_54 (sequence is synthesized)
cactctcggggttgtctgcaggagagcaagccaggaggacatgggcctggacgacacggcctcgcagcaaagtgtgtcagacgagcagtgacgggcgtgcggccgggcggggaggctggc

SEQ ID NO: 321908 - DNA, 120 bp, Artificial Sequence
  ENSG00000135749_55 (sequence is synthesized)
tcccccacacctcccacctgcattgctctccctcgtgctccccaaatcaccacaaccaaccaataccgcgatccatgagggactcctcctgtggaaaaggagagctgttccagaacacag

SEQ ID NO: 321909 - DNA, 120 bp, Artificial Sequence
  ENSG00000135749_56 (sequence is synthesized)
aaaaaaaaaaaaaatcaaacaacaacaacaaaaaaacctcacatgatggggaaacaaaaaaaagcaacaaagaagccacaccacacctccctggccaggcacagcgctgcccagagcggc

SEQ ID NO: 321910 - DNA, 120 bp, Artificial Sequence
  ENSG00000135749_57 (sequence is synthesized)
ccctggccaggcacagcgctgcccagagcggcacaccgcggacagcaccacacatgttccagaatctgaaatctcaaaagccattcactaacttaaaacaactcaacagagccatgaaac

SEQ ID NO: 321911 - DNA, 120 bp, Artificial Sequence
  ENSG00000135749_58 (sequence is synthesized)
aaatgccctgatgaaaataagacaactgcatgttacatcatcggcactttatacattactgttaccatgaaaaagaaatgaacagcagcacgtctgataccatcagctgggcagatgcat

SEQ ID NO: 321912 - DNA, 120 bp, Artificial Sequence
  ENSG00000135749_59 (sequence is synthesized)
taaggttaaatctaagtgtcaagaaaaccctatttctttataatatttatgcagctgttaagcgtaacatggtggcagcttcacaacaagaaccgtgatcatgcatgcagtcatgtctcc

SEQ ID NO: 321913 - DNA, 120 bp, Artificial Sequence
  ENSG00000135749_60 (sequence is synthesized)
agtattctgtgaaaagccaggatacgttaggatgtgagtttagaaactgagtccattcggtgcatggaaatccaccgcggagtcacacaatgctcctcactgtagtccaggcgattggtg

SEQ ID NO: 321914 - DNA, 120 bp, Artificial Sequence
  ENSG00000135749_61 (sequence is synthesized)
ggccgccagcaccctgcgggcttcacagggacgcgtgcttgttctccaagccccgcaacccttactgtgcacacaacatcgcacacacctttgtttttgaaattaaaatgtttatagtta

SEQ ID NO: 321915 - DNA, 120 bp, Artificial Sequence
  ENSG00000135749_62 (sequence is synthesized)
cgaatatatcagatttaaccatatgaaattgccattttgtaggtgataataaacagttgactatcgtcaatttcataggcctgatgtcaatttcatatttcattctttaaagaccgccac

SEQ ID NO: 321916 - DNA, 120 bp, Artificial Sequence
  ENSG00000135749_63 (sequence is synthesized)
tcattgttggaaataaaaggacaaaggtaggctggcatagcctctccaagagagcagatcgctgcacttacaaagggttttggggatgtgtggagttcaaggactggtgaggttttggag

SEQ ID NO: 321917 - DNA, 120 bp, Artificial Sequence
  ENSG00000135749_64 (sequence is synthesized)
gcatacatgggttgatggcatctgtataggtggttacttgaaaagcctgttattcatcagttgcccctcaagtctgcagtgagtcggctaactctcagaagccaggggttgtcatggact

SEQ ID NO: 321918 - DNA, 120 bp, Artificial Sequence
  ENSG00000135749_65 (sequence is synthesized)
ggctgccttacaaaagctgtgcactgaggggtgtttacatgatggaataggttcaaagctggttctagtggccacttgttaccatggctgcagatgatccgagagctttcattctcatgg

SEQ ID NO: 321919 - DNA, 120 bp, Artificial Sequence
  ENSG00000135749_66 (sequence is synthesized)
ttcaacctaagaaaggtctataagagtataccccactcttgaaagcaggtggtggagacgttgactactcaccaccatttcctgaaatcaatttgaagagaaagatacctttgtggacac

SEQ ID NO: 321920 - DNA, 120 bp, Artificial Sequence
  ENSG00000135749_67 (sequence is synthesized)
ttgaagagaaagatacctttgtggacactgttctcaagttctgaaagtgggtagcattacattggcagtttaaacacttgcttttttttttttgagtcttgctctgtcacccaggttgga

SEQ ID NO: 321921 - DNA, 120 bp, Artificial Sequence
  ENSG00000135749_68 (sequence is synthesized)
aatctcggctcactgcgacctcggcctcctggattcaagttcagcctcccaagtagctgagattataggagtgtgccaccacacatggctaatctttttgtatttttagtagagatggag

SEQ ID NO: 321922 - DNA, 75 bp, Artificial Sequence
  ENSG00000135749_69 (sequence is synthesized)
tatttttagtagagatggagtttcacactgtttgccagactggtaccaagctcctgacttcaaatgatctgcctg

SEQ ID NO: 321923 - DNA, 120 bp, Artificial Sequence
  ENSG00000135749_70 (sequence is synthesized)
gtgctccaaattgattaagacacaagaccgttctctccaaatcagagagctactcatctctcccttccatgtgtttcttgtactgctccctctatctcttatcatgagactcctctcttc

SEQ ID NO: 321924 - DNA, 120 bp, Artificial Sequence
  ENSG00000135749_71 (sequence is synthesized)
ctgcagtgtggtaaaactacagcaatcgtcttaacctgtgagatctgtcacctttgcattttccactcatgcagctggttctataaaccaactcttctgcttggggggatctaatcatga

SEQ ID NO: 321925 - DNA, 120 bp, Artificial Sequence
  ENSG00000135749_72 (sequence is synthesized)
gatggtggcacgggctcctggcctgagcgtggcacctgccttgcgttcccacccttctgcctgcagaaccccatccccttctctatggggctcccagagtgacaaaggacagtgattaga

SEQ ID NO: 321926 - DNA, 120 bp, Artificial Sequence
  ENSG00000135749_73 (sequence is synthesized)
cacgaagtggcttagctgctcttgaaagcagacaagatacagagcagatatcctgtaaacgataatgcccaggcaggcactgaaaggagtcaccggatacagaggttctgcagaactgtg

SEQ ID NO: 321927 - DNA, 120 bp, Artificial Sequence
  ENSG00000135749_74 (sequence is synthesized)
gccatctgccctacaccggggcatgacggagaatgccctccacccattcacacagcaggactcttctcacatgattctggcctgagggagaggaaaggacacctgtcaatgctggagtta

SEQ ID NO: 321928 - DNA, 120 bp, Artificial Sequence
  ENSG00000135749_75 (sequence is synthesized)
gagcttcactgcttctcagccaatcgatttgactttaaagctgctgagatggcccactgcttttaggtatttaaatactagacaaggagagttctaaggacttcacccaaataagctgtt

SEQ ID NO: 321929 - DNA, 120 bp, Artificial Sequence
  ENSG00000135749_76 (sequence is synthesized)
acttgtccagaatcccaaaccagctgagatgaaatgaatacttgagcttcttcagtgagaaaaaagtaaataaatacccagcagtgctcctatgtgacctggtagacagggaaaatcgat

SEQ ID NO: 321930 - DNA, 120 bp, Artificial Sequence
  ENSG00000135749_77 (sequence is synthesized)
ggtgtcaaggcaaaaatgggtcaggtttggagagttcccccactccttttgagtgttcaggttttccttaccatggctcatgctttccatcaagcaccagagttgcagtggcttggcctc

SEQ ID NO: 321931 - DNA, 120 bp, Artificial Sequence
  ENSG00000135749_78 (sequence is synthesized)
tggttctgggtgaggttatttgcaggtggagacggggggctgcacctgaacatttctagtgtcaccctccctctccttcatgggaaacagctctccagggaagtaccttcctgccagggg

SEQ ID NO: 321932 - DNA, 120 bp, Artificial Sequence
  ENSG00000135749_79 (sequence is synthesized)
aagccaaggctgggccggccgccctacaaggagccacaggattgcagccatgggtgccacctttcatggaaggggagatttatgggctttcctggaacccccaggctgtcctggccaaga

SEQ ID NO: 321933 - DNA, 120 bp, Artificial Sequence
  ENSG00000135749_80 (sequence is synthesized)
ggaaagaggtggttacttcaggagtttgaccttagttagataactaaaagaatacatttcccctcccttttctttatttcctcaataaaaatgtacaaagtatcacccttctccatgccc

SEQ ID NO: 321934 - DNA, 120 bp, Artificial Sequence
  ENSG00000135749_81 (sequence is synthesized)
caatctgtgttaaagtcacaatctatgggtgtagttctgggattctgtcaaattctccttcctgctctccaaaatggacaattgtcgtagggaccacatgcccccagaatacaatggcct

SEQ ID NO: 321935 - DNA, 120 bp, Artificial Sequence
  ENSG00000135749_82 (sequence is synthesized)
ctgtgttctactggggtcaagcctgctagaactcagcattcatgacaggggctaagtgtgcatgaagtgacactgactacagctagaaagccaggcgcacaaatgccccttccccccagg

SEQ ID NO: 321936 - DNA, 120 bp, Artificial Sequence
  ENSG00000135749_83 (sequence is synthesized)
gccgctctttccagcgcagtcatccagaaaggcccacgtgcagagcccctgtgtctcagatgctgcttcagttgcccgtcctgtcctcagaggccactgtgctggccctctatcatttga

SEQ ID NO: 321937 - DNA, 120 bp, Artificial Sequence
  ENSG00000135749_84 (sequence is synthesized)
cctgactttagaacctgacctcaaggatatggcagcgctagcctttagctcccacagcacggatgggggtgatgccagttagaagtgggtagtgaacgtttgctgagctgttcactgttt

SEQ ID NO: 321938 - DNA, 120 bp, Artificial Sequence
  ENSG00000135749_85 (sequence is synthesized)
gccagtgaaattctgggagaaaaactacaagtaagatcctaaaatcagtgctcaattgcttttctccagtttgcacttcagaaggctcctctgccttcctctgttaggaggtccctggct

SEQ ID NO: 321939 - DNA, 120 bp, Artificial Sequence
  ENSG00000135749_86 (sequence is synthesized)
ccaggcttccccctgctgtggggccaggccaaacctgtctctcttgatgacctcctcagttcattgactcagctcttgggtctcagggatctggaaagaacatgactgatttcaaattag

SEQ ID NO: 321940 - DNA, 120 bp, Artificial Sequence
  ENSG00000135749_87 (sequence is synthesized)
ttcagcaaaattggtggggaagacatctgcacagaattagaaaaataataaatgcagacatggtaccttagagtgctggaaaaggcaccccaccctcggggaagctgatctgagaggcat

SEQ ID NO: 321941 - DNA, 120 bp, Artificial Sequence
  ENSG00000135749_88 (sequence is synthesized)
gcagggcgtcctggtgtggggagctgtgtggagagtgcgtctggaggcagtgagtcttacttcctgactttgtagccatgcagctcagcagcctcaggaagactcagctccctgcaattt

SEQ ID NO: 321942 - DNA, 120 bp, Artificial Sequence
  ENSG00000135749_89 (sequence is synthesized)
aggatgatttcccttaactcaaaccatgcaagttactgcagttcatctcatgggaggggctgaaatacacgctagtaactcctctgcccttcagccttcaaactcggggacctgcttcac

SEQ ID NO: 321943 - DNA, 120 bp, Artificial Sequence
  ENSG00000135749_90 (sequence is synthesized)
atcgtttaaatatattttctacagagactcagactgaatgtgagtgaataaaagagttcatgattatgagaattgtgacttctttgggggacttatttgaggacaaacaaatttcctgat

SEQ ID NO: 321944 - DNA, 120 bp, Artificial Sequence
  ENSG00000135749_91 (sequence is synthesized)
tcctcgactcccttcagcctcttcccctctgatgaaggcatggggaaatccgttgaagcaaacattctagcatgccttctcttcaaacttccttcatgtttgtgctcggccaggaaccta

SEQ ID NO: 321945 - DNA, 120 bp, Artificial Sequence
  ENSG00000135749_92 (sequence is synthesized)
tataaattacacagagagaatattgagggaaaaaattggagggtctcatataatccactaaaatgtgggaagaacacatctttcctcttttatgtatataaagagtctgattttaccctt

SEQ ID NO: 321946 - DNA, 120 bp, Artificial Sequence
  ENSG00000135749_93 (sequence is synthesized)
aatgtagccttgaaatcatgagatgatgacacagacacttctgatttgtgttttagagtgttcagcctgaccccgcctcaccaatacacggacacaaccaaatcataacatatagcagac

SEQ ID NO: 321947 - DNA, 120 bp, Artificial Sequence
  ENSG00000135749_94 (sequence is synthesized)
tatttagcaaggcaagtgaattagctattttcttcattttaacattttaaagggggctgttcttatcaaatgttttaagagtttaaaacttattctttataaaaaaaattatgggaggat

SEQ ID NO: 321948 - DNA, 120 bp, Artificial Sequence
  ENSG00000135749_95 (sequence is synthesized)
atgaaattgaattatacatgtatgttaaactcttgctaccatttggggaaaactgcccatggaatgtaagtatgccatgttatttgctaaaaatcactaattaaaatgaattagccatta

SEQ ID NO: 321949 - DNA, 120 bp, Artificial Sequence
  ENSG00000135749_96 (sequence is synthesized)
tgccattcctcgtatcctttctgcttctattttcaccctccagctgagattcacattttacggaagcaagcttttcattgacccctggcaataaaaagattttaaagtctataagattac

SEQ ID NO: 321950 - DNA, 120 bp, Artificial Sequence
  ENSG00000135749_97 (sequence is synthesized)
attttaatggggacatgaagaggcactttggatccctttaggccacttagccttaaaagatatttctttattttgaactcttcctgcttcttaatgcatattcaggagttacttttattt

SEQ ID NO: 321951 - DNA, 120 bp, Artificial Sequence
  ENSG00000135749_98 (sequence is synthesized)
tttctggtccttccatttcccatgcccagatctgcattaaggtaccctgtcttttaaactgcttaaatgattgggttgccttgtgcaaaatagtgcaaataaatttgctgttattaagca

SEQ ID NO: 321952 - DNA, 86 bp, Artificial Sequence
  ENSG00000135749_99 (sequence is synthesized)
gactggaaaacacaggccttctgcctttcttcccgttccctctctgacctgcaggttaacaaagaatgcgtccgaggactttgggc

SEQ ID NO: 321953 - DNA, 120 bp, Artificial Sequence
  ENSG00000135749_100 (sequence is synthesized)
tgctctactttttccttttacctttcagaaggtgtttttataacatgtaaaatccagggttttcgttgtaccaagtagaggaataaggaaaaatacaccaactccatatttccggaagaa

SEQ ID NO: 321954 - DNA, 120 bp, Artificial Sequence
  ENSG00000135749_101 (sequence is synthesized)
actagcaccggccccgcatgcactcagcctgccaagaccacagccttgtaaggataagttacttaatttagtttcacttggtcataaagcatgagacagcctcatttactggcttctgct

SEQ ID NO: 321955 - DNA, 120 bp, Artificial Sequence
  ENSG00000135749_102 (sequence is synthesized)
aaaaaaaaaaggacaaaataatttcagcaatttcaagtgtcattttcctgaagtcctggtaacataacaagcatttggctgctttttccttcacgttcactgcaacctgacagatgagac

SEQ ID NO: 321956 - DNA, 120 bp, Artificial Sequence
  ENSG00000135749_103 (sequence is synthesized)
acatggactccctcttcctcccattccacctccacgacatttattttaaagactagagctttcctcctccaggatgttttggagaggatctagtgcatggacctccttgttgactgctgt

SEQ ID NO: 321957 - DNA, 120 bp, Artificial Sequence
  ENSG00000135749_104 (sequence is synthesized)
tcttcctgtattgtttcattaagttccaattctacacccacagccagagcatctccagggatgactttctggtatttcttaccattttatcttcctcatgccatttttcattgtgttcca

SEQ ID NO: 321958 - DNA, 120 bp, Artificial Sequence
  ENSG00000135749_105 (sequence is synthesized)
attctttccatttctttgggttttgttgcactggctaatgtatttcttatacagaatatctctttatccttgatttaccaaatagctcccaatatctggctttgcctttcatatcattcc

SEQ ID NO: 321959 - DNA, 120 bp, Artificial Sequence
  ENSG00000135749_106 (sequence is synthesized)
atacctagacttttccctgtggttcttcattctcagagtagtttttgtcacatacacatacagcatttggaaaggcaattaataaatctcattggaccttccctctgccctgatccggaa

SEQ ID NO: 321960 - DNA, 120 bp, Artificial Sequence
  ENSG00000135749_107 (sequence is synthesized)
ttggcagatatagcatagcacaaaattgttattgctgggttttgaccccaaagtaaagagaagctcttctcagtttgtttgaaattttatggaattttgtggattaaaatttctatgctc

SEQ ID NO: 321961 - DNA, 120 bp, Artificial Sequence
  ENSG00000135750_0 (sequence is synthesized)
agaagaggcggcgggccgcgctccggccggtctgcggcgttggccttggcggcggcggtggagaagatgctgcagtccctggccggcagctcgtgcgtgcgcctggtggagcggcaccgc

SEQ ID NO: 321962 - DNA, 120 bp, Artificial Sequence
  ENSG00000135750_1 (sequence is synthesized)
tcggcctggtgcttcggcttcctggtgctgggctacttgctctacctggtcttcggcgcagtggtcttctcctcggtggagctgccctatgaggacctgctgcgccaggagctgcgcaag

SEQ ID NO: 321963 - DNA, 120 bp, Artificial Sequence
  ENSG00000135750_2 (sequence is synthesized)
ctgaagcgacgcttcttggaggagcacgagtgcctgtctgagcagcagctggagcagttcctgggccgggtgctggaggccagcaactacggcgtgtcggtgctcagcaacgcctcgggc

SEQ ID NO: 321964 - DNA, 120 bp, Artificial Sequence
  ENSG00000135750_3 (sequence is synthesized)
aactggaactgggacttcacctccgcgctcttcttcgccagcaccgtgctctccaccacaggttatggccacaccgtgcccttgtcagatggaggtaaggccttctgcatcatctactcc

SEQ ID NO: 321965 - DNA, 120 bp, Artificial Sequence
  ENSG00000135750_4 (sequence is synthesized)
gtcattggcattcccttcaccctcctgttcctgacggctgtggtccagcgcatcaccgtgcacgtcacccgcaggccggtcctctacttccacatccgctggggcttctccaagcaggtg

SEQ ID NO: 321966 - DNA, 120 bp, Artificial Sequence
  ENSG00000135750_5 (sequence is synthesized)
gtggccatcgtccatgccgtgctccttgggtttgtcactgtgtcctgcttcttcttcatcccggccgctgtcttctcagtcctggaggatgactggaacttcctggaatccttttatttt

SEQ ID NO: 321967 - DNA, 120 bp, Artificial Sequence
  ENSG00000135750_6 (sequence is synthesized)
tgttttatttccctgagcaccattggcctgggggattatgtgcctggggaaggctacaatcaaaaattcagagagctctataagattgggatcacgtgttacctgctacttggccttatt

SEQ ID NO: 321968 - DNA, 120 bp, Artificial Sequence
  ENSG00000135750_7 (sequence is synthesized)
gccatgttggtagttctggaaaccttctgtgaactccatgagctgaaaaaattcagaaaaatgttctatgtgaagaaggacaaggacgaggatcaggtgcacatcatagagcatgaccaa

SEQ ID NO: 321969 - DNA, 120 bp, Artificial Sequence
  ENSG00000135750_8 (sequence is synthesized)
gaccaggcagctggcatgaaagaggaccagaagcaaaatgagccttttgtggccacccagtcatctgcctgcgtggatggccctgcaaaccattgagcgtaggatttgttgcattatgct

SEQ ID NO: 321970 - DNA, 120 bp, Artificial Sequence
  ENSG00000135750_9 (sequence is synthesized)
agagcaccagggtcagggtgcaaggaagaggcttaagtatgttcatttttatcagaatgcaaaagcgaaaattatgtcactttaagaaatagctactgtttgcaatgtcttattaaaaaa

SEQ ID NO: 321971 - DNA, 120 bp, Artificial Sequence
  ENSG00000135750_10 (sequence is synthesized)
caacaaaaaaagacaaatggaacaaagaagctgtgaccccagcaggatgtctaatatgtgaggaaatgagatgtccacctaaaattcatatgtgacaaaattatctcgaccttacatagg

SEQ ID NO: 321972 - DNA, 120 bp, Artificial Sequence
  ENSG00000135750_11 (sequence is synthesized)
aggagaatacttgaagcagtatgctgctgtggttagaagcagattttatacttttaactggaaactttggggtttgcatttagatcatttagctgatggctaaatagcaaaatttatatt

SEQ ID NO: 321973 - DNA, 120 bp, Artificial Sequence
  ENSG00000135750_12 (sequence is synthesized)
tagaagcaaaaaaaaaaagcatagagatgtgttttataaataggtttatgtgtactggtttgcatgtacccacccaaaatgattatttttgtagaatctaagttaaacttactatttata

SEQ ID NO: 321974 - DNA, 120 bp, Artificial Sequence
  ENSG00000135750_13 (sequence is synthesized)
atgcataggtaaccattaactatgtacatataaagtataaatatgtttatattctgtacatatggtttaggtcaccagatcctagtgtagttctgaaactaagactatagatattttgtt

SEQ ID NO: 321975 - DNA, 120 bp, Artificial Sequence
  ENSG00000135750_14 (sequence is synthesized)
tcttttgatttctctttatactaaagaatccagagttgctacaataaaataaggggaataataaacttgagagtgaataaccatagtattctgctgcaataaatgtttctaccctcttgc

SEQ ID NO: 321976 - DNA, 120 bp, Artificial Sequence
  ENSG00000135750_15 (sequence is synthesized)
gatagaatggtgtcagatgtctaacatgtttataaacatttttttgaattgaacaggttatgaaaaggatttattaaaaggttaagatactttgttttgaaagtacattgtgatttgcag

SEQ ID NO: 321977 - DNA, 120 bp, Artificial Sequence
  ENSG00000135750_16 (sequence is synthesized)
ccacctagcactaaagcatagaacttaaacacgaatccctaaatgaacagattatgttacattaatctgagaattttaaatttagaagctaaaataaataaaaatcacagctggttgtaa

SEQ ID NO: 321978 - DNA, 120 bp, Artificial Sequence
  ENSG00000135750_17 (sequence is synthesized)
gataaatagcctgtcctgcaacctggcttaaaacagggaaagccggagttaggcaacagagtgcctagctttctcagtcattcaaacacaagcacggaagaagagattgcactgaccaga

SEQ ID NO: 321979 - DNA, 120 bp, Artificial Sequence
  ENSG00000135750_18 (sequence is synthesized)
ggaccgccagggtgtgatgctccgtagtcgcagggatgaaggaaaaccatgggcggagcttgtcatggacagctcctaggtggacataaatggaaactcattggttctggggcacggcgg

SEQ ID NO: 321980 - DNA, 120 bp, Artificial Sequence
  ENSG00000135750_19 (sequence is synthesized)
gaagagggagacggccctggacggccgcaccaagaatttcacaacccaaacccgactagaaagcctggggctcccaatattacaagtctgttcttgacaaggaagttgggatgacagaac

SEQ ID NO: 321981 - DNA, 120 bp, Artificial Sequence
  ENSG00000135750_20 (sequence is synthesized)
tactgtatgaaaactcagaaatgctcagaagtgcagacctttggttctgttttcttcctcatcagataggaattttttttaactacgcacagaatcacacttgcgaagtcttcttttcct

SEQ ID NO: 321982 - DNA, 120 bp, Artificial Sequence
  ENSG00000135750_21 (sequence is synthesized)
tcttgttactttatttagaagctgtgaactcaagaagtaggtcccatgttgaatctacatgtgcgcaggtgattcttttagccaagtcatttccacactcatgcccaagtctggagatac

SEQ ID NO: 321983 - DNA, 120 bp, Artificial Sequence
  ENSG00000135750_22 (sequence is synthesized)
acaggtgcgggtttctgacaacatcaagatatgaaaggattttaagctcaacggttatcagctcaaaagcagaaaatgttcattcccgtttgtgccctggtatcttgaagaatgtgcaat

SEQ ID NO: 321984 - DNA, 120 bp, Artificial Sequence
  ENSG00000135750_23 (sequence is synthesized)
gactgagaagagctaaaccccagtagagccaagttgggaggtggtgaaaaaaatccaggtgaatggggctaagaccccatacccaggaagcgagctggcatcagaagcagaagactgagg

SEQ ID NO: 321985 - DNA, 120 bp, Artificial Sequence
  ENSG00000135750_24 (sequence is synthesized)
tcatttttatggatgggagatgtgctggtgggtttttagaagagctcatgtcagttggcatccatttcttcagtaaggtgagaaggttatggccacaccgtgcccttgtcagatggaggt

SEQ ID NO: 321986 - DNA, 120 bp, Artificial Sequence
  ENSG00000135750_25 (sequence is synthesized)
ctccttctgccttgtgagattagagtgagaagtctatgaggaagcagccctcaccagacactgaatctgctggtgccttgatcagagacttcccagccactaaaactggacagtcttcat

SEQ ID NO: 321987 - DNA, 120 bp, Artificial Sequence
  ENSG00000135750_26 (sequence is synthesized)
tgctgacccaccttctgatatctgtagagttaccctaggctccaccttccaccaaccagttctgtgtcaaagtgcaaaatgaaaatcacagaaaaagtcaacctgacctgaagcttattc

SEQ ID NO: 321988 - DNA, 120 bp, Artificial Sequence
  ENSG00000135750_27 (sequence is synthesized)
atcaccgtgcaatgagtttcaccatacagttatggccacaccgtgcccttgtcagatggaggtaaggccttctgcatcatctactccgtcattggcattcccttcaccctcctgttcctg

SEQ ID NO: 321989 - DNA, 120 bp, Artificial Sequence
  ENSG00000135750_28 (sequence is synthesized)
gtcctgagggttttatctcctgatttggttagaagattgttgaatctggctgtgagagcctttcaagtgcctaaaggagagagcttgaacttccctgagagtacaccaggttatggccac

SEQ ID NO: 321990 - DNA, 120 bp, Artificial Sequence
  ENSG00000135763_0 (sequence is synthesized)
gtacagcggcctccgccgcaccgggacagcagccgccgccgctgccgccgtcctcccctgtctacccggagctgtctcgagctgagccccctaccgggccggatcccgagataaagccta

SEQ ID NO: 321991 - DNA, 120 bp, Artificial Sequence
  ENSG00000135763_1 (sequence is synthesized)
gccatggctgctgtttattctggcatttcccttaagcttaaaagcaagacaacttcctgggaagataaactaaaactagctcactttgcttggatttctcaccagtgctttcttccaaat

SEQ ID NO: 321992 - DNA, 120 bp, Artificial Sequence
  ENSG00000135763_2 (sequence is synthesized)
aaagaacaagtgttacttgattgggcaagacaatcattggttgcattttataagaaaaagcttgaactgaaggaagatattgttgaaaggctttggatctatatagataacattttacat

SEQ ID NO: 321993 - DNA, 120 bp, Artificial Sequence
  ENSG00000135763_3 (sequence is synthesized)
agcagaaaattgcagaatctcctcaagaatggaaagaccattaatcttcagatttccctagtcaagatcatcaatgagagagtagctgagttctctctttcgggatcccaaagaaacatc

SEQ ID NO: 321994 - DNA, 120 bp, Artificial Sequence
  ENSG00000135763_4 (sequence is synthesized)
tgtgctgtccttcgatgttgccagggcatcctgtcgacacctgccctggctgtcatctacacggccaaacaggagctgatggtggccttgctgagccagctttgctggtcggcctgcagg

SEQ ID NO: 321995 - DNA, 120 bp, Artificial Sequence
  ENSG00000135763_5 (sequence is synthesized)
cagcccgaaggagctgtggtagcccagttgtttgaggtcattcacctggcccttggccattatctcttgatcctgcagcagcaggtcaacccaagacgtgcctttggggatgtgactgct

SEQ ID NO: 321996 - DNA, 120 bp, Artificial Sequence
  ENSG00000135763_6 (sequence is synthesized)
cacctgctccagccgtgcctggtcctgaggcacttactctctgggggcacatggacgcaggctggccagggccagctgaggcaggtgctgagccgggacatcaggagtcagattgaggcc

SEQ ID NO: 321997 - DNA, 120 bp, Artificial Sequence
  ENSG00000135763_7 (sequence is synthesized)
atgttccgaggagggatttttcagcctgagctactgtcatcctacaaggaggggctcttggaccagcagcaaggggatgtgaagacgggagccatgaagaaccttctggctcccatggac

SEQ ID NO: 321998 - DNA, 120 bp, Artificial Sequence
  ENSG00000135763_8 (sequence is synthesized)
accgtgcttaacaggctggttgatgctggctactgtgcagcatcccttcatacctctgttgtggccaactcagtggccttgctgtataagctctttctagattcttactttaaggaggga

SEQ ID NO: 321999 - DNA, 120 bp, Artificial Sequence
  ENSG00000135763_9 (sequence is synthesized)
aaccagcttctctgcttccaggttctccccaggttgtttggctgcttgaagatttcacacctgcaggaggagcagagcaaagccctgtccacatcagattggaccacagagcttttggtt

SEQ ID NO: 322000 - DNA, 120 bp, Artificial Sequence
  ENSG00000135763_10 (sequence is synthesized)
gtggaacagctactaaactcagtggccaacaacaatatctacaacatcgctgccgacagaattcggcacgaagaggctcagttccgcttttaccgccacgtggctgagctgctgataaac

SEQ ID NO: 322001 - DNA, 120 bp, Artificial Sequence
  ENSG00000135763_11 (sequence is synthesized)
catgcacaagcacccataccggcctggttccgctgtctgaagactttgatatctctgaatcatttgattttggagccagacctggatgacctgctggcttcagcgtggatcgatgccgag

SEQ ID NO: 322002 - DNA, 120 bp, Artificial Sequence
  ENSG00000135763_12 (sequence is synthesized)
gtaacagagtttcgaaccaaaaaagcccaggaggcgcttattcgtactgtcttccagacttatgccaaactccgacaagtgccacggttgtttgaagaggttttgggggtgatctgtcgt

SEQ ID NO: 322003 - DNA, 120 bp, Artificial Sequence
  ENSG00000135763_13 (sequence is synthesized)
ccagctgctgaggcactgaggcagcctgtgctggcctcgggcccctccacggtactctctgcatgcctcctggagctgcctccaagtcagatcctggacacgtggtcccttgtgctggag

SEQ ID NO: 322004 - DNA, 120 bp, Artificial Sequence
  ENSG00000135763_14 (sequence is synthesized)
aagttccagtctttagtcttgccctatttgcagagtgatgccgacatggccctgaaatcactgtcactgagcttgctgctgcactgcatcatgttcaacatgaggagcctggacagcagc

SEQ ID NO: 322005 - DNA, 120 bp, Artificial Sequence
  ENSG00000135763_15 (sequence is synthesized)
acgcctctgcccattgtcagacggacacagtgcatgatggagaggatgatgagggagctcgtgcagcccctgctggcccttctcccggacaccccaggcccagagccagagctgtggctg

SEQ ID NO: 322006 - DNA, 120 bp, Artificial Sequence
  ENSG00000135763_16 (sequence is synthesized)
cagaaggtcagtgactctgtgctcctgctctcttacacttgggcccaggtggacgctatgttcagtttgaactgtagccagtatcactctatgtctgggccccttataggtgttgctctg

SEQ ID NO: 322007 - DNA, 120 bp, Artificial Sequence
  ENSG00000135763_17 (sequence is synthesized)
gagatctcgaacctcccttcgttgctcccaggtgtaaaaacacagcattggaagaagatagagaagtttacagctcagttcagctctcttggtacatattgcttagaacagctgtacctg

SEQ ID NO: 322008 - DNA, 120 bp, Artificial Sequence
  ENSG00000135763_18 (sequence is synthesized)
cagaaaatgaaaaggactttaatgcaaactagtttccggtctgaaggagccatccaaagtttgaggtgcgatgctgcctttattattggttccggcagaaaaagcttgaatcagagaacg

SEQ ID NO: 322009 - DNA, 120 bp, Artificial Sequence
  ENSG00000135763_19 (sequence is synthesized)
acggcttcctgggatggccaagttgggatggtgagtggactcacataccctgtagcacactggcacttgattgtgtcaaatctcacaattttaatatcctatctgtgtccagatgatgtg

SEQ ID NO: 322010 - DNA, 120 bp, Artificial Sequence
  ENSG00000135763_20 (sequence is synthesized)
ggatacctggccagtgtcctgctgagaactttacccatgggcaaagcccaggaagtctcaatagatgaagaggcatacatcacactggaaaaaatatccaaagccttccttcatagccct

SEQ ID NO: 322011 - DNA, 120 bp, Artificial Sequence
  ENSG00000135763_21 (sequence is synthesized)
ctctttccagagatgcagtcccttcattctgctttcttaacgtgcgtaaccacaagttgctccagcattctgtgttctggtgcccagcgtgactcaggtcttgtcagtcagcagcttccc

SEQ ID NO: 322012 - DNA, 120 bp, Artificial Sequence
  ENSG00000135763_22 (sequence is synthesized)
tggctttttgaaaaggaccacatggttgtgggtcattgggaaaacagatttgcaaaagctggacccgaaggtatagaacctagaggagaaattgcccagaacttactgtccctggtcaag

SEQ ID NO: 322013 - DNA, 120 bp, Artificial Sequence
  ENSG00000135763_23 (sequence is synthesized)
gacagcctcttgccaccctatcatgtgcattattttcttgtgttactgtccatggccgtcaccaaactaggatgctcttgctcctcctcactggctctcaagttcttgacgacttgctac

SEQ ID NO: 322014 - DNA, 120 bp, Artificial Sequence
  ENSG00000135763_24 (sequence is synthesized)
caacttcttggttacttgcaaaaggggaaaagtgctcgctctgtgttcaagatcatgtatggtagtgatatttttgaggttgtactgacctcattgttcagagctagtagtaggttcctt

SEQ ID NO: 322015 - DNA, 120 bp, Artificial Sequence
  ENSG00000135763_25 (sequence is synthesized)
attgagatggatgatcccgcttggctggaattcctccaagtgatagggacgttcttagaggagctaatgcagatgctcatccaaatgaagctgagcttggtgctcaattttagaaaaatc

SEQ ID NO: 322016 - DNA, 120 bp, Artificial Sequence
  ENSG00000135763_26 (sequence is synthesized)
accgcattcctctctagttccaaaccatacacggaggcagcttcaagcaaacaattagaaaatcagaacccccagggcaggcagctccttctggtgtctttaaccaggttgtgccatgtc

SEQ ID NO: 322017 - DNA, 120 bp, Artificial Sequence
  ENSG00000135763_27 (sequence is synthesized)
ctgggacctttcctcaaagagcagaagctgggccaagaggccccagcagcactgtctgagctgctgcagcaggttgtgctgcagacaggagctgtgctgcagctctgctcagtgccgggg

SEQ ID NO: 322018 - DNA, 120 bp, Artificial Sequence
  ENSG00000135763_28 (sequence is synthesized)
gcccggggctggcgccttccctcggtcctcatctcatccgtcagcacgctcttggaagccgacctgggtcagcactgcagggatggaggggccgacatttcccaaggaagcgacaggacg

SEQ ID NO: 322019 - DNA, 120 bp, Artificial Sequence
  ENSG00000135763_29 (sequence is synthesized)
ctgctctcccatgttgccctctaccagggtgtttactctcagatactgttggagttgccagctctcgcgggacatgatcagtcttttcaggcagccttgcagtttttgactctgttcttt

SEQ ID NO: 322020 - DNA, 120 bp, Artificial Sequence
  ENSG00000135763_30 (sequence is synthesized)
ttggccccagaactgcatcccaaaaaggactccgtgtttacctccatgtttcattctgtgagaagagttcttgcagatcctgaaattcctgttcaggtcactcaggatattgagcctcat

SEQ ID NO: 322021 - DNA, 120 bp, Artificial Sequence
  ENSG00000135763_31 (sequence is synthesized)
ttgggagccttgttcacccaaatgttagaggttgggacgacagaggacttgaggctggtgatgcagtgtattctccagggactggatgtcagtaacatgtggaaagcagatgtgcaggct

SEQ ID NO: 322022 - DNA, 120 bp, Artificial Sequence
  ENSG00000135763_32 (sequence is synthesized)
gttgtgtcagctgttacactgctgaggctgctactgaactgcccactcagtggagagaaagcaagtctgttgtggcgtgcgtgtccccagatagtcacagctttaacactcttaaaccga

SEQ ID NO: 322023 - DNA, 120 bp, Artificial Sequence
  ENSG00000135763_33 (sequence is synthesized)
gaagcttctcaggagcagcctgtgtccctcacagtggtcgggcctgtcttagatgtcctggctgcactgctgcggcagggggaggaggccatcggcaacccccaccacgtcagcctggcc

SEQ ID NO: 322024 - DNA, 120 bp, Artificial Sequence
  ENSG00000135763_34 (sequence is synthesized)
ttcagcatccttctcactgtccctttggaccatctgaagccgctggagtatggaagcgtcttcccgaggctgcacaacgtgctcttctcaatcctgcagtgtcaccctaaggtaatgctg

SEQ ID NO: 322025 - DNA, 120 bp, Artificial Sequence
  ENSG00000135763_35 (sequence is synthesized)
aaagccatcccttctttcttgaactctttcaatagattggtgttttcagttatgcgggaagggcggcagaaggacaaaggaagcatagatgacctgcctacggtcctaaagtgtgcacgc

SEQ ID NO: 322026 - DNA, 120 bp, Artificial Sequence
  ENSG00000135763_36 (sequence is synthesized)
ctggttgaaagaatgtacagccacatcgccgcacgagctgaggagtttgctgtgttttccccatttatggtggcccagtacgtgttggaggtacagaaggtgaccttatatccagctgtg

SEQ ID NO: 322027 - DNA, 120 bp, Artificial Sequence
  ENSG00000135763_37 (sequence is synthesized)
aaaagtctgctgcaggagggcatttacctcatcctggacctctgcatcgagcctgacgtccagttcctgcgggcctcgctgcagccgggaatgagagacatctttaaggagctctataat

SEQ ID NO: 322028 - DNA, 120 bp, Artificial Sequence
  ENSG00000135763_38 (sequence is synthesized)
gactatctcaagtaccacaaggccaaacatgaaggagagaaaagatatacggcctaaggctatgggacagaagtgccgccagtgacactgtccagaggctttggctgcatggtctgaaag

SEQ ID NO: 322029 - DNA, 120 bp, Artificial Sequence
  ENSG00000135763_39 (sequence is synthesized)
agctggagaatgaaagacttaagatgttctaattcgtagtattggtatacatagaaaatcctttggggtttatgtagtatattttgatgtattttacatcgtgtttttcttactattttt

SEQ ID NO: 322030 - DNA, 120 bp, Artificial Sequence
  ENSG00000135763_40 (sequence is synthesized)
taatacatagttttatgcagtaagtattgcaatagaatcctgaaaattgaccctgggatgagattaattcaatagaaaaattgctgactcttgggacctttctgtgtttggttctcgtct

SEQ ID NO: 322031 - DNA, 120 bp, Artificial Sequence
  ENSG00000135763_41 (sequence is synthesized)
tggctcagtggtttggtgttccctcgtctgcactggaaactacataaaacttggctttttactttgggtacatgggcgtataattcagccctgtttaaatatacttgcctttcaaattct

SEQ ID NO: 322032 - DNA, 120 bp, Artificial Sequence
  ENSG00000135763_42 (sequence is synthesized)
tcaagtaacatgggaagtattcttgaaatgtcacattttctgccttccctctaagtatgctttctgaagaagtcagggaaagttagagtctgtggcctgaggtgtctgctctgggtggcg

SEQ ID NO: 322033 - DNA, 120 bp, Artificial Sequence
  ENSG00000135763_43 (sequence is synthesized)
atagtgggcacctcaggcaggtcggtgacgtttagcacaggtgccagggctcctgcctgctcctcctgtgttagctctgtgaagttcatttaggaatttttttttcctatgcagtttaag

SEQ ID NO: 322034 - DNA, 120 bp, Artificial Sequence
  ENSG00000135763_44 (sequence is synthesized)
aaataatcctaattgttttttcttattacctaagcaatatatttttattatagcaacctcagaaaagaaaaataaaaggataatttaaaaaactcattcatagtctcagttacccagata

SEQ ID NO: 322035 - DNA, 120 bp, Artificial Sequence
  ENSG00000135763_45 (sequence is synthesized)
acctcggttgtcaccttggagtatcttgttgtagtccctttactatgtgtatgtatatagatgtgcatataaatatatatagtagctaaattggatcataaatgcatttttttaaagtta

SEQ ID NO: 322036 - DNA, 120 bp, Artificial Sequence
  ENSG00000135763_46 (sequence is synthesized)
ccaatgatacttgaatatattaattagtactgttcctattattgtttgtttctacccatttccagaatggattagcaccagcttagagtaaaaggtacagactcagcaaattccaaacca

SEQ ID NO: 322037 - DNA, 120 bp, Artificial Sequence
  ENSG00000135763_47 (sequence is synthesized)
ggattgccccatagacctcctgaagttacgcagtgtgggttctctaccctagatagttaaaacaagggtcaaagagtctaatacaagatgggtgagcagtgacagcagcatgtccaggcg

SEQ ID NO: 322038 - DNA, 80 bp, Artificial Sequence
  ENSG00000135766_0 (sequence is synthesized)
gcagagcgagtggcgcccgtatgccctgcgctcctccacagcctgggccgggccgcccgggacgctgaggcggcggcggc

SEQ ID NO: 322039 - DNA, 120 bp, Artificial Sequence
  ENSG00000135766_1 (sequence is synthesized)
ctgagcccaggttgccattcgccgcacaggccctattctctcagccctcggcggcgatgaggcgctgaggcggctgccggcgctgcgccggagcttaggactcggaagcggccgggccga

SEQ ID NO: 322040 - DNA, 120 bp, Artificial Sequence
  ENSG00000135766_2 (sequence is synthesized)
gggcgtggggtgccggcctccctgaggcgagggtagcgggtgcatggcgcagtaacggcccctatctctctccccgctccccagcctcgggcgaggccgtccggccgctacccctcctgc

SEQ ID NO: 322041 - DNA, 120 bp, Artificial Sequence
  ENSG00000135766_3 (sequence is synthesized)
tcggccgccgcagtcgccgtcgccgccgccgccgccgccatggccaatgacagcggcgggcccggcgggccgagcccgagcgagcgagaccggcagtactgcgagctgtgcgggaagatg

SEQ ID NO: 322042 - DNA, 120 bp, Artificial Sequence
  ENSG00000135766_4 (sequence is synthesized)
gagaacctgctgcgctgcagccgctgccgcagctccttctactgctgcaaggagcaccagcgtcaggactggaagaagcacaagctcgtgtgccagggcagcgagggcgccctcggccac

SEQ ID NO: 322043 - DNA, 120 bp, Artificial Sequence
  ENSG00000135766_5 (sequence is synthesized)
ctgcagtgccgccgcccagggccggggcccgggagcccaggaaggcagcggcgcgccgggacaacgcctccggggacgcggccaagggaaaagtaaaggccaagcccccggccgacccag

SEQ ID NO: 322044 - DNA, 120 bp, Artificial Sequence
  ENSG00000135766_6 (sequence is synthesized)
gccaagggaaaagtaaaggccaagcccccggccgacccagcggcggccgcgtcgccgtgtcgtgcggccgccggcggccagggctcggcggtggctgccgaagccgagcccggcaaggag

SEQ ID NO: 322045 - DNA, 120 bp, Artificial Sequence
  ENSG00000135766_7 (sequence is synthesized)
gagccgccggcccgctcatcgctgttccaggagaaggcgaacctgtaccccccaagcaacacgcccggggatgcgctgagccccggcggcggcctgcggcccaacgggcagacgaagccc

SEQ ID NO: 322046 - DNA, 120 bp, Artificial Sequence
  ENSG00000135766_8 (sequence is synthesized)
ctgccggcgctgaagctggcgctcgagtacatcgtgccgtgcatgaacaagcacggcatctgtgtggtggacgacttcctcggcaaggagaccggacagcagatcggcgacgaggtgcgc

SEQ ID NO: 322047 - DNA, 120 bp, Artificial Sequence
  ENSG00000135766_9 (sequence is synthesized)
gccctgcacgacaccgggaagttcacggacgggcagctggtcagccagaagagtgactcgtccaaggacatccgaggcgataagatcacctggatcgagggcaaggagcccggctgcgaa

SEQ ID NO: 322048 - DNA, 120 bp, Artificial Sequence
  ENSG00000135766_10 (sequence is synthesized)
accattgggctgctcatgagcagcatggacgacctgatacgccactgtaacgggaagctgggcagctacaaaatcaatggccggacgaaagccatggttgcttgttatccgggcaatgga

SEQ ID NO: 322049 - DNA, 120 bp, Artificial Sequence
  ENSG00000135766_11 (sequence is synthesized)
acgggttatgtacgtcatgttgataatccaaatggagatggaagatgtgtgacatgtatatattatcttaataaagactgggatgccaaggtaagtggaggtatacttcgaatttttcca

SEQ ID NO: 322050 - DNA, 120 bp, Artificial Sequence
  ENSG00000135766_12 (sequence is synthesized)
gaaggcaaagcccagtttgctgacattgaacccaaatttgatagactgctgtttttctggtctgaccgtcgcaaccctcatgaagtacaaccagcatatgctacaaggtacgcaataact

SEQ ID NO: 322051 - DNA, 120 bp, Artificial Sequence
  ENSG00000135766_13 (sequence is synthesized)
gtttggtattttgatgcagatgagagagcacgagctaaagtaaaatatctaacaggtgaaaaaggtgtgagggttgaactcaataaaccttcagattcggtcggtaaagacgtcttctag

SEQ ID NO: 322052 - DNA, 120 bp, Artificial Sequence
  ENSG00000135766_14 (sequence is synthesized)
agcctttgatccagcaataccccacttcacctacaatattgttaactatttgttaacttgtgaatacgaataaatgggataaagaaaaatagacaaccagttcgcattttaataaggaaa

SEQ ID NO: 322053 - DNA, 120 bp, Artificial Sequence
  ENSG00000135766_15 (sequence is synthesized)
cagaaacaactttttgtgttgcatcaaacagaagattttgactgctgtgactttgtactgcatgatcaacttcaaatctgtgattgcttacaggaggaagataagctactaattgaaaat

SEQ ID NO: 322054 - DNA, 120 bp, Artificial Sequence
  ENSG00000135766_16 (sequence is synthesized)
ggtttttacatctggatatgaaataagtgccctgtgtagaatttttttcattcttatattttgccagatctgttatctagctgagttcatttcatctctcccttttttatatcaagtttg

SEQ ID NO: 322055 - DNA, 120 bp, Artificial Sequence
  ENSG00000135766_17 (sequence is synthesized)
aatttgggataatttttctatattaggtacaatttatctaaactgaattgagaaaaaattacagtattattcctcaaaataacatcaatctatttttgtaaacctgttcatactattaaa

SEQ ID NO: 322056 - DNA, 120 bp, Artificial Sequence
  ENSG00000135766_18 (sequence is synthesized)
cctcttaataatgattgttgccagtgactgatgattaattttattttacttaaaataagaaaaggagcactttaattacaactgaaaaatcagattgttttgtagtccttccttacacta

SEQ ID NO: 322057 - DNA, 120 bp, Artificial Sequence
  ENSG00000135766_19 (sequence is synthesized)
atttgaactgttaaagattgctgctttttttttgacattgtcaataacgaaacctaattgtaaaacagtcaccatttactaccaataacttttagttaatgttttacaaggaaaaagaca

SEQ ID NO: 322058 - DNA, 120 bp, Artificial Sequence
  ENSG00000135766_20 (sequence is synthesized)
aaaagacacaagaagagtttaaatttttttgttttgttttgtttttttgagacagtcttgctctgttacccaggctggaggggagtggtgcattcttggctcactgcaacctccgcctcc

SEQ ID NO: 322059 - DNA, 75 bp, Artificial Sequence
  ENSG00000135766_21 (sequence is synthesized)
agcaatcctcccacctcagcctcccaactagctgggactgcaggcacacaccaccatgcctgataggctggggtt

SEQ ID NO: 322060 - DNA, 120 bp, Artificial Sequence
  ENSG00000135766_22 (sequence is synthesized)
taagttaaattttttaaaaaactaaagtgactggcactaagtgaacttgagattatcctcagcttcaagttcctaagataagggctttcttaagctttcaggtgtatgtatcctctagat

SEQ ID NO: 322061 - DNA, 120 bp, Artificial Sequence
  ENSG00000135766_23 (sequence is synthesized)
gtagacaataatgtcccatttctaagtcttttccttttgcttctccttaaattgattgtacttccaaatttgctgttatgtttttttcctaatactgtgatctatctgatctgcagacaa

SEQ ID NO: 322062 - DNA, 120 bp, Artificial Sequence
  ENSG00000135766_24 (sequence is synthesized)
gaaccttgtctctgttgaagagcatcaaggggagattatgtacacattgaaactgaagtgtggtgttactgacggaatgtgcagtaactcctcagatatctgttaaggcatttcccagat

SEQ ID NO: 322063 - DNA, 120 bp, Artificial Sequence
  ENSG00000135766_25 (sequence is synthesized)
gtgatgccagccttcttacctgtactgaaagatgcttagcttagaaaaaaacaaaacagatgcaaaatcagataattttattttgtttcatgggttttcttatttactttttaaacaagg

SEQ ID NO: 322064 - DNA, 120 bp, Artificial Sequence
  ENSG00000135766_26 (sequence is synthesized)
aaggaatattagaaaatcacacaaggcctcacatacatgttatttaaagaatgaattgggacggatgtcttagacttcactttcctaggctttttagcaaaacctaaagggtggtatcca

SEQ ID NO: 322065 - DNA, 120 bp, Artificial Sequence
  ENSG00000135766_27 (sequence is synthesized)
tattttgcgtgaattatgggtgtaagaccttgcccacttaggttttctatctctgtccttgatcttctttgccaaaatgtgagtatacagaaattttctgtatatttcaacttaagacat

SEQ ID NO: 322066 - DNA, 120 bp, Artificial Sequence
  ENSG00000135766_28 (sequence is synthesized)
ttttagcatctgtatagtttgtattcaatttgagaccttttctatgggaagctcagtaatttttattaaaagattgccattgctattcatgtaaaacatggaaaaaaattgtgtagtgaa

SEQ ID NO: 322067 - DNA, 120 bp, Artificial Sequence
  ENSG00000135766_29 (sequence is synthesized)
gccaacagtggacttaggatgggattgaatgttcagtatagtgatctcacttaggagaatttgcaggagaaagtgatagtttattgttttttcctcgcccatattcagttttgttctact

SEQ ID NO: 322068 - DNA, 120 bp, Artificial Sequence
  ENSG00000135766_30 (sequence is synthesized)
tcctccccttccttccagatgataacatcacatctctacagtaagtgcctctgccagcccaacccaggagcgcaagttgtctttgccatctggtctatagtacagtgcgcggcgttaggc

SEQ ID NO: 322069 - DNA, 120 bp, Artificial Sequence
  ENSG00000135766_31 (sequence is synthesized)
cacaactcaaaagcattatcttttttagggttagtagaaattgttttatgttgatgggaggtttgtttgattgtcaaaatgtacagccacagccttttaatttgggagcccctgttgtca

SEQ ID NO: 322070 - DNA, 120 bp, Artificial Sequence
  ENSG00000135766_32 (sequence is synthesized)
ttcaaatgtgtacctctacagttgtaaaaagtattagattctactatctgtgggttgtgcttgccagacaggtcttaaattgtatattttttggaaaagtttatatactctcttaggaat

SEQ ID NO: 322071 - DNA, 120 bp, Artificial Sequence
  ENSG00000135766_33 (sequence is synthesized)
cattgtgaaaagatcaagaaatcaggatggccatttatttaatatccattcatttcatgttagtgggactattaacttgtcaccaagcaggactctatttcaaacaaaatttaaaactgt

SEQ ID NO: 322072 - DNA, 120 bp, Artificial Sequence
  ENSG00000135766_34 (sequence is synthesized)
ttgtggcctatatgtgtttaatcctggttaaagataaagcttcataatgctgtttttattcaacacattaaccagctgtaaaacacagacctttatcaagagtaggcaaagattttcagg

SEQ ID NO: 322073 - DNA, 120 bp, Artificial Sequence
  ENSG00000135766_35 (sequence is synthesized)
attcatatacagatagactataaagtcatgtaatttgaaaagcagtgtttcattatgaaagagctctcaagttgcttgtaaagctaatctaattaaaaagatgtataaatgttgttgaaa

SEQ ID NO: 322074 - DNA, 120 bp, Artificial Sequence
  ENSG00000135766_36 (sequence is synthesized)
aggcctctcagtgtaggtaggctacatttttagcaccagtttcctttatttgctttgttaatgtaatccttctgttgaaaactgttttgtaacttcctggaaaacaaaacaaaacaaaac

SEQ ID NO: 322075 - DNA, 120 bp, Artificial Sequence
  ENSG00000135766_37 (sequence is synthesized)
atgagtattttcctgccaggtacttttcacagtcattttaatttgaataattgtataagatttatgttgcacagtcatctgaattcaaataattatataagactcattaacagttagtac

SEQ ID NO: 322076 - DNA, 120 bp, Artificial Sequence
  ENSG00000135766_38 (sequence is synthesized)
taaatgtgtctttctttgcacagccactctgaagaaagggaagcacaggccttcccatctttctagcactctctccgtgctttgtgcatctcttaactactatccatgctttgatttttg

SEQ ID NO: 322077 - DNA, 120 bp, Artificial Sequence
  ENSG00000135766_39 (sequence is synthesized)
cccgggttcaagcgattctcctgcctctcagcctcctgagtagctagggctacaggcatgtgccaccatgcacggctaattttttttttcttttttttagtagagatggggtttcaccct

SEQ ID NO: 322078 - DNA, 120 bp, Artificial Sequence
  ENSG00000135766_40 (sequence is synthesized)
aggcgtgagccactgtgcccggcctattgtctctttctgatctgcagttcccttgcaaaaaataagtagttgaaataagtattaagaaagtcacaaaaactcatcaacttcagacatcaa

SEQ ID NO: 322079 - DNA, 120 bp, Artificial Sequence
  ENSG00000135766_41 (sequence is synthesized)
atcattccagtttaggcataattttggcattacaagttttaatataccattgcagcaaaataccactttttccccgcagtgtgatcattcttatcctattctaaattttcttttaggtac

SEQ ID NO: 322080 - DNA, 120 bp, Artificial Sequence
  ENSG00000135773_0 (sequence is synthesized)
agcccagtggccctctgagctgttccttcttgaccggcacacacagctcgcttcttcactttcttttccatccactgccggacccaagccagccttccagggagcagccatgccttacct

SEQ ID NO: 322081 - DNA, 120 bp, Artificial Sequence
  ENSG00000135773_1 (sequence is synthesized)
ctaccgggccccagggcctcaggcacacccggttcccaaggacgcccggatcacccactcctcaggccagagctttgagcaaatgaggcaggagtgcctgcagagaggcaccctgtttga

SEQ ID NO: 322082 - DNA, 120 bp, Artificial Sequence
  ENSG00000135773_2 (sequence is synthesized)
ggatgcagacttcccagccagcaattcctccctgttctacagtgagaggccgcagatcccctttgtgtggaaacgaccaggggaaatcgtgaaaaacccagaattcattcttggaggggc

SEQ ID NO: 322083 - DNA, 120 bp, Artificial Sequence
  ENSG00000135773_3 (sequence is synthesized)
caccaggactgatatctgccagggagagctgggagactgctggctattagccgccatcgcctcccttacgcttaatcaaaaagcactggccagagtcatcccccaggaccaaagctttgg

SEQ ID NO: 322084 - DNA, 120 bp, Artificial Sequence
  ENSG00000135773_4 (sequence is synthesized)
ccctggttatgccgggatattccatttccagttctggcagcacagtgagtggctggacgtggtgatcgatgaccgcctgcccaccttcagggaccgcttggttttcctccactctgccga

SEQ ID NO: 322085 - DNA, 120 bp, Artificial Sequence
  ENSG00000135773_5 (sequence is synthesized)
ccacaacgagttctggagcgccttgctggaaaaagcctacgccaagctaaatgggagctatgaagctctgaagggaggcagcgccatcgaggccatggaagacttcactgggggtgtggc

SEQ ID NO: 322086 - DNA, 120 bp, Artificial Sequence
  ENSG00000135773_6 (sequence is synthesized)
agagaccttccaaactaaagaggcccccgagaacttctatgagattctagagaaggctttgaagagaggctccctgctgggctgcttcattgataccagaagtgctgcagaatctgaggc

SEQ ID NO: 322087 - DNA, 120 bp, Artificial Sequence
  ENSG00000135773_7 (sequence is synthesized)
ccggacgccgtttggtcttattaagggtcatgcctacagtgtaacgggaattgaccaggtaagcttccgaggccagagaatcgagctcatccgaatccggaacccttggggccaggttga

SEQ ID NO: 322088 - DNA, 120 bp, Artificial Sequence
  ENSG00000135773_8 (sequence is synthesized)
gtggaacgggtcgtggagcgacagttctccggagtggcgttctgttggtccagctgagcagaagcgtctgtgtcacactgctctggatgatggggaattctggatggcatttaaggactt

SEQ ID NO: 322089 - DNA, 120 bp, Artificial Sequence
  ENSG00000135773_9 (sequence is synthesized)
caaggcccactttgataaagtggagatctgcaacctcactcccgatgccctggaggaagacgcgatccacaaatgggaggtgacggtccatcagggaagctgggttcgcggctccacggc

SEQ ID NO: 322090 - DNA, 120 bp, Artificial Sequence
  ENSG00000135773_10 (sequence is synthesized)
tctctgactgagaaagatgaggggcaggaggagtgtagtttccttgtagccctgatgcagaaagatagaaggaaactcaagagatttggtgccaatgtgctgacaatcggctatgccatt

SEQ ID NO: 322091 - DNA, 120 bp, Artificial Sequence
  ENSG00000135773_11 (sequence is synthesized)
tatgagtgccctgacaaagacgaacacctgaacaaagacttcttcagataccacgcttctcgggccagaagcaagacgttcatcaacctgagagaagtctccgaccggttcaagctgccc

SEQ ID NO: 322092 - DNA, 120 bp, Artificial Sequence
  ENSG00000135773_12 (sequence is synthesized)
cctggggagtacatcctgattcccagcacttttgagccccaccaggaagctgatttctgtctgagaatcttttcagagaaaaaagccattacccgggatatggatggaaatgtagacatt

SEQ ID NO: 322093 - DNA, 120 bp, Artificial Sequence
  ENSG00000135773_13 (sequence is synthesized)
gaccttcctgagcctccaaagccaactccacctgaccaggagacagaggaggagcagcggtttcgggctctgtttgaacaagtcgctggtgaggacatggaggtgacagcagaggaactt

SEQ ID NO: 322094 - DNA, 120 bp, Artificial Sequence
  ENSG00000135773_14 (sequence is synthesized)
gagtatgttttaaatgctgtgctgcaaaagaaaaaggacatcaaattcaagaagctaagcctgatctcctgtaaaaacatcatttccctgatggacaccagcggcaatgggaagctggag

SEQ ID NO: 322095 - DNA, 120 bp, Artificial Sequence
  ENSG00000135773_15 (sequence is synthesized)
tttgatgaattcaaagtgttctgggacaagctgaagcagtggattaaccttttccttcggtttgatgctgacaagtccggcaccatgtctacctatgaactacggactgcactgaaagct

SEQ ID NO: 322096 - DNA, 120 bp, Artificial Sequence
  ENSG00000135773_16 (sequence is synthesized)
gcaggctttcagctgagcagccacctcctgcagctgattgtgctcaggtatgcggatgaggagctccagctggacttcgatgacttcctcaactgcctggtccggctggagaatgcgagc

SEQ ID NO: 322097 - DNA, 120 bp, Artificial Sequence
  ENSG00000135773_17 (sequence is synthesized)
cgggtgttccaggctctcagtacaaagaacaaggagttcattcatctcaatataaatgagttcatccatttgacaatgaacatctgaggctgccttgtagagatgcagcctgcccagctg

SEQ ID NO: 322098 - DNA, 120 bp, Artificial Sequence
  ENSG00000135773_18 (sequence is synthesized)
aatcttggcttctggaccttgaccttcagaacttctcttggtgtggaaccattacgcccagggttcactcccctctcatcgtccggccttctcccttcatcttgatctgggaagaatgaa

SEQ ID NO: 322099 - DNA, 120 bp, Artificial Sequence
  ENSG00000135773_19 (sequence is synthesized)
atgaactcagctacactctctgattttgtgctactcctttgtaaagtcactgccttaagggggctgatggcgccacctgtgccttacatccaggttcaggcatcactagctttcccacac

SEQ ID NO: 322100 - DNA, 120 bp, Artificial Sequence
  ENSG00000135773_20 (sequence is synthesized)
tctactttccttatttccttccattaagaattactcagagttctaacgcacagaatcctgacttccatgtagctccagtcattgtgatcagacatcctttataaaacatgtttttataaa

SEQ ID NO: 322101 - DNA, 120 bp, Artificial Sequence
  ENSG00000135775_0 (sequence is synthesized)
atgttggcggaagcggacccccctgtgccgtggaaactggcggtggccgcggccgccgagtcggtctgcgcagcctcctgcgttttctcgcttggatcttggcactgagaggcggtggcc

SEQ ID NO: 322102 - DNA, 120 bp, Artificial Sequence
  ENSG00000135775_1 (sequence is synthesized)
ggcgggatggagaaaagtaggatgaacctgcccaaggggccggacacgctctgcttcgacaaggacgagttcatgaaggaagatttcgatgtcgatcattttgtgtctgactgtaggaag

SEQ ID NO: 322103 - DNA, 120 bp, Artificial Sequence
  ENSG00000135775_2 (sequence is synthesized)
cgggtccagctggaagaactgagagatgacctggagctctactataaacttcttaaaacagccatggtcgaactcatcaacaaggattatgcagattttgtcaatctttcaacaaacttg

SEQ ID NO: 322104 - DNA, 120 bp, Artificial Sequence
  ENSG00000135775_3 (sequence is synthesized)
gttggcatggacaaagccctcaaccagctttctgtgcctttgggacaattacgagaagaggttctgagccttagatcgtctgtcagtgaaggaattcgggcagttgatgaacgaatgtct

SEQ ID NO: 322105 - DNA, 120 bp, Artificial Sequence
  ENSG00000135775_4 (sequence is synthesized)
aaacaagaggacattaggaaaaaaaagatgtgtgtattgaggcttatacaagttattcggtcagttgagaaaattgaaaaaatcttaaactctcaaagttctaaagaaacctctgcacta

SEQ ID NO: 322106 - DNA, 120 bp, Artificial Sequence
  ENSG00000135775_5 (sequence is synthesized)
gaagcaagcagcccccttttgactggacaaattttggagagaattgccacagaatttaatcagttacagtttcatgctgttcaaagcaaaggcatgcctcttttggacaaagtaagaccg

SEQ ID NO: 322107 - DNA, 120 bp, Artificial Sequence
  ENSG00000135775_6 (sequence is synthesized)
cgtatagctggcattacagccatgttacagcagtcactggaaggtctcctattagaaggccttcagacgtctgacgtcgatataatacggcactgcttgcggacttacgccacgattgac

SEQ ID NO: 322108 - DNA, 120 bp, Artificial Sequence
  ENSG00000135775_7 (sequence is synthesized)
aagacacgggacgcggaggccttagttggccaagtactagtgaaaccatacatagacgaggtgattatagagcagtttgttgaatctcatcccaatggccttcaggtcatgtataataaa

SEQ ID NO: 322109 - DNA, 120 bp, Artificial Sequence
  ENSG00000135775_8 (sequence is synthesized)
ctcctggagtttgttcctcaccattgccgccttcttcgagaagtcacaggaggtgccatctccagtgaaaaaggcaatactgttcctggatatgactttttggtgaattctgtttggcca

SEQ ID NO: 322110 - DNA, 120 bp, Artificial Sequence
  ENSG00000135775_9 (sequence is synthesized)
caaatagtacaaggattagaagaaaagttaccctcgctttttaatcctgggaatcccgatgcatttcatgagaaatataccataagtatggattttgtcagaagattggaacggcagtgt

SEQ ID NO: 322111 - DNA, 120 bp, Artificial Sequence
  ENSG00000135775_10 (sequence is synthesized)
ggatcacaggctagtgtaaagagattaagagcccatcctgcctatcacagcttcaataagaagtggaacttgcctgtttattttcaaataagatttagagaaatagcgggatccttagaa

SEQ ID NO: 322112 - DNA, 120 bp, Artificial Sequence
  ENSG00000135775_11 (sequence is synthesized)
gcagcacttacagatgtcctggaagatgccccagctgaaagtccgtattgccttttggcttctcatagaacttggagcagccttaggaggtgttggtcagatgagatgttcttgccatta

SEQ ID NO: 322113 - DNA, 120 bp, Artificial Sequence
  ENSG00000135775_12 (sequence is synthesized)
tgtttgtcaatgagctttcactcaggcccatttctaatgaaagtcccaaggagatcaagaaacctttggtaactggtagcaaagaaccttccatcacccaaggaaacactgaagaccaag

SEQ ID NO: 322114 - DNA, 120 bp, Artificial Sequence
  ENSG00000135775_13 (sequence is synthesized)
gaagtggtccttcggaaacaaagcctgtggtttccatttcccgcactcagctcgtgtatgtggttgcagacctggacaagcttcaggagcagcttccagaactcttggaaataatcaagc

SEQ ID NO: 322115 - DNA, 120 bp, Artificial Sequence
  ENSG00000135775_14 (sequence is synthesized)
caaaacttgaaatgattggctttaagaatttttcttctatctcagcagccctggaggactcccagagctctttttcagcctgtgtgccctccttgagtagcaagatcatccaggatttaa

SEQ ID NO: 322116 - DNA, 120 bp, Artificial Sequence
  ENSG00000135775_15 (sequence is synthesized)
gtgactcttgcttcggtttcctaaaaagcgccctggaggttcccaggctttaccgaagaaccaataaggaggtcccaaccacagcttcctcctatgtggacagtgctctgaagcccttat

SEQ ID NO: 322117 - DNA, 120 bp, Artificial Sequence
  ENSG00000135775_16 (sequence is synthesized)
tccagcttcagagcggacacaaggataagctcaaacaagcaataattcagcagtggctagaaggcactctcagtgaaagcactcataagtactatgaaaccgtgtcagatgtattaaact

SEQ ID NO: 322118 - DNA, 120 bp, Artificial Sequence
  ENSG00000135775_17 (sequence is synthesized)
ctgtgaagaagatggaagagagcctgaaaaggctgaaacaagccagaaaaaccactcccgccaaccccgtcggtcccagtggtggcatgagcgacgacgacaaaatcaggctgcagttgg

SEQ ID NO: 322119 - DNA, 120 bp, Artificial Sequence
  ENSG00000135775_18 (sequence is synthesized)
ccctagatgttgagtacttgggagagcagatacaaaagttgggactacaagcaagtgacataaaaagcttctcagctctcgcagagcttgttgctgctgccaaggaccaggcaacagcag

SEQ ID NO: 322120 - DNA, 120 bp, Artificial Sequence
  ENSG00000135775_19 (sequence is synthesized)
agcagccttaagcatcttggaagatcccgaggttagattcttaagcaagagaagagttggacttccaggctgaaggggagaaagtgactctgttctcttagcaaccgtctgtagcaaaga

SEQ ID NO: 322121 - DNA, 120 bp, Artificial Sequence
  ENSG00000135775_20 (sequence is synthesized)
agtgcttccagcatcactccagcaacacgcccatgcgtcttctctcagcgtatttgggtcttctttgcccaaaagaacacaaaagcctttttccattgtatggaagatagtttttaagac

SEQ ID NO: 322122 - DNA, 120 bp, Artificial Sequence
  ENSG00000135775_21 (sequence is synthesized)
ctttctactatagtttacagaacaaattattttatttttattgtaaatcttagtgtggaagagctgatttctaaaatatgattaaagtaaatatatacctatgaatatcaagagtcgtct

SEQ ID NO: 322123 - DNA, 120 bp, Artificial Sequence
  ENSG00000135775_22 (sequence is synthesized)
agtcgtctccctgagcctgtagttggaagtgacgactgtaatggaatgatgtcttgtatagaaatgcccttctctgaaataaagagaactcctgggctttctaaagaggctgcgggaagc

SEQ ID NO: 322124 - DNA, 120 bp, Artificial Sequence
  ENSG00000135775_23 (sequence is synthesized)
catcctccactcccactgtgtgtgagagcagtgcttctgatcctgctgtcaccccgacctctggcaggagccggcgccagtaggaaagacctccttcctaaataaaagaagtgtctccca

SEQ ID NO: 322125 - DNA, 120 bp, Artificial Sequence
  ENSG00000135775_24 (sequence is synthesized)
gcacttcgcaatgagtcttttggcgtcaggtttggcgggtgcagcctggagaaagcacttctgtaaaatcgtgcgtgttacatggaaaggcctgaaagttctgggcaagtggttttgagc

SEQ ID NO: 322126 - DNA, 120 bp, Artificial Sequence
  ENSG00000135775_25 (sequence is synthesized)
tgcatgtcaaagccactgttacccgttcctgttaccatgcagtgcagtcagattgccagtccccttgtcggaaagaagcttgtggaccggggccttggagctcattaagtgaagatttcg

SEQ ID NO: 322127 - DNA, 120 bp, Artificial Sequence
  ENSG00000135775_26 (sequence is synthesized)
agtttgtagatgcaaatagaattgcctcttcctttgatttataaaaagtaactgaatatataaagtgcatatttatttcagcttccagaactcttggaaataatcaagccaaaacttgaa

SEQ ID NO: 322128 - DNA, 120 bp, Artificial Sequence
  ENSG00000135775_27 (sequence is synthesized)
atgattggctttaagaatttttcttctatctcaggtaaaaatgaatcttgactaagcaaatctttgaataagaaatgatttaaaataaaatctcagagactgtagggtatatttaacatt

SEQ ID NO: 322129 - DNA, 120 bp, Artificial Sequence
  ENSG00000135775_28 (sequence is synthesized)
ttcttctgtagttgtaaatccttggttgtttctctattctgtattataacttacctaaataagatgttttatttaattcatttgatctgatttattatagtacacaatgtaaatgctgtg

SEQ ID NO: 322130 - DNA, 120 bp, Artificial Sequence
  ENSG00000135775_29 (sequence is synthesized)
tgcggcagaaacccccaaggcaatcaagcactgcgtatggataaggcagtgagactgcctagcacttcttcactggattagtcagagtgtgtgtcccactgtttgcttcctccctcccca

SEQ ID NO: 322131 - DNA, 120 bp, Artificial Sequence
  ENSG00000135775_30 (sequence is synthesized)
gtgtcacacattatagattttgtgtaaagactcagtcacattctccagatgataagagtaaaattaattctgaatttcatggaattggacatcttatatgatgtagacaattaatttatc

SEQ ID NO: 322132 - DNA, 120 bp, Artificial Sequence
  ENSG00000135775_31 (sequence is synthesized)
tagacgaggtctgtgtacctccttcaacaaacattcatgagcttctgttctgtctttgactctttactgggtgtgaggaagataagaagagagaacagagatctttctggaaagattctc

SEQ ID NO: 322133 - DNA, 120 bp, Artificial Sequence
  ENSG00000135775_32 (sequence is synthesized)
agttcctacagtaccagctataaggaaggattggtctccatgggttatagttgggaagtaatgttacgatgccaggaattgggcgtgccgtctcaggtgtcctaggaatgctgcggctca

SEQ ID NO: 322134 - DNA, 120 bp, Artificial Sequence
  ENSG00000135775_33 (sequence is synthesized)
ggcttcaagggcgagattcaagggcatccacgtgcttttaggtcaattttatgggaggcgatggttcctcagtaattgttaaaagaatgttttcaaatcactggtcttgtgggtggacta

SEQ ID NO: 322135 - DNA, 120 bp, Artificial Sequence
  ENSG00000135775_34 (sequence is synthesized)
aggcaattaagcagtgacaacactgcagtgtacgaggaaggtgcagggagtgctgtgagtgtggaaaggtgtgtgagtggggtagacagtggtaccctcaagtcttcagggaataaatga

SEQ ID NO: 322136 - DNA, 120 bp, Artificial Sequence
  ENSG00000135775_35 (sequence is synthesized)
catttggcccaagtcttgaaaaatacagaggagtttgctggacgaggaaggtgagaggaggaatattcaaagatcaagggcttttatagcaaattagccaagtaataccttaaatctaga

SEQ ID NO: 322137 - DNA, 120 bp, Artificial Sequence
  ENSG00000135775_36 (sequence is synthesized)
acttggctatgcagtatccttcacctagtaggatatagttaaaatgtaggaaacaagtatatcccacttctgagcagccagagtatagattgtgccatataaagttgctgatattcaaca

SEQ ID NO: 322138 - DNA, 120 bp, Artificial Sequence
  ENSG00000135775_37 (sequence is synthesized)
gtttctgacatacaaaaacagcagctttgtctgcttcaaactgagagaagtcactgagcccgtcctcggtgtttggggactttcctccagtgtcctgtcagtatgaatgttctgactgtt

SEQ ID NO: 322139 - DNA, 120 bp, Artificial Sequence
  ENSG00000135775_38 (sequence is synthesized)
agtaaatacaaagattatactcacatgatttcagggtgaaagtcttttattttttaaagtggaaagttgagactcccaatgataaaaatgaaatgtagggactcattttaataattattt

SEQ ID NO: 322140 - DNA, 120 bp, Artificial Sequence
  ENSG00000135775_39 (sequence is synthesized)
tggccttgttaagattactaaaaataaatgatatttcagttctctctgtttatatcatgttatattccatagctgtctctatgggggtgaaaaaattacatacattatttctttgtcaat

SEQ ID NO: 322141 - DNA, 120 bp, Artificial Sequence
  ENSG00000135775_40 (sequence is synthesized)
tacatacattatttctttgtcaataagtgaaaaaatttttttgtgctttgggggacagggtctcactctgtcacgcaggctggggtgcagaggcatgatcatggctcactgtagcctcaa

SEQ ID NO: 322142 - DNA, 89 bp, Artificial Sequence
  ENSG00000135775_41 (sequence is synthesized)
aagcagtcctcctacctcagcctcccaattagctggaactacaggtacacaccaccatgcctggctaatgtttccaaactaatcttgaa

SEQ ID NO: 322143 - DNA, 120 bp, Artificial Sequence
  ENSG00000135775_42 (sequence is synthesized)
tgggattacaggcgtgatccactgcgcccaaccgatgaaaatattttagtcactaatctattcctttttcacggaactgaatctagtgtgctaaattaaagaactatttgaactttcagt

SEQ ID NO: 322144 - DNA, 120 bp, Artificial Sequence
  ENSG00000135775_43 (sequence is synthesized)
tgctaaattaaagaactatttgaactttcagtggcatattaaattcagtagccacattgtgttttatttaaactcagcttatcttgtcatatcattcttgtctcccaattttatcacaaa

SEQ ID NO: 322145 - DNA, 120 bp, Artificial Sequence
  ENSG00000135775_44 (sequence is synthesized)
aaataaaataatgaactaatatattttcttctgtctttctctgcctcaaacccttccctaatctgaatgatggtagaaaaaaaggccaggatgaagacagtgaggagttgtggtggcgaa

SEQ ID NO: 322146 - DNA, 120 bp, Artificial Sequence
  ENSG00000135775_45 (sequence is synthesized)
tcatgtgctctgctttaaatctttttttaaaagttgttattttattttcagactcccagggaagcagatgagagtgcatggtttgtcagcccatgtctcccccacagttgtatctgtaca

SEQ ID NO: 322147 - DNA, 120 bp, Artificial Sequence
  ENSG00000135775_46 (sequence is synthesized)
gcctaatccaaggaagtagttttgaatgtgacctgttatttacttcactgtttagaaaatgtgtcacagggaggagggtgagtgtgaggaagcagatttgtaaagttttctttattgttt

SEQ ID NO: 322148 - DNA, 120 bp, Artificial Sequence
  ENSG00000135775_47 (sequence is synthesized)
tctctgaaatagatcgtttgtacttcccttttaaatgcttttttaaaaaatgatttttcttttaataggtgattatagagcagtttgttgaatctcatcccaatggccttcaggtcatgt

SEQ ID NO: 322149 - DNA, 120 bp, Artificial Sequence
  ENSG00000135775_48 (sequence is synthesized)
ccccgccccgcacccttctaaaacagaattggaatgccagttaaggatgttgcctcagttagcggctccttttctctgatcatcataataagctttgggagacaaaattgaaagtggaga

SEQ ID NO: 322150 - DNA, 120 bp, Artificial Sequence
  ENSG00000135775_49 (sequence is synthesized)
aagagatataagaagtattatggttgccaaagtctggcttgcatgacaaaaagataagttttcttttttggtaattggagagctcagaacacaagagttggaaggagctgactccaagcc

SEQ ID NO: 322151 - DNA, 120 bp, Artificial Sequence
  ENSG00000135775_50 (sequence is synthesized)
cagcctcattcccacccaccatgtcctcattcattgtgaaaagagaaagtaggagttatacagcagctctttttttccattttccctatttcatcgtctgcctcaaataatgaacctgtc

SEQ ID NO: 322152 - DNA, 120 bp, Artificial Sequence
  ENSG00000135775_51 (sequence is synthesized)
ctagagggaatggggagaagcagagctttaagtgttctttgcagctggttccatctattagtttatgagaagcctggtcattatttcagcctccctgatcgtctttgtgacatttgtacc

SEQ ID NO: 322153 - DNA, 120 bp, Artificial Sequence
  ENSG00000135775_52 (sequence is synthesized)
ctctattcaggaaaatggtgacatttttcttccaggtttcatgatgatatcacctttgtcaataagccattctataaaatacttgggggaaatttaggatgaacccttatcatacactgc

SEQ ID NO: 322154 - DNA, 120 bp, Artificial Sequence
  ENSG00000135775_53 (sequence is synthesized)
attggaaaaacatgataagagtcatttttgcagattctcttgaatgaggtcatggtatgttcttccgtagaatggattttacttgaaatgctctttgaagaatcataggcttttttattt

SEQ ID NO: 322155 - DNA, 120 bp, Artificial Sequence
  ENSG00000135775_54 (sequence is synthesized)
aaattgctggatgctttcattaattatgatgcagtcctttcccctagcgttctgaggaataattacagagagggaaatcaagaattaggtaccctgatgataattgcttgagatgattga

SEQ ID NO: 322156 - DNA, 120 bp, Artificial Sequence
  ENSG00000135775_55 (sequence is synthesized)
gaatgtatgtaatgatctttttataatgaaatcacagttctcagaatgaagtagtaaggtgccctttcacttacaatactgtgttttatgctaaattttccaaggttgcatcatcatgta

SEQ ID NO: 322157 - DNA, 120 bp, Artificial Sequence
  ENSG00000135775_56 (sequence is synthesized)
gttggtctctcagcaggaaattacggatttgttcatctaagatattaatgggatgcactggaaatagttggtatatgataatcaacatcaagccagggcaagaaacctttttgatttgtg

SEQ ID NO: 322158 - DNA, 120 bp, Artificial Sequence
  ENSG00000135775_57 (sequence is synthesized)
agcaggatttaaaatagcaaagcatcattttataaaatgatactgctatgtagaaataatgtttacatttccccatctctttttgtcgtccaggtttggagttagattgctttagttatc

SEQ ID NO: 322159 - DNA, 120 bp, Artificial Sequence
  ENSG00000135775_58 (sequence is synthesized)
taatgctgtcacctcacaaacatactcctctgcttcctgcctccaaactttcctggtccttttcctcagaccctgggacccatgcagcatcacctcactcttccatcccacccctgcacc

SEQ ID NO: 322160 - DNA, 120 bp, Artificial Sequence
  ENSG00000135775_59 (sequence is synthesized)
tcctggagctcccatgggctatttcagcccatgctcttggctctgccaggctgggccccttggtgacggcccagcttggcttcagctgcatctcccttccatttcagtttctctcaaagc

SEQ ID NO: 322161 - DNA, 120 bp, Artificial Sequence
  ENSG00000135775_60 (sequence is synthesized)
tggtaattggaccttaaactacattgaaactcagccagttccctgaaagtcttttttaccttcaccagatttcagccttaagccttcaaaggagctgattagccttttttaaaaaacctc

SEQ ID NO: 322162 - DNA, 120 bp, Artificial Sequence
  ENSG00000135775_61 (sequence is synthesized)
ttttatttaaaattcatgaaattttaaaaaaacacgtttgagttacggaagtgtagaacttgtctttagtacatttgtttttccatctaaaaagtaaattccattaagactttgtagaac

SEQ ID NO: 322163 - DNA, 120 bp, Artificial Sequence
  ENSG00000135775_62 (sequence is synthesized)
ttttctattgatttttatcaggtgttgagttgtttgctctgaaggatgacaaaaagttccgcaaacatgattagggtcagagttgcattgtcatcagattcatttcaaggtcatttgaag

SEQ ID NO: 322164 - DNA, 120 bp, Artificial Sequence
  ENSG00000135775_63 (sequence is synthesized)
taaacctaaagacagtggggtgtgatggttggacatttcctaagaagaaatattactctcagtaatagttttctgctcctggatctgactatatacccacatcccaatcaccttcaggaa

SEQ ID NO: 322165 - DNA, 120 bp, Artificial Sequence
  ENSG00000135775_64 (sequence is synthesized)
aaaggccacctccccaccccagccaccaccacaattcttgtgaacacattttgtatcctctcactcttcctgagaccccactgtgtctacatttcatttgcacctacaggcatattggaa

SEQ ID NO: 322166 - DNA, 120 bp, Artificial Sequence
  ENSG00000135775_65 (sequence is synthesized)
agtagatgaggacttagtatctcataggaagaaattaaatgcagatgtgatcaaaacagccccaaattataatgagtcagtggctgcctggaaactgcaggtgttagctctttaaatgct

SEQ ID NO: 322167 - DNA, 120 bp, Artificial Sequence
  ENSG00000135775_66 (sequence is synthesized)
aaagcctaaatttcagtttgctgttctttttaaaattgaaatctttatagtacattcacatgtatatactgtattacatagtatatgctgaacacagtcttatgatgtggaatctacata

SEQ ID NO: 322168 - DNA, 120 bp, Artificial Sequence
  ENSG00000135775_67 (sequence is synthesized)
gtagtattaaggtgcaagtagccctttcctgttcctgcactcctctcagacatgtgtatccacaagagacgggtgcacttaatgatgtttccaatacttcagagaaaaaaaacaataggc

SEQ ID NO: 322169 - DNA, 120 bp, Artificial Sequence
  ENSG00000135775_68 (sequence is synthesized)
atcactattattatcgccattgttatttttatttaagtattattgtagacctgtgatgttcgtggaggaatatgtctagagaccttccccaggcctatatttaagaatttagaaatgttt

SEQ ID NO: 322170 - DNA, 120 bp, Artificial Sequence
  ENSG00000135775_69 (sequence is synthesized)
gtatttggggttgcccttcttacatggatcctgttgagagtagaatgacattcgatgtgcacatgaaaaccacagcatggcttttcagatttcagcagaggttccctctcacttttggcc

SEQ ID NO: 322171 - DNA, 120 bp, Artificial Sequence
  ENSG00000135775_70 (sequence is synthesized)
attttccaagaagaaatatgatctgttgcttcattcctggaagtgactgcacagcagagctgtgtgaggggctggtcccctggctggggagcacacctaggccaagtgactcaggcagtt

SEQ ID NO: 322172 - DNA, 120 bp, Artificial Sequence
  ENSG00000135775_71 (sequence is synthesized)
gtaatcatgtatcactgtccctgctcacagacaggcagaacgtctctgtgaagtgcagggatcaaggctctgctgcatttctttggtcctttttcatttctatgcttttcagaattatca

SEQ ID NO: 322173 - DNA, 120 bp, Artificial Sequence
  ENSG00000135775_72 (sequence is synthesized)
taaatatacataaaactttgtgtcccatgtctttggatagtactaaattatacctatttttccttattggaaaatagcatcaagcttccacattaatactgcatactagtccattgaata

SEQ ID NO: 322174 - DNA, 120 bp, Artificial Sequence
  ENSG00000135775_73 (sequence is synthesized)
tatctcaggttccataagcatattccttcttttggccatttaggttgcttccagtttttccctgatataaacagtgctgtgccagctatcaggccttttctgtatcagggctaacttcct

SEQ ID NO: 322175 - DNA, 120 bp, Artificial Sequence
  ENSG00000135775_74 (sequence is synthesized)
atattttgtttagattttgaaaaaaggcaggacttgggggtctgagattgagctctaggtgctggtttgctctcccaggtgcagagcaatcccatctcccttgttcccgtgctcagtgtc

SEQ ID NO: 322176 - DNA, 120 bp, Artificial Sequence
  ENSG00000135775_75 (sequence is synthesized)
actgcctcctcttactgctgttcctgggctagtttccagtgctctcttatcccacttttccatctgtcacttgttccttctgtacctctcaactgcagcttgaaaagactagccttttgt

SEQ ID NO: 322177 - DNA, 120 bp, Artificial Sequence
  ENSG00000135775_76 (sequence is synthesized)
aagcttcactgggcaattagagttcctttccttccatggggcagacgggacagctactggaaaccagccagctacaatggtacaggatagccttagtgtcttcagtgctcagctgtgttg

SEQ ID NO: 322178 - DNA, 120 bp, Artificial Sequence
  ENSG00000135775_77 (sequence is synthesized)
ggtagggctgctgctttttgtctcaagctgttctttttactcttcagacagttgcctttagctcagtctgtgaaccgctttgtaaaagcacattatgtactataaaaaataatttaatat

SEQ ID NO: 322179 - DNA, 120 bp, Artificial Sequence
  ENSG00000135775_78 (sequence is synthesized)
cagttggataaattgatattgagcatgcatcagaattcattactagtaaggcaattagcaggtgacaaaagagcatgctagtaaagagatatatgaaattgcaagagttatatagttaga

SEQ ID NO: 322180 - DNA, 120 bp, Artificial Sequence
  ENSG00000135775_79 (sequence is synthesized)
aaacaatgcctgcaaaagcagctagcttaaaaaaactatataacacatttgcctttcacaaagtcataaaaacatgtccatatccattattagaacagaagtctgtgacaggatgagctg

SEQ ID NO: 322181 - DNA, 120 bp, Artificial Sequence
  ENSG00000135775_80 (sequence is synthesized)
aggtgccaggtgagccagctgtcatcagggaaaaaagaacgcacatctaggaagcgctggtacagacagccgtagaacccgaagggcaagtaccatggacgtgggagagggtcacagatt

SEQ ID NO: 322182 - DNA, 120 bp, Artificial Sequence
  ENSG00000135775_81 (sequence is synthesized)
agaagagcaccaagcagtgagttctagttttaactggccacttcctgtgatttttctcaagctgccaacacaggtacagaatgcagctttcttagcttggggacgtttaccttcctgtga

SEQ ID NO: 322183 - DNA, 120 bp, Artificial Sequence
  ENSG00000135775_82 (sequence is synthesized)
tggtgttaagatagatgggttggaggaaccaaagttttatggccttgaagtgaatagaggatcataatcaggtgctgctcaccagcaacaacttcttgatggagacttaactggcagttt

SEQ ID NO: 322184 - DNA, 120 bp, Artificial Sequence
  ENSG00000135775_83 (sequence is synthesized)
gtttaatttgagaaacatggggtaagttatgattcagaccagctgcaaataacagagaacccttatataacagtggcttagtcacgatttcttgttcagttaaaaaaaaaaaaaaaaaaa

SEQ ID NO: 322185 - DNA, 120 bp, Artificial Sequence
  ENSG00000135775_84 (sequence is synthesized)
ccggcagctccagcgagcctgaaaccaaattctgagagccgggcagttacttggtggctcgcgtgatcccagagatgctgtcgcagtggctagggaattgcttcctgtgttaagactagg

SEQ ID NO: 322186 - DNA, 120 bp, Artificial Sequence
  ENSG00000135775_85 (sequence is synthesized)
agtcggggctcccaaattactttgcccctaggcagtatgagacggcaatatgagaattcccgttttgaagtctggtggcgtgctctctggtgctgttgccatctgcttgtttccccagtg

SEQ ID NO: 322187 - DNA, 120 bp, Artificial Sequence
  ENSG00000135775_86 (sequence is synthesized)
cagctttctgtgcctttgggacaattacgagaagaggttctgataatgtctgctgtgagttgggactccccatgtctaagccattggagacagggactccatccggatgaacagtagaga

SEQ ID NO: 322188 - DNA, 120 bp, Artificial Sequence
  ENSG00000135775_87 (sequence is synthesized)
agggagttttggcatcattttcaacagaaaagtgtgctaccctgtcctgtccctgctggtccaccccacagtctgtgtcaggcaccccgacttccatgctgtcttaggattgatgaactg

SEQ ID NO: 322189 - DNA, 120 bp, Artificial Sequence
  ENSG00000135775_88 (sequence is synthesized)
ggtagagggtcaggtgctcctgcgtctcactgagaatgactcacagctggagcatgcatcctgggcctcctgtgccctggccgcccatcctaggatgttgggcaggtaacagttgtagct

SEQ ID NO: 322190 - DNA, 120 bp, Artificial Sequence
  ENSG00000135776_0 (sequence is synthesized)
cggcgggctgaggcgtacgggtcgcacgcagcgccatgcgaggcccccctgcctggccgctgcggctgctcgagccaccgagccctgccgagccaggtcggctcctgccggtagcctgcg

SEQ ID NO: 322191 - DNA, 120 bp, Artificial Sequence
  ENSG00000135776_1 (sequence is synthesized)
gtcggctcctgccggtagcctgcgtgtgggccgcggccagccgcgttcccgggtccctatcgccgttcactggcctgaggccggcgcggctatggggcgcggggcccgcgctgctctggg

SEQ ID NO: 322192 - DNA, 80 bp, Artificial Sequence
  ENSG00000135776_2 (sequence is synthesized)
tcgcggggcgtcctgggcctcgcgcggctcctggggctgtgggctcgcggccccggcagctgcaggtgcggggcttttgc

SEQ ID NO: 322193 - DNA, 80 bp, Artificial Sequence
  ENSG00000135776_3 (sequence is synthesized)
cagctgcaggtgcggggcttttgccgggccaggcgctcctcggctcccgcgcgcccggttcccgggcggtcccgcagccg

SEQ ID NO: 322194 - DNA, 120 bp, Artificial Sequence
  ENSG00000135776_4 (sequence is synthesized)
ggacaaggggcggctgcgccccgcagcggccggactcccggaggcccggaagctcctggggctggcgtaccctgagcgccggaggctggcagctgcggttggatttctcacgatgtccag

SEQ ID NO: 322195 - DNA, 120 bp, Artificial Sequence
  ENSG00000135776_5 (sequence is synthesized)
tgttatctccatgtctgcccctttcttcctggggaagatcattgatgtcatctataccaaccccactgtggactacagcgacaacctgacccgcctctgcctagggctcagtgccgtgtt

SEQ ID NO: 322196 - DNA, 120 bp, Artificial Sequence
  ENSG00000135776_6 (sequence is synthesized)
tctgtgtggtgctgccgccaatgccattcgtgtctacctcatgcaaacttcaggtcagcgcattgtgaataggctgagaacttcattattctcctccattctgaggcaggaggttgcttt

SEQ ID NO: 322197 - DNA, 120 bp, Artificial Sequence
  ENSG00000135776_7 (sequence is synthesized)
ctttgacaagactcgcacaggagaattgattaaccgcctctcatcagacactgcactcctggggcgctcagtgactgaaaacctctcagatgggctcagggccggggcccaggcttccgt

SEQ ID NO: 322198 - DNA, 120 bp, Artificial Sequence
  ENSG00000135776_8 (sequence is synthesized)
aggcatcagtatgatgttttttgtctcacctaatctggccacctttgttttgagcgtggtgcctccagtgtcaatcattgctgtaatttatgggcgatatctacggaaactgaccaaagt

SEQ ID NO: 322199 - DNA, 120 bp, Artificial Sequence
  ENSG00000135776_9 (sequence is synthesized)
cactcaggattccctggcacaagccactcagctagctgaggaacgtattggaaatgtaagaactgttcgagcttttgggaaagaaatgactgaaatcgagaaatatgccagcaaagtgga

SEQ ID NO: 322200 - DNA, 120 bp, Artificial Sequence
  ENSG00000135776_10 (sequence is synthesized)
ccatgtaatgcagttagcaaggaaagaggcattcgcccgggctggtttctttggagcaactgggctctccggaaacctgatcgtgctttctgtcctgtacaaaggagggctgctgatggg

SEQ ID NO: 322201 - DNA, 120 bp, Artificial Sequence
  ENSG00000135776_11 (sequence is synthesized)
cagtgcccacatgaccgtgggtgaactctcttccttcctaatgtatgctttctgggttggaataagcattggaggtctgagctctttctactcggagctgatgaaaggactgggtgcagg

SEQ ID NO: 322202 - DNA, 120 bp, Artificial Sequence
  ENSG00000135776_12 (sequence is synthesized)
ggggcgcctctgggagctcctggagagagagcccaagctgccttttaacgagggggtcatcttaaatgagaaaagcttccagggtgctttggagtttaagaacgtgcattttgcctatcc

SEQ ID NO: 322203 - DNA, 120 bp, Artificial Sequence
  ENSG00000135776_13 (sequence is synthesized)
agctcgcccagaggtgcccatatttcaggatttcagcctttccattccgtcaggatctgtcacggcactggttggcccaagtggttctggcaaatcaacagtgctttcactcctgctgag

SEQ ID NO: 322204 - DNA, 120 bp, Artificial Sequence
  ENSG00000135776_14 (sequence is synthesized)
gttgtacgaccctgcttctggaactattagtcttgatggccatgacatccgtcagctaaacccagtgtggctgagatccaaaattgggacagtgagtcaggaacccattttgttttcttg

SEQ ID NO: 322205 - DNA, 120 bp, Artificial Sequence
  ENSG00000135776_15 (sequence is synthesized)
ctctattgctgagaacattgcttatggtgctgatgacccttcctctgtgaccgctgaggaaatccagagagtggctgaagtggccaatgcagtggccttcatccggaatttcccccaagg

SEQ ID NO: 322206 - DNA, 120 bp, Artificial Sequence
  ENSG00000135776_16 (sequence is synthesized)
ttctcctctcaggtgggcagaaacagcggattgcgattgcccgtgctctgctaaagaatcccaaaattcttctcctagatgaagcaaccagtgcgctggatgccgaaaatgagtaccttg

SEQ ID NO: 322207 - DNA, 120 bp, Artificial Sequence
  ENSG00000135776_17 (sequence is synthesized)
ttcaagaagctctagatcgactgatggatggaagaacggtgttagttattgcccatcgtctgtccaccattaagaatgctaatatggttgctgttcttgaccaaggaaaaattactgaat

SEQ ID NO: 322208 - DNA, 120 bp, Artificial Sequence
  ENSG00000135776_18 (sequence is synthesized)
atggaaaacatgaagagctgctttcaaaaccaaatgggatatacagaaaactaatgaacaaacaaagttttatttcagcataaggaagcaattactggtaaacaatatgagactttaatg

SEQ ID NO: 322209 - DNA, 120 bp, Artificial Sequence
  ENSG00000135776_19 (sequence is synthesized)
caaaacagtgttgcagaaaaaaaactcagagactatgaaatacataaaccatatatcaagttatttgaaaaatacctatttttttccaaagtgtgtaaaagattgttttgaaacgtacct

SEQ ID NO: 322210 - DNA, 120 bp, Artificial Sequence
  ENSG00000135776_20 (sequence is synthesized)
gttctcaagatctttttattcagagttttaataattgtaactttttaaatgtctatagcactgaagttattttcaggttttgtattttcttttcttgtggaatattttaattaatatagc

SEQ ID NO: 322211 - DNA, 120 bp, Artificial Sequence
  ENSG00000135776_21 (sequence is synthesized)
atggcacctcattttcttttgcctgctgttaaagattgaagctattgtcaaatgacaactttaaaaaggcaattataaataaaaagcctgattattttaggccagtttaccaatcactgt

SEQ ID NO: 322212 - DNA, 120 bp, Artificial Sequence
  ENSG00000135776_22 (sequence is synthesized)
gtaattcttctggtagtattctacctacttttaagtctaattttacagatagaataatggaaattgaaaatttaaccctttattccgataatctcatgaagcaaacctaactatttaaca

SEQ ID NO: 322213 - DNA, 120 bp, Artificial Sequence
  ENSG00000135776_23 (sequence is synthesized)
tcagctggaaagaagggaacatttatattgcccatctcctgtgtcttcaaaggtgtgagagctgaggaatatgtgttcctatgggaactatgtttgaatatgtgcagttttcaacatttt

SEQ ID NO: 322214 - DNA, 120 bp, Artificial Sequence
  ENSG00000135776_24 (sequence is synthesized)
ggcacatgaaagcctgacaagtttttaaaagggcagaagctttattttttgaacaggaaaacatgttttttaaattcacatgtttgtatgagtacttttgcgaagcaaggcatgaactgc

SEQ ID NO: 322215 - DNA, 120 bp, Artificial Sequence
  ENSG00000135776_25 (sequence is synthesized)
ctgctaggtattattaagaatgaatgatttttgcatttaagttgtttgaaggcatgtattttgaaaaatatctgttacaaatttataatttcaagacaaattgaatcttattttataata

SEQ ID NO: 322216 - DNA, 120 bp, Artificial Sequence
  ENSG00000135776_26 (sequence is synthesized)
tggaatttcattaataaggctaaaatttgaggaatataactaattttcagccttaagacatttaagtttggaagtccttgctattcaacagaataacaagaaaacttcagaatgtatcac

SEQ ID NO: 322217 - DNA, 120 bp, Artificial Sequence
  ENSG00000135776_27 (sequence is synthesized)
tctcctgaaaagaagatattaataagcccttttatttatggttatagttttatttatagtctcaaaattcctaaagcaatgctacaaccattgaatttgccatattttgtatcagtgctg

SEQ ID NO: 322218 - DNA, 120 bp, Artificial Sequence
  ENSG00000135776_28 (sequence is synthesized)
ttaatttgctgttgcctcaagaaaaagtgctttttctccatggatgaggctagaccctaagaagtaattaagtcaatgtaaatcaaatggaagttttcccatgaactaagcatttattag

SEQ ID NO: 322219 - DNA, 120 bp, Artificial Sequence
  ENSG00000135776_29 (sequence is synthesized)
ttccctgattagactggaagaagaaaccactatttcatgaaaagcatggaatattatattttattgttcataattaatgaataaaattgatatgaatgaatatagtgttctttgaattag

SEQ ID NO: 322220 - DNA, 120 bp, Artificial Sequence
  ENSG00000135776_30 (sequence is synthesized)
taaacagtacatctgtgacaatcatttttaacaagctctacttgtgttctttataaagtgtgattttcagaaagcaaacaacacaattacaaggttgaatctgaggaaaataatccttgt

SEQ ID NO: 322221 - DNA, 120 bp, Artificial Sequence
  ENSG00000135776_31 (sequence is synthesized)
ttgtgccatagaagtatttacgaaattgcatttcattgttatgttttattttctgatacatgatgttcaattttatctttaggtaatattttatatcatagattaaaatttatagtgaac

SEQ ID NO: 322222 - DNA, 120 bp, Artificial Sequence
  ENSG00000135776_32 (sequence is synthesized)
cccagccccagatatccaccatctgtagaagtgcctgttgtggacatttcatataagtgaactcatacagtatgtgattctttgtgtctggcttctttcacttagcataagtttccaagg

SEQ ID NO: 322223 - DNA, 120 bp, Artificial Sequence
  ENSG00000135776_33 (sequence is synthesized)
ctcatccacattgtagcatgtgtcagaattttattccttttttattgctgagagtttgtatttttccaataaaattattttatcttttccttttttttccttcttcagaatcccaaaatt

SEQ ID NO: 322224 - DNA, 120 bp, Artificial Sequence
  ENSG00000135776_34 (sequence is synthesized)
gacaagcaattctgagtatcagttcccaggaagctgcctcaagttgttttttgaaaatattaataacagattttatattaaaagcaatcattgtcactcctctcagaggagtggtggcca

SEQ ID NO: 322225 - DNA, 120 bp, Artificial Sequence
  ENSG00000135778_0 (sequence is synthesized)
gggcgggtcctgagtcgcgaccctggtccggacctgacctgaattgcgaccccaacctggactgctcccctgaccgcaacccctacccccgcccaccagtatggcccggcacgtgttcct

SEQ ID NO: 322226 - DNA, 120 bp, Artificial Sequence
  ENSG00000135778_1 (sequence is synthesized)
aacggggcccccaggagttggaaaaacaacattgatccataaagccagtgaggttttaaaatcctctggtgtgcctgttgatggattttataccgaagaagtcagacagggagggagaag

SEQ ID NO: 322227 - DNA, 120 bp, Artificial Sequence
  ENSG00000135778_2 (sequence is synthesized)
aataggattcgatgtcgtcacgttgtccggcacccgggggcctttatcgagagttgggttagagcctccacctggaaaacgtgaatgccgagttgggcagtatgtggtcgacctgacttc

SEQ ID NO: 322228 - DNA, 120 bp, Artificial Sequence
  ENSG00000135778_3 (sequence is synthesized)
ttttgagcagttggcactacccgtcttgaggaatgccgactgcagcagtggcccagggcaaagagtgtgcgtcatcgatgagattgggaagatggagctcttcagtcagcttttcattca

SEQ ID NO: 322229 - DNA, 120 bp, Artificial Sequence
  ENSG00000135778_4 (sequence is synthesized)
agctgttcgtcagacgctgtctaccccagggactataatccttggcacaatcccagttcctaaaggaaagccactggctcttgtagaagaaatcagaaacagaaaggatgtgaaggtgtt

SEQ ID NO: 322230 - DNA, 120 bp, Artificial Sequence
  ENSG00000135778_5 (sequence is synthesized)
taatgtcaccaaggaaaacagaaaccaccttctgccagatatcgtgacgtgcgtgcagagcagcaggaagtgaagacacgtgcattcctgccttccgtgaaggagtgcccagttcaagag

SEQ ID NO: 322231 - DNA, 120 bp, Artificial Sequence
  ENSG00000135778_6 (sequence is synthesized)
gagcctgatggagccctgcctgtcgaggctgtatgcctatggggttatggaaccttgtgggcttttctagagaaaactcaacagctgtttcccataaaatgtttaaaagatcaaattagc

SEQ ID NO: 322232 - DNA, 120 bp, Artificial Sequence
  ENSG00000135778_7 (sequence is synthesized)
cttaatgctggattgtctgtacaagattaactatccattgtggcttatctatgcttaaagatttcttgtttatttcctcttgcagtcatgcacatgatttgggtaaactgtgagatgaga

SEQ ID NO: 322233 - DNA, 120 bp, Artificial Sequence
  ENSG00000135778_8 (sequence is synthesized)
aatggttttcagagtattagatggaattcacccccgttgaagtttataaatgtgttcaggggaagcgggaggaaagagttcactgcctaatcagttttgcatgtcatgaaaattaaattc

SEQ ID NO: 322234 - DNA, 120 bp, Artificial Sequence
  ENSG00000135778_9 (sequence is synthesized)
ctctccaggtgcagcttcagcctcatgcaacttaaagtgataacagttatttgattttttaaaaaatattattccaaaagaaaaccattttaggtcatctcccccaactctgtttgctta

SEQ ID NO: 322235 - DNA, 120 bp, Artificial Sequence
  ENSG00000135778_10 (sequence is synthesized)
ctgcttaataaatataaaaataaatctgatggttacagacaggaggcattgtgtgggaggaatacacaacctttggaagtgttgatagcatctgatattcagccgaccagatgacaagag

SEQ ID NO: 322236 - DNA, 120 bp, Artificial Sequence
  ENSG00000135778_11 (sequence is synthesized)
ctcaggcccacgggtttgcataagagcactgctttgccttagtttactcgggagcaattttgaatctttctatgcctagtttcccttccagaaaagcaggaagtggctgtcatctcagga

SEQ ID NO: 322237 - DNA, 120 bp, Artificial Sequence
  ENSG00000135778_12 (sequence is synthesized)
gtgatgtcacaccacagaaggaaactgtcaaccactccacacaactgtggagagtgcccagtgccaggggctgggcttatcaggaataatggtgtagcaatgcggagttcagcccataac

SEQ ID NO: 322238 - DNA, 120 bp, Artificial Sequence
  ENSG00000135778_13 (sequence is synthesized)
aggggtactataaaaatgaagtaggaaagtagaagagacccctgaaaccccagaactgatagaggataaaaacttccctccaagtggtagatggtactggagtgataaacagttcagtgt

SEQ ID NO: 322239 - DNA, 120 bp, Artificial Sequence
  ENSG00000135778_14 (sequence is synthesized)
ttttaggtcatttttggtgaagatctatgaatttccaggatttttttttaacaaattagcattggctacaaacccactggtataagcagcagtgtgccttctctctaactgtggacaagt

SEQ ID NO: 322240 - DNA, 120 bp, Artificial Sequence
  ENSG00000135778_15 (sequence is synthesized)
cgggcatgtggcgggtgaggagccctgggctgggcactggggcacagtgaatggggcgggaggggctcacatcaaaaccaaaatggcacgcagcccaggtctggttcctccatcagtgtc

SEQ ID NO: 322241 - DNA, 120 bp, Artificial Sequence
  ENSG00000135778_16 (sequence is synthesized)
tctttcctcagcgcttttcttccgaggtaactttgtgaagcttgacttggacttgcctagccttggagggaccacaacagggaggcctaatagattatgaactaagccctcaaaagggct

SEQ ID NO: 322242 - DNA, 120 bp, Artificial Sequence
  ENSG00000135778_17 (sequence is synthesized)
acctgcccaggaggaggaagtgggcatctccttccacagtccctgcctggcggggctgttcagggagactgagttccgagctcaggatgtctggcaggctggctgtgacttccagccacc

SEQ ID NO: 322243 - DNA, 120 bp, Artificial Sequence
  ENSG00000135778_18 (sequence is synthesized)
atcaccaggacaccggtgtgggctgcatgcctcagtgggccaggagaggcacggcctctgagttgggtagaggcttcccacaaaggcctgggaacctgatcctggccgtaaatctgaaag

SEQ ID NO: 322244 - DNA, 120 bp, Artificial Sequence
  ENSG00000135778_19 (sequence is synthesized)
taccacagccctcaggagaaccaagagatagggaggcaggctggggaaatgtcatcaatgtgcacccaggcgtggtggagctggtcagccccagctggagtgggaccccatcaagatgga

SEQ ID NO: 322245 - DNA, 120 bp, Artificial Sequence
  ENSG00000135778_20 (sequence is synthesized)
gcctttcctggcacctccgggaggccgttttgcgtttccgcccttcatgcatctgaaacaccaagggccatgttccttctggtgcttgtccttttgagcttggtgtttcagccgtgtctg

SEQ ID NO: 322246 - DNA, 120 bp, Artificial Sequence
  ENSG00000135778_21 (sequence is synthesized)
ttttgtagactttgattttgtcttaaatgagaaagaaagctggtgaaggttatttcaaagttaaatagctagtctgaggggcttatcactgaagccagttgtgcttatgtggggtgggag

SEQ ID NO: 322247 - DNA, 120 bp, Artificial Sequence
  ENSG00000135778_22 (sequence is synthesized)
tgtcactgcctacttgaaagtatgcacttgtgtggaacagattcagggtggcccctagcacttggggctgcgggagcttctgcacactttccctttaacggtaaagagacaagcttggag

SEQ ID NO: 322248 - DNA, 120 bp, Artificial Sequence
  ENSG00000135778_23 (sequence is synthesized)
tgtttaagtggttcgttcaggagcacagtgatagcggtgacaaaggagatttgaacccacgtctgcgtggctccaaagttcactctttcatcactccctgctgcgtccttcttgaggctt

SEQ ID NO: 322249 - DNA, 120 bp, Artificial Sequence
  ENSG00000135778_24 (sequence is synthesized)
tagcatttttagtgtgttttgtgcccccagacctcagagttgacatttagcagtgataaactgctgtaaatccaaagaacgtttagtgtctcttgtggtgaggtcctgaaatgattgttg

SEQ ID NO: 322250 - DNA, 120 bp, Artificial Sequence
  ENSG00000135778_25 (sequence is synthesized)
tattagtcaaacagaatgatcatggagcatgtatggagatgtcagatgcaatccctgtattgtaaggcaatgacatttaatgaaggataagatgaattcacagataactagaactcaggg

SEQ ID NO: 322251 - DNA, 120 bp, Artificial Sequence
  ENSG00000135778_26 (sequence is synthesized)
cccctccctgcacgcagccaggatgagaggagcagagctgagcgccacctccctgtcggtgccacggctgaggtgaggagctcttgccggatggtggggtgggggcagcagggcagattg

SEQ ID NO: 322252 - DNA, 120 bp, Artificial Sequence
  ENSG00000135778_27 (sequence is synthesized)
aagtcagggattctcttatacctgagtttggaatgcctcctattcaaacaaagcaaaatatctaacagatggttggatatgagtctcagggaggaattcaatttgaaaagcacagaatta

SEQ ID NO: 322253 - DNA, 120 bp, Artificial Sequence
  ENSG00000135778_28 (sequence is synthesized)
acatgtattgcttatatgaagaatctcagctagaataacaaggtcggatgggaggaatcaggactgatttgaagcacgatttactaaatcattctttccttttcctccttagcagatcat

SEQ ID NO: 322254 - DNA, 120 bp, Artificial Sequence
  ENSG00000135778_29 (sequence is synthesized)
accgccagctgcttaacacgtaatagtttaataaattgtttcttcttacctctcagtgagggtaagcacatgcagggagatgggtgagtcttttaaatggatagtgtcatctctgatgat

SEQ ID NO: 322255 - DNA, 120 bp, Artificial Sequence
  ENSG00000135778_30 (sequence is synthesized)
cagccttgacagggagagatcctagtaaagctgcaaattcaggcactcagttcccagccctccagttatcaagggggtgggaacgctggtgggctggaaaatgtggaacagacctgctcc

SEQ ID NO: 322256 - DNA, 120 bp, Artificial Sequence
  ENSG00000135778_31 (sequence is synthesized)
tcttcttttcctgccaattaccgtattcatagaaggttgtgtctgtggatcacacctgtgtgtgtgctgatggcggatgcttgtgtagcatagtgacttgggacaaaacagcatggtaga

SEQ ID NO: 322257 - DNA, 120 bp, Artificial Sequence
  ENSG00000135778_32 (sequence is synthesized)
tgaggctggagacgggtgggctaagtaaacaggcattgcattgcacattttgtgggcaaagaagttgaagcatcgcatgattttaacaaattacttgccagatgatttcaacacactgca

SEQ ID NO: 322258 - DNA, 120 bp, Artificial Sequence
  ENSG00000135778_33 (sequence is synthesized)
aaatttagaatcaataatgccaaattggccacatgatttatataaaaccaagtgctatggttttaatattatctttagaggagaaaccattttgatctgtgtccaaataactcttttttt

SEQ ID NO: 322259 - DNA, 120 bp, Artificial Sequence
  ENSG00000135778_34 (sequence is synthesized)
gcgtgagccaccgtgcccagcccccaaataactcttgaactggaaaataactctttagctatatactggcagaatatttgaacaactctagcaagaaatgtcagtttagggatgcctcct

SEQ ID NO: 322260 - DNA, 120 bp, Artificial Sequence
  ENSG00000135778_35 (sequence is synthesized)
tagcaagaaatgtcagtttagggatgcctcctctaaatgggggcttagaatataacattttgcaggaagtcctttctgatacatagctgactagatgaaggaccagattaacaagttcat

SEQ ID NO: 322261 - DNA, 120 bp, Artificial Sequence
  ENSG00000135778_36 (sequence is synthesized)
gagttgtaaatataaaagttgtgtaccacgataaaaaagaaaaagaagtatggctgcactgttgatggctggtcaaacagcccccaagaatcctggggtgactccaatactgccaccttt

SEQ ID NO: 322262 - DNA, 120 bp, Artificial Sequence
  ENSG00000135778_37 (sequence is synthesized)
tctctgtgggtgcagttgcctgcggatgtgtgtgcacatctgtgcctcggtatgcacactcgagatgcccgctctcatagacggtgcagagcgtcactgcattcctatctgattaatgtg

SEQ ID NO: 322263 - DNA, 120 bp, Artificial Sequence
  ENSG00000135778_38 (sequence is synthesized)
accttagtgttgtagatacactgtgtcactttcatcctccctcctccccacaaaagatgccacgagaactcgtgaactgtgataagcaatgaacagaataactgttgaagaagcacctca

SEQ ID NO: 322264 - DNA, 120 bp, Artificial Sequence
  ENSG00000135778_39 (sequence is synthesized)
tgaacctccccagagaaacgggatggaggagcacccagggtgctcttgctctcttgcctgcgctgccatttccttccagcctgggtttctagctctttggggagattccccgttttgtgg

SEQ ID NO: 322265 - DNA, 120 bp, Artificial Sequence
  ENSG00000135778_40 (sequence is synthesized)
aatgctttctgtgtttcctacttctggatgcctaaggagtggccagtcatactcctggctgaccactgccaggcaccgtggttttcctcactgaactcaaggagtcaccctccgtgggga

SEQ ID NO: 322266 - DNA, 120 bp, Artificial Sequence
  ENSG00000135778_41 (sequence is synthesized)
ggccacactcacagctccaggcctgccatttagcccttggggcttggctgtaaagttgcccaagaggattacaggagctgccagccaagtttaatttggccaccttagagaactgcagca

SEQ ID NO: 322267 - DNA, 120 bp, Artificial Sequence
  ENSG00000135778_42 (sequence is synthesized)
aggccctatcagcttcccattagacaaacaactgcatttaaattaaataaagtttgcacctctagggagtgctgacctgaaaataagaaccttctgtctgtgattatagagtacacttgc

SEQ ID NO: 322268 - DNA, 120 bp, Artificial Sequence
  ENSG00000135778_43 (sequence is synthesized)
ttttattaattgctgattcttagtttacaaaaaaaaaaattagaaaagcattaccatttactttccaaggggcaagagattctctacaatacccttcccccaaccctctcctcaaatttc

SEQ ID NO: 322269 - DNA, 120 bp, Artificial Sequence
  ENSG00000135778_44 (sequence is synthesized)
caaatcctaaatactttgaagaaatttgtgtgactgtttaaaattgagtatttccttctaactattgtcttttgaaaagggatggttcaccaggccagtgatactctatggactgcattt

SEQ ID NO: 322270 - DNA, 120 bp, Artificial Sequence
  ENSG00000135778_45 (sequence is synthesized)
tgggacctctaccccagcaaggatacaggttcctggggtcttgaagatgggaaaagttgtctcagaatttacccaaatgtcgttctcaccataaaagatatacttgtagaaatgagaagc

SEQ ID NO: 322271 - DNA, 120 bp, Artificial Sequence
  ENSG00000135778_46 (sequence is synthesized)
ttcagtataactcaaaacactggacgcagcaataactataaacattttaatttcaaaaacaaaggtgtgtgcgatgttgtgtgcacagtaagggttgcggggcttggagaacaagcacgc

SEQ ID NO: 322272 - DNA, 120 bp, Artificial Sequence
  ENSG00000135778_47 (sequence is synthesized)
gtccctgtgaagcccgcagggtgctggcggcccaccaatcgcctggactacagtgaggagcattgtgtgactccgcggtggatttccatgcaccgaatggactcagtttctaaactcaca

SEQ ID NO: 322273 - DNA, 120 bp, Artificial Sequence
  ENSG00000135778_48 (sequence is synthesized)
tcctaacgtatcctggcttttcacagaatactggagacatgactgcatgcatgatcacggttcttgttgtgaagctgccaccatgttacgcttaacagctgcataaatattataaagaaa

SEQ ID NO: 322274 - DNA, 120 bp, Artificial Sequence
  ENSG00000135778_49 (sequence is synthesized)
tagggttttcttgacacttagatttaaccttaatgcatctgcccagctgatggtatcagacgtgctgctgttcatttctttttcatggtaacagtaatgtataaagtgccgatgatgtaa

SEQ ID NO: 322275 - DNA, 120 bp, Artificial Sequence
  ENSG00000135778_50 (sequence is synthesized)
agagcaaattctccagctgtgtatcacagtccactctcacagagcctggctggaggcagaagctactgcaatcactgctgaactcagagtggaagaaaagggcccctgtggtgcccacct

SEQ ID NO: 322276 - DNA, 120 bp, Artificial Sequence
  ENSG00000135778_51 (sequence is synthesized)
ctgtgtcgcctcctttctacctcaggtggattccttgaatgcaaacaacaggaatggactttggctaacttaagtgaaaacagcatcaaaaagccttataggctttggagctgtcccatg

SEQ ID NO: 322277 - DNA, 120 bp, Artificial Sequence
  ENSG00000135778_52 (sequence is synthesized)
gggatcacaggattgacgcagccaggaccggtagaaatgggatcacgggactgacgcagccaggaccagtagaaatgggatcacgggattgacgcagccaggaccagtagaaatgggatc

SEQ ID NO: 322278 - DNA, 120 bp, Artificial Sequence
  ENSG00000135778_53 (sequence is synthesized)
agcttctggcacttgctgcgtgagctcactcctcttggggtgcagatctcagtcactcctcttggggtacagatctcagagaagttgccagggcctggcttgcccacttgttggctgggg

SEQ ID NO: 322279 - DNA, 120 bp, Artificial Sequence
  ENSG00000135778_54 (sequence is synthesized)
gcaagtttcctagaccgtacagtctcctaaagacaaccagagcactcttccaagaagggtgagcaggtgccaggaaccagaattgacgaggtccgctctgcatctcctcttcagacatgt

SEQ ID NO: 322280 - DNA, 120 bp, Artificial Sequence
  ENSG00000135778_55 (sequence is synthesized)
attggcacctattgtatgccaggccccctcttcagatacaaccaccctgaacctcagaaggcttccacatgcactccctgctcttaccgggaaccttggctcagccccttttccatggtt

SEQ ID NO: 322281 - DNA, 120 bp, Artificial Sequence
  ENSG00000135778_56 (sequence is synthesized)
cacctgtcgaaattacatccaggcttaagcacccctggaagcctttcctgcccctgaccccacacatgcccctgttcctgcctgccccccagactccttcattgtccttgttcatgcctg

SEQ ID NO: 322282 - DNA, 120 bp, Artificial Sequence
  ENSG00000135778_57 (sequence is synthesized)
tcctgtcctggtctgcgagctccatgaggtcagggtccttacctgtggtgcttctctatgcgcatctctgtgcctggctcctgtttgcccttccaccccatcagcgtgtgttgagtggat

SEQ ID NO: 322283 - DNA, 120 bp, Artificial Sequence
  ENSG00000135778_58 (sequence is synthesized)
ggatattatatgggccaagtaggaaggcactgtgatgggagcagagatggcccttcctttaccctggggcactcgggatggtgtggtagtgaaagaaaaataaacagatcatcgggtaaa

SEQ ID NO: 322284 - DNA, 120 bp, Artificial Sequence
  ENSG00000135778_59 (sequence is synthesized)
ctggtccggacctgacctgaattgcgaccccaacctggactgctcccctgaccgcaacccctacccccgcccaccagtatggcccggcacgtgttcctaacggggcccccaggccgactg

SEQ ID NO: 322285 - DNA, 120 bp, Artificial Sequence
  ENSG00000135778_60 (sequence is synthesized)
agtcaccgtactgtgtcatagaagaccagagcaaattctccagctgtgtatcacagtccactctcacagagcctggctggaggcagaagctactgcaatcactgctgaactcagagtgga

SEQ ID NO: 322286 - DNA, 120 bp, Artificial Sequence
  ENSG00000135778_61 (sequence is synthesized)
gggctccggcctctgaagttcccaatttaaatggcgggcttggtagtctgaagagtttgtactccttcccggaaaacgtgatttaaaagacacagggcctaaaggattagaacacacttg

SEQ ID NO: 322287 - DNA, 120 bp, Artificial Sequence
  ENSG00000135778_62 (sequence is synthesized)
tgagggggtcctagactggcttcttgatgaagggcagaaaccgcaggggccagcggcagcggtaactcctactgtagtgttgacgttgtggtctgcacaaatggtatttcaagagatctg

SEQ ID NO: 322288 - DNA, 120 bp, Artificial Sequence
  ENSG00000135778_63 (sequence is synthesized)
atagtgtttcagagttatctgttctcttccattgatctgtttgatccttgcatcagtaccatagtattttaattaccatggtaatcgtttttatttttcttcttcaaaaaatggccttgt

SEQ ID NO: 322289 - DNA, 120 bp, Artificial Sequence
  ENSG00000135778_64 (sequence is synthesized)
tcagaaactgtagtaatggtggcacttgtaatagtaaactattattgagtgcgaactacgtgccaggcatgaactcacttaatcctcagaacactatcactctattcctattttacagat

SEQ ID NO: 322290 - DNA, 120 bp, Artificial Sequence
  ENSG00000135778_65 (sequence is synthesized)
gaggaaactgaggcatagaatggaaagttacttgcccagggacacactaattgtgtaagtggtagagctggagtgaactatagaatcaagactttactatccattaaaaaaaatgtctta

SEQ ID NO: 322291 - DNA, 120 bp, Artificial Sequence
  ENSG00000135778_66 (sequence is synthesized)
tatggagtgattgggactatagttattttgacataaagggtgtcttaatttttcagataatcttaattctccacagcccaaaacatgtttctctttctccatctgtttctttaaaatttt

SEQ ID NO: 322292 - DNA, 120 bp, Artificial Sequence
  ENSG00000135778_67 (sequence is synthesized)
tattggtgaggttattcatagggctctcctattttctggtgctactggaattaggattgttttttctgttttctaatgatcaaggctgataagataatgctggcctttttcataatggcc

SEQ ID NO: 322293 - DNA, 120 bp, Artificial Sequence
  ENSG00000135778_68 (sequence is synthesized)
tttttgatagctaccctcaatgctttattaaaatttgatgcaatgtaagatgtaacattttattgattttcaacatatctcctactcacacaaaatggagacaatagattataatgtttt

SEQ ID NO: 322294 - DNA, 120 bp, Artificial Sequence
  ENSG00000135778_69 (sequence is synthesized)
aaagaacaaaggacatctactcaaagccctgttttccaggtgaacagtgtcattttttacaaagatctgtgaaaggaagagtaagctaaaatcagaacacccagggaaaaccaacatagt

SEQ ID NO: 322295 - DNA, 120 bp, Artificial Sequence
  ENSG00000135778_70 (sequence is synthesized)
ttgaaccttgtattttcctgttttgattaaaataagtctttaaagtatatttgtttttgagagcaggatctacttttggttctgaaataggctctgctttggaaaatcttagaaacttcc

SEQ ID NO: 322296 - DNA, 120 bp, Artificial Sequence
  ENSG00000135778_71 (sequence is synthesized)
tttgaaggtgagaggactcctgtctagggaaaagtattttgtttttgtttttttagactcgacctggaagtgttccttaggtcactctcaggccacttggctttagaaagaatgtagaaa

SEQ ID NO: 322297 - DNA, 120 bp, Artificial Sequence
  ENSG00000135778_72 (sequence is synthesized)
aaccaagttctagtcaggatccattcttgaaagattgacaagctcctcagcattgctagaatttctgtcattgctgttagcaaatgtggcatttgattctttgttctctctcagcttctg

SEQ ID NO: 322298 - DNA, 120 bp, Artificial Sequence
  ENSG00000135778_73 (sequence is synthesized)
tttctctacctcatgtattacaagtatgtaatgcaggatcagccagggaaattaaaagctatctggcgcaaacagaaaatcagtttttaaactgtcagtaaggacattcctgcagtgaat

SEQ ID NO: 322299 - DNA, 120 bp, Artificial Sequence
  ENSG00000135778_74 (sequence is synthesized)
cagcataagaaaatgaggtgaaaattcagcatgaggttgactctgcagttcattttgcaagatttgtcatggcaaatcttcataatttctattgagcagagactgagactttattatttc

SEQ ID NO: 322300 - DNA, 120 bp, Artificial Sequence
  ENSG00000135778_75 (sequence is synthesized)
tgattgttggcgagattctgtggatttagatgctaagcaggcttttgccctgggttatgacaccttcatgtctttcttcttgcagtccactctcaagaaacacagaaaagttgcatgctc

SEQ ID NO: 322301 - DNA, 120 bp, Artificial Sequence
  ENSG00000135778_76 (sequence is synthesized)
cttaagtcacacgtcccttaagctggactggggttgagtttgtataaactgttgccgtttttctttttccctctcactttgtcccatttccagcatttccttctgtctcgcctcccgtgc

SEQ ID NO: 322302 - DNA, 120 bp, Artificial Sequence
  ENSG00000135778_77 (sequence is synthesized)
gtatcagtctaaaaccacactccattaggaggaagttcatacggggtgagttggttgttttcttgagtctggtactgagaaagtacatacgtgtgtgttttctttttttgacaatttttt

SEQ ID NO: 322303 - DNA, 120 bp, Artificial Sequence
  ENSG00000135778_78 (sequence is synthesized)
taacttcatttggataaaattttactcttagagaaagttataagtgtaagaatagtgcaagaacacctgtatactctcattatccagagtcacctatgtttatcatttgccttgtttgct

SEQ ID NO: 322304 - DNA, 120 bp, Artificial Sequence
  ENSG00000135778_79 (sequence is synthesized)
gtgtgtgtgtgtgtttgtgtgtgtgtataaatatataagctggaagggggtgactatttgagaatacgttgcaatcatcaaggtactttactcctaaatgttcagtatatttttcctaaa

SEQ ID NO: 322305 - DNA, 120 bp, Artificial Sequence
  ENSG00000135778_80 (sequence is synthesized)
tactcctaaatgttcagtatatttttcctaaaaataaggatatgcttttacataatcaatacagttatcaacctctgtaaatcttacattgaaaaaatactttaatctatcgttagtgtt

SEQ ID NO: 322306 - DNA, 120 bp, Artificial Sequence
  ENSG00000135778_81 (sequence is synthesized)
ctagtttcatcagttgacaatattctttgtaacatttcttttcctccagatgttacacttagttgtcacatctccatagcctccgttaatttggaacatttccacagtcattctttgtct

SEQ ID NO: 322307 - DNA, 120 bp, Artificial Sequence
  ENSG00000135778_82 (sequence is synthesized)
tccaggacattgacatttgtaaagaatatagttccaatttaaaagaacgttcatcttttggagtttttctgatgtttcctcatgaccaaataaagctggaatactccataagtcataagt

SEQ ID NO: 322308 - DNA, 120 bp, Artificial Sequence
  ENSG00000135778_83 (sequence is synthesized)
gatgatgcatccttctcgagtatctcatctggaggtgtgtgatgtttagtgatattaattttgattacctgatcaaggacttgtcctatttctccactgtatagttactatttttttctt

SEQ ID NO: 322309 - DNA, 120 bp, Artificial Sequence
  ENSG00000135778_84 (sequence is synthesized)
tgacactaatgagcagtgagtggggagatagtgtgagaccatgcacatcctcctcatcagatttcccctagccaattctaattttatctaaactttattagatcatcttaagataaaaat

SEQ ID NO: 322310 - DNA, 120 bp, Artificial Sequence
  ENSG00000135778_85 (sequence is synthesized)
aattttctcttgaggccttaattggcaagcagatttaactactctcttttgaaattgtttctctagcaaggtgagcagtaattaacaaacataaaattactatacattgaagctgcacta

SEQ ID NO: 322311 - DNA, 120 bp, Artificial Sequence
  ENSG00000135778_86 (sequence is synthesized)
aaaaaaatgccataatggttaagcttttttccactctaagctgtgcttctctctatttgtatccggttacctccccattagaaaagccatcaccattttattataggaaaaacaatcagt

SEQ ID NO: 322312 - DNA, 120 bp, Artificial Sequence
  ENSG00000135778_87 (sequence is synthesized)
tctttctcctcaggcagtttctaatgaaaacggtatcaggtatcagagatactaaacatttaccaaaagcttaaatattgatgaaaatttttactaagcaagtgaaattttttttaattt

SEQ ID NO: 322313 - DNA, 120 bp, Artificial Sequence
  ENSG00000135778_88 (sequence is synthesized)
ggtttttgtaaacactggcaggaaggtggacatatcaggatacctggtcataactcttccaccgtcttctcggggtgtgctcctggtagaggagagaagtccttttactttatcatatct

SEQ ID NO: 322314 - DNA, 120 bp, Artificial Sequence
  ENSG00000135778_89 (sequence is synthesized)
gcctactgcagtgggccattcgctatccatacttgatgaaataattttggtgatattattctcagacccaaaatatgagttattttcgagtaatttagagcaatatgattactccaaata

SEQ ID NO: 322315 - DNA, 120 bp, Artificial Sequence
  ENSG00000135778_90 (sequence is synthesized)
aattgaggttttgtgcctatgcctccatagatccctaaacaccagagtgctattcgttcttattggagaggaaagcagtttcttcgtggttaggtcagtttcctagatgctattctttat

SEQ ID NO: 322316 - DNA, 120 bp, Artificial Sequence
  ENSG00000135778_91 (sequence is synthesized)
ttcagaatcaaagtgtggaggcgtattgcacacagggtgtggaagagagctttgaagtcaggtgatctctggtttgactccagctctgtcactgtgctctcagtgagttttgagtaaatc

SEQ ID NO: 322317 - DNA, 120 bp, Artificial Sequence
  ENSG00000135778_92 (sequence is synthesized)
ccttaatgcctaatttcctttcctcatctgtgaaacagatgctgttacctgctatgtgaagttgctgggaggactgaatgtaatgcttgtaaagtgccttggcccctggctcctaggagg

SEQ ID NO: 322318 - DNA, 120 bp, Artificial Sequence
  ENSG00000135778_93 (sequence is synthesized)
tgctcagcagagcaatagcagtgattattttcttgagaagttaattgaggtggtggatggcagtaccttgagaggagcctcccttcacaatttggtttgtgtttgccagggagctggggt

SEQ ID NO: 322319 - DNA, 120 bp, Artificial Sequence
  ENSG00000135778_94 (sequence is synthesized)
ccggagtgggatagtaatctgtcatggagtcccaggagcccaaatgtgcaggccagtcccaagtgctcagagcatgaggaggacgaggagtactgggctctccgtctcactggactgact

SEQ ID NO: 322320 - DNA, 120 bp, Artificial Sequence
  ENSG00000135778_95 (sequence is synthesized)
gtcagccaggaggtgttgtttcagtcccaagatagcttggaaaaccccatggctaccattcaagcgctcttcagtcgggtgaccatgtgggtgagcccctgtgagtcccgagaggccatt

SEQ ID NO: 322321 - DNA, 120 bp, Artificial Sequence
  ENSG00000135778_96 (sequence is synthesized)
taggacatccaggaagagcctcagagctagtctgtctgtgtgccggggtgaggatctctggcatgtccgggggagcagcttctgcccggagtattcttgactggggaagggccgggttac

SEQ ID NO: 322322 - DNA, 120 bp, Artificial Sequence
  ENSG00000135778_97 (sequence is synthesized)
caggcgccatcgggcagtctagacaccttgtcctggctatgccctggagactcacagtccatatgccaccagacagcaaagggattatgagacttgaaggcttggaataaacacacataa

SEQ ID NO: 322323 - DNA, 120 bp, Artificial Sequence
  ENSG00000135778_98 (sequence is synthesized)
aatatgaccggagccctgcatttttagctaataacttcagtgggtgaggaattgtgggctggctcagagatggctgctgttagcaccatttgcctttctgcttccctagaacttgctgct

SEQ ID NO: 322324 - DNA, 120 bp, Artificial Sequence
  ENSG00000135778_99 (sequence is synthesized)
ctttccatacttgctgtcccaggtgggtaagctcaggagctagtctgtgtgtctgatattaaaataaaacaatccaaacagtcctcctaaaattaacattaataccactggaaacattta

SEQ ID NO: 322325 - DNA, 120 bp, Artificial Sequence
  ENSG00000135778_100 (sequence is synthesized)
ttatgcaaataattcagaataaggcaaagaccacttggattagcttgctctcagtttgatattttggttaaatgaaattattttatatttatatgttctttgtatttttaaaagtacata

SEQ ID NO: 322326 - DNA, 120 bp, Artificial Sequence
  ENSG00000135778_101 (sequence is synthesized)
taaaaataaaggacccaaaaaaatcacactattttcaggtctctgatataactggtacgaagatatttgttgttctaatctttctggaaagcaaactaggtgagtgtaaccaaagttata

SEQ ID NO: 322327 - DNA, 120 bp, Artificial Sequence
  ENSG00000135778_102 (sequence is synthesized)
aaattattcgtagcttctcttatccctggctggtcaattttaggactctatctaaggaaatatcttctctcccggaacagggaaactaaaagtgcgcttcatggctgaacatttataatc

SEQ ID NO: 322328 - DNA, 120 bp, Artificial Sequence
  ENSG00000135778_103 (sequence is synthesized)
agctgaagtggaagcctgtgaggggtgtggccaggaaggctagtgtgttacataggactgaggtgtggcactaggaagcaatgctgcctgggttgttctctgaggagaggctgtgagggg

SEQ ID NO: 322329 - DNA, 120 bp, Artificial Sequence
  ENSG00000135778_104 (sequence is synthesized)
aggaaagggtgctccccagttggtgtgtacaccccagatggtgtgtacatcgtgattctgaccacgtggctgagagccacctacagtttttacacactccttactccagcagctgtaggt

SEQ ID NO: 322330 - DNA, 120 bp, Artificial Sequence
  ENSG00000135778_105 (sequence is synthesized)
ggagtttctctgggagctcattaggactctcctcacactgggggttggggaggggttcctgaccatcttcaaacctgggcccctattgttctaagtctgtgtctctatcaatttagaaca

SEQ ID NO: 322331 - DNA, 120 bp, Artificial Sequence
  ENSG00000135778_106 (sequence is synthesized)
atgtaaagggggtgaatgtttgtttacttacttatttctttgtttccctctaaagttgcttgaatttatatagaaataaaaccatgttacacgttatagtggttctttttttaagacctt

SEQ ID NO: 322332 - DNA, 120 bp, Artificial Sequence
  ENSG00000135778_107 (sequence is synthesized)
gagtgtatgatcttgtactatttagaaaagcaggctgagtgtctacatgcttcagagtggctcagcagctgacatctttctctcaactgaatatgaataacttgcatttttaattaaaaa

SEQ ID NO: 322333 - DNA, 120 bp, Artificial Sequence
  ENSG00000135778_108 (sequence is synthesized)
tcacagatttatttttgagattcctgaagttcttggattataaaattccccaattctggacagattgaggattttatgtaagctaaggttttaaaatgaggatttccaattggtagaaag

SEQ ID NO: 322334 - DNA, 120 bp, Artificial Sequence
  ENSG00000135778_109 (sequence is synthesized)
taatgtatacatgtgtgtccaaattcttttgtgctgaaacttaaataaatgttgatgagctttcactggtgaatgttctagaggattgcaggaaggctggttgttgaagagccacacact

SEQ ID NO: 322335 - DNA, 120 bp, Artificial Sequence
  ENSG00000135778_110 (sequence is synthesized)
ttctacctgtacgtgtgtatttacacatggccacgtgcattttactaccctcatgtatatagtcaaataaatacatgtgcatgtgtacacacattctttcatatcacttcttgtctgatt

SEQ ID NO: 322336 - DNA, 120 bp, Artificial Sequence
  ENSG00000135778_111 (sequence is synthesized)
tggcaccttccaaaactcattttgaggtgccagaataagttttattttggcttttagatgacagcctccagaggaatggcatccacaattactcttcgtctctgggggcagcaaaatgtc

SEQ ID NO: 322337 - DNA, 120 bp, Artificial Sequence
  ENSG00000135778_112 (sequence is synthesized)
cacagcacttgggaacagtcgggtcagttggagtggcatgcccccaggaagacagaaaccttcttgtacagttgtctgtttttattatcatagacaggtggttgatagctgttttatttc

SEQ ID NO: 322338 - DNA, 120 bp, Artificial Sequence
  ENSG00000135778_113 (sequence is synthesized)
tcccaaatatggctttcgttttggaggaaaaacttggaataagtagtgacttacttcatagatgctctgcccttctccccgaccccaccagtggagggtgacattgctccttcagctccc

SEQ ID NO: 322339 - DNA, 120 bp, Artificial Sequence
  ENSG00000135778_114 (sequence is synthesized)
cacttctcagctctgggacatcggtgagttccccaggaaggatgcggacgaggacaaccatgtacctgccctaagtggggagaccaggcgtgtgtacagataaacttaatagagaggcaa

SEQ ID NO: 322340 - DNA, 120 bp, Artificial Sequence
  ENSG00000135778_115 (sequence is synthesized)
aaatgaagcatgtcagaaacacagaagtgcggagattgttcagacctctcttgggtgattacagtggactccttattgatcttttagctaataaaatgaatggaaaaatatttcataagt

SEQ ID NO: 322341 - DNA, 120 bp, Artificial Sequence
  ENSG00000135778_116 (sequence is synthesized)
gtacaatatgcagtaggaaaatagagtactgtttacttaaaagtctgaaaaacactgctgtactgcttccgtgcaatcacaactggggtttagacacccactatcttatcttgtctattc

SEQ ID NO: 322342 - DNA, 120 bp, Artificial Sequence
  ENSG00000135778_117 (sequence is synthesized)
caaaaggagtctaacatttgtttctgactccacagccagcagtctttctagcacaacttgtgatcctccctggattagactctttcggctgtgggagaagattcccacctctgtgtgtgc

SEQ ID NO: 322343 - DNA, 120 bp, Artificial Sequence
  ENSG00000135778_118 (sequence is synthesized)
cttcgaaggcctttaggatctgggcccgcagccccgtctgtcactggctgcccctggttgccactgatccctaccaccagccacactgtaccatatgctgctttggcttttggaatttga

SEQ ID NO: 322344 - DNA, 120 bp, Artificial Sequence
  ENSG00000135778_119 (sequence is synthesized)
acaaaatctagcttaactcagacatgccctctaggactatattgctgtcatcatttaaggaatcagaactgtagtgaagaatactttgtaaatcagctttacatacagttttcaaaataa

SEQ ID NO: 322345 - DNA, 120 bp, Artificial Sequence
  ENSG00000135778_120 (sequence is synthesized)
tcatgtatacaaacatatataaggtgtatttgtcattcaccattcattgaagtgtttattacatgttctgttttgtccctcccagggaagaatcaaccaaagtcctgtcagccttcccca

SEQ ID NO: 322346 - DNA, 120 bp, Artificial Sequence
  ENSG00000135778_121 (sequence is synthesized)
ggaaggctttctatagaggacatgtgtgttagttatatgttgctatggaacaagttatctcaaaatttagcagcttaaaacaacaaacacattattgtacacagtatctgaggatcagga

SEQ ID NO: 322347 - DNA, 120 bp, Artificial Sequence
  ENSG00000135778_122 (sequence is synthesized)
atccaggtacagcttagctggggttctgaggttgcagtcaagctgttggctggggctgtggtcatctgaggcttgcctgggagggccctgcctctaagcttgctcatgtggttgctggca

SEQ ID NO: 322348 - DNA, 120 bp, Artificial Sequence
  ENSG00000135778_123 (sequence is synthesized)
ggttcatttcctcttggctgttggcatgaggcctcagtgcctcaccacgtggacctcaccgtcagctgcctgagtatcctcacagcatagcacttctcttcccccagagtgagtgattcg

SEQ ID NO: 322349 - DNA, 120 bp, Artificial Sequence
  ENSG00000135778_124 (sequence is synthesized)
agagaggggatccaagacagagatcaagctttatatttatatacaaccagaaaataagtggcacccaaatacctcaggcttaaaaaaagtgagacagcaagcatgggagcctttgttgat

SEQ ID NO: 322350 - DNA, 120 bp, Artificial Sequence
  ENSG00000135778_125 (sequence is synthesized)
aataatggcctcttttttccattttgagccatatgagattccctacgtgctgggggggagataactgctctaggtagatgtttgtgtatttcatgatctggtccataagcgttgttggaa

SEQ ID NO: 322351 - DNA, 120 bp, Artificial Sequence
  ENSG00000135778_126 (sequence is synthesized)
aaaagtgaaaattaaaaggaaacaagtcttggctaaaggggaaaaaaaagtaagtacaattgcatcctttagatctcagattctctttctcatgactttattccaatttatgtccgttac

SEQ ID NO: 322352 - DNA, 120 bp, Artificial Sequence
  ENSG00000135778_127 (sequence is synthesized)
ttccttgaacatcccactggtgacaggcatagctgccagcttccaagagtcctaatgattcccagctcctgggactcacccttgtgcagtcccctcccacacagtaccagcggtggtctg

SEQ ID NO: 322353 - DNA, 120 bp, Artificial Sequence
  ENSG00000135778_128 (sequence is synthesized)
tgggatgctgtcactttttgaaatccagtaaaaaggtttctgtcttttttacctcattggtgagtgattggggagtgggacccatgggccctttgattaatgtgactctgatgtcccagt

SEQ ID NO: 322354 - DNA, 120 bp, Artificial Sequence
  ENSG00000135801_0 (sequence is synthesized)
gcgcgggggcccagctgagccggccgtcggagtgagaccctgcggcagagacgacggaggcggaagcaacccgatcccggaggcggcggcggcggggggagccggagccgcctgggatgt

SEQ ID NO: 322355 - DNA, 120 bp, Artificial Sequence
  ENSG00000135801_1 (sequence is synthesized)
aggcggcggcggcggggggagccggagccgcctgggatgttcagtcatgaaacgagtgcgtaccgagcagattcagatggcagtgtcctgctacctcaaacgccggcagtacgtggactc

SEQ ID NO: 322356 - DNA, 120 bp, Artificial Sequence
  ENSG00000135801_2 (sequence is synthesized)
agatggtcccctgaagcaaggactgcggctgtcacagactgctgaagagatggcggccaatctaacagtgcaatcagaatctggttgtgccaacatagtgtctgcagccccttgccaggc

SEQ ID NO: 322357 - DNA, 120 bp, Artificial Sequence
  ENSG00000135801_3 (sequence is synthesized)
agaaccccagcaatatgaagtacagtttggacgactgcggaattttctcactgattctgattcccagcatagccacgaagtgatgcctctcctctatcctctctttgtctacctccatct

SEQ ID NO: 322358 - DNA, 120 bp, Artificial Sequence
  ENSG00000135801_4 (sequence is synthesized)
caacctggtccaaaacagtccgaagagcacagtggaaagtttttacagccgcttccatggaatgtttctgcagaatgctagccagaaggatgtcattgagcagctacagaccactcaaac

SEQ ID NO: 322359 - DNA, 120 bp, Artificial Sequence
  ENSG00000135801_5 (sequence is synthesized)
catccaggacatcctatctaacttcaagcttcgagcattcctagataacaagtacgtggtccgtctccaagaagacagctacaactaccttatccgctacctccaaagtgacaacaatac

SEQ ID NO: 322360 - DNA, 120 bp, Artificial Sequence
  ENSG00000135801_6 (sequence is synthesized)
tgccctgtgcaaagtcctcaccttacatattcatcttgacgtgcagcctgccaagagaacagactatcagctgtatgccagtggcagctcctcccgcagtgagaacaacggtttggagcc

SEQ ID NO: 322361 - DNA, 120 bp, Artificial Sequence
  ENSG00000135801_7 (sequence is synthesized)
ccccgacatgcccagccctattctgcagaacgaggctgccctagaggtcttacaggagagcattaagcgagtcaaggatgggcctccctccctcactaccatctgcttctatgccttcta

SEQ ID NO: 322362 - DNA, 120 bp, Artificial Sequence
  ENSG00000135801_8 (sequence is synthesized)
taacacagagcagctgttgaacactgcagaaatctcccccgatagcaagctgcttgctgctgggtttgacaactcctgtataaaactttggagtttacgatccaagaagttaaaatcaga

SEQ ID NO: 322363 - DNA, 120 bp, Artificial Sequence
  ENSG00000135801_9 (sequence is synthesized)
gccccaccaagtagacgtgtcccgcatccatttggcttgtgatattctggaggaggaggatgatgaggatgataatgcaggcacggagatgaagatactgcggggccactgcggaccagt

SEQ ID NO: 322364 - DNA, 120 bp, Artificial Sequence
  ENSG00000135801_10 (sequence is synthesized)
gtacagcacgaggttcctcgcggacagctcagggttgctctcttgttctgaagacatgtccatcagatactgggatctggggagtttcaccaacactgtgttgtaccaaggacatgccta

SEQ ID NO: 322365 - DNA, 120 bp, Artificial Sequence
  ENSG00000135801_11 (sequence is synthesized)
tcctgtgtgggatctggacatcagtccatatagcctgtacttcgccagcgggtcccacgaccgcaccgccaggctgtggtcatttgatcggacgtacccgctgaggatatatgcaggaca

SEQ ID NO: 322366 - DNA, 120 bp, Artificial Sequence
  ENSG00000135801_12 (sequence is synthesized)
cttttcacaggccaccgtggccccgtgctttctctcgccttttctcccaacggtaagtacttggcgtctgctggcgaggaccagcggttgaagctgtgggacttggcctctgggaccctt

SEQ ID NO: 322367 - DNA, 120 bp, Artificial Sequence
  ENSG00000135801_13 (sequence is synthesized)
tataaagagttgagaggccacacagacaatatcaccagcctcaccttcagtccagacagcggcttgattgcctctgcctccatggacaactcggtgcgcgtctgggacatcaggaacact

SEQ ID NO: 322368 - DNA, 120 bp, Artificial Sequence
  ENSG00000135801_14 (sequence is synthesized)
tactgcagtgcacctgccgacggctcctccagcgagctcgtgggcgtgtacaccgggcagatgagcaacgtcctgagcgtgcagttcatggcctgtaaccttcttctggtgactggaatt

SEQ ID NO: 322369 - DNA, 120 bp, Artificial Sequence
  ENSG00000135801_15 (sequence is synthesized)
acacaagaaaatcaggaacattaattttttaactttgttggaacggactggggtaacagtggaaagcctccagttgcaatccttcaatgagctgagattgaatcattgactgtgaaagag

SEQ ID NO: 322370 - DNA, 120 bp, Artificial Sequence
  ENSG00000135801_16 (sequence is synthesized)
ccccctcctcccctctctcctgggccctcattccgggcaggtcccccttcactcagccccccagtgtcgaaggccaaggttggggaggggaacaggagagaggcaatgatgagtgatcaa

SEQ ID NO: 322371 - DNA, 120 bp, Artificial Sequence
  ENSG00000135801_17 (sequence is synthesized)
gaattagagtgccctggaggtcactcacaagtcctcatggagactctgccgtgacctcgcgcatgcgagcaccttcctgtctctcattttcaccatctgactggggctaggtttggttag

SEQ ID NO: 322372 - DNA, 120 bp, Artificial Sequence
  ENSG00000135801_18 (sequence is synthesized)
agggcggctgtagagcaccctcaggagaagtggcgccgcaggggtcacgcatggtccagccctcaggtgggagggaagtccttgttggcagagggatgtggggcgggaatgaggaaaggg

SEQ ID NO: 322373 - DNA, 120 bp, Artificial Sequence
  ENSG00000135801_19 (sequence is synthesized)
gagggcatgatcctggcaaatagtctttccttttccgtaattacagagaaccaggattttttttaattattgttattataattataattattattattattgacatgaggaaacctagca

SEQ ID NO: 322374 - DNA, 120 bp, Artificial Sequence
  ENSG00000135801_20 (sequence is synthesized)
ctggcagagggcaccttctctgcttttaatctttcaggtttgactcctggcactggttttgatacttggaattttgaggttcagggaattcagagaatttggtagcacagtgtattggga

SEQ ID NO: 322375 - DNA, 120 bp, Artificial Sequence
  ENSG00000135801_21 (sequence is synthesized)
gaaagggaaatttcgggtgacagattgatcaccctggctgacatgtttctggaagtgggtgggtgggtttgattgagaacactttgggctcctgcagtgatggtgggaaagaaaaattct

SEQ ID NO: 322376 - DNA, 120 bp, Artificial Sequence
  ENSG00000135801_22 (sequence is synthesized)
ttccaaagctgcacttctcttaataattctctcccctcaaaagaaagattatgataaagaataatttggagtaataagtaacaagatagaattagaaaaatgttgaatttctgaatgacc

SEQ ID NO: 322377 - DNA, 120 bp, Artificial Sequence
  ENSG00000135801_23 (sequence is synthesized)
attcagaggtgtggctttttccacgtctttttctcctgcaatgaactgctcccacgtcctgcactgcaataccagtctaatgaacactttgtgaaacaaatcgtaagtatgtacgcacgc

SEQ ID NO: 322378 - DNA, 120 bp, Artificial Sequence
  ENSG00000135801_24 (sequence is synthesized)
atatcaaactatgctctgaggataaagcaagttctaatttgtggaaaaaggattaaatatttctgttttctgaaaagagttattttgtattttgttttctattaaaatgtatttagtttc

SEQ ID NO: 322379 - DNA, 120 bp, Artificial Sequence
  ENSG00000135801_25 (sequence is synthesized)
cttccctgcacccgccttcctaatttccttagaatgtccttaccaaacacgacatatcttagaatggacttcctagtttccctcatcatatagctaaagccagactaatgacatgttacc

SEQ ID NO: 322380 - DNA, 120 bp, Artificial Sequence
  ENSG00000135801_26 (sequence is synthesized)
tgtagccattgaattcctgcacatgcctaacctaagatgcaaaaacaatttttagcagcattaacttcttattaatgaatggtcagtatttatactatgtgaaatgtggatagcaacact

SEQ ID NO: 322381 - DNA, 120 bp, Artificial Sequence
  ENSG00000135801_27 (sequence is synthesized)
aagcctaatgaaagacctttagctaatattgactttagctgagatttgcagtaaatatacacttatgtgtgtgcacatttgctcaggtacaaataatcggtagtaggataactgagtcga

SEQ ID NO: 322382 - DNA, 120 bp, Artificial Sequence
  ENSG00000135801_28 (sequence is synthesized)
agggcctccattgtcaactgtaatgaatattattttccccacagaaggttgtgccatttcacagtctcagcaacagtagtaagaatactggcatccctgcaccctcaccacactggatgg

SEQ ID NO: 322383 - DNA, 120 bp, Artificial Sequence
  ENSG00000135801_29 (sequence is synthesized)
atggtattggctttctgaggccagtgcatatcctgtggctccatgtaccccggggtgttcccagaccccacttggagaagtaacacaggaagtagagttgccagctcccctccccccgtc

SEQ ID NO: 322384 - DNA, 120 bp, Artificial Sequence
  ENSG00000135801_30 (sequence is synthesized)
agtcagtgttcaatcttgtttggcttgtaaccgtttaggacagtcattgaaaagggcaggcgcagcttgggtttcaggtcaccaaaaatcactaccttagaaaaaatgtgggccaaggaa

SEQ ID NO: 322385 - DNA, 120 bp, Artificial Sequence
  ENSG00000135801_31 (sequence is synthesized)
gatagaaattaaacttcacagcattaacttttctttagagtggtcctgaaaaagctgtgggccaaagtatttttgtcttatcaccactgaaattcaggtagctctgcctcacattacttt

SEQ ID NO: 322386 - DNA, 120 bp, Artificial Sequence
  ENSG00000135801_32 (sequence is synthesized)
taaattaaaccattgttttcctgttcctgttttctgagtccacttccagttaggatggcctttgaatttttgattcttgcaaccgagacagtataattgaaggatttccttgtgatgagt

SEQ ID NO: 322387 - DNA, 120 bp, Artificial Sequence
  ENSG00000135801_33 (sequence is synthesized)
gaagagtctagattcccatgtagaagctttaatttctagaattttatagtactctccaaaatattttttattacatttgtatttgaattttcaaacatctcttttccttggagacagttc

SEQ ID NO: 322388 - DNA, 120 bp, Artificial Sequence
  ENSG00000135801_34 (sequence is synthesized)
cctttttgggagttcttctgataaaactgaggaatactgcctgcatttgctttcgattttctgtaaatacaaaaaaaaattacactgaccttattagctttgatgatacagagtttggag

SEQ ID NO: 322389 - DNA, 120 bp, Artificial Sequence
  ENSG00000135801_35 (sequence is synthesized)
attattctgtgcattaaaaattaatattaaagaagatagcattatgacatctgataacagtagaccaaaataaaacattttaagactctggccactactggtaactagctctgtggcttg

SEQ ID NO: 322390 - DNA, 120 bp, Artificial Sequence
  ENSG00000135801_36 (sequence is synthesized)
tcctatgtttatttccgggtatcagaagtgtatctgaagactcagaagtgaggaaccgcatgcggaattccaggaactgaaagaaattaagtatggctggagttaggagaggggccaaga

SEQ ID NO: 322391 - DNA, 120 bp, Artificial Sequence
  ENSG00000135801_37 (sequence is synthesized)
caggaagtgatgtagtgacactgtcttatatgagcaattatggcggccaaactagggtagtggcagtggcaaaggagacatggatggactagagaagagctcggttattcaattactgta

SEQ ID NO: 322392 - DNA, 120 bp, Artificial Sequence
  ENSG00000135801_38 (sequence is synthesized)
ggggataagggagagcaagcatcaagggtgacgtttgtgtttcaggcttaaacagttggatgtccatcaagaagaaagcaaaagacgtcattggaatggtggttttgtttaagcatttct

SEQ ID NO: 322393 - DNA, 120 bp, Artificial Sequence
  ENSG00000135801_39 (sequence is synthesized)
ggctttccatcatggttcatactgaaagtactgtagatgctagctaacctctgccctttttaagaataaaccttttttttaaacttaagaactaaagctgagattctcctattctgttgt

SEQ ID NO: 322394 - DNA, 120 bp, Artificial Sequence
  ENSG00000135801_40 (sequence is synthesized)
tgaggggcttcctgcatgcccgcccattttatcacagcaatttgagaagttttctttttggtttctgacaacaagcatttggggagaaagccaggcataaattagttacgatagttggtg

SEQ ID NO: 322395 - DNA, 120 bp, Artificial Sequence
  ENSG00000135801_41 (sequence is synthesized)
tttaatgtttctccagtgaaaatttggacttttctttttcccttatagaatgcataattaaaacagactattattttgaaatgaaatattgaatattaaaaaaaataaaatagagactct

SEQ ID NO: 322396 - DNA, 120 bp, Artificial Sequence
  ENSG00000135801_42 (sequence is synthesized)
taatacaggagccacaaactcacatacctagagaaaccaaacaggtaaaagcaagtggtgaagccacatggattaatgagatgatagaaagtacaaaatcactatgtaagtcagattaaa

SEQ ID NO: 322397 - DNA, 120 bp, Artificial Sequence
  ENSG00000135801_43 (sequence is synthesized)
aagccagcttgcactctctgctttcatctttttgaagcaataactattacataaatcagtgaatacagtatttctacagtatttgaaacggtgttcacacccagcaattccacttctaga

SEQ ID NO: 322398 - DNA, 120 bp, Artificial Sequence
  ENSG00000135801_44 (sequence is synthesized)
catatatccaagagaatggaaaacatgtgcacacaggcacttgtacatgaatatttatggaagcattattcacaatagccaaaaagtggaaacagtccaaatggccatcaagatgaatga

SEQ ID NO: 322399 - DNA, 120 bp, Artificial Sequence
  ENSG00000135801_45 (sequence is synthesized)
ataaataaaatgtagtgtgtgcatgcagtggaatattatttgcccataaaaagaaatgaagcactgatgcaggctgcaacatggatgaacttgaaagctttatgctacgtgaaagaagcc

SEQ ID NO: 322400 - DNA, 120 bp, Artificial Sequence
  ENSG00000135801_46 (sequence is synthesized)
agtcataaaaggtcacctactgttattcctttcataggaaatatccagataggcaagtccatagagacagagaggagaggagtggttgccaggggctgggcaaggagaatgagagtgacc

SEQ ID NO: 322401 - DNA, 120 bp, Artificial Sequence
  ENSG00000135801_47 (sequence is synthesized)
gctaatgggtgtggcatttctttgtgaggtaatgaaaatgttctgtattagatagtggtgatcattgcacaactctgtgaatgtactaaaaatcattgaattgtacactttgaaagaatt

SEQ ID NO: 322402 - DNA, 120 bp, Artificial Sequence
  ENSG00000135801_48 (sequence is synthesized)
atatagtatgtaattatatctcagtttaaaaaaaaaaacaggataacagtaaccaaaatcttctatgtaagcttaaaattttctctgttaattatgccaaataaaactgaattcacagca

SEQ ID NO: 322403 - DNA, 120 bp, Artificial Sequence
  ENSG00000135801_49 (sequence is synthesized)
tggaattacttctcctcttctcaagacagtgccagagagagcagactgaccaaaaacctcagtgagctacgttaagtgaatgatgttggcctcagagaccctgtctgtcatttagagcgg

SEQ ID NO: 322404 - DNA, 120 bp, Artificial Sequence
  ENSG00000135801_50 (sequence is synthesized)
ggaattttctcactggtctctgaagagcagttaaccaaatcaaatgaatagttatttcctgatcaccaagataaagtgttgtctgtagatgagagattctgtgagctcacctattgccgt

SEQ ID NO: 322405 - DNA, 120 bp, Artificial Sequence
  ENSG00000135821_0 (sequence is synthesized)
gtaaaactattccccgtgaaggcggcagggcagaggtccagggcgggctttgctgggagcctcgggaccccgggttgggggccgtggggcggcacctggcgagctggcgggtgggcggcg

SEQ ID NO: 322406 - DNA, 120 bp, Artificial Sequence
  ENSG00000135821_1 (sequence is synthesized)
agccgaggcttcccggcctggcggcaactcgcccctctgccctcagccctcccggctccgctcccttcccccacgccgccctgcccctcccccacgcccctttctctttctttctttctt

SEQ ID NO: 322407 - DNA, 120 bp, Artificial Sequence
  ENSG00000135821_2 (sequence is synthesized)
tctttcccagttcgcttgcccccaccccagcggcgcccgccgggctcctcgcccaatggccgcggggcccgggaccgcatcagctgatcggcccgggctcctggccgctgggagccaatc

SEQ ID NO: 322408 - DNA, 120 bp, Artificial Sequence
  ENSG00000135821_3 (sequence is synthesized)
caccgggggcggccccgggccgcggataaagggtgcggggctgctggcggctctgcagagtcgagagtgggagaagagcggagcgtgtgagcagtactgcggcctcctctcctctcctaa

SEQ ID NO: 322409 - DNA, 120 bp, Artificial Sequence
  ENSG00000135821_4 (sequence is synthesized)
cctcgctctcgcggcctagctttacccgcccgcctgctcggcgaccagcggggatcctcccccagccgcaagtccacgaagaaagcaacgaatgaaaattatgaagacaacgagaagtca

SEQ ID NO: 322410 - DNA, 120 bp, Artificial Sequence
  ENSG00000135821_5 (sequence is synthesized)
gactcctccgggtcgcgctccagctgcttcggcttcgtcgcctactctgtgaactccggggagagatctcgagtcaagattaagaccttaacccaccaacctgcctgttcggacaccccc

SEQ ID NO: 322411 - DNA, 120 bp, Artificial Sequence
  ENSG00000135821_6 (sequence is synthesized)
cgggccggccgctgtctgtccccttctccatcgccctctcccagaaagctccggtgcttggaccagctagagtctgagaaagaggagaggcgcgaacgccactccaaaaagagaagggtt

SEQ ID NO: 322412 - DNA, 120 bp, Artificial Sequence
  ENSG00000135821_7 (sequence is synthesized)
aaagagggcaaccctaacgatacgcttgactttctgtggctgggaacaccttccaccatgaccacctcagcaagttcccacttaaataaaggcatcaagcaggtgtacatgtccctgcct

SEQ ID NO: 322413 - DNA, 120 bp, Artificial Sequence
  ENSG00000135821_8 (sequence is synthesized)
cagggtgagaaagtccaggccatgtatatctggatcgatggtactggagaaggactgcgctgcaagacccggaccctggacagtgagcccaagtgtgtggaagagttgcctgagtggaat

SEQ ID NO: 322414 - DNA, 120 bp, Artificial Sequence
  ENSG00000135821_9 (sequence is synthesized)
ttcgatggctctagtactttacagtctgagggttccaacagtgacatgtatctcgtgcctgctgccatgtttcgggaccccttccgtaaggaccctaacaagctggtgttatgtgaagtt

SEQ ID NO: 322415 - DNA, 120 bp, Artificial Sequence
  ENSG00000135821_10 (sequence is synthesized)
ttcaagtacaatcgaaggcctgcagagaccaatttgaggcacacctgtaaacggataatggacatggtgagcaaccagcacccctggtttggcatggagcaggagtataccctcatgggg

SEQ ID NO: 322416 - DNA, 120 bp, Artificial Sequence
  ENSG00000135821_11 (sequence is synthesized)
acagatgggcacccctttggttggccttccaacggcttcccagggccccagggtccatattactgtggtgtgggagcagacagagcctatggcagggacatcgtggaggcccattaccgg

SEQ ID NO: 322417 - DNA, 120 bp, Artificial Sequence
  ENSG00000135821_12 (sequence is synthesized)
gcctgcttgtatgctggagtcaagattgcggggactaatgccgaggtcatgcctgcccagtgggaatttcagattggaccttgtgaaggaatcagcatgggagatcatctctgggtggcc

SEQ ID NO: 322418 - DNA, 120 bp, Artificial Sequence
  ENSG00000135821_13 (sequence is synthesized)
cgtttcatcttgcatcgtgtgtgtgaagactttggagtgatagcaacctttgatcctaagcccattcctgggaactggaatggtgcaggctgccataccaacttcagcaccaaggccatg

SEQ ID NO: 322419 - DNA, 120 bp, Artificial Sequence
  ENSG00000135821_14 (sequence is synthesized)
cgggaggagaatggtctgaagtacatcgaggaggccattgagaaactaagcaagcggcaccagtaccacatccgtgcctatgatcccaagggaggcctggacaatgcccgacgtctaact

SEQ ID NO: 322420 - DNA, 120 bp, Artificial Sequence
  ENSG00000135821_15 (sequence is synthesized)
ggattccatgaaacctccaacatcaacgacttttctgctggtgtagccaatcgtagcgccagcatacgcattccccggactgttggccaggagaagaagggttactttgaagatcgtcgc

SEQ ID NO: 322421 - DNA, 120 bp, Artificial Sequence
  ENSG00000135821_16 (sequence is synthesized)
ccctctgccaactgcgaccccttttcggtgacagaagccctcatccgcacgtgtcttctcaatgaaaccggcgatgagcccttccagtacaaaaattaagtggactagacctccagctgt

SEQ ID NO: 322422 - DNA, 120 bp, Artificial Sequence
  ENSG00000135821_17 (sequence is synthesized)
tgagcccctcctagttcttcatcccactccaactcttccccctctcccagttgtcccgattgtaactcaaagggtggaatatcaaggtcgtttttttcattccatgtgcccagttaatct

SEQ ID NO: 322423 - DNA, 120 bp, Artificial Sequence
  ENSG00000135821_18 (sequence is synthesized)
tgctttctttgtttggctgggatagaggggtcaagttattaatttcttcacacctaccctcctttttttccctatcactgaagctttttagtgcattagtggggaggagggtggggagac

SEQ ID NO: 322424 - DNA, 120 bp, Artificial Sequence
  ENSG00000135821_19 (sequence is synthesized)
taggcgtagctatccggacagagcacgtttgcagaagggggtctcttcttccaggtagctgaaaggggaagacctgacgtactctggttaggttaggacttgccctcgtggtggaaactt

SEQ ID NO: 322425 - DNA, 120 bp, Artificial Sequence
  ENSG00000135821_20 (sequence is synthesized)
ttcttaaaaagttataaccaacttttctattaaaagtgggaattaggagagaaggtaggggttgggaatcagagagaatggctttggtctcttgcttgtgggactagcctggcttgggac

SEQ ID NO: 322426 - DNA, 120 bp, Artificial Sequence
  ENSG00000135821_21 (sequence is synthesized)
taaatgccctgctctgaacacgaagcttagtataaactgatggatatccctaccttgaaagaagaaaaggttcttactgcttggtccttgatttatcacacaaagcagaatagtattttt

SEQ ID NO: 322427 - DNA, 120 bp, Artificial Sequence
  ENSG00000135821_22 (sequence is synthesized)
atatttaaatgtaaagacaaaaaactatatgtatggttttgtggattatgtgtgttttgctaaaggaaaaaaccatccaggtcacggggcaccaaatttgagacaaatagtcggattaga

SEQ ID NO: 322428 - DNA, 120 bp, Artificial Sequence
  ENSG00000135821_23 (sequence is synthesized)
aataaagcatctcattttgagtagagagcaagggaagtggttcttagatggtgatctgggattaggccctcaagacccttttgggtttctgccctgcccaccctctggagaaggtgggca

SEQ ID NO: 322429 - DNA, 120 bp, Artificial Sequence
  ENSG00000135821_24 (sequence is synthesized)
ctggattagttaacagacaacacgttactagcagtcacttgatctccgtggctttggtttaaaagacacacttgtccacataggtttagagataagagttggctggtcaacttgagcatg

SEQ ID NO: 322430 - DNA, 120 bp, Artificial Sequence
  ENSG00000135821_25 (sequence is synthesized)
ttactgacagagggggtattggggttattttctggtaggaatagcatgtcactaaagcaggccttttgatattaaattttttaaaaagcaaaattatagaagtttagattttaatcaaat

SEQ ID NO: 322431 - DNA, 120 bp, Artificial Sequence
  ENSG00000135821_26 (sequence is synthesized)
ttgtagggtttctaggtaatttttacagaattgcttgtttgcttcaactgtctcctacctctgctcttggaggagatggggacagggctggagtcaaaacacttgtaattttgtatcttg

SEQ ID NO: 322432 - DNA, 120 bp, Artificial Sequence
  ENSG00000135821_27 (sequence is synthesized)
atgtctttgttaagactgctgaagaattattttttttcttttataataaggaataaaccccacctttattccttcatttcatctaccattttctggttcttgtgttggctgtggcaggcc

SEQ ID NO: 322433 - DNA, 120 bp, Artificial Sequence
  ENSG00000135821_28 (sequence is synthesized)
agctgtggttttcttttgccatgacaacttctaattgccatgtacagtatgttcaaagtcaaataactcctcattgtaaacaaactgtgtaactgcccaaagcagcacttataaatcagc

SEQ ID NO: 322434 - DNA, 120 bp, Artificial Sequence
  ENSG00000135821_29 (sequence is synthesized)
ctaacataagatctctctgatgtgtttgtgattctttcaaatccctatgtgccattatatttctttatttcctaaaacaggcaaaataagctcaagtttatgtactctgagtttttaaaa

SEQ ID NO: 322435 - DNA, 120 bp, Artificial Sequence
  ENSG00000135821_30 (sequence is synthesized)
cactggagtgatgttgctgaccagccgtttcctgtacctctctaagttgggtatttgggacttaagggattaagtttttcacctagacttagttacacacaatcttggcatttcctagcc

SEQ ID NO: 322436 - DNA, 120 bp, Artificial Sequence
  ENSG00000135821_31 (sequence is synthesized)
tagaggtttgtagcagggtacaagccccactcctcccccttcctttgctcccctgagtttggttttggcttaccataacattgttttgaccattcctagcctaatacaatagcctaacat

SEQ ID NO: 322437 - DNA, 120 bp, Artificial Sequence
  ENSG00000135821_32 (sequence is synthesized)
aatgtaagattaactggctttacgatttctattctctgctctcagtgataagaaacaaatattagctaccctgctaccctggttgaagccttccaaggctggctatgccctaggcatggg

SEQ ID NO: 322438 - DNA, 120 bp, Artificial Sequence
  ENSG00000135821_33 (sequence is synthesized)
ctcatccttgggtgtatcttgccttgcaggaagaccagtggaccgattgtgattctcaaaagctctgtgttgtcacctgtgcccttgccccttgctcttatcttggtccgtgtatctggg

SEQ ID NO: 322439 - DNA, 120 bp, Artificial Sequence
  ENSG00000135821_34 (sequence is synthesized)
agttcttccaccttatcttggccaattcctaccttcgttcattcctcatgaggttgggtaaaagctccctccggctcccatgatgctgtgcatatacctagcaaaaagcaattattggac

SEQ ID NO: 322440 - DNA, 120 bp, Artificial Sequence
  ENSG00000135821_35 (sequence is synthesized)
acattggagtgcaatattattaatagcattaatactactaataatgtgggcaatagtgattgtttttaaaaggcagtatactcttaccagtgcgaggtagctggggcctgtgatagtttt

SEQ ID NO: 322441 - DNA, 120 bp, Artificial Sequence
  ENSG00000135821_36 (sequence is synthesized)
tagagataagttcttcaggcaactgtgtattttacactagtcaagtaatcctagatatccgtggtttttcttaagaaagttggctcgtaatatgatttaatattcaaagtagagtcatct

SEQ ID NO: 322442 - DNA, 120 bp, Artificial Sequence
  ENSG00000135821_37 (sequence is synthesized)
acctattagcttgctggcgtggtcctagtttatgcctgtttcagcatgattgttgagtaccctgtttcatccttagcattttcttgattttgttgttaaatgatgtatacccttatttcc

SEQ ID NO: 322443 - DNA, 120 bp, Artificial Sequence
  ENSG00000135821_38 (sequence is synthesized)
attgaatctgtgcttccacccccccaactgaagttgtcttccctttgcttggccacccttacagcctcttggatggtgtatcctacagtgtaagcactaaactgaagaggcagtgacctg

SEQ ID NO: 322444 - DNA, 120 bp, Artificial Sequence
  ENSG00000135821_39 (sequence is synthesized)
gcagagtcgagagtgggagaagagcggagcgtgtgagcagtactgcggcctcctctcctctcctaacctcgctctcgcggcctagctttacccgcccgcctgctcggcgaccaggtaagc

SEQ ID NO: 322445 - DNA, 120 bp, Artificial Sequence
  ENSG00000135821_40 (sequence is synthesized)
ccccggacggcccggtgtcacgcaagcgaggcgcgccgcccctgctaccccgcgaggcgcgccgcccagcctcttttttcggctgcctgcccctccagtcccagccctacgctgcggcct

SEQ ID NO: 322446 - DNA, 120 bp, Artificial Sequence
  ENSG00000135821_41 (sequence is synthesized)
ctccggcccatgcctgagatccggcatgagtgctcctcccgcgtgcttccgccgctggtggcttggacccgtcggggctggcgctggtggggcgcgcccttggccaggctctgggaaggg

SEQ ID NO: 322447 - DNA, 120 bp, Artificial Sequence
  ENSG00000135821_42 (sequence is synthesized)
cggggtgagttgttttgatcttcttttcactacttgcggccgaagcgccgcccctggaggccgttgggccggcctgcgccctggggctcgcagtggtttgtttgcgctgtggatggagtg

SEQ ID NO: 322448 - DNA, 120 bp, Artificial Sequence
  ENSG00000135821_43 (sequence is synthesized)
gcggtgcggtcccctgtggagcgcaaacaaggcgcttggttggcgcgggcgcctggctgccttcctcgtggtggggccttcggagcaatcgtcctggttctggcgatggttgagacgcct

SEQ ID NO: 322449 - DNA, 120 bp, Artificial Sequence
  ENSG00000135821_44 (sequence is synthesized)
cgattgcggcgtgtaacggtgagcgttgtttgggcggccggctcccgcctcggggtcccgggggccttccaatgtgaccgaacaatggagagcccgggcctcggcgcagtcagtggagaa

SEQ ID NO: 322450 - DNA, 120 bp, Artificial Sequence
  ENSG00000135821_45 (sequence is synthesized)
gccggtccgggcggaggcagcagcagcgcgcagtccctacggcctgcgcccccaccctcccccggaccccccaacccctcggcggcagggtatggccacctccgtgaggccctgagattc

SEQ ID NO: 322451 - DNA, 120 bp, Artificial Sequence
  ENSG00000135821_46 (sequence is synthesized)
ggacgggggcccgaggggcagggcgcccactttagggacatttcagtgggaaggggctgctctcaaagtggataattataactccctcgggggcgggaagcggggatcctcccccagccg

SEQ ID NO: 322452 - DNA, 120 bp, Artificial Sequence
  ENSG00000135821_47 (sequence is synthesized)
cctgcttgtatgctggagtcaagattgcggggactaatgccgaggtcatgcctgcccaggtaagtatagctccaatccatcaatgaagaagggtaggtaggtgtacataggacttttgct

SEQ ID NO: 322453 - DNA, 120 bp, Artificial Sequence
  ENSG00000135821_48 (sequence is synthesized)
ttaagcctgtgagctcagggatgcagaggcattgagttactaccaagggcctgatcttttctttagcaggcatctgtgttaattgtttcaaaaggtggtgatcagttttacagcctatta

SEQ ID NO: 322454 - DNA, 120 bp, Artificial Sequence
  ENSG00000135821_49 (sequence is synthesized)
taaaggagatttttgcctactataaaactaatccccctgaaagagtgagtaaacataactttttgtgtgttgacttccacaagggaaggagttggcacttacactctgacttttgattca

SEQ ID NO: 322455 - DNA, 120 bp, Artificial Sequence
  ENSG00000135821_50 (sequence is synthesized)
gtcgtccttcttgagccatttttgcaggggatcagtttggagtgggcgttaacaatgttattctttttttcttctccagaacaccttccaccatgaccacctcagcaagttcccacttaa

SEQ ID NO: 322456 - DNA, 120 bp, Artificial Sequence
  ENSG00000135821_51 (sequence is synthesized)
aagtgtgcatgatattggtggtgtaacatgttggagaggacagccgagaaattgggttgtaggttttttttttttgttttccgacagagtctctatctgttacccaggttggagtgcagt

SEQ ID NO: 322457 - DNA, 120 bp, Artificial Sequence
  ENSG00000135821_52 (sequence is synthesized)
ttttagtagagacgggagtttcatcgtgttggccaggctggtctcgaactttgtacctcaggtgatctgcccgcttcggtgggttgtagcttttagcgggagctaaagggttctgggatg

SEQ ID NO: 322458 - DNA, 120 bp, Artificial Sequence
  ENSG00000135821_53 (sequence is synthesized)
gaggtgggaagtaggatttggccggctgagtcttctagaggcaatattggggtgttggtcttccccaaggggaagggtggtgaggctgagggagaagcagttatgttttcagctgggcaa

SEQ ID NO: 322459 - DNA, 120 bp, Artificial Sequence
  ENSG00000135821_54 (sequence is synthesized)
acatggacggttgcccgtagaaactttgccactgtacttcagaacgttgccctagtcgttggaggagaacaatgtgttccctttctagccaccctggtccacggagggaggagggagaga

SEQ ID NO: 322460 - DNA, 120 bp, Artificial Sequence
  ENSG00000135821_55 (sequence is synthesized)
gagaatgtttcctcttcggctgttgtggcttgagagtttctcttctttcggaggttttgtggtagtggctggcagttattagtatgcctcatggcttttaaatttccagatctttttgat

SEQ ID NO: 322461 - DNA, 120 bp, Artificial Sequence
  ENSG00000135821_56 (sequence is synthesized)
ttagaagtggaaatttcctaattacttgacaagtcttgtagaattccataatgttgtgattcttgcccactatcttaagtgagactttgcatgagacctatggaaattatggcagcattc

SEQ ID NO: 322462 - DNA, 120 bp, Artificial Sequence
  ENSG00000135821_57 (sequence is synthesized)
cccttagaatctggcttgaatcagcttttgtgtaggaaactgctagccttctaaaaaaatatattgtaaccttgtttcatcctcaaatctaaatgtgtaatgagttttcttttggtgggg

SEQ ID NO: 322463 - DNA, 120 bp, Artificial Sequence
  ENSG00000135821_58 (sequence is synthesized)
aggggcggtgggtttgagttaagaccacagctaggatgaaagacaaagagaaaaacaaactgtggaagccaagcctgttctgtggctggattttacttatattggaagaagttctatgtt

SEQ ID NO: 322464 - DNA, 120 bp, Artificial Sequence
  ENSG00000135821_59 (sequence is synthesized)
ttgtaaatttgtgtattggttttgatttgtttcctctgatagtttagtatttggatagtttagtgttaacctcagctacactgaaggaatagaccttagtcctcacaagtataagttcta

SEQ ID NO: 322465 - DNA, 120 bp, Artificial Sequence
  ENSG00000135821_60 (sequence is synthesized)
cccctcctcaatctgtgaatgctgtgaaggggagggagaagacattctgaaatcagcattgggaagactaggcaatttcagcactattttaagaatctgagtgattcttttccctgaact

SEQ ID NO: 322466 - DNA, 120 bp, Artificial Sequence
  ENSG00000135821_61 (sequence is synthesized)
tctgctttgaggaagagataatatggcccatctttctatggtcttctctgttggttgcataaaatagcattggatttgtccagatctgtttgccggtcttggagtccccagtaacagcct

SEQ ID NO: 322467 - DNA, 120 bp, Artificial Sequence
  ENSG00000135821_62 (sequence is synthesized)
tcctgcctggaatgtaggccaggacaaatgtaaaccaatggacaaatgtttctcaaaaattatagaatggctccaagtgcctgagaaatgaagaataaatctgacaaccagaagcagctg

SEQ ID NO: 322468 - DNA, 120 bp, Artificial Sequence
  ENSG00000135821_63 (sequence is synthesized)
tcttgtgaatagagggttaagtgcctggcatttggtgcttgggaggtggccagaatgcagataaggtgaaagttgccctgttctaaatccactcccatgtgacttggttgtaactgagtt

SEQ ID NO: 322469 - DNA, 120 bp, Artificial Sequence
  ENSG00000135821_64 (sequence is synthesized)
tagttaaaactgaagtctttcagagtcttcctacagatgtacaattaacagcttctctcatttttctgactcggtgatcccaagaaggcctatactgggtcagttcataccatagtgcac

SEQ ID NO: 322470 - DNA, 120 bp, Artificial Sequence
  ENSG00000135821_65 (sequence is synthesized)
acctcagttgtatagaatccaaggactattctcccatcagcatcggtattcagcatctatgtctttagatccctgatggcgtattattgactcttttttctagagaccaatttgaggcac

SEQ ID NO: 322471 - DNA, 120 bp, Artificial Sequence
  ENSG00000135821_66 (sequence is synthesized)
gggccccagggtaagtctccttgggttagaggtgaaattcccagaagtgtctaactgtgcaggaatgccccttcccagggatgggaatgactttcagaatcaagaagcaaaataatacag

SEQ ID NO: 322472 - DNA, 120 bp, Artificial Sequence
  ENSG00000135821_67 (sequence is synthesized)
taaaggcgaaacagccctcacatcaccaaagtccaaaaatggatatgaatatataaagtaaggttttagggggaacgtttggccccactgaagctgtggtgaagaggaactcccctattg

SEQ ID NO: 322473 - DNA, 120 bp, Artificial Sequence
  ENSG00000135821_68 (sequence is synthesized)
cccgcacctgcagatgaaggcaaggatagtgattcaagagggcaaggcttaagggccttctgatctctgactttgggattctctggatttcttgactcttagtgttttgtcctgatgctt

SEQ ID NO: 322474 - DNA, 120 bp, Artificial Sequence
  ENSG00000135821_69 (sequence is synthesized)
cgggttggagtacaggtgagaagagaacaggtttaggagattctgagttggagtgagcagttagctttgttttaatggccaagcttctcgtttctagtgggaatttcagattggaccttg

SEQ ID NO: 322475 - DNA, 120 bp, Artificial Sequence
  ENSG00000135821_70 (sequence is synthesized)
gcaatctctcagcaaagtctcctttgcaggatgacttgcaaatatttgccaaagatgagtaaacttgacttctcagtctggacgtactttaggtgttgacacttgccttcacattctctc

SEQ ID NO: 322476 - DNA, 120 bp, Artificial Sequence
  ENSG00000135821_71 (sequence is synthesized)
tgacacttgccttcacattctctcattttgttcctatttgaaaaataccaaataatacttctgattcacagtgataaatatttgttataatttatataatatatattagtcatatatcat

SEQ ID NO: 322477 - DNA, 120 bp, Artificial Sequence
  ENSG00000135821_72 (sequence is synthesized)
tatttgtgacatatgtcatggtgacagggaaaagttgacaaattcatgcatttgaaaatcttttagaactaaattagtaacaatacaggcatgtggataagcttaatgcttatgaggggg

SEQ ID NO: 322478 - DNA, 120 bp, Artificial Sequence
  ENSG00000135821_73 (sequence is synthesized)
agaaagtttcaaatgattagtcttttcaacaaacagtaactttgtactgcttgtcgggcactgttctcaccactgagacacacaggtaagaagatgcagccactgccctcatgaagtatt

SEQ ID NO: 322479 - DNA, 120 bp, Artificial Sequence
  ENSG00000135823_0 (sequence is synthesized)
gattcggccagtggtgctgagcgagtgctggaccagcggccgtcctgtgcacctggcctgtgcgcgtgcccgctgctcggcttcacccagactaaggcgcgggcagctgcgggaacaggc

SEQ ID NO: 322480 - DNA, 120 bp, Artificial Sequence
  ENSG00000135823_1 (sequence is synthesized)
ggggtgggcggagggagaccgggaggcacgggcgccctgtgcgcggaggaggtgaaggcggccggggccgggacgccatgtccatggaggaccccttctttgtggtgaaaggagaggtac

SEQ ID NO: 322481 - DNA, 120 bp, Artificial Sequence
  ENSG00000135823_2 (sequence is synthesized)
agaaagcagtcaacactgcccagggattgtttcagagatggacagagctcctccaggacccctccacagcaacaagggaagaaatcgactggaccaccaacgagctgagaaataacctcc

SEQ ID NO: 322482 - DNA, 120 bp, Artificial Sequence
  ENSG00000135823_3 (sequence is synthesized)
ggagcatagagtgggatctagaggaccttgatgaaaccatcagcatagttgaagcaaatcctagaaaatttaaccttgatgcaactgaattgagtataagaaaagccttcattacaagta

SEQ ID NO: 322483 - DNA, 120 bp, Artificial Sequence
  ENSG00000135823_4 (sequence is synthesized)
ctcggcaagttgtcagggacatgaaagatcagatgtcaacttcatctgtgcaggcattagctgaaagaaaaaatagacaggcactgctgggagacagtggcagccagaactggagcactg

SEQ ID NO: 322484 - DNA, 120 bp, Artificial Sequence
  ENSG00000135823_5 (sequence is synthesized)
gaacaacagataaatatgggcgtctggaccgagagctccagagagccaattctcatttcattgaggagcagcaggcacagcagcagttgatcgtggaacagcaggatgagcagttggagc

SEQ ID NO: 322485 - DNA, 120 bp, Artificial Sequence
  ENSG00000135823_6 (sequence is synthesized)
tggtctctggcagcatcggggtgctgaagaacatgtcccagcgcatcggaggggagctggaggaacaggcagttatgttggaagatttctctcacgaattggagagcactcagtcccggc

SEQ ID NO: 322486 - DNA, 120 bp, Artificial Sequence
  ENSG00000135823_7 (sequence is synthesized)
tggacaatgtgatgaagaaacttgcaaaagtatctcatatgaccagtgatcggcgccaatggtgtgccatagccatcctctttgcagtcctgttggttgtgctcatcctcttcttagtgc

SEQ ID NO: 322487 - DNA, 120 bp, Artificial Sequence
  ENSG00000135823_8 (sequence is synthesized)
tgtgacggcggggcctctgggtgcgagttcctcctgcatatgaaccgaggggaggaggagaagctgagcacgtgtgacattgccgtctactcacattcctatcctggaaacatactgctg

SEQ ID NO: 322488 - DNA, 120 bp, Artificial Sequence
  ENSG00000135823_9 (sequence is synthesized)
cactgacttttctccgtgtgaccccacaattgacatggctcctccatcccagcgctggaagggccagtgggaagaggaaatagatgtctgcactcctggctgcagctggacaacagaagc

SEQ ID NO: 322489 - DNA, 120 bp, Artificial Sequence
  ENSG00000135823_10 (sequence is synthesized)
cccatgccgcctgtccagttcggaggagaactagctgctgccttgccttccgggacctcgtttgctgaggagggacttacagactccactggtgttttgctgttgctcattccatgcatc

SEQ ID NO: 322490 - DNA, 120 bp, Artificial Sequence
  ENSG00000135823_11 (sequence is synthesized)
tttggcagctcttttcttctgctcagacccttccccgtgctcagacagtgcaccgctgtcccatctaaagaaacctgtcaggaatacgagcttctgggtatgtttcgtttcccattgctg

SEQ ID NO: 322491 - DNA, 120 bp, Artificial Sequence
  ENSG00000135823_12 (sequence is synthesized)
tagcatttcttatcccctgagagctgatgattattgaggacagaaggctcagaaacagtttgtgacagaaaatgcagtgtttcatttttcagggataaatgctaagataaaattgctttt

SEQ ID NO: 322492 - DNA, 120 bp, Artificial Sequence
  ENSG00000135823_13 (sequence is synthesized)
ccaggtcatttttttttgtggtaagaataactaatggaaaataatgaaacaccctggggtttgggggtgctaacaacttgtggctttaactgacaggagcaattaaaaagagcaagaggg

SEQ ID NO: 322493 - DNA, 120 bp, Artificial Sequence
  ENSG00000135823_14 (sequence is synthesized)
ttctgcattggcatagcttagggaagggttaatgatgtcgccacaggtcagctcctgatccttgccgacttgatgttgctgtaccagggcttcctccccagaggtgcagcttgcgttttg

SEQ ID NO: 322494 - DNA, 120 bp, Artificial Sequence
  ENSG00000135823_15 (sequence is synthesized)
agggtgattgctacatatgttgttgctaaacagctcagtaacacacttgaatgaatttggataccagattgtcctcattacagttcttttactcttagggcactctacactgggggttgg

SEQ ID NO: 322495 - DNA, 120 bp, Artificial Sequence
  ENSG00000135823_16 (sequence is synthesized)
ggttgggagtggttagtacatttattacatttattaagaaacgtaatgacataaaaggttagctctgggccagacttctcttactctgtgggtaatggcaaggatgtgtaggtaaacttg

SEQ ID NO: 322496 - DNA, 120 bp, Artificial Sequence
  ENSG00000135823_17 (sequence is synthesized)
gttcttttttttccctaagatgacagcttgattttatcatctgcagtcaaataactgagccaatccaaatttaaatgatagatgctttaattgagtttaagtagctgaaactgctgagac

SEQ ID NO: 322497 - DNA, 120 bp, Artificial Sequence
  ENSG00000135823_18 (sequence is synthesized)
actaaactttaaccttctgatgactttttaaaatgcctcaaatgtgcacatgtatataggatatttttataacttccctgatgaataatctgatattaaagtagtatttggacccagagc

SEQ ID NO: 322498 - DNA, 120 bp, Artificial Sequence
  ENSG00000135823_19 (sequence is synthesized)
cagaactcggtggtggaggctgctggtctctcctcaccaccttcttttgcacttggaaagaacagcaacatctggatagagttctagctttgacttctcatttccttgtctttttgggtg

SEQ ID NO: 322499 - DNA, 120 bp, Artificial Sequence
  ENSG00000135823_20 (sequence is synthesized)
cacactttttttttaaacctttttgttttgttttgtttgtatttcatgtggttttatttgggggttttggttttttcacccttttttgtgatttgcaatgatgtgcttgcccagctaact

SEQ ID NO: 322500 - DNA, 120 bp, Artificial Sequence
  ENSG00000135823_21 (sequence is synthesized)
tttgaattgcactttttaataaatattcttaacaatttttgaagaaggatattttatctcatttgagatcatggtaggttaagaaaatatgcctgttgatgaaagctaaaagcaaattta

SEQ ID NO: 322501 - DNA, 120 bp, Artificial Sequence
  ENSG00000135823_22 (sequence is synthesized)
tgaaactaaaagggtgattgacatccatgtttacactccgctctaatgtttgatatataaataagttattttcaaattaggaaaaaacagtgagtattacaaagggcttcagatgtttag

SEQ ID NO: 322502 - DNA, 120 bp, Artificial Sequence
  ENSG00000135823_23 (sequence is synthesized)
agtactaggttatttatgttttacaaagtttgaatcttctataaactaagaaaggggatgatccttagatttgcattaaaatatagaagtcttttaaagtaaatgtgaaccttgtctaag

SEQ ID NO: 322503 - DNA, 120 bp, Artificial Sequence
  ENSG00000135823_24 (sequence is synthesized)
tactgtaatccacacaacacattataagaagcaaaccagcatcttaaggaattataaaattaccctatttaaaagccatgctattgttctgctattaccagatttattgtgccacacaaa

SEQ ID NO: 322504 - DNA, 120 bp, Artificial Sequence
  ENSG00000135823_25 (sequence is synthesized)
aggatcatgtgtgtcagcaggggccgtttggaacaaacctagtcattaatgagtaagatactcctgttagttcagggaccaagttttatgacccagaggcttaatgatgtttggatatat

SEQ ID NO: 322505 - DNA, 120 bp, Artificial Sequence
  ENSG00000135823_26 (sequence is synthesized)
ttcaaatcggcgtgcttacctcactgatttaaattattttctaaatagtggccattgtagacctgactcaggctgaagctaaatagagaacaatttagaaagttaactaacaatacagtg

SEQ ID NO: 322506 - DNA, 120 bp, Artificial Sequence
  ENSG00000135823_27 (sequence is synthesized)
cattctacccgtagggccaccatgcccttctgcccctggctgatttgatcctgtgtctgatcccattgcaccctgactgggcagtccctacagaaccagtgttaatttgaagggcctcca

SEQ ID NO: 322507 - DNA, 120 bp, Artificial Sequence
  ENSG00000135823_28 (sequence is synthesized)
ctcaggctccaaatgtggcagccaaagagaacaatccagggaacctacatttatttttaaggacaaatatttcctcctcagtggtcctaatgttcagggctttagagggaacccaggtgg

SEQ ID NO: 322508 - DNA, 120 bp, Artificial Sequence
  ENSG00000135823_29 (sequence is synthesized)
tctcttcaccctgtgtcctagaatgggagagtaagtagacagtggtgataaccccacactgcttataagtgcatctttatagtatttggggctttcctacccctttagccttctgtacct

SEQ ID NO: 322509 - DNA, 120 bp, Artificial Sequence
  ENSG00000135823_30 (sequence is synthesized)
agtaccatattccagttttaaagaactggcagaatgtgatggataacagaggaagagctcaatttatgtttattggaagaacattttacttaaatgatttgaggggtgggagggagtgaa

SEQ ID NO: 322510 - DNA, 120 bp, Artificial Sequence
  ENSG00000135823_31 (sequence is synthesized)
ctactgagtttgccagagtgaaaatccatctgaaaaactcagctacctttagtttttagtcctcatttttggtcttgtctctgcggactgtgaagaatcacaatgctctatatgccctgg

SEQ ID NO: 322511 - DNA, 120 bp, Artificial Sequence
  ENSG00000135823_32 (sequence is synthesized)
actgtgtggcaaatgcaggttgcagcgtgtgtgttacatgaggatcttccacaatttcagaatgcacgccagagctgaagggggaaacttggtaacttgcccattattctctgcttttag

SEQ ID NO: 322512 - DNA, 120 bp, Artificial Sequence
  ENSG00000135823_33 (sequence is synthesized)
ccagagttaaacagactgatgggtctggtagccaacaacttggcaacttccactccttctcacctcgtgagattaagggctgtgaaaagaaatctagtctaactccaacagaaatctgtc

SEQ ID NO: 322513 - DNA, 120 bp, Artificial Sequence
  ENSG00000135823_34 (sequence is synthesized)
tctgttaagtgttttaccttctgtaagtagagatggtagagccaagatttttcttttggtaatttccctgtctataaagtgagaccaaagggatatctgttccctgttacctttttggag

SEQ ID NO: 322514 - DNA, 120 bp, Artificial Sequence
  ENSG00000135823_35 (sequence is synthesized)
aattcataacatttgaagatcaaaaaattgaatgataaatatgaatggcttttcaattctgtggactttgtaccatttggcttcaccttgtactgcaagatgaatttgtaaacaaaacaa

SEQ ID NO: 322515 - DNA, 120 bp, Artificial Sequence
  ENSG00000135823_36 (sequence is synthesized)
aattggactgtctggaaagctaaagttctgaaatatggaatgtactgcctctaatttttctttgtcttcctctcactggcatttttttctctcccaggtttcttaagaataatgtttttt

SEQ ID NO: 322516 - DNA, 120 bp, Artificial Sequence
  ENSG00000135823_37 (sequence is synthesized)
aaaggaggctttttgcccatcaagaataaaaagaaataaaaccaaagggttaccggacttaagcccccgcagtcactgtgcgccatccctgagcaaagtccgcccctgaggacagtgccc

SEQ ID NO: 322517 - DNA, 120 bp, Artificial Sequence
  ENSG00000135823_38 (sequence is synthesized)
ctgccccagtgacaggccttactcctcccagggcctttgcttctaatagggggtggtctttcttttctttctctcctttttttttttttgattaaaaaataaaaccaaaccagaatttgc

SEQ ID NO: 322518 - DNA, 120 bp, Artificial Sequence
  ENSG00000135823_39 (sequence is synthesized)
tgaaagcaggtacctttcagtagctccgatcagagtaactcagcttagagatactgttactcaggacaacagtatgtacaaaagtctccggaaaaggaaaataaaacaacctgaaaagaa

SEQ ID NO: 322519 - DNA, 77 bp, Artificial Sequence
  ENSG00000135823_40 (sequence is synthesized)
cttgtttctcaggctggtctcgaactcttgagctcaggcaatccacctgactcagcctcccaaagtactaggattac

SEQ ID NO: 322520 - DNA, 120 bp, Artificial Sequence
  ENSG00000135823_41 (sequence is synthesized)
aggcatgagccaccgcgcccggcctattggttggttttgttatatgtaaagatgactgcttttgtgtaggttaaggggtagaaggaaaatgaaattgattatgtctgttgatgcctttga

SEQ ID NO: 322521 - DNA, 120 bp, Artificial Sequence
  ENSG00000135823_42 (sequence is synthesized)
gattatgtctgttgatgcctttgatatgtagctgtattaataaaagcaagctaatgataatgtgtctggggatttgaggagcatgtacccattgaaactattgattcttaaatattgtgt

SEQ ID NO: 322522 - DNA, 120 bp, Artificial Sequence
  ENSG00000135823_43 (sequence is synthesized)
tttatgtatacatgtagtttatatgttcttttgttctttacattagtatgtctgcttaaccagttgtctacttaaattgctattaaacccaggaaattttttttctatagaaagtgagaa

SEQ ID NO: 322523 - DNA, 120 bp, Artificial Sequence
  ENSG00000135823_44 (sequence is synthesized)
gaatgcaacacaactaaaagtaaatatttgtcagtcagtagttgtccttgaggtaacttattgccacagggaatcctttcgtttgtccttgaagagagaggaaagactgcatagtttccc

SEQ ID NO: 322524 - DNA, 120 bp, Artificial Sequence
  ENSG00000135823_45 (sequence is synthesized)
cacatccagagatttgccagactctcttgtatttaagctgtggcagtctgttgtggattgagaccttgatcttggcaatgggcttcctcctcccaaacatccccatgtctcaatggtcat

SEQ ID NO: 322525 - DNA, 120 bp, Artificial Sequence
  ENSG00000135823_46 (sequence is synthesized)
ctgcacgtgtgctttcaaccattgtctgctccattattggacgtcagccaaccagagtaaatctctcttggtggtttcaagccccgctgactgttcacaagttggatcagcaggagatat

SEQ ID NO: 322526 - DNA, 120 bp, Artificial Sequence
  ENSG00000135823_47 (sequence is synthesized)
cagtagcttaacaatccagccttttgagcagtgtgttctcagaggcaacggtctggtcctttgatttctgggctttgcttctgaatgtgaattgtcccaagttggcaaagaaactagcag

SEQ ID NO: 322527 - DNA, 79 bp, Artificial Sequence
  ENSG00000135823_48 (sequence is synthesized)
gagagagagagatatatgccctggtcacgtgagcggggtgcggaagtcgtgtttcaggcggcgttcgtgattggccgcg

SEQ ID NO: 322528 - DNA, 120 bp, Artificial Sequence
  ENSG00000135823_49 (sequence is synthesized)
gcggaagtcgtgtttcaggcggcgttcgtgattggccgcggccgagggtcccgggggtggggtcaggccctccgacgcttcgggaggagccgggactggaggctgccgagggggccggcg

SEQ ID NO: 322529 - DNA, 120 bp, Artificial Sequence
  ENSG00000135823_50 (sequence is synthesized)
cagcatcggggtgctgaagaacatgtcccagcgcatcggaggggagctggaggaacaggcagtattagcctccccaaaagaagcaattctacttcgtaaattttactacaggctttaggt

SEQ ID NO: 322530 - DNA, 120 bp, Artificial Sequence
  ENSG00000135823_51 (sequence is synthesized)
tgaatgggaatatgaaacagagaagcctctgtaacctgtgggaatttttgttccagagaggataggacatgagctgactttatcatcccatgactctcctgctatattgaacagacacgt

SEQ ID NO: 322531 - DNA, 120 bp, Artificial Sequence
  ENSG00000135823_52 (sequence is synthesized)
tttgctttgaatcttaaattattgtaactttgttttttttttttaaaaaaaacttacaaatttaacgccagttaataaaaactctttcctctcagaaaaataaataaaaacaaaacataa

SEQ ID NO: 322532 - DNA, 120 bp, Artificial Sequence
  ENSG00000135824_0 (sequence is synthesized)
gggaggtgtgttgtgcatgcctgtgtgtgtatatgtgtgtgtgtgcccctatgtgttcatgcacacatgcccttcactcgccgaggatttgactgctaaaagaaagatctactttttccc

SEQ ID NO: 322533 - DNA, 120 bp, Artificial Sequence
  ENSG00000135824_1 (sequence is synthesized)
cagaacaccttaacccgaagcctctctgaccatccagttggcaaagaccctcaggccatgaggactggccaaagacagtgagaggacgtgcaagggtaaattcctgagccccgcagtctt

SEQ ID NO: 322534 - DNA, 120 bp, Artificial Sequence
  ENSG00000135824_2 (sequence is synthesized)
atttcctgccctgacgtccctgcataccagcccaagggttaaccgtaagctgatgcctgtatggcggccttactgatgccacgcaggaacaaagggatgaggactcgactgggatgcctg

SEQ ID NO: 322535 - DNA, 120 bp, Artificial Sequence
  ENSG00000135824_3 (sequence is synthesized)
cacaagtcagactcgtgtagtgatttcacagctattcttccagacaaacccaaccgcgctctcaagagattatcgacagaagaagctacgaggtgggcagattcctttgatgtgcttctc

SEQ ID NO: 322536 - DNA, 120 bp, Artificial Sequence
  ENSG00000135824_4 (sequence is synthesized)
tctcataagtatggggtggctgcattccgtgccttcttgaagacggagttcagtgaggagaacctggaattctggttggcctgtgaggagttcaagaagaccaggtcaactgcaaaactg

SEQ ID NO: 322537 - DNA, 120 bp, Artificial Sequence
  ENSG00000135824_5 (sequence is synthesized)
gtctctaaggcccataggatctttgaggagtttgtggatgtgcaggctccacgggaggtaaacattgacttccagacccgagaagccacgaggaagaacctgcaggagccatccctgact

SEQ ID NO: 322538 - DNA, 120 bp, Artificial Sequence
  ENSG00000135824_6 (sequence is synthesized)
tgctttgaccaagcccaaggaaaagtacacagcctcatggagaaagactcttaccccaggttcctgaggtccaaaatgtacttagatctgctgtcccaaagccagaggaggctcagttag

SEQ ID NO: 322539 - DNA, 120 bp, Artificial Sequence
  ENSG00000135824_7 (sequence is synthesized)
ctttcccctccacttgctgccaagatcatattctaatgtgaaatgtcataggtgttcaaaagcggtggcattgggggtgggaggctgggggtgaggagggaatgaagggccattccaaag

SEQ ID NO: 322540 - DNA, 120 bp, Artificial Sequence
  ENSG00000135824_8 (sequence is synthesized)
tatgacccagctgccggagcttggactctattccatttacccatgtttgtgttttggttagtggtagcgccttgccgctgtcacccttttctgggtcagcaacttgcccttcatataatg

SEQ ID NO: 322541 - DNA, 120 bp, Artificial Sequence
  ENSG00000135824_9 (sequence is synthesized)
ccttgggtcacctctgctgagagggcagatttgctgtgctaggctaatctgtaaataatgcaaatgcaattcccaccacctccacaccctcctcggttaggattcctgactctccacttg

SEQ ID NO: 322542 - DNA, 120 bp, Artificial Sequence
  ENSG00000135824_10 (sequence is synthesized)
ttgtaaatccctgggaggaatagctgaaagacttgggctcaactctgtgatttgtagtggccagctctgctcactgggatctcacagcttaggagagaggtttctgtggaattccaggtt

SEQ ID NO: 322543 - DNA, 120 bp, Artificial Sequence
  ENSG00000135824_11 (sequence is synthesized)
tctagttctgtcattgacaggtgacctctcagagaaggagtgaaatccatggagttgtttgtttcttccatttccattggaccagtgtgaaaaactgtgattacttcccatcttggccta

SEQ ID NO: 322544 - DNA, 120 bp, Artificial Sequence
  ENSG00000135824_12 (sequence is synthesized)
gtgatttgtttctggatcaaagaagttttggcatcactattagtatatgtatcctggattttagaaatgtaatttccattcttttcctctatctggtcttggaacccattcaccagctta

SEQ ID NO: 322545 - DNA, 120 bp, Artificial Sequence
  ENSG00000135824_13 (sequence is synthesized)
ttttctccagttgttcggggatacaagaggactctggtttttaggacagcattttcataaatagagaacttaaaataaattgtttttgttgttgtgctcttgtatttttccaagcctggg

SEQ ID NO: 322546 - DNA, 120 bp, Artificial Sequence
  ENSG00000135824_14 (sequence is synthesized)
ctttacgctccccactcccggtgcagcagccaaccttcagccagcagcggggctcattagaagagggtcccctggacacttgatttttagctcactggtgactggaaagagttaatacct

SEQ ID NO: 322547 - DNA, 120 bp, Artificial Sequence
  ENSG00000135824_15 (sequence is synthesized)
aaattcacaagactaccctaaccttacatttccagaaagagtcttgggtgatgttcttcatgacttctgaagtggaactgccattaagaaagatacagcttgcaaatcttcctcaattct

SEQ ID NO: 322548 - DNA, 120 bp, Artificial Sequence
  ENSG00000135824_16 (sequence is synthesized)
acgaagaacttttccagaagtcaagagacgagggcaagtagcaccagtagacttctattcaaaggggtaccatgtaacctgtctgttgctcagtgtcttctctgccctcacctctctgca

SEQ ID NO: 322549 - DNA, 120 bp, Artificial Sequence
  ENSG00000135824_17 (sequence is synthesized)
gcatcatacatcactgatgtcttaggatgacagcttggcaaagggaggtgaattcctatagcatggagtgctcccatggtgcctaatactttccctgtatctccacctccccccttccat

SEQ ID NO: 322550 - DNA, 120 bp, Artificial Sequence
  ENSG00000135824_18 (sequence is synthesized)
gccggtcatgtaattatgatgggggagaatgggaatttaggctgaaactctttccagcatacttcctgggaaaatgctttcttagaaagatctctctcttggatactatgaagcaccttc

SEQ ID NO: 322551 - DNA, 120 bp, Artificial Sequence
  ENSG00000135824_19 (sequence is synthesized)
tttcttgatctttgaccttttggaattgagcatgaaataggaggtgtggctaagaagatcactgtgaacatctggacgtggacaaccttcctaaaatgctttcatggtaccctgcagctg

SEQ ID NO: 322552 - DNA, 120 bp, Artificial Sequence
  ENSG00000135824_20 (sequence is synthesized)
ctcttggaaatgtgtcaggcaattcttccttggaggatgagtgagcagcctggaacctactctagccacccaggaaaaagctgactttggcacaagactagtgcccaggagatgaacctt

SEQ ID NO: 322553 - DNA, 120 bp, Artificial Sequence
  ENSG00000135824_21 (sequence is synthesized)
tagcagagagaccggaaagtgaaagaggggcatgtaagaggctggtttccaggtggagaggataacagagtggagttactattggaataattcacgaccagtggatttggattcattgca

SEQ ID NO: 322554 - DNA, 120 bp, Artificial Sequence
  ENSG00000135824_22 (sequence is synthesized)
gatctacaaaacgttcagcttgactaagtggaacagcacatgattaggcataagctctggagtgcagatgattgagaactgggctgaaccattttccttttaaggggtgaggggcctttt

SEQ ID NO: 322555 - DNA, 120 bp, Artificial Sequence
  ENSG00000135824_23 (sequence is synthesized)
aacgttatgctggtggcgttctagtgcttgtgttcctctccagtaactttgagaatctcttccttttttagctatagctagaccaggccaagaaagcccttgagtcccactagtgctagg

SEQ ID NO: 322556 - DNA, 120 bp, Artificial Sequence
  ENSG00000135824_24 (sequence is synthesized)
gccactgcactgctacagcacattgttatctgtgagtgagggtgggtgtgactgtgtgaacctcaaggggagagaagaacacatgtctcctagccctcacagacaccgaaaagacctgtg

SEQ ID NO: 322557 - DNA, 120 bp, Artificial Sequence
  ENSG00000135824_25 (sequence is synthesized)
gaattttgtgtttgagaactccaaagcctcaaatgggtgttcctagttagatcaggtagtatcctcccaaccgtggttaaaaaaacaaatcattctttcttagataaagctgccagaatt

SEQ ID NO: 322558 - DNA, 120 bp, Artificial Sequence
  ENSG00000135824_26 (sequence is synthesized)
aatttaatgattaaattctctaacagggtattttaaacattgtttacatatgaaatgtgcatctgctgccaactctactgtcgaatatgaggtgcatataaattagaactgcacagagtt

SEQ ID NO: 322559 - DNA, 120 bp, Artificial Sequence
  ENSG00000135824_27 (sequence is synthesized)
ggcctcatagagaggcctagagttcttgccaactattgaggaaacgaaggctgcagatggtggtgtcatggcgccctggtgacttcctcccacaatggggaggtgtgaaagaccaagctt

SEQ ID NO: 322560 - DNA, 120 bp, Artificial Sequence
  ENSG00000135824_28 (sequence is synthesized)
ggggatcctgaattttgcagctaagcaagggtatgtgggcatgtgtccatgtgtagaggaacgtgatagctaaatttatggtactcctgtggagtgtctctgtgtgtttgtgtgtgtgtg

SEQ ID NO: 322561 - DNA, 120 bp, Artificial Sequence
  ENSG00000135824_29 (sequence is synthesized)
acaactgtgagcattagactagtacacggcagacatgatcttcccgtggggtggagctttcctcataccttgtatgccctgcttcccacaagaggcacagagctctccactctgatgcct

SEQ ID NO: 322562 - DNA, 120 bp, Artificial Sequence
  ENSG00000135824_30 (sequence is synthesized)
actttcaggcactctggtcgtgccaacccagattttggtctgtgatgaaacaaagagaaatgtttacaacatctagagcaatatccaagcatacctcatccctgagcttccatgtttccc

SEQ ID NO: 322563 - DNA, 120 bp, Artificial Sequence
  ENSG00000135824_31 (sequence is synthesized)
agtcctgccctctctcccattgcctcttccgcaagcccatgtccttgggtatcacttccatttatttcctgtcttccttggctcctcaagccgagcctgtgctgtggacttgccttctgg

SEQ ID NO: 322564 - DNA, 120 bp, Artificial Sequence
  ENSG00000135824_32 (sequence is synthesized)
acttgaggcttgctcagtcctgggcctatgcaggctccaggcaagccagggcagggcaagtccaggcaagtctaggcagagctgtgacttctagaattgctctccatccctgagtgatct

SEQ ID NO: 322565 - DNA, 120 bp, Artificial Sequence
  ENSG00000135824_33 (sequence is synthesized)
tgccccactggagggctaacttgtttgggggctggtgtgagattcgtcattgcccttggcaaactaaatagaatactgtcagtatcaaccattcatggccttgggcacctctggggtgag

SEQ ID NO: 322566 - DNA, 120 bp, Artificial Sequence
  ENSG00000135824_34 (sequence is synthesized)
gaagaatcctctgaggcagtccttctcattaaacttgagcatgcacaggaatcacctggaaagcctgtgacacgtgctaattcccaggtgcacacccagagatgctgatctgatagacct

SEQ ID NO: 322567 - DNA, 120 bp, Artificial Sequence
  ENSG00000135824_35 (sequence is synthesized)
gagatggggcccagaaatccacatttttaataagttcctagatggctagtggcctgtggacttggactcttagacagagtctcacgaccttggctgctccttagaatcacctagggagtt

SEQ ID NO: 322568 - DNA, 120 bp, Artificial Sequence
  ENSG00000135824_36 (sequence is synthesized)
tttaaaacccagatgtccaggtcccaccccagaacagccaaatcagaagcttttgttagagacccaggcatcagtcatttttaaagctccacaggtgattccaatgtgcagctgaactta

SEQ ID NO: 322569 - DNA, 120 bp, Artificial Sequence
  ENSG00000135824_37 (sequence is synthesized)
ggaagcattgagtctaaggagtgaggaggaacacagcgcgggggcgggggggctgggggaggggggagacacagctgtgtgggccaagggggctggtgtatctccacatgcaagcacgta

SEQ ID NO: 322570 - DNA, 120 bp, Artificial Sequence
  ENSG00000135824_38 (sequence is synthesized)
gataccgaggaacctggccagccctgcagcctgactcgggatggctgcctctatgccctctgcgtctgactttctcctttgagataaaggtgttttggcccaagctgagtgcattgctgg

SEQ ID NO: 322571 - DNA, 120 bp, Artificial Sequence
  ENSG00000135824_39 (sequence is synthesized)
gcagcggccatgccgaaggtggtagctgaagggacccttgatcgaaagacgctctgccatgctttctgagtcctgtctcctccaagcttgtctcctagactgtttcccctgtctgttttc

SEQ ID NO: 322572 - DNA, 120 bp, Artificial Sequence
  ENSG00000135824_40 (sequence is synthesized)
ctgcgcccttgtgtttggccatttttgcattaggctgtgtctctgtacccaaggccacgtgacaaggtagttggaacccccactcaagtggtgagtgaagagcgtcgtggtaataataat

SEQ ID NO: 322573 - DNA, 120 bp, Artificial Sequence
  ENSG00000135824_41 (sequence is synthesized)
agtagtaacacaacttccaaatttctcagtggagagtgtcacgtcctgggggtatcaagatctgtgaggcctttccaagccctcaccattccctctttggtcccacgttgggtgggcagc

SEQ ID NO: 322574 - DNA, 120 bp, Artificial Sequence
  ENSG00000135824_42 (sequence is synthesized)
tgggaaggtcctagttgattttaatctccggtgctttccccagaactgctgctctgaataaaccaaagctgtgaaagagtgttctgcgcaggctgcgggcccagcctctgggtgcaggcc

SEQ ID NO: 322575 - DNA, 120 bp, Artificial Sequence
  ENSG00000135824_43 (sequence is synthesized)
ctgggcacttgagctgagcagctcagctggctctgctgtgagggaaagccgtgaacttaactgtgctgagagctgggtgagggcaaaatggggaagactgaagaagaaggagcaggtggg

SEQ ID NO: 322576 - DNA, 120 bp, Artificial Sequence
  ENSG00000135824_44 (sequence is synthesized)
agagaccagccgctaacatggtgtctacttctccgtggatcagagaagggatgagtagcaaatgcagaggcagggtggtctcccagcaacaaggatgtccagagttctcctgaccctgtc

SEQ ID NO: 322577 - DNA, 120 bp, Artificial Sequence
  ENSG00000135824_45 (sequence is synthesized)
tgcacccacttccatgcaaggcagaggcatcacagttttccatcccaggccacccttcactcttccaagtgtcaggcctctttaaatctgcatccctttgggttagaagcaagagaggtg

SEQ ID NO: 322578 - DNA, 120 bp, Artificial Sequence
  ENSG00000135824_46 (sequence is synthesized)
gcaaagtctccctggcactgagagcctgtcccaccatgccactcggcatgagatggtggaggaagaagccaagagcagggatgccttcctgtccccgtggcctctcaggactccacaaga

SEQ ID NO: 322579 - DNA, 120 bp, Artificial Sequence
  ENSG00000135824_47 (sequence is synthesized)
tgctgtggaccaagatgagagatttcaggatggggccactggccttcctaggttgggctctgggtcctttcaataaactgttcctttcctgattcttactcccttctggtccttccactc

SEQ ID NO: 322580 - DNA, 120 bp, Artificial Sequence
  ENSG00000135824_48 (sequence is synthesized)
ccttccctctgccaggtatggaaaaggtggctgggctcggtgtgcgctccaaccccggtagcattagctgagtcacgcggcgagcacacaacagatttgtagcagctcatctgccatata

SEQ ID NO: 322581 - DNA, 120 bp, Artificial Sequence
  ENSG00000135824_49 (sequence is synthesized)
aaccgcttggctgatggagtcctcattgagttttttcattatcgtgtaaagtggaatcatgtcattcacctttactataaacaaggctgtgagaacataataaacagaacctgaacaagc

SEQ ID NO: 322582 - DNA, 120 bp, Artificial Sequence
  ENSG00000135824_50 (sequence is synthesized)
cccttttcatgagatgcagagcctggagaggagcggagccggcaggagcagcatgttgcagccgctattctaggggcgctgggtgaagtgggctgccctctgccaccctctcccaggtgc

SEQ ID NO: 322583 - DNA, 120 bp, Artificial Sequence
  ENSG00000135824_51 (sequence is synthesized)
caggaggaggtggctgactctatcactcagggcctcaccgaaccatgcccagctggggcccgcaccagccacaccttcccagctgcgctgcccaccgccaggtgatgctgacactgctgg

SEQ ID NO: 322584 - DNA, 120 bp, Artificial Sequence
  ENSG00000135828_0 (sequence is synthesized)
gacgcagcaggaggaaactgctcgggctgcaagcagtcttccaggctttgcggctgccaaaggaataattgagacgtctgagttgagcaggtggaatgtcagaagactgagaacattgtt

SEQ ID NO: 322585 - DNA, 120 bp, Artificial Sequence
  ENSG00000135828_1 (sequence is synthesized)
ccttcttcatactgctgctctgttgccagagaatcccaatttacactcaaagcttctttgattaagtgctaggagataaatttgcattttctcaaggaaaaggctaaaagtggtagcagg

SEQ ID NO: 322586 - DNA, 120 bp, Artificial Sequence
  ENSG00000135828_2 (sequence is synthesized)
tggcatttaccgtcatggagagcagggatcataacaacccccaggagggacccacgtcctccagcggtagaagggctgcagtggaagacaatcacttgctgattaaagctgttcaaaacg

SEQ ID NO: 322587 - DNA, 120 bp, Artificial Sequence
  ENSG00000135828_3 (sequence is synthesized)
aagatgttgacctggtccagcaattgctggaaggtggagccaatgttaatttccaggaagaggaagggggctggacacctctgcataacgcagtacaaatgagcagggaggacattgtgg

SEQ ID NO: 322588 - DNA, 120 bp, Artificial Sequence
  ENSG00000135828_4 (sequence is synthesized)
aacttctgcttcgtcatggtgctgaccctgttctgaggaagaagaatggggccacgccttttatcctcgcagcgattgcggggagcgtgaagctgctgaaacttttcctttctaaaggag

SEQ ID NO: 322589 - DNA, 120 bp, Artificial Sequence
  ENSG00000135828_5 (sequence is synthesized)
cagatgtcaatgagtgtgatttttatggcttcacagccttcatggaagccgctgtgtatggtaaggtcaaagccctaaaattcctttataagagaggagcaaatgtgaatttgaggcgaa

SEQ ID NO: 322590 - DNA, 120 bp, Artificial Sequence
  ENSG00000135828_6 (sequence is synthesized)
agacaaaggaggatcaagagcggctgaggaaaggaggggccacagctctcatggacgctgctgaaaaaggacacgtagaggtcttgaagattctccttgatgagatgggggcagatgtaa

SEQ ID NO: 322591 - DNA, 120 bp, Artificial Sequence
  ENSG00000135828_7 (sequence is synthesized)
acgcctgtgacaatatgggcagaaatgccttgatccatgctctcctgagctctgacgatagtgatgtggaggctattacgcatctgctgctggaccatggggctgatgtcaatgtgaggg

SEQ ID NO: 322592 - DNA, 120 bp, Artificial Sequence
  ENSG00000135828_8 (sequence is synthesized)
gagaaagagggaagactcccctgatcctggcagtggagaagaagcacttgggtttggtgcagaggcttctggagcaagagcacatagagattaatgacacagacagtgatggcaaaacag

SEQ ID NO: 322593 - DNA, 120 bp, Artificial Sequence
  ENSG00000135828_9 (sequence is synthesized)
cactgctgcttgctgttgaactcaaactgaagaaaatcgccgagttgctgtgcaaacgtggagccagtacagattgtggggatcttgttatgacagcgaggcggaattatgaccattccc

SEQ ID NO: 322594 - DNA, 120 bp, Artificial Sequence
  ENSG00000135828_10 (sequence is synthesized)
ttgtgaaggttcttctctctcatggagccaaagaagattttcaccctcctgctgaagactggaagcctcagagctcacactggggggcagccctgaaggatctccacagaatataccgcc

SEQ ID NO: 322595 - DNA, 120 bp, Artificial Sequence
  ENSG00000135828_11 (sequence is synthesized)
ctatgattggcaaactcaagttctttattgatgaaaaatacaaaattgctgatacttcagaaggaggcatctacctggggttctatgagaagcaagaagtagctgtgaagacgttctgtg

SEQ ID NO: 322596 - DNA, 120 bp, Artificial Sequence
  ENSG00000135828_12 (sequence is synthesized)
agggcagcccacgtgcacagcgggaagtctcttgtctgcaaagcagccgagagaacagtcacttggtgacattctatgggagtgagagccacaggggccacttgtttgtgtgtgtcaccc

SEQ ID NO: 322597 - DNA, 120 bp, Artificial Sequence
  ENSG00000135828_13 (sequence is synthesized)
tctgtgagcagactctggaagcgtgtttggatgtgcacagaggggaagatgtggaaaatgaggaagatgaatttgcccgaaatgtcctgtcatctatatttaaggctgttcaagaactac

SEQ ID NO: 322598 - DNA, 120 bp, Artificial Sequence
  ENSG00000135828_14 (sequence is synthesized)
acttgtcctgtggatacacccaccaggatctgcaaccacaaaacatcttaatagattctaagaaagctgctcacctggcagattttgataagagcatcaagtgggctggagatccacagg

SEQ ID NO: 322599 - DNA, 120 bp, Artificial Sequence
  ENSG00000135828_15 (sequence is synthesized)
aagtcaagagagatctagaggaccttggacggctggtcctctatgtggtaaagaagggaagcatctcatttgaggatctgaaagctcaaagtaatgaagaggtggttcaactttctccag

SEQ ID NO: 322600 - DNA, 120 bp, Artificial Sequence
  ENSG00000135828_16 (sequence is synthesized)
atgaggaaactaaggacctcattcatcgtctcttccatcctggggaacatgtgagggactgtctgagtgacctgctgggtcatcccttcttttggacttgggagagccgctataggacgc

SEQ ID NO: 322601 - DNA, 120 bp, Artificial Sequence
  ENSG00000135828_17 (sequence is synthesized)
aaatctgaaagtgagatcctcagactactgcaacctgggccttctgaacattccaaaagttttgacaagtggacgactaagattaatgaatgtgttatgaaaaaaatgaataagttttat

SEQ ID NO: 322602 - DNA, 120 bp, Artificial Sequence
  ENSG00000135828_18 (sequence is synthesized)
gaaaaaagaggcaatttctaccagaacactgtgggtgatctgctaaagttcatccggaatttgggagaacacattgatgaagaaaagcataaaaagatgaaattaaaaattggagaccct

SEQ ID NO: 322603 - DNA, 120 bp, Artificial Sequence
  ENSG00000135828_19 (sequence is synthesized)
tccctgtattttcagaagacatttccagatctggtgatctatgtctacacaaaactacagaacacagaatatagaaagcatttcccccaaacccacagtccaaacaagcctcagtgtgat

SEQ ID NO: 322604 - DNA, 120 bp, Artificial Sequence
  ENSG00000135828_20 (sequence is synthesized)
ggagctggtggggccagtgggttggccagccctgggtgctgatggactgatttgctggagttcagggaactacttattagctgtagagtccttggcaaatcacaacattctgggcctttt

SEQ ID NO: 322605 - DNA, 120 bp, Artificial Sequence
  ENSG00000135828_21 (sequence is synthesized)
aactcaccaggttgcttgtgagggatgagttgcatagctgatatgtcagtccctggcatcgtgtattccatatgtctataacaaaagcaatatatacccagactacactagtccataagc

SEQ ID NO: 322606 - DNA, 120 bp, Artificial Sequence
  ENSG00000135828_22 (sequence is synthesized)
tttacccactaactgggaggacattctgctaagattccttttgtcaattgcaccaaaagaatgagtgccttgacccctaatgctgcatatgttacaattctctcacttaattttcccaat

SEQ ID NO: 322607 - DNA, 120 bp, Artificial Sequence
  ENSG00000135828_23 (sequence is synthesized)
gatcttgcaaaacagggattatcatccccatttaagaactgaggaacctgagactcagagagtgtgagctactggcccaagattattcaatttatacctagcactttataaatttatgtg

SEQ ID NO: 322608 - DNA, 120 bp, Artificial Sequence
  ENSG00000135828_24 (sequence is synthesized)
gtgttattggtacctctcatttgggcaccttaaaacttaactatccttccagggctcttccagatgaggcccaaaacatatataggggttccaggaatctcattcattcattcagtattt

SEQ ID NO: 322609 - DNA, 120 bp, Artificial Sequence
  ENSG00000135828_25 (sequence is synthesized)
attgagcatctagtataagtctgggcactggatgcatgaattccactccttccagaaccaactgcattggttttccatgaccttaaggcagtagttctcaactggggggcaattttgcac

SEQ ID NO: 322610 - DNA, 120 bp, Artificial Sequence
  ENSG00000135828_26 (sequence is synthesized)
tgaagagagcatttggcagagtctgaagaagtttttggtgtcacagctttgtggggagcatgctatggcatttagtgggtaaagaccagggatgctgccaaacctgccttgcacaggaca

SEQ ID NO: 322611 - DNA, 120 bp, Artificial Sequence
  ENSG00000135828_27 (sequence is synthesized)
gcccctgcaacaaagaattatccagacaaaaatatcaatggtgctgaggttgagaaaacctgacttaaggggctgggatgcttttgaactagcttaaggcccaggactgtggagtgtgtg

SEQ ID NO: 322612 - DNA, 120 bp, Artificial Sequence
  ENSG00000135828_28 (sequence is synthesized)
gaccaccccacagaggagggactcagatttatttactcttgctggatctgtagtgatggagttccttctggtgtcagccccacaggaggctcccaggcctccctcacttcccatacccag

SEQ ID NO: 322613 - DNA, 120 bp, Artificial Sequence
  ENSG00000135828_29 (sequence is synthesized)
tctaggagctccttctggctcccaagcacccagagctttcctccgccttttagttttggttcctccactggaatgtaggctcctcacgggcgatggctgtcttttcttgactttgtatct

SEQ ID NO: 322614 - DNA, 120 bp, Artificial Sequence
  ENSG00000135828_30 (sequence is synthesized)
tcactgccaagcaaaaagtctgccaagtgggaatgtttaataaatattcattgaataatgaatgaaccatcttcgtacatgaataataatactgtcttacgtttttctggtgctttataa

SEQ ID NO: 322615 - DNA, 120 bp, Artificial Sequence
  ENSG00000135828_31 (sequence is synthesized)
tgtatacattacatctgagtattttattttatttaattttcaaaacaatcctttaaggtcaacattgttatccctattttgctgatgaggaaactaaggttagaaacattttgatttcct

SEQ ID NO: 322616 - DNA, 120 bp, Artificial Sequence
  ENSG00000135828_32 (sequence is synthesized)
ctaggacgtatagctaggaagtgttactatcttgatttgaacaaattttctggtgctaagtctgatgttctttccatgaatcattgtggtggttgagatggagctttgtaatgggaataa

SEQ ID NO: 322617 - DNA, 120 bp, Artificial Sequence
  ENSG00000135828_33 (sequence is synthesized)
aacagtaccttaggttctttctgaaaaggaggtatctagcaatggataaatagataccactgaatgaaattaaatgttgattaggaacaaatttaaggcttaaaaaatactttatgagca

SEQ ID NO: 322618 - DNA, 120 bp, Artificial Sequence
  ENSG00000135828_34 (sequence is synthesized)
gcaagattgctttaacttttaaaatgaagctttggttctctgatttgtaatgagcacctggacatgtcaattaaaatgcccatttgtgaagcttactcaataaaactttaaattgtctta

SEQ ID NO: 322619 - DNA, 120 bp, Artificial Sequence
  ENSG00000135828_35 (sequence is synthesized)
cattccaaaagttttgacaagtggacgactaagatgagcaagctgaggcacagacaaataatttttccaactacacagaaccagtaaggggtgcaccaggatttgaagctgggaaggatg

SEQ ID NO: 322620 - DNA, 120 bp, Artificial Sequence
  ENSG00000135828_36 (sequence is synthesized)
gctgcagaggccatgtgcttaagccacaccactacatgaagctgtgatggcatcaagtctaccaactcatttactcactgaggaaattgaggctcagagaccacactcaaattactcatg

SEQ ID NO: 322621 - DNA, 120 bp, Artificial Sequence
  ENSG00000135828_37 (sequence is synthesized)
ctggacagtcagagattggcagacctggaaagaggaacttgttcttttatttcccaatttattggttcttttccctaaattccatgggcttatattgaattttgatagtcttcaggtttt

SEQ ID NO: 322622 - DNA, 120 bp, Artificial Sequence
  ENSG00000135828_38 (sequence is synthesized)
aacttcaagttttaccttttaattcccattttacactttgtttttctgttgacttgcccattttcatggtcacacaattaattttgtcagcataggtctggagcccaagttttccagctt

SEQ ID NO: 322623 - DNA, 120 bp, Artificial Sequence
  ENSG00000135828_39 (sequence is synthesized)
gtatgactgtattggttcttgacttgccccatcctgccacacatacgtgcttggcgtttctcacgggtgttctgcacagagtgcacctggccagtctcagcagcatcctcactagcattg

SEQ ID NO: 322624 - DNA, 120 bp, Artificial Sequence
  ENSG00000135828_40 (sequence is synthesized)
ctctttcatcagttactcttcctaagtgacccactggattcttgactgttgcatcttgatctcgtagcccaaactctttctaaatatgagagccatctatggctctgtatctatgagggt

SEQ ID NO: 322625 - DNA, 120 bp, Artificial Sequence
  ENSG00000135828_41 (sequence is synthesized)
gacaagcacagacaaagaggatgacattactgtgatatgaaaggagttgccctgggacacctgcaggcaaggagaagcaagtaaccttgtttaaaatataaattttagagggtactagta

SEQ ID NO: 322626 - DNA, 120 bp, Artificial Sequence
  ENSG00000135828_42 (sequence is synthesized)
tagttttgttacatggatatattgtgtagtggtaaagttgggcttttagtgtaaccattacctgaataacgcacattgtacccattaagtaatttctcatccctctccctccaaccctcc

SEQ ID NO: 322627 - DNA, 120 bp, Artificial Sequence
  ENSG00000135828_43 (sequence is synthesized)
cacctttccaagtctccaattatattattccactctgtacatccatgtgtacacattattgagctcccacttataagagagaacatgtgatatttgactttctgtttgtaagtcatttca

SEQ ID NO: 322628 - DNA, 120 bp, Artificial Sequence
  ENSG00000135828_44 (sequence is synthesized)
tcatttcacttaaaataatggcctccagttccgtccatgtggccacaaaagacatgatttcattcttcttttttatggctgaaatggcccagacacattttctttatccaatcatctgtt

SEQ ID NO: 322629 - DNA, 120 bp, Artificial Sequence
  ENSG00000135828_45 (sequence is synthesized)
gatggacacttaggtggattccatatctttgctattgtgaatagtgctgtagtaaacatatgagtgccggtatctttttgatataagatttcttgggctgagtgcagtggctcacacctg

SEQ ID NO: 322630 - DNA, 120 bp, Artificial Sequence
  ENSG00000135828_46 (sequence is synthesized)
aatcccagctacttgggcggctgaggcatgagaattgcttcagcctgtgaagcagaggttacagctttattttggcagatactcagtacattcttttctctgcatcctcatcaacatctg

SEQ ID NO: 322631 - DNA, 120 bp, Artificial Sequence
  ENSG00000135828_47 (sequence is synthesized)
agatactcagtacattcttttctctgcatcctcatcaacatctgttactttttgactttttaatagtagcccctagtataagatgatatctcattggttttaatttgcatttctctgatg

SEQ ID NO: 322632 - DNA, 120 bp, Artificial Sequence
  ENSG00000135828_48 (sequence is synthesized)
gcaatttgtacgtcttcttttgagaaatgtctattcttgtcatttgcccactttttaatggtgttattattttttattgttaagttgtttgagttccttgtaaattctggatatcaatcc

SEQ ID NO: 322633 - DNA, 120 bp, Artificial Sequence
  ENSG00000135828_49 (sequence is synthesized)
tctgttggatgcatagtttgcaaatattttttttcccatgctgcaggttgtttgttcactctgtttatttcttttgctgcgcagaagtttttagtttaattaaaccccatctgtttcttt

SEQ ID NO: 322634 - DNA, 120 bp, Artificial Sequence
  ENSG00000135829_0 (sequence is synthesized)
gccatttcgccgattcctccatgcgagttgctgtgcgtttctctgttgtctcggtagaaggccagagtcacacacggtcctaagagctgggcaccaggaagcgaaggctgatctgaagaa

SEQ ID NO: 322635 - DNA, 120 bp, Artificial Sequence
  ENSG00000135829_1 (sequence is synthesized)
gacacttgaatcatgggtgacgttaaaaattttctgtatgcctggtgtggcaaaaggaagatgaccccatcctatgaaattagagcagtggggaacaaaaacaggcagaaattcatgtgt

SEQ ID NO: 322636 - DNA, 120 bp, Artificial Sequence
  ENSG00000135829_2 (sequence is synthesized)
gaggttcaggtggaaggttataattacactggcatgggaaattccaccaataaaaaagatgcacaaagcaatgctgccagagactttgttaactatttggttcgaataaatgaaataaag

SEQ ID NO: 322637 - DNA, 120 bp, Artificial Sequence
  ENSG00000135829_3 (sequence is synthesized)
agtgaagaagttccagcttttggggtagcatctccgcccccacttactgatactcctgacactacagcaaatgctgaaggagatttaccaacaaccatgggaggacctcttcctccacat

SEQ ID NO: 322638 - DNA, 120 bp, Artificial Sequence
  ENSG00000135829_4 (sequence is synthesized)
ctggctctcaaagcagaaaataattctgaggtaggggcctctggctatggtgttcctgggcccacctgggaccgaggagccaacttgaaggattactactcaagaaaggaagaacaagaa

SEQ ID NO: 322639 - DNA, 120 bp, Artificial Sequence
  ENSG00000135829_5 (sequence is synthesized)
gtgcaagcgactctagaatcagaagaagtggatttaaatgctgggcttcatggaaactggaccttggaaaatgctaaagctcgtctaaaccaatattttcagaaagaaaagatccaagga

SEQ ID NO: 322640 - DNA, 120 bp, Artificial Sequence
  ENSG00000135829_6 (sequence is synthesized)
gaatataagtacacccaagtgggtcctgatcacaacaggagctttattgcagaaatgaccatttatatcaagcagctgggcagaaggatttttgcacgagaacatggatcaaataagaaa

SEQ ID NO: 322641 - DNA, 120 bp, Artificial Sequence
  ENSG00000135829_7 (sequence is synthesized)
ttggcagcacagtcctgtgccctgtcacttgtcagacaactgtaccatcttggagtggttgaagcttactccggacttacaaagaagaaggaaggagagacagtggagccttacaaagta

SEQ ID NO: 322642 - DNA, 120 bp, Artificial Sequence
  ENSG00000135829_8 (sequence is synthesized)
aacctctctcaagatttagagcatcagctgcaaaacatcattcaagagctaaatcttgagattttgcccccgcctgaagatccttctgtgccagttgcactcaacattggcaaattggct

SEQ ID NO: 322643 - DNA, 120 bp, Artificial Sequence
  ENSG00000135829_9 (sequence is synthesized)
cagttcgaaccatctcagcgacaaaaccaagtgggtgtggttccttggtcacctccacaatccaactggaatccttggactagtagcaacattgatgaggggcctctggcttttgctact

SEQ ID NO: 322644 - DNA, 120 bp, Artificial Sequence
  ENSG00000135829_10 (sequence is synthesized)
ccagagcaaataagcatggacctcaagaatgaattgatgtaccagttggaacaggatcatgatttgcaagcaatcttgcaggagagagagttactgcctgtgaagaaatttgaaagtgag

SEQ ID NO: 322645 - DNA, 120 bp, Artificial Sequence
  ENSG00000135829_11 (sequence is synthesized)
attctggaagcaatcagccaaaattcagttgtcattattagaggggctactggatgtgggaaaaccacacaggttccccagttcattctagatgactttatccagaatgaccgagcagca

SEQ ID NO: 322646 - DNA, 120 bp, Artificial Sequence
  ENSG00000135829_12 (sequence is synthesized)
gagtgtaacatcgtagtaactcagcccagaagaatcagtgcggtttctgtggcagagcgagttgcatttgaaagaggagaagagcctggaaaaagctgtggctacagcgttcgatttgag

SEQ ID NO: 322647 - DNA, 120 bp, Artificial Sequence
  ENSG00000135829_13 (sequence is synthesized)
tctatacttcctcgtcctcatgccagtataatgttttgtactgtaggtgtgctcctgagaaaattagaagcaggcattcgaggaatcagtcatgtaattgtagatgaaatacatgaaaga

SEQ ID NO: 322648 - DNA, 120 bp, Artificial Sequence
  ENSG00000135829_14 (sequence is synthesized)
gatattaatactgacttccttttggtagtactgcgtgatgttgttcaggcttatcctgaagttcgcattgttcttatgtctgctactattgataccagcatgttttgtgaatatttcttc

SEQ ID NO: 322649 - DNA, 120 bp, Artificial Sequence
  ENSG00000135829_15 (sequence is synthesized)
aattgccccatcattgaagtttatgggaggacttacccagttcaagaatattttctggaagactgcattcagatgacccactttgttcctccaccaaaagacaaaaagaagaaggataag

SEQ ID NO: 322650 - DNA, 120 bp, Artificial Sequence
  ENSG00000135829_16 (sequence is synthesized)
gatgatgatggtggtgaggatgatgatgcaaattgcaacttgatctgtggtgatgaatatggtccagaaacaaggttgagcatgtctcaattgaacgaaaaggaaactccttttgaactc

SEQ ID NO: 322651 - DNA, 120 bp, Artificial Sequence
  ENSG00000135829_17 (sequence is synthesized)
atcgaggctctacttaagtacattgaaacccttaatgttcctggagctgtgttggtttttttgcctggctggaatctgatttatactatgcagaagcatttggaaatgaatccacatttt

SEQ ID NO: 322652 - DNA, 120 bp, Artificial Sequence
  ENSG00000135829_18 (sequence is synthesized)
acagcgcaaagtgtttgatccagtaccagttggagtaaccaaggttattttgtccacaaatattgctgaaacaagcattaccataaacgatgttgtttatgtcattgactcctgcaagca

SEQ ID NO: 322653 - DNA, 120 bp, Artificial Sequence
  ENSG00000135829_19 (sequence is synthesized)
gaaagtgaaactcttcactgctcacaacaatatgaccaactatgctaccgtatgggcatcaaaaacaaaccttgagcaacggaaagggcgagctggccgagtacggcctggattctgctt

SEQ ID NO: 322654 - DNA, 120 bp, Artificial Sequence
  ENSG00000135829_20 (sequence is synthesized)
tcacctgtgcagccgagctcgttttgagagacttgaaacccacatgacaccagagatgttccgaacaccattgcatgaaattgctcttagcataaaacttctgcgtctaggaggaattgg

SEQ ID NO: 322655 - DNA, 120 bp, Artificial Sequence
  ENSG00000135829_21 (sequence is synthesized)
ccaatttctggccaaagcaattgaacctccccctttggatgctgtgattgaagcagaacacactcttagagagcttgatgcattagatgccaatgatgagttgactcctttgggacgaat

SEQ ID NO: 322656 - DNA, 120 bp, Artificial Sequence
  ENSG00000135829_22 (sequence is synthesized)
cctggctaaactccccattgagcctcgttttggcaaaatgatgataatggggtgtattttctacgtgggagatgctatctgtaccattgctgctgctacctgctttccagagcctttcat

SEQ ID NO: 322657 - DNA, 120 bp, Artificial Sequence
  ENSG00000135829_23 (sequence is synthesized)
caatgaaggaaagcggctgggctatatccatcgaaattttgctggaaacagattttctgatcacgtagcccttttatcagtattccaagcctgggatgatgctagaatgggtggagaaga

SEQ ID NO: 322658 - DNA, 120 bp, Artificial Sequence
  ENSG00000135829_24 (sequence is synthesized)
agcagagatacgtttttgtgagcacaaaagacttaatatggctacactaagaatgacttgggaagccaaagttcagctcaaagagattttgattaattctgggtttccagaagattgttt

SEQ ID NO: 322659 - DNA, 120 bp, Artificial Sequence
  ENSG00000135829_25 (sequence is synthesized)
gttgacacaagtgtttactaacactggaccagataataatttggatgttgttatctccctcctggcctttggtgtgtaccccaatgtatgctatcataaggaaaagaggaagattctcac

SEQ ID NO: 322660 - DNA, 120 bp, Artificial Sequence
  ENSG00000135829_26 (sequence is synthesized)
cactgaagggcgtaatgcacttatccacaaatcatctgttaattgtccttttagtagccaagacatgaagtacccatctcccttctttgtatttggtgaaaagattcgaactcgagccat

SEQ ID NO: 322661 - DNA, 120 bp, Artificial Sequence
  ENSG00000135829_27 (sequence is synthesized)
ctctgctaaaggcatgactttagtcacccccctgcagttgcttctctttgcctccaagaaagtccaatctgatgggcagattgtgcttgtagatgactggattaaactgcaaatatctca

SEQ ID NO: 322662 - DNA, 120 bp, Artificial Sequence
  ENSG00000135829_28 (sequence is synthesized)
tgaagctgctgcctgtatcactggtctccgggcagccatggaggctttggttgttgaagtaaccaaacaacctgctatcatcagccagttggaccccgtaaatgaacgtatgctgaacat

SEQ ID NO: 322663 - DNA, 120 bp, Artificial Sequence
  ENSG00000135829_29 (sequence is synthesized)
gatccgtcagatctctagaccctcagctgctggtatcaaccttatgattggcagtacacggtatggagatggtccacgtcctcccaagatggcccgatacgacaatggaagcggatatag

SEQ ID NO: 322664 - DNA, 120 bp, Artificial Sequence
  ENSG00000135829_30 (sequence is synthesized)
aaggggaggttctagttacagtggtggaggctatggcggtggctatagcagtggaggctatggtagcggaggctatggtggcagcgccaactcctttcgggcaggatatggtgcaggtgt

SEQ ID NO: 322665 - DNA, 120 bp, Artificial Sequence
  ENSG00000135829_31 (sequence is synthesized)
tggtggaggctatagaggagtttcccgaggtggctttagaggcaactctggaggagactacagagggcctagtggaggctacagaggatctgggggattccagcgaggaggtggtagggg

SEQ ID NO: 322666 - DNA, 120 bp, Artificial Sequence
  ENSG00000135829_32 (sequence is synthesized)
ggcctatggaactggctactttggacagggaagaggaggtggcggctattaaaacttggttatgtcagttcctgtgtgtagacagtaaggaaaaaaaggcatgctatgtgttacgtgttt

SEQ ID NO: 322667 - DNA, 120 bp, Artificial Sequence
  ENSG00000135829_33 (sequence is synthesized)
tttccagtatgtttatttgccaccaaaaagtaaatgcattttcacccattctgtggttcattgtagtttaaggaaaccaagcatatagatgcattagtgattttgtttatattatgtaaa

SEQ ID NO: 322668 - DNA, 120 bp, Artificial Sequence
  ENSG00000135829_34 (sequence is synthesized)
atataacgatctcttaaaaataccacagtttgtattttttctttaaggagtaaagatttgcctttaaataacttggtattttcctggctttcgtttaatacaatagaaaataaagtatta

SEQ ID NO: 322669 - DNA, 120 bp, Artificial Sequence
  ENSG00000135829_35 (sequence is synthesized)
caccgaatacttgccgtgtagtttgtttgttgacctcgtatgttagaaaattttacaatgccagctacatctgttgattttaaatgtcagagaagttgtaccctgtttcaaaagtatact

SEQ ID NO: 322670 - DNA, 120 bp, Artificial Sequence
  ENSG00000135829_36 (sequence is synthesized)
aagtgatactacttgtaatagaataaatcatcttggaattgaattgttaccttttgaagtaaatactggcaagtgcacaagccacataaacctgaataaaacttttgacctagggttgaa

SEQ ID NO: 322671 - DNA, 120 bp, Artificial Sequence
  ENSG00000135829_37 (sequence is synthesized)
tgtttgatccagtaccagttggagtaaccaaggtaaatattaaacattagagtgatgggattggaagtgacgtagatactaaacaaatgttacaggctttcaaagagctacccaaaaaat

SEQ ID NO: 322672 - DNA, 120 bp, Artificial Sequence
  ENSG00000135829_38 (sequence is synthesized)
tgtaacccatctaaattgaggaagaaaaaaggagtcttctctttctgagcttagtagattgttgttcattaatcagttattgggtgatctttttaggacttctgtaattttcttgtcatt

SEQ ID NO: 322673 - DNA, 120 bp, Artificial Sequence
  ENSG00000135829_39 (sequence is synthesized)
tctggcctgcgtacgccggggcaccgcggcggctgagggaagggggtgcttcgcctgtggtggttgccgccggggcgccactggcctagggctcttcattcattcaagccacgaataact

SEQ ID NO: 322674 - DNA, 120 bp, Artificial Sequence
  ENSG00000135829_40 (sequence is synthesized)
cgatgtcattaatgaaagggtggatgttgttcccctgaaagccagtggcctttgacccctgaagccgctgtgcctgaaggagctttattgcagaaatgaccatttatatcaagcagctgg

SEQ ID NO: 322675 - DNA, 120 bp, Artificial Sequence
  ENSG00000135829_41 (sequence is synthesized)
taagtggtaaaccaaccatgaaatacctagagagcagactatttctgattctttctttgattaactaatttttgtaattatttaagattgagagagcattgtgcccttgaaattaaattt

SEQ ID NO: 322676 - DNA, 120 bp, Artificial Sequence
  ENSG00000135829_42 (sequence is synthesized)
tggccaacttgtaccccatgacttctctttataattccttagtctgtcctgacaatgaaaacaatttgctgccaacatccattttaggaaatgatgaatagcattctgtgccaatcccag

SEQ ID NO: 322677 - DNA, 120 bp, Artificial Sequence
  ENSG00000135829_43 (sequence is synthesized)
tcatttagtggcagctgtctctgtatgtaacattgaaggaatctgaggttacttgggggttcaaatggaccacacaggcatcactagatacagatatcctaaaagttacactaaactttg

SEQ ID NO: 322678 - DNA, 120 bp, Artificial Sequence
  ENSG00000135829_44 (sequence is synthesized)
gaatagagatgacttaaataattactttcttttgtgtatgtgccatattccatttaaatgctttgcatttgttaatttatttaatgtttaccaaaaaaactataaggtagataatggcat

SEQ ID NO: 322679 - DNA, 120 bp, Artificial Sequence
  ENSG00000135829_45 (sequence is synthesized)
gcaaagtttggccaaggcagttcagctgataagtggcaagtggatgttacattgccttttagtaggttgacaactaggagtttgcagtcagattgctgattcttacttgtgccattcatg

SEQ ID NO: 322680 - DNA, 120 bp, Artificial Sequence
  ENSG00000135829_46 (sequence is synthesized)
aatagacatcacaagtaggtatggctttaactacatagtggaaagcattcactacttagtggatatataatagttattgataatacacatgagtcttagaattaaccactttttcctatg

SEQ ID NO: 322681 - DNA, 120 bp, Artificial Sequence
  ENSG00000135829_47 (sequence is synthesized)
gggaaacctatttgtctgctccagtgttactaactggaaacttcttaccagttaacagaatcaaaaacaccttatttttaaactcctgtgttcttaaatctccaaaattattgtgcatct

SEQ ID NO: 322682 - DNA, 120 bp, Artificial Sequence
  ENSG00000135835_0 (sequence is synthesized)
gctcttcccctccacggcaaagccgtgaacggacagctgatgccacttccttccctgccagcgccctccctgcccgaccccgcttcccgtcctctcgccgggagggagtgcggcccgtgg

SEQ ID NO: 322683 - DNA, 80 bp, Artificial Sequence
  ENSG00000135835_1 (sequence is synthesized)
ggacccccagtcggccgcgccccgaggggcgaggcctgcgggccgcactccctccggccccggattcggggctggaagtc

SEQ ID NO: 322684 - DNA, 120 bp, Artificial Sequence
  ENSG00000135835_2 (sequence is synthesized)
ggccgcactccctccggccccggattcggggctggaagtccctccccgaacccagcagctggcctgggagggagaaggggctggagagggcctggcctctccgagggatggaggggacag

SEQ ID NO: 322685 - DNA, 120 bp, Artificial Sequence
  ENSG00000135835_3 (sequence is synthesized)
aggcggcggcggccaaacccgcgggcggcagcccccaagggcccaagacagggagtggaacagccagccccgtggaggggacctcagctgtggagtggagtggtcctgagccacagctgg

SEQ ID NO: 322686 - DNA, 120 bp, Artificial Sequence
  ENSG00000135835_4 (sequence is synthesized)
ataacggacaccccccaagaccctggccttgccctcaggaaaacagaacatccagcctgatggccccccagcctcccagggtatggggagtacagctccagggcccctctgtgctggaat

SEQ ID NO: 322687 - DNA, 120 bp, Artificial Sequence
  ENSG00000135835_5 (sequence is synthesized)
ccaaggtgagggctttgaaggagaagatgacagtggccaaacagggagtgagtccctgctctgcttcccaagagtggtcatcccccaagaaaccccaatgcagacgaggcaaggcaggga

SEQ ID NO: 322688 - DNA, 120 bp, Artificial Sequence
  ENSG00000135835_6 (sequence is synthesized)
gagccgggactccatcagaggggtctttcctgccaggtgctgtggtggctcctcgtacccaaaacctgcctgatgggcagctggacggcagcatcaatgaggagcaacccgccagggatg

SEQ ID NO: 322689 - DNA, 120 bp, Artificial Sequence
  ENSG00000135835_7 (sequence is synthesized)
gaggccccaggcttcccaggccgcctgcccctggacgtgagtactgcaacagggggagcccgtggcctccagaagccgaatggacacttcctgaccatgacagaggtccgctgctggggc

SEQ ID NO: 322690 - DNA, 120 bp, Artificial Sequence
  ENSG00000135835_8 (sequence is synthesized)
ccagctctttgcaacagagcccgatccatggagttactcccggacggcctgggggtcctggtcattgtaacaaaatcatccacattcccagcccaaggacaggaaggtcctacccttttc

SEQ ID NO: 322691 - DNA, 120 bp, Artificial Sequence
  ENSG00000135835_9 (sequence is synthesized)
cagatggcgtggtgacagaggcagatctggatagcacatccctgacctccgaggaggtctttgtccccaggacggccctgctgggtgagcgctggagagctggagacctggaggctctgg

SEQ ID NO: 322692 - DNA, 120 bp, Artificial Sequence
  ENSG00000135835_10 (sequence is synthesized)
gcgctgggagcagtgtcttgtccctgtctgatcgggtggagagaaaccgcctgttgctgcaggagatgctcaacgtttctgggcagagcccccgcaaggtgggaacccctgcctggactc

SEQ ID NO: 322693 - DNA, 120 bp, Artificial Sequence
  ENSG00000135835_11 (sequence is synthesized)
catcctgggacacagctgcaccagagcgaccagtgggggatgtggactgggcctcgggcacctccttgcaggactccggccagaacaggaccgttggtcccaacccggagcctgtgctga

SEQ ID NO: 322694 - DNA, 120 bp, Artificial Sequence
  ENSG00000135835_12 (sequence is synthesized)
gccccaggcatgaggaagccacgcatctgctgcagcgtgcccgcatgaaggccaggacccggcccctccgtgccagccatgacatcgtgcccaccattacccagggcagccgagatggcc

SEQ ID NO: 322695 - DNA, 120 bp, Artificial Sequence
  ENSG00000135835_13 (sequence is synthesized)
acagaagcccagcccgggaccccaggacgacccctgcctgcagagacagcctccagaacgggcacacgagcgattcctccagcggagagtccagcggtgggcacaggccgaggcggggcc

SEQ ID NO: 322696 - DNA, 120 bp, Artificial Sequence
  ENSG00000135835_14 (sequence is synthesized)
cctcgccgtcgcacgtgcgctttgaggatgagtccgcccgcgaagccgagttccgtcacctggagcggctgcagcagcgccagcgccaggtgctgagcaccgtgttgcaggccgcggacc

SEQ ID NO: 322697 - DNA, 120 bp, Artificial Sequence
  ENSG00000135835_15 (sequence is synthesized)
agggccccctgcgctccaagcccgacctcgccgactacatcaacggggctccccggctccgggacgcggggcaggggacattccacaggcttgtgggcagcctggaccgcaggggacacc

SEQ ID NO: 322698 - DNA, 120 bp, Artificial Sequence
  ENSG00000135835_16 (sequence is synthesized)
ccggcaccgggcagcgagaggaggtgccaggcctgcggcagctgcatcgacgacccgcgccccgcccaggggaaggcgccccccgtccccaggaccctccaggagctccaggctgcctgt

SEQ ID NO: 322699 - DNA, 120 bp, Artificial Sequence
  ENSG00000135835_17 (sequence is synthesized)
ctgcctgtgggatggagagggtgctgggtggcctgagctccccactccggctccttcctgcagagccccggctccacatggaatggatccgggaaacacacatcggagacaccgtgtgcc

SEQ ID NO: 322700 - DNA, 120 bp, Artificial Sequence
  ENSG00000135835_18 (sequence is synthesized)
ctgcggaggtggactctgccctggacagcacagacaactctgacaactgcaggaccgacagtgaggaggcggggacctctcaggctggctgggcgtgtgggcggacccaaggcagcagcc

SEQ ID NO: 322701 - DNA, 120 bp, Artificial Sequence
  ENSG00000135835_19 (sequence is synthesized)
cgcgactgcgactgcggggctccaggcctcgaggccacaggtggtccaagaaggctgaggcggagctcccttggggccttcaggcccagcaacacctgcctagggctgatgatgtggagg

SEQ ID NO: 322702 - DNA, 120 bp, Artificial Sequence
  ENSG00000135835_20 (sequence is synthesized)
tggaaaatgaggtgaaagagggcagaggacacacgcctgaaggaactctatttttgagagaagatgccaagcctcctgacctggagttgaagcgggtgtccctgggaccccagtggcagc

SEQ ID NO: 322703 - DNA, 120 bp, Artificial Sequence
  ENSG00000135835_21 (sequence is synthesized)
ctggaccagggctgggaagtcaccagcctcaccctttggattcccggactccatgcaggacagcctatgccaccaccgcccccatgacgcctgaatcatcggggccaggaggccaggccc

SEQ ID NO: 322704 - DNA, 120 bp, Artificial Sequence
  ENSG00000135835_22 (sequence is synthesized)
aggttacagaaagccacgagtccctggaaattgtctctccttcctccctgcaacagagccatgcagagccttctgccccacaccaagcctggcagccaacagcttccttgtgtcctgaag

SEQ ID NO: 322705 - DNA, 120 bp, Artificial Sequence
  ENSG00000135835_23 (sequence is synthesized)
gctgggcgccaacccctcccccttcgaggaaaaccacctcgccagtgtctcacaggaaggcagccctggctggactgctcaggctgggtgaccagacagagcctgtgggtatccctcggc

SEQ ID NO: 322706 - DNA, 120 bp, Artificial Sequence
  ENSG00000135835_24 (sequence is synthesized)
ctccttcaagaagcgcggttctcaggacctgtgagctgcccccatcacagacccagcccagccgccctcaggtcaggcacccactgctggccctgtccaccaacaactgcaacaacagcg

SEQ ID NO: 322707 - DNA, 120 bp, Artificial Sequence
  ENSG00000135835_25 (sequence is synthesized)
cacctcgggggctgcaggagccctacgggggagccgtccacgagggtagggtggagaggggcccctgcagccgggaaccggagccgcccctggagaacagcagagatggaggaccccagg

SEQ ID NO: 322708 - DNA, 120 bp, Artificial Sequence
  ENSG00000135835_26 (sequence is synthesized)
gctttcttggctcagcagatgttgccaccatcaactccacgggcatcaccctctccctgtcctcagaggagtcagagtccagcaaggaatcagagggaagcctgcagaggacagggtcag

SEQ ID NO: 322709 - DNA, 120 bp, Artificial Sequence
  ENSG00000135835_27 (sequence is synthesized)
gatctggaggacatgtgctgtcaagagcatcagcaggagctggcacaggacccggctccccctcggctgcccctttggaccagaacaagaaaaggagcagcagcatagcctccaccctgg

SEQ ID NO: 322710 - DNA, 120 bp, Artificial Sequence
  ENSG00000135835_28 (sequence is synthesized)
ggctgaaaaagctcttctcagccctgggccagagttcccggcccaagctgggcaagtcccgcagctacagtgtggagcagttgcagcccgccccgcctggcctgacgtcacagtccaggg

SEQ ID NO: 322711 - DNA, 120 bp, Artificial Sequence
  ENSG00000135835_29 (sequence is synthesized)
ccccatcgttacaatccctgcacccggtgtcaccctctcaccagcgtcggaaagctgcctcttttcagaacctccattctctgctgagcagcaaggggaaccggtccagcctctacctgg

SEQ ID NO: 322712 - DNA, 120 bp, Artificial Sequence
  ENSG00000135835_30 (sequence is synthesized)
tagcagggccaggggaccacagtgcagctggcaggccggccaagacttcaccacggcgtgccctcagtgtggaggacgtgggtgctcccagcctggctcgcaccgtgggccgcctggtgg

SEQ ID NO: 322713 - DNA, 120 bp, Artificial Sequence
  ENSG00000135835_31 (sequence is synthesized)
aggtgttcccagacggcaccagccagctgcagctgcagcgctccccagggggcactttcggcttctgcgtggcctctgggaatgggcgcccagactcaggtatgccctctcctcttcctc

SEQ ID NO: 322714 - DNA, 120 bp, Artificial Sequence
  ENSG00000135835_32 (sequence is synthesized)
agccccatggctggggcggccttagcaaacaaggcagggccttctggctgtggtcagaggcttttctggtctttggctgagccgtgcagctctgggaattcagaaagcctctgactacag

SEQ ID NO: 322715 - DNA, 120 bp, Artificial Sequence
  ENSG00000135835_33 (sequence is synthesized)
gactaggcttctcccctcaggggctctttctgaattgtccagggctctctaggagtctgcacctgcagagcctttgccctaggcaactgcagctgagagtgcgttggtggggagtgtgcg

SEQ ID NO: 322716 - DNA, 120 bp, Artificial Sequence
  ENSG00000135835_34 (sequence is synthesized)
gcgttggtggggagtgtgcgggagggggtagagttggcaggtttgactccactgtccccctgctgtctgatgacatcttgaaattagaagcttaggccgggcgcagtggctcatgcctgt

SEQ ID NO: 322717 - DNA, 120 bp, Artificial Sequence
  ENSG00000135835_35 (sequence is synthesized)
aaaaaaaaaaagaaataaataaattagaattttgaaggccatctttgcagaggagagccagagggaaactgtctgtgcctgctggttctcagcagtccctttgatgtggctgcgttgaaa

SEQ ID NO: 322718 - DNA, 120 bp, Artificial Sequence
  ENSG00000135835_36 (sequence is synthesized)
cggttcctttcctccggctgtggagtatgtctgggcacgtggagcatgcctgtctgtctctgcatcccgtccctccctcaggcctgtgcccgatgattatgttcagatgaatcctggctg

SEQ ID NO: 322719 - DNA, 120 bp, Artificial Sequence
  ENSG00000135835_37 (sequence is synthesized)
caggcctctgactggggtgtgctctgggtctcaattcaacccaggcaatggcagggagaagtcctggacatcattctgcactctgaccagttctcagttccaccccatccatgagtcttt

SEQ ID NO: 322720 - DNA, 120 bp, Artificial Sequence
  ENSG00000135835_38 (sequence is synthesized)
cagggcaacgtgacttgcaaaagcccacgcccaaggtctgtggtccagaatgcatctcaagggcccataaaagacattccccagaggatcagggaaggaagacacgtatgtgagggtggg

SEQ ID NO: 322721 - DNA, 120 bp, Artificial Sequence
  ENSG00000135835_39 (sequence is synthesized)
gtgctttgatctcctagctcaatgctgtttagcctggaaaaaagtctgcctgctaccacatttgcagaccacagcatgagttctcatgtctgttccatcattgtttcagcaaatatatac

SEQ ID NO: 322722 - DNA, 120 bp, Artificial Sequence
  ENSG00000135835_40 (sequence is synthesized)
taagcacctactatgtgttatagatacgggggatacagcagtaaatggaacagaccaaatccctatcctcatgaatatactacccagtgagcagttagattgtatctataaaatgtgtac

SEQ ID NO: 322723 - DNA, 120 bp, Artificial Sequence
  ENSG00000135835_41 (sequence is synthesized)
tcttgttatgtataatgtgctacgtatgtcagatggtgaaaagaaagttctgagaaacagacagataaagcaggtgtggcaggtgctggtatagacaggagtgtggggaggcttttctga

SEQ ID NO: 322724 - DNA, 120 bp, Artificial Sequence
  ENSG00000135835_42 (sequence is synthesized)
gaagatgacacttgagcagggccgtggatggggcgaggaaggggccccatgggtgtctggggaagagcattccggcagactgaacagcaagtgcggagccctggtggaggggcgagcctg

SEQ ID NO: 322725 - DNA, 120 bp, Artificial Sequence
  ENSG00000135835_43 (sequence is synthesized)
gcctgtgagaactgtgagggtcaggctggacactgcagagcaggcaacgggttgggaggagcagagtttggaaagatggggttgtgccactgtaaggggctttggctttcatgccgaatg

SEQ ID NO: 322726 - DNA, 120 bp, Artificial Sequence
  ENSG00000135835_44 (sequence is synthesized)
agatgggagccactagagggctcggagcgagcactgagactctctaatgtctatgagaatagaccccagtgggacacgggtggagccagggagccctgtgttgaagctatttcagcagtc

SEQ ID NO: 322727 - DNA, 120 bp, Artificial Sequence
  ENSG00000135835_45 (sequence is synthesized)
caggacagagacagtggtgcctggactgggaacggctgtggagatggggagaggggagaggggacaggggttggattctggttgatttgactatttgctgatgagctggacatgtaagag

SEQ ID NO: 322728 - DNA, 120 bp, Artificial Sequence
  ENSG00000135835_46 (sequence is synthesized)
gaagagaggacaggtctctgcctactctggacctcaggaggataaaaagtccttcctcacaggccttcccgtagcctcctctcccgttaggggagcaggacaggccccccggacaggtgg

SEQ ID NO: 322729 - DNA, 120 bp, Artificial Sequence
  ENSG00000135835_47 (sequence is synthesized)
tgtgaaggcagaggcagacaacgcagcatgtttgtgctccggcacctctgctggctatgtgatctagagcaggcgacatccccactgagcctcactcagttccctaatctgtgaaatgag

SEQ ID NO: 322730 - DNA, 120 bp, Artificial Sequence
  ENSG00000135835_48 (sequence is synthesized)
gatgacaaaacctacctagaagagtcataaggagcatttggtaaggcacacaggaaagggcctagcatttttcttccctccccttcagaaagagaaagtctggggaagagaaccccagac

SEQ ID NO: 322731 - DNA, 120 bp, Artificial Sequence
  ENSG00000135835_49 (sequence is synthesized)
agggaccagcgtgatccgcattcacctgtcgatgtgagtgcacacacaacaggtcattgtactctgccgcccaccctcccccagagtccctttttgctcccttgtaggcagtgggagccc

SEQ ID NO: 322732 - DNA, 120 bp, Artificial Sequence
  ENSG00000135835_50 (sequence is synthesized)
ctccctgtcacccgtcagggagctctgatgggcaggggtctctagtgacccagggcccccggcaccctcgcctgagttggtgccagctccccgttgtgcccaggcactccctggtcctgc

SEQ ID NO: 322733 - DNA, 120 bp, Artificial Sequence
  ENSG00000135835_51 (sequence is synthesized)
tgccatcatgggcgctggatggcacacaggggtccccacgcacatgaagcctggcgagtgctggggcctccgtgtcccaggccatcctccaacagcagagggtcgcttcttccaggctcc

SEQ ID NO: 322734 - DNA, 120 bp, Artificial Sequence
  ENSG00000135835_52 (sequence is synthesized)
aaggggctgtgaggagggctggcttgcgccccgcactgaaccggcaggatgctggtattaacttgctggctttcacatccgactctatatgagcctgtgagaacagcaggctttgccttc

SEQ ID NO: 322735 - DNA, 120 bp, Artificial Sequence
  ENSG00000135835_53 (sequence is synthesized)
tgcttctaattggatacaacatagagatcacacatcctcaacaaaggccatttccagcagacaataaatgcctatgacagcaggctgtcatatttgtgtcacgaatttcagttgcgaaac

SEQ ID NO: 322736 - DNA, 120 bp, Artificial Sequence
  ENSG00000135835_54 (sequence is synthesized)
ctacccgagtctccccaaaatggcaggcgtgacgtcagtgtctggcctagctctggcagcattctttcagggtttatcattagtccccacctgcaactcccacagcacatcagacacttc

SEQ ID NO: 322737 - DNA, 120 bp, Artificial Sequence
  ENSG00000135835_55 (sequence is synthesized)
tctgggtttgccccaggggccccttcttacctgccccctccccgtgccaccaacccgtagacagggagggcaagcagtgaaaggtccatctagaggaggtaaaagacagggctgagggaa

SEQ ID NO: 322738 - DNA, 120 bp, Artificial Sequence
  ENSG00000135835_56 (sequence is synthesized)
aacgccttgtacagtcaggatggcagatgtactctgtcagggaagacagccccacagaaaaggctcggcttggccaagaagcaacaaaagggattctacacctcagaccagggaggggga

SEQ ID NO: 322739 - DNA, 120 bp, Artificial Sequence
  ENSG00000135835_57 (sequence is synthesized)
atgtgtacaaagattggatttactaaattcagagccacagactttcaggtacttcggtgaagatcagtgctctttcaaacccacacttcagaggcaggctttaaaacgcctgacttctgt

SEQ ID NO: 322740 - DNA, 120 bp, Artificial Sequence
  ENSG00000135835_58 (sequence is synthesized)
cagggccacaggctgggctgcccaaagctcctacggggctgggggatccgagagaggacttcccactagtccaagatgtggtgactagtttcaagccagagattgaggagcagacctgat

SEQ ID NO: 322741 - DNA, 120 bp, Artificial Sequence
  ENSG00000135835_59 (sequence is synthesized)
gccctttcgggcccctgctaagaacctgattcgaggaaaaggaagtgaagacagtaacgcgtgggcagtggcctcatgtctgaaatgcagagtgagccgagctgggctgcgaacagcgag

SEQ ID NO: 322742 - DNA, 120 bp, Artificial Sequence
  ENSG00000135835_60 (sequence is synthesized)
ggtgccaaaggctgcgctgagcagcctgaattccgccagtgctgatgcccacaccaggggtgtgccccgcagtccctccagcaaactcagcttgtgtctcagcccctgtgtccacccagc

SEQ ID NO: 322743 - DNA, 120 bp, Artificial Sequence
  ENSG00000135835_61 (sequence is synthesized)
atgaagcatgggcatcagggggtccagcctgccctgggagagccagcacctcacttactctcccaggtgggagcagctggaggggaatttgaaaggtttccagccgcggttgaggccggc

SEQ ID NO: 322744 - DNA, 120 bp, Artificial Sequence
  ENSG00000135835_62 (sequence is synthesized)
gggcgggggttgggggcagggggcctcctcagctggacacttcccagcccagccagcccaagccccacagggcctgccccactgacggggggctccctgagagccggagcctggcaaaga

SEQ ID NO: 322745 - DNA, 120 bp, Artificial Sequence
  ENSG00000135835_63 (sequence is synthesized)
agcagagaagctagttcccgcaggctggctcttggcaccttctagacccaggcagggcctctttggggtggggaggagggggcatgtgcagaagaggagagggagccaccgcagctttga

SEQ ID NO: 322746 - DNA, 120 bp, Artificial Sequence
  ENSG00000135835_64 (sequence is synthesized)
aatatgtggctagaatttttatttttcctggggttttttgctcagatgcttccccatcccaattgaggagccatatctgagtaagactgaggccagtgtcagtctttggcaatagagtgc

SEQ ID NO: 322747 - DNA, 120 bp, Artificial Sequence
  ENSG00000135835_65 (sequence is synthesized)
agcaaaccaggcttggatgtggctcagccacttttgctcttccgatgataccttcccaccaccccggcctttacgctgggcctgggtgacctgaggcagcaactggatcatagtgccagg

SEQ ID NO: 322748 - DNA, 120 bp, Artificial Sequence
  ENSG00000135835_66 (sequence is synthesized)
cactgagtaggtatggttcctaatttttaaaaactattttcctcccaattctacaagaaaagctcatctcagaaaaagattagctcactcactgtcaggtataaataaatgacaacagtt

SEQ ID NO: 322749 - DNA, 120 bp, Artificial Sequence
  ENSG00000135835_67 (sequence is synthesized)
taacgcgttatttgcactaggagcatttccactttaaaagcagagacagtggaatggagttagaccatggaggaggcgcactgtatctatgtctaaagccagttgtggttgtgagatgga

SEQ ID NO: 322750 - DNA, 120 bp, Artificial Sequence
  ENSG00000135835_68 (sequence is synthesized)
ataatgaggggtgtgtgtatgtgtgcatgcgcacagagaagtgcctggtatgagcacctcctccctgtgccacacaaacagcacctcatcaacatggtcagcattccagagatgcacttc

SEQ ID NO: 322751 - DNA, 120 bp, Artificial Sequence
  ENSG00000135835_69 (sequence is synthesized)
ttcgatttgggtgtcattgtgaaattctcctgttttcctctgcagggatctacgtgcaggagatggctgacatgagcatggccaagctgtactcagggctgctgggggtgggcgatgaga

SEQ ID NO: 322752 - DNA, 120 bp, Artificial Sequence
  ENSG00000135835_70 (sequence is synthesized)
tcctcgaggtgaacggggccaaggtggcagggctgggcttggctcacattaaggagctcctggcccactcagagagcttgtcaatccgtgtcctgaggcagagacctgtcccacggtgac

SEQ ID NO: 322753 - DNA, 120 bp, Artificial Sequence
  ENSG00000135835_71 (sequence is synthesized)
ccagaagtgccgctgccctcactgtcacggcctcggaagccctgaagcactcagggtggttggcaggaacgtgctgcacagagctgctctgtggcggaaacagatcctggcagcatctaa

SEQ ID NO: 322754 - DNA, 120 bp, Artificial Sequence
  ENSG00000135835_72 (sequence is synthesized)
ccccttgggctgtggcagggcttctgtggtgggctgcctttgggagacgcaaggagcctgtttgcatattttgtttaaggccatttatccagaactagaaaaagaaaaaaatgggtctcc

SEQ ID NO: 322755 - DNA, 120 bp, Artificial Sequence
  ENSG00000135835_73 (sequence is synthesized)
ttccatgtctgagggggtgtcaacatctacttgtacctttgttggcagggggagaagggagattcagtggatcctttggttgatgcctgagagccggcctcacctcctggtcccatgcct

SEQ ID NO: 322756 - DNA, 120 bp, Artificial Sequence
  ENSG00000135835_74 (sequence is synthesized)
ggtcaaaggctacagcctccaacactgtggaaccaaagaaagcacatgtccatattggccttgacccttccctatttcagccacgttcctccctactccattcactgcccttgcccttta

SEQ ID NO: 322757 - DNA, 120 bp, Artificial Sequence
  ENSG00000135835_75 (sequence is synthesized)
tccagaaatgggcaaagtgtcccggaataccagccttacagccattgaccatatatgccaaaccaaaatcagaacgtgtggtctggcaggagttttatgccccttcggggtgtgggaatt

SEQ ID NO: 322758 - DNA, 120 bp, Artificial Sequence
  ENSG00000135835_76 (sequence is synthesized)
ctgggagatgttatctggtagccagaatattaaaaatttctaggaaaatttttttatacataaagttgaaaacaacaacaacaacaacaaagaccaatttcaggacgtgctactgtggta

SEQ ID NO: 322759 - DNA, 120 bp, Artificial Sequence
  ENSG00000135835_77 (sequence is synthesized)
gccaggatccagctagtgggaccggccagaccagccccatgccaccccggccgctgcctctgcccaggtggaggcaagagttgctgcaacctgacctgtggcagcctccatcttagttct

SEQ ID NO: 322760 - DNA, 120 bp, Artificial Sequence
  ENSG00000135835_78 (sequence is synthesized)
gtccagcttggagacagggctgcggcaggtgcctggccatcacagctgcatgctttctgcccagacctcctggcggtgctgtcggtgggcaggtgggtgggtgggcagcagggaagctgc

SEQ ID NO: 322761 - DNA, 120 bp, Artificial Sequence
  ENSG00000135835_79 (sequence is synthesized)
agagcgcggctgggccatctgcctgggcctcagtgctgcctggagggctgggactctttgggagtggatggccatgtgtcagtcttaacttactaaaaagcaaagctaaagcttctctca

SEQ ID NO: 322762 - DNA, 120 bp, Artificial Sequence
  ENSG00000135835_80 (sequence is synthesized)
agatcctcttgaggtctctgcctccagtgcctgagcagatgtccaaggccgggccagctccccagcccccatccagagccacgcagggccatttcccagccccaggccccaggccccagg

SEQ ID NO: 322763 - DNA, 120 bp, Artificial Sequence
  ENSG00000135835_81 (sequence is synthesized)
cccccaggctgggttccctgtgcgtgggtgctagaggaggaaggctgcacatgcagggctttttctggcacagccagtgcttgacactgctaaagccctcctaatctgcgttattttcct

SEQ ID NO: 322764 - DNA, 120 bp, Artificial Sequence
  ENSG00000135835_82 (sequence is synthesized)
gtgctgagccccaggcatgaggaagccacgcatctgctgcagcgtgcccgcatgaaggccaggacccggcccctccgtgccagccatgacatcgtgcccaccattacccagggcagccgg

SEQ ID NO: 322765 - DNA, 120 bp, Artificial Sequence
  ENSG00000135835_83 (sequence is synthesized)
gcgggcggcagcccccaaggagaagaaggagatgcaaagagaaacttgctgcattctagattaactcatagaacaaattatttctgtcctcctaaagataatccttaaactttactggct

SEQ ID NO: 322766 - DNA, 120 bp, Artificial Sequence
  ENSG00000135835_84 (sequence is synthesized)
taaaactggtgtgacatttcgcattatatgtgtattttgctttataaaatatgtgcattcctgaaagcttgtgtataaattgaattgtaataaacgactacagagagacttgccatttaa

SEQ ID NO: 322767 - DNA, 120 bp, Artificial Sequence
  ENSG00000135837_0 (sequence is synthesized)
agttgttgggctgtaatggcgactgggccgcccctgacgaagtgactcccgggccggggagcggggccagacctgcgccagagagaactgcagggagccgcagctcggggggtggcttgc

SEQ ID NO: 322768 - DNA, 120 bp, Artificial Sequence
  ENSG00000135837_1 (sequence is synthesized)
cctgagggaggggaggcagcctttccgccttgtcttccttcccagcggaccggcggatccccggagccggtgcgaggagggcacccggtgcgtccccggagcggggaggccaggccgggc

SEQ ID NO: 322769 - DNA, 120 bp, Artificial Sequence
  ENSG00000135837_2 (sequence is synthesized)
agccctggggccggtcggggcggcgtcactgcaccctccgccaggctccgcgggatgcaccgtggtagccgagggcggaggcgacactctcaggtaaattggcaggatgaggagcagcaa

SEQ ID NO: 322770 - DNA, 120 bp, Artificial Sequence
  ENSG00000135837_3 (sequence is synthesized)
atcaaaagaggtgcctttaccaaatccaaggaactctcaaagcaaggatactgttcaagcagatataaccacatcgtgggatgcactttctcaaaccaaggctgctctgagacacattga

SEQ ID NO: 322771 - DNA, 120 bp, Artificial Sequence
  ENSG00000135837_4 (sequence is synthesized)
aaataaattagaagtagcccctacaagtacagctgtgtgtgattctgtcatggataccaagaagtcttctacaagtgctactcgaaaaataagtagaaaagatggtagatacctggatga

SEQ ID NO: 322772 - DNA, 120 bp, Artificial Sequence
  ENSG00000135837_5 (sequence is synthesized)
ttcttgggttaatgctccaatctccaaatccactaaatcacgaaaagagaaatctcgtagtcctctcagggccaccaccctggagagtaatgtgaagaaaaataatcgtgtggaatttcg

SEQ ID NO: 322773 - DNA, 120 bp, Artificial Sequence
  ENSG00000135837_6 (sequence is synthesized)
tgaacctttggtttcttatagggaaatccatggtgcaccttccaatttcagttccagccatctggaatcaaagcacgtatactgtgtagatgttaatgaagaaaagactgagagcggtaa

SEQ ID NO: 322774 - DNA, 120 bp, Artificial Sequence
  ENSG00000135837_7 (sequence is synthesized)
ctggatgataggcagtcgagaagaacggaatatacggagctgtgattttgagagctcccaatcatctgtcatcaatgatacagttgttaggtttttaaatgatcgaccagcaattgatgc

SEQ ID NO: 322775 - DNA, 120 bp, Artificial Sequence
  ENSG00000135837_8 (sequence is synthesized)
attgcaaaattctgaatgtttgattaggatgggagcttctatgagaactgaggaagaaatgcctaacagaacaaaaggaagtgagaataatttgaagctttctgtgaataacatggccca

SEQ ID NO: 322776 - DNA, 120 bp, Artificial Sequence
  ENSG00000135837_9 (sequence is synthesized)
tgatactgatccaaaagcgttacgactaactgactcttctccatcctctactagtacttctaattcccaaagattagatattctaaagcggcgacaacatgatgtcaaactggaaaaact

SEQ ID NO: 322777 - DNA, 120 bp, Artificial Sequence
  ENSG00000135837_10 (sequence is synthesized)
taaggaacggattagaaaacagtgggaacactcagaagaaacaaatggccggggccagaagctgggtcatattgaccatccagtaatggttgttaatgttgataactcagtaacagcaaa

SEQ ID NO: 322778 - DNA, 120 bp, Artificial Sequence
  ENSG00000135837_11 (sequence is synthesized)
agtcagaaaagtggcaacagcaccacctgctccagcatataaaggtttcaacccttcagagaccaagattcgaacacctgatgggaaagtgtggcaggaggctgagtttcaaaacatgag

SEQ ID NO: 322779 - DNA, 120 bp, Artificial Sequence
  ENSG00000135837_12 (sequence is synthesized)
tagagaactgtatcgagatttagcacttcactttgcagatgatatttctataaaggagaaacctgctgaaaaaagtaaagagaagaaagtagtcaagccagtacgaaaagtccaaaaagt

SEQ ID NO: 322780 - DNA, 120 bp, Artificial Sequence
  ENSG00000135837_13 (sequence is synthesized)
agcacagttatcaagtacagaatgcagaacaggtagtagtcatcttataagtacatcttcttggcgagatggacaaaaattagtaaagaagattctgggacctgctcccagaatggagcc

SEQ ID NO: 322781 - DNA, 120 bp, Artificial Sequence
  ENSG00000135837_14 (sequence is synthesized)
aaaagagcaaagaacagcatcaagtgacagaggtggaagagaaagaactgctaaatctgggggtcacattggaagagcagaatctgatcccaggttggacgttttacatagacatcttca

SEQ ID NO: 322782 - DNA, 120 bp, Artificial Sequence
  ENSG00000135837_15 (sequence is synthesized)
aagaaactcagaacgttcgagaagtaaatctcggtctgaaaataatataaagaaactagcttcatctcttccagataataagcaggaggaaaatactgccttaaataaggactttttacc

SEQ ID NO: 322783 - DNA, 120 bp, Artificial Sequence
  ENSG00000135837_16 (sequence is synthesized)
tattgaaattcgtggcattcttgatgacctacagctggattctacagctcacactgcaaagcaagatactgtagagttacagaaccagaagtcatcagcaccagtacatgctcctaggag

SEQ ID NO: 322784 - DNA, 120 bp, Artificial Sequence
  ENSG00000135837_17 (sequence is synthesized)
tcacagcccagtaaaaagaaaacctgacaaaataacagctaatgaagatccccctgttatttccaaaaggcgccactatgacacagatgaggtacgacagtacattgttaggcagcagga

SEQ ID NO: 322785 - DNA, 120 bp, Artificial Sequence
  ENSG00000135837_18 (sequence is synthesized)
ggaaaggaagagaaagcaaaatgaagagaagaaggctcaaaaggaggctacagaacagaaaaacaaacgattacaagagctctaccggaagcagaaggaagcctttactaaagtaaaaaa

SEQ ID NO: 322786 - DNA, 120 bp, Artificial Sequence
  ENSG00000135837_19 (sequence is synthesized)
tgtccctccttctgagccatcagcaactaggcgactacaggaaacttactccaaattgctactagaaaagaccttgcttgaagagccatctcatcaacatgttacgcaggaaacacaggc

SEQ ID NO: 322787 - DNA, 120 bp, Artificial Sequence
  ENSG00000135837_20 (sequence is synthesized)
caaaccagggtatcagccatctggagaatctgacaaagaaaacaaagtacaggaacgtcccccaagtgcatcttccagtagtgacatgtctctctcagaacctccacagcctcttgcaag

SEQ ID NO: 322788 - DNA, 120 bp, Artificial Sequence
  ENSG00000135837_21 (sequence is synthesized)
aaaagacttgatggaatctacatggatgcagcctgaaagattgagcccacaagttcaccattctcaaccacagccttttgctggaacagctggaagtttactctcccatctcttgagttt

SEQ ID NO: 322789 - DNA, 120 bp, Artificial Sequence
  ENSG00000135837_22 (sequence is synthesized)
agagcatgtaggaattttgcataaggattttgaatctattttaccaaccaggaagaatcataatatggcttcaaggccattaacttttacacctcaaccatatgtgacctcaccagctgc

SEQ ID NO: 322790 - DNA, 120 bp, Artificial Sequence
  ENSG00000135837_23 (sequence is synthesized)
ttatacagatgccttgttaaaacctagtgccagccaatataagagtaaactggatcgtattgaagccttgaaagcaacagctgcttctttgtccagcagaattgaaagtgaagccaagaa

SEQ ID NO: 322791 - DNA, 120 bp, Artificial Sequence
  ENSG00000135837_24 (sequence is synthesized)
attagctggggccagcattaactatgggtcagcatggaacactgagtatgatgtgcagcaggcacctcaagaagatggaccttggaccaaggctgtaactccacctgtgaaagatgataa

SEQ ID NO: 322792 - DNA, 120 bp, Artificial Sequence
  ENSG00000135837_25 (sequence is synthesized)
tgaagatgttttctctgccagaattcagaagatgctgggaagctgtgtatctcatgcaacttttgatgatgatcttcctggtgtaggcaatcttagtgaatttaaaaagcttcctgagat

SEQ ID NO: 322793 - DNA, 120 bp, Artificial Sequence
  ENSG00000135837_26 (sequence is synthesized)
gataagaccacagagtgccatatcaagctttagagtgagatcccctggtcccaaaccagaagggctactggcacagttatgtaaaaggcagactgactcttctagctctgatatgcaagc

SEQ ID NO: 322794 - DNA, 120 bp, Artificial Sequence
  ENSG00000135837_27 (sequence is synthesized)
ctgttctcaagacaaagccaaaatatctcttggttccagcatagattcagtcagtgaagggcctcttcttagtgaggggagtctctctgaagaagagggagaccaggatggacagcccct

SEQ ID NO: 322795 - DNA, 120 bp, Artificial Sequence
  ENSG00000135837_28 (sequence is synthesized)
tttgaaagtagcagaaattttaaaagaaaaggaattttgtcctggagaaagaaatagttatgaacccatcaaagagtttcagaaagaagctgaaaaattcttgccactttttgggcacat

SEQ ID NO: 322796 - DNA, 120 bp, Artificial Sequence
  ENSG00000135837_29 (sequence is synthesized)
aggtggtacacaaagcaaaggaccatgggaagaattggcaaagggaagtccacatagcgtcattaatatttttacaaaatcctatcagttatatggaaaagggtttgaagacaagttgga

SEQ ID NO: 322797 - DNA, 120 bp, Artificial Sequence
  ENSG00000135837_30 (sequence is synthesized)
cagaggaacatcaacatcacggcctttgaatgccaccgcaactcctctaagtggtgtttcatatgaagatgattttgtctcctctccagggactgggacttcgacagaaaaaaaatcaac

SEQ ID NO: 322798 - DNA, 120 bp, Artificial Sequence
  ENSG00000135837_31 (sequence is synthesized)
tcttgaacctcatagcactttaagccctcaggaggaccattctaacagaaagtctgcctatgatccttcctctgtggatgttacctcccagcattcatcaggagcccagtctgctgcatc

SEQ ID NO: 322799 - DNA, 120 bp, Artificial Sequence
  ENSG00000135837_32 (sequence is synthesized)
gtctcgttcatctacttcttctaaaggaaagaaaggaaaaaaggaaaagacagaatggttggattcattcactggaaatgttcagaactcacttcttgatgaggaaaaagcagaacgtgg

SEQ ID NO: 322800 - DNA, 120 bp, Artificial Sequence
  ENSG00000135837_33 (sequence is synthesized)
ctcccatcaaggaaagaaatctgggaccagcagcaaactttctgttaaagattttgagcagactcttgatacagatagcactttggaggatctttctggacattctgtgagtgtctcatc

SEQ ID NO: 322801 - DNA, 120 bp, Artificial Sequence
  ENSG00000135837_34 (sequence is synthesized)
agataagggaagatctcagaaaactccaacttctcccctgtcaccaagttcccagaaatcattgcagtttgacgttgcaggaacttcttcagaaagatctaagtcgtcagtaatgcctcc

SEQ ID NO: 322802 - DNA, 120 bp, Artificial Sequence
  ENSG00000135837_35 (sequence is synthesized)
aactataacaggatttaagcctaatgcacctctcactgatctgaacccggcagccagcagaacaacgacagagaacatggctccaataccaggttctaagcgcttttctcctgctggcct

SEQ ID NO: 322803 - DNA, 120 bp, Artificial Sequence
  ENSG00000135837_36 (sequence is synthesized)
ccatcatcgtatggcagcagaactcagttatctgaacgccattgaggagtcggtgcgccaactgtcagatgtagaaagagttagaggcatttcacttgctcagcaggagagtgtgtctct

SEQ ID NO: 322804 - DNA, 120 bp, Artificial Sequence
  ENSG00000135837_37 (sequence is synthesized)
agctcagataataaaggcacaacagcaacgccatgaaagagacttggccctcttgaaactaaaggctgaacaagaggctctggagagtcagagacaattagaagaaacccgaaacaaagc

SEQ ID NO: 322805 - DNA, 120 bp, Artificial Sequence
  ENSG00000135837_38 (sequence is synthesized)
agctcaggtccatgcagaatcattacagcaggtggttcaatcacaacgggaagtaactgaagtcctgcaggaagcaacgtgtaaaatagcagctcagcagtcagaaactgctcgcctcac

SEQ ID NO: 322806 - DNA, 120 bp, Artificial Sequence
  ENSG00000135837_39 (sequence is synthesized)
cacagacgcagcacgtcaaatctgtgagatggcagagttgactagaactcatatctcagatgctgtcgtggcttcaggagctccccttgcaatactgtatgaccaccaacggcagcacct

SEQ ID NO: 322807 - DNA, 120 bp, Artificial Sequence
  ENSG00000135837_40 (sequence is synthesized)
tccagactttgtgaaacagctgaggaccagaactgaaacagataggaaaagtccatctgtttcactctctcagagtaaagaagggacccttgactcaaagcatcagaagtattctgcttc

SEQ ID NO: 322808 - DNA, 120 bp, Artificial Sequence
  ENSG00000135837_41 (sequence is synthesized)
atatgatagttattctgagtcttcaggatacaagaatcatgatagaagaagtagcagtggtagcagccgccaagaaagtccttcagttccatcttgtaaggaaaatgagaagaaacttaa

SEQ ID NO: 322809 - DNA, 120 bp, Artificial Sequence
  ENSG00000135837_42 (sequence is synthesized)
tggtgaaaagatagagagttccattgatgaacaggttcagactgctgcagatgattctctacgaagtgatagtgttccatctcttcctgatgaaaaagactcaacgtctattgcaacaga

SEQ ID NO: 322810 - DNA, 120 bp, Artificial Sequence
  ENSG00000135837_43 (sequence is synthesized)
atattctctgaaatttgatgaatccatgacagaagatgaaatagaagaacaatcatttcgatcattactaccttcagagagtcaccgcagatttaacatggaaaagagaagaggtcatca

SEQ ID NO: 322811 - DNA, 120 bp, Artificial Sequence
  ENSG00000135837_44 (sequence is synthesized)
tgatgactctgatgaagaagcttctccagaaaaaactacactgtctactgccaaggaactgaacatgccattctcaggaggacaagatagcttttctaaatttactatggagatggttcg

SEQ ID NO: 322812 - DNA, 120 bp, Artificial Sequence
  ENSG00000135837_45 (sequence is synthesized)
acagtatatgaaagaggaagaaatgagggcagctcaccagtcttcactcctgcgtctccgtgaaaaggccttgaaggagaagactaaggctgaattggcctggttagagcatcaaaaaaa

SEQ ID NO: 322813 - DNA, 120 bp, Artificial Sequence
  ENSG00000135837_46 (sequence is synthesized)
acatctacgagacaaaggagaggatgataaaatgcccccgctccggaagaaacagcgtggtttgcttttaaggttgcagcaagaaaaggcagaaataaaacgtcttcaagaagccaataa

SEQ ID NO: 322814 - DNA, 120 bp, Artificial Sequence
  ENSG00000135837_47 (sequence is synthesized)
ggcagctcggaaggaaagacagctgattcttaaacagcaggaggagatagaaaagatccgacagaccaccataaaactacaggagaaattgaagtctgcaggggagagtaaattggactc

SEQ ID NO: 322815 - DNA, 120 bp, Artificial Sequence
  ENSG00000135837_48 (sequence is synthesized)
tcatagtgatgatgatacaaaggataataaggcaaccagtcctggtccaactgacttggagacccgcagtccttctcccatttcaatctccagcagtgaaactagcagcattatgcagaa

SEQ ID NO: 322816 - DNA, 120 bp, Artificial Sequence
  ENSG00000135837_49 (sequence is synthesized)
actgaagaaaatgagaagccgcatggatgaaaagtttctgacaaagcgggagcaaaaattaatgcaacggcgacaacatgcagaggagctcctagagtggaagcgacgtttagatgcaga

SEQ ID NO: 322817 - DNA, 120 bp, Artificial Sequence
  ENSG00000135837_50 (sequence is synthesized)
agaagcagaaattcgtcaaatggaaaaacaagctttggctgcctgggacaaagaattaataaaacccaaaactcctaagaaagaactggaggaccagagaacagaacagaaagaaatagc

SEQ ID NO: 322818 - DNA, 120 bp, Artificial Sequence
  ENSG00000135837_51 (sequence is synthesized)
aagtgaagaggaatctccagtacctctgtactctcatctaaacagtgaaagctccattccagaagaattaggcagccctgctgttgaatatgtaccatccgagtctataggacaggagca

SEQ ID NO: 322819 - DNA, 120 bp, Artificial Sequence
  ENSG00000135837_52 (sequence is synthesized)
gccagggagtccagatcacagtatacttactgaagaaatgatttgttcacaggaactagaatcttctacctctcctagtaaacattcacttcccaaaagctgcacatctgtgtcaaagca

SEQ ID NO: 322820 - DNA, 120 bp, Artificial Sequence
  ENSG00000135837_53 (sequence is synthesized)
ggagtctagcaaaggaagtcataggactggaggacaatgtcacctgcctatcaagtcccatcagcactgttatagttggtcagatgagtcattatctatgacacagtcagaaactacatc

SEQ ID NO: 322821 - DNA, 120 bp, Artificial Sequence
  ENSG00000135837_54 (sequence is synthesized)
tgaccagagtgatattgaaggtaggatcagagctctgaaggatgagttgcggaaaagaaaatcagttgtgaaccagctgaagaaggaacagaaaaaaaggcaaaaggaaagactgaaagc

SEQ ID NO: 322822 - DNA, 120 bp, Artificial Sequence
  ENSG00000135837_55 (sequence is synthesized)
acagccaagcctcagattaaaacgctctcctcagcttctgaaaaacccaagatcaaacccctcacaccactacacagatctgaaacggcaaagaattggaaatcactaacagagtcagaa

SEQ ID NO: 322823 - DNA, 120 bp, Artificial Sequence
  ENSG00000135837_56 (sequence is synthesized)
cgttccagaggatccctggagtctattgctgaacatgttgatgcttcactgtctggttctgagagatcagtatcagaaaggtctttatctgcatatgcaaagagagtaaatgaatgggac

SEQ ID NO: 322824 - DNA, 120 bp, Artificial Sequence
  ENSG00000135837_57 (sequence is synthesized)
agtcgaacagaagattttcagaccccatctccagttctcagatcatcaaggaaaatcagagaagaatctggagattctctagaaaatgtacctgcattacatcttctcaaagaattaaat

SEQ ID NO: 322825 - DNA, 120 bp, Artificial Sequence
  ENSG00000135837_58 (sequence is synthesized)
gccactagtagaattcttgatatgtcagatggcaaggttggagaatctagtaaaaaatcagaaataaaagaaatagagtatacaaaattgaagaagagtaagattgaagatgccttttct

SEQ ID NO: 322826 - DNA, 120 bp, Artificial Sequence
  ENSG00000135837_59 (sequence is synthesized)
aaagaaggtaaatctgatgtcttactgaaattagtcctagaacagggagattcatctgaaattctttcaaagaaagatcttcctttagattctgaaaatgttcagaaagacctagttgga

SEQ ID NO: 322827 - DNA, 120 bp, Artificial Sequence
  ENSG00000135837_60 (sequence is synthesized)
ttagctattgaaaatctccataaaagtgaggaaatgttgaaagagagacagtcagatcaagatatgaatcatagtccaaacatccaatcaggaaaagacattcacgaacaaaagaacaca

SEQ ID NO: 322828 - DNA, 120 bp, Artificial Sequence
  ENSG00000135837_61 (sequence is synthesized)
aaggaaaaagatttgtcttggtcagaacatctttttgctcctaaagagataccatactctgaagattttgaagtgtcttctttcaagaaagaaatttcagctgaattgtacaaagatgat

SEQ ID NO: 322829 - DNA, 120 bp, Artificial Sequence
  ENSG00000135837_62 (sequence is synthesized)
tttgaggtgtcatctttgctgtcactcaggaaagactctcagtcttgcagagataagccacagccaatgaggagctctacaagtggagccactagctttggtagtaatgaggaaatcagt

SEQ ID NO: 322830 - DNA, 120 bp, Artificial Sequence
  ENSG00000135837_63 (sequence is synthesized)
gagtgcctaagtgagaaaagcctttctatccatagcaatgttcattctgacaggctgttggaactcaagtcccctactgagctgatgaaaagtaaggagcgcagtgatgtggagcatgaa

SEQ ID NO: 322831 - DNA, 120 bp, Artificial Sequence
  ENSG00000135837_64 (sequence is synthesized)
cagcaagttactgaatccccttccttggcttcagttcctactgcagacgagttatttgatttccacattggtgatagggtgttgattggaaatgttcagccaggaattcttcgattcaaa

SEQ ID NO: 322832 - DNA, 120 bp, Artificial Sequence
  ENSG00000135837_65 (sequence is synthesized)
ggtgagactagttttgctaaaggattttgggccggagtggagttagataaacctgaaggaaataacaatggaacatatgatggtattgcatattttgagtgcaaagaaaagcatggtatt

SEQ ID NO: 322833 - DNA, 120 bp, Artificial Sequence
  ENSG00000135837_66 (sequence is synthesized)
tttgctcctcctcaaaaaatatctcacattccagaaaactttgatgactatgtagacattaatgaagatgaagactgttactcagatgaacgatatcagtgctataatcaagagcaaaat

SEQ ID NO: 322834 - DNA, 120 bp, Artificial Sequence
  ENSG00000135837_67 (sequence is synthesized)
gatacagagggtccaaaagacagagaaaaggatgtcagtgaatatttttatgagaaatccctacctagtgtgaatgatatagaagcctcagttaatagaagtagaagccttaaaatagaa

SEQ ID NO: 322835 - DNA, 120 bp, Artificial Sequence
  ENSG00000135837_68 (sequence is synthesized)
acagacaatgtacaggacatttctggggtacttgaagcccatgttcaccagcagtcttcagtggattcacagatttcttcaaaggaaaacaaagacctcatttctgatgccacagaaaag

SEQ ID NO: 322836 - DNA, 120 bp, Artificial Sequence
  ENSG00000135837_69 (sequence is synthesized)
gtttccatcgctgcagaagatgacactttagacaataccttttccgaagaattggagaagcaacagcagtttacagaagaggaagacaacctatatgctgaagcttcagaaaagctttgt

SEQ ID NO: 322837 - DNA, 120 bp, Artificial Sequence
  ENSG00000135837_70 (sequence is synthesized)
acaccacttctggatcttttaacaagagaaaaaaaccaactggaagcccagctgaagtcatcactaaatgaggaaaaaaagtcaaaacaacaactggaaaaaatcagcttactgacagac

SEQ ID NO: 322838 - DNA, 120 bp, Artificial Sequence
  ENSG00000135837_71 (sequence is synthesized)
agtttactaaaagtctttgtaaaggacacagtcaatcaactacaacaaatcaaaaaaaccagggatgagaaaatccagcttagcaatcaggagcttcttggtgatgaccaaaagaaagta

SEQ ID NO: 322839 - DNA, 120 bp, Artificial Sequence
  ENSG00000135837_72 (sequence is synthesized)
acaccccaagacctatcccaaaatgttgaggaacagtcgccaagtatttcaggttgcttcttaagttctgaattggaagatgaaaaagaagagatttcctctccagatatgtgtcccaga

SEQ ID NO: 322840 - DNA, 120 bp, Artificial Sequence
  ENSG00000135837_73 (sequence is synthesized)
ccggagagcccagtatttggtgccagtgggcaggaagaacttgctaagagacttgctgaacttgaactcagccgggagttcctgagcgcgttaggagatgatcaagactggtttgatgaa

SEQ ID NO: 322841 - DNA, 120 bp, Artificial Sequence
  ENSG00000135837_74 (sequence is synthesized)
gactttggtttgagctcttctcacaagatccaaaaaaataaggcagaagaaaccattgtacctctaatggcagaacctaaaagagtaacccaacaaccatgtgaaacattattggcagtc

SEQ ID NO: 322842 - DNA, 120 bp, Artificial Sequence
  ENSG00000135837_75 (sequence is synthesized)
ccccatactgcagaagaagtagagattcttgtacataatgcagcagaagaactttggaaatggaaagaattaggccacgatcttcatagcatcagtattcctacaaaactgcttggctgt

SEQ ID NO: 322843 - DNA, 120 bp, Artificial Sequence
  ENSG00000135837_76 (sequence is synthesized)
gccagtaaaggtctagatatagaaagcactagtaaaagggtctacaaacaggcggtttttgatttaacaaaagagatttttgaggaaatatttgctgaggatcccaacttaaatcaacct

SEQ ID NO: 322844 - DNA, 120 bp, Artificial Sequence
  ENSG00000135837_77 (sequence is synthesized)
gtctggatgaagccatgtagaatcaactctagttatttccgacgagtgaaaaatccaaataaccttgatgaaatcaagagcttcatagcaagtgaagtactcaagttgttcagtcttaaa

SEQ ID NO: 322845 - DNA, 120 bp, Artificial Sequence
  ENSG00000135837_78 (sequence is synthesized)
aaggagccaaaccacaaaacagattggcagaaaatgatgaaatttggaagaaagaaaagagaccgagtggatcatatcctggttcaggagctccatgaggaggaggcacagtgggtgaac

SEQ ID NO: 322846 - DNA, 120 bp, Artificial Sequence
  ENSG00000135837_79 (sequence is synthesized)
tatgatgaggatgagttgtgtgtgaaaatgcagctagccgacgggatctttgagaccctgatcaaagatactattgatgttctgaatcagatcagtgaaaagcaggggagaatgctactt

SEQ ID NO: 322847 - DNA, 120 bp, Artificial Sequence
  ENSG00000135837_80 (sequence is synthesized)
gtgtgacatcttgcaaataaatcgaacgctgagtgctaatgtgagtcctgggcctttctgcctcctgatgtacacccatcgccatcatagcaagagtgcttctggaccttgtacttattc

SEQ ID NO: 322848 - DNA, 120 bp, Artificial Sequence
  ENSG00000135837_81 (sequence is synthesized)
ttaaagactaccagtatggagttcataggacaatgtggtacacctggtattacagcctttgcctttcgagactatccactggattaatgggttattttcagtgggcagggttgcacagtg

SEQ ID NO: 322849 - DNA, 120 bp, Artificial Sequence
  ENSG00000135837_82 (sequence is synthesized)
taatcctacaccttttgctaacacccctactaggtcccagagggccagaaacacctgacttacctctgagtttagactagggtatcacttctttgagtctgaagtcaagtgagagaggta

SEQ ID NO: 322850 - DNA, 120 bp, Artificial Sequence
  ENSG00000135837_83 (sequence is synthesized)
tagataaatgcatcacatcacttttgaaatgtaattctggtctataccatggaagtcataaatggacattatagtctctaaacagtattaaacccttaaccacttctaaaataggcaagc

SEQ ID NO: 322851 - DNA, 120 bp, Artificial Sequence
  ENSG00000135837_84 (sequence is synthesized)
tcaataatgtctgccaacttcacattctggagtttatttcatttctttttgaagaccattttcttccattattgtagttgagcagcaccaagtggactgtcaggctaacaggaataagtg

SEQ ID NO: 322852 - DNA, 120 bp, Artificial Sequence
  ENSG00000135837_85 (sequence is synthesized)
gtagccttgctttctgagcaccatctaaagaattttaaacctctgcattatgtttagtgttctctgtgtgggcatgaaaacaaagaaatgcccctactgaagactgggctcaaaggacca

SEQ ID NO: 322853 - DNA, 120 bp, Artificial Sequence
  ENSG00000135837_86 (sequence is synthesized)
atgcagggctggttcttttaccccttggtttactcctgcacttgtcttactcattctgaatctctaccagctgctcccagaatcacagatactcaggaccatctcaggcatccaggcatg

SEQ ID NO: 322854 - DNA, 120 bp, Artificial Sequence
  ENSG00000135837_87 (sequence is synthesized)
gcaaagtggaaataattcattttggcctgcaaaccttcaactcccatctttccccaagaagtcagagatgctgttacttgaatgatttaggaaatgagtgtgtgcaccaaagacaaaaag

SEQ ID NO: 322855 - DNA, 120 bp, Artificial Sequence
  ENSG00000135837_88 (sequence is synthesized)
atattgtctattgtttgtgtgcttgttttgcgctatggaacattttttaatttattttaagataaattattaagttgaaaatgtgtgtccctattcagaagtgaaagattcatcttgtaa

SEQ ID NO: 322856 - DNA, 120 bp, Artificial Sequence
  ENSG00000135837_89 (sequence is synthesized)
tagttaaacctccatcttgaagcttctatggttcatagtctttgcacaggaacctgtggttttaacaaaccaatacacatattgaagaagtcattttaattcagtgaaacgaagatgggc

SEQ ID NO: 322857 - DNA, 120 bp, Artificial Sequence
  ENSG00000135837_90 (sequence is synthesized)
ttttccagatcacctgcaatagcagcagtgggataaaatgatttaaaaacactgtacaatttaactctgcctctcttgcagcattgcttctcacaactattacctgcatctgaaaaaaaa

SEQ ID NO: 322858 - DNA, 120 bp, Artificial Sequence
  ENSG00000135837_91 (sequence is synthesized)
tctatagactccagctgctacattagagcataagagatgctctcctgggacctcagtaccctgccttcttgactggtttccgttcatcagtcctgtccctcttcaagtaatctagaagaa

SEQ ID NO: 322859 - DNA, 120 bp, Artificial Sequence
  ENSG00000135837_92 (sequence is synthesized)
tgtggatactcttaggcgtgaatgtaaatgccttaatattgaaggtcctggttagaagcatgatacaagacatctactggattcatatttacaaatatcctggaatgttatagcttcaaa

SEQ ID NO: 322860 - DNA, 120 bp, Artificial Sequence
  ENSG00000135837_93 (sequence is synthesized)
gtatattagaaaaaccccaaagatggtataatctttaagtgtgcacgttcgtttatttctgcatcttccctccaaacttgcctttgcatcttaaatatttcactatgcacactcccattc

SEQ ID NO: 322861 - DNA, 120 bp, Artificial Sequence
  ENSG00000135837_94 (sequence is synthesized)
ctcttgggtttcatcttgtcgtttaagaaatgtactgaaataatcattggaatatttgcattttgcacaatgactggtatgatagctcttgacaaataaggaaagcactgaaatgttgtg

SEQ ID NO: 322862 - DNA, 120 bp, Artificial Sequence
  ENSG00000135837_95 (sequence is synthesized)
attgggtctcgggaaatgctcagattgatgtcttaccagcatttcttctgggcttgtgatgttgagctgtagtcttgtagccataatgagcaaattgactaagagaagcaaaggtttctt

SEQ ID NO: 322863 - DNA, 120 bp, Artificial Sequence
  ENSG00000135837_96 (sequence is synthesized)
ggggttattaaccagtagtgtggaaatactagttttatgtggccaaggaaaagcaaaggcttttcttttcagtttgtgttatttggaagacagaaaaacatcttgtctacatcctttggc

SEQ ID NO: 322864 - DNA, 120 bp, Artificial Sequence
  ENSG00000135837_97 (sequence is synthesized)
tgtttgtaggatcacgttgtccttacgatactgaaactttacagctgctgtaaattttttataaatgaatttcaaaatgttataatgggactgtaggttgtttttctacatcttcattat

SEQ ID NO: 322865 - DNA, 120 bp, Artificial Sequence
  ENSG00000135837_98 (sequence is synthesized)
ttggacctaaaaccagtttttaataagaaagtttatctttactctttctgaaattatgactccagaaaaagaaaaaaaaaatacaagtcatggaatcagcaatctggtaagaaatgctgc

SEQ ID NO: 322866 - DNA, 120 bp, Artificial Sequence
  ENSG00000135837_99 (sequence is synthesized)
caagaatgtggcagtagctgtcctgacagactccaactgtctttactatctgaagaatcctaggctccacatgagaggcagaaatggatcagtcttattcttttctagaaatggttatct

SEQ ID NO: 322867 - DNA, 120 bp, Artificial Sequence
  ENSG00000135837_100 (sequence is synthesized)
gtagtttggtagcaaaaaaaaagaaaaaagaatccataattagcagatttcttattaactatttggatctaattgaaatggctttattcttaggattaagaaagatagatgtggataccc

SEQ ID NO: 322868 - DNA, 120 bp, Artificial Sequence
  ENSG00000135837_101 (sequence is synthesized)
agccactcgttccatattggtatctttttaaatcagctctgcctcttaatcaagaacctaaatattccctctttctaatctttgttccttctccctacaccctcatcctctttcactctt

SEQ ID NO: 322869 - DNA, 120 bp, Artificial Sequence
  ENSG00000135837_102 (sequence is synthesized)
ccttcataattcctctaagaaaaatatctttgcatcagcagtaatatcttttagaatagcactatcagaatttagcagtaaaccaacatacaggcttcagatttacttctgagtccaaaa

SEQ ID NO: 322870 - DNA, 120 bp, Artificial Sequence
  ENSG00000135837_103 (sequence is synthesized)
caatttgtgctatccagggtagttaactctgggttaaacaagtacagggtatagattccctcttcaggtctacacaggaatttttaccatagggaaaagtggggagagctcaaacgtagt

SEQ ID NO: 322871 - DNA, 120 bp, Artificial Sequence
  ENSG00000135837_104 (sequence is synthesized)
taataaggaaggtaatttgtttttcttttacctaaaagaaaagaaaattccttctgtgactacaggtctctgagaaattatctttcaaaagagatttcattgctcataagagtgttgtgg

SEQ ID NO: 322872 - DNA, 120 bp, Artificial Sequence
  ENSG00000135837_105 (sequence is synthesized)
cctattgataaaaacaattttgttcagtttcttgtcttgaaaaaaaagtggccttagctttttgcaatacttgaataaagtgtgtactcgcaaaagaatttctgtagcacagcattagag

SEQ ID NO: 322873 - DNA, 120 bp, Artificial Sequence
  ENSG00000135837_106 (sequence is synthesized)
actcataacttttctgcaagaaatacaaacttacatcttccttttactaccttaagaatactagtgaataaaacattaattcaaagagcaaattatagaaactacaatgacatttaatgc

SEQ ID NO: 322874 - DNA, 120 bp, Artificial Sequence
  ENSG00000135837_107 (sequence is synthesized)
aaattgtaggaatttacatgtttacaaatcatcttcaactggttgtgcagcaattcaataaaatatctttgtattataaaaatgtgaagaaaaaatgtaaactgatgtaaaggaggtact

SEQ ID NO: 322875 - DNA, 120 bp, Artificial Sequence
  ENSG00000135837_108 (sequence is synthesized)
gtcattttaattaacctatgtttaatagcttttccttctggactttgcaaagccttcttggcaaacacattgcaaagcattctctgggaggttcagcctccttgtgtgtactgtactgtg

SEQ ID NO: 322876 - DNA, 120 bp, Artificial Sequence
  ENSG00000135837_109 (sequence is synthesized)
cagacatgaaaaaataaacccgtttactgtgtgcgtgtaaatagcctggtcatcaggccattttcagccaatagtcacatccagtgcaattttgcaccgaacacttaagggtgtggtttg

SEQ ID NO: 322877 - DNA, 120 bp, Artificial Sequence
  ENSG00000135837_110 (sequence is synthesized)
taagtacgatctgtaaaataactgggatgaattcccatgtatacctgtgtaaatagatttgttaactgaaatatactttaagaaagataaaatctgtaaataaactgatttataaattaa

SEQ ID NO: 322878 - DNA, 120 bp, Artificial Sequence
  ENSG00000135837_111 (sequence is synthesized)
ctttacgtctcatcactgggcctctctcagtgtctgttttcccaaccttcatcccaaattccagctgtatatctacaaccagttggtcaggtttctgacaaagcgggagcaaaaattaat

SEQ ID NO: 322879 - DNA, 120 bp, Artificial Sequence
  ENSG00000135837_112 (sequence is synthesized)
attgcaagaatcccttctcatctcatcaccagagaacatcattcaacttctacctgaacacttccagtaataggaattttcaaaatttcaagctaattggtttccttgttagactctaag

SEQ ID NO: 322880 - DNA, 120 bp, Artificial Sequence
  ENSG00000135837_113 (sequence is synthesized)
tgctctaagtattagaagagctctttgttgtatttagccaaaatttctgtccttttaatttccacccattggtccttgttgtgtaacagcaaacacatgcttctcctactgttattaatt

SEQ ID NO: 322881 - DNA, 120 bp, Artificial Sequence
  ENSG00000135837_114 (sequence is synthesized)
taatcatcaaatattcaaatgcctatttatgtgccaggagctcagctaattacacatatttttcatttaatcctcacaacaaggttacttagcccataagaaacttactgctattgaaac

SEQ ID NO: 322882 - DNA, 120 bp, Artificial Sequence
  ENSG00000135837_115 (sequence is synthesized)
tcagaacagaatgactaacttcttaaagataccatgaaagtaatagtacactctttagagaatacaaagaagttttttaatgtggcaagtcatatgatgaatttattaagaaaactgaag

SEQ ID NO: 322883 - DNA, 120 bp, Artificial Sequence
  ENSG00000135837_116 (sequence is synthesized)
ctgatcaagcagttagaggttagacataggaagaagggggtttagtatcaaggctaatgtgtatgtgacgtctaaaatgtttttaatgttgttaataaagtaatggattaggattcttca

SEQ ID NO: 322884 - DNA, 120 bp, Artificial Sequence
  ENSG00000135837_117 (sequence is synthesized)
atgaggagcagcaaatcaaaagaggtgcctttaccaaatccaaggaactctcaaagcaaggatactgttcaagatataaccacatcgtgggatgcactttctcaaaccaaggctgctctg

SEQ ID NO: 322885 - DNA, 120 bp, Artificial Sequence
  ENSG00000135837_118 (sequence is synthesized)
acactctcaggatgaggagcagcaaatcaaaagaggtgcctttaccaaatccaaggaactctcaaagcaaggatactgttcaagatataaccacatcgtgggatgcactttctcaaacca

SEQ ID NO: 322886 - DNA, 120 bp, Artificial Sequence
  ENSG00000135838_0 (sequence is synthesized)
ttccagacctaccagcagctcaatggccttcccaaagaagaaacttcagggtcttgtggctgcaaccatcacgccaatgactgagaatggagaaatcaacttttcagtaattggtcagta

SEQ ID NO: 322887 - DNA, 120 bp, Artificial Sequence
  ENSG00000135838_1 (sequence is synthesized)
tgtggattatcttgtgaaagaacagggagtgaagaacatttttgtgaatggcacaacaggagaaggcctgtccctgagcgtctcagagcgtcgccaggttgcagaggagtgggtgacaaa

SEQ ID NO: 322888 - DNA, 120 bp, Artificial Sequence
  ENSG00000135838_2 (sequence is synthesized)
agggaaggacaagctggatcaggtgataattcacgtaggagcactgagcttgaaggagtcacaggaactggcccaacatgcagcagaaataggagctgatggcatcgctgtcattgcacc

SEQ ID NO: 322889 - DNA, 120 bp, Artificial Sequence
  ENSG00000135838_3 (sequence is synthesized)
gttcttcctcaagccatggaccaaagatatcctgattaatttcctaaaggaagtggctgctgccgcccctgccctgccattttattactatcacattcctgccttgacaggggtaaagat

SEQ ID NO: 322890 - DNA, 120 bp, Artificial Sequence
  ENSG00000135838_4 (sequence is synthesized)
tcgtgctgaggagttgttggatgggattctggataagatccccaccttccaagggctgaaattcagtgatacagatctcttagacttcgggcaatgtgttgatcagaatcgccagcaaca

SEQ ID NO: 322891 - DNA, 120 bp, Artificial Sequence
  ENSG00000135838_5 (sequence is synthesized)
gtttgctttcctttttggggtggatgagcaactgttgagtgctctggtgatgggagcaactggagcagtgggcagtacctataactacctgggaaaaaagacaaaccagatgttggaggc

SEQ ID NO: 322892 - DNA, 120 bp, Artificial Sequence
  ENSG00000135838_6 (sequence is synthesized)
ttttgaacaaaaggacttctctttagccctgaactatcagttttgtatccagagatttatcaactttgttgtcaaactaggttttggagtgtcacagaccaaagccatcatgactctggt

SEQ ID NO: 322893 - DNA, 120 bp, Artificial Sequence
  ENSG00000135838_7 (sequence is synthesized)
ctctgggattccaatgggcccaccccggcttccactgcagaaagcctccagggagtttactgatagtgctgaagctaaactgaagagcctggatttcctttctttcactgatttaaagga

SEQ ID NO: 322894 - DNA, 120 bp, Artificial Sequence
  ENSG00000135838_8 (sequence is synthesized)
tggaaacttggaagctggtagctagtgcctctctatcaaatcagggtttgcaccttgagacataatctaccttaaatagtgcatttttttctcagggaattttagatgaacttgaataaa

SEQ ID NO: 322895 - DNA, 120 bp, Artificial Sequence
  ENSG00000135838_9 (sequence is synthesized)
ctctcctagcaaatgaaatctcacaataagcattgaggtaccttttgtgagccttaaaaagtcttattttgtgaaggggcaaaaactctaggagtcacaactctcagtcattcatttcac

SEQ ID NO: 322896 - DNA, 120 bp, Artificial Sequence
  ENSG00000135838_10 (sequence is synthesized)
aattgattaattccatctgtctttaggagctctcattatctcggtctctggttcctaatcctattttaaagttgtctaattttaaaccactataatatgtcttcattttaataaatattc

SEQ ID NO: 322897 - DNA, 120 bp, Artificial Sequence
  ENSG00000135838_11 (sequence is synthesized)
atttggaatctaggaaaactctgagctactgcatttaggcaggcactttaataccaaactgtaacatgtctcaactgtatacaactcaaaatacaccagctcatttggctgctcagtcta

SEQ ID NO: 322898 - DNA, 120 bp, Artificial Sequence
  ENSG00000135838_12 (sequence is synthesized)
actctagaatggatgcttttgaattcatttcgatgtcaccacttttcgctctttaaaaacactgggtcaggtgaggacttgtttcagttcctataactaagtaaagggcggctttctcat

SEQ ID NO: 322899 - DNA, 120 bp, Artificial Sequence
  ENSG00000135838_13 (sequence is synthesized)
aacaaaggaaaaagtcttccccaaagatgaatttaagtctccacttttttctatacagaaaactcaaaactcaaagtttcaaagaaccaaaggactcttcctctgggcaccacaaacttc

SEQ ID NO: 322900 - DNA, 120 bp, Artificial Sequence
  ENSG00000135838_14 (sequence is synthesized)
cccttcctccactgagaagactgtctctcccgcaggaccctgaattattgaaatcgaaggctgacttcctttctgcagtgagcccaggggctaatgttattatcctgtcacacttgcaac

SEQ ID NO: 322901 - DNA, 120 bp, Artificial Sequence
  ENSG00000135838_15 (sequence is synthesized)
tagtgacttttgtttagtgatagaagatttggggaggacccaaaggactcagaactttctctccatacctccttttactcttttctttctgtgtaatgtatcaacaactgtttaatctcc

SEQ ID NO: 322902 - DNA, 120 bp, Artificial Sequence
  ENSG00000135838_16 (sequence is synthesized)
cttctaacaaaccttgatataagctttctgatatcaaagtatattgacagttaacccttactgattttaaacttgactatccagtctgttaattacctaagattttgttttcatttcatc

SEQ ID NO: 322903 - DNA, 120 bp, Artificial Sequence
  ENSG00000135838_17 (sequence is synthesized)
tctaattgttttgatcattggcagagaaagagtatttgaaattcatatcagttttgctccttattttaatctctttgaattaaaaataaaactttttcaaaatggaaatttgaaattata

SEQ ID NO: 322904 - DNA, 120 bp, Artificial Sequence
  ENSG00000135838_18 (sequence is synthesized)
agtagacttcaattatctttgctaatcctctctttaattagtcagctagttaaaagttgttatattcatatatcctcaaccctctttttgcctttgtagcttttaatttcctgaaagaag

SEQ ID NO: 322905 - DNA, 120 bp, Artificial Sequence
  ENSG00000135838_19 (sequence is synthesized)
aaaatgagttgttcgtttttggttctgaggatgtgatatccgtacttactgatactaaagccaaatttaaattctaaaattaattcttgggtatccaataaacaaagaactatttttcta

SEQ ID NO: 322906 - DNA, 120 bp, Artificial Sequence
  ENSG00000135838_20 (sequence is synthesized)
tccccagaggatacgccctccctgcttcctggtcagagccggggcttgaggtcagctggtgggaagatgagcagggcccccgggatcctggcttcttggagaagagccccctccctttct

SEQ ID NO: 322907 - DNA, 120 bp, Artificial Sequence
  ENSG00000135838_21 (sequence is synthesized)
gtgcagaagggcagccaaactgctagacacacctgccacccagaggttccgctgggaaactgcttcttacctgtctacaaggccagtcccctcacagttacccgtctttgggctgaaagg

SEQ ID NO: 322908 - DNA, 120 bp, Artificial Sequence
  ENSG00000135838_22 (sequence is synthesized)
gggcagttgggattctccgtacgcctcggaaacagcagcccaaacctcacaacgcagaaccacgagatagtggggattgcagagccctgcgcaagagaaggaaaattaagacgcagcgga

SEQ ID NO: 322909 - DNA, 120 bp, Artificial Sequence
  ENSG00000135838_23 (sequence is synthesized)
gcccaggaggtgcccgcacgcgggaaggactggcgtgcagacgaggcagggggaggtttgcactcggcgtggcgcgggtgagccgcgtgctctcgggcacccggccgccagttcggatgc

SEQ ID NO: 322910 - DNA, 120 bp, Artificial Sequence
  ENSG00000135838_24 (sequence is synthesized)
ttccgatcctcggggagccggggcgctgcgccggagtcacttcagcccatgttgttcaggtgacacccggggaagagcagactccagtgtgcaaaacgtttcggggtttccgggccagcg

SEQ ID NO: 322911 - DNA, 120 bp, Artificial Sequence
  ENSG00000135838_25 (sequence is synthesized)
ggtttccgggccagcggttccgggcgcgcctcgcgggcggcggcgcagaactacaacccccaggctccctggcgtggcggcacgtgggcccgagccgggcggccgcggatataaagcgcg

SEQ ID NO: 322912 - DNA, 120 bp, Artificial Sequence
  ENSG00000135838_26 (sequence is synthesized)
ggagcggctgcacggacaagagcggaggcctggctatacctgctggaatggataaagtgagctttaaaagttgatcagaccgaagagattgaagtgagagaaccacaggaacaaagaagg

SEQ ID NO: 322913 - DNA, 120 bp, Artificial Sequence
  ENSG00000135838_27 (sequence is synthesized)
gggtgacaaaagggaaggacaagtcaaaccatcataagttggggaccatccgcacaacccaaagtagacggagtagctttagaagacagctgaaggcctggcacagtggctcacacctgt

SEQ ID NO: 322914 - DNA, 120 bp, Artificial Sequence
  ENSG00000135838_28 (sequence is synthesized)
ttgggaggccaagtggtagctgtgcctagcagcccaggagaaagaggaagagcaaatggatgattggcttcacctaaaccaagagaaaggggtagtgaagggaggggtcgtgcaataaaa

SEQ ID NO: 322915 - DNA, 120 bp, Artificial Sequence
  ENSG00000135838_29 (sequence is synthesized)
gtaagtgccacccatcttctgctttgtctgctgctggagactgtaaagaaaatggaataccatcactttctctgagggttcaacaagaacactttttaatggtctgttgcaagcagagtt

SEQ ID NO: 322916 - DNA, 120 bp, Artificial Sequence
  ENSG00000135838_30 (sequence is synthesized)
ctgtttcccttattaaccctcggggccaaccatataaaactgtgaagtaaacctagttggaaaatctttggcaaccttctccattttagcacatgcctaccccattttccattctttctc

SEQ ID NO: 322917 - DNA, 120 bp, Artificial Sequence
  ENSG00000135838_31 (sequence is synthesized)
tcctaaaccatcagcactccctccctttacttgcttcagctcattaaaattctactactgcattgaggttgatttcagcctaagtgcttggaggaaggcagtctaaatacagattttact

SEQ ID NO: 322918 - DNA, 120 bp, Artificial Sequence
  ENSG00000135838_32 (sequence is synthesized)
aaattgtgaatgactgacagctctcccaagagtatttacaatttaaacagagtttattaacacaagtaagcctaaatggatggaggtttggataatatgacaaagtaaaattggggagca

SEQ ID NO: 322919 - DNA, 120 bp, Artificial Sequence
  ENSG00000135838_33 (sequence is synthesized)
gtcgtggggagaaatacagtgaatttgagtagagaaaccgctccagagtctcttaaatcttctataacaaatgacaaatgccactatccactcttctgcaagagattggcccttgggcca

SEQ ID NO: 322920 - DNA, 120 bp, Artificial Sequence
  ENSG00000135838_34 (sequence is synthesized)
attgaatctgcgttaatgcaggaaaatttttaagtttatttttggtagacctccctgctccctgtcagagtcctgcataattctgacaactcctccctctcccccaagcacctcttctgt

SEQ ID NO: 322921 - DNA, 120 bp, Artificial Sequence
  ENSG00000135838_35 (sequence is synthesized)
gttatgcccctcattcttgcagggttctcaacccactctcttactccttcaaggacgtttctgtttgtttttccactttcgtgatttttgcacatttgtgtgctgccagtgctatgaact

SEQ ID NO: 322922 - DNA, 120 bp, Artificial Sequence
  ENSG00000135838_36 (sequence is synthesized)
acctattattgttccatttttctaagcaatggtttcacaaaattgtgggtttggtgtgataattattatgttcctaaaatacattaaaataggtattgaactgttaaaattttagacaaa

SEQ ID NO: 322923 - DNA, 120 bp, Artificial Sequence
  ENSG00000135838_37 (sequence is synthesized)
ctaaaagcttgatgtgtgtagtagtccccccttatctcagggggatatgttccaagatgaccagtggatgcctgaaattgcagataatacgaaaccctatatatactatgttttttcctg

SEQ ID NO: 322924 - DNA, 120 bp, Artificial Sequence
  ENSG00000135838_38 (sequence is synthesized)
taatacgaaaccctatatatactatgttttttcctgtacatgcatacctatggtaaagtttaatttataaattaggcatagtaagagataaacagtaactaataataaaatagaacaatt

SEQ ID NO: 322925 - DNA, 120 bp, Artificial Sequence
  ENSG00000135842_0 (sequence is synthesized)
agaaggcgacgcctcttgcctcctgtctctcgcctctcgaaggaagtttgctcttaatttcagagccgggttcgccgtcggatcaacctccaggagctagcagcgggcgcggaccgggca

SEQ ID NO: 322926 - DNA, 120 bp, Artificial Sequence
  ENSG00000135842_1 (sequence is synthesized)
gtttccgcgctcagcacaggcagctcgcggtcatgggcggctcagcctccagccagctggacgagggcaagtgcgcttacatccgagggaaaactgaggctgccatcaaaaacttcagtc

SEQ ID NO: 322927 - DNA, 120 bp, Artificial Sequence
  ENSG00000135842_2 (sequence is synthesized)
cctactacagtcgtcagtactctgtggctttctgcaatcacgtgcgcactgaagtagaacagcaaagagatttaacgtcacagtttttgaagaccaagccaccattggcgcctggaacta

SEQ ID NO: 322928 - DNA, 120 bp, Artificial Sequence
  ENSG00000135842_3 (sequence is synthesized)
ttttgtatgaagcagagctatcacaattttctgaagacataaagaagtggaaggagagatacgttgtagttaaaaatgattatgctgtggagagctatgagaataaagaggcctatcaga

SEQ ID NO: 322929 - DNA, 120 bp, Artificial Sequence
  ENSG00000135842_4 (sequence is synthesized)
gaggagctgctcctaaatgtcgaattcttccagccggtggcaaggtgttaacctcagaagatgaatataatctgttgtctgacaggcatttcccagaccctcttgcctccagtgagaagg

SEQ ID NO: 322930 - DNA, 120 bp, Artificial Sequence
  ENSG00000135842_5 (sequence is synthesized)
agaacactcagccctttgtggtcctgcccaaggaattcccagtgtacctgtggcagcccttcttcagacacggctacttctgcttccacgaggctgctgaccagaagaggtttagtgccc

SEQ ID NO: 322931 - DNA, 120 bp, Artificial Sequence
  ENSG00000135842_6 (sequence is synthesized)
tcctgagtgactgcgtcaggcatctcaatcatgattacatgaagcagatgacatttgaagcccaagcctttttagaagctgtgcaattcttccgacaggagaagggtcactatggttcct

SEQ ID NO: 322932 - DNA, 120 bp, Artificial Sequence
  ENSG00000135842_7 (sequence is synthesized)
gggaaatgatcactggggatgaaatccagatcctgagtaacctggtgatggaggagctcctgcccactcttcagacagacctgctgcctaagatgaaggggaagaagaatgacagaaaga

SEQ ID NO: 322933 - DNA, 120 bp, Artificial Sequence
  ENSG00000135842_8 (sequence is synthesized)
ggacgtggcttggtctcctcgaggaggcctacaccctggttcagcatcaagtttcagaaggattaagtgccttgaaggaggaatgcagagctctgacaaagggcctggaaggaacgatcc

SEQ ID NO: 322934 - DNA, 120 bp, Artificial Sequence
  ENSG00000135842_9 (sequence is synthesized)
gttctgacatggatcagattgtgaactcaaagaactatttaattggaaagatcaaagcgatggtggcccagccggcggagaaaagctgcttggagagtgtgcagccattcctggcatcca

SEQ ID NO: 322935 - DNA, 120 bp, Artificial Sequence
  ENSG00000135842_10 (sequence is synthesized)
tcctggaggagctcatgggaccagtgagctcgggattcagtgaagtacgtgtactctttgagaaagaggtgaatgaagtcagccagaacttccagaccaccaaagacagtgtccagctaa

SEQ ID NO: 322936 - DNA, 120 bp, Artificial Sequence
  ENSG00000135842_11 (sequence is synthesized)
aggagcatctagaccggcttatgaatcttccgctgcattccgtgaagatggaaccttgttatactaaagtcaacctgcttcacgagcgcctgcaggatctcaagagccgcttcagattcc

SEQ ID NO: 322937 - DNA, 120 bp, Artificial Sequence
  ENSG00000135842_12 (sequence is synthesized)
cccacattgatctggtggttcagaggacacagaactacatgcaggagctaatggagaatgcagtgttcacttttgagcagttgctttccccacatctccaaggagaggcctccaaaactg

SEQ ID NO: 322938 - DNA, 120 bp, Artificial Sequence
  ENSG00000135842_13 (sequence is synthesized)
cagttgccattgagaaggttaaactccgagtcttaaagcaatatgattatgacagcagcaccatccgaaagaagatatttcaagaggcactagttcaaatcacacttcccactgtgcaga

SEQ ID NO: 322939 - DNA, 120 bp, Artificial Sequence
  ENSG00000135842_14 (sequence is synthesized)
aggcactggcgtccacatgcaaaccagagcttcagaaatacgagcagttcatctttgcagatcataccaatatgattcacgttgaaaatgtctatgaggagattttacatcagatcctgc

SEQ ID NO: 322940 - DNA, 120 bp, Artificial Sequence
  ENSG00000135842_15 (sequence is synthesized)
ttgatgaaactctgaaagtgataaaggaagctgctatcttgaagaaacacaacttatttgaagataacatggccttgcccagtgaaagtgtgtccagcttaacagatctaaagcccccca

SEQ ID NO: 322941 - DNA, 120 bp, Artificial Sequence
  ENSG00000135842_16 (sequence is synthesized)
cagggtcaaaccaggccagccctgccaggagagcttctgccattctgccaggagttctgggtagtgagaccctcagtaacgaagtattccaggagtcagaggaagagaagcagcctgagg

SEQ ID NO: 322942 - DNA, 120 bp, Artificial Sequence
  ENSG00000135842_17 (sequence is synthesized)
tccctagctcgttggccaaaggagaaagcctttctctccctgggccaagcccacccccagatgggactgagcaggtgattatttcaagagtggatgaccccgtggtgaatcctgtggcaa

SEQ ID NO: 322943 - DNA, 120 bp, Artificial Sequence
  ENSG00000135842_18 (sequence is synthesized)
cagaggacacagcaggactcccgggcacatgctcatcagagctggagtttggagggacccttgaggatgaagaacccgcccaggaagagccagaacccatcactgcctcgggttctttga

SEQ ID NO: 322944 - DNA, 120 bp, Artificial Sequence
  ENSG00000135842_19 (sequence is synthesized)
aggcgctcagaaagttgctgacagcgtccgtggaagtaccagtggactctgctccagtgatggaagaagatacgaatggggagagccacgttccccaagaaaatgaagaagaagaggaaa

SEQ ID NO: 322945 - DNA, 120 bp, Artificial Sequence
  ENSG00000135842_20 (sequence is synthesized)
aagagcccagtcaggcagctgccatccaccccgacaactgtgaagaaagtgaagtcagcgagagggaggcccaacctccctgtcccgaggcccatggggaggagttggggggatttccag

SEQ ID NO: 322946 - DNA, 120 bp, Artificial Sequence
  ENSG00000135842_21 (sequence is synthesized)
aggtaggcagcccagcctctccgccagccagtggagggctcaccgaggagcccctggggcccatggagggggagctcccaggagaggcctgcacactcactgcccatgaaggaagagggg

SEQ ID NO: 322947 - DNA, 120 bp, Artificial Sequence
  ENSG00000135842_22 (sequence is synthesized)
gcaagtgtaccgaggaaggggatgcctcacagcaagagggctgcaccttaggttctgaccccatctgcctcagtgagagccaggtttctgaggaacaagaagagatgggagggcaaagca

SEQ ID NO: 322948 - DNA, 120 bp, Artificial Sequence
  ENSG00000135842_23 (sequence is synthesized)
gcgcggcccaggccacggccagtgtgaatgcagaggagatcaaggtagcccgtattcatgagtgtcagtgggtggtggaggatgctccaaacccggatgtcctgctgtcacacaaagatg

SEQ ID NO: 322949 - DNA, 120 bp, Artificial Sequence
  ENSG00000135842_24 (sequence is synthesized)
acgtgaaggagggagaaggtggtcaggagagtttcccagagctgccctcagaggagtgaaagggacaatttggctgaagtctttctctgaaaaaagccaaagggttataggggtacactt

SEQ ID NO: 322950 - DNA, 120 bp, Artificial Sequence
  ENSG00000135842_25 (sequence is synthesized)
aggggttgcatgcaagctgttaccaaaaaatttttaagtattttcttaatttgaataataaaaccagaggaaatgcatacagggcatgagcaactgaggcaaacctttgtggacatgaat

SEQ ID NO: 322951 - DNA, 120 bp, Artificial Sequence
  ENSG00000135842_26 (sequence is synthesized)
tgttctacgatgaatttttgctttagtattttaataagaattacaaagacaatggcatacttggggtgagagggagctgaggatgtctgaggagggaatagtattgcagggaagactgag

SEQ ID NO: 322952 - DNA, 120 bp, Artificial Sequence
  ENSG00000135842_27 (sequence is synthesized)
aaaacagtaggatgacagttttgagtatactctgcacttttcaattgtgcaatcttcttgtgcactttaaggctttttaattttgtttgagaatgcaaatgtatactgtaagtctacctt

SEQ ID NO: 322953 - DNA, 120 bp, Artificial Sequence
  ENSG00000135842_28 (sequence is synthesized)
tttgtccacagtcagactgcaagagagggtaggtcatgaacagtcacccgtgctggctgtagcccccacagaggcaatcatgcccaatagattcaagagaagctaagcggaaatggaggg

SEQ ID NO: 322954 - DNA, 120 bp, Artificial Sequence
  ENSG00000135842_29 (sequence is synthesized)
tggaaggtgtgatctgtgggactgtctgggcctgttactcatcctgctatcaatttcttattaattaatcttgatgattcttattaattaatcacatttgcaggaaattcagatgaggca

SEQ ID NO: 322955 - DNA, 120 bp, Artificial Sequence
  ENSG00000135842_30 (sequence is synthesized)
agaaaattttattggcctgggtaagactgaaagcattccaaattaggcttagactgtgcaaagggcttagctaagttatcgagcttaaaacccgtcaattaaacaaacattatttgaaca

SEQ ID NO: 322956 - DNA, 120 bp, Artificial Sequence
  ENSG00000135842_31 (sequence is synthesized)
gttactgcatgccacgcactgtgttgggcttagtaataaaaaaaagaaaagataagtgcttgttctagcataaattaaaaggtccaagggaatttaatctggaagagaacatatgccaat

SEQ ID NO: 322957 - DNA, 120 bp, Artificial Sequence
  ENSG00000135842_32 (sequence is synthesized)
ttttaaactatgacagcttttttttttctctttccattcaaatagtcctggttcattcccagaagggcacaaaatgaatgaataaataaataaatgaataaagacaaaagccaaggtgta

SEQ ID NO: 322958 - DNA, 120 bp, Artificial Sequence
  ENSG00000135842_33 (sequence is synthesized)
tgctctcaagttccaaagatgttatcaaaagctgaaatcatttgtttggtcattcagcaagctaattgagtctctgttatataccaagcactggggataccatggcgaaaaacaactttg

SEQ ID NO: 322959 - DNA, 120 bp, Artificial Sequence
  ENSG00000135842_34 (sequence is synthesized)
ttccttcctcctagaacttacattttaatggaaatagacaaaacacatcttcttaacggatggtgacctataaccattaatgttgaaaatggaagagacttgcttccaaaagattaaaag

SEQ ID NO: 322960 - DNA, 120 bp, Artificial Sequence
  ENSG00000135842_35 (sequence is synthesized)
gagttgttcttttctccttcagaaaaataccagatcatttcctaaaatctccagtcccaagtattacatcgtggtttccctccccgactttttattttattttattctatttttttgaga

SEQ ID NO: 322961 - DNA, 80 bp, Artificial Sequence
  ENSG00000135842_36 (sequence is synthesized)
agattctcctctgtcagcgtcccaagtagctggaattacagccatgcggcaccattcccggctaatttttgtatttttgg

SEQ ID NO: 322962 - DNA, 120 bp, Artificial Sequence
  ENSG00000135842_37 (sequence is synthesized)
agtgctgggattacagcgtgagctacctggcccctccccaaattttaacatcagatctcaacatatttgttgagaacttgtttagatcatcactatcgagtaaatttatgtcagttcttt

SEQ ID NO: 322963 - DNA, 120 bp, Artificial Sequence
  ENSG00000135842_38 (sequence is synthesized)
agagcatttgcttcacacacagttcaaccatttaaccagaaattaaaatatcacccttttcagccctcccatgaagaatttctaggtcataaacatgaataatactcagtatatgtataa

SEQ ID NO: 322964 - DNA, 120 bp, Artificial Sequence
  ENSG00000135842_39 (sequence is synthesized)
tatcatatttaattgttgcaacttttcttggcgtgtttaaatcctcatgtctttgagggatcccaccacaggtgaaggaagtaaagaccacttctcccccagtctctgctttctgcagtg

SEQ ID NO: 322965 - DNA, 120 bp, Artificial Sequence
  ENSG00000135842_40 (sequence is synthesized)
ctcactcatatcctggcatttagcatggtgtgttgaaattaggtttacttcttgtctctccaagtggctcctctcttaaaagacagaaactagggtttagtcatcatttgtgcttcctgc

SEQ ID NO: 322966 - DNA, 120 bp, Artificial Sequence
  ENSG00000135842_41 (sequence is synthesized)
tagaaacccacagccttgaataatggcttcctgcctccttgagtcactttaatatccctggtgcataggacctggcatgcgtcaggctgctcgggaaatgtgggaactggacacccagaa

SEQ ID NO: 322967 - DNA, 120 bp, Artificial Sequence
  ENSG00000135842_42 (sequence is synthesized)
cactgctgtgctggggctatttggggcctgctgtcaggcagaaagacgttttgaattgggctttctgcccttgttgagttttctcttaagtaaagtccaaagtccaaggggcagatggcc

SEQ ID NO: 322968 - DNA, 120 bp, Artificial Sequence
  ENSG00000135842_43 (sequence is synthesized)
agatgcactgcccagtaaggcaggaagccaaagaggcagtgcccagccccacaaaggctgcccgactccctgggacagtagtgtggagtcccagcccaggctgacctcacaccggagctt

SEQ ID NO: 322969 - DNA, 120 bp, Artificial Sequence
  ENSG00000135842_44 (sequence is synthesized)
cctagcttcctttctttgctcaatgcagggcttcttgcaccccctggaaagctaagagatttttttcaaccctaaaagagagtacctttcactgcattggatggatgaacatcagtgccc

SEQ ID NO: 322970 - DNA, 120 bp, Artificial Sequence
  ENSG00000135842_45 (sequence is synthesized)
taactttatccatcatgtaggtcagggaggactgggcactatttggcaggatgtactccagaatataatcaaagaattttctgtacatatttcactaaagacaagtttttgggctggatg

SEQ ID NO: 322971 - DNA, 120 bp, Artificial Sequence
  ENSG00000135842_46 (sequence is synthesized)
gcactttgggaggctgaggtgagagggtcacttgagcccaggagttctagacaagcctgggaaacatagcaagatctcatccttacaaaaaataataatggtgtgtgcctgcagtcctag

SEQ ID NO: 322972 - DNA, 120 bp, Artificial Sequence
  ENSG00000135842_47 (sequence is synthesized)
aatggtgtgtgcctgcagtcctagctacttgggtggttgaggcaggaggattgtttgagcgagggaagttgaggctgcagtgaactatgattttaccactgcactccagcttgggcaaca

SEQ ID NO: 322973 - DNA, 120 bp, Artificial Sequence
  ENSG00000135842_48 (sequence is synthesized)
gagaccctgtctcaaaaaaaaaaaaaaagttttctagaataagcaggatgattgtttaatttgaagatggaacaggaaactagagtgcatttaaaatactctgtcttcattttaacatgt

SEQ ID NO: 322974 - DNA, 120 bp, Artificial Sequence
  ENSG00000135842_49 (sequence is synthesized)
atgttgaatggaataactgcatatcaccatgagtttgttttgcttttcatacagacttgtatgtgtcatttgagtggtttccagattggagcgaggttattctgatctaaatgaacagca

SEQ ID NO: 322975 - DNA, 120 bp, Artificial Sequence
  ENSG00000135842_50 (sequence is synthesized)
tttttttccttagcctctgtttgccactctgggtatctctcctatgggcaaagccattagaaatgcataaaacctcgagacatggtttttggcaaaaactccatgactttaaactagctc

SEQ ID NO: 322976 - DNA, 120 bp, Artificial Sequence
  ENSG00000135842_51 (sequence is synthesized)
ttttactactgacctttcacagagaaaaaatatttcccttgaaaaaaactgggcttgtcattttttcccttgtagctttaagcagagacataagtgccttgcattacacatagtaaactt

SEQ ID NO: 322977 - DNA, 120 bp, Artificial Sequence
  ENSG00000135842_52 (sequence is synthesized)
tctttaaaaaaaaaaaaaaaagattttggagactaccagggtaagattccaacttgtccaaaagctttctggccttacatattttattataaaaattctcaagtctggtaatcttctatg

SEQ ID NO: 322978 - DNA, 120 bp, Artificial Sequence
  ENSG00000135842_53 (sequence is synthesized)
tcagagctagtgatttcaaaaggtttcacaattccccaagacaaaagtgattttcgttcattataataaggttaagtgatatgtgattcatagcaattttgatgtgaagaagggaaggac

SEQ ID NO: 322979 - DNA, 120 bp, Artificial Sequence
  ENSG00000135842_54 (sequence is synthesized)
atcattgacttaataatagtatcagtcggtgcaacagttggcaacatgtgccttcacactttaccataaagagacgggtttgagggtttgccttctaaagtctgcaacttcaagaaaaaa

SEQ ID NO: 322980 - DNA, 120 bp, Artificial Sequence
  ENSG00000135842_55 (sequence is synthesized)
aatcgacactgtggattgactttcccggtcactatataaagcaaataaacttaaaacactttgtaaccatgtatttactctgccaggtgcctatattccaataaaatgttcatccttgaa

SEQ ID NO: 322981 - DNA, 120 bp, Artificial Sequence
  ENSG00000135842_56 (sequence is synthesized)
gaagttgtgccttaacccaaaagggtgttcctgtggtaaactgtgtactctataaatgttctccaaagctagaattttcttggtttatgcaaatgtacagctgagaataattttgtggga

SEQ ID NO: 322982 - DNA, 120 bp, Artificial Sequence
  ENSG00000135842_57 (sequence is synthesized)
tatgttgcaggggtggggttgaaaaattcatggtacttatctattaccagttctttgtgttttaagtacttagcctttatttttttttcctttcagcattttcttttgttaactggattc

SEQ ID NO: 322983 - DNA, 120 bp, Artificial Sequence
  ENSG00000135842_58 (sequence is synthesized)
ccatactggctgttgctgagggggttggggaagtcctgatctgacctgaattttttaaaacaattttttagcattttcttttggagaccacaaatcatattgcaagtcaacaacgtctgg

SEQ ID NO: 322984 - DNA, 120 bp, Artificial Sequence
  ENSG00000135842_59 (sequence is synthesized)
agttaggaaggagcaatgaaagcaaagcacccattttcacatcttaccagacaaagcccctccctgccaagttcctttctggtgggagatcagggcatggctcatgcaatcaccagctaa

SEQ ID NO: 322985 - DNA, 120 bp, Artificial Sequence
  ENSG00000135842_60 (sequence is synthesized)
gaaaggaactgagacttctcttcatttgttgttttttccttccccacctttccctagaaactattagactgccacactgtcccgttgtgtgacacgggacactttaagtgacggggtaga

SEQ ID NO: 322986 - DNA, 85 bp, Artificial Sequence
  ENSG00000135842_61 (sequence is synthesized)
ttccagccggtggcaaggtgttaacctcagaagatgaatataatctgttgtctgacaggcatttcccagaccctcttatgtgatc

SEQ ID NO: 322987 - DNA, 120 bp, Artificial Sequence
  ENSG00000135842_62 (sequence is synthesized)
ctgggctcaagtaatcctcccacctcagactctcgagttgctgggaccacagctacatgccactatgcccagaaaaacaaaacaagcaaaaaaacaaacaaagaactgcagagacaatgg

SEQ ID NO: 322988 - DNA, 70 bp, Artificial Sequence
  ENSG00000135842_63 (sequence is synthesized)
aataagtgtattctttacagagtgttcagctaagttgatacagaaaaaaatgcccccgtgttttgttaaa

SEQ ID NO: 322989 - DNA, 120 bp, Artificial Sequence
  ENSG00000135842_64 (sequence is synthesized)
taagttgatacagaaaaaaatgcccccgtgttttgttaaagtaattcacttgtttggcattttactggttagaatctcatttactgcatacaataaaaaactcaaagttttattatctca

SEQ ID NO: 322990 - DNA, 120 bp, Artificial Sequence
  ENSG00000135842_65 (sequence is synthesized)
ttgatgaaactctgaaaggtgcctatattccaataaaatgttcatccttgaagagctgaccagatgtcatttatttggaaggaggctggtttcatcttttaagcagatgtcacatttgaa

SEQ ID NO: 322991 - DNA, 120 bp, Artificial Sequence
  ENSG00000135842_66 (sequence is synthesized)
ttgtgaggtacagccctctgaaacgaaaaggcgagtcattcttgctgtatcatggaccttttacttttctgttgtcacgaaggaatctgcagggaaaccacttaatgtcaggtgtaatta

SEQ ID NO: 322992 - DNA, 120 bp, Artificial Sequence
  ENSG00000135842_67 (sequence is synthesized)
tgctttgataatgcatatgcttacgtctccaggaattggatcacattcataatacagcagtgggcaattattcttgatgtaattgaactgctgttcaaacttaaatttattttcaatggg

SEQ ID NO: 322993 - DNA, 120 bp, Artificial Sequence
  ENSG00000135845_0 (sequence is synthesized)
acagtcgcagccccggcgccccgaagcgggaaaaaggctgggtgccgccgtcccccagctgcgcaaccctaggaactctcgggaacttggctgtgttgtcctgcctcagagacaaattca

SEQ ID NO: 322994 - DNA, 120 bp, Artificial Sequence
  ENSG00000135845_1 (sequence is synthesized)
tctattgtaggcctagcccctgcctttgaaaacaaggaaaggttggtagaacatcaacacagcatggaatttccagggaggtctcatttcaaaacttcataaagaacaagaaccacctgg

SEQ ID NO: 322995 - DNA, 120 bp, Artificial Sequence
  ENSG00000135845_2 (sequence is synthesized)
acttctgtgagggcgatgattaaactggcctgagtttgaatgaaaggataatgtatgctcaacctgtgactaacaccaaggaggtcaagtggcagaaggtcttgtatgagcgacagccct

SEQ ID NO: 322996 - DNA, 120 bp, Artificial Sequence
  ENSG00000135845_3 (sequence is synthesized)
ttcctgataactatgtggaccggcgattcctggaagagctccggaaaaacatccatgctcggaaataccaatattgggctgtggtatttgagtccagtgtggtgatccagcagctgtgca

SEQ ID NO: 322997 - DNA, 120 bp, Artificial Sequence
  ENSG00000135845_4 (sequence is synthesized)
gtgtttgtgtttttgtggttatctggtggtatatggatgagggtcttctggccccccattggcttttagggactggtctggcttcttcactgattgggtatgttttgtttgatctcattg

SEQ ID NO: 322998 - DNA, 120 bp, Artificial Sequence
  ENSG00000135845_5 (sequence is synthesized)
atggaggtgaagggcggaagaagagtgggcagacccggtgggctgacctgaagagtgccctagtcttcattactttcacttatgggttttcaccagtgctgaagacccttacagagtctg

SEQ ID NO: 322999 - DNA, 120 bp, Artificial Sequence
  ENSG00000135845_6 (sequence is synthesized)
ctatgccatgtcagtcttcatgctgttaggccatctcatcttttttgactatggtgccaatgctgccattgtatccagcacactatccttgaacatggccatctttgcttctgtatgctt

SEQ ID NO: 323000 - DNA, 120 bp, Artificial Sequence
  ENSG00000135845_7 (sequence is synthesized)
ggcatcacgtcttccccggtccctgcatgccttcatcatggtgacatttgccattcagatttttgccctgtggcccatgttgcagaagaaactaaaggcatgtactccccggagctatgt

SEQ ID NO: 323001 - DNA, 120 bp, Artificial Sequence
  ENSG00000135845_8 (sequence is synthesized)
gggggtcacactgctttttgcattttcagccgtgggaggcctactgtccattagtgctgtgggagccgtactctttgcccttctgctgatgtctatctcatgtctgtgtccattctacct

SEQ ID NO: 323002 - DNA, 120 bp, Artificial Sequence
  ENSG00000135845_9 (sequence is synthesized)
cattcgcttgcagctttttaaagaaaacattcatgggccttgggatgaagctgaaatcaaggaagacttgtccaggttcctcagttaaattaggacatccattacattattaaagcaagc

SEQ ID NO: 323003 - DNA, 120 bp, Artificial Sequence
  ENSG00000135845_10 (sequence is synthesized)
tgatagattagcctcctaactagtatagaacttaaagacagagttccattctggaagcagcatgtcattgtggtaagagaatagagatcaaaaccaaaaaaaatgaaccaaaggcttggg

SEQ ID NO: 323004 - DNA, 120 bp, Artificial Sequence
  ENSG00000135845_11 (sequence is synthesized)
tggtgagggtgcttatcctttctgttattttgtagatgaaaaaactttctggggacctcttgaattacatgctgtaacatatgaagtgatgtggtttctattaaaaaaataacacatcca

SEQ ID NO: 323005 - DNA, 120 bp, Artificial Sequence
  ENSG00000135845_12 (sequence is synthesized)
cccggaagtgcttggccacagtcgcagccccggcgccccgaagcgggaaaaaggctgggtgccgccgtcccccagctgcgcaaccctaggaactctcgggtaggtgggttccgtgtaacg

SEQ ID NO: 323006 - DNA, 120 bp, Artificial Sequence
  ENSG00000135845_13 (sequence is synthesized)
gtcagtgtttccggggctccttttcctctgctgcctcccgcagacccaaggctgagtgaggggcggcggcggaagtgggaggcccacccaaaaagccaaatggggtgccagaagagtgaa

SEQ ID NO: 323007 - DNA, 120 bp, Artificial Sequence
  ENSG00000135845_14 (sequence is synthesized)
ggcgcaccctggggtcaccctaccctaccccgtcccctcccagccccactctgcgggcgggcgctgcccttttgggcgtcgcagaccctccaaccccggcggcggccttaagattcccgg

SEQ ID NO: 323008 - DNA, 120 bp, Artificial Sequence
  ENSG00000135845_15 (sequence is synthesized)
gctgggatccctgctgcagagggggtaacggtgtctggcttgccaagcaatatttgttgtggtctatcatggaagaaataaagtcgggcaatatgaattttttttttctcaaatttgccg

SEQ ID NO: 323009 - DNA, 120 bp, Artificial Sequence
  ENSG00000135845_16 (sequence is synthesized)
gatggctgtggtgtttctgactcttagttttctcattgtgaaaaaggaatgattatcttcttcgatcctctcaagagtttccttgttttgagtagattgatagctctttaaaggatgcta

SEQ ID NO: 323010 - DNA, 120 bp, Artificial Sequence
  ENSG00000135845_17 (sequence is synthesized)
agctcagctaatggaagaagagtctagtttctttgaggctttgattttggttaaactatagagctcatacctttctgtatggtgcagcttactattgtctttggattggtaacttaaaaa

SEQ ID NO: 323011 - DNA, 120 bp, Artificial Sequence
  ENSG00000135845_18 (sequence is synthesized)
atacaaataacatgcctttgagaaccaataaaaactatggatattatccctataaatttacacaaatccagatataagcatgcaatgtgatatacctaagggatatgtgaaccactgagt

SEQ ID NO: 323012 - DNA, 120 bp, Artificial Sequence
  ENSG00000135845_19 (sequence is synthesized)
taagaactgctttagagggagatacaatgtgagacacaggctttgggataagactttggtttgaatcctggctctgctctgttaccttagggcaaagttacttaagcatcttgaatctca

SEQ ID NO: 323013 - DNA, 120 bp, Artificial Sequence
  ENSG00000135845_20 (sequence is synthesized)
gcttttttaccaaagcaggactaatactaacttacaaggtggtgaggattaagtgaaagaagatacataaggcacttagcacatagtaggtactcaataagcgatagctaacagatgtct

SEQ ID NO: 323014 - DNA, 120 bp, Artificial Sequence
  ENSG00000135845_21 (sequence is synthesized)
attattattcaaggaattataattttcaaatctgaaatgcagttttaatgtcccataaggtgactaccacatacatttttctcagacttttagtaaactgagttgatttgactttatctc

SEQ ID NO: 323015 - DNA, 120 bp, Artificial Sequence
  ENSG00000135845_22 (sequence is synthesized)
atatagtgcagagcaaagcagcgtttgaactgatggcagcactaatgactctcggtgaaacagtgaaaagataaatgatccttaatcaggaaaatgtttaaataagcaagtgcctggata

SEQ ID NO: 323016 - DNA, 120 bp, Artificial Sequence
  ENSG00000135845_23 (sequence is synthesized)
taccacagcaaaacaacctgaattcatttaagtaaatgaagaagaaaaaaagaagcagtaaactgccccttctaccaatgtctaagatgaacgggaaaaatgcatataaatggaattttt

SEQ ID NO: 323017 - DNA, 120 bp, Artificial Sequence
  ENSG00000135845_24 (sequence is synthesized)
catcaaggaaatgtaaaataaaaatagtaatttgtctctgatctttgaggcaaaaaagaatggtctgcaaacatttaaccttttatgtgcaggttcaatgatgctgtttaaaaaacgtga

SEQ ID NO: 323018 - DNA, 120 bp, Artificial Sequence
  ENSG00000135845_25 (sequence is synthesized)
ataatattgtagaaaccagcttgtttctaaaaaatacaatagacagtccttcctattgcagtttttaaaaatagctattgagaaatctaatttaaccaataaaaacaccagcattgtaaa

SEQ ID NO: 323019 - DNA, 120 bp, Artificial Sequence
  ENSG00000135845_26 (sequence is synthesized)
agatcaacctggatgccttccttcacaataatctcatggaggtaatttaaagaatcccttttttggagagtcagagagaaaagcaaaaaaaaagagcatgaggaatttgaagactgagag

SEQ ID NO: 323020 - DNA, 120 bp, Artificial Sequence
  ENSG00000135845_27 (sequence is synthesized)
gaattaaaagtactggtgacagtaacagtttccctctgtcttttggctgtccacactgaaggatgatagagatgagtagaagaaggccaaacccagccatcaccagaacagggcctgctg

SEQ ID NO: 323021 - DNA, 120 bp, Artificial Sequence
  ENSG00000135845_28 (sequence is synthesized)
gctttgtgagcatttcacaatattgtctggagctgtttggcttatagaagagggaaggtactatgagctaatttgtgtcaagctactcctcacagctataggcaggaagtgctatttcct

SEQ ID NO: 323022 - DNA, 120 bp, Artificial Sequence
  ENSG00000135845_29 (sequence is synthesized)
gcttgaaccatctaagccccagaacatgacacagaaaaaaagaagcagtaaactgccccttctaccaatgtctaagatgaacgggaaaaatgcatataaatggaatttttcttttacgtg

SEQ ID NO: 323023 - DNA, 120 bp, Artificial Sequence
  ENSG00000135845_30 (sequence is synthesized)
atgatacagtgttttggtgtcccaaagaaataaaatccagcactgtccaattgaagtataatgcaagccacatttctagtagccatattttaaaaagtaacaataaagtgttgaaattta

SEQ ID NO: 323024 - DNA, 120 bp, Artificial Sequence
  ENSG00000135845_31 (sequence is synthesized)
tttctgcctgaccttcatacctgatgaattaaaagggcaataattaaggtggaatttgcctcacatgaagttttattattttagttattaaaatagtttccaacactactgagaagcaaa

SEQ ID NO: 323025 - DNA, 120 bp, Artificial Sequence
  ENSG00000135845_32 (sequence is synthesized)
aagcaattctcgttgttttaagaacataggatgtttggaagagtgagataggggacacattgaaaacagagaggcaatctgaaggctaccttgacgcatctgcaaagctcccagattctg

SEQ ID NO: 323026 - DNA, 120 bp, Artificial Sequence
  ENSG00000135845_33 (sequence is synthesized)
actttcacaagacttgctttctgtttctgggcctcgcctaaacagactgccagtcatccgaaccgtggcaggatggagatgtttgtgtaaggtagactcaagtttgcaagactcaagaag

SEQ ID NO: 323027 - DNA, 120 bp, Artificial Sequence
  ENSG00000135845_34 (sequence is synthesized)
gaaaccaccaaactaattttactttcacttaaaccagattgaaaccaagacttgaagaattaaaaactttgacattaaccattgattcactccaatgaaataattgtgttatagccagaa

SEQ ID NO: 323028 - DNA, 120 bp, Artificial Sequence
  ENSG00000135845_35 (sequence is synthesized)
attttcattaaagtatattaagcatcatgacaactcatattaaacctgcaacaaatgattaatgacatttagagacttcaaatgtcatgagacaccttaaatattaagaatcaaaaagaa

SEQ ID NO: 323029 - DNA, 120 bp, Artificial Sequence
  ENSG00000135845_36 (sequence is synthesized)
cacctcaaagttgtttctattcttagtaattatgcttaaaaaaacatctttccttgctttgaaagccagttgctaaaaataaaaactgttccatgaaaaatcacaatgcccaatgataaa

SEQ ID NO: 323030 - DNA, 120 bp, Artificial Sequence
  ENSG00000135845_37 (sequence is synthesized)
tttatgtatttgttttttaaagggggaggatggtgagaaaaatagaaagctcctggctgacatcagaggtcacaagatgagttcctcatttgtccaaatgacattcagctgctaaaagaa

SEQ ID NO: 323031 - DNA, 120 bp, Artificial Sequence
  ENSG00000135845_38 (sequence is synthesized)
gtcagacttttagagggctgttgaaaagacagtaagtcaggaggttttcagtacatgactgcaggggaatcagacacaggctagtcacttaagttgcttaattgtccgtgtacccttagc

SEQ ID NO: 323032 - DNA, 120 bp, Artificial Sequence
  ENSG00000135845_39 (sequence is synthesized)
ccacgacttcagggctcagcagcttcatccttcatggcaccaaaccttgacgtaagggattcaaagacacactcataagaatcgtgaatttgtcctcatgcaaaatttgggggactggct

SEQ ID NO: 323033 - DNA, 120 bp, Artificial Sequence
  ENSG00000135845_40 (sequence is synthesized)
acaaaaccgaaacaaggagatcgtatccctaagtgaaagggactttatattaattgtcagttataacaatatgtaaaatacataaaagagatagagcactgcaggccatcaaggtcaaac

SEQ ID NO: 323034 - DNA, 120 bp, Artificial Sequence
  ENSG00000135845_41 (sequence is synthesized)
atttgaaacagaattaaactaaattataaggaggattaaatggcttttgtctttgtaaagaaaagaatatgcatgcattgattgcctatgtagaaggattaataaatcttttggcatggt

SEQ ID NO: 323035 - DNA, 120 bp, Artificial Sequence
  ENSG00000135862_0 (sequence is synthesized)
gcactcgggcacgcgctcggaagtcgggggtcggcgcggagtgcaggctgctcccggggtaggtgagggaagcgcggaggcggcgcgcgggggcagtggtcggcgagcagcgcggtcctc

SEQ ID NO: 323036 - DNA, 120 bp, Artificial Sequence
  ENSG00000135862_1 (sequence is synthesized)
cacccgtcagtctctccggcgcgagccgccgccaccgcccgcgccggagtcaggcccctgggcccccaggctcaagcagcgaagcggcctccgggggacgccgctaggcgagaggaacgc

SEQ ID NO: 323037 - DNA, 120 bp, Artificial Sequence
  ENSG00000135862_2 (sequence is synthesized)
gaagcggcctccgggggacgccgctaggcgagaggaacgcgccggtgcccttgccttcgccgtgacccagcgtgcgggcggcgggatgagagggagccatcgggccgcgccggccctgcg

SEQ ID NO: 323038 - DNA, 120 bp, Artificial Sequence
  ENSG00000135862_3 (sequence is synthesized)
gccgtgctggcggcggccgccgcggcgggctgtgcccaggcagccatggacgagtgcacggacgagggcgggcggccgcagcgctgcatgcccgagttcgtcaacgccgccttcaacgtg

SEQ ID NO: 323039 - DNA, 120 bp, Artificial Sequence
  ENSG00000135862_4 (sequence is synthesized)
actgtggtggccaccaacacgtgtgggactccgcccgaggaatactgtgtgcagaccggggtgaccggggtcaccaagtcctgtcacctgtgcgacgccgggcagccccacctgcagcac

SEQ ID NO: 323040 - DNA, 120 bp, Artificial Sequence
  ENSG00000135862_5 (sequence is synthesized)
ggggcagccttcctgaccgactacaacaaccaggccgacaccacctggtggcaaagccagaccatgctggccggggtgcagtaccccagctccatcaacctcacgctgcacctgggaaaa

SEQ ID NO: 323041 - DNA, 120 bp, Artificial Sequence
  ENSG00000135862_6 (sequence is synthesized)
gcttttgacatcacctatgtgcgtctcaagttccacaccagccgcccggagagctttgccatttacaagcgcacacgggaagacgggccctggattccttaccagtactacagtggttcc

SEQ ID NO: 323042 - DNA, 120 bp, Artificial Sequence
  ENSG00000135862_7 (sequence is synthesized)
tgtgagaacacctactccaaggcaaaccgcggcttcatcaggacaggaggggacgagcagcaggccttgtgtactgatgaattcagtgacatttctcccctcactgggggcaacgtggcc

SEQ ID NO: 323043 - DNA, 120 bp, Artificial Sequence
  ENSG00000135862_8 (sequence is synthesized)
ttttctaccctggaaggaaggcccagcgcctataactttgacaatagccctgtgctgcaggaatgggtaactgccactgacatcagagtaactcttaatcgcctgaacacttttggagat

SEQ ID NO: 323044 - DNA, 120 bp, Artificial Sequence
  ENSG00000135862_9 (sequence is synthesized)
gaagtgtttaacgatcccaaagttctcaagtcctattattatgccatctctgattttgctgtaggtggcagatgtaaatgtaatggacacgcaagcgagtgtatgaagaacgaatttgat

SEQ ID NO: 323045 - DNA, 120 bp, Artificial Sequence
  ENSG00000135862_10 (sequence is synthesized)
aagctggtgtgtaattgcaaacataacacatatggagtagactgtgaaaagtgtcttcctttcttcaatgaccggccgtggaggagggcaactgcggaaagtgccagtgaatgcctgccc

SEQ ID NO: 323046 - DNA, 120 bp, Artificial Sequence
  ENSG00000135862_11 (sequence is synthesized)
tgtgattgcaatggtcgatcccaggaatgctacttcgaccctgaactctatcgttccactggccatgggggccactgtaccaactgccaggataacacagatggcgcccactgtgagagg

SEQ ID NO: 323047 - DNA, 120 bp, Artificial Sequence
  ENSG00000135862_12 (sequence is synthesized)
tgccgagagaacttcttccgccttggcaacaatgaagcctgctcttcatgccactgtagtcctgtgggctctctaagcacacagtgtgatagttacggcagatgcagctgtaagccagga

SEQ ID NO: 323048 - DNA, 120 bp, Artificial Sequence
  ENSG00000135862_13 (sequence is synthesized)
gtgatgggggacaaatgtgaccgttgccagcctggattccattctctcactgaagcaggatgcaggccatgctcttgtgatccctctggcagcatagatgaatgtaatattgaaacagga

SEQ ID NO: 323049 - DNA, 120 bp, Artificial Sequence
  ENSG00000135862_14 (sequence is synthesized)
agatgtgtttgcaaagacaatgtcgaaggcttcaattgtgaaagatgcaaacctggattttttaatctggaatcatctaatcctcggggttgcacaccctgcttctgctttgggcattct

SEQ ID NO: 323050 - DNA, 120 bp, Artificial Sequence
  ENSG00000135862_15 (sequence is synthesized)
tctgtctgtacaaacgctgttggctacagtgtttattctatctcctctacctttcagattgatgaggatgggtggcgtgcggaacagagagatggctctgaagcatctctcgagtggtcc

SEQ ID NO: 323051 - DNA, 120 bp, Artificial Sequence
  ENSG00000135862_16 (sequence is synthesized)
tctgagaggcaagatatcgccgtgatctcagacagctactttcctcggtacttcattgctcctgcaaagttcttgggcaagcaggtgttgagttatggtcagaacctctccttctccttt

SEQ ID NO: 323052 - DNA, 120 bp, Artificial Sequence
  ENSG00000135862_17 (sequence is synthesized)
cgagtggacaggcgagatactcgcctctctgcagaagaccttgtgcttgagggagctggcttaagagtatctgtacccttgatcgctcagggcaattcctatccaagtgagaccactgtg

SEQ ID NO: 323053 - DNA, 120 bp, Artificial Sequence
  ENSG00000135862_18 (sequence is synthesized)
aagtatgtcttcaggctccatgaagcaacagattacccttggaggcctgctcttaccccttttgaatttcagaagctcctaaacaacttgacctctatcaagatacgtgggacatacagt

SEQ ID NO: 323054 - DNA, 120 bp, Artificial Sequence
  ENSG00000135862_19 (sequence is synthesized)
gagagaagtgctggatatttggatgatgtcaccctggcaagtgctcgtcctgggcctggagtccctgcaacttgggtggagtcctgcacctgtcctgtgggatatggagggcagttttgt

SEQ ID NO: 323055 - DNA, 120 bp, Artificial Sequence
  ENSG00000135862_20 (sequence is synthesized)
gagatgtgcctctcaggttacagaagagaaactcctaatcttggaccatacagtccatgtgtgctttgcgcctgcaatggacacagcgagacctgtgatcctgagacaggtgtttgtaac

SEQ ID NO: 323056 - DNA, 120 bp, Artificial Sequence
  ENSG00000135862_21 (sequence is synthesized)
tgcagagacaatacggctggcccgcactgtgagaagtgcagtgatgggtactatggagattcaactgcaggcacctcctccgattgccaaccctgtccgtgtcctggaggttcaagttgt

SEQ ID NO: 323057 - DNA, 120 bp, Artificial Sequence
  ENSG00000135862_22 (sequence is synthesized)
gctgttgttcccaagacaaaggaggtggtgtgcaccaactgtcctactggcaccactggtaagagatgtgagctctgtgatgatggctactttggagaccccctgggtagaaacggccct

SEQ ID NO: 323058 - DNA, 120 bp, Artificial Sequence
  ENSG00000135862_23 (sequence is synthesized)
gtgagactttgccgcctgtgccagtgcagtgacaacatcgatcccaatgcagttggaaattgcaatcgcttgacgggagaatgcctgaagtgcatctataacactgctggcttctattgt

SEQ ID NO: 323059 - DNA, 120 bp, Artificial Sequence
  ENSG00000135862_24 (sequence is synthesized)
gaccggtgcaaagacggattttttggaaatcccctggctcccaatccagcagacaaatgcaaagcctgcaattgcaatctgtatgggaccatgaagcagcagagcagctgtaaccccgtg

SEQ ID NO: 323060 - DNA, 120 bp, Artificial Sequence
  ENSG00000135862_25 (sequence is synthesized)
acggggcagtgtgaatgtttgcctcacgtgactggccaggactgtggtgcttgtgaccctggattctacaatctgcagagtgggcaaggctgtgagaggtgtgactgccatgccttgggc

SEQ ID NO: 323061 - DNA, 120 bp, Artificial Sequence
  ENSG00000135862_26 (sequence is synthesized)
tccaccaatgggcagtgtgacatccgcaccggccagtgtgagtgccagcccggcatcactggtcagcactgtgagcgctgtgaggtcaaccactttgggtttggacctgaaggctgcaaa

SEQ ID NO: 323062 - DNA, 120 bp, Artificial Sequence
  ENSG00000135862_27 (sequence is synthesized)
ccctgtgactgtcatcctgagggatctctttcacttcagtgcaaagatgatggtcgctgtgaatgcagagaaggctttgtgggaaatcgctgtgaccagtgtgaagaaaactatttctac

SEQ ID NO: 323063 - DNA, 120 bp, Artificial Sequence
  ENSG00000135862_28 (sequence is synthesized)
aatcggtcttggcctggctgccaggaatgtccagcttgttaccggctggtaaaggataaggttgctgatcatagagtgaagctccaggaattagagagtctcatagcaaaccttggaact

SEQ ID NO: 323064 - DNA, 120 bp, Artificial Sequence
  ENSG00000135862_29 (sequence is synthesized)
ggggatgagatggtgacagatcaagccttcgaggatagactaaaggaagcagagagggaagttatggacctccttcgtgaggcccaggatgtcaaagatgttgaccagaatttgatggat

SEQ ID NO: 323065 - DNA, 120 bp, Artificial Sequence
  ENSG00000135862_30 (sequence is synthesized)
cgcctacagagagtgaataacactctgtccagccaaattagccgtttacagaatatccggaataccattgaagagactggaaacttggctgaacaagcgcgtgcccatgtagagaacaca

SEQ ID NO: 323066 - DNA, 120 bp, Artificial Sequence
  ENSG00000135862_31 (sequence is synthesized)
gagcggttgattgaaatcgcatccagagaacttgagaaagcaaaagtcgctgctgccaatgtgtcagtcactcagccagaatctacaggggacccaaacaacatgactcttttggcagaa

SEQ ID NO: 323067 - DNA, 120 bp, Artificial Sequence
  ENSG00000135862_32 (sequence is synthesized)
gaggctcgaaagcttgctgaacgtcataaacaggaagctgatgacattgttcgagtggcaaagacagccaatgatacgtcaactgaggcatacaacctgcttctgaggacactggcagga

SEQ ID NO: 323068 - DNA, 120 bp, Artificial Sequence
  ENSG00000135862_33 (sequence is synthesized)
acagcatttgagattgaagagcttaataggaagtatgaacaagcgaagaacatctcacaggatctggaaaaacaagctgcccgagtacatgaggaggccaaaagggccggtgacaaagct

SEQ ID NO: 323069 - DNA, 120 bp, Artificial Sequence
  ENSG00000135862_34 (sequence is synthesized)
gtggagatctatgccagcgtggctcagctgagccctttggactctgagacactggagaatgaagcaaataacataaagatggaagctgagaatctggaacaactgattgaccagaaatta

SEQ ID NO: 323070 - DNA, 120 bp, Artificial Sequence
  ENSG00000135862_35 (sequence is synthesized)
aaagattatgaggacctcagagaagatatgagagggaaggaacttgaagtcaagaaccttctggagaaaggcaagactgaacagcagaccgcagaccaactcctagcccgagctgatgct

SEQ ID NO: 323071 - DNA, 120 bp, Artificial Sequence
  ENSG00000135862_36 (sequence is synthesized)
gccaaggccctcgctgaagaagctgcaaagaagggacgggataccttacaagaagctaatgacattctcaacaacctgaaagattttgataggcgtgtgaacgataacaagacggccgca

SEQ ID NO: 323072 - DNA, 120 bp, Artificial Sequence
  ENSG00000135862_37 (sequence is synthesized)
gaggaggcactaaggaagattcctgccatcaaccagaccatcactgaagccaatgaaaagaccagagaagcccagcaggccctgggcagtgctgcggcggatgccacagaggccaagaac

SEQ ID NO: 323073 - DNA, 120 bp, Artificial Sequence
  ENSG00000135862_38 (sequence is synthesized)
aaggcccatgaggcggagaggatcgcgagcgctgtccaaaagaatgccaccagcaccaaggcagaagctgaaagaacttttgcagaagttacagatctggataatgaggtgaacaatatg

SEQ ID NO: 323074 - DNA, 120 bp, Artificial Sequence
  ENSG00000135862_39 (sequence is synthesized)
ttgaagcaactgcaggaagcagaaaaagagctaaagagaaaacaagatgacgctgaccaggacatgatgatggcagggatggcttcacaggctgctcaagaagccgagatcaatgccaga

SEQ ID NO: 323075 - DNA, 120 bp, Artificial Sequence
  ENSG00000135862_40 (sequence is synthesized)
aaagccaaaaactctgttactagcctcctcagcattattaatgacctcttggagcagctggggcagctggatacagtggacctgaataagctaaacgagattgaaggcaccctaaacaaa

SEQ ID NO: 323076 - DNA, 120 bp, Artificial Sequence
  ENSG00000135862_41 (sequence is synthesized)
gccaaagatgaaatgaaggtcagcgatcttgataggaaagtgtctgacctggagaatgaagccaagaagcaggaggctgccatcatggactataaccgagatatcgaggagatcatgaag

SEQ ID NO: 323077 - DNA, 120 bp, Artificial Sequence
  ENSG00000135862_42 (sequence is synthesized)
gacattcgcaatctggaggacatcaggaagaccttaccatctggctgcttcaacaccccgtccattgaaaagccctagtgtctttagggctggaaggcagcatccctctgacaggggggc

SEQ ID NO: 323078 - DNA, 120 bp, Artificial Sequence
  ENSG00000135862_43 (sequence is synthesized)
agttgtgaggccacagagtgccttgacacaaagattacatttttcagacccccactcctctgctgctgtccatgactgtccttttgaaccaggaaaagtcacagagtttaaagagaagca

SEQ ID NO: 323079 - DNA, 120 bp, Artificial Sequence
  ENSG00000135862_44 (sequence is synthesized)
aattaaacatcctgaatcgggaacaaagggttttatctaataaagtgtctcttccattcacgttgctaccttacccacactttcccttctgatttgcgtgaggacgtggcatcctacgtt

SEQ ID NO: 323080 - DNA, 120 bp, Artificial Sequence
  ENSG00000135862_45 (sequence is synthesized)
actgtacagtggcataagcacatcgtgtgagcccatgtatgctggggtagagcaagtagccctcccctgtctcatcgataccagcagaacctcctcagtctcagtactcttgtttctatg

SEQ ID NO: 323081 - DNA, 120 bp, Artificial Sequence
  ENSG00000135862_46 (sequence is synthesized)
aaggaaaagtttggctactaacagtagcattgtgatggccagtatatccagtccatggataaagaaaatgcatctgcatctcctacccctcttccttctaagcaaaaggaaataaacatc

SEQ ID NO: 323082 - DNA, 120 bp, Artificial Sequence
  ENSG00000135862_47 (sequence is synthesized)
ctgtgccaaaggtattggtcatttagaatgtcggtagccatccatcagtgcttttagttattatgagtgtaggacactgagccatccgtgggtcaggatgcaattatttataaaagtctc

SEQ ID NO: 323083 - DNA, 120 bp, Artificial Sequence
  ENSG00000135862_48 (sequence is synthesized)
caggtgaacatggctgaagatttttctagtatattaataattgactaggaagatgaactttttttcagatctttgggcagctgataatttaaatctggatgggcagcttgcactcaccaa

SEQ ID NO: 323084 - DNA, 120 bp, Artificial Sequence
  ENSG00000135862_49 (sequence is synthesized)
tagaccaaaagacatcttttgatattcttataaatggaacttacacagaagaaatagggatatgataaccactaaaattttgttttcaaaatcaaactaattcttacagcttttttatta

SEQ ID NO: 323085 - DNA, 120 bp, Artificial Sequence
  ENSG00000135862_50 (sequence is synthesized)
gttagtcttggaactagtgttaagtatctggcagagaacagttaatccctaaggtcttgacaaaacagaagaaaaacaagcctcctcgtcctagtcttttctagcaaagggataaaactt

SEQ ID NO: 323086 - DNA, 120 bp, Artificial Sequence
  ENSG00000135862_51 (sequence is synthesized)
agatggcagcttgtactgtcagaatcccgtgtatccatttgttcttctgttggagagatgagacatttgacccttagctccagttttcttctgatgtttccatcttccagaatccctcaa

SEQ ID NO: 323087 - DNA, 120 bp, Artificial Sequence
  ENSG00000135862_52 (sequence is synthesized)
aaaacattgtttgccaaatcctggtggcaaatacttgcactcagtatttcacacagctgccaacgctatcgagttcctgcactttgtgatttaaatccactctaaaccttccctctaagt

SEQ ID NO: 323088 - DNA, 120 bp, Artificial Sequence
  ENSG00000135862_53 (sequence is synthesized)
gtagagggaagacccttacgtggagtttcctagtgggcttctcaacttttgatcctcagctctgtggttttaagaccacagtgtgacagttccctgccacacacccccttcctcctacca

SEQ ID NO: 323089 - DNA, 120 bp, Artificial Sequence
  ENSG00000135862_54 (sequence is synthesized)
acccacctttgagattcatatatagcctttaacactatgcaactttgtactttgcgtagcaggggcggggtggggggaaagaaactattatctgacacactggtgctattaattatttca

SEQ ID NO: 323090 - DNA, 120 bp, Artificial Sequence
  ENSG00000135862_55 (sequence is synthesized)
aatttatatttttgtgtgaatgttttgtgttttgtttatcatgattatagaataaggaatttatgtaaatatacttagtcctatttctagaatgacactctgttcactttgctcaatttt

SEQ ID NO: 323091 - DNA, 120 bp, Artificial Sequence
  ENSG00000135862_56 (sequence is synthesized)
tcctcttcactggcacaatgtatctgaatacctccttccctcccttctagaattctttggattgtactccaaagaattgtgccttgtgtttgcagcatctccattctctaaaattaatat

SEQ ID NO: 323092 - DNA, 120 bp, Artificial Sequence
  ENSG00000135862_57 (sequence is synthesized)
aattgctttcctccacacccagccactgtaaagaggtaacttgggtcctcttccattgcagtcctgatgatcctaacctgcagcacggtggttttacaatgttccagagcaggaacgcca

SEQ ID NO: 323093 - DNA, 120 bp, Artificial Sequence
  ENSG00000135862_58 (sequence is synthesized)
ggttgacaagctatggtaggattaggaaagtttgctgaagaggatctttgacgccacagtgggactagccaggaatgagggagaaatgccctttctggcaattgttggagctggataggt

SEQ ID NO: 323094 - DNA, 120 bp, Artificial Sequence
  ENSG00000135862_59 (sequence is synthesized)
aagttttataagggagtacattttgactgagcacttagggcatcaggaacagtgctacttactgatgggtagactgggagaggtggtgtaacttagttcttgatgatcccacttcctgtt

SEQ ID NO: 323095 - DNA, 120 bp, Artificial Sequence
  ENSG00000135862_60 (sequence is synthesized)
tccatctgcttgggatataccagagtttaccacaagtgttttgacgatatactcctgagctttcactctgctgcttctcccaggcctcttctactatggcaggagatgtggcgtgctgtt

SEQ ID NO: 323096 - DNA, 120 bp, Artificial Sequence
  ENSG00000135862_61 (sequence is synthesized)
gcaaagttttcacgtcattgtttcctggctagttcatttcattaagtggctacatcctaacatatgcatttggtcaaggttgcagaagaggactgaagattgactgccaagctagtttgg

SEQ ID NO: 323097 - DNA, 120 bp, Artificial Sequence
  ENSG00000135862_62 (sequence is synthesized)
gtgaagttcactccagcaagtctcaggccacaatggggtggtttggtttggtttccttttaactttctttttgttatttgcttttctcctccacctgtgtggtatattttttaagcagaa

SEQ ID NO: 323098 - DNA, 120 bp, Artificial Sequence
  ENSG00000135862_63 (sequence is synthesized)
ttttattttttaaaataaaaggttctttacaagatgataccttaattacactcccgcaacacagccattattttattgtctagctccagttatctgtattttatgtaatgtaattgacag

SEQ ID NO: 323099 - DNA, 120 bp, Artificial Sequence
  ENSG00000135862_64 (sequence is synthesized)
gatggctgctgcagaatgctggttgacacagggattattatactgctatttttccctgaatttttttcctttgaattccaactgtggaccttttatatgtgccttcactttagctgtttg

SEQ ID NO: 323100 - DNA, 120 bp, Artificial Sequence
  ENSG00000135862_65 (sequence is synthesized)
ccttaatctctacagccttgctctccggggtggttaataaaatgcaacacttggcatttttatgttttaagaaaaacagtattttatttataataaaatctgaatatttgtaacccttta

SEQ ID NO: 323101 - DNA, 120 bp, Artificial Sequence
  ENSG00000135862_66 (sequence is synthesized)
gctaagccttcaaaatccagtgtgtatctcacgtttatagcacatctcaattcagactcaccagccacatttaaagtgctcagtagccacatgtgacagcagctaccaacctggcaacac

SEQ ID NO: 323102 - DNA, 120 bp, Artificial Sequence
  ENSG00000135862_67 (sequence is synthesized)
aggtctaaagaatctctttaggttgtttatattttagtatttctctcaggtgatttgtgtcttttgccatctctgtcttcctgccttagcctgcaattgcaatctgtatgggaccatgaa

SEQ ID NO: 323103 - DNA, 120 bp, Artificial Sequence
  ENSG00000135862_68 (sequence is synthesized)
tacagtgtttattctatctcctctacctttcagattggtaatttagacctcatcccccaacctgttagaactgtgagattacacttaaaatatttttaaaaataaaatcagtgactcttt

SEQ ID NO: 323104 - DNA, 120 bp, Artificial Sequence
  ENSG00000135870_0 (sequence is synthesized)
caaagattttgattccagtggaatctttgctttagatttgtgtgtgtgtttgtgttcgtgaattgtaactccagaagcaatgcctgtacaagctccacaatggacggatttcctctcctg

SEQ ID NO: 323105 - DNA, 120 bp, Artificial Sequence
  ENSG00000135870_1 (sequence is synthesized)
cccaatttgcactcagactttcgacgaaacaattcgaaagcccatcagtttgggttgtggccatactgtctgcaagatgtgcctgaataaactccaccgcaaggcttgcccatttgacca

SEQ ID NO: 323106 - DNA, 120 bp, Artificial Sequence
  ENSG00000135870_2 (sequence is synthesized)
gaccactatcaatacagacattgagctcctccctgtgaactcagcattgctgcagctcgtgggtgctcaggtccctgagcagcagcctattactttgtgtagtggggttgaagacacaaa

SEQ ID NO: 323107 - DNA, 120 bp, Artificial Sequence
  ENSG00000135870_3 (sequence is synthesized)
gcattatgaggaagccaagaaatgtgtagaagaattagcattgtacttaaaaccgctcagcagtgctagaggagtgggtctgaacagcactactcagagtgttctgagtcgcccaatgca

SEQ ID NO: 323108 - DNA, 120 bp, Artificial Sequence
  ENSG00000135870_4 (sequence is synthesized)
gaggaagcttgtgactctagtccactgtcaactagtagaagaagaaggcaggattcgtgccatgagggcagctcgatctttaggtgaacgaacagttacagagctcattctccagcacca

SEQ ID NO: 323109 - DNA, 120 bp, Artificial Sequence
  ENSG00000135870_5 (sequence is synthesized)
gaatcctcagcaactctcttccaatctttgggcagcagtaagggctaggggatgccagttccttggaccagcaatgcaggaggaagctttaaagttggttctgctggccttagaagatgg

SEQ ID NO: 323110 - DNA, 120 bp, Artificial Sequence
  ENSG00000135870_6 (sequence is synthesized)
ttctgctttgtcaagaaaagtattggttctgtttgtggtgcaaagattggagccacggtttcctcaagcctctaaaactagcattgggcatgttgttcagctcctttatagagcctcctg

SEQ ID NO: 323111 - DNA, 120 bp, Artificial Sequence
  ENSG00000135870_7 (sequence is synthesized)
tttcaaggtcaccaaacgtgatgaagactcttctttgatgcagctgaaagaagaatttagaacctatgaagctctgcggcgagaacatgactcccagatagtgcagattgctatggaagc

SEQ ID NO: 323112 - DNA, 120 bp, Artificial Sequence
  ENSG00000135870_8 (sequence is synthesized)
aggcttacgaattgcaccggaccagtggtcctctttgctttatggagaccagtctcacaaatctcatatgcagtccattattgacaagttgcagactccagcctcttttgcacagagtgt

SEQ ID NO: 323113 - DNA, 120 bp, Artificial Sequence
  ENSG00000135870_9 (sequence is synthesized)
tcaggaactaacaattgctctccagcgaactggagacccagcaaacttgaaccgactaagaccccatttggagctgttagcaaacattgaccctagtccagatgctcctcctcctacttg

SEQ ID NO: 323114 - DNA, 120 bp, Artificial Sequence
  ENSG00000135870_10 (sequence is synthesized)
ggaacagctggaaaatgggctggttgctgtgcgtacagtggtacatgggctggttgattatatccagaaccacagcaaaaaaggagcagatcagcagcagcctccacagcatagcaaata

SEQ ID NO: 323115 - DNA, 120 bp, Artificial Sequence
  ENSG00000135870_11 (sequence is synthesized)
caaaacatacatgtgtcgagatatgaagcagagaggaggatgccctcgtggggccagctgtacatttgcacactcacaggaggaactggaaaaatttcgtaaaatgaataagcgcctggt

SEQ ID NO: 323116 - DNA, 120 bp, Artificial Sequence
  ENSG00000135870_12 (sequence is synthesized)
tccgagaagacccttgagtgcctctttgggtcaacttaatgaggtgggcctgccttcagcagctatccttccagatgaaggtgcagtggatctccctagcagaaaacctcctgctctgcc

SEQ ID NO: 323117 - DNA, 120 bp, Artificial Sequence
  ENSG00000135870_13 (sequence is synthesized)
aaatggaattgtatcaacagggaatacagtaacacagcttattccgcgagggacagaccccagctatgattctagtctgaaaccaggaaaaatagatcatctgagcagtagtgctcctgg

SEQ ID NO: 323118 - DNA, 120 bp, Artificial Sequence
  ENSG00000135870_14 (sequence is synthesized)
atcccctcctgacctgctagaatctgttcctaagagtatttctgccttacctgtgaatccacattctatacctccaagggggccagcagatctgcctccaatgcctgttaccaaaccact

SEQ ID NO: 323119 - DNA, 120 bp, Artificial Sequence
  ENSG00000135870_15 (sequence is synthesized)
tcagatggtacctcgaggttctcagttatatccagcacaacagacggatgtttattatcaggatcctcgaggagcagctccgccatttgaaccagcaccttatcagcagggtatgtatta

SEQ ID NO: 323120 - DNA, 120 bp, Artificial Sequence
  ENSG00000135870_16 (sequence is synthesized)
tactccaccaccacaatgtgtgtcccgctttgtccgacctccaccatctgctcctgaacctgctcctccctacttggatcattatccaccctacctccaagaacgtgttgtaaactctca

SEQ ID NO: 323121 - DNA, 120 bp, Artificial Sequence
  ENSG00000135870_17 (sequence is synthesized)
gtatggcacacagccacagcagtacccacctatatacccatctcactatgatggccgtcgagtgtaccctgctccgtcttacacaagagaagagatattccgagaaagccctatacccat

SEQ ID NO: 323122 - DNA, 120 bp, Artificial Sequence
  ENSG00000135870_18 (sequence is synthesized)
tgagattccacctgcagcagtaccatcgtatgtaccagaatccagagaaagataccaacagatcgagagttactatccagtggctcctcatccaactcagatcagaccttcgtacctcag

SEQ ID NO: 323123 - DNA, 120 bp, Artificial Sequence
  ENSG00000135870_19 (sequence is synthesized)
agaacctccttatagccggcttcctcctcctccccagcctcatcctagtctagatgaactacatcgccgacgaaaggaaataatggcccagctagaggaaagaaaggttatctctccacc

SEQ ID NO: 323124 - DNA, 120 bp, Artificial Sequence
  ENSG00000135870_20 (sequence is synthesized)
tccttttgcaccttcaccaaccttgcctcctacctttcatccggaagaatttttggatgaagacttgaaggtagctgggaaatacaaaggaaatgattatagccaatactctccctggtc

SEQ ID NO: 323125 - DNA, 120 bp, Artificial Sequence
  ENSG00000135870_21 (sequence is synthesized)
atgtgacaccatcggctcctacattggaaccaaagatgcaaaacccaaagatgttgtggcagcagggagtgtggaaatgatgaatgtggagagtaaaggaatgagggaccagcgattaga

SEQ ID NO: 323126 - DNA, 120 bp, Artificial Sequence
  ENSG00000135870_22 (sequence is synthesized)
tcttcagagaagagcagcagaaaccagtgatgatgacctcatcccatttggagaccgaccaacagtgtctcggtttggtgccatctcacgaacttccaaaactatatatcagggtgctgg

SEQ ID NO: 323127 - DNA, 120 bp, Artificial Sequence
  ENSG00000135870_23 (sequence is synthesized)
tccaatgcaggctatggcacctcagggagctcctacaaaatctattaacatttcagattatagtccatatggaacccacggtggctggggagcttctccatattcacctcatcaaaacat

SEQ ID NO: 323128 - DNA, 120 bp, Artificial Sequence
  ENSG00000135870_24 (sequence is synthesized)
accttctcagggacacttcagtgagagggagagaatatctatgtcagaagtggccagtcatggaaaaccccttccatctgctgagagagaacagctacgactagaattgcagcaattgaa

SEQ ID NO: 323129 - DNA, 120 bp, Artificial Sequence
  ENSG00000135870_25 (sequence is synthesized)
ccatcagattagccagcagacccagctacgtggactagaggctgttagtaacaggctggtgttgcagagggaggcaaacaccctggcaggccagtcacagcccccaccaccgccacctcc

SEQ ID NO: 323130 - DNA, 120 bp, Artificial Sequence
  ENSG00000135870_26 (sequence is synthesized)
aaaatggcctgggatgatctcaagtgagcagttgagcttggaactgcaccaggtggaaagggaaatcgggaagagaacacgggaactgagtatggaaaaccagtgttctctggacatgaa

SEQ ID NO: 323131 - DNA, 120 bp, Artificial Sequence
  ENSG00000135870_27 (sequence is synthesized)
aagcaaactgaatacaagtaaacaagcagaaaatggacaaccagaaccacaaaacaaggttccggctgaggaccttacattgacattcagtgatgtaccaaatggatcagccttgacaca

SEQ ID NO: 323132 - DNA, 120 bp, Artificial Sequence
  ENSG00000135870_28 (sequence is synthesized)
agagaatatcagcctcctatcaaacaagaccagctctctgaacctgtcagaggaccctgagggaggaggggataataatgactcccagagatcaggagttactcccagttctgctcctta

SEQ ID NO: 323133 - DNA, 120 bp, Artificial Sequence
  ENSG00000135870_29 (sequence is synthesized)
aaatatgaggagtcctacttttatcttctgctcctaatcagtttgtcgggcataggggtaggagaacgcataacttctaaactttttctcttaagagcggtcagagaaatccaggaaatt

SEQ ID NO: 323134 - DNA, 120 bp, Artificial Sequence
  ENSG00000135870_30 (sequence is synthesized)
caccagaggcaatgtgcacaaacaccactactaaaaacaaaccctgcacatagttcacattaatgcatttttttaatttaaagaaaaagaaaattagcagtatctgcaagcaattcagat

SEQ ID NO: 323135 - DNA, 120 bp, Artificial Sequence
  ENSG00000135870_31 (sequence is synthesized)
taaatttgtttttgttctgtgaatgaactttattttaataactttggacgccttggatccagggctttaaaaaaaaaagatattatatatacactctgtttgattaattgtatgatctta

SEQ ID NO: 323136 - DNA, 120 bp, Artificial Sequence
  ENSG00000135870_32 (sequence is synthesized)
atgaagtaggttttcttgtattttggtattacatacccagtgtataatttgtataattcctcacccccaatccttatcaattctcaccaccccataaacttaaaacagaccaaaaatgtc

SEQ ID NO: 323137 - DNA, 120 bp, Artificial Sequence
  ENSG00000135870_33 (sequence is synthesized)
agctttcagagaattctgtggtgcttgagaaacagacagtactagactgagttattagaaaatgtgcagcaaaccaacttttcccagagctgttatttggaattctttatccctttctag

SEQ ID NO: 323138 - DNA, 120 bp, Artificial Sequence
  ENSG00000135870_34 (sequence is synthesized)
atcactagcttcattggatacgtatatttttcttgacattgaagctttttgtttgtttgggagggttttatttcttgtttttattttcaacttttcaaatagaattaccaattttgaagt

SEQ ID NO: 323139 - DNA, 120 bp, Artificial Sequence
  ENSG00000135870_35 (sequence is synthesized)
cctcattttcatattaaggatcatttgcattctcttaatataatcagaaagctgattcagtgtttaattagatttaaatgttgatcaagaattaactgtaacttactagcactgaaaata

SEQ ID NO: 323140 - DNA, 120 bp, Artificial Sequence
  ENSG00000135870_36 (sequence is synthesized)
catgtttggtgtttcgcctgcgttcagctcatggttggaaatttgaagcagtgcttttcaaattaaacttttgctgacatcataggatgctaaaaaacaaggacaatcaactatgtttta

SEQ ID NO: 323141 - DNA, 120 bp, Artificial Sequence
  ENSG00000135870_37 (sequence is synthesized)
aaactgcaacatttgatttgaacttaaaatgaatagagccacattattttaatggatgttttgttttacttgtgaactgattgagtcttaaggatagtttatgaattgatcacttgttgc

SEQ ID NO: 323142 - DNA, 120 bp, Artificial Sequence
  ENSG00000135870_38 (sequence is synthesized)
tcagaatcattagtataagtaggtaggaaatagtttgaagtcatttttcatagacttaactgtccaatgttgcaaatgtttcttcatgaaaatattgaaaagagtaaggttttttttttt

SEQ ID NO: 323143 - DNA, 120 bp, Artificial Sequence
  ENSG00000135870_39 (sequence is synthesized)
tttaattctgctgcacatattctgatgccatgtgtctgtgcttaattaactaagaccctataaaacgtgtttagtggggactgtttgatatagttgccctctccattcctctatttgcct

SEQ ID NO: 323144 - DNA, 120 bp, Artificial Sequence
  ENSG00000135870_40 (sequence is synthesized)
gatttttttcagtttccctttctgtattttactactaaattagaaagcactggttatgtaataagttactacattgctttggttgagtaaaaacaagagtttatatttttcttgtttctt

SEQ ID NO: 323145 - DNA, 120 bp, Artificial Sequence
  ENSG00000135870_41 (sequence is synthesized)
attttcttaacccttaactcctgctgaggtcataacaacctcagtctaagctctgtgtccatcatactgttaacttaaacaaatgggtggtgggggtgggaagggtaatacagtcctgcc

SEQ ID NO: 323146 - DNA, 120 bp, Artificial Sequence
  ENSG00000135870_42 (sequence is synthesized)
attgcctaccagtaggagagtccaaacagaacactcttttgagtagcaattatttaatttgcccagtcaaggcaccgtgtttatatactatttcacattgaatttgattatgccctacag

SEQ ID NO: 323147 - DNA, 120 bp, Artificial Sequence
  ENSG00000135870_43 (sequence is synthesized)
acctggctggtcaaggatttgatatacacatattggcttgggattcgagctttcttttttatttaaataaaaatttatatatatattatatatatacatatatacatagctatatctgta

SEQ ID NO: 323148 - DNA, 120 bp, Artificial Sequence
  ENSG00000135870_44 (sequence is synthesized)
tatatattgggtatgttttaaggattttttcgcatgagcgcagctgttgcgataaattgaccgattgggaggtggtagaagcactgaatgaaggtgaggctttttttttttccagttttc

SEQ ID NO: 323149 - DNA, 120 bp, Artificial Sequence
  ENSG00000135870_45 (sequence is synthesized)
tatgtatgctttttcttttttttttggcttttgtttgctttttgacttttacttaaaacccttttacatttccactttaaatgcctattgtttattgggagaaggaaagaaacttttgta

SEQ ID NO: 323150 - DNA, 120 bp, Artificial Sequence
  ENSG00000135870_46 (sequence is synthesized)
gggagaaggaaagaaacttttgtatgtctgacagagtcccaagatttttcatttctctgcataacagtaaaaggcaacattattggcctccaaccttctttttttttttttttttttttt

SEQ ID NO: 323151 - DNA, 64 bp, Artificial Sequence
  ENSG00000135870_47 (sequence is synthesized)
tttttttttttttttttttggagagggagtctgcttctgttgcccaggctggagtgcagtgggt

SEQ ID NO: 323152 - DNA, 120 bp, Artificial Sequence
  ENSG00000135870_48 (sequence is synthesized)
tccagctaatttttgtactacaaccttcttataagcagatttggactgatcttctcctttgggtatgtcagatcatcctaaattttagaagcagttgattcactttggaattcagaatga

SEQ ID NO: 323153 - DNA, 120 bp, Artificial Sequence
  ENSG00000135870_49 (sequence is synthesized)
ttcttgtattagaagataatttgtgggtattaatttttgtttaagtttaaaataaaagtaaagattcattttggatatcagttgaaaccccttagtaactcagtttctgttattcttgtt

SEQ ID NO: 323154 - DNA, 120 bp, Artificial Sequence
  ENSG00000135870_50 (sequence is synthesized)
ctcatttcctttaaatacacttgttcttggcttttgccattttgattctgtgaagtaggcaggagcagggattaatttatacagtattcctgttctgaacaaaaccagaaaagtcactgt

SEQ ID NO: 323155 - DNA, 120 bp, Artificial Sequence
  ENSG00000135870_51 (sequence is synthesized)
ataaacttgacttaaaatagtatctttctcttttcatgtattttcatttgggggaaaaaaaatctctttaattgtaacctgaattcaagctgtacccctccatggtcctacactctagag

SEQ ID NO: 323156 - DNA, 120 bp, Artificial Sequence
  ENSG00000135870_52 (sequence is synthesized)
ctaatctggttgggcagaaaggcagaaggatggtatattgtcccattgtgcctataatgtattttaaattggtcattccaccttacctaatggaaattcttgcagctttcctagtgctca

SEQ ID NO: 323157 - DNA, 120 bp, Artificial Sequence
  ENSG00000135870_53 (sequence is synthesized)
tcagcggttttaggaattcactaacacccccaaaatttgttttttgttttttgctttttttccttttccttttctctgtgatatcatgagcctgtaaggacaaatggcatatttgggcat

SEQ ID NO: 323158 - DNA, 120 bp, Artificial Sequence
  ENSG00000135870_54 (sequence is synthesized)
aactgcttgactctgtaactacttttttaaaatcaaaattgaaaaggtattaattgcttctggctttttaatttttttttttagagacaaagatgaaaccagataggaaatacagttttt

SEQ ID NO: 323159 - DNA, 120 bp, Artificial Sequence
  ENSG00000135870_55 (sequence is synthesized)
atgttttctacttactaaaatattagtttcttctaaatattactttatttgtatttcactaaattccaaagcaaaaatcagatatctgagatgaacaattttgaatgggttaaggtagga

SEQ ID NO: 323160 - DNA, 120 bp, Artificial Sequence
  ENSG00000135870_56 (sequence is synthesized)
gtaataagcattgtgttcactcatacataggtgagggaattttatttatagcgagaaatataaaagtattttgacttactcttttttcaaggagtcgctaggaaagggtagaagaactga

SEQ ID NO: 323161 - DNA, 120 bp, Artificial Sequence
  ENSG00000135870_57 (sequence is synthesized)
gaataagacatctagattccatttctggtttatatgtagctcttttgcctaatttatatataattttgtcataagataagtccagtaactgtcctgtcttagataacgtacagaggctga

SEQ ID NO: 323162 - DNA, 120 bp, Artificial Sequence
  ENSG00000135870_58 (sequence is synthesized)
agtgaccaaagatccattccttattacttttctaattaaaagaagagttagctagatttctagtagtagtattctagatattgataagacattattcctaatgccaactacaaatattca

SEQ ID NO: 323163 - DNA, 120 bp, Artificial Sequence
  ENSG00000135870_59 (sequence is synthesized)
actactcagaatgtatttaaaaaattgtttggtacagcattaatgttggtgattcctttctcccatcttatttcccttcccttctattctttcccatgtatttcttttgcctaaaagaat

SEQ ID NO: 323164 - DNA, 120 bp, Artificial Sequence
  ENSG00000135870_60 (sequence is synthesized)
attggtatgattctcatttgctactttgagtatataactccatcagactttccagagttcttcagggatggagctcaaagtttacatttttccatatatgtctttttttttcttgacctt

SEQ ID NO: 323165 - DNA, 120 bp, Artificial Sequence
  ENSG00000135870_61 (sequence is synthesized)
tttccaccctgtaatttccccttgacttacccactgccctccccaatctgcaacagtgacagtttgctgcctcaaaacagagcattcaaatgaattcgcttagccaataacttctgtgaa

SEQ ID NO: 323166 - DNA, 120 bp, Artificial Sequence
  ENSG00000135870_62 (sequence is synthesized)
gttgccttttctaatggtgttattactcagtgatgcacaaatgtggtatttgccctactggtaggcaaacaaaggtctggttaagaatggtaacctgctgttttctttaaaggagagcca

SEQ ID NO: 323167 - DNA, 120 bp, Artificial Sequence
  ENSG00000135870_63 (sequence is synthesized)
aagacttgtgctttactctgttttggttttgggggaagtagtagccattttgatcatgaaaccttttagtatttgtgagttgattgtactgtgtaagtagatttatctaaagttaactgt

SEQ ID NO: 323168 - DNA, 120 bp, Artificial Sequence
  ENSG00000135870_64 (sequence is synthesized)
taaagttagctagccttataaaatgtaaaagtaatgaaaattcatcagtttctctaagccagtgaatgtcgtcttttgtaatattgtgtataagcatttgtgcccaccccagcttctgct

SEQ ID NO: 323169 - DNA, 120 bp, Artificial Sequence
  ENSG00000135870_65 (sequence is synthesized)
atcactgtggtcaagtcatgggtctgagtaaaagaattcttgagtatgtgactggtgagaaataactaactatagtcagtacatgtacagattgttaaaattcaagacaaaatactttca

SEQ ID NO: 323170 - DNA, 120 bp, Artificial Sequence
  ENSG00000135870_66 (sequence is synthesized)
ctaaaaaaaaggattcgtctcagtaaagaagtattcagttgctgtcacttacatacaaatggtggtgggtagcagtctcaccatttttctactctctttttgctcgttttaaataattga

SEQ ID NO: 323171 - DNA, 120 bp, Artificial Sequence
  ENSG00000135870_67 (sequence is synthesized)
gtaaaggttttatttgtaaaatctatctgtaaaaagcacctgtaacgatttatatgtcattgaaaggaatggcccagttactttttaggagagattaataacctacctggaaattaactg

SEQ ID NO: 323172 - DNA, 120 bp, Artificial Sequence
  ENSG00000135870_68 (sequence is synthesized)
cagtgtttacttagattttttccccctaataagagtctaagtgtgttaaatttttaactgatgatatggttacagtgttgcaaggtgatctcttcccctgaaaaatctgcctatcctttt

SEQ ID NO: 323173 - DNA, 120 bp, Artificial Sequence
  ENSG00000135870_69 (sequence is synthesized)
aagaaaaattagacctactaaactaaagcaaattttactttcatcattagcacctaaacaagcaagcagtctactactgtcatcattttacctgagtgcccattttgctgatccacattc

SEQ ID NO: 323174 - DNA, 120 bp, Artificial Sequence
  ENSG00000135870_70 (sequence is synthesized)
atacctttctaccttggacagctatgatttttatatttatttgttgcttcagctcaggtttatgaaattttcctgctgaaatgacttattgggagttgtaggttgattatagttactatt

SEQ ID NO: 323175 - DNA, 120 bp, Artificial Sequence
  ENSG00000135870_71 (sequence is synthesized)
aaacattttctcaatttagcttttctgagccacttcaagaagaaagctgtttttgtcaaaaggtactattaattgtagcaagtaaatcttaagatttgaatttttaagattttatttctg

SEQ ID NO: 323176 - DNA, 120 bp, Artificial Sequence
  ENSG00000135870_72 (sequence is synthesized)
tgttcactaaagatctttccacaagtaatagattataattgataagtaatactagctatagtgttaataaagagtaagactatcaccaccaggaataagtaacaccttttaataataaat

SEQ ID NO: 323177 - DNA, 120 bp, Artificial Sequence
  ENSG00000135870_73 (sequence is synthesized)
ctattcctaataggtatgttttcaatactgcactgaacaaagtgggtaaagagccctttgaaatcttattgtaataaagggacttacctcaccactggaatccttgttttcagagcctct

SEQ ID NO: 323178 - DNA, 120 bp, Artificial Sequence
  ENSG00000135870_74 (sequence is synthesized)
ggattttcagccaaacactgaatttctcctaaactttatccctgaaacatccctagagaacgaactttattttcacaagaaaataaggcacaataagggggaagaacttaaacctcaaca

SEQ ID NO: 323179 - DNA, 120 bp, Artificial Sequence
  ENSG00000135870_75 (sequence is synthesized)
taatatcgtgtccaaaaatgtgtatttagaaaaataaaatcctgtggagtttgttatcctaatgtttattttatactagataaggtgacttgttttcttgtattgaggtcttactgtttc

SEQ ID NO: 323180 - DNA, 120 bp, Artificial Sequence
  ENSG00000135870_76 (sequence is synthesized)
agatttgtttttgtttctgttctaactctaagcagacagagctcacaagtctttggcatccattttaggttgtacactcagagtcatcttataactggaaactgtcaggtggtcccccac

SEQ ID NO: 323181 - DNA, 120 bp, Artificial Sequence
  ENSG00000135870_77 (sequence is synthesized)
cccagtgagtgtatgaaagagtcaagaaaaagattggaaacaaactattgggtgaataattggttgctctattattattattattattatttgcctttttttaatcaccatttatttgtg

SEQ ID NO: 323182 - DNA, 120 bp, Artificial Sequence
  ENSG00000135870_78 (sequence is synthesized)
taatctttctccattgattggctgtcattcttataatatctgaactaccccataaaataattctctgacttaaaggcatttagcttttgcttatcgtttttacatcctctattcaactaa

SEQ ID NO: 323183 - DNA, 120 bp, Artificial Sequence
  ENSG00000135870_79 (sequence is synthesized)
gacactgtcttgagagttattttttccagatggatcgttggcctaaattttcacacttctcccctgttcatcctttttcctcttccctgcttcctgggaataaaaggaacttttttaaaa

SEQ ID NO: 323184 - DNA, 120 bp, Artificial Sequence
  ENSG00000135870_80 (sequence is synthesized)
aaattaattagtccacaggtctcattatctttctttatgattaatctatgactttttggtacaagaacaatggaaaaagtgaattaaggtaatgaacaaaacctttcacccacttaaaca

SEQ ID NO: 323185 - DNA, 120 bp, Artificial Sequence
  ENSG00000135870_81 (sequence is synthesized)
ttttccagttttgagattcctcttcgtgtttgtggtgtcttccccttgttaccccttctgccctttttctctgactatggtaatttggtctttaggctcatatcagtctccccgagacat

SEQ ID NO: 323186 - DNA, 120 bp, Artificial Sequence
  ENSG00000135870_82 (sequence is synthesized)
tctgcagtcattatcacctttttgggtggattttattttgttttattttgttttttttaaaaaaataactttttaacattggtgcatatttgcttgggatagagcttgtgtaatttacca

SEQ ID NO: 323187 - DNA, 120 bp, Artificial Sequence
  ENSG00000135870_83 (sequence is synthesized)
atcgtattgattgtaagtgattgtgccctgcagaggtatatttaacaagacaaaaataatcttggttaataaaggagcccatgagatttgagtcaggttgtaagtgaaatcacttacact

SEQ ID NO: 323188 - DNA, 120 bp, Artificial Sequence
  ENSG00000135870_84 (sequence is synthesized)
tttggatagaatttatactcctgctcttataaatcagtggtagacttaccattttttaaagttttcttgcatttttttgtttttttattgccacagctccctattctttcttgcctgcct

SEQ ID NO: 323189 - DNA, 120 bp, Artificial Sequence
  ENSG00000135870_85 (sequence is synthesized)
ccacccccctgttcaggaaaaaaaaaaattgagccttaaagtgacagctgattttttaattgctgaattttgtgaaattttactttttccaagtgtttccaactttaaaaagagaagtga

SEQ ID NO: 323190 - DNA, 120 bp, Artificial Sequence
  ENSG00000135870_86 (sequence is synthesized)
agacaaataggttggaatggtgaagacaaatggattggaatttcacaggctgtgaataattccttaggatctggcaaaccgtgaagtcttatttgaagaccttatctcctgagagttctt

SEQ ID NO: 323191 - DNA, 120 bp, Artificial Sequence
  ENSG00000135870_87 (sequence is synthesized)
ttggagtaggaaaaagaaccctatttgaaatagaccgtttttctcttgtttttaatctgtttaatatttctgatttttaagcagctttcaaaacaagtgtggtggaaaaaaagaaatagt

SEQ ID NO: 323192 - DNA, 120 bp, Artificial Sequence
  ENSG00000135870_88 (sequence is synthesized)
agtaggaagatgtttagggcagcagaactctgggtctaaataagtacatgttcccacttgttgccgatttttgagagtactagggccatctttctcaattttgtattatttgtgtgcatg

SEQ ID NO: 323193 - DNA, 120 bp, Artificial Sequence
  ENSG00000135870_89 (sequence is synthesized)
tttatatcaaagatgcccattttgttaaaatgctatttcctttattaccttggaaactgactcagcctcatgttgctcctaattagtgtttaaggctcccatgagttgcagataaaatga

SEQ ID NO: 323194 - DNA, 120 bp, Artificial Sequence
  ENSG00000135870_90 (sequence is synthesized)
tttattttaacaagtagaaggaggtgattcaccttttggattgtaaatatatgaaaatgtctacaaggtctttatctgctttctgtcagcatttatattaaatgataaattaatgaggaa

SEQ ID NO: 323195 - DNA, 120 bp, Artificial Sequence
  ENSG00000135870_91 (sequence is synthesized)
tggcccctgctgcaggagcagcctcagcagcagcaggtgggaggccggaggcggtgctggcggtggcggcggcagccgtggcccggcggcctgggacagaatcagagtcaacggtggcct

SEQ ID NO: 323196 - DNA, 120 bp, Artificial Sequence
  ENSG00000135870_92 (sequence is synthesized)
cggcggcggcggcggctgccgcggcggtggcgacggccgcggggactcggagctgagaggagctgctgctcggaccagcgcggttatatttcacactatgtgctgactgtatctacagaa

SEQ ID NO: 323197 - DNA, 120 bp, Artificial Sequence
  ENSG00000135870_93 (sequence is synthesized)
tgctggttaatcttaactgtattgccagttaattgaatagctgcagaaatgattaaatattccccttctaataaatggatttatcttatctatgtacttgataaattttggttttgccca

SEQ ID NO: 323198 - DNA, 120 bp, Artificial Sequence
  ENSG00000135898_0 (sequence is synthesized)
agaatgctctgggctttcaaaatggttacttttcggctgggcatggttttaaatggttacttttcctctcctgttgcctgaagcctggggatttttctcctgtcttcacagtgagaaact

SEQ ID NO: 323199 - DNA, 120 bp, Artificial Sequence
  ENSG00000135898_1 (sequence is synthesized)
ggtgaccttcctggaggtaaccccaggaaaatgtggggcttccctactacagggaccccaggactttatgacacttaagctagcccaaacactcagcctccagcaattcgtcaggtacca

SEQ ID NO: 323200 - DNA, 120 bp, Artificial Sequence
  ENSG00000135898_2 (sequence is synthesized)
tgtaagtgctcctacaagttgccggctcctgggtggcttctgcttctggaagttgtgattcaatgggcatgaattgctgtgtgatgctggggaggtgtttgtgattcttgacaaagtcat

SEQ ID NO: 323201 - DNA, 120 bp, Artificial Sequence
  ENSG00000135898_3 (sequence is synthesized)
ttgaatccatcacttcaagagagtgaaaggagccccgtctgatctgttggtgttgtaggaagaaacatgagtcagcaaaacaccagtggggactgcctgtttgacggtgtcaacgagctg

SEQ ID NO: 323202 - DNA, 120 bp, Artificial Sequence
  ENSG00000135898_4 (sequence is synthesized)
atgaaaaccctacagtttgcagtccacatccccaccttcgtcctgggcctgctcctcaacctgctggccatccatggcttcagcaccttccttaagaacaggtggcccgattatgctgcc

SEQ ID NO: 323203 - DNA, 120 bp, Artificial Sequence
  ENSG00000135898_5 (sequence is synthesized)
acctccatctacatgatcaacctggcagtctttgacctgctgctggtgctctccctcccattcaagatggtcctgtcccaggtacagtcccccttcccgtccctgtgcaccctggtggag

SEQ ID NO: 323204 - DNA, 120 bp, Artificial Sequence
  ENSG00000135898_6 (sequence is synthesized)
gctactggtgagccacctccggtcccccaggaagatctttgggatctgctgcaccatctgggtcctggtgtggaccggaagcatccctatctacagtttccatgggaaagtggaaaaata

SEQ ID NO: 323205 - DNA, 120 bp, Artificial Sequence
  ENSG00000135898_7 (sequence is synthesized)
catgtgcttccacaacatgtctgatgatacctggagcgccaaggtcttcttcccgctggaggtgtttggcttcctccttcccatgggcatcatgggcttctgctgctccaggagcatcca

SEQ ID NO: 323206 - DNA, 120 bp, Artificial Sequence
  ENSG00000135898_8 (sequence is synthesized)
catcctgctgggccgccgagaccacacccaggactgggtgcagcagaaagcctgcatctacagcatcgcagccagcctggctgtcttcgtggtctccttcctcccagtccacctggggtt

SEQ ID NO: 323207 - DNA, 120 bp, Artificial Sequence
  ENSG00000135898_9 (sequence is synthesized)
cttcctgcagttcctggtgagaaacagctttatcgtagagtgcagagccaagcagagcatcagcttcttcttgcaattgtccatgtgtttctccaacgtcaactgctgcctggatgtttt

SEQ ID NO: 323208 - DNA, 120 bp, Artificial Sequence
  ENSG00000135898_10 (sequence is synthesized)
ctgctactactttgtcatcaaagaattccgcatgaacatcagggcccaccggccttccagggtccagctggtcctgcaggacaccacgatctcccggggctaacggaaggacatcctgtt

SEQ ID NO: 323209 - DNA, 120 bp, Artificial Sequence
  ENSG00000135898_11 (sequence is synthesized)
caggggaagaaagccctggccctgaattctggtaacggatatcgcgttccagggttttgatgtggtgggatgatccgcaccatcttcactgatgtgcttccctttgatgcccattgagtg

SEQ ID NO: 323210 - DNA, 120 bp, Artificial Sequence
  ENSG00000135898_12 (sequence is synthesized)
tttttccactgcccagacagcttataccacccagtgttcagggatctctgaagaacccacagaccaggtgaattactgatttctaagtccaaaaactatagagcagaagaattgagaaag

SEQ ID NO: 323211 - DNA, 120 bp, Artificial Sequence
  ENSG00000135898_13 (sequence is synthesized)
agaatgagaccatgtcaacaaggctgtttccaactctccccattttcctgttcgactgggaggttctggaaagaaagagagagagagaaaagaggtaaaggagggagccaagagagtcag

SEQ ID NO: 323212 - DNA, 120 bp, Artificial Sequence
  ENSG00000135898_14 (sequence is synthesized)
ttattggggagagtgtcttgggcagaggtggggtggtagggatgagtgaagtccctttttagtttgggtgtcccagaacagagcagacttgcattttccagtcccttctggaactgtgtt

SEQ ID NO: 323213 - DNA, 120 bp, Artificial Sequence
  ENSG00000135898_15 (sequence is synthesized)
gccaaaagcctcactgagatgacagcaagaaggggtggtgttggggctgggcaagtagcatggatcaccccaagtttccagtgagcctcagaaaggtgaaggaagccagccacacctttc

SEQ ID NO: 323214 - DNA, 120 bp, Artificial Sequence
  ENSG00000135898_16 (sequence is synthesized)
agggctggaagcacacagcccctcccctatcaccatcagggtgtccacagcacggagtgttggtgctggcccagggtgaagagagacagtgagagacggcctgggagcggggagaccccg

SEQ ID NO: 323215 - DNA, 120 bp, Artificial Sequence
  ENSG00000135898_17 (sequence is synthesized)
acctgctttctatcttaaacagactgggaagttgctcattacagctagcttccttgaaaacaatggcaaagaatcaggcctgccttggttccaccataggagggtggaggaggtgctgtc

SEQ ID NO: 323216 - DNA, 120 bp, Artificial Sequence
  ENSG00000135898_18 (sequence is synthesized)
ttactcacctgcatcctggctgggcagctggcacccgtggcactgcccatggagccgtccctccctggcagctgggagggagatgaggcagctaggcacaagggtgtggccttgagaaag

SEQ ID NO: 323217 - DNA, 120 bp, Artificial Sequence
  ENSG00000135898_19 (sequence is synthesized)
aaggcaagggggggtccctgctggtcccaggaaactgtaaacaattgagtcacgcctggatggcttctcaacggatctggaggaggagtgcaagtgacagcggaagcctcccaatgactc

SEQ ID NO: 323218 - DNA, 120 bp, Artificial Sequence
  ENSG00000135898_20 (sequence is synthesized)
agctgctccggagagtgaaatgatgagaaggatccattgtggggtggttttgcatgacagagcgagtgggatgaggagtaactgatgagacttcatgtgagcaaggtcttcaggaggaaa

SEQ ID NO: 323219 - DNA, 120 bp, Artificial Sequence
  ENSG00000135898_21 (sequence is synthesized)
agcaactgaggtctacttgtaggatctgggctcagtgggggctgaagggcttgggaggggtggtgacctgaggggaagaagagaagcatttggataaacctggacctgtggggaggagga

SEQ ID NO: 323220 - DNA, 120 bp, Artificial Sequence
  ENSG00000135898_22 (sequence is synthesized)
ggaggaagaggaagaggaaaaggaggggaagctgagccgtggccctaggcttgaagcctgcagggagtgcagggtgggtggggaacctggctgagctgcttcctgcctgagagctttccc

SEQ ID NO: 323221 - DNA, 120 bp, Artificial Sequence
  ENSG00000135898_23 (sequence is synthesized)
agctggcctaagagccatggacggacaggagtcgccttctcaggagcagctcccgctgttgctgtgttcaagtggcaccctgtacacctcctcctaggtggatggagggaagggtgagga

SEQ ID NO: 323222 - DNA, 120 bp, Artificial Sequence
  ENSG00000135898_24 (sequence is synthesized)
agagagcgtcaatgaaggggtggaagtggatgtggaggagtgaccagaccagaccagaccagaccagagggatcggaggctcaggccccctgagctgggcctctaagaaccacagccaca

SEQ ID NO: 323223 - DNA, 120 bp, Artificial Sequence
  ENSG00000135898_25 (sequence is synthesized)
gagtcaggctctgcagacccagaggtaaggctgcctggctgccccaaaccccagacactcctctccttgcctgcaggctgccctctcccatggccaccctagacagagacccacccgtga

SEQ ID NO: 323224 - DNA, 120 bp, Artificial Sequence
  ENSG00000135898_26 (sequence is synthesized)
tactctgagggagccagactttcacatgcaacggggcatttggggctggttcgggtcagtgtctacgggtggtggatttagtgaccaccctcctcccacttctttctctgcacgaggagt

SEQ ID NO: 323225 - DNA, 120 bp, Artificial Sequence
  ENSG00000135898_27 (sequence is synthesized)
tgggagcctgcctggtggagttgagtgatgcccgtcatgtgcacttgggtctaccaatgtgcttaaggccagatgggcttcctaagagacaagggtgggtggacctaaccaactatcatc

SEQ ID NO: 323226 - DNA, 120 bp, Artificial Sequence
  ENSG00000135898_28 (sequence is synthesized)
cccagcgatgttcaaacataaaatcttatctatgtgcagcatgactctctccaggtgacagaaagggctctagacagctgagaggacctgatcatgtagggagggacggggaggggagcc

SEQ ID NO: 323227 - DNA, 120 bp, Artificial Sequence
  ENSG00000135898_29 (sequence is synthesized)
aggacccaggagctgcatggctgtaagaggaaggtccttggagggtatcagcagtctcagtgtgatgtgacaactatggacctgtgggtgtgccctggggacccctgacccatcccaaaa

SEQ ID NO: 323228 - DNA, 120 bp, Artificial Sequence
  ENSG00000135898_30 (sequence is synthesized)
cactgtggaaagaagggcctcttctccgtggggacccgtgtctgtgggagcgggcacaggtccatgctgcaggccactacggctgctcggcaggagggccgagagtttggacccacatag

SEQ ID NO: 323229 - DNA, 120 bp, Artificial Sequence
  ENSG00000135898_31 (sequence is synthesized)
ctgcaacccaagctggcccataatcagcagtggggcccagcagcacaggaggggcggacggttagctttggaaaaaatgacttgattaatctgattcgccaaataaatagattcatgtga

SEQ ID NO: 323230 - DNA, 120 bp, Artificial Sequence
  ENSG00000135898_32 (sequence is synthesized)
agaacaggctgacagccaggcctggaggagaaatgacatctctcagccctctcagctgcaccggaccaccaacagttgtgattcaatgggcatgaattgctgtgtgatgctggggaggtg

SEQ ID NO: 323231 - DNA, 120 bp, Artificial Sequence
  ENSG00000135899_0 (sequence is synthesized)
tgtaactctcccaatcttgaggagtgatccctgtcccagcccctggaaaggggcaggaacgacaaactcaaagtccaggatgttcaccatgacaagagccatggaagaggctctttttca

SEQ ID NO: 323232 - DNA, 120 bp, Artificial Sequence
  ENSG00000135899_1 (sequence is synthesized)
gcacttcatgcaccagaagctggggatcgcctatgccatacacaagccatttcccttctttgaaggcctcctagacaactccatcatcactaagagaatgtacatggaatctctggaagc

SEQ ID NO: 323233 - DNA, 120 bp, Artificial Sequence
  ENSG00000135899_2 (sequence is synthesized)
ctgtagaaatttgatccctgtatccagagtggtgcacaacattctcacccaactggagaggacttttaacctgtctcttctggtgacattgttcagtcaaattaacctgcgtgaatatcc

SEQ ID NO: 323234 - DNA, 120 bp, Artificial Sequence
  ENSG00000135899_3 (sequence is synthesized)
caatctggtgacgatttacagaagcttcaaacgtgttggtgcttcctatgaatggcagagcagagacacaccaatcctacttgaagccccaactggcctagcagaaggaagctccctcca

SEQ ID NO: 323235 - DNA, 120 bp, Artificial Sequence
  ENSG00000135899_4 (sequence is synthesized)
taccccactggcgctgcccccaccacaaccccctcaaccaagctgttcaccctgtgcgccaagagtcagtgagcctggaacatcctcccagcaaagcgatgagatcctgagtgagtcgcc

SEQ ID NO: 323236 - DNA, 120 bp, Artificial Sequence
  ENSG00000135899_5 (sequence is synthesized)
cagcccatctgaccctgtcctgcctctccctgcactcatccaggaaggaagaagcacttcagtgaccaatgacaagttaacatccaaaatgaatgcggaagaagactcagaagagatgcc

SEQ ID NO: 323237 - DNA, 120 bp, Artificial Sequence
  ENSG00000135899_6 (sequence is synthesized)
cagcctcctcactagcactgtgcaagtggccagtgacaacctgatcccccaaataagagataaagaagaccctcaagagatgccccactctcccttgggctctatgccagagataagaga

SEQ ID NO: 323238 - DNA, 120 bp, Artificial Sequence
  ENSG00000135899_7 (sequence is synthesized)
taattctccagaaccaaatgacccagaagagccccaggaggtgtccagcacaccttcagacaagaaaggaaagaaaagaaaaagatgtatctggtcaactccaaaaaggagacataagaa

SEQ ID NO: 323239 - DNA, 120 bp, Artificial Sequence
  ENSG00000135899_8 (sequence is synthesized)
aaaaagcctcccaggagggacagcctcatctagacacggaatccaaaagaagctcaaaagggtggatcaggttcctcaaaagaaagatgactcaacttgtaactccacggtagagacaag

SEQ ID NO: 323240 - DNA, 120 bp, Artificial Sequence
  ENSG00000135899_9 (sequence is synthesized)
tggcacttcagaaatgaatgaaggaaagaggtcccagaagacgcctagtacaccacgaagggtcacacaaggggcagcctcacctgggcatggcatccaagagaagctccaagtggtgga

SEQ ID NO: 323241 - DNA, 120 bp, Artificial Sequence
  ENSG00000135899_10 (sequence is synthesized)
taaggtgactcaaaggaaagacgactcaacctggaactcagaggtcatgatgagggtccaaaaggcaagaactaaatgtgcccgaaagtccagattgaaagaaaagaaaaaggagaaaga

SEQ ID NO: 323242 - DNA, 120 bp, Artificial Sequence
  ENSG00000135899_11 (sequence is synthesized)
tatctgttcaagctcaaaaaggagatttcagaaaaatattcaccgaagaggaaaacccaaaagtgacactgtggattttcactgttctaagctccccgtgacctgtggtgaggcgaaagg

SEQ ID NO: 323243 - DNA, 120 bp, Artificial Sequence
  ENSG00000135899_12 (sequence is synthesized)
gattttatataagaagaaaatgaaacacggatcctcagtgaagtgcattcggaatgaggatggaacttggttaacaccaaatgaatttgaagtcgaaggaaaaggaaggaacgcaaagaa

SEQ ID NO: 323244 - DNA, 120 bp, Artificial Sequence
  ENSG00000135899_13 (sequence is synthesized)
ctggaaacggaatatacgttgtgaaggaatgaccctaggagagctgctgaagcggaaaaactcggatgaatgcgaggtgtgctgtcaagggggacaacttctctgctgcggtacttgtcc

SEQ ID NO: 323245 - DNA, 120 bp, Artificial Sequence
  ENSG00000135899_14 (sequence is synthesized)
acgagtcttccatgaggactgtcacatcccccctgtggaagccaagaggatgctgtggagttgcaccttctgcaggatgaagaggtcttcaggaagccaacagtgccatcatgtatctaa

SEQ ID NO: 323246 - DNA, 120 bp, Artificial Sequence
  ENSG00000135899_15 (sequence is synthesized)
gaccctggagaggcagatgcagcctcaggaccagctgattcgagattacggtgagccctttcaggaagcaatgtggttggacctggttaaggaaaggctgattacggaaatgtacacggt

SEQ ID NO: 323247 - DNA, 120 bp, Artificial Sequence
  ENSG00000135899_16 (sequence is synthesized)
ggcatggtttgtgcgagacatgcgcctgatgtttcgcaaccataaaacattttacaaggcttctgactttggccaggtaggacttgacttagaggcagaatttgaaaaagatctcaaaga

SEQ ID NO: 323248 - DNA, 120 bp, Artificial Sequence
  ENSG00000135899_17 (sequence is synthesized)
cgtgctcggttttcatgaagccaatgacggcggtttctggactcttccttgaccctgttctgtaaagactgaagcatccccacctcaggattcagctgatgggaccctggcttggactgt

SEQ ID NO: 323249 - DNA, 120 bp, Artificial Sequence
  ENSG00000135899_18 (sequence is synthesized)
tgattgccagtgagtctgggatgtaattggctgccctcaggacccaaacccagacacttcataggattatcacaccctccatctttattctttctttttacctttaaaagtctatatcta

SEQ ID NO: 323250 - DNA, 120 bp, Artificial Sequence
  ENSG00000135899_19 (sequence is synthesized)
aaagcacagacttcctgttttgcctgctagcatctccctgtaactctcccaatcttgaggagtgatccctgtcccagcccctggaaaggggcaggaacgacaaactcaaagtccaggaat

SEQ ID NO: 323251 - DNA, 120 bp, Artificial Sequence
  ENSG00000135899_20 (sequence is synthesized)
agcatctccctgtaactctcccaatcttgaggagtgatccctgtcccagcccctggaaaggggcaggaacgacaaactcaaagtccaggcctcctagacaactccatcatcactaagaga

SEQ ID NO: 323252 - DNA, 120 bp, Artificial Sequence
  ENSG00000135899_21 (sequence is synthesized)
gaagcaaactcacctctgcaccctctggcattgcacctcctctgggtctcagcctcaccttccatctctccctcatggtagccgccttcttggcagggtccttccctctcagttttttta

SEQ ID NO: 323253 - DNA, 120 bp, Artificial Sequence
  ENSG00000135899_22 (sequence is synthesized)
ataccttgcactttgcccactgaaggcacctagaaacttttggaaatctcttgtaccacacacaggccgtgggggaacctggagaggtgctttataagacacctcctctccacctagacg

SEQ ID NO: 323254 - DNA, 120 bp, Artificial Sequence
  ENSG00000135899_23 (sequence is synthesized)
agactgtgtggccacctcgtggtgcaggccgacacaaacgaaaatcaggaaataagctctaggatttccccagctttatctagttgattgcaacaggtcataccaggagtgaaagcagat

SEQ ID NO: 323255 - DNA, 120 bp, Artificial Sequence
  ENSG00000135899_24 (sequence is synthesized)
ctctgtcctccaagaataaatctcaagagagagttaaatagcaagtgaatttctactaccctctcagtcaccatgttgcagactttccctgtctggaggctcaccttagagcttctgagt

SEQ ID NO: 323256 - DNA, 120 bp, Artificial Sequence
  ENSG00000135899_25 (sequence is synthesized)
ttccaagctctgagtcacctccacatttgggcatggcatcttcaaaacaattaatttgcatagttaatttgggatggggaagcaaatgactctaaaataaaaattaaatgaaaaagctca

SEQ ID NO: 323257 - DNA, 120 bp, Artificial Sequence
  ENSG00000135899_26 (sequence is synthesized)
gggatcttggacactctgggaggtgtcccaccctcatggctgagcccatccttcctgagggaagacagtggcagccacaggaatggtggccatttccaggggctttgccctctgctcacc

SEQ ID NO: 323258 - DNA, 120 bp, Artificial Sequence
  ENSG00000135899_27 (sequence is synthesized)
gtttatctagtgcctagaacaatagctggcttaaagaggtcaaatggtattatcattatgaccctggaaatgaaggcttggattgtatttaagttggatccattccagtgatgacagctg

SEQ ID NO: 323259 - DNA, 120 bp, Artificial Sequence
  ENSG00000135899_28 (sequence is synthesized)
ggggcaggaacgacaaactcaaagtccagagtccagcctgttattgtgaatggagccgagatttgccctctaccctcacctaagctctgatccttcagtgcccgcaataggcggctcatc

SEQ ID NO: 323260 - DNA, 120 bp, Artificial Sequence
  ENSG00000135899_29 (sequence is synthesized)
aagtgcccatgaggaggtggagagaggctgcaggcaccgacctgccttcagcttccggcttggcaaactccgaaaactttcacttttcttttctcggaagcccggccccttactgcgttt

SEQ ID NO: 323261 - DNA, 120 bp, Artificial Sequence
  ENSG00000135899_30 (sequence is synthesized)
gaaattgcctaactagctgacgtgggtgcaccaactctacagtcctccctccacccaatctccatgacgtctctcagtcaagggaggaggagcagagccagccccacgaggccacggaag

SEQ ID NO: 323262 - DNA, 120 bp, Artificial Sequence
  ENSG00000135899_31 (sequence is synthesized)
acagggtcacttgttcctgccaaggaaagagggtggaaaagtcattcaactcaagcagatcaaagttgttttgagatctaaaggaagaagttcttgctgccaggatcctcagatgcccat

SEQ ID NO: 323263 - DNA, 120 bp, Artificial Sequence
  ENSG00000135899_32 (sequence is synthesized)
ctgtcttacactgaggcaatatttcttaacttttttttttcattattactgtgctagagagcccttctggatttttttttcttaatcaagacccttcccatgatatttactactacaaat

SEQ ID NO: 323264 - DNA, 120 bp, Artificial Sequence
  ENSG00000135899_33 (sequence is synthesized)
atatgtccattttatgtaatgtgtccatatgtatgtatgtatatctgcactatataagatttttctcagcactcaagaatgagtttttccactactggcagcaatatcaccattactgag

SEQ ID NO: 323265 - DNA, 120 bp, Artificial Sequence
  ENSG00000135899_34 (sequence is synthesized)
aatgagtgtcctaagtatattcatggtactatactgaaagtacagcttgtcgaaagtgcagcttgatccaacccatggatcaagctttttcctagaattccaatctccatatttctcatg

SEQ ID NO: 323266 - DNA, 120 bp, Artificial Sequence
  ENSG00000135899_35 (sequence is synthesized)
gtggagctttaagagcagaaatgtgaagagctcccgttaggattcaacagcatgatttataaggagttaaatgttcatagaaaaaaaactgtgggtgacaaagttaggagcacatattgt

SEQ ID NO: 323267 - DNA, 120 bp, Artificial Sequence
  ENSG00000135899_36 (sequence is synthesized)
caattgtaagtgccaaaggtaacttaattttaattattttaatgtgttatttactgggtcatagcatccatgcccactgtggaacattttagggccatgttatgttacgaccatggggca

SEQ ID NO: 323268 - DNA, 120 bp, Artificial Sequence
  ENSG00000135899_37 (sequence is synthesized)
gttaggcaaggcaccaggaacaacagttcccatactcctgcacccaaatgccagttatcatcatttcttactttggtcagtcagatctattaatagaggcctggtgggctcagcaaatgc

SEQ ID NO: 323269 - DNA, 120 bp, Artificial Sequence
  ENSG00000135899_38 (sequence is synthesized)
gcccagagtggcccagctcaaagcacaagcttgccagcaggcagcagcacagctcaaaacgcagcagaacctgttggcaagccacagccagagaagaaaagtcctggtggcggcggtcac

SEQ ID NO: 323270 - DNA, 120 bp, Artificial Sequence
  ENSG00000135899_39 (sequence is synthesized)
cacccagactctctgcttgttgtgccatttgtcttgcaatttcccccagggaggtggcatcagctccccccatcaaaaattgggtttggatatccactctggcacacacaaaaatgatgt

SEQ ID NO: 323271 - DNA, 120 bp, Artificial Sequence
  ENSG00000135899_40 (sequence is synthesized)
gttctagaaccccacagggtcagcattcgtgggtctccatggtcctagcggtgcccacgttatctgcccttgcagcggaaaaactcggatgaatgcgaggtgtgctgtcaagggggacaa

SEQ ID NO: 323272 - DNA, 120 bp, Artificial Sequence
  ENSG00000135899_41 (sequence is synthesized)
aacaagttccacacactgcatttggctctcctgtccctatgtctcttttaagctataaattgtcatgtatttattgaagaactcagggttttggtcctattacattttttgcaatctgga

SEQ ID NO: 323273 - DNA, 120 bp, Artificial Sequence
  ENSG00000135899_42 (sequence is synthesized)
taactcaggttttgaggggtttgttttgatttgggggttttggggcacatgcaggcttcacaggggaatttagtattattttttatgttaaggttggcagcaggtgcacgtgttatcagc

SEQ ID NO: 323274 - DNA, 120 bp, Artificial Sequence
  ENSG00000135899_43 (sequence is synthesized)
ctgatcatctatcacctgatggttttagcaatacctaaatccgtgatatcatcagaggttgcaaaatgatgagattcaggtttttttttacataattattggtcagaattattctgcaaa

SEQ ID NO: 323275 - DNA, 120 bp, Artificial Sequence
  ENSG00000135899_44 (sequence is synthesized)
tagcttctctttaacagtattcggttaccttgaaatacaggttgtacaaaaaataggataaatgcttgtttttttatttagcaatgttcaaaataatgaattgatgtcccaatatcctct

SEQ ID NO: 323276 - DNA, 120 bp, Artificial Sequence
  ENSG00000135899_45 (sequence is synthesized)
aaaggtaaccagggattttttaatttaattatcttgaacccacatatttaaatatacgtagcatgctacaaaccattgcagttaatacctttattgatgcttgagttgcccactttttct

SEQ ID NO: 323277 - DNA, 61 bp, Artificial Sequence
  ENSG00000135899_46 (sequence is synthesized)
acagtagcgtcatcttgactcactgcaacctcctcctcctgggtgcaagcgattctcctgc

SEQ ID NO: 323278 - DNA, 120 bp, Artificial Sequence
  ENSG00000135899_47 (sequence is synthesized)
ccgagtagctgggattacaggcatgtgcaagttccccacttttagtgagaaactcctcaatttgcctcctgagttgttttgaaatgaccccagaactctttgatggtgtattagctatct

SEQ ID NO: 323279 - DNA, 120 bp, Artificial Sequence
  ENSG00000135899_48 (sequence is synthesized)
agctatctattgctgtgtaacaaatgacctcaaagcttagctgcttaaaaagaaaaaaacattttattgctcactattctgtggatcaagaattcaggcatcatccatgaggatgcttcc

SEQ ID NO: 323280 - DNA, 120 bp, Artificial Sequence
  ENSG00000135899_49 (sequence is synthesized)
ctttgctccacatggtactggcagaccccattcatacttgcacactgtcacttctgccacaatctattggtgaaagcaagtcacagggacagattcagaaggagggagaatagaccttac

SEQ ID NO: 323281 - DNA, 120 bp, Artificial Sequence
  ENSG00000135899_50 (sequence is synthesized)
ctcttgatgcgatgggtggcaaagtcacatttcaaaggagaatgttgcttgggaagaaacattgctgctcccatctttagaagcaatctaccatagttcaccctctggccacagtagttc

SEQ ID NO: 323282 - DNA, 120 bp, Artificial Sequence
  ENSG00000135899_51 (sequence is synthesized)
acatctttcccaaatgcaaaggacactcctctccccacagaagtctcactctctgcagcattggaacaaagtccaggacctccttatctaaatcaggttcagatcagataaagcttcttc

SEQ ID NO: 323283 - DNA, 66 bp, Artificial Sequence
  ENSG00000135899_52 (sequence is synthesized)
gggctgggcgcttgagtccaggagttgaagaccagcctgggtaacatggcaaaacctcatctctac

SEQ ID NO: 323284 - DNA, 120 bp, Artificial Sequence
  ENSG00000135899_53 (sequence is synthesized)
gctcaggaagctggagaacagaagagaagggcagcgtggcagcagtggagcggggcagcagggattttgctgcacactctggagagggactacctggttcaaactccaccccactgctca

SEQ ID NO: 323285 - DNA, 120 bp, Artificial Sequence
  ENSG00000135900_0 (sequence is synthesized)
ctctcgtgcaatggcgtccgggctggtaagattgctgcagcagggacatcgctgcctcctggctccagtcgcccccaagctggtccctccggttcggggagtgaagaagggattccgcgc

SEQ ID NO: 323286 - DNA, 120 bp, Artificial Sequence
  ENSG00000135900_1 (sequence is synthesized)
cgccttccgcttccagaaggagttagagcggcagcgccttctgcggtgcccgccgccgcccgtgcgccgttcagagaagccgaactgggattaccatgcagaaatacaagcttttggaca

SEQ ID NO: 323287 - DNA, 120 bp, Artificial Sequence
  ENSG00000135900_2 (sequence is synthesized)
tcggttacaggaaaacttttccttagatcttctcaaaactgcatttgttaatagctgctatattaaaagtgaggaggccaaacgccaacaacttgggatagagaaagaagctgttcttct

SEQ ID NO: 323288 - DNA, 120 bp, Artificial Sequence
  ENSG00000135900_3 (sequence is synthesized)
gaatcttaaaagtaatcaagaactatccgaacaagggacatctttttcacagacttgccttacacagtttcttgaagacgagtacccagacatgcccactgaaggcataaaaaatcttgt

SEQ ID NO: 323289 - DNA, 120 bp, Artificial Sequence
  ENSG00000135900_4 (sequence is synthesized)
tgactttctcactggtgaggaagtcgtgtgtcacgtggctagaaacttggctgtggagcagttaacactgagtgaagaattcccagtgcccccagctgtgttacagcagactttctttgc

SEQ ID NO: 323290 - DNA, 120 bp, Artificial Sequence
  ENSG00000135900_5 (sequence is synthesized)
agttattggagccctgttacagagcagtggacctgagaggactgcacttttcatcagggacttcttaattactcaaatgactggaaaagagctctttgagatgtggaagataataaatcc

SEQ ID NO: 323291 - DNA, 120 bp, Artificial Sequence
  ENSG00000135900_6 (sequence is synthesized)
catggggctattggtagaagaactgaagaaaaggaatgtttcagctcctgaatcaagacttactaggcagtctggtggcaccacagctttgcctttgtattttgttggcttatactgtga

SEQ ID NO: 323292 - DNA, 120 bp, Artificial Sequence
  ENSG00000135900_7 (sequence is synthesized)
gattgcagaaggacctggggaaacagtattggttgcagaagaagaggctgctcgagtggcccttagaaaactttatggattcacagaaaatagacggccgtggaactattccaagcccaa

SEQ ID NO: 323293 - DNA, 120 bp, Artificial Sequence
  ENSG00000135900_8 (sequence is synthesized)
agaaaccttgagagcagaaaagagcatcactgccagctagccgccatggatgcagcagcctgaaacttgagagcgaaagtgagataaatgtcaaaggtgtttcaagccagacattttcac

SEQ ID NO: 323294 - DNA, 120 bp, Artificial Sequence
  ENSG00000135900_9 (sequence is synthesized)
aattgtgaagaaatagatgttttgtttctgttttttactgtgttcccaaaattaaataagtgttaaccaagtcacagtgtttttggttttgtttttctgaaatcttggtttgatcaaatc

SEQ ID NO: 323295 - DNA, 120 bp, Artificial Sequence
  ENSG00000135900_10 (sequence is synthesized)
gattacaggtgtgagccactatacccgaccagatcaaatctttttttgacatttttgcaaaaaaattttcctaatgttcttgatttaattgtatagaatttgtataattaggtgtatttt

SEQ ID NO: 323296 - DNA, 120 bp, Artificial Sequence
  ENSG00000135900_11 (sequence is synthesized)
atagaatttgtataattaggtgtattttatttgcgtctagctttgaggtatcataatttatgtatcttatgtgaattttttgctgtaataccaataaagttttttttctccacatgttaa

SEQ ID NO: 323297 - DNA, 120 bp, Artificial Sequence
  ENSG00000135902_0 (sequence is synthesized)
attccacagccctgtagacaggaggggcagatgcacgtcccagtcagagggatgggatggaggggccagtgctgacactggggctgctggctgccctggcggtgtgtggcagctgggggc

SEQ ID NO: 323298 - DNA, 120 bp, Artificial Sequence
  ENSG00000135902_1 (sequence is synthesized)
tgaacgaggaggagcggctgatccggcacctgtttcaagagaagggctacaacaaggagctccggcccgtggcacacaaagaggagagtgtggacgttgccctggccctcacactctcca

SEQ ID NO: 323299 - DNA, 120 bp, Artificial Sequence
  ENSG00000135902_2 (sequence is synthesized)
acctcatctccctgaaagaagttgaggagaccctcactaccaatgtgtggatagagcacggctggacagacaaccggctgaagtggaatgctgaagaatttggaaacatcagtgtcctgc

SEQ ID NO: 323300 - DNA, 120 bp, Artificial Sequence
  ENSG00000135902_3 (sequence is synthesized)
gcctccccccggacatggtgtggctcccagagattgtgctggagaacaacaatgacggctccttccagatctcctactcctgcaacgtgcttgtctaccactacggcttcgtgtactggc

SEQ ID NO: 323301 - DNA, 120 bp, Artificial Sequence
  ENSG00000135902_4 (sequence is synthesized)
tgccacctgccatcttccgctcctcctgccccatctctgtcacctatttccccttcgactggcagaactgctccctcaagttcagttccctcaagtatacggccaaagagatcaccctga

SEQ ID NO: 323302 - DNA, 120 bp, Artificial Sequence
  ENSG00000135902_5 (sequence is synthesized)
gcctgaaacaggatgccaaggagaaccgcacctaccccgtggagtggatcatcattgatcctgaaggcttcacagagaacggggagtgggagatagtccaccggccggccagggtcaacg

SEQ ID NO: 323303 - DNA, 120 bp, Artificial Sequence
  ENSG00000135902_6 (sequence is synthesized)
tggaccccagagcccctctggacagccccagccgccaggacatcaccttctacctcatcatccgccgcaagcccctcttctacatcatcaacatcctggtgccctgcgtgctcatctcct

SEQ ID NO: 323304 - DNA, 120 bp, Artificial Sequence
  ENSG00000135902_7 (sequence is synthesized)
tcatggtcaacctggtcttctacctaccggctgacagtggtgagaagacatcagtggccatctcggtgctcctggctcagtctgtcttcctgctgctcatctccaagcgtctgcctgcca

SEQ ID NO: 323305 - DNA, 120 bp, Artificial Sequence
  ENSG00000135902_8 (sequence is synthesized)
catccatggccatcccccttatcggcaagttcctgctcttcggcatggtgctggtcaccatggttgtggtgatctgtgtcatcgtgctcaacatccacttccgaacacccagcacccatg

SEQ ID NO: 323306 - DNA, 120 bp, Artificial Sequence
  ENSG00000135902_9 (sequence is synthesized)
tgctgtctgagggggtcaagaagctcttcctggagaccctgccggagctcctgcacatgtcccgcccagcagaggatggacccagccctggggccctggtgcggaggagcagctccctgg

SEQ ID NO: 323307 - DNA, 120 bp, Artificial Sequence
  ENSG00000135902_10 (sequence is synthesized)
gatacatctccaaggccgaggagtacttcctgctcaagtcccgcagtgacctcatgttcgagaagcagtcagagcggcatgggctggccaggcgcctcaccactgcacgccggcccccag

SEQ ID NO: 323308 - DNA, 120 bp, Artificial Sequence
  ENSG00000135902_11 (sequence is synthesized)
caagctctgagcaggcccagcaggaactcttcaatgagctgaagccagctgtggatggggcaaacttcattgttaaccacatgagggaccagaacaattacaatgaggagaaagacagct

SEQ ID NO: 323309 - DNA, 120 bp, Artificial Sequence
  ENSG00000135902_12 (sequence is synthesized)
cctgcagggcgtttacaaccagccaccaccccagccttttcctggggacccctactcctacaacgtgcaggacaagcgcttcatctagggtgggcctgttggggagccaggagacagcag

SEQ ID NO: 323310 - DNA, 120 bp, Artificial Sequence
  ENSG00000135902_13 (sequence is synthesized)
ggtctgagagaggagccacagtccctaatgacacccactcctagccctgaggctcgtgcccctcagactggggaagagtccaaggaagggagggagcagccactcctcaatgctcaatgg

SEQ ID NO: 323311 - DNA, 120 bp, Artificial Sequence
  ENSG00000135902_14 (sequence is synthesized)
ctcccctgaaatcaagacaggggccacccgagatggtctgagggtggacatcggctacagtgggtgggcaggacgatttggggggaggcccgaggctggctcaggggccagggaggaggc

SEQ ID NO: 323312 - DNA, 120 bp, Artificial Sequence
  ENSG00000135902_15 (sequence is synthesized)
cactcagggtggcctcagggggagagctctgataggggtgagacagatagggccccttctctgcttctcctcccccaaggtgtggggtagagcaggcaggaatctgcgccttcactctct

SEQ ID NO: 323313 - DNA, 120 bp, Artificial Sequence
  ENSG00000135902_16 (sequence is synthesized)
ggcccctccagcctccctcttcctacctacccttcaacctcaggcttctgaggcctcacctgggactgaggttgaggacacctccctccctccagaccccagagtatcctttcctagctc

SEQ ID NO: 323314 - DNA, 120 bp, Artificial Sequence
  ENSG00000135902_17 (sequence is synthesized)
tttctgccttgacctctctgcctaggtccctttgggaagttgaggactggagtggaaaggtcaggatcgacatccacaaagacttggggtcagcctgaggttgcacacacaatcctagag

SEQ ID NO: 323315 - DNA, 120 bp, Artificial Sequence
  ENSG00000135902_18 (sequence is synthesized)
gaccagaacgcagcacctctccccaaagggtccctgccccccagcacctactcctctccaaattagggttgtcatgcattatttggggcatacatattctaaaaaatcattcgttgtttc

SEQ ID NO: 323316 - DNA, 120 bp, Artificial Sequence
  ENSG00000135902_19 (sequence is synthesized)
tctgaaatttgtcccctatttttatttgctaaatctagcaaccctatcccaaaggcagcctccactcaatcttatcctgagggccaaaggccaaggctgcaggaattgggagacaagggt

SEQ ID NO: 323317 - DNA, 120 bp, Artificial Sequence
  ENSG00000135902_20 (sequence is synthesized)
ctgtttgtatggtggtccacctccaagatggccccagtgatgcccagtattcacacccttgtgcagtcccctcactctgtaccagggtgggtctgggtaaccaatagaatgaggcagaag

SEQ ID NO: 323318 - DNA, 120 bp, Artificial Sequence
  ENSG00000135902_21 (sequence is synthesized)
tgatggtacctcacttcccagatttggttaggaaagacactatggcctctttcttgctcattagccctcattctcacatcagttggatctctcactttggggaagccagctggcatgtta

SEQ ID NO: 323319 - DNA, 120 bp, Artificial Sequence
  ENSG00000135902_22 (sequence is synthesized)
aggagccctatggagaggcccacatggcaaggaactaaggcctcctgccaacagccacgtgagtgaatgtggaagtggatcctctgccccagtagggccttcggatgagatcacagccca

SEQ ID NO: 323320 - DNA, 120 bp, Artificial Sequence
  ENSG00000135902_23 (sequence is synthesized)
gtagacatcttatgtgcagccccatgaaagtccctaagccagaaccaccagctaagtgactcctggattcctgacccccagaaactgtgtgagataataaatgtgtgttgttttaagtga

SEQ ID NO: 323321 - DNA, 120 bp, Artificial Sequence
  ENSG00000135902_24 (sequence is synthesized)
tccgagctgcggggagtcccagcctgggatctttgcctcatgtccttgggctcctgccctggctggcccgtcccccaccgccatgaggtgtcagattgtgtttccggctgcctcttcccg

SEQ ID NO: 323322 - DNA, 120 bp, Artificial Sequence
  ENSG00000135903_0 (sequence is synthesized)
actcggtgtcaccacaggaggagactcaggcaggccgcgctccagcctcaccaggctccccggctcgccgtggctctctgagcccccttttcagggaccccagtcgctggaacatttgcc

SEQ ID NO: 323323 - DNA, 120 bp, Artificial Sequence
  ENSG00000135903_1 (sequence is synthesized)
cagactcgtaccaaacttttccgccctgggctcgggatcctggactccggggcctccccgtcctcccctttcccgggttccagctccggcctctggactaggaaccgacagcccccctcc

SEQ ID NO: 323324 - DNA, 120 bp, Artificial Sequence
  ENSG00000135903_2 (sequence is synthesized)
ccgcgtccctccctctctctccagccgttttggggaggggctctccacgctccggatagttcccgagggtcatccgcgccgcactcgcctttccgtttcgccttcacctggatataattt

SEQ ID NO: 323325 - DNA, 120 bp, Artificial Sequence
  ENSG00000135903_3 (sequence is synthesized)
ccgagcgaagctgcccccaggatgaccacgctggccggcgctgtgcccaggatgatgcggccgggcccggggcagaactacccgcgtagcgggttcccgctggaagtgtccactcccctc

SEQ ID NO: 323326 - DNA, 120 bp, Artificial Sequence
  ENSG00000135903_4 (sequence is synthesized)
ggccagggccgcgtcaaccagctcggcggtgtttttatcaacggcaggccgctgcccaaccacatccgccacaagatcgtggagatggcccaccacggcatccggccctgcgtcatctcg

SEQ ID NO: 323327 - DNA, 120 bp, Artificial Sequence
  ENSG00000135903_5 (sequence is synthesized)
cgccagctgcgcgtgtcccacggctgcgtctccaagatcctgtgcaggtaccaggagactggctccatacgtcctggtgccatcggcggcagcaagcccaagcaggtgacaacgcctgac

SEQ ID NO: 323328 - DNA, 120 bp, Artificial Sequence
  ENSG00000135903_6 (sequence is synthesized)
gtggagaagaaaattgaggaatacaaaagagagaacccgggcatgttcagctgggaaatccgagacaaattactcaaggacgcggtctgtgatcgaaacaccgtgccgtcagtgagttcc

SEQ ID NO: 323329 - DNA, 120 bp, Artificial Sequence
  ENSG00000135903_7 (sequence is synthesized)
atcagccgcatcctgagaagtaaattcgggaaaggtgaagaggaggaggccgacttggagaggaaggaggcagaggaaagcgagaagaaggccaaacacagcatcgacggcatcctgagc

SEQ ID NO: 323330 - DNA, 120 bp, Artificial Sequence
  ENSG00000135903_8 (sequence is synthesized)
gagcgagcctcagcaccccaatcagatgaaggctctgatattgactctgaaccagatttaccactaaagaggaaacagcgcagaagccgaaccaccttcacagcagaacagctggaggaa

SEQ ID NO: 323331 - DNA, 120 bp, Artificial Sequence
  ENSG00000135903_9 (sequence is synthesized)
gtttagcaaccgccgtgcaagatggaggaagcaagctggggccaatcaactgatggctttcaaccatctcattcccggggggttccctcccactgccatgccgaccttgccaacgtacca

SEQ ID NO: 323332 - DNA, 120 bp, Artificial Sequence
  ENSG00000135903_10 (sequence is synthesized)
gctgtcggagacctcttaccagcccacatctattccacaagctgtgtcagatcccagcagcaccgttcacagacctcaaccgcttcctccaagcactgtacaccaaagcacgattccttc

SEQ ID NO: 323333 - DNA, 120 bp, Artificial Sequence
  ENSG00000135903_11 (sequence is synthesized)
caacccagacagcagctctgcctactgcctccccagcaccaggcatggattttccagctatacagacagctttgtgcctccgtcggggccctccaaccccatgaaccccaccattggcaa

SEQ ID NO: 323334 - DNA, 120 bp, Artificial Sequence
  ENSG00000135903_12 (sequence is synthesized)
tggcctctcacctcaggtaatgggactcctgaccaaccacggtggggtacctcatcagccccagactgattacgcgctctcccctctcaccgggggtctggaacctaccaccacggtgtc

SEQ ID NO: 323335 - DNA, 120 bp, Artificial Sequence
  ENSG00000135903_13 (sequence is synthesized)
ggccagctgcagtcagagactagaccatatgaagagcttggacagtctgccaacatctcagtcctactgtccacccacctatagcaccacaggctacagtatggaccctgtcacaggcta

SEQ ID NO: 323336 - DNA, 120 bp, Artificial Sequence
  ENSG00000135903_14 (sequence is synthesized)
ccaatatgggcagtatggacaaagtgcctttcattatctcaagccagatatcgcgtaagtgaactgtccacttggagctaaaactggccctgtttctggtcttcgcagcctagatatgaa

SEQ ID NO: 323337 - DNA, 120 bp, Artificial Sequence
  ENSG00000135903_15 (sequence is synthesized)
gaatctgctctgaaaacaaaaaaaaattacccttttgttggggggggtggggcagtggtcccaataggagacaaaggagagtgattgattttcttcctccaatagttggtttcaaatcct

SEQ ID NO: 323338 - DNA, 120 bp, Artificial Sequence
  ENSG00000135903_16 (sequence is synthesized)
tttgaacacgttcgacaaaagcagtggagaagaggaagacctggagcaataaaagacaaatgcaacattttaaggcaatggtttcacatggttacatatcaaaacatcccaattctttag

SEQ ID NO: 323339 - DNA, 88 bp, Artificial Sequence
  ENSG00000135903_17 (sequence is synthesized)
gtttcacatggttacatatcaaaacatcccaattctttagtgctgatcatcgaggagctagaacattccatttgcttgtattgagatt

SEQ ID NO: 323340 - DNA, 120 bp, Artificial Sequence
  ENSG00000135903_18 (sequence is synthesized)
gagcgagaacctatagcctggaggggaagatggtcacatgagcagatcacaacaatctcatgtgtttaagtactttttagagtccagggcactgtgggaatgcgggggatggtcgtctgg

SEQ ID NO: 323341 - DNA, 120 bp, Artificial Sequence
  ENSG00000135903_19 (sequence is synthesized)
ccatccccaagttcaggaaatgcttccttgaagagaagatctcagagctgagtgttagaggatgactaatgagctgaagaagcaaaaaataaatggtattactggcagagtgaacagcat

SEQ ID NO: 323342 - DNA, 120 bp, Artificial Sequence
  ENSG00000135903_20 (sequence is synthesized)
gggcaaaggtatggaatggtcacatggtgcatgtgagaatggcaagaagttgaagacaagaggtcctgtcaccagaatgcctcagtcttcaaaggcaaaagctgcgagtgaccattttgt

SEQ ID NO: 323343 - DNA, 120 bp, Artificial Sequence
  ENSG00000135903_21 (sequence is synthesized)
aggagcattttgggaaagaacagagcctgatgcactgaagtggaaagtcctttggaatttaacaacttaactcttcctttgtgctttgttcaaggaggtaatctaagcatggagttacaa

SEQ ID NO: 323344 - DNA, 120 bp, Artificial Sequence
  ENSG00000135903_22 (sequence is synthesized)
tatgattttaaatttattttttgaaattatcatggtaaaatagacttttttggattactttgtgtgggggtgaaacttgcgtaacacaaaattaactgttttaaagtgaacaattcaatg

SEQ ID NO: 323345 - DNA, 120 bp, Artificial Sequence
  ENSG00000135903_23 (sequence is synthesized)
gcatttggtattttcacaacatattgcagtcaccagatctatctagttctaaaacattttaatcacccaaaaagaaaacctgggacccattaagcaattgcttcccaatcccccatccgt

SEQ ID NO: 323346 - DNA, 120 bp, Artificial Sequence
  ENSG00000135903_24 (sequence is synthesized)
ctcctggcaatcatcaatctgcattttatctctatggatttaactattctggttatttcacaaaaatagactcctacagtatgtgatcttttgtgtctggcttctttcacttagcattat

SEQ ID NO: 323347 - DNA, 120 bp, Artificial Sequence
  ENSG00000135903_25 (sequence is synthesized)
gtcttagaggttcacacatattgtagcatgcatcagtatttcattactttttatggctgaataatattccattgtattatatatcctaatttggttatccattcttctacgatggacagt

SEQ ID NO: 323348 - DNA, 120 bp, Artificial Sequence
  ENSG00000135903_26 (sequence is synthesized)
tgggcatctaccttttgactattatcaatagtgctgctatgaacttgtatttgatcttttttggagtcttaacacatgctaatttatgcaatcatcatcactaccaggatagagcacagt

SEQ ID NO: 323349 - DNA, 120 bp, Artificial Sequence
  ENSG00000135903_27 (sequence is synthesized)
tccatcactccaaaaacctcgctttgaaattgtattctctactgctcttagtccctggaagctgctgatctgttctctatcaatgtagttttattctttaagaatatcttataagtggaa

SEQ ID NO: 323350 - DNA, 120 bp, Artificial Sequence
  ENSG00000135903_28 (sequence is synthesized)
tcatacagtatgtaatgttttgagattggcttatttcaatcagtgtaattactttgagattcacccaagtcattgcatgtgtcaatatttcacccctttgtattgctgagtagtattcta

SEQ ID NO: 323351 - DNA, 120 bp, Artificial Sequence
  ENSG00000135903_29 (sequence is synthesized)
ctgaatgggtatgccacagtttgtttacccattcacctgttgaggaaaaacaaccagttgagggttttggctatttccttgttttggtcattatgaatagaattgccataaacatttgtc

SEQ ID NO: 323352 - DNA, 120 bp, Artificial Sequence
  ENSG00000135903_30 (sequence is synthesized)
tagaggttttgtgtgaacacaagttttcatttctctaaatacctagaagtgtgatttctgggtgatatgttaactgtatgcttaactttataagaaactgccagactgttttacagagtg

SEQ ID NO: 323353 - DNA, 120 bp, Artificial Sequence
  ENSG00000135903_31 (sequence is synthesized)
actctatccttctgcattccaccagcaatacacaaaattcccaggtgctctgcatctgtgccaacccttggtattgtcaatatttttttattttgccattctaatatattcttagtgaca

SEQ ID NO: 323354 - DNA, 120 bp, Artificial Sequence
  ENSG00000135903_32 (sequence is synthesized)
tttaattttaattaaatgttttaattcatttttctctaatggctaatgatgttggacaacttttcatgtccttatttgccaaccatatatcctctttggtgaaatgtctattcaactctt

SEQ ID NO: 323355 - DNA, 120 bp, Artificial Sequence
  ENSG00000135903_33 (sequence is synthesized)
ttgctcatttttaaaaattgttaaatattttgttttcatattgttgagttttgaaagttcttcttatattctcaatgcaggtcttttgtcagatatgtgatttgcaaatattttctctca

SEQ ID NO: 323356 - DNA, 120 bp, Artificial Sequence
  ENSG00000135903_34 (sequence is synthesized)
gaaagaaaaaattctcataaagatttgtgtactgggcttgaaaaagcctgaatgtttgcccaccactcagcaacactcaggaacaaagaagaggtctgcagatctcatcaagtttatcca

SEQ ID NO: 323357 - DNA, 120 bp, Artificial Sequence
  ENSG00000135903_35 (sequence is synthesized)
ccattcatctagtaagttcggctgaatcatcacagacttgtgttgatgagataccatctctgaaatagacccagaaagagcagatagctctttacactaataagactgtggttaatggca

SEQ ID NO: 323358 - DNA, 120 bp, Artificial Sequence
  ENSG00000135903_36 (sequence is synthesized)
taaaatgccaggatcgactttttgttcttattcacattttacaaaagcaaacctttaactctaccacccatccagttgcttttaaagaataatattaaaattgagattattagtgtgtaa

SEQ ID NO: 323359 - DNA, 120 bp, Artificial Sequence
  ENSG00000135903_37 (sequence is synthesized)
gctgacattggtgatctgacggcagccaagcccagctcggatcaaggtcccttcatgcgcggtgtctctgcgcctgagtaacgacatggaactgaaagaccagagggacactaggaatca

SEQ ID NO: 323360 - DNA, 120 bp, Artificial Sequence
  ENSG00000135903_38 (sequence is synthesized)
aaacaaacatttctattctgcttagtttttctgttttgtaaatctttctttcttaaccactttcagcccctgggattctagaactgtgaattgtgctctgttgtagggggcaggggaagc

SEQ ID NO: 323361 - DNA, 120 bp, Artificial Sequence
  ENSG00000135903_39 (sequence is synthesized)
tctcactctgttgccattaaatgtatgagactgggcatctctgagcaattgtagggccggggatagagggtacttgaatcttcagaagttgaagtagcttttatgccctcaggaaaggcc

SEQ ID NO: 323362 - DNA, 120 bp, Artificial Sequence
  ENSG00000135903_40 (sequence is synthesized)
ctggtctccggagtttcctcgcattaaaggagagagagagagagtactcttttgggcaacggccctccaaaattgcccccacattggctgccttataaatatgtctgtgtgttgactggt

SEQ ID NO: 323363 - DNA, 120 bp, Artificial Sequence
  ENSG00000135903_41 (sequence is synthesized)
gggttgtgatatctgagtcctagctcagtggatcaagaagaaagaagaagtgaagatattggccacagtttttccttcaaccctcatcaatcctatttctcaaatgacaatgctgatatg

SEQ ID NO: 323364 - DNA, 120 bp, Artificial Sequence
  ENSG00000135903_42 (sequence is synthesized)
attttatattagggtaacctctctgagttctcatgaatcaggtaggtaacatcactctagacctcatttttgcccatctgtaagatggggatgacagtatccctccaaagagggttttgt

SEQ ID NO: 323365 - DNA, 120 bp, Artificial Sequence
  ENSG00000135903_43 (sequence is synthesized)
taaaggtgaaagaaaatgcacagcaaggacttcgcagggaacagggattgggcggaggaagctgttagcagcagctgtcctggacagatgcccactcagcagagacccagactctagtta

SEQ ID NO: 323366 - DNA, 120 bp, Artificial Sequence
  ENSG00000135903_44 (sequence is synthesized)
acgtaggtgggtggatgttgagggtagggaggggagttcctgttgttcctactcctgctcagtgattcctgcccatggtcctcataaggttcatgggggctgttgttgcaagatcatggt

SEQ ID NO: 323367 - DNA, 120 bp, Artificial Sequence
  ENSG00000135903_45 (sequence is synthesized)
atggacaaagtaagccttggactttttagggggcaatttctcctggaagggagataaactcaactcttccttaagaaaggtgaattagaggcaagattaagccacacatgccggtatcaa

SEQ ID NO: 323368 - DNA, 120 bp, Artificial Sequence
  ENSG00000135903_46 (sequence is synthesized)
tttttttttttttttgcaaagccagctgactgttccagcaggggcttccttgtgtaattattttcttaactgatgtcaacaacatcttgcggttattaattgttgagacgtgaaacctga

SEQ ID NO: 323369 - DNA, 120 bp, Artificial Sequence
  ENSG00000135903_47 (sequence is synthesized)
agcatcgacggcatcctgagcgagcgaggccgtgtattcacacactgccccagggacagcatcttccagctccaagttgggcctgatcttagtaccaactcaaaattgctgacccaagaa

SEQ ID NO: 323370 - DNA, 120 bp, Artificial Sequence
  ENSG00000135903_48 (sequence is synthesized)
cagaatgaaagttttattttgatgaagtccaatttgtcaattttttattttatcagttgtgcttttaagcatcacatctaaaaactatttgactagccttggtcctgaaaatattctgaa

SEQ ID NO: 323371 - DNA, 120 bp, Artificial Sequence
  ENSG00000135903_49 (sequence is synthesized)
aatatagactttacatttagttctatgacccattttcagttaatttttgtatgtggtggtgttaggtttagggcaaggtttattaatgtattttttgcatctgtatgtctaactgtttca

SEQ ID NO: 323372 - DNA, 120 bp, Artificial Sequence
  ENSG00000135903_50 (sequence is synthesized)
acactgttggttgaaaagtcgttcctttctccattcagttgcatttgcacctttgtcaaaaattgactgtccatatttttgtggttgtttctgaattgtctgttctgttccatatatata

SEQ ID NO: 323373 - DNA, 120 bp, Artificial Sequence
  ENSG00000135903_51 (sequence is synthesized)
tctgtgtctttccttataccacaatgtcttgattactgtgacttcagaataattcttaaaatcaaaaaatgtgattcctctaactttattcttctttttaaaattgtttttagctattct

SEQ ID NO: 323374 - DNA, 120 bp, Artificial Sequence
  ENSG00000135903_52 (sequence is synthesized)
agtcctctgtttgtccacataaatttgttaattagtttgtctgtatctacaaaaaaaaaaaccttctgagaacaatttactttcaaaagttgttttatattggttttaaagagttttaga

SEQ ID NO: 323375 - DNA, 120 bp, Artificial Sequence
  ENSG00000135903_53 (sequence is synthesized)
ataacatgtcgatgttcgatgctgatacttctacaactttaaaactgctcatttcatgaagcaagaatggaggaatccttgactcttacacactggaaattgaaataaagataaatgcaa

SEQ ID NO: 323376 - DNA, 120 bp, Artificial Sequence
  ENSG00000135903_54 (sequence is synthesized)
ccatttttaggaagctagactagctgtaaaggacctcctaaataaattatttgttactgtatcctcatttgtaatctagttgtcaataaatggcccggacatgtcttgctaacaggatat

SEQ ID NO: 323377 - DNA, 120 bp, Artificial Sequence
  ENSG00000135903_55 (sequence is synthesized)
gggctaccaggaagaaggacttgtttccctttcctgtgtggggagaggtgtgtgacgtttttccagttcacatttatttggtagcccacctgggttggaggaagggcacggtggagagaa

SEQ ID NO: 323378 - DNA, 120 bp, Artificial Sequence
  ENSG00000135903_56 (sequence is synthesized)
agtgacatgcattcacatatctgcttatcagtgtgcaatactgtgtacctcatggatgctttggcaatgcccaaggcgatataagcaaaatcagaagtatatttttgcaggtgcttttat

SEQ ID NO: 323379 - DNA, 120 bp, Artificial Sequence
  ENSG00000135903_57 (sequence is synthesized)
tttcacagcccataattcatagtgatagagtgcagtgatgtttgccatttgctggacaaccaacacccgggttgctcctttgattagagaccagatcagataattatgcttttaaactga

SEQ ID NO: 323380 - DNA, 120 bp, Artificial Sequence
  ENSG00000135903_58 (sequence is synthesized)
ttacgtttacattcttctcttttctatgaaaggcagggcaagaacagaagtgttcacatggctctcatgtacttttaaattatacaatgatatccaatattaaaagattataggaactga

SEQ ID NO: 323381 - DNA, 120 bp, Artificial Sequence
  ENSG00000135903_59 (sequence is synthesized)
ggtttacatacgtttgtgtggtgacattttagaatgtcaataaatttgctttttgagatgttgagaggaacaagaaggtggaaggcagtgttatttatttctttctattcttggaaccac

SEQ ID NO: 323382 - DNA, 120 bp, Artificial Sequence
  ENSG00000135903_60 (sequence is synthesized)
gaatgaggtaggcacaaatacattccttttagagttaagaactatgacgtagcgagttagtgagactagacatagtaccgaatttagttcatgcattggtcttagagggtgatggaacaa

SEQ ID NO: 323383 - DNA, 120 bp, Artificial Sequence
  ENSG00000135903_61 (sequence is synthesized)
gagaagtactatctttgtgttgcagcctcaaccaacaacaatgtgttgtaaaaatgtctttcatgtaaaaagtgcagtaaatatttactatttataatgaataaacagttatgaaaactt

SEQ ID NO: 323384 - DNA, 120 bp, Artificial Sequence
  ENSG00000135903_62 (sequence is synthesized)
gtaggtgggtggatgttgagggtagggaggggagttcctgttgttcctactcctgctcagtgattcctgcccatggtcctcataaggttcatgggggctgttgttgcaagatcatggtgg

SEQ ID NO: 323385 - DNA, 120 bp, Artificial Sequence
  ENSG00000135903_63 (sequence is synthesized)
tcacctcaggtgcctttcattatctcaagccagatatcgcgtaagtgaactgtccacttggagctaaaactggccctgtttctggtcttcgcagcctagatatgaagaatctgctctgaa

SEQ ID NO: 323386 - DNA, 120 bp, Artificial Sequence
  ENSG00000135905_0 (sequence is synthesized)
atttccctttttaccaagaagaaagatttgttcagcctggtgacgcttcagaagagaagagtttaacgacattgatattttgaaatattttgtgactcaaattatagcaatacgatgagt

SEQ ID NO: 323387 - DNA, 120 bp, Artificial Sequence
  ENSG00000135905_1 (sequence is synthesized)
tttcgagggaaggtttttaaacgggagcccagtgaattttggaagaagagacgaactgtgaggagagtaaaccaagaagaaatccacagatttagttctcaagaaaagcctaggcttctc

SEQ ID NO: 323388 - DNA, 120 bp, Artificial Sequence
  ENSG00000135905_2 (sequence is synthesized)
gagcctttggattatgagactgtcattgaagaacttgaaaagacctaccggaatgatcctcttcaagatctcttgttcttccccagtgatgacttttcagcagccacagtttcctgggat

SEQ ID NO: 323389 - DNA, 120 bp, Artificial Sequence
  ENSG00000135905_3 (sequence is synthesized)
atccgcacgttgtactcaacagtacctgaagatgcagagcacaaggcagaaaatttactggttaaggaggcttgtaaattttatagttcccagtggcatgtggtaaactacaaatatgaa

SEQ ID NO: 323390 - DNA, 120 bp, Artificial Sequence
  ENSG00000135905_4 (sequence is synthesized)
caatattctggagacattcgacagctaccccgagcagaatacaaaccagagaagcttccttcacattcctttgagattgaccatgaagatgctgataaggatgaagataccacttcccac

SEQ ID NO: 323391 - DNA, 120 bp, Artificial Sequence
  ENSG00000135905_5 (sequence is synthesized)
tcgtcttccaaggggggtggaggagcgggaggaactggtgttttcaagtccggctggctctacaaggggaattttaacagcaccgtgaacaacaccgttactgttcggtcattcaaaaag

SEQ ID NO: 323392 - DNA, 120 bp, Artificial Sequence
  ENSG00000135905_6 (sequence is synthesized)
cgctacttccagctgactcagttaccagataactcctacattatgaacttttacaaagatgagaaaatatccaaagaacccaaaggatgcatctttttggattcctgtacaggagtggtg

SEQ ID NO: 323393 - DNA, 120 bp, Artificial Sequence
  ENSG00000135905_7 (sequence is synthesized)
cagaataacagactaagaaaatatgcctttgaattgaaaatgaatgatctgacctattttgtgctggcagctgaaacagagtcagatatggatgaatggatccacaccctcaaccgcatt

SEQ ID NO: 323394 - DNA, 120 bp, Artificial Sequence
  ENSG00000135905_8 (sequence is synthesized)
ctgcaaatcagtcctgaggggcccctccaagggaggaggagcacagagctcactgatctgggtctggattcgctggataattctgtaacttgtgaatgcacgccagaggaaacagattct

SEQ ID NO: 323395 - DNA, 120 bp, Artificial Sequence
  ENSG00000135905_9 (sequence is synthesized)
tcagagaacaacctacacgcagactttgcaaagtacctcacagaaacagaagatactgtaaaaacaactcgaaacatggagaggctaaatctgttctctctagatccagacatagatacc

SEQ ID NO: 323396 - DNA, 120 bp, Artificial Sequence
  ENSG00000135905_10 (sequence is synthesized)
ttgaaacttcaaaaaaaagatctcttggaacctgagtctgtgatcaaaccatttgaagaaaaagctgccaagagaatcatgatcatctgtaaagccctcaactcaaatcttcagggatgt

SEQ ID NO: 323397 - DNA, 120 bp, Artificial Sequence
  ENSG00000135905_11 (sequence is synthesized)
gttacggagaatgaaaatgatccgataacgaatattgagcctttttttgtgagtgtggcactttatgacctcagagacagcaggaagatttctgctgattttcatgtggatctaaaccat

SEQ ID NO: 323398 - DNA, 120 bp, Artificial Sequence
  ENSG00000135905_12 (sequence is synthesized)
gctgctgtcagacagatgctcttgggggcttctgtggctttggaaaatggcaacatcgacaccatcactccaagacaatcagaagaacctcacatcaagggacttccagaggaatggcta

SEQ ID NO: 323399 - DNA, 120 bp, Artificial Sequence
  ENSG00000135905_13 (sequence is synthesized)
aaatttccaaagcaggctgtattttctgtaagcaatccacattctgaaattgttttggtggccaaaatcgaaaaagtcttgatgggaaacattgcaagtggtgccgaaccttatattaag

SEQ ID NO: 323400 - DNA, 120 bp, Artificial Sequence
  ENSG00000135905_14 (sequence is synthesized)
aacccagactccaacaagtatgcacaaaagatactaaaatccaacagacaattctgcagcaaattgggaaaataccgtatgccttttgcttgggcagtaagatcagtatttaaggacaac

SEQ ID NO: 323401 - DNA, 120 bp, Artificial Sequence
  ENSG00000135905_15 (sequence is synthesized)
cagggaaatgtggacagagactcaagattttcaccattgtttagacaagaaagtagcaagatttcaactgaggacctagttaaactagtatcagattatagaagggccgacagaataagc

SEQ ID NO: 323402 - DNA, 120 bp, Artificial Sequence
  ENSG00000135905_16 (sequence is synthesized)
aaaatgcagaccattcctggaagcctggatattgctgttgacaacgttcccttggagcatccaaattgtgtaacatcgtcctttatccctgtcaagcctttcaacatgatggctcaaaca

SEQ ID NO: 323403 - DNA, 120 bp, Artificial Sequence
  ENSG00000135905_17 (sequence is synthesized)
gaacccacagtggaggtggaagaatttgtttacgattcaacaaagtattgtcggccttacagagtatataaaaatcaaatttatatttaccccaaacacctcaagtatgatagccagaaa

SEQ ID NO: 323404 - DNA, 120 bp, Artificial Sequence
  ENSG00000135905_18 (sequence is synthesized)
tgcttcaacaaggcacggaatataactgtgtgcattgaattcaaaaattcagatgaagaaagtgccaagcccctgaagtgtatttatggaaaacctggagggcccctcttcacctcagcc

SEQ ID NO: 323405 - DNA, 120 bp, Artificial Sequence
  ENSG00000135905_19 (sequence is synthesized)
gcctacacagcagttctgcaccactctcagaatccggatttctcagatgaggtgaaaattgagctaccaacacaactccatgagaaacaccatattttgttttctttttatcacgtcacc

SEQ ID NO: 323406 - DNA, 120 bp, Artificial Sequence
  ENSG00000135905_20 (sequence is synthesized)
tgtgacatcaatgcaaaagctaatgccaaaaagaaggaggctctggaaacgtcagttggatatgcttggcttcctctgatgaaacacgatcagatagcttctcaagagtacaacatccca

SEQ ID NO: 323407 - DNA, 120 bp, Artificial Sequence
  ENSG00000135905_21 (sequence is synthesized)
atagcaacaagtctgcctcctaattatttaagctttcaagattctgcaagtggaaagcatggtgggagtgacattaaatgggttgatggtggcaaaccacttttcaaagtgtcgacattt

SEQ ID NO: 323408 - DNA, 120 bp, Artificial Sequence
  ENSG00000135905_22 (sequence is synthesized)
gttgtatcaacagtaaatactcaggatccacatgtgaatgcatttttccaagagtgccaaaaaagagagaaagatatgtctcagtcacctacctcaaatttcatccgctcttgtaagaac

SEQ ID NO: 323409 - DNA, 120 bp, Artificial Sequence
  ENSG00000135905_23 (sequence is synthesized)
ttattgaatgtggaaaagattcatgcaatcatgagttttctgcctataattttgaatcagctcttcaaagttctggtacagaatgaggaagatgaaataactacaactgtcaccagggtt

SEQ ID NO: 323410 - DNA, 120 bp, Artificial Sequence
  ENSG00000135905_24 (sequence is synthesized)
ctgaccgacattgtggccaagtgccatgaggagcagctggatcattctgtccagtcatatattaagttcgtgttcaagaccagggcatgcaaggagaggactgtacatgaggaactggct

SEQ ID NO: 323411 - DNA, 120 bp, Artificial Sequence
  ENSG00000135905_25 (sequence is synthesized)
aaaaatgtgactggtcttttgaaatcaaatgactcaacaacagtaaagcatgtcctaaagcattcctggttcttctttgcaattatcctaaaatcgatggcacagcacttgattgacaca

SEQ ID NO: 323412 - DNA, 120 bp, Artificial Sequence
  ENSG00000135905_26 (sequence is synthesized)
aataaaatccagcttccccggcctcagagatttcctgaatcttaccaaaatgaattggacaatcttgtcatggtcctatccgaccatgtgatttggaaatacaaggatgcacttgaagaa

SEQ ID NO: 323413 - DNA, 120 bp, Artificial Sequence
  ENSG00000135905_27 (sequence is synthesized)
acaagaagggcaaaccacagcgttgccagatttctcaagcgctgctttacatttatggaccgagggtatgtgtttaagatggtcaacaattacatcagcatgttctcctccggtgacctt

SEQ ID NO: 323414 - DNA, 120 bp, Artificial Sequence
  ENSG00000135905_28 (sequence is synthesized)
aagaccttgtgccagtataaatttgattttcttcaagaagtatgtcaacatgaacactttatccctttgtgtctgcccataagatcagcaaacattccagatcctttgacaccttcagaa

SEQ ID NO: 323415 - DNA, 120 bp, Artificial Sequence
  ENSG00000135905_29 (sequence is synthesized)
tcgactcaagagttacatgcatcagatatgcctgaatattcagtcacaaatgaattttgtcgcaaacacttcttaatcggaattctgctccgagaagttggctttgccctgcaggaagac

SEQ ID NO: 323416 - DNA, 120 bp, Artificial Sequence
  ENSG00000135905_30 (sequence is synthesized)
aggcccagatagcaagtttatacatgcccctgtacggcatgctcctggacaatatgccaaggatttatctgaaggacctgtatccttttactgtcaatacatctaatcaggggtctagag

SEQ ID NO: 323417 - DNA, 120 bp, Artificial Sequence
  ENSG00000135905_31 (sequence is synthesized)
atgatctaagcaccaatggaggatttcaaagccagacagctatcaaacatgcaaactctgtggatacatcattttctaaagatgttttaaattccatagcagcattttcatcaatagcta

SEQ ID NO: 323418 - DNA, 120 bp, Artificial Sequence
  ENSG00000135905_32 (sequence is synthesized)
tttctacagtaaaccatgctgactccagagcatctttagcaagtcttgactccaatccaagtaccaatgagaagagcagtgagaagacggacaactgtgaaaagatcccaagacccttgt

SEQ ID NO: 323419 - DNA, 120 bp, Artificial Sequence
  ENSG00000135905_33 (sequence is synthesized)
ctttgattggctcaactcttcgatttgacaagttagatcaagcagaaaccaggagtctcctgatgtgttttcttcacattatgaaaacgatttcgtacgagactctgattgcctactggc

SEQ ID NO: 323420 - DNA, 120 bp, Artificial Sequence
  ENSG00000135905_34 (sequence is synthesized)
agagagctcccagcccagaggtgtccgacttcttcagcatcttggacgtttgtcttcaaaatttcagatacctaggaaaacgcaacataataagaaaaattgctgctgcatttaaatttg

SEQ ID NO: 323421 - DNA, 120 bp, Artificial Sequence
  ENSG00000135905_35 (sequence is synthesized)
tgcagtccacccagaacaatggaactctcaaaggatccaatccttcctgccagacatcaggtctcttgtcacaatggatgcactccacttccagtcatgaaggccataagcagcacagat

SEQ ID NO: 323422 - DNA, 120 bp, Artificial Sequence
  ENSG00000135905_36 (sequence is synthesized)
cacaaactttacctataattcgaggcaaaaatgcactttctaaccccaaactcttacagatgttagacaataccatgaccagcaactccaatgaaatagacatcgtgcatcatgtagaca

SEQ ID NO: 323423 - DNA, 120 bp, Artificial Sequence
  ENSG00000135905_37 (sequence is synthesized)
ctgaggccaatatagctacggaggtttgcctcactattctggacctgttatccctcttcacacagactcatcagagacaactccaacaatgtgactgtcaaaattcattgatgaaaaggg

SEQ ID NO: 323424 - DNA, 120 bp, Artificial Sequence
  ENSG00000135905_38 (sequence is synthesized)
tctttgatacctacatgctctttttccaagtcaatcagtcagccacagcgctgaagcatgtgtttgcctccttgagactgtttgtatgcaagtttccttcagcgttctttcaagggcctg

SEQ ID NO: 323425 - DNA, 120 bp, Artificial Sequence
  ENSG00000135905_39 (sequence is synthesized)
ctgacctctgtggatcattctgttacgaagtcctaaaatgctgtaaccacaggtcacggtcaactcagacagaagcctcagcccttctgtactttttcatgaggaagaattttgaattta

SEQ ID NO: 323426 - DNA, 120 bp, Artificial Sequence
  ENSG00000135905_40 (sequence is synthesized)
acaagcagaagtcaattgtccggtcccacttacaactcatcaaagctgtgagccagttaatagccgatgctgggattggaggctctcggtttcaacattcgcttgcaattaccaataatt

SEQ ID NO: 323427 - DNA, 120 bp, Artificial Sequence
  ENSG00000135905_41 (sequence is synthesized)
tcgccaatggagataagcaaatgaaaaacagcaatttcccagcagaggtgaaggacctgactaagcgtataaggactgttttgatggccacagctcagatgaaggagcacgagaaggacc

SEQ ID NO: 323428 - DNA, 120 bp, Artificial Sequence
  ENSG00000135905_42 (sequence is synthesized)
ccgagatgctggtggatctccagtacagcctggcaaactcctacgcaagcactcctgaactacgcaggacctggctggaaagtatggccaagattcatgccagaaacggagatttatctg

SEQ ID NO: 323429 - DNA, 120 bp, Artificial Sequence
  ENSG00000135905_43 (sequence is synthesized)
aggctgccatgtgttacatccatattgctgctctcattgcagagtatctgaaaagaaagggttactggaaagtggaaaagatttgcacagcatccctgctctcggaggatacccacccct

SEQ ID NO: 323430 - DNA, 120 bp, Artificial Sequence
  ENSG00000135905_44 (sequence is synthesized)
gtgatagcaactcattactaacaactcccagtggaggaagcatgttctctatgggatggccagcttttttgagcattacaccaaacattaaggaagaaggagcgatgaaagaggattctg

SEQ ID NO: 323431 - DNA, 120 bp, Artificial Sequence
  ENSG00000135905_45 (sequence is synthesized)
gaatgcaagatacaccatacaatgagaatatcctggtggagcagctatacatgtgtgtggagtttctctggaagtctgagcgatatgaactcattgctgatgtcaacaagcccatcattg

SEQ ID NO: 323432 - DNA, 120 bp, Artificial Sequence
  ENSG00000135905_46 (sequence is synthesized)
ctgtctttgagaaacaacgagacttcaaaaaattgtcagatctctactacgacattcatcggtcatatctgaaagtggcagaggtggtgaattcggagaagcggctgtttggtcgctact

SEQ ID NO: 323433 - DNA, 120 bp, Artificial Sequence
  ENSG00000135905_47 (sequence is synthesized)
atcgtgtggcattttatgggcagggcttttttgaagaagaagaaggtaaagagtatatttataaagagcctaagctgacaggtctgtccgagatttcccaaagattactcaagctctatg

SEQ ID NO: 323434 - DNA, 120 bp, Artificial Sequence
  ENSG00000135905_48 (sequence is synthesized)
cagataaatttggagcagacaatgtgaagataatccaggattccaacaaggtaaaccccaaggatttggaccccaaatatgcctacatccaggtgacctatgtgacgccgttctttgagg

SEQ ID NO: 323435 - DNA, 120 bp, Artificial Sequence
  ENSG00000135905_49 (sequence is synthesized)
aaaaggaaatcgaagaccggaagacagatttcgaaatgcaccacaacatcaaccgctttgtcttcgagacacccttcacgctgtcgggcaagaagcacggtggggtggcggagcagtgca

SEQ ID NO: 323436 - DNA, 120 bp, Artificial Sequence
  ENSG00000135905_50 (sequence is synthesized)
agcggcggacgatcctgacaacgagtcacctgttcccctacgtgaagaagagaatacaagtaattagccaatcgagcacagaactgaatccaattgaagtggcaattgacgagatgtcca

SEQ ID NO: 323437 - DNA, 120 bp, Artificial Sequence
  ENSG00000135905_51 (sequence is synthesized)
agaaggtttctgagcttaatcagctttgcacaatggaagaagtggacatgatcagactgcagctcaaactgcaaggaagtgtcagcgtgaaggttaatgctgggccaatggcctatgcac

SEQ ID NO: 323438 - DNA, 120 bp, Artificial Sequence
  ENSG00000135905_52 (sequence is synthesized)
gagcttttcttgaagaaaccaatgcaaagaagtaccctgacaaccaagtaaagcttttgaaggagatcttcaggcaatttgcagatgcatgtgggcaggcccttgacgtgaatgagcgcc

SEQ ID NO: 323439 - DNA, 120 bp, Artificial Sequence
  ENSG00000135905_53 (sequence is synthesized)
tcatcaaagaggaccagctggagtaccaggaagaactgaggtcccactacaaggacatgctcagcgaactctccacagtcatgaatgagcagattacgggcagggacgacctgtcaaagc

SEQ ID NO: 323440 - DNA, 120 bp, Artificial Sequence
  ENSG00000135905_54 (sequence is synthesized)
gcggagtggaccaaacctgcactcgagtaattagcaaagcaactccggccctacccacggtctccatctcatctagtgctgaagtctgagggctctgcagcatcagacccacctctaaga

SEQ ID NO: 323441 - DNA, 120 bp, Artificial Sequence
  ENSG00000135905_55 (sequence is synthesized)
gaactttctgaatttgcagctaatctcggggaagagaaagataggtttaatttatttgaagttttcatggtgttaatatttttgtttacctcgctagcttcagaattttgccaacctctg

SEQ ID NO: 323442 - DNA, 120 bp, Artificial Sequence
  ENSG00000135905_56 (sequence is synthesized)
aatttgcacattttgtataatttttttttctttgagcagtgttgatcaagccaggttgaatatttgccatgaaattccagtgaatgtgtagctcaaatgcaaaccctaagtttgctgtca

SEQ ID NO: 323443 - DNA, 120 bp, Artificial Sequence
  ENSG00000135905_57 (sequence is synthesized)
gttattgtatggtcagtaccccagtcctagtacacatattttaaaggttaaagtgaatgtttttgtaacatttaagcatatttcagatgtaaataaaagattgtaaaatatacggttttt

SEQ ID NO: 323444 - DNA, 120 bp, Artificial Sequence
  ENSG00000135905_58 (sequence is synthesized)
accaaatttaaaagatcctttttagttaatactatgacagtactaaaaatatatgaataacatttcagataccattatattaaaatatttgtgtatgtgtacaaaagcgttgataaatac

SEQ ID NO: 323445 - DNA, 120 bp, Artificial Sequence
  ENSG00000135905_59 (sequence is synthesized)
taatctttaaagtttgtggagttcctttatttgtaatatatgtgctcttaaaagcaatgggatgtgaaattatgaaagtattttattgttcatagaaataaaaaacacagttactttgca

SEQ ID NO: 323446 - DNA, 120 bp, Artificial Sequence
  ENSG00000135905_60 (sequence is synthesized)
actgttttgcaaacatagcatcaacatagaagttattttgtaggctccaggatgcagcgatgggctgcactgccagcattgttctgcttcaagcttttcgttctgtggtccagaggagct

SEQ ID NO: 323447 - DNA, 120 bp, Artificial Sequence
  ENSG00000135905_61 (sequence is synthesized)
gtccacacatttgtagacgacgccaagaggaaccatcccacgaaattttgcctctggaaagtgacgatgaaatgaatagacccagaaccctcatcataatgcaagaaaagcctaggcttc

SEQ ID NO: 323448 - DNA, 120 bp, Artificial Sequence
  ENSG00000135905_62 (sequence is synthesized)
gatccacccttcagcattttgctttcatttctctctgttctctgtatcagcttccaattctttccagcttttacaggttcctctgttgcaattatgaccccttcctcagtggacaccttc

SEQ ID NO: 323449 - DNA, 120 bp, Artificial Sequence
  ENSG00000135905_63 (sequence is synthesized)
tcctaccactttctacattccctacatccccccctggtgtcagaataaatagccaagtgccttatttgtagtcacaacccaggagtgactataatccttcctccactgaggcaccacagt

SEQ ID NO: 323450 - DNA, 120 bp, Artificial Sequence
  ENSG00000135905_64 (sequence is synthesized)
ctacgacattcatcggtcatatctgaaagtggcagaggtggtgaattcggagaagcggctgtttggtcgctactatcgtgtggcattttatgggcaggctgtgggcttttttgaagaaga

SEQ ID NO: 323451 - DNA, 120 bp, Artificial Sequence
  ENSG00000135905_65 (sequence is synthesized)
aaggttggcgcggggaagaccggcgggaggcgcgccccgggcccgcggcgcgattggcgtgaccggcgatggccggtgagcggacccgcaggttcacccggagcctgttgagacctgggc

SEQ ID NO: 323452 - DNA, 120 bp, Artificial Sequence
  ENSG00000135905_66 (sequence is synthesized)
catttcacaagacagtttagcaatacagtttataatagagggccgtgacacatgtaccctgcatgcatgaccagatatgctatgggttcttggtagatatcaaatcaatgtcataaattg

SEQ ID NO: 323453 - DNA, 120 bp, Artificial Sequence
  ENSG00000135905_67 (sequence is synthesized)
tttattatgtatatttgacttaacaaacctttgacattatgtcagtcctgagagtctggtgtgcctaaaattcagatagatgcactgtaatttcttatgcagctgtttgttttcatttat

SEQ ID NO: 323454 - DNA, 120 bp, Artificial Sequence
  ENSG00000135905_68 (sequence is synthesized)
gcgtagagctcaggtctatatatggacgtccaaatgaaaccatcaaaccaatcatttaaactcattttgattttgatactgtttagcccagccaaatttatcagtaccagttgcctctga

SEQ ID NO: 323455 - DNA, 120 bp, Artificial Sequence
  ENSG00000135905_69 (sequence is synthesized)
aagaaagtctgagttctgtggacatagatggacacatcattcacttggatgcatgacctcttcatgaagaaccataattgcttttcagaactgtttaatcatcaattatgattgtcctca

SEQ ID NO: 323456 - DNA, 120 bp, Artificial Sequence
  ENSG00000135905_70 (sequence is synthesized)
tcaatctctttacatctttattagtgtaagaatttcttaagtgaggaagagcctggcatagactcataaggctaaaaggtcatcaatgtacacactgaatgaactaagaaaggttagagc

SEQ ID NO: 323457 - DNA, 120 bp, Artificial Sequence
  ENSG00000135905_71 (sequence is synthesized)
acaaaaattagccaggtgtggtggcaaataagacagcccatcaagtattcatttgaactttgctgacattatctcaatgtatccaactttagcatccagaaggaagagagaacctgttaa

SEQ ID NO: 323458 - DNA, 120 bp, Artificial Sequence
  ENSG00000135905_72 (sequence is synthesized)
cctgttaattatgccatttttaagtctcacagttcccagtgatgtatattcagagtaaactcaccaatatttgtcataattttgaggttgttatttaaagttggagatgagtaggtgtag

SEQ ID NO: 323459 - DNA, 120 bp, Artificial Sequence
  ENSG00000135905_73 (sequence is synthesized)
gaaggagaaatgtggaagtttgggcagcagtaaatcaagatagattcatgcagtctccaggaattcgtttgccctaaggcagcgtcatagcaagggagggagagtccaggcctgggagtc

SEQ ID NO: 323460 - DNA, 120 bp, Artificial Sequence
  ENSG00000135905_74 (sequence is synthesized)
taataaacgttgcagatcaggccactacttactgtgacttggaacaagtttcttctccatgtctctgggtccccagctataaattgaagctgacaatacctgtgttatgagcagtatgtg

SEQ ID NO: 323461 - DNA, 120 bp, Artificial Sequence
  ENSG00000135905_75 (sequence is synthesized)
caatctcaagtgcacaagcatttggcgtaaaatagatcatgaatagtactttatcctcccttttctatctctttctataggaacaactaatgccaggacattctgcatgaaaaagatggt

SEQ ID NO: 323462 - DNA, 120 bp, Artificial Sequence
  ENSG00000135905_76 (sequence is synthesized)
atttagatttgcagaaccctttataatgaatttgtttttatttctcataagctttaagacaaaggttaactaattataattcactgattaaacatttttggtattgttaagcattctcag

SEQ ID NO: 323463 - DNA, 120 bp, Artificial Sequence
  ENSG00000135905_77 (sequence is synthesized)
ttccctccagaaaacctactggggcaagtagaggcaagatgtctgttgtgaaatattccagtataacaaaattacaatagtgcacacatttttcactttaaggatccaacattgctctga

SEQ ID NO: 323464 - DNA, 120 bp, Artificial Sequence
  ENSG00000135905_78 (sequence is synthesized)
ggttttagaaacaggcattttagaaccagacagagctgagctcaaaatatcctaactctggccaggcatggtggggcatgcctataatcccaatactttaggaggccaaggtctcctgga

SEQ ID NO: 323465 - DNA, 87 bp, Artificial Sequence
  ENSG00000135905_79 (sequence is synthesized)
taaggtcaggaaaatctctaaaaacaacttttaaaaaattaaccaagggtggtagcatacacctgtagtcctagctactcaggaggc

SEQ ID NO: 323466 - DNA, 80 bp, Artificial Sequence
  ENSG00000135905_80 (sequence is synthesized)
cattatcagaatcatcagagatgagcccagaagctggaagttgcaatgaactatgatagcaccactgcactccagcctgg

SEQ ID NO: 323467 - DNA, 120 bp, Artificial Sequence
  ENSG00000135905_81 (sequence is synthesized)
tcgacagctaccccgcgagggtccataggaagatactgaagaaatagatgacttcaggctagaatggaaaatgtaagcctttacacactaggaatagaaatcagcactaacttggagatc

SEQ ID NO: 323468 - DNA, 120 bp, Artificial Sequence
  ENSG00000135905_82 (sequence is synthesized)
atcattgcccagtctaatgtcacgaagtttttctccttatgttttcttctcatagatttatagtttcaggtcttgaatgtaggacatgcttcaaatttaattggtatcctttttttctgc

SEQ ID NO: 323469 - DNA, 120 bp, Artificial Sequence
  ENSG00000135905_83 (sequence is synthesized)
gcagcagcagcggcactaaaatatgtttgctcaaaacagagggagatgaaaaactactggcagccagtacttcttaaaagaaaaagaagcatgttttacttctctggggtgaacatacca

SEQ ID NO: 323470 - DNA, 120 bp, Artificial Sequence
  ENSG00000135905_84 (sequence is synthesized)
tttgagcatcatgctagatgcttccgcgaaagcaacctcactgaggctggggcggccacacgttacagcaaaacaatccttcctcaaacttcctgcagcacccttcacgccgaggagccc

SEQ ID NO: 323471 - DNA, 120 bp, Artificial Sequence
  ENSG00000135905_85 (sequence is synthesized)
agaaaccacagaaaacatttttttttctttgaatctccaagagttacactggaagaattagcttggcagaaagatctcaagattgaattctattggggatttcatactttcctcatttgt

SEQ ID NO: 323472 - DNA, 120 bp, Artificial Sequence
  ENSG00000135905_86 (sequence is synthesized)
aaattttttaccatggtcgatttgatagaaagaagatgtaaggaagaaaaattcataagagtataaattgtgactaaagatcaaataaagtgtgaccagcttagctgggctgaaatagaa

SEQ ID NO: 323473 - DNA, 120 bp, Artificial Sequence
  ENSG00000135912_0 (sequence is synthesized)
ttcagactgacagacttcaaggatgcagctgctactaccggaggtgtgtggcaccttacctcagcaaggccatgagaccgtgtggccatgatgtgggcccctcatggcctcagcaggaac

SEQ ID NO: 323474 - DNA, 120 bp, Artificial Sequence
  ENSG00000135912_1 (sequence is synthesized)
acagcactatagtattggcctccgccagaaaaacagcttcaagcagagtggtccctcaggcacagtacctgccacgccacctgagaaaccctcggagggcagagtctggcctcaggccca

SEQ ID NO: 323475 - DNA, 120 bp, Artificial Sequence
  ENSG00000135912_2 (sequence is synthesized)
tcagcaagtgaagccaatctggaagctggaaaagaagcaagtggagacactgtcagcagggttgggcccaggcctcttgggcgtcccaccccagccagcatatttcttttgccccagcac

SEQ ID NO: 323476 - DNA, 120 bp, Artificial Sequence
  ENSG00000135912_3 (sequence is synthesized)
tttatgtagctctgggaccacggctgtcattgcaggccacagcagttcctgttacctacactctctcccggacttgttcaacagcaccctgctataccgccgctccagctataggcaaaa

SEQ ID NO: 323477 - DNA, 120 bp, Artificial Sequence
  ENSG00000135912_4 (sequence is synthesized)
accgtaccagcaactggagtctttctgcttgcgttcgagcccgtcagaaaaaagccctttttctctccctcaaaagagcctccctgtcagtctcactgccaacaaggccacttcttccat

SEQ ID NO: 323478 - DNA, 120 bp, Artificial Sequence
  ENSG00000135912_5 (sequence is synthesized)
ggtcttctccatggcccagcccatggcctcctcatccacagaaccatacctctgcttggcagcggctggggaaaacccttcagggaagagcctggcctctgccatctcagggaagatccc

SEQ ID NO: 323479 - DNA, 120 bp, Artificial Sequence
  ENSG00000135912_6 (sequence is synthesized)
atctccactctcttcctcctataagcccatgctgaataataattccttcatgtggccaaatagcacgccagtgcctttattgcagaccacacagggcctgaagccagtatcgccacccaa

SEQ ID NO: 323480 - DNA, 120 bp, Artificial Sequence
  ENSG00000135912_7 (sequence is synthesized)
gatccagcctgtctcctggcatcattcagggggtactggagactgtgcaccgcagcctgttgaccataaggtgcccaaaagcattggcactgtcccagctgatgccagtgcccatatcgc

SEQ ID NO: 323481 - DNA, 120 bp, Artificial Sequence
  ENSG00000135912_8 (sequence is synthesized)
cttgtctaccgctagctcccacgacacatccaccaccagtgttgcctcttcctggtataaccggaataacttagccatgagggcagagccactttcctgtgctctggatgacagctctga

SEQ ID NO: 323482 - DNA, 120 bp, Artificial Sequence
  ENSG00000135912_9 (sequence is synthesized)
ttcccaggatccaactaaggagattcggttcactgaggccgtgaggaaattgaccgcaagaggctttgagaagatgccgaggcaaggctgccagcttgaacagtctagtttcctgaaccc

SEQ ID NO: 323483 - DNA, 120 bp, Artificial Sequence
  ENSG00000135912_10 (sequence is synthesized)
cagcttccagtggaatgtcctcaacaggagcaggcggtggaaacctcctgcggtaaatcagcagtttcctcaggaggatgctggatcggtcaggcgggtcctccctggtgcctcagatac

SEQ ID NO: 323484 - DNA, 120 bp, Artificial Sequence
  ENSG00000135912_11 (sequence is synthesized)
cttggggttggacaatacagtcttctgtaccaagcgtatcagcattcacctccttgcctcacatgccagtgggctcaatcacaaccctgcctgtgaatctgtaattgactcctcagcatt

SEQ ID NO: 323485 - DNA, 120 bp, Artificial Sequence
  ENSG00000135912_12 (sequence is synthesized)
tggagaaggcaaagctccaggtcccccttttcctcaaactcttggcatagccaacgtggccacccgcctctcttccatccagctgggccagtctgagaaggagagacctgaggaggccag

SEQ ID NO: 323486 - DNA, 120 bp, Artificial Sequence
  ENSG00000135912_13 (sequence is synthesized)
ggagctggactcatctgatagggatattagttcagctactgacctccagccagatcaggctgagactgaagatacagaagaagaactagtagatggtttggaagactgttgtagccgtga

SEQ ID NO: 323487 - DNA, 120 bp, Artificial Sequence
  ENSG00000135912_14 (sequence is synthesized)
tgagaatgaagaggaggagggagactcagagtgctcctcattaagtgctgtctcccccagcgaatcggtggccatgatctctagaagctgtatggaaattctgaccaaacccctttccaa

SEQ ID NO: 323488 - DNA, 120 bp, Artificial Sequence
  ENSG00000135912_15 (sequence is synthesized)
tcatgagaaagttgtccgaccagccctcatctacagtctctttcccaacgttccccctaccatctattttggcactcgggatgagagagtggagaaacttccctgggaacagaggaagtt

SEQ ID NO: 323489 - DNA, 120 bp, Artificial Sequence
  ENSG00000135912_16 (sequence is synthesized)
gctccgatggaagatgagcacagtgacccccaacattgtcaagcagaccattggacggtcccacttcaaaatcagcaaaagaaacgatgactggctgggctgctggggtcaccacatgaa

SEQ ID NO: 323490 - DNA, 120 bp, Artificial Sequence
  ENSG00000135912_17 (sequence is synthesized)
gtctcctagtttccgatccattcgagagcatcagaagctaaaccatttcccaggctcattccagattgggaggaaggaccggctatggcggaacctgtcacgtatgcagagccgctttgg

SEQ ID NO: 323491 - DNA, 120 bp, Artificial Sequence
  ENSG00000135912_18 (sequence is synthesized)
caagaaggagttcagtttcttcccccagtcctttatcctgccccaggacgccaagctcctgcgcaaagcgtgggagagcagcagccgccaaaagtggattgtgaagccaccagcatcagc

SEQ ID NO: 323492 - DNA, 120 bp, Artificial Sequence
  ENSG00000135912_19 (sequence is synthesized)
gaaggcccctcctggtacagaggtatctacacaaaccctacctcatcagcggcagcaagtttgacctgcggatctatgtttatgtcacttcctacgatcctctgcggatttacctctttt

SEQ ID NO: 323493 - DNA, 120 bp, Artificial Sequence
  ENSG00000135912_20 (sequence is synthesized)
cagatggactggtccgctttgccagttgcaagtattcgccttccatgaagagccttggcaataagttcatgcacctgaccaactacagtgtcaataaaaagaatgccgagtaccaggcca

SEQ ID NO: 323494 - DNA, 120 bp, Artificial Sequence
  ENSG00000135912_21 (sequence is synthesized)
atgcagatgaaatggcttgccagggccacaaatgggcactgaaggctttgtggaactacctgagccagaagggagtcaatagcgacgccatctgggagaagataaaggatgttgttgtca

SEQ ID NO: 323495 - DNA, 120 bp, Artificial Sequence
  ENSG00000135912_22 (sequence is synthesized)
aaactatcatctcgtcagagccctatgtgaccagcctgctcaagatgtatgtgcgacggccctatagctgccatgaactctttggttttgacatcatgctagacgaaaacctcaagccct

SEQ ID NO: 323496 - DNA, 120 bp, Artificial Sequence
  ENSG00000135912_23 (sequence is synthesized)
gggtcctggaagtcaacatttccccaagcctccactccagctctccactggatatcagcatcaaaggccagatgattcgtgaccttctgaatctggcaggttttgtcctgcccaatgcag

SEQ ID NO: 323497 - DNA, 120 bp, Artificial Sequence
  ENSG00000135912_24 (sequence is synthesized)
aggatatcatttccagccccagcagctgcagcagctccaccaccagcctgcccacctcccctggggacaaatgtcgaatggctccagagcatgtcactgcacagaagatgaagaaagcct

SEQ ID NO: 323498 - DNA, 120 bp, Artificial Sequence
  ENSG00000135912_25 (sequence is synthesized)
attatctgacccagaaaattcctgatcaggacttctatgcatctgtgctggatgtcctgacaccagatgatgttcggattctggttgagatggaagatgagttttctcgccgtggtcagt

SEQ ID NO: 323499 - DNA, 120 bp, Artificial Sequence
  ENSG00000135912_26 (sequence is synthesized)
ttgaacgaatttttccttctcatatctcctctcgctatctccgcttttttgagcagccacgatatttcaacattctcaccacccaatgggaacagaaataccatggcaacaagcttaaag

SEQ ID NO: 323500 - DNA, 120 bp, Artificial Sequence
  ENSG00000135912_27 (sequence is synthesized)
gagtagatctgctccggagttggtgctacaaagggttccacatgggagttgtctctgattctgctccagtgtggtctctcccgacatcacttctgactatctcaaaggatgacgtgatac

SEQ ID NO: 323501 - DNA, 120 bp, Artificial Sequence
  ENSG00000135912_28 (sequence is synthesized)
tcaatgccttcagcaaatcagagactagcaagctgggaaaacaaagctcctgtgaggttagcctactactctctgaagacgggaccacgcccaaatccaagaagactcaagctggccttt

SEQ ID NO: 323502 - DNA, 120 bp, Artificial Sequence
  ENSG00000135912_29 (sequence is synthesized)
ccccttatccccagaaacccagttcctcaaaggacagtgaggacaccagcaaagagcccagcctttctacccagacgttacctgtgatcaagtgctctgggcagacttcaagactttctg

SEQ ID NO: 323503 - DNA, 120 bp, Artificial Sequence
  ENSG00000135912_30 (sequence is synthesized)
cttcctccactttccagtcaatcagtgactccctcctggctgtgagcccataactggcctctctccaaaagcctctgcccaggagcatgggcatcagctacctcacgggaaccagcctgc

SEQ ID NO: 323504 - DNA, 120 bp, Artificial Sequence
  ENSG00000135912_31 (sequence is synthesized)
tgttcagaccagtctgaccccctacccctttcaccctgtccctcctcagagtattttttgaagtggttgcattatagagatgggtatttgtagggccggagggatggtagtgatggggag

SEQ ID NO: 323505 - DNA, 120 bp, Artificial Sequence
  ENSG00000135912_32 (sequence is synthesized)
aaggtgaggaagggtcaccctctgtcacctgtctgcctggctggcacctcatatctcagcagagaagccagtggtggccacgcagccttataaagcaggttttggtttctaccttaagtg

SEQ ID NO: 323506 - DNA, 120 bp, Artificial Sequence
  ENSG00000135912_33 (sequence is synthesized)
agccatgtgtggtttgtctgggggccctggtgtggttgctgagttgtagctcaagaggagaaaacatacagaacatatttggaccggaaatcctttgttctgaatttgagggggtcttct

SEQ ID NO: 323507 - DNA, 120 bp, Artificial Sequence
  ENSG00000135912_34 (sequence is synthesized)
gaggtccttacttccttaggtctttcctcacccctctcccaccgctgtcctgaggagaaacccttgaacttcctcagtagacaggcggagaggccacaacatgccgaacccatttcctgt

SEQ ID NO: 323508 - DNA, 120 bp, Artificial Sequence
  ENSG00000135912_35 (sequence is synthesized)
catcctagtcttgggtcttcaccgcctccttccaaatacccaccctgccagcagccctaggtcttcctgttctgaccccccatcactgctcgttcagccttctagatgtctctctcgtgg

SEQ ID NO: 323509 - DNA, 120 bp, Artificial Sequence
  ENSG00000135912_36 (sequence is synthesized)
acatctgttctttagctgttggctttctctgaggtgtgagagggtctatgaactttgtgaatttcccatggccccagtgaaggagcccagataatcccagtagctgttacctgtctccat

SEQ ID NO: 323510 - DNA, 120 bp, Artificial Sequence
  ENSG00000135912_37 (sequence is synthesized)
gtatcaaaggacacagtccagggggagggtggaaggagatgtggtttctctatagtgcaacaaacatggtttctcaatgttctgctgtgcagcaagcagggtctggcggcttggtaggtg

SEQ ID NO: 323511 - DNA, 120 bp, Artificial Sequence
  ENSG00000135912_38 (sequence is synthesized)
ggtttcaggagcagtcactattgtaggatgggcttccaatcaaacctcagactaaactcttgtactgaactgattctacctccctcctctagactcagtaaacagtgactattcaataaa

SEQ ID NO: 323512 - DNA, 120 bp, Artificial Sequence
  ENSG00000135912_39 (sequence is synthesized)
ctcttcttccagactctcggtctgtccgctgggggcgcgcgcggtgtgtggcaggcggcagcggcgctggcggccgagtgcgcttgtcacgcgtggcggtgcgtggttgctaggggcgcc

SEQ ID NO: 323513 - DNA, 120 bp, Artificial Sequence
  ENSG00000135912_40 (sequence is synthesized)
tgaggctgccgggtagcccagcaggccgagggaggaagtagcgtggagccggtgccgagccggggcgaagctggatcccctagatagactgtcttcaagctcactgatattttcctctgc

SEQ ID NO: 323514 - DNA, 120 bp, Artificial Sequence
  ENSG00000135912_41 (sequence is synthesized)
ttctttgcacttaaggtgaatatcacatctggcttacattactctgttttgtctgtgttttaatcatcttttggtgagtgctctgcagttggatacttgaggaccattagggtggtgata

SEQ ID NO: 323515 - DNA, 120 bp, Artificial Sequence
  ENSG00000135912_42 (sequence is synthesized)
gtaagatggaacaaaagcttggagtgctgctaaagaagttggaatggtagaatgagtcttgtcatcttcctcatggcctcacctctgccctcttcctgcactcacccttttcccttttgt

SEQ ID NO: 323516 - DNA, 120 bp, Artificial Sequence
  ENSG00000135912_43 (sequence is synthesized)
aaaccctgatctggagcaatagttagtgacttgcctgcccagggaagaatgggcagccatgccatcttttttgtcttctcatcatgactctctgctcctctccatcccccatccccacac

SEQ ID NO: 323517 - DNA, 120 bp, Artificial Sequence
  ENSG00000135912_44 (sequence is synthesized)
ccctggactttggactaggccaagaggagggggatgatgtgagtagggggtagggggcgggaagaggatgatgaccatggagaagtcaggaaggtgtacagaggagaaagtacaggacgg

SEQ ID NO: 323518 - DNA, 120 bp, Artificial Sequence
  ENSG00000135912_45 (sequence is synthesized)
gggtacagtgagagactccagtggatcacgtacatctccagttcagctgcagtatcttggagtttcttgcctatgtagggggcagctgagtccctctcctgaactccaacctcataggag

SEQ ID NO: 323519 - DNA, 120 bp, Artificial Sequence
  ENSG00000135912_46 (sequence is synthesized)
ggtgtaactctgaaatcctgcagttgcagcttctccaagatgctttttcctctaatgtgtcttgagttagattgtctgttttctgtttattatgtttccctatgatcactgcacattcca

SEQ ID NO: 323520 - DNA, 120 bp, Artificial Sequence
  ENSG00000135912_47 (sequence is synthesized)
ttctcccaagctgaatatgtgtaaagaggacttctggtctcacattggaatgaatgagtcccttgcctccagacttactaaaggcgaaatgcttttctgtcctcatcccatagggtttca

SEQ ID NO: 323521 - DNA, 120 bp, Artificial Sequence
  ENSG00000135912_48 (sequence is synthesized)
atccaggttattcacaagtggagtcagctccccaagcgaaggcccctcctggtacagaggtgagcctgtagcacatatcccttaccccatcctcccacctccttggcctcgaggttccct

SEQ ID NO: 323522 - DNA, 120 bp, Artificial Sequence
  ENSG00000135912_49 (sequence is synthesized)
gttctcccagccaaagagcttccttagccaactgttctaaggtctttatcttggggactgttagctggcttttcctgtggcttggttacccactgagccccatcatctggctgtatgaga

SEQ ID NO: 323523 - DNA, 120 bp, Artificial Sequence
  ENSG00000135912_50 (sequence is synthesized)
cagatggactggtccgctttgccagttgcaagtatgtgacagtggtgaggtatcctctgacaatattggggattttattttccttggagggagggaaactagaagacaccaaacagaaaa

SEQ ID NO: 323524 - DNA, 120 bp, Artificial Sequence
  ENSG00000135912_51 (sequence is synthesized)
atagtttttgttagcaaggggaaaggcaggaaatgggaaatatggaggctctctacttcgttaaatctggggagggtcttcctgcatgcgggactgaggtgggataaaggagatgagttt

SEQ ID NO: 323525 - DNA, 120 bp, Artificial Sequence
  ENSG00000135912_52 (sequence is synthesized)
agctgtggtttttcagaactttgccagtagacacacttctcaggctcttgtggctatgaaaagatctgtgtacttgttctacacctcttcaggatttggggaaatgtttggccccttctc

SEQ ID NO: 323526 - DNA, 120 bp, Artificial Sequence
  ENSG00000135912_53 (sequence is synthesized)
ttctggggttttgggaggttcaggggcatggcgagtggaggattaatataagacccagagataacacttaccaattcagaattggtctatttgaggccggatgtggtggctcacgcctgt

SEQ ID NO: 323527 - DNA, 120 bp, Artificial Sequence
  ENSG00000135912_54 (sequence is synthesized)
cagaaagccaagtttagtgagagattaaatcccagtataccaagaaatgggcctctctggaaagaattggccaattgattctaccttcttaaaccccaactcctgctaatcttgtcctag

SEQ ID NO: 323528 - DNA, 120 bp, Artificial Sequence
  ENSG00000135912_55 (sequence is synthesized)
gagtagatctgctccggagttggtgctacaaagggttccacatgggagttgtctctgattctgctccagtggtgagtgctgccagtgtggaggacagctccttctcaggcccctccctcc

SEQ ID NO: 323529 - DNA, 120 bp, Artificial Sequence
  ENSG00000135912_56 (sequence is synthesized)
tctgccttatgagtgcagcaggagttgggttggtatgtataggcctctctcacttctccgctaggctctgcttctgtctcaccattctttcctttcaagggaatagttgcctccaggatt

SEQ ID NO: 323530 - DNA, 120 bp, Artificial Sequence
  ENSG00000135912_57 (sequence is synthesized)
attgttctgtccctggccccagggcctcatgtaggacagctccatagcaactctttgaaaaccaagtctgggagctctgcccagttctggggcctctgggcctctctctgtccctggact

SEQ ID NO: 323531 - DNA, 120 bp, Artificial Sequence
  ENSG00000135912_58 (sequence is synthesized)
ctgatgcaacctttttcttgtctgtcctttagctgacccttttcagccttgccatgtcatgctgagttcatgctcttcaaccttgttgcttttccctttcagtcttccctttctttgttc

SEQ ID NO: 323532 - DNA, 120 bp, Artificial Sequence
  ENSG00000135913_0 (sequence is synthesized)
gtttgcgtgtggtcacagttcccgccatcagccgctctccctgactaggggtagctagcggcctccctcctttgggttcggtatccctacttccattaccctcggctcctcccactcctc

SEQ ID NO: 323533 - DNA, 120 bp, Artificial Sequence
  ENSG00000135913_1 (sequence is synthesized)
gcgggctccgtgctttccgcgggtctgtccgggggctccggaccctcggcgcagctgagttgatggcttccggagaactggcatagctgcagaatatgagtagtgtcccaagaagagtgc

SEQ ID NO: 323534 - DNA, 120 bp, Artificial Sequence
  ENSG00000135913_2 (sequence is synthesized)
tttgcctttggcacaaggatcagaataaaggtgaattgctattacatagggtttttcggtaaaagtcactgaaaattatttgccatacagtaaccagagacctccaactaggggccccca

SEQ ID NO: 323535 - DNA, 120 bp, Artificial Sequence
  ENSG00000135913_3 (sequence is synthesized)
aactgtatcctgcctgtagccagaagcaatttttaaagaaaatatgtctcctctgaagatacatggtcctatcagaattcgaagtatgcagactgggattacaaagtggaaagaaggatc

SEQ ID NO: 323536 - DNA, 120 bp, Artificial Sequence
  ENSG00000135913_4 (sequence is synthesized)
ctttgaaattgtagaaaaagagaataaagtcagcctagtagttcactacaatactggaggaattccaaggatatttcagctaagtcataacattaaaaatgtggtgcttcgacccagtgg

SEQ ID NO: 323537 - DNA, 120 bp, Artificial Sequence
  ENSG00000135913_5 (sequence is synthesized)
agcgaaacaaagccgcctaatgttaactctgcaagataacagcttcttgtctattgacaaagtaccaagtaaggatgcagaggaaatgaggttgtttctagatgcagtccatcaaaacag

SEQ ID NO: 323538 - DNA, 120 bp, Artificial Sequence
  ENSG00000135913_6 (sequence is synthesized)
acttcctgcagccatgaaaccgtctcaggggtctggtagttttggagccattctgggcagcaggacctcacagaaggaaaccagcaggcagctttcttactcagacaatcaggcttctgc

SEQ ID NO: 323539 - DNA, 120 bp, Artificial Sequence
  ENSG00000135913_7 (sequence is synthesized)
aaaaagaggaagtttggaaactaaagatgatattccatttcgaaaagttcttggtaatccgggtagaggatcgattaagactgtagcaggaagtggaatagctcggacgattccttcttt

SEQ ID NO: 323540 - DNA, 120 bp, Artificial Sequence
  ENSG00000135913_8 (sequence is synthesized)
gacatctacttcaacacctcttagatcagggttgctagaaaatcgtactgaaaagaggaaaagaatgatatcaactggctcagaattgaatgaagattaccctaaggaaaatgattcatc

SEQ ID NO: 323541 - DNA, 120 bp, Artificial Sequence
  ENSG00000135913_9 (sequence is synthesized)
atcgaacaacaaggccatgacagatccctccagaaagtatttaaccagcagtagagaaaagcagctgagtttgaaacagtcagaagagaataggacatcagggcttttacctttacagtc

SEQ ID NO: 323542 - DNA, 120 bp, Artificial Sequence
  ENSG00000135913_10 (sequence is synthesized)
atcatccttttatggtagcagagctggatccaaggaacactcttctggtggcactaacttagacaggactaatgtttcaagccagactccctctgccaaaagaagtttgggatttcttcc

SEQ ID NO: 323543 - DNA, 120 bp, Artificial Sequence
  ENSG00000135913_11 (sequence is synthesized)
tcagccagttcctctttctgttaaaaaactgaggtgtaaccaggattacactggctggaataaaccaagagtgcccctttcctctcaccaacagcagcaactgcagggcttctccaattt

SEQ ID NO: 323544 - DNA, 120 bp, Artificial Sequence
  ENSG00000135913_12 (sequence is synthesized)
gggaaatacctgctatatgaatgctattctacaatctctattttcactccagtcatttgcaaatgacttgcttaaacaaggtatcccatggaagaaaattccactcaatgcacttatcag

SEQ ID NO: 323545 - DNA, 120 bp, Artificial Sequence
  ENSG00000135913_13 (sequence is synthesized)
acgctttgcacacttgcttgttaaaaaagatatctgtaattcagagaccaaaaaggatttactcaagaaggttaaaaatgccatttcagctacagcagagagattctctggttatatgca

SEQ ID NO: 323546 - DNA, 120 bp, Artificial Sequence
  ENSG00000135913_14 (sequence is synthesized)
gaatgatgctcatgaatttttaagtcagtgtttggaccagctgaaagaagatatggaaaaattaaataaaacttggaagactgaacctgtttctggagaagaaaattcaccagatatttc

SEQ ID NO: 323547 - DNA, 120 bp, Artificial Sequence
  ENSG00000135913_15 (sequence is synthesized)
agctaccagagcatacacttgccctgttattactaatttggagtttgaggttcagcactccatcatttgtaaagcatgtggagagattatccccaaaagagaacagtttaatgacctctc

SEQ ID NO: 323548 - DNA, 120 bp, Artificial Sequence
  ENSG00000135913_16 (sequence is synthesized)
tattgaccttcctcgtaggaaaaaaccactccctcctcgttcaattcaagattctcttgatcttttctttagggccgaagaactggagtattcttgtgagaagtgtggtgggaagtgtgc

SEQ ID NO: 323549 - DNA, 120 bp, Artificial Sequence
  ENSG00000135913_17 (sequence is synthesized)
tcttgtcaggcacaaatttaacaggcttcctagggtcctcattctccatttgaaacgatatagcttcaatgtggctctctcgcttaacaataagattgggcagcaagtcatcattccaag

SEQ ID NO: 323550 - DNA, 120 bp, Artificial Sequence
  ENSG00000135913_18 (sequence is synthesized)
atacctgaccctgtcatctcattgcactgaaaatacaaaaccaccttttacccttggttggagtgcacatatggcaatttctagaccattgaaagcctctcaaatggtgaattcctgcat

SEQ ID NO: 323551 - DNA, 120 bp, Artificial Sequence
  ENSG00000135913_19 (sequence is synthesized)
caccagcccttctacaccttcaaagaaattcaccttcaaatccaagagctccttggctttatgccttgattcagacagtgaggatgagctaaaacgttctgtggccctcagccagagact

SEQ ID NO: 323552 - DNA, 120 bp, Artificial Sequence
  ENSG00000135913_20 (sequence is synthesized)
ttgtgaaatgttaggcaacgaacagcagcaggaagacctggaaaaagattcaaaattatgcccaatagagcctgacaagtctgaattggaaaactcaggatttgacagaatgagcgaaga

SEQ ID NO: 323553 - DNA, 120 bp, Artificial Sequence
  ENSG00000135913_21 (sequence is synthesized)
agagcttctagcagctgtcttggagataagtaagagagatgcttcaccatctctgagtcatgaagatgatgataagccaactagcagcccagataccggatttgcagaagatgatattca

SEQ ID NO: 323554 - DNA, 120 bp, Artificial Sequence
  ENSG00000135913_22 (sequence is synthesized)
agaaatgccagaaaatccagacactatggaaactgagaagcccaaaacaatcacagagctggatcctgccagttttactgagataactaaagactgtgatgagaataaagaaaacaaaac

SEQ ID NO: 323555 - DNA, 120 bp, Artificial Sequence
  ENSG00000135913_23 (sequence is synthesized)
tccagaaggatctcagggagaagttgattggctccagcagtatgatatggagcgtgaaagggaagagcaagagcttcagcaggcactggctcagagccttcaagagcaagaggcttggga

SEQ ID NO: 323556 - DNA, 120 bp, Artificial Sequence
  ENSG00000135913_24 (sequence is synthesized)
acagaaagaagatgatgacctcaaaagagctaccgagttaagtcttcaagagtttaacaactcctttgtggatgcattgggttctgatgaggactctggaaatgaggatgtttttgatat

SEQ ID NO: 323557 - DNA, 120 bp, Artificial Sequence
  ENSG00000135913_25 (sequence is synthesized)
ggagtacacagaagctgaagctgaggaactgaaaagaaatgctgagacaggaaatctgcctcattcgtaccggctcatcagtgttgtcagtcacattggtagcacttcttcttcaggtca

SEQ ID NO: 323558 - DNA, 120 bp, Artificial Sequence
  ENSG00000135913_26 (sequence is synthesized)
ttacattagtgatgtatatgacattaagaagcaagcgtggtttacttacaatgacctggaggtatcaaaaatccaagaggctgccgtgcagagtgatcgagatcggagtggctacatctt

SEQ ID NO: 323559 - DNA, 120 bp, Artificial Sequence
  ENSG00000135913_27 (sequence is synthesized)
cttttatatgcacaaggagatctttgatgagctgctggaaacagaaaagaactctcagtcacttagcacggaagtggggaagactacccgtcaggccttgtgaggaacaaactcctgggt

SEQ ID NO: 323560 - DNA, 120 bp, Artificial Sequence
  ENSG00000135913_28 (sequence is synthesized)
tggcagcatgcactgcatatttgttactgctgcccacctcacctttcctctgctgaaggagaatttggaattctacttgatgcgggagcaacaaacagctcagggccaaaccaaaagaca

SEQ ID NO: 323561 - DNA, 120 bp, Artificial Sequence
  ENSG00000135913_29 (sequence is synthesized)
aaaattggagtaacgtagaatgctccatgctattttatggaaactttggtctcacatccgtagctgattatcctctttttctcctatgagtggcacttcttttgtcttaggaatacatgt

SEQ ID NO: 323562 - DNA, 120 bp, Artificial Sequence
  ENSG00000135913_30 (sequence is synthesized)
cacacacagacacacacacacacacacgggatgaatggagccttaaagagttaggatgagccaccagaatatgcctgctcaaaattaatagcacagcagtttggagaagaaatgaaggtg

SEQ ID NO: 323563 - DNA, 120 bp, Artificial Sequence
  ENSG00000135913_31 (sequence is synthesized)
tagcacagcagtttggagaagaaatgaaggtgtcaaagagtccattcacctgagaaatgtgtgaagacatacttatcagttggcttttagcttttatgttccttgagtagtttcactcaa

SEQ ID NO: 323564 - DNA, 120 bp, Artificial Sequence
  ENSG00000135913_32 (sequence is synthesized)
gtctgtaaccttttgtgtttccttattagtaaaattcactggaaagccagctcttcatgttacactaatgacagtttgttctctttgcaagagaggggcattactgtcacctgacttgag

SEQ ID NO: 323565 - DNA, 120 bp, Artificial Sequence
  ENSG00000135913_33 (sequence is synthesized)
tgttacagtcccacatttgatatttcttatatactttgttttctctaaggagatttcttcacacagtatgttcatcatatatcatcatcattattatggtggtaaagatagaatcttttt

SEQ ID NO: 323566 - DNA, 120 bp, Artificial Sequence
  ENSG00000135913_34 (sequence is synthesized)
tcttttttgtcattctgccatggagcagcattaccctaatggattgcaaccaaaactttaaacaagtagaaagataatatttctccaattgggactccccagcaggaatacttagggata

SEQ ID NO: 323567 - DNA, 120 bp, Artificial Sequence
  ENSG00000135913_35 (sequence is synthesized)
aggaagaatgctagcatctctgtctctcaaacatagggaggataagaagagtgttcttctggtaaagctaaaattctggaccactgaagctaaaagccctattgcaagtatgaaattaag

SEQ ID NO: 323568 - DNA, 120 bp, Artificial Sequence
  ENSG00000135913_36 (sequence is synthesized)
tacttgagctgtaggacaaaccttgggcatttaaccatttactgtctggctttgcccttaaaatagggttgcaattaaaatgtgattggcttaggtaatcccaaaaactaacaaataaca

SEQ ID NO: 323569 - DNA, 120 bp, Artificial Sequence
  ENSG00000135913_37 (sequence is synthesized)
aaggtgcataatttatttatctactttttaggtgctctgagttgaggcaaagtagagcggcaacattaagtgctatgctagtcacttagctgacgtaaccagcttggttaagcagcttat

SEQ ID NO: 323570 - DNA, 120 bp, Artificial Sequence
  ENSG00000135913_38 (sequence is synthesized)
gaaaccatataaagaattcttttgaggatggaattctgtccacaaaataattttgtgagcccagatatcattaggatcacacagagttaaatatagaaaaatgaaaccatcattatattc

SEQ ID NO: 323571 - DNA, 120 bp, Artificial Sequence
  ENSG00000135913_39 (sequence is synthesized)
tttcgtgttttttcttttattataaacaaggggattattctttagttctcagaggtagggacaaaaccacatcaggttttcagaaggaaaaaacatttaaaaacccaccatcacatgaga

SEQ ID NO: 323572 - DNA, 88 bp, Artificial Sequence
  ENSG00000135913_40 (sequence is synthesized)
gtgagctgagatcgcatcattgcactgcagtctgagtgacagagtgagactccatctcatcaaaccatcatcacagaagatgcaacat

SEQ ID NO: 323573 - DNA, 120 bp, Artificial Sequence
  ENSG00000135913_41 (sequence is synthesized)
aacacaaaccatcatcacagaagatgcaacatcttttctgaaagattgccttaagagagctccagtcctactcttggaacttggatgtattctaatgtagtaaactattctaagttttca

SEQ ID NO: 323574 - DNA, 120 bp, Artificial Sequence
  ENSG00000135913_42 (sequence is synthesized)
ttctttgaattataaatggcctcagcagttttgctcaactactgataaatgctttgcctcctaccatctacctatataccttattgtaatgaatgttccaaaatggtagagtggtagaaa

SEQ ID NO: 323575 - DNA, 120 bp, Artificial Sequence
  ENSG00000135913_43 (sequence is synthesized)
acgccagagtagtttagagcagaggaaaatatttgttttaaaactagctttaaagttttgtttcatttctaccaggagcctctttggtttggtttgattttgcttggaaataattggttt

SEQ ID NO: 323576 - DNA, 120 bp, Artificial Sequence
  ENSG00000135913_44 (sequence is synthesized)
tcttataaatgagtgaagcggtgataaaattctttggctagttattaattcttttacgtgtctttgcatttgagaggcactgttaaaaattattgggaaagatttaaagtgcaggctgca

SEQ ID NO: 323577 - DNA, 120 bp, Artificial Sequence
  ENSG00000135913_45 (sequence is synthesized)
attaaaacatggagaaaagtagaaataatgccataagtctagattgcctcatgaagcagcctcatttgaattgctttcatagctttcatgtgtgtatggtttagaagtacacttacctca

SEQ ID NO: 323578 - DNA, 120 bp, Artificial Sequence
  ENSG00000135913_46 (sequence is synthesized)
gaaacctgatttgatcttcatgtcttgggcaggagttgttgaaaataggttattggaatatataagttatctcactgctcatgtacttgcatgtttgggactcaaattttacttgatgtc

SEQ ID NO: 323579 - DNA, 120 bp, Artificial Sequence
  ENSG00000135913_47 (sequence is synthesized)
tgtccattcttgtggccctatcagccttctccttcctttactcctttaatctacttctttgactaccagtggagatttcagctggactatgttgatggggtttgttgttgtttttgagct

SEQ ID NO: 323580 - DNA, 120 bp, Artificial Sequence
  ENSG00000135913_48 (sequence is synthesized)
ggctgtatatattttaaaattataaatagataatatattattttttgcacattgtgatcagtttgcccagaattggggatggggcagttagcatgttggggccaggaagggacaagttag

SEQ ID NO: 323581 - DNA, 120 bp, Artificial Sequence
  ENSG00000135913_49 (sequence is synthesized)
ataaggactgagtgcttccgttgcaggcagtttgcacaatacctaattaaccttcctattgaaaataccaaatgtgtggttacattactttaaatgacattgaattggaacttgatggca

SEQ ID NO: 323582 - DNA, 120 bp, Artificial Sequence
  ENSG00000135913_50 (sequence is synthesized)
attagttctagatacaaccttttgatctttgttggaattttaagggaaaaatgaactaaacttcatatttgttgattttaatcacctaatagtactgaaggttggaaagttgcatgtggc

SEQ ID NO: 323583 - DNA, 120 bp, Artificial Sequence
  ENSG00000135913_51 (sequence is synthesized)
tggatgctgttaatttctttaatagccatgactataatttaagcctatgagaagatagactgtttcgtagggatatattcacatgtgtgtgcacactcatgagttttgtctcagcaggat

SEQ ID NO: 323584 - DNA, 120 bp, Artificial Sequence
  ENSG00000135913_52 (sequence is synthesized)
agaataagcaaatccatgaactggtcttctattaatactttgattctaaaaattatttgtttacttgctatggtctgttcattctgggcctaaccttaaaggctcaataacaaatacaac

SEQ ID NO: 323585 - DNA, 120 bp, Artificial Sequence
  ENSG00000135913_53 (sequence is synthesized)
aaatgtaaatatgtttacattttaagacatatgcagtggttcttacagatcagttaattaactccagaaagcaaatgttagactacacatttatttttctccttgatcaagtataaaatt

SEQ ID NO: 323586 - DNA, 120 bp, Artificial Sequence
  ENSG00000135913_54 (sequence is synthesized)
ctgaaacagaggctttaaaatttaaaacctcagcaaaataatccatgaatttactgattcttctgtatcgtgtgtagttaccattatgtaactatacacacatacagctacggatataat

SEQ ID NO: 323587 - DNA, 120 bp, Artificial Sequence
  ENSG00000135913_55 (sequence is synthesized)
gaaaattatctgcaaacacctaaattaaagagaaaaaaaagtagtttgtaaactcatttgtgatctactgaaaagaggttatattaaagcaaattaaaatattttccttctctgtcctct

SEQ ID NO: 323588 - DNA, 120 bp, Artificial Sequence
  ENSG00000135913_56 (sequence is synthesized)
gaaatgactgcagtagatactcttagttatcccatttagggtggttggagggcctttttaatttaattgaccccccgaggtggtcttttgttttaaacagggggcaacagctggatctcc

SEQ ID NO: 323589 - DNA, 120 bp, Artificial Sequence
  ENSG00000135913_57 (sequence is synthesized)
aagtacatatggattttgtatatataggagatttttagaaaaatcaacaacctaacaccagattcaagtcacataaaagtgttccaataaaatggatggatgtctttttcctccccattt

SEQ ID NO: 323590 - DNA, 120 bp, Artificial Sequence
  ENSG00000135913_58 (sequence is synthesized)
tgctttatactgagtaatgcactcttgcaagtgtatacaaaaactaaatagacttctgccctccaacatctttttattgcattacttcaaaatcctaattttgtctctactgatatgtct

SEQ ID NO: 323591 - DNA, 120 bp, Artificial Sequence
  ENSG00000135913_59 (sequence is synthesized)
tattaacatctgaaaaaatatatattttttattggaaaattctaatttgttaggccttgaaagttttgtgacaattattttgctgtgtttaaccacaatcattcaccttatggcatgctt

SEQ ID NO: 323592 - DNA, 120 bp, Artificial Sequence
  ENSG00000135913_60 (sequence is synthesized)
tgattactagacttcaggcagtctcattcattgtatcatacttacacacaattagtaagttgtctccatgtgtgctatatgtctgaggtgtatggagtttttatttaaaaagtgtgccag

SEQ ID NO: 323593 - DNA, 120 bp, Artificial Sequence
  ENSG00000135913_61 (sequence is synthesized)
tctgaatataagcatttgattttgtaacattggacttttcttaaaagtacagaggttcaaagtataggtatgtccattggcataagaatagagtgggtgagggtctggaccaggttccag

SEQ ID NO: 323594 - DNA, 120 bp, Artificial Sequence
  ENSG00000135913_62 (sequence is synthesized)
gttggtccagtcagatgccagaacaaagaagaacagtcaactaaactggtctacttcaaaaatagtgggcctgtgtgaagagtgagaccacatgtgggtgtgcacacctcttgtccccag

SEQ ID NO: 323595 - DNA, 120 bp, Artificial Sequence
  ENSG00000135913_63 (sequence is synthesized)
gtttccctccctttgagcttttctttccctccctaacttctctggcctattgtcattgttgtttctttaaacttaaggagagaaaaacaaaaatgagattcctacactttgcctaattga

SEQ ID NO: 323596 - DNA, 120 bp, Artificial Sequence
  ENSG00000135913_64 (sequence is synthesized)
gccactaccaggttttctggcagctgtggccacattatttgtgagatgattttttttctttatgttcagagtgacttttgattctgattctttatgttttgtatggagcggcacttttat

SEQ ID NO: 323597 - DNA, 120 bp, Artificial Sequence
  ENSG00000135913_65 (sequence is synthesized)
ctgtgttttagcagaactgttcctctgtatcctttacggtttttctttgtttttgtttcctttttaaattatgcatagagtttttttgtgtgtatgaaattaaagcctttattaaccttc

SEQ ID NO: 323598 - DNA, 120 bp, Artificial Sequence
  ENSG00000135913_66 (sequence is synthesized)
agatacctgctaagcacttgttgagaacatgtgatcatgcagtgcagcacagaagggttgatggttttaaatgtaaaaagtgagggtaatggcaaatgcccatcaatgatagacaggata

SEQ ID NO: 323599 - DNA, 80 bp, Artificial Sequence
  ENSG00000135913_67 (sequence is synthesized)
tgcaggacacaggaacataaaaccaaacaccacatattcttactcataagtggatgttgaacaatgagaacacatggaca

SEQ ID NO: 323600 - DNA, 76 bp, Artificial Sequence
  ENSG00000135913_68 (sequence is synthesized)
aaactgacacaggaacataaaaccaaacaccacatattcttactcataagtggatcaccggggtctgtcgtggggt

SEQ ID NO: 323601 - DNA, 120 bp, Artificial Sequence
  ENSG00000135913_69 (sequence is synthesized)
aaagtagagtccccagaccagcagcatcaacgtgatctagtaacttgttagaaatggacatttttgtgccttctttttttggacacatttgtgtccaaacctactgaatcagaaaccttg

SEQ ID NO: 323602 - DNA, 120 bp, Artificial Sequence
  ENSG00000135913_70 (sequence is synthesized)
aaaacaatcacagagctggttctttgcccagtcctataacttcctaaaattaacaaagggacagctacaggaagagatcctgccagttttactgagataactaaagactgtgatgagaat

SEQ ID NO: 323603 - DNA, 120 bp, Artificial Sequence
  ENSG00000135913_71 (sequence is synthesized)
aaagataaatactctgcttttcttttagtcatttttaaactattcttgttattatcatagactttgaagattttcctatgtatttttacccccattttttaaggatttcttgtttcagtg

SEQ ID NO: 323604 - DNA, 120 bp, Artificial Sequence
  ENSG00000135913_72 (sequence is synthesized)
ttctctaggtaatggtattcaccccaacttttcatccttttaaagcagttgttcttagtgggctgtcacgagaagattgagttccattatgcgaaaggggtagcgttacacctaacagac

SEQ ID NO: 323605 - DNA, 120 bp, Artificial Sequence
  ENSG00000135913_73 (sequence is synthesized)
aaataaagtaaaatacctgaccattactcttcaaaattgtcaaagccattaaaaaaagaagaaattgaggattgtacgagtaaagaaacatgacaactacttgcactgtgggatcctggg

SEQ ID NO: 323606 - DNA, 120 bp, Artificial Sequence
  ENSG00000135914_0 (sequence is synthesized)
agtcacagcagcaagcaagtctagtgaacagataagatgacatgctcagcaaaataacaacgaaaccagagggggaactctctggcatgcaagttcaaacacgactctacaactacggca

SEQ ID NO: 323607 - DNA, 120 bp, Artificial Sequence
  ENSG00000135914_1 (sequence is synthesized)
gaaaaagagagagagagaaactaaaaatatatatatatcctatttttttcacagctatcagtttctttcactgagctttcctaaatttaagcctctagaaaataataaatacttggatat

SEQ ID NO: 323608 - DNA, 120 bp, Artificial Sequence
  ENSG00000135914_2 (sequence is synthesized)
cttacctacaaacatggacagatgtgtgtatgcgctcattttagagaacttgaatttttttttttaaaggaaggtgtcaactttggcttttgagtgtttggcatggttacaatgccttaa

SEQ ID NO: 323609 - DNA, 120 bp, Artificial Sequence
  ENSG00000135914_3 (sequence is synthesized)
aaaaacagatgagcagcttagctactaaccatgctgaccactgttcggaacgggattgaatcacagaaaaacagcaaatggctctctcttacagagtgtctgaacttcaaagcacaattc

SEQ ID NO: 323610 - DNA, 120 bp, Artificial Sequence
  ENSG00000135914_4 (sequence is synthesized)
ctgagcacattttgcagagcacctttgttcacgttatctcttctaactggtctggattacagacagaatcaataccagaggaaatgaaacagattgttgaggaacagggaaataaactgc

SEQ ID NO: 323611 - DNA, 120 bp, Artificial Sequence
  ENSG00000135914_5 (sequence is synthesized)
actgggcagctcttctgatactcatggtgataatacccacaattggtggaaatacccttgttattctggctgtttcactggagaagaagctgcagtatgctactaattactttctaatgt

SEQ ID NO: 323612 - DNA, 120 bp, Artificial Sequence
  ENSG00000135914_6 (sequence is synthesized)
ccttggcggtggctgatttgctggttggattgtttgtgatgccaattgccctcttgacaataatgtttgaggctatgtggcccctcccacttgttctatgtcctgcctggttatttcttg

SEQ ID NO: 323613 - DNA, 120 bp, Artificial Sequence
  ENSG00000135914_7 (sequence is synthesized)
acgttctcttttcaaccgcatccatcatgcatctctgtgccatttcagtggatcgttacatagccatcaaaaagccaatccaggccaatcaatataactcacgggctacagcattcatca

SEQ ID NO: 323614 - DNA, 120 bp, Artificial Sequence
  ENSG00000135914_8 (sequence is synthesized)
agattacagtggtgtggttaatttcaataggcattgccattccagtccctattaaagggatagagactgatgtggacaacccaaacaatatcacttgtgtgctgacaaaggaacgttttg

SEQ ID NO: 323615 - DNA, 120 bp, Artificial Sequence
  ENSG00000135914_9 (sequence is synthesized)
gctctttggctcactggctgccttcttcacacctcttgcaattatgattgtcacctactttctcactatccatgctttacagaagaaggcttacttagtcaaaaacaagccacctcaacg

SEQ ID NO: 323616 - DNA, 120 bp, Artificial Sequence
  ENSG00000135914_10 (sequence is synthesized)
cctaacatggttgactgtgtctacagttttccaaagggatgaaacaccttgctcgtcaccggaaaaggtggcaatgctggatggttctcgaaaggacaaggctctgcccaactcaggtga

SEQ ID NO: 323617 - DNA, 120 bp, Artificial Sequence
  ENSG00000135914_11 (sequence is synthesized)
tgaaacacttatgcgaagaacatccacaattgggaaaaagtcagtgcagaccatttccaacgaacagagagcctcaaaggtcctagggattgtgtttttcctctttttgcttatgtggtg

SEQ ID NO: 323618 - DNA, 120 bp, Artificial Sequence
  ENSG00000135914_12 (sequence is synthesized)
tcccttctttattacaaatataactttagttttatgtgattcctgtaaccaaactactctccaaatgctcctggagatatttgtgtggataggctatgtttcctcaggagtgaatccttt

SEQ ID NO: 323619 - DNA, 120 bp, Artificial Sequence
  ENSG00000135914_13 (sequence is synthesized)
ggtctacaccctcttcaataagacatttcgggatgcatttggccgatatatcacctgcaattaccgggccacaaagtcagtaaaaactctcagaaaacgctccagtaagatctacttccg

SEQ ID NO: 323620 - DNA, 120 bp, Artificial Sequence
  ENSG00000135914_14 (sequence is synthesized)
gaatccaatggcagagaactctaagtttttcaagaaacatggaattcgaaatgggattaaccctgccatgtaccagagtccaatgaggctccgaagttcaaccattcagtcttcatcaat

SEQ ID NO: 323621 - DNA, 120 bp, Artificial Sequence
  ENSG00000135914_15 (sequence is synthesized)
cattctactagatacgcttctcctcactgaaaatgaaggtgacaaaactgaagagcaagttagttatgtatagcagaactggcagttgtcatcaaacataatgatgagtaagatgatgaa

SEQ ID NO: 323622 - DNA, 120 bp, Artificial Sequence
  ENSG00000135914_16 (sequence is synthesized)
tgagatgtaaatgtgccaagaatatattatataaagaattttatgtcatatatcaaatcatctctttaacctaagatgtaagtattaagaatatctaattttcctaatttggacaagatt

SEQ ID NO: 323623 - DNA, 120 bp, Artificial Sequence
  ENSG00000135914_17 (sequence is synthesized)
attccatgaggaaaataattttatatagctacaaatgaaaacaatccagcactctggttaaattttaaggtattcgaatgaaataaagtcaaatcaataaatttcaggctttaaaaagaa

SEQ ID NO: 323624 - DNA, 120 bp, Artificial Sequence
  ENSG00000135916_0 (sequence is synthesized)
gcctgcagagctcggagcggcggaggcagagaccgaggctgcaccggcagaggctgcggggcggacgcgcgggccggcgcagccatggtgaagattagcttccagcccgccgtggctggc

SEQ ID NO: 323625 - DNA, 120 bp, Artificial Sequence
  ENSG00000135916_1 (sequence is synthesized)
atcaagggcgacaaggctgacaaggcgtcggcgtcggcccctgcgccggcctcggccaccgagatcctgctgacgccggctagggaggagcagcccccacaacatcgatccaagaggggg

SEQ ID NO: 323626 - DNA, 120 bp, Artificial Sequence
  ENSG00000135916_2 (sequence is synthesized)
ggctcagtgggcggcgtgtgctacctgtcgatgggcatggtcgtgctgctcatgggcctcgtgttcgcctctgtctacatctacagatacttcttccttgcgcagctggcccgagataac

SEQ ID NO: 323627 - DNA, 120 bp, Artificial Sequence
  ENSG00000135916_3 (sequence is synthesized)
ttcttccgctgtggtgtgctgtatgaggactccctgtcctcccaggtccggactcagatggagctggaagaggatgtgaaaatctacctcgacgagaactacgagcgcatcaacgtgcct

SEQ ID NO: 323628 - DNA, 120 bp, Artificial Sequence
  ENSG00000135916_4 (sequence is synthesized)
gtgccccagtttggcggcggtgaccctgcagacatcatccatgacttccagcggggtctgactgcgtaccatgatatctccctggacaagtgctatgtcatcgaactcaacaccaccatt

SEQ ID NO: 323629 - DNA, 120 bp, Artificial Sequence
  ENSG00000135916_5 (sequence is synthesized)
gtgctgccccctcgcaacttctgggagctcctcatgaacgtgaagagggggacctacctgccgcagacgtacatcatccaggaggagatggtggtcacggagcatgtcagtgacaaggag

SEQ ID NO: 323630 - DNA, 120 bp, Artificial Sequence
  ENSG00000135916_6 (sequence is synthesized)
gccctggggtccttcatctaccacctgtgcaacgggaaagacacctaccggctccggcgccgggcaacgcggaggcggatcaacaagcgtggggccaagaactgcaatgccatccgccac

SEQ ID NO: 323631 - DNA, 120 bp, Artificial Sequence
  ENSG00000135916_7 (sequence is synthesized)
ttcgagaacaccttcgtggtggagacgctcatctgcggggtggtgtgaggccctcctcccccagaaccccctgccgtgttcctcttttcttctttccggctgctctctggccctcctcct

SEQ ID NO: 323632 - DNA, 120 bp, Artificial Sequence
  ENSG00000135916_8 (sequence is synthesized)
atctctgctgacctgggtgtggcggagggagaggcgatgctgcaaagtgttttctgtgtcccactgtcttgaagctgggcctgccaaagcctgggcccacagctgcaccggcagcccaag

SEQ ID NO: 323633 - DNA, 120 bp, Artificial Sequence
  ENSG00000135916_9 (sequence is synthesized)
gggaaggaccggttgggggagccgggcatgtgaggccctgggcaaggggatggggctgtgggggcggggcggcatgggcttcagaagtatctgcacaattagaaaagtcctcagaagctt

SEQ ID NO: 323634 - DNA, 120 bp, Artificial Sequence
  ENSG00000135916_10 (sequence is synthesized)
tttcttggagggtacactttcttcactgtccctattcctagacctggggcttgagctgaggatgggacgatgtgcccagggagggacccaccagagcacaagagaaggtggctacctggg

SEQ ID NO: 323635 - DNA, 120 bp, Artificial Sequence
  ENSG00000135916_11 (sequence is synthesized)
ggtgtcccagggactctgtcagtgccttcagcccaccagcaggagcttggagtttggggagtggggatgagtccgtcaagcacaactgttctctgagtggaaccaaagaagcaaggagct

SEQ ID NO: 323636 - DNA, 120 bp, Artificial Sequence
  ENSG00000135916_12 (sequence is synthesized)
aggacccccagtcctgccccccaggagcacaagcagggtcccctcagtcaaggcagtgggatgggcggctgaggaacggggcaggcaaggtcactgctcagtcacgtccacgggggacga

SEQ ID NO: 323637 - DNA, 120 bp, Artificial Sequence
  ENSG00000135916_13 (sequence is synthesized)
gccgtgggttctgctgagtaggtggagctcattgctttctccaagcttggaactgttttgaaagataacacagagggaaagggagagccacctggtacttgtccaccctgcctcctctgt

SEQ ID NO: 323638 - DNA, 120 bp, Artificial Sequence
  ENSG00000135916_14 (sequence is synthesized)
tctgaaattccatccccctcagcttaggggaatgcacctttttccctttccttctcacttttgcatgtttttactgatcattcgatatgctaaccgttctcagccctgagccttggagag

SEQ ID NO: 323639 - DNA, 120 bp, Artificial Sequence
  ENSG00000135916_15 (sequence is synthesized)
gagggctgtaacgccttcagtcagtctctggggatgaaactcttaaatgctttgtatattttctcaattagatctcttttcagaagtgtctatagaacaataaaaatcttttacttctga

SEQ ID NO: 323640 - DNA, 120 bp, Artificial Sequence
  ENSG00000135916_16 (sequence is synthesized)
gttgggaagtctcgaatggttgcttatcccagaatgaggagggggcttaagtcccgtactaaagcggcagccaaaagctgaagtccgaagagtgggaggcgtctggttctggtcttcagg

SEQ ID NO: 323641 - DNA, 120 bp, Artificial Sequence
  ENSG00000135916_17 (sequence is synthesized)
attatgctacggagaacggatccgagcgtgacggctgaatgaatgagtgagcgagtgagtgagtgagtgagtgagcgagcgagtgagtgactgtgcgagcgagcggcagaaggaactccg

SEQ ID NO: 323642 - DNA, 120 bp, Artificial Sequence
  ENSG00000135916_18 (sequence is synthesized)
gaaattgggggctgcgagggacagaggatgtgctgctggcctgcaccggaattgacagaccagaaagtgatgaaatggaaatcagccagaaccgacggcgctgcggcctctggacgtcgg

SEQ ID NO: 323643 - DNA, 120 bp, Artificial Sequence
  ENSG00000135916_19 (sequence is synthesized)
ctttagccaggacgagtccgggtgaccctggtgggccttcctttcccttctaggtgtcatctccttccctccctttcccccaagactccctccgggcccagccagcaggaggagcagccc

SEQ ID NO: 323644 - DNA, 120 bp, Artificial Sequence
  ENSG00000135917_0 (sequence is synthesized)
attgctcttggcagctctgtctgaaggaggaggacaagagactccagggtatggaaagggattttcatagtggcgggcagcaggaaggagcagaagttggacctgaaggcaggaagccag

SEQ ID NO: 323645 - DNA, 120 bp, Artificial Sequence
  ENSG00000135917_1 (sequence is synthesized)
cttggttctagaaagaaagaaactgggggcacagaaaaaaacagccatggattgttacagaacttcactaagcagttcctggatttaccccactgtgatcctctgcttatttggtttttt

SEQ ID NO: 323646 - DNA, 120 bp, Artificial Sequence
  ENSG00000135917_2 (sequence is synthesized)
ctccatgatgagaccctcagaaccattccttatcccatatttatctggaccagataaaaacctgaccagtgcagagataacaaatgagatcttccccgtttggacatactcctacctggt

SEQ ID NO: 323647 - DNA, 120 bp, Artificial Sequence
  ENSG00000135917_3 (sequence is synthesized)
gctgctgctgcctgtgtttgtcctcaccgattatgtccgctacaagccagtcatcatcttgcaaggtatcagtttcatcattacctggctgctgctgttgtttggccaaggagtgaagac

SEQ ID NO: 323648 - DNA, 120 bp, Artificial Sequence
  ENSG00000135917_4 (sequence is synthesized)
catgcaggttgtagagttcttctatgggatggtcaccgccgccgaggtggcctactacgcctacatatacagcgtggtcagccccgagcactaccagagagtgagcggctactgcaggag

SEQ ID NO: 323649 - DNA, 120 bp, Artificial Sequence
  ENSG00000135917_5 (sequence is synthesized)
cgtcacgctggccgcctacacagcagggtcggtgctggctcaactcttggtatccctggcgaacatgtcgtacttttacctcaacgtcatatccttggcctctgtctccgtggctttcct

SEQ ID NO: 323650 - DNA, 120 bp, Artificial Sequence
  ENSG00000135917_6 (sequence is synthesized)
tttctcacttttcctaccaatgcccaagaaaagcatgttttttcatgcaaaacccagcagagaaataaagaagtcatcaagcgtgaatccagtattagaggaaactcacgaaggtgaagc

SEQ ID NO: 323651 - DNA, 120 bp, Artificial Sequence
  ENSG00000135917_7 (sequence is synthesized)
accaggctgtgaagagcagaaacccacatcagaaatactcagcacttcagggaagctgaataagggccagctgaacagcctgaaaccaagcaatgtgactgtggacgtttttgtgcagtg

SEQ ID NO: 323652 - DNA, 120 bp, Artificial Sequence
  ENSG00000135917_8 (sequence is synthesized)
gttccaagatttgaaggagtgctactcctcaaaacgtcttttctactggtctctatggtgggctttcgccacagcaggttttaaccaggttttgaactatgttcaaatcctgtgggatta

SEQ ID NO: 323653 - DNA, 120 bp, Artificial Sequence
  ENSG00000135917_9 (sequence is synthesized)
caaggcgccatcccaagattcttccatctataatggggccgtagaagctattgcaacctttggaggggctgtggctgcctttgcagtgggttatgtgaaagtcaactgggaccttctggg

SEQ ID NO: 323654 - DNA, 120 bp, Artificial Sequence
  ENSG00000135917_10 (sequence is synthesized)
agagctggctctggtggtcttctcagttgtcaatgccggttctttatttctcatgcattacacagccaatatctgggcgtgctatgctggctatttgatattcaagtccagctatatgct

SEQ ID NO: 323655 - DNA, 120 bp, Artificial Sequence
  ENSG00000135917_11 (sequence is synthesized)
tcttataaccatagcagtatttcagattgcagttaatctgaatgtggaacgctatgccttggtatttggaatcaacacctttattgccttggtgattcagaccatcatgactgtgattgt

SEQ ID NO: 323656 - DNA, 120 bp, Artificial Sequence
  ENSG00000135917_12 (sequence is synthesized)
agtagatcagagagggctcaacttgccagtcagcattcagtttttagtttatgggagctattttgcagtaattgctggaattttcctaatgagaagcatgtatattacctactcaaccaa

SEQ ID NO: 323657 - DNA, 120 bp, Artificial Sequence
  ENSG00000135917_13 (sequence is synthesized)
agagagtaatatcatcatgtcaacaaaactctaacctcatcgcaacaaacgcaacagtggctttcaaagttatgcaataataaggaaagattttgagatgggtggcatatgttttgccat

SEQ ID NO: 323658 - DNA, 120 bp, Artificial Sequence
  ENSG00000135917_14 (sequence is synthesized)
aacttgacatgctttgcaaatctggattccaatggacctttcaaaaccacaacaaaacctcagttttagatgagttctctatgtgaccaattttactggatgcaattgacaggacccgtc

SEQ ID NO: 323659 - DNA, 120 bp, Artificial Sequence
  ENSG00000135917_15 (sequence is synthesized)
atcataattaaacaacccatattggggaccccctgtgactagtagcagctggaaaattctggtttttatcacttgtaaagacatgcagatggcgtggaaccaaaccatgagaaaactcca

SEQ ID NO: 323660 - DNA, 120 bp, Artificial Sequence
  ENSG00000135917_16 (sequence is synthesized)
gccatcctggagttgatattcaccatttgtgaggagaaatactaactggactgaccctattgctaggcttaaatacttatttgatcttaccaaagaagtcaacacatgggacctttgtgt

SEQ ID NO: 323661 - DNA, 120 bp, Artificial Sequence
  ENSG00000135917_17 (sequence is synthesized)
cacatgaaccattttctttcctcttctattaagtgtatttctgtttaagttacagttctctaagagaattacaatgtttgtcccatttctaagggcttctcttcaactctaataacagca

SEQ ID NO: 323662 - DNA, 120 bp, Artificial Sequence
  ENSG00000135917_18 (sequence is synthesized)
ttattcacgttatgatttgatagtattattatttaatttttttatgattattttccattttgtgctctgagttttgctgttgaaagtctccctcaagaatagcttcagatcctcttgtgt

SEQ ID NO: 323663 - DNA, 120 bp, Artificial Sequence
  ENSG00000135917_19 (sequence is synthesized)
atttgcagaatacacaaggtcatttcccagtggcctgggagaggcagtgagccttctctccaccaccatagacaggtgttaatgcatctatgggccaggtgcagtggctcactcctgtaa

SEQ ID NO: 323664 - DNA, 120 bp, Artificial Sequence
  ENSG00000135917_20 (sequence is synthesized)
tccgagcaatttgggaggccaaggtgggagttttgcttgaggccagaggttcaagaccagcctgggcaacacagtgacacctgactctactaaaaaattaaaaaattagctgggcagcgt

SEQ ID NO: 323665 - DNA, 84 bp, Artificial Sequence
  ENSG00000135917_21 (sequence is synthesized)
aaaaattagctgggcagccatggtgggaggatgggttgagcacaggagtcagaggctacagtgagctatgattgcaccattgca

SEQ ID NO: 323666 - DNA, 120 bp, Artificial Sequence
  ENSG00000135917_22 (sequence is synthesized)
taagactctcatccccctcctcccaaaaaagagcacctgtgtggtgtctgtctaaaataggaaaacttaaaggaggtttctagaagtattagaaataagaaaacactgatggggggagtg

SEQ ID NO: 323667 - DNA, 120 bp, Artificial Sequence
  ENSG00000135917_23 (sequence is synthesized)
tagaagtattagaaataagaaaacactgatggggggagtggaataaaacacctgattttgttttgttttggtttttgagacagtctcgctctctcacccaggctggaatgcaatggcgtg

SEQ ID NO: 323668 - DNA, 120 bp, Artificial Sequence
  ENSG00000135917_24 (sequence is synthesized)
aagagcgcctggatccatccgacagccgcgggtgcgtggtcgtgcggcaagtgagcgatttggtgaacagacactcccttctgtagccatggattgttacagaacttcactaagcagttc

SEQ ID NO: 323669 - DNA, 120 bp, Artificial Sequence
  ENSG00000135917_25 (sequence is synthesized)
gcctggccaaaacacctgatttttaaatggtagcaattgtgctaaataaaatgtgtaaaaattttaaagagttgttaacattttttgatgaattctgctgaaaattatctgaacatacct

SEQ ID NO: 323670 - DNA, 120 bp, Artificial Sequence
  ENSG00000135917_26 (sequence is synthesized)
gtttttcgaaacttcaagaaacttcaataagggatgcattgagcagtctgacagtgagaataaagaatgctgagtcaagatttatattaaggctggaagctgtggctcacacctgtaatc

SEQ ID NO: 323671 - DNA, 120 bp, Artificial Sequence
  ENSG00000135917_27 (sequence is synthesized)
ccagcattttgggaggctgaagtgagaggttaatttgagggtaggggtatgagaccatcttggccaatatagcaagaccctgtgtctaaaacaaacaaaaaaatttttaattggattttg

SEQ ID NO: 323672 - DNA, 120 bp, Artificial Sequence
  ENSG00000135917_28 (sequence is synthesized)
atatggtttggatctgtgtccccaccaaatctcacgttgaagtgtaatccccaatgttagaggtggggccggctgggaggcgactggatcatgggtgtgaagccttcatgaatggtttgg

SEQ ID NO: 323673 - DNA, 120 bp, Artificial Sequence
  ENSG00000135917_29 (sequence is synthesized)
caccgtcccctcagtgctggtctcatgacagtgagttatcgtgagatctggtagtttaaaagtgtgtagcacctccccactctctctttctcctgctttggccacgtgaagatgcctgct

SEQ ID NO: 323674 - DNA, 120 bp, Artificial Sequence
  ENSG00000135917_30 (sequence is synthesized)
cccactttgccttctgccatgagtaaaaattccccgaggactccctagaagcagatgttgccacgcttcctatatagcctgtgagctaattaaaccccttttcttacaaactatctagtc

SEQ ID NO: 323675 - DNA, 120 bp, Artificial Sequence
  ENSG00000135917_31 (sequence is synthesized)
tcaggtgtttctttatagcaatgtgataatggactaatatgtttctcaagtatactcctctccaaatcccgaaattcttcactggactaagatccagcccaagaatcaatgcactcactt

SEQ ID NO: 323676 - DNA, 120 bp, Artificial Sequence
  ENSG00000135917_32 (sequence is synthesized)
gactaagatccagcccaagaatcaatgcactcacttagtggagaaaactaataacattcctacttacattaaaggcaaggaaggaatggccgctattctttttcttcttcttcttttttt

SEQ ID NO: 323677 - DNA, 120 bp, Artificial Sequence
  ENSG00000135917_33 (sequence is synthesized)
gcttcagccacctcacacccagtctattatccttcttttttaacttattattctggaggcattaggcatcacaattagacaaacaagaaaaatcagaggtcagaaattggaaaggaggcc

SEQ ID NO: 323678 - DNA, 120 bp, Artificial Sequence
  ENSG00000135917_34 (sequence is synthesized)
ctttgggaggctgaggcggtcagatcacatgaggccaggaattggaggcaagcctgggcaacatgatgaaaccctgtatgtactaaaaacaacaaaattagccgggtgtggtccatgcct

SEQ ID NO: 323679 - DNA, 120 bp, Artificial Sequence
  ENSG00000135917_35 (sequence is synthesized)
gatgaaaccctgtatgtactaaaaacaacaaaattagccgggtgtggtccatgcctgtaatcccagccactcggtggctgaagcataagagtcacttaaacccaggaggcagaggttgca

SEQ ID NO: 323680 - DNA, 120 bp, Artificial Sequence
  ENSG00000135917_36 (sequence is synthesized)
ctccagcctgagcgacagagtgagacccaaagtggattaaaaaatgcattatgattccttcacatattcacctataacaaaattaactgctaaaaaatgaggaagatctttagtgacaca

SEQ ID NO: 323681 - DNA, 120 bp, Artificial Sequence
  ENSG00000135917_37 (sequence is synthesized)
gaactctaagagctctactatcaagtggaaaaaagtcaagcaccaaaataataatgaacgcagcaactcagcatttgtataaaaaggacaaaaatatctgtattggcttatatatgcgta

SEQ ID NO: 323682 - DNA, 66 bp, Artificial Sequence
  ENSG00000135917_38 (sequence is synthesized)
acaaatgaggtggattgcttgagttcaggagttcaaaaccagcctaggcaacatggcaaaaccctg

SEQ ID NO: 323683 - DNA, 63 bp, Artificial Sequence
  ENSG00000135917_39 (sequence is synthesized)
gcacctggactcccagctacttgaggggatgagaagggaggatcgcttgagcccaggaggtgg

SEQ ID NO: 323684 - DNA, 78 bp, Artificial Sequence
  ENSG00000135917_40 (sequence is synthesized)
gatgacagagtgagaccctgtcttgaacaaacaaaccaacaatcaaacaaataaataaacaactgaaactcataccaa

SEQ ID NO: 323685 - DNA, 120 bp, Artificial Sequence
  ENSG00000135917_41 (sequence is synthesized)
agcctcccaaagcgctgggattacaagcatgagccactacacccagccttttaaaatttttaatctaccgtttacacagtgttcttgtacctttttaaaaagtgatagagcttataataa

SEQ ID NO: 323686 - DNA, 120 bp, Artificial Sequence
  ENSG00000135917_42 (sequence is synthesized)
tgggtgaagatgactgctacaggagtaacttttaaaaggactatcttgtgatttggaacacacagaaaatgaaggggaaaggtaaacatctggctttcacagccatggattgttacagaa

SEQ ID NO: 323687 - DNA, 120 bp, Artificial Sequence
  ENSG00000135917_43 (sequence is synthesized)
aaatgatatctgtcttacagttattatgtagatttaaggagatagtatgcagaaaagcatcatacaacaaattagtttccttcctataaatgtatctcagagaacttagccacatgcagg

SEQ ID NO: 323688 - DNA, 120 bp, Artificial Sequence
  ENSG00000135917_44 (sequence is synthesized)
accatcaaaaatctataaacattacaataaggcaaagcttgagctaaaatgtggaggaattagtgaattttcctgtgcacatgataattcacatgagatagcaagatgttttcaaatata

SEQ ID NO: 323689 - DNA, 120 bp, Artificial Sequence
  ENSG00000135917_45 (sequence is synthesized)
gctgccatacaatgattgttttttgttttttgtttcttctgtgcagtgacaaatgagatcctctattgggctttatgtctaaagcttgcatttcaagcaatttcctcactcgaggtcagg

SEQ ID NO: 323690 - DNA, 120 bp, Artificial Sequence
  ENSG00000135917_46 (sequence is synthesized)
agatcatgccactgcacttcagcctggacaacagagcgaccctccatctcaaaaaaaaaaaaaaaatcaggttttcatcgcatcaaggatgctaaaaagaataagcatcacttaattttc

SEQ ID NO: 323691 - DNA, 120 bp, Artificial Sequence
  ENSG00000135917_47 (sequence is synthesized)
gttttttaaattttatgggacttgaacaaggatacagggcttccctcaacttgatataagatgaacacattaaactcagtgagcctgattttcataatatgtgtcccatatagaactttt

SEQ ID NO: 323692 - DNA, 120 bp, Artificial Sequence
  ENSG00000135917_48 (sequence is synthesized)
atgtgttaacaaatttttaacttgcatagagtcctaacatttgtgttaatgataggagactttcaggtctccgttgattctattatactaatcctaaaatagcatcactggcaggcacag

SEQ ID NO: 323693 - DNA, 120 bp, Artificial Sequence
  ENSG00000135917_49 (sequence is synthesized)
gatctagatctaaataaactctcaggctgctgagggataagcaggatctcataaaaaattgtggtatttctttatgacactgtttgccagcaggtgagccattaacagctttatctccca

SEQ ID NO: 323694 - DNA, 120 bp, Artificial Sequence
  ENSG00000135917_50 (sequence is synthesized)
tgtttgccagcaggtgagccattaacagctttatctcccagcccttgcctccttctctggaatgccagtttctcttacttaaaagagcaacgcctttctttttctttctttctttctttt

SEQ ID NO: 323695 - DNA, 120 bp, Artificial Sequence
  ENSG00000135917_51 (sequence is synthesized)
agcaactcaatgaatccactgggttctgcttctcgagccactgtggaccagttaacagaccttccctccaaggagcagctcagttgtgtggtctttgctctgtggcctcctgctttctcc

SEQ ID NO: 323696 - DNA, 120 bp, Artificial Sequence
  ENSG00000135917_52 (sequence is synthesized)
agccttgaaaacactgtgtaaagtgtgtggcttcgcctgcaaggctgatgggtgcctcgggtggtgaggtggcaaagacagaaaggcaagcttcttctgtagcatcagatcacttaggga

SEQ ID NO: 323697 - DNA, 120 bp, Artificial Sequence
  ENSG00000135917_53 (sequence is synthesized)
tgtaagttttaccaaccactcctaaaactgaactgtattcctctctcttctgtctttctaaactttctctaagaacttcagaaggattttagtcaattgcaatattaaatgttgactgct

SEQ ID NO: 323698 - DNA, 120 bp, Artificial Sequence
  ENSG00000135917_54 (sequence is synthesized)
ttatattaaattagacacaactaagccaacttttcatttaactatttgctctctgaatattgctacaatataccttaagtcatcaagggaaaaaactctgtaggtttatagaccaaaagc

SEQ ID NO: 323699 - DNA, 120 bp, Artificial Sequence
  ENSG00000135917_55 (sequence is synthesized)
agtgatacattgtcaggtttttctttttgttttattttgtttgagagatggcctggctctcttgcccaggctggagagcagtggtgcgatcacgatcaggactcaatgcagccttgactt

SEQ ID NO: 323700 - DNA, 120 bp, Artificial Sequence
  ENSG00000135917_56 (sequence is synthesized)
aagagcgcctggatccatccgacagccgcgggtgcgtggtcgtgcggcaagtgagcgatttggtgaacagacactcccttctgtaggttggggtgcagtggcatgatctccactcactgc

SEQ ID NO: 323701 - DNA, 120 bp, Artificial Sequence
  ENSG00000135919_0 (sequence is synthesized)
gcgctgtggggctgcccgggctgcgcggcgtctgcaggcgccaccgctgcctctttccggctgtgaccctcctcgccgccgccgcttggctgcgtcctccgactccccgcgccgccgaga

SEQ ID NO: 323702 - DNA, 120 bp, Artificial Sequence
  ENSG00000135919_1 (sequence is synthesized)
ccaggctcccgctccggttgcggccgcaccgccctccgcggccgccccctggggatccagcgagcgcggtcgtccttggtggaaggaaccatgaactggcatctccccctcttcctcttg

SEQ ID NO: 323703 - DNA, 120 bp, Artificial Sequence
  ENSG00000135919_2 (sequence is synthesized)
gcctctgtgacgctgccttccatctgctcccacttcaatcctctgtctctcgaggaactaggctccaacacggggatccaggttttcaatcagattgtgaagtcgaggcctcatgacaac

SEQ ID NO: 323704 - DNA, 120 bp, Artificial Sequence
  ENSG00000135919_3 (sequence is synthesized)
atcgtgatctctccccatgggattgcgtcggtcctggggatgcttcagctgggggcggacggcaggaccaagaagcagctcgccatggtgatgagatacggcgtaaatggagttggtaaa

SEQ ID NO: 323705 - DNA, 120 bp, Artificial Sequence
  ENSG00000135919_4 (sequence is synthesized)
atattaaagaagatcaacaaggccatcgtctccaagaagaataaagacattgtgacagtggctaacgccgtgtttgttaagaatgcctctgaaattgaagtgccttttgttacaaggaac

SEQ ID NO: 323706 - DNA, 120 bp, Artificial Sequence
  ENSG00000135919_5 (sequence is synthesized)
aaagatgtgttccagtgtgaggtccggaatgtgaactttgaggatccagcctctgcctgtgattccatcaatgcatgggttaaaaatgaaaccagggatatgattgacaatctgctgtcc

SEQ ID NO: 323707 - DNA, 120 bp, Artificial Sequence
  ENSG00000135919_6 (sequence is synthesized)
ccagatcttattgatggtgtgctcaccagactggtcctcgtcaacgcagtgtatttcaagggtctgtggaaatcacggttccaacccgagaacacaaagaaacgcactttcgtggcagcc

SEQ ID NO: 323708 - DNA, 120 bp, Artificial Sequence
  ENSG00000135919_7 (sequence is synthesized)
gacgggaaatcctatcaagtgccaatgctggcccagctctccgtgttccggtgtgggtcgacaagtgcccccaatgatttatggtacaacttcattgaactgccctaccacggggaaagc

SEQ ID NO: 323709 - DNA, 120 bp, Artificial Sequence
  ENSG00000135919_8 (sequence is synthesized)
atcagcatgctgattgcactgccgactgagagctccactccgctgtctgccatcatcccacacatcagcaccaagaccatagacagctggatgagcatcatggtgcccaagagggtgcag

SEQ ID NO: 323710 - DNA, 120 bp, Artificial Sequence
  ENSG00000135919_9 (sequence is synthesized)
actgacatgtttgattcatcaaaggcaaattttgcaaaaataacaacagggtcagaaaacctccatgtttctcatatcttgcaaaaagcaaaaattgaagtcagtgaagatggaaccaaa

SEQ ID NO: 323711 - DNA, 120 bp, Artificial Sequence
  ENSG00000135919_10 (sequence is synthesized)
gcttcagcagcaacaactgcaattctcattgcaagatcatcgcctccctggtttatagtagacagaccttttctgtttttcatccgacataatcctacaggtgctgtgttattcatgggg

SEQ ID NO: 323712 - DNA, 120 bp, Artificial Sequence
  ENSG00000135919_11 (sequence is synthesized)
cagataaacaaaccctgaagagtatacaaaagaaaccatgcaaagcaacgactactttgctacgaagaaagactcctttcctgcatctttcatagttctgttaaatatttttgtacatcg

SEQ ID NO: 323713 - DNA, 120 bp, Artificial Sequence
  ENSG00000135919_12 (sequence is synthesized)
cttctttttcaaaactagttcttaggaacagactcgatgcaagtgtttctgttctgggaggtattggagggaaaaaacaagcaggatggctggaacactgtactgaggaatgaatagaaa

SEQ ID NO: 323714 - DNA, 120 bp, Artificial Sequence
  ENSG00000135919_13 (sequence is synthesized)
ggcttccagatgtctaaaagattctttaaactactgaactgttacctaggttaacaaccctgttgagtatttgctgtttgtccagttcaggaatttttgttttgttttgtctatatgtgc

SEQ ID NO: 323715 - DNA, 120 bp, Artificial Sequence
  ENSG00000135919_14 (sequence is synthesized)
ggcttttcagaagaaatttaatcagtgtgacagaaaaaaaaatgttttatggtagcttttactttttatgaaaaaaaaattatttgccttttaaattcttttcccccatccccctccaaa

SEQ ID NO: 323716 - DNA, 120 bp, Artificial Sequence
  ENSG00000135919_15 (sequence is synthesized)
gtcttgatagcaagcgttattttggtggtagaaacggtgaaatctctagcctctttgtgtttttgttgttgttgttgttgttgttttatataatgcatgtattcactaaaataaaattta

SEQ ID NO: 323717 - DNA, 120 bp, Artificial Sequence
  ENSG00000135919_16 (sequence is synthesized)
aaaaactcctgtcttgctagacaaggttgctgttgtgcagtgtgcctgtcactactggtctgtactccttggatttgcatttttgtattttgtacaaagtaaaaataaactgttatgagt

SEQ ID NO: 323718 - DNA, 120 bp, Artificial Sequence
  ENSG00000135919_17 (sequence is synthesized)
agtaaaaataaagctatttctctgctatttgaaaatacaatagaagaaactgagccttttagacattcgtcagcctcttctaataaacctttgtactatgtaaacatcaggaaattcaaa

SEQ ID NO: 323719 - DNA, 120 bp, Artificial Sequence
  ENSG00000135919_18 (sequence is synthesized)
aatccttggttaggaggaaagggagtggagaggaccgtgctgcctggcgttccccagctgcctttctttctgttttccccccaacggaatctctatgtggtctcctagagcctcgtgcct

SEQ ID NO: 323720 - DNA, 120 bp, Artificial Sequence
  ENSG00000135919_19 (sequence is synthesized)
gcctctcagctagatgctgatatcattcccactcatgtagttgggaaggaagggtgtggcagagataaagggtccacggtcacgcagtatgtggggggtcacacagcctgtatgccaaag

SEQ ID NO: 323721 - DNA, 120 bp, Artificial Sequence
  ENSG00000135919_20 (sequence is synthesized)
tggcacaccctgtgaatatgtagggtcgcacagcctttatgtgtcagtgccagagcctggacccgggtctgtagatgtgtgaaccgtgagctgataccatggatattcaaagatttacat

SEQ ID NO: 323722 - DNA, 120 bp, Artificial Sequence
  ENSG00000135919_21 (sequence is synthesized)
cccatcaatgtttataccttcttgagaagaaatttgtgtcaaagcacactcctcctttcaagactacctcctcgccgtgctgcgtgatagccctagtatcacaaccaaaacacatgatac

SEQ ID NO: 323723 - DNA, 120 bp, Artificial Sequence
  ENSG00000135919_22 (sequence is synthesized)
agaaagaggccagtatctgtgtggcttcaggctcttgtgcgttggccatgaagcaaaggaaggctgttgcatgaaataacctccttctgactccacccttgcatttgtgagatgtaaaca

SEQ ID NO: 323724 - DNA, 120 bp, Artificial Sequence
  ENSG00000135919_23 (sequence is synthesized)
agcccaggttcatctacatcctgttgagaagtttggcagctggaggtggacatgcacacactacactgaacctcctgcaacaagcactgcggaagggaccatttggatgttgctgccata

SEQ ID NO: 323725 - DNA, 120 bp, Artificial Sequence
  ENSG00000135919_24 (sequence is synthesized)
ggaaaagggaagttctccaactgagttgctctctgaagctatcccggtgaccagcaagcactcatcctgcttctagaagtcaacaaggatacactgaacctgcttctgatttctttaggg

SEQ ID NO: 323726 - DNA, 120 bp, Artificial Sequence
  ENSG00000135919_25 (sequence is synthesized)
atcacagaacaagtgtgccatgacttttcaaacatgcctaattgaactctgtttgcgatttaacttctttttcaaaggtttatagttacctttatttcaaaatttgtcattttaaaatat

SEQ ID NO: 323727 - DNA, 120 bp, Artificial Sequence
  ENSG00000135919_26 (sequence is synthesized)
gtgtttcctccttttcctccactgtatagtaattaagagtgtggaggatttggaggccagcgggctttggtttgaatctagaggctacatattggagggtatgagccaaagccaaatttc

SEQ ID NO: 323728 - DNA, 120 bp, Artificial Sequence
  ENSG00000135919_27 (sequence is synthesized)
cgctaagcacagtggcaggaatggagctgactttcgggacacgaggtggctgtggttgtggcattgggtaatatttgtcacagaagtacaggtcgtccttggtggaaggaaccatgaact

SEQ ID NO: 323729 - DNA, 120 bp, Artificial Sequence
  ENSG00000135919_28 (sequence is synthesized)
agtgatacccgcagctgggagcaccggggccggcgtggctcctgcccggccatccgagccggccctgaccctgaacctgaggtttccagctgctcgccggcaacccctaccccggactta

SEQ ID NO: 323730 - DNA, 120 bp, Artificial Sequence
  ENSG00000135919_29 (sequence is synthesized)
ggctgcgcgccgccggatggggagagactggcgcactcttacttgttacctctgcctgggcagagggaggtgacgcgcggtgtggggaaagcctttaacttggcctctggcagccgattt

SEQ ID NO: 323731 - DNA, 120 bp, Artificial Sequence
  ENSG00000135919_30 (sequence is synthesized)
aacccgagcgagcaggtctttgctattttcatcatctgtagaaacgggagttgcgaggcggatgagtgactgcaggtcgtccttggtggaaggaaccatgaactggcatctccccctctt

SEQ ID NO: 323732 - DNA, 120 bp, Artificial Sequence
  ENSG00000135919_31 (sequence is synthesized)
ttcacagctgtagcacaaacagatttgaaggagccgctgaaagttcttggcattactgacatgtttgattcatcaaaggcaaattttgcaaaaataacaagtatgttcaatttaaaatgt

SEQ ID NO: 323733 - DNA, 120 bp, Artificial Sequence
  ENSG00000135919_32 (sequence is synthesized)
atttgtatacttgaagaaagtgttacaaactgagactgatttgtgcagagaaaaaggatcagaattaggaatgtgttgccctgaaactgtacaaggtttcatttgatacattgccaaatt

SEQ ID NO: 323734 - DNA, 120 bp, Artificial Sequence
  ENSG00000135919_33 (sequence is synthesized)
atgctattggccttcgtttatttattgaccttcatttatttattttttccttttatctttttatttcaatagtttttgggatacaagtggtttttggttacatggatcagtttatatagc

SEQ ID NO: 323735 - DNA, 120 bp, Artificial Sequence
  ENSG00000135919_34 (sequence is synthesized)
gatgaagtctgagattttagtacacccctcccccgagtagtatacgttgtactcaatatgtattaatagatttttagctcctcaccaacccaccctcctccttctgagtctccataatcc

SEQ ID NO: 323736 - DNA, 120 bp, Artificial Sequence
  ENSG00000135919_35 (sequence is synthesized)
cctccttctgagtctccataatccattataccactccgtatgcctttgcatacccgtagcttatctcccacttacaagcgagaacatacagtatttggttttccattcttgagttacttc

SEQ ID NO: 323737 - DNA, 120 bp, Artificial Sequence
  ENSG00000135919_36 (sequence is synthesized)
cattcaagttgctgcaaaagatattatttcattctttttatgactgagtagtattccatgatgtgtacatacctcattttctttatctagtcattgctcttgaccttcatttaaatcagc

SEQ ID NO: 323738 - DNA, 120 bp, Artificial Sequence
  ENSG00000135919_37 (sequence is synthesized)
gtccccacattttgcacgtacatttcatgggaagccccagtgactacctaaaggagtatttcatgtattgcttttatgaatattggctctgacttaggtgttgtcgctctgttttcaaat

SEQ ID NO: 323739 - DNA, 120 bp, Artificial Sequence
  ENSG00000135919_38 (sequence is synthesized)
gccaactttttccttttgcttgaaaaaaagtcaagactgcagtcattcactgtacccagatatgtattttggcatttcatgctcattaatatgaaacgatataaattcaaatgaatctga

SEQ ID NO: 323740 - DNA, 120 bp, Artificial Sequence
  ENSG00000135919_39 (sequence is synthesized)
ttaaaactttcctttgccaaagcaattaaggcatgcttttcatttgccagcagtatatgtacctttttctagagttatgtttgaatggtcagtcctttgttctttaaatttagaacatag

SEQ ID NO: 323741 - DNA, 120 bp, Artificial Sequence
  ENSG00000135919_40 (sequence is synthesized)
caatctttccaaggaaaagccatggcttgaacattatttgcactccagtttgcaaataactttgagtggtaagaaattagctcattaccagcttcagttgcatgctagtaaacacctagt

SEQ ID NO: 323742 - DNA, 120 bp, Artificial Sequence
  ENSG00000135919_41 (sequence is synthesized)
acctgttctggggacaaacatgactcccctggtgaacctgcagctccatggatattctgatagccgttcatccctcatgactcaaactcaggcctccagcccagcagcattagcatcacc

SEQ ID NO: 323743 - DNA, 120 bp, Artificial Sequence
  ENSG00000135919_42 (sequence is synthesized)
caggagcttgtttgaaatgcacaatcttgggtgtaacccagacccactgaaccagaatccattttaacacagtccctcagcccagcaaagactgagaagcaccattttcatctgcacttt

SEQ ID NO: 323744 - DNA, 120 bp, Artificial Sequence
  ENSG00000135919_43 (sequence is synthesized)
tcccttcaaggttgttcatggtagctgaaatactaaatggggggtgttcacaggaagaaccaggtgccccagattctcctggaaagtcctctttaacactgcatgtgacttgggccctat

SEQ ID NO: 323745 - DNA, 120 bp, Artificial Sequence
  ENSG00000135919_44 (sequence is synthesized)
aaatgtgcatctcagtcacaatttggtcatattagagctgggcattggtgcagatagttcacaagcagatgacacaaaaagcacattttccctttgcatccagacctatgtcccatccag

SEQ ID NO: 323746 - DNA, 120 bp, Artificial Sequence
  ENSG00000135919_45 (sequence is synthesized)
actaatatcaacttaagtttttcattctctgtgaaagctacacccagtgggtgttgctggaatggtcagaatttgctgagaagtaaagtgagttcaccagaatgtccctgaggcacaact

SEQ ID NO: 323747 - DNA, 120 bp, Artificial Sequence
  ENSG00000135919_46 (sequence is synthesized)
gcatttacacatcggcccttccaggaaaatctaaactcttctcttgttcgacactcttctcttactagcatgcccatgagatgagtggctgttgtgaagagccaggacttactctgccac

SEQ ID NO: 323748 - DNA, 120 bp, Artificial Sequence
  ENSG00000135919_47 (sequence is synthesized)
taactagccgtatgattgcagggaacattacttaacgttctaggcctcagtttccccatctgtaaatgctgtctgaaatcccttctgcatctgcattctgtaactgaaaaataatcttgt

SEQ ID NO: 323749 - DNA, 120 bp, Artificial Sequence
  ENSG00000135919_48 (sequence is synthesized)
tgccttgctgcttccagaaaaccgggcttcctttttaaagctctgctcttttcatttttaaaaaacaattctagtgatcagaattgaattgatagaggcactaaatcatttgagggcctg

SEQ ID NO: 323750 - DNA, 120 bp, Artificial Sequence
  ENSG00000135919_49 (sequence is synthesized)
ggcccttctccagaagtgagtatcacagttcacttagcagggactgaaattcacaagtaacagctgtctgcagccttcaacaccaggactgtcagaggtcatgtcttctgacactttaaa

SEQ ID NO: 323751 - DNA, 120 bp, Artificial Sequence
  ENSG00000135919_50 (sequence is synthesized)
aattggaatttgccatggctttgagctttgaggttacttccccaaccaaccaatggcctgcctatcaaacaaatgctgatactgttttattttctggaagcagggtcagaaaacctccat

SEQ ID NO: 323752 - DNA, 120 bp, Artificial Sequence
  ENSG00000135919_51 (sequence is synthesized)
gtttctcatatcttgcaaaaagcaaaaattgaagtcagtgaagatggaaccaaagcttcagcagcaacaagtaagcactgggtcacgtggcagggcttcctctagcaggggagcaaacac

SEQ ID NO: 323753 - DNA, 120 bp, Artificial Sequence
  ENSG00000135919_52 (sequence is synthesized)
attcctgtatactcattggttgagcaaatatgtaatgcaccctctttccagccaggcagtgtgtgtgggttaaccctcaggagacagcagtgagtacagacagactgaagacctgtaacc

SEQ ID NO: 323754 - DNA, 120 bp, Artificial Sequence
  ENSG00000135919_53 (sequence is synthesized)
acaaagctcagaatctgtttcattaaagaaaagcatttcagtgagagaaattcctctaggacaggagtcagcaaacttctataaagagccaggtagtatgtatttcagatttgtgtgtca

SEQ ID NO: 323755 - DNA, 120 bp, Artificial Sequence
  ENSG00000135919_54 (sequence is synthesized)
tatttcagatttgtgtgtcataccatctccattacagcttcttagctctttcactgtagcatgaaaacagcaatcaacaatacaagtaaacagatgtggctgtgttccaataaaacttta

SEQ ID NO: 323756 - DNA, 120 bp, Artificial Sequence
  ENSG00000135919_55 (sequence is synthesized)
taaaataaacaacaagtacttaaaggaaaataggcaatcaggtctatccaggataaaccgaagaattcgccagcatctgttgaattgcggcaggattgctgtacagccttccttgataat

SEQ ID NO: 323757 - DNA, 120 bp, Artificial Sequence
  ENSG00000135919_56 (sequence is synthesized)
tagaacatccacatctgcttcctcctcagtggtttacataatgaaggagaaaacagaacaatcgtaagtcagttttttcacccctcattatccgtaggaaaatagatgaatagatttggc

SEQ ID NO: 323758 - DNA, 120 bp, Artificial Sequence
  ENSG00000135919_57 (sequence is synthesized)
caactctgtgagcccataaagtgaaaatcttagctacacttgcagctgggtcaaatatctctggtcattgaaacataccagttatactcacaatagatgtgttattgcctttctcgaata

SEQ ID NO: 323759 - DNA, 120 bp, Artificial Sequence
  ENSG00000135919_58 (sequence is synthesized)
aacgttttaaaaattcctttaaagaagcatttaaaacaaagaccctgaaataagagggttggaaattttaagatgctttttgtcttttctaggtaattttaagtaacatctaaaagttat

SEQ ID NO: 323760 - DNA, 120 bp, Artificial Sequence
  ENSG00000135919_59 (sequence is synthesized)
tgaccagttttgctgagtgtaactatcaggaccagctacatagtttgtggggtcctgtgccaaatgaaaatatggagccccttgttcaaaatgtataagaatttcaagatagcaacagca

SEQ ID NO: 323761 - DNA, 120 bp, Artificial Sequence
  ENSG00000135919_60 (sequence is synthesized)
gagtattaaacccagtgcagggccccatgtaaccgcccaggtcctcctgtcttagtccgcctgggctgccatgacaaaataccgttgactgagtggtttaaacaacagaactcacacttc

SEQ ID NO: 323762 - DNA, 120 bp, Artificial Sequence
  ENSG00000135919_61 (sequence is synthesized)
tggaggctgcgagttcaagatcaaggtgttggtgttggcaggtttgtttctcctgagatctctggatctccggaggtcgccccctccctgtgtcctcacatggtcttttctccatgtgac

SEQ ID NO: 323763 - DNA, 120 bp, Artificial Sequence
  ENSG00000135919_62 (sequence is synthesized)
acatccctggtgtctctcccacttcaaataagggcaacggtcctattagaatagaaccctacttaaccttcattacctcctcaaaggcattatctccaaatacagttacgttaggggttt

SEQ ID NO: 323764 - DNA, 120 bp, Artificial Sequence
  ENSG00000135919_63 (sequence is synthesized)
ggggcttcagcatatgaatttggggggagacacatttcagtccataacacctgctatttaatatttgtttttaataaccctgggtaaaagggcttgccccagcataactgcagctgtttc

SEQ ID NO: 323765 - DNA, 120 bp, Artificial Sequence
  ENSG00000135919_64 (sequence is synthesized)
ctttataacatcaagcccaagtgttcaatacttcatggggtttgagcaagaggactgagctattgcaacaggcatgtggtagtaatgccacacacctaccctcccgtgaggccctggttc

SEQ ID NO: 323766 - DNA, 120 bp, Artificial Sequence
  ENSG00000135919_65 (sequence is synthesized)
aggcttattaaatggaaacaagcctggcagacgaggaatggccaagacccatgaggctaaagaagtttgctttccaagtcagatgcctacacctggtgagtggaacagcagtataaggta

SEQ ID NO: 323767 - DNA, 120 bp, Artificial Sequence
  ENSG00000135919_66 (sequence is synthesized)
gtaggtcccggatgagtggtctacattccagtgcagaggaaacctaaataatgtgccaaaggagaaggcacagacacaaaagctaagaattggactgggcctttatatacagaaaagatt

SEQ ID NO: 323768 - DNA, 90 bp, Artificial Sequence
  ENSG00000135919_67 (sequence is synthesized)
agctaagaattggactgggcctttatatacagaaaagatttagagaagctaaacaggaccaggcccgcactttgggaggctgaggcaggt

SEQ ID NO: 323769 - DNA, 120 bp, Artificial Sequence
  ENSG00000135919_68 (sequence is synthesized)
tgggtgacagagtgagactccatccccaaaaaaaaggactgggggctttatcagcaaagcagatggtgtgaataaaaaatagctaataacaataaatatgcattagatgtgtttagtggc

SEQ ID NO: 323770 - DNA, 120 bp, Artificial Sequence
  ENSG00000135919_69 (sequence is synthesized)
aataacaataaatatgcattagatgtgtttagtggcaaacactgttctaagagctataatatatcttatgtcatttaattatgtcatttaattctcatcaaaactctatgaggagtaagt

SEQ ID NO: 323771 - DNA, 120 bp, Artificial Sequence
  ENSG00000135919_70 (sequence is synthesized)
atgtttatcagagatggtgcttgtgtagaagacatgagagagtaatgtaaagggcctggcccaaggtaggcttagtaaatggtgaccattgagcctgttgtaacatggccagcctatgga

SEQ ID NO: 323772 - DNA, 120 bp, Artificial Sequence
  ENSG00000135919_71 (sequence is synthesized)
acaagcatgaagtgtgtcttcagacaccagcctctgagggtccatgaagctagctaacttgctggccttatgcttacatggtctcatgtaatgtgcacaacacattttccttttcttccc

SEQ ID NO: 323773 - DNA, 120 bp, Artificial Sequence
  ENSG00000135924_0 (sequence is synthesized)
gtgtgcccaaaatagccggctccgccctcttctcccggcagcccctgcaggcccccacccccccaggggacaggcggagccggccttctccccgtctctagtagtttccgcaccgctgac

SEQ ID NO: 323774 - DNA, 120 bp, Artificial Sequence
  ENSG00000135924_1 (sequence is synthesized)
gtagtttccgcaccgctgacgcatgcctgcgcgcacagctgggccgggcgcgtcctacgcagcagccgcgagccgggctgcgggtgccagacggttcccggcggggggcaggggcggggc

SEQ ID NO: 323775 - DNA, 120 bp, Artificial Sequence
  ENSG00000135924_2 (sequence is synthesized)
ctggcggaggagccccaaggaggcccgcctgacgactgaccagttgccatggcatcctactacgagatcctagacgtgccgcgaagtgcgtccgctgatgacatcaagaaggcgtatcgg

SEQ ID NO: 323776 - DNA, 120 bp, Artificial Sequence
  ENSG00000135924_3 (sequence is synthesized)
cgcaaggctctccagtggcacccagacaaaaacccagataataaagagtttgctgagaagaaatttaaggaggtggccgaggcatatgaagtgctgtctgacaagcacaagcgggagatt

SEQ ID NO: 323777 - DNA, 120 bp, Artificial Sequence
  ENSG00000135924_4 (sequence is synthesized)
tacgaccgctatggccgggaagggctgacagggacaggaactggcccatctcgggcagaagctggcagtggtgggcctggcttcaccttcaccttccgcagccccgaggaggtcttccgg

SEQ ID NO: 323778 - DNA, 120 bp, Artificial Sequence
  ENSG00000135924_5 (sequence is synthesized)
gaattctttgggagtggagacccttttgcagagctctttgatgacctgggccccttctcagagcttcagaaccggggttcccgacactcaggccccttctttaccttctcttcctccttc

SEQ ID NO: 323779 - DNA, 120 bp, Artificial Sequence
  ENSG00000135924_6 (sequence is synthesized)
cctgggcactccgatttctcctcctcatctttctccttcagtcctggggctggtgcttttcgctctgtttctacatctaccacctttgtccaaggacgccgcatcaccacacgcagaatc

SEQ ID NO: 323780 - DNA, 120 bp, Artificial Sequence
  ENSG00000135924_7 (sequence is synthesized)
atggagaacgggcaggagcgggtggaagtggaggaggatgggcagctgaagtcagtcacaatcaatggtgtcccagatgacctggcactgggcttggagctgagccgtcgcgagcagcag

SEQ ID NO: 323781 - DNA, 120 bp, Artificial Sequence
  ENSG00000135924_8 (sequence is synthesized)
ccgtcagtcacttccaggtctgggggcactcaggtccagcagacccctgcctcatgccccttggacagcgacctctctgaggatgaggacctgcagctggccatggcctacagcctgtca

SEQ ID NO: 323782 - DNA, 120 bp, Artificial Sequence
  ENSG00000135924_9 (sequence is synthesized)
gagatggaggcagctgggaagaaacccgcaggtgggcgggaggcacagcaccgacggcaggggcggcccaaggcccagcaccaagatccaggcttgggggggacccaggagggtgcgagg

SEQ ID NO: 323783 - DNA, 120 bp, Artificial Sequence
  ENSG00000135924_10 (sequence is synthesized)
ggtgaagcaaccaaacgcagtccatccccagaggagaaggcctctcgctgcctcatcctctgaacaccgggcccaacctgatctgatccagatcttgactggggggtctgactcactgtg

SEQ ID NO: 323784 - DNA, 120 bp, Artificial Sequence
  ENSG00000135924_11 (sequence is synthesized)
ggaagagaagaggggagtatcctgagttgtaggaactgctttccaactccaagctccctccacaagtttccctcccaggccccccacaccccagtgtggacttgggatttgctgtgctca

SEQ ID NO: 323785 - DNA, 120 bp, Artificial Sequence
  ENSG00000135924_12 (sequence is synthesized)
gcccagggctgataggtccctggtgaagcccagggtggggggtgtcagggcagtggaggggcccgaggagccaggttgcatttattggatggggagctccaaggggcattagtggtttgg

SEQ ID NO: 323786 - DNA, 120 bp, Artificial Sequence
  ENSG00000135924_13 (sequence is synthesized)
aggaggacttggcctagggttgtctgagccggagccggcagctccactggagagcagtgcaggcagagtggagcctcctgctctcctggaccagctgcagacccccaaccctggtttctg

SEQ ID NO: 323787 - DNA, 120 bp, Artificial Sequence
  ENSG00000135924_14 (sequence is synthesized)
tgccatgttgcgctctgaccgtctctgttgcttctcttctggtgttgcttctcctccctcccattctctctgcaactccctgcgggccgcatcgcttgctttcactgccgtctggctagg

SEQ ID NO: 323788 - DNA, 120 bp, Artificial Sequence
  ENSG00000135924_15 (sequence is synthesized)
actcccttcttccttccttccccgagaaggcctcaatgtggcgaggaagatgctggggccggtagggctgtgagatcttctggggaggctagccgggtggggcgggagcctctcagctgt

SEQ ID NO: 323789 - DNA, 120 bp, Artificial Sequence
  ENSG00000135924_16 (sequence is synthesized)
ccagattcagaactggagcccactcctcctccctctcgttgcctcagcctgccctcaccctcaggactaggcagaggtgaggctggctcaccctgaagaggtgggataggaccgggggac

SEQ ID NO: 323790 - DNA, 120 bp, Artificial Sequence
  ENSG00000135924_17 (sequence is synthesized)
cccagagggaggcctaggaggggactgcacccatactgcttccctaccacaaatcagggctcagggagaggccatgcggccagcccaggtctgcatgctgagccccatcctccacagctt

SEQ ID NO: 323791 - DNA, 120 bp, Artificial Sequence
  ENSG00000135924_18 (sequence is synthesized)
gccgctgacgctctctcctgtcaccccgcccctgctctctccccagatgtgttctgagctggatgccgggttccagaatcgctgcacagttccaacaggacagcgccttcccccatgcgc

SEQ ID NO: 323792 - DNA, 120 bp, Artificial Sequence
  ENSG00000135924_19 (sequence is synthesized)
tgggaggggaccctccatttctccccctcacccatgctgagtgtagagccggggcctgggtggcgggtgggggccgggtgggaggtggcagtagtcttagcctgtgcactctcttccttg

SEQ ID NO: 323793 - DNA, 120 bp, Artificial Sequence
  ENSG00000135924_20 (sequence is synthesized)
ggtgtttggtgctggctcctggggactacaaatcccagagtgcggtgtgcccggcctcatttctgatagatcccgcttgggggaggtggtgtatggttacggagctgtgcatcttgggac

SEQ ID NO: 323794 - DNA, 120 bp, Artificial Sequence
  ENSG00000135924_21 (sequence is synthesized)
atgtagtagcccaggtcggcttgtcactcgctgtgagatggggagattttgtcttttgatttatccctgtagggctggcagggttgtagatgaagggggaatgatctgagccttggttcc

SEQ ID NO: 323795 - DNA, 120 bp, Artificial Sequence
  ENSG00000135924_22 (sequence is synthesized)
cctgacacgtcttgctagccccagggttagagtgggcagggcagagccgcgcagcacctgggagcggtacctttcccttgggcagcctggggtcccaggaacaagccagggcgagtggca

SEQ ID NO: 323796 - DNA, 120 bp, Artificial Sequence
  ENSG00000135924_23 (sequence is synthesized)
tgtctgcctgagcagggtgtggccccagaaagctgaggagtgtgggctggcagagagcttcgagggcaaggccacccgcgggggcgtgtgtgtggtggggcttggcatgtgatggcagct

SEQ ID NO: 323797 - DNA, 120 bp, Artificial Sequence
  ENSG00000135924_24 (sequence is synthesized)
ccaggcatgccgctgcttgtatggctttctttggcctctgaccctgctgcccattctttccaacatcacagatgaactgcctctcctcctccctgcctggggagcccagtggccagggag

SEQ ID NO: 323798 - DNA, 120 bp, Artificial Sequence
  ENSG00000135924_25 (sequence is synthesized)
gggagtggtggagccagtcgctgtaacactgagcctcagagacgaaccaaaaccagctgggctgagctcagatccagggggaaatgctggaagtcaataaaactgagttttgagagcttg

SEQ ID NO: 323799 - DNA, 120 bp, Artificial Sequence
  ENSG00000135924_26 (sequence is synthesized)
caccctccacccgccaccaccatggggcacttcagagtgacacctgtaggtgtctgagggaaccaggtcgttagaaagcactggggtgcttcttccgagtgacacctgcagggaggaaag

SEQ ID NO: 323800 - DNA, 120 bp, Artificial Sequence
  ENSG00000135924_27 (sequence is synthesized)
agacccctggtagagtacaaggagaacgtccagagagtgaagtagttagttcctctgggagctgcactgtgttatgggttgttctccagttgatcttcccctcctcctcctcctcctcct

SEQ ID NO: 323801 - DNA, 120 bp, Artificial Sequence
  ENSG00000135924_28 (sequence is synthesized)
ataaataagcccaactaaaaagcggaaaagaaaaaccctacccagttgcttagtggtttatacttccagacttgggctcacacacttttgaggggaaatgtcattaccagatgactgcta

SEQ ID NO: 323802 - DNA, 120 bp, Artificial Sequence
  ENSG00000135924_29 (sequence is synthesized)
ggctcctgggcctgggcgtcgagatagctcttggccccggcctgcgggggcagataaggctgccggagggagcctagtcaccggccgcaagcagagcccggtgtgctccgcttccaactg

SEQ ID NO: 323803 - DNA, 120 bp, Artificial Sequence
  ENSG00000135924_30 (sequence is synthesized)
aggaagcagggcaggtaactcatgtgagctgagcctcctgcgtgccaggcattggtgggtgtcatctccatgagttctcacagccgtcctatgaggcaggttctatcacccctattttac

SEQ ID NO: 323804 - DNA, 120 bp, Artificial Sequence
  ENSG00000135924_31 (sequence is synthesized)
aggcaaggaaactgaggctgagagaggtgaagtaacttgctcaaggccacgcagagctggaatatgaatccaggtctgcctttttattgattcattcgaaaagtaattcagtgaatggtg

SEQ ID NO: 323805 - DNA, 120 bp, Artificial Sequence
  ENSG00000135924_32 (sequence is synthesized)
acagtgtccggcactcgctgggtgctggggaaactggaggacaagcaggcactgtctttgcccagaggggcagggaagaccaacacctaccaggcacacacacagacacagttacagctt

SEQ ID NO: 323806 - DNA, 120 bp, Artificial Sequence
  ENSG00000135924_33 (sequence is synthesized)
gtgaagagtattccgagggaagaaacagggcaggtggagtgctagggaataatgtgcacttgctttagttctggtggttgtagaaggcctctccgagaaggtgacatttaggctaagccc

SEQ ID NO: 323807 - DNA, 120 bp, Artificial Sequence
  ENSG00000135924_34 (sequence is synthesized)
acagtaagggccggggtcaggcaggacccagcacatcaccccctacttcatgccccagctcacattttcttaaagcaatgtctctgccacctagtttcctctgtgcctttttccagcctg

SEQ ID NO: 323808 - DNA, 120 bp, Artificial Sequence
  ENSG00000135924_35 (sequence is synthesized)
acatttattgaacactttctatgtgtcaggcactggtaggcagtttacgtggatggtctcatttgatctgtgcaacaaccctgtgcggtaggtgttgtgatgacagccattttccagatg

SEQ ID NO: 323809 - DNA, 120 bp, Artificial Sequence
  ENSG00000135924_36 (sequence is synthesized)
agaagaggccagctgtgtgaaaggctgagttgctgcctaaacctatagcccgtgtcccctgggtcccctgctgtgcctgctttcccccgccaagtgtcagagtgtcagtctctggacaat

SEQ ID NO: 323810 - DNA, 120 bp, Artificial Sequence
  ENSG00000135924_37 (sequence is synthesized)
ccacgtttgcaagctccgattcctggaacccctggcttgagcttgttgcttttccaagcctgtctcctgtgttgggagccctgcctccagcagccctgcgaggcggcctggagcctcggt

SEQ ID NO: 323811 - DNA, 120 bp, Artificial Sequence
  ENSG00000135924_38 (sequence is synthesized)
tgtgtctgcctgtcatcgcgtcatgatgatttgcctgtactgaaagagccatctgtcctccatccctcttccccctccttccttcctttattctttattgtggacagaattaaccagtga

SEQ ID NO: 323812 - DNA, 120 bp, Artificial Sequence
  ENSG00000135924_39 (sequence is synthesized)
ggtgagtggactctggaagcctctgaatggctcaacttccccctccaggcctgtccttccatcagctgggaggccctgaggtggaaggctgagaggggacgggaatgccacggacagaag

SEQ ID NO: 323813 - DNA, 120 bp, Artificial Sequence
  ENSG00000135924_40 (sequence is synthesized)
attttgtggagctgggtccagtgagagccgggacagaacctcacgtgtgccagaacccccgtaatccaacagtgacacttcacagactcaccttattaaattacaacaataatacattgt

SEQ ID NO: 323814 - DNA, 120 bp, Artificial Sequence
  ENSG00000135924_41 (sequence is synthesized)
tagacttctatagtaacagccatgaaagcaagactcaaagcatcttgtgacaatattgttattattacctataaaacagatagtggtattttttaatgatagatatgtgccaaatatttt

SEQ ID NO: 323815 - DNA, 120 bp, Artificial Sequence
  ENSG00000135924_42 (sequence is synthesized)
acatttcgtaagtctctagtgaatcctgacaggtgggcaattttctccccatttgcagatgagaaaactgaggcacagttaatagcccagagtcacataacacatggcagagctggactc

SEQ ID NO: 323816 - DNA, 120 bp, Artificial Sequence
  ENSG00000135925_0 (sequence is synthesized)
gtctgctccgggagccctgacccgagtcggagctgtgtgtcgcagccgccccgaccccccgccgatcatgcgccggcgcccctggctctccagtcccactgggctgtgagccccccactc

SEQ ID NO: 323817 - DNA, 120 bp, Artificial Sequence
  ENSG00000135925_1 (sequence is synthesized)
ccagcccgtcagggcctgcgcgccatgggcagcgcccaccctcgcccctggctgcggctccgaccccagccccagccgcggccagcgctctgggtgctcctgttcttcctactgctgctg

SEQ ID NO: 323818 - DNA, 120 bp, Artificial Sequence
  ENSG00000135925_2 (sequence is synthesized)
gctgctgccatgcccaggtcagcacccaatgacattctggacctccgcctccccccggagcccgtgctcaatgccaacacagtgtgcctaacattgccaggcctgagccggcggcagatg

SEQ ID NO: 323819 - DNA, 120 bp, Artificial Sequence
  ENSG00000135925_3 (sequence is synthesized)
gaggtgtgtgtgcgtcaccctgatgtggctgcctcagccatacagggcatccagatcgccatccacgaatgccaacaccaattcagggaccagcgctggaactgctcaagcctggagact

SEQ ID NO: 323820 - DNA, 120 bp, Artificial Sequence
  ENSG00000135925_4 (sequence is synthesized)
cgcaacaagatcccctatgagagtcccatcttcagcagaggtttccgagagagcgcttttgcctacgccatcgcagcagctggcgtggtgcacgccgtgtccaatgcgtgtgccctgggc

SEQ ID NO: 323821 - DNA, 120 bp, Artificial Sequence
  ENSG00000135925_5 (sequence is synthesized)
aaactgaaggcctgtggctgtgatgcgtcccggcgaggggacgaggaggccttccgtaggaagctgcaccgcttacaactggatgcactgcagcgtggtaagggcctgagccatggggtc

SEQ ID NO: 323822 - DNA, 120 bp, Artificial Sequence
  ENSG00000135925_6 (sequence is synthesized)
ccggaacacccagccctgcccacagccagcccaggcctgcaggactcctgggagtggggcggctgcagccccgacatgggcttcggggagcgcttttctaaggactttctggactcccgg

SEQ ID NO: 323823 - DNA, 120 bp, Artificial Sequence
  ENSG00000135925_7 (sequence is synthesized)
gagcctcacagagacatccacgcgagaatgaggcttcacaacaaccgagttgggaggcaggcagtgatggagaacatgcggcggaagtgcaagtgccacggcacgtcaggcagctgccag

SEQ ID NO: 323824 - DNA, 120 bp, Artificial Sequence
  ENSG00000135925_8 (sequence is synthesized)
ctggcaggtgacgcccgagttccgcaccgtgggggcgctgctgcgcagccgcttccaccgcgccacgctcatccggccgcacaaccgcaacggcggccagctggagccgggcccagcggg

SEQ ID NO: 323825 - DNA, 120 bp, Artificial Sequence
  ENSG00000135925_9 (sequence is synthesized)
ccctcgccggctccgggcgctcccgggccgcgccgacgggccagccccgccgacctggtctacttcgaaaagtctcccgacttctgcgagcgcgagccgcgcctggactcggcgggcacc

SEQ ID NO: 323826 - DNA, 120 bp, Artificial Sequence
  ENSG00000135925_10 (sequence is synthesized)
gtgggccgcctgtgcaacaagagcagcgccggctcggatggctgcggcagcatgtgctgcggccgcggccacaacatcctgcgccagacgcgcagcgagcgctgccactgccgcttccac

SEQ ID NO: 323827 - DNA, 120 bp, Artificial Sequence
  ENSG00000135925_11 (sequence is synthesized)
tggtgctgtttcgtggtctgcgaagagtgccgcatcaccgagtgggtcagcgtctgcaagtgagcggcccggggtcccctgggccctgatcgaggtcccctcctggagcctggccctctg

SEQ ID NO: 323828 - DNA, 120 bp, Artificial Sequence
  ENSG00000135925_12 (sequence is synthesized)
aggcttacggtcttggcaaggcagcatcgccttggctcttgggaagaggagattggaccacatgatcttataggaacccctcagctctgaggtctgtgatcgccggacagtccaggcctg

SEQ ID NO: 323829 - DNA, 120 bp, Artificial Sequence
  ENSG00000135925_13 (sequence is synthesized)
tctgaaccccaccactcacttctgtgggctctaggactgactgggttcttcctccctccccgaagcccagacagttcagttgggctgggggttgctccacaccctaaaacaagcctcagc

SEQ ID NO: 323830 - DNA, 120 bp, Artificial Sequence
  ENSG00000135925_14 (sequence is synthesized)
caggcaacccgtcagtctgtctccatcctttcaccccttccctggagatgggaggtggggaatgaatggaagctgacgggcagagagaggaggattaaaaaaaagaaatagacataactg

SEQ ID NO: 323831 - DNA, 120 bp, Artificial Sequence
  ENSG00000135925_15 (sequence is synthesized)
agctgaagtaattccataaagggcccagacagcctcctccaccattcccttcatcattcatttaacaaatatttattttgcactctctttgcggcactctgggggcggtggggtgcgtgg

SEQ ID NO: 323832 - DNA, 120 bp, Artificial Sequence
  ENSG00000135925_16 (sequence is synthesized)
gggtggcaatgcaaggcactgaggccacagatgtgagtaagcgagacacaacacttgtcctcttggaggttacattcttgctggggggaggcatgggcaataaacaagtaaatatacaaa

SEQ ID NO: 323833 - DNA, 86 bp, Artificial Sequence
  ENSG00000135925_17 (sequence is synthesized)
gtggtctgcgaagagtgccgcatcaccgagtgggtcagcgtctgcaaggtctcgccaggcttgctgcagcctcgacatccagagct

SEQ ID NO: 323834 - DNA, 120 bp, Artificial Sequence
  ENSG00000135925_18 (sequence is synthesized)
tttttcttttagaggcggagtctcgctttgtattttaagctggtctctgaactcctgggctcaagttatcctcccgcctccaattcccaaagtgttggggttacagagactgagccactg

SEQ ID NO: 323835 - DNA, 120 bp, Artificial Sequence
  ENSG00000135925_19 (sequence is synthesized)
cccctggccagaatacactaaattttttaaaagatcccgtttaaaactaggaattgggggacctggcctcctgacaagagctaatataattatgtcattgtgattttctttttaaaactg

SEQ ID NO: 323836 - DNA, 120 bp, Artificial Sequence
  ENSG00000135925_20 (sequence is synthesized)
gccgacacgaacggacgggcctctgcaccattcatgccccggctgggccgggccggcgctcaccgccgccgcgggcccgctcctaccctcgggtttctaggtcgtccgcgctgcccgcag

SEQ ID NO: 323837 - DNA, 120 bp, Artificial Sequence
  ENSG00000135925_21 (sequence is synthesized)
ccgcgtttcccttcggggccctcgggtaccccatgaggactccgtagccctggctttggtttctgcccgccggggactgggataggcgcggaggttctcacttctgccgcttcgggtgag

SEQ ID NO: 323838 - DNA, 120 bp, Artificial Sequence
  ENSG00000135925_22 (sequence is synthesized)
gcgcggcctgctggaggaccttggggtctttgaagcctgggggagagttcagagcggcagaacagcgcagggctggctgggtgccaggcgctcccgggttcacctgcagtttaataagct

SEQ ID NO: 323839 - DNA, 120 bp, Artificial Sequence
  ENSG00000135925_23 (sequence is synthesized)
cgaggtttccgagagagcgcttttgcctacgccatcgcagcagctggcgtggtgcacgccgtgtccaatgcgtgtgccctgggcaaactgaaggcctgtggctgtgatgcgtcccggcga

SEQ ID NO: 323840 - DNA, 120 bp, Artificial Sequence
  ENSG00000135926_0 (sequence is synthesized)
actccgaggccaggaacgctccgtctggaacggcgcaggtcccagcagctggggttccccctcagcccgtgagcagccatgtccaaccccagcgccccaccaccatatgaagaccgcaac

SEQ ID NO: 323841 - DNA, 120 bp, Artificial Sequence
  ENSG00000135926_1 (sequence is synthesized)
cccctgtacccaggccctccgccccctgggggctatgggcagccatctgtcctgccaggagggtatcctgcctaccctggctacccgcagcctggctacggtcaccctgctggctaccca

SEQ ID NO: 323842 - DNA, 120 bp, Artificial Sequence
  ENSG00000135926_2 (sequence is synthesized)
cagcccatgccccccacccacccgatgcccatgaactacggcccaggccatggctatgatggggaggagagagcagtgagtgatagcttcgggcctggagagtgggatgaccggaaagtg

SEQ ID NO: 323843 - DNA, 120 bp, Artificial Sequence
  ENSG00000135926_3 (sequence is synthesized)
cgacacacttttatccgaaaggtttactccatcatctccgtgcagctgctcatcactgtggccatcattgctatcttcacctttgtggaacctgtcagcgcctttgtgaggagaaatgtg

SEQ ID NO: 323844 - DNA, 120 bp, Artificial Sequence
  ENSG00000135926_4 (sequence is synthesized)
gctgtctactacgtgtcctatgctgtcttcgttgtcacctacctgatccttgcctgctgccagggacccagacgccgtttcccatggaacatcattctgctgaccctttttacttttgcc

SEQ ID NO: 323845 - DNA, 120 bp, Artificial Sequence
  ENSG00000135926_5 (sequence is synthesized)
atgggcttcatgacgggcaccatttccagtatgtaccaaaccaaagccgtcatcattgcaatgatcatcactgcggtggtatccatttcagtcaccatcttctgctttcagaccaaggtg

SEQ ID NO: 323846 - DNA, 120 bp, Artificial Sequence
  ENSG00000135926_6 (sequence is synthesized)
gacttcacctcgtgcacaggcctcttctgtgtcctgggaattgtgctcctggtgactgggattgtcactagcattgtgctctacttccaatacgtttactggctccacatgctctatgct

SEQ ID NO: 323847 - DNA, 120 bp, Artificial Sequence
  ENSG00000135926_7 (sequence is synthesized)
gctctgggggccatttgtttcaccctgttcctggcttacgacacacagctggtcctggggaaccggaagcacaccatcagccccgaggactacatcactggcgccctgcagatttacaca

SEQ ID NO: 323848 - DNA, 120 bp, Artificial Sequence
  ENSG00000135926_8 (sequence is synthesized)
gacatcatctacatcttcacctttgtgctgcagctgatgggggatcgcaattaaggagcaagcccccattttcacccgatcctgggctctcccttccaagctagagggctgggccctatg

SEQ ID NO: 323849 - DNA, 120 bp, Artificial Sequence
  ENSG00000135926_9 (sequence is synthesized)
gctttaggcccctttccttccccttgagtaacatgcccagtttcctttctgtcctggagacaggtggcctctctggctatggatgtgtgggtacttggtggggacggaggagctagggac

SEQ ID NO: 323850 - DNA, 120 bp, Artificial Sequence
  ENSG00000135926_10 (sequence is synthesized)
taactgttgctcttggtgggcttggcagggactaggctgaagatgtgtcttctccccgccacctactgtatgacaccacattcttcctaacagctggggttgtgaggaatatgaaaagag

SEQ ID NO: 323851 - DNA, 120 bp, Artificial Sequence
  ENSG00000135926_11 (sequence is synthesized)
cctattcgatagctagaagggaatatgaaaggtagaagtgacttcaaggtcacgaggttcccctcccacctctgtcacaggcttcttgactacgtagttggagctatttcttcccccagc

SEQ ID NO: 323852 - DNA, 120 bp, Artificial Sequence
  ENSG00000135926_12 (sequence is synthesized)
aaagccagagagctttgtccccggcctcctggacacataggccattatcctgtattcctttggcttggcatcttttagctcaggaaggtagaagagatctgtgcccatgggtctccttgc

SEQ ID NO: 323853 - DNA, 120 bp, Artificial Sequence
  ENSG00000135926_13 (sequence is synthesized)
ttcaatcccttcttgtttcagtgacatatgtattgtttatctgggttagggatgggggacagataacagaacgagcaaagtaacctatacaggccagcatggaacagcatctcccctggg

SEQ ID NO: 323854 - DNA, 120 bp, Artificial Sequence
  ENSG00000135926_14 (sequence is synthesized)
cttgctcctggcttgtgacgctataagacagagcaggccacatgtggccatctgctccccattcttgaaagctgctggggcctccttgcaggcttctggatctctggtcagagtgaactc

SEQ ID NO: 323855 - DNA, 120 bp, Artificial Sequence
  ENSG00000135926_15 (sequence is synthesized)
ttgcttcctgtattcaggcagctcagagcagaaagtaaggggcagagtcatacgtgtggccaggaagtagccagggtgaagagagactcggtgcgggcagggagaatgcctgggggtccc

SEQ ID NO: 323856 - DNA, 120 bp, Artificial Sequence
  ENSG00000135926_16 (sequence is synthesized)
tcacctggctagggagataccgaagcctactgtggtactgaagacttctgggttctttccttctgctaacccagggagggtcctaagaggaaggtgacttctctctgtttgtcttaagtt

SEQ ID NO: 323857 - DNA, 120 bp, Artificial Sequence
  ENSG00000135926_17 (sequence is synthesized)
gcactgggggatttctgacttgaggcccatctctccagccagccactgccttctttgtaatattaagtgccttgagctggaatggggaagggggacaagggtcagtctgtcgggtggggg

SEQ ID NO: 323858 - DNA, 120 bp, Artificial Sequence
  ENSG00000135926_18 (sequence is synthesized)
cagaaatcaaatcagcccaaggatatagttaggattaattacttaatagagaaatcctaactatatcacacaaagggatacaactataaatgtaataaagtttatgtctagaagttaaaa

SEQ ID NO: 323859 - DNA, 120 bp, Artificial Sequence
  ENSG00000135926_19 (sequence is synthesized)
atgccagccccaaacctcatccctagtggaggccttgctgatgtggaagtggccagggccctcatggaggctgggcagaagcccaagagcaggctctaaagctgccaaacccggcagccc

SEQ ID NO: 323860 - DNA, 120 bp, Artificial Sequence
  ENSG00000135926_20 (sequence is synthesized)
atccgtctctggcagggaggagggcaggctgcctggaccagtcagctgctcctttccatccctccctccagtacacatactctcctcttgctgtaaccccagtagctcaggcctcctctg

SEQ ID NO: 323861 - DNA, 120 bp, Artificial Sequence
  ENSG00000135926_21 (sequence is synthesized)
cagattccggagccttaacccttcaaatacccccaggagagccccagccggggcctcagtaggcagacagcaggattaccacactgagagggctccaggggaggaggtgcttccgcctct

SEQ ID NO: 323862 - DNA, 120 bp, Artificial Sequence
  ENSG00000135926_22 (sequence is synthesized)
gcatctgaaaaccttgacacccagcaagtcctgctgtctgagctcacccacttgtgccgctgctgtggtagaaagcaggggctctggttccttcctaatgggggactggggccctgagag

SEQ ID NO: 323863 - DNA, 120 bp, Artificial Sequence
  ENSG00000135926_23 (sequence is synthesized)
aggagcaaacttagatctataatgggcaaggatagggcacagtctgaatgccttgataacaggcattgtgaggcaaggaagaatgttctaatcgagctgtctgcagacaaggggcttgct

SEQ ID NO: 323864 - DNA, 120 bp, Artificial Sequence
  ENSG00000135926_24 (sequence is synthesized)
catgggagcggggctgaggaagaagtgcacattgcctctgagccaggcatctcactggggtcgcctctgggccaggctgcagctagggagggttcttgagtgggaggaaagtactggggg

SEQ ID NO: 323865 - DNA, 120 bp, Artificial Sequence
  ENSG00000135926_25 (sequence is synthesized)
tgccagggacccaggtgagtcccagagacttaacacagtgagaggggtgacagggattgggatgggggccgagtattttggaaagaaggattcctttatagcagctgaatggaaacttac

SEQ ID NO: 323866 - DNA, 80 bp, Artificial Sequence
  ENSG00000135926_26 (sequence is synthesized)
tagccctgcccggccccggaggacttgcaacactccgaggccaggaacgctccgtctggaacggcgcaggctggagtacg

SEQ ID NO: 323867 - DNA, 120 bp, Artificial Sequence
  ENSG00000135926_27 (sequence is synthesized)
gtggcaggagggtgtggagatgctgtgagggagactgctcccagggaagggatggggacccatttcagaaggatgtcctggctgtctcctccaccttatctgggccgcctgttctgatct

SEQ ID NO: 323868 - DNA, 120 bp, Artificial Sequence
  ENSG00000135926_28 (sequence is synthesized)
tttctccactgtggctcccataaacaagtccctactcctttcccccacgtgggctgatttagggataaaaggaggccaggggaggtcatttgcctggattcctgcagctagttcatgaac

SEQ ID NO: 323869 - DNA, 120 bp, Artificial Sequence
  ENSG00000135926_29 (sequence is synthesized)
gggacccaggtctgtctcattggcccatgttgtccctgcgtaccacacctgaacaggtgccaaaggccatgccaacctccctccttggagtcaaggcttaatcctccaggcacaggagcc

SEQ ID NO: 323870 - DNA, 120 bp, Artificial Sequence
  ENSG00000135926_30 (sequence is synthesized)
aagcgcttccttctgctgtaggagcctctgacgcctgaggggccccaagtcatttaatcaaggcttctctttcccttcagacgccgtttcccatggaacatcattctgctgacccttttt

SEQ ID NO: 323871 - DNA, 120 bp, Artificial Sequence
  ENSG00000135926_31 (sequence is synthesized)
ccgccccacgaggccggcgcgacggggcggggcgcggagccccagccgagcctagccctgcccggccccggaggacttgcaacactccgaggccaggaacgctccgtctggaacggcgca

SEQ ID NO: 323872 - DNA, 120 bp, Artificial Sequence
  ENSG00000135926_32 (sequence is synthesized)
aagggaagttccaaacccatgacgaagaagagggctgttctggggtggagcaggaactttcttggctctggggtttccttgtctgtcaaatgaccaggtcccagcagctggggttccccc

SEQ ID NO: 323873 - DNA, 84 bp, Artificial Sequence
  ENSG00000135926_33 (sequence is synthesized)
gtgaagttagagtgcagtgagtcttcctgggtggctcaagcgtggattttaaaagtagttcccaaagaggcattcaggcattca

SEQ ID NO: 323874 - DNA, 120 bp, Artificial Sequence
  ENSG00000135926_34 (sequence is synthesized)
gattttaaaagtagttcccaaagaggcattcaggcattcaggcattcagggaatgtttgcagccctgcagcatctctgaaccccagaggggtgtcagccagctctcacctggacatgtgc

SEQ ID NO: 323875 - DNA, 120 bp, Artificial Sequence
  ENSG00000135926_35 (sequence is synthesized)
gctggtgcggatctgcgcatgggtcctgcacagtcacgcacaccctttgcacacctgcctctgtgaggctgatgcagatccctgtcttcacctctatccctgctgctgcacaaactgcgc

SEQ ID NO: 323876 - DNA, 120 bp, Artificial Sequence
  ENSG00000135926_36 (sequence is synthesized)
tctgccgccctccttttctcctaccctctgtccccatcccctgttctgccctggctggctgccccagtggatgcccatacctgctcctgcctggcttccccactacatcgtgacccccca

SEQ ID NO: 323877 - DNA, 120 bp, Artificial Sequence
  ENSG00000135926_37 (sequence is synthesized)
gtgaacccccagtggcgtgggctgggcacacaggagccctccacagatgcacgtgaggaacgtttcccacctaagccccctcgtgacaggccggctctgggtcactctgagggtgtctag

SEQ ID NO: 323878 - DNA, 120 bp, Artificial Sequence
  ENSG00000135926_38 (sequence is synthesized)
aagaccccagcttgggagaagagttcctgttataacacttgtcttttggctggagatccctgagactttgagattgtcagggaggctttgggattgacgccacatgtctcaggtccccag

SEQ ID NO: 323879 - DNA, 120 bp, Artificial Sequence
  ENSG00000135926_39 (sequence is synthesized)
tagccctgcccggccccggaggacttgcaacactccgaggccaggaacgctccgtctggaacggcgcagaggtgcaccctgaggaggtgctgggacacgtcatggtgacatcacggttgg

SEQ ID NO: 323880 - DNA, 71 bp, Artificial Sequence
  ENSG00000135926_40 (sequence is synthesized)
aggaggtgctgggacacgtcatggtgacatcacggttggggtttctgcccacagagcctttccggccagtg

SEQ ID NO: 323881 - DNA, 120 bp, Artificial Sequence
  ENSG00000135929_0 (sequence is synthesized)
actcgacccaaaggtgcaggcgcgcgagcacaacccatggctgcgctgggctgcgcgaggctgaggtgggcgctgcgaggggccggccgtggcctctgcccccacggggccagagccaag

SEQ ID NO: 323882 - DNA, 120 bp, Artificial Sequence
  ENSG00000135929_1 (sequence is synthesized)
gccgcgatccctgccgccctcccctcggacaaggccaccggagctcccggagccgggcctggtgtccggcggcggcaacggagcttagaggagattccacgtctaggacagctgcgcttc

SEQ ID NO: 323883 - DNA, 120 bp, Artificial Sequence
  ENSG00000135929_2 (sequence is synthesized)
ttctttcagctgttcgttcaaggctatgccctgcaactgcaccagttacaggtgctttacaaggccaagtacggtccaatgtggatgtcctacttagggcctcagatgcacgtgaacctg

SEQ ID NO: 323884 - DNA, 120 bp, Artificial Sequence
  ENSG00000135929_3 (sequence is synthesized)
gccagtgccccgctcttggagcaagtgatgcggcaagagggcaagtacccagtacggaacgacatggagctatggaaggagcaccgggaccagcacgacctgacctatgggccgttcacc

SEQ ID NO: 323885 - DNA, 120 bp, Artificial Sequence
  ENSG00000135929_4 (sequence is synthesized)
acggaaggacaccactggtaccagctgcgccaggctctgaaccagcggttgctgaagccagcggaagcagcgctctatacggatgctttcaatgaggtgattgatgactttatgactcga

SEQ ID NO: 323886 - DNA, 120 bp, Artificial Sequence
  ENSG00000135929_5 (sequence is synthesized)
ctggaccagctgcgggcagagagtgcttcggggaaccaggtgtcggacatggctcaactcttctactactttgccttggaagctatttgctacatcctgttcgagaaacgcattggctgc

SEQ ID NO: 323887 - DNA, 120 bp, Artificial Sequence
  ENSG00000135929_6 (sequence is synthesized)
ctgcagcgatccatccccgaggacaccgtgaccttcgtcagatccatcgggttaatgttccagaactcactctatgccaccttcctccccaagtggactcgccccgtgctgcctttctgg

SEQ ID NO: 323888 - DNA, 120 bp, Artificial Sequence
  ENSG00000135929_7 (sequence is synthesized)
agggccagatggcatccaggtgtctggctacctgcacttcttactggccagtggacagctcagtcctcgggaggccatgggcagcctgcctgagctgctcatggctggagtggacacgac

SEQ ID NO: 323889 - DNA, 120 bp, Artificial Sequence
  ENSG00000135929_8 (sequence is synthesized)
atccaacacgctgacatgggccctgtaccacctctcaaaggaccctgagatccaggaggccttgcacgaggaagtggtgggtgtggtgccagccgggcaagtgccccagcacaaggactt

SEQ ID NO: 323890 - DNA, 120 bp, Artificial Sequence
  ENSG00000135929_9 (sequence is synthesized)
tgcccacatgccgttgctcaaagctgtgcttaaggagactctgcgtctctaccctgtggtccccacaaactcccggatcatagaaaaggaaattgaagttgatggcttcctcttccccaa

SEQ ID NO: 323891 - DNA, 120 bp, Artificial Sequence
  ENSG00000135929_10 (sequence is synthesized)
gaacacccagtttgtgttctgccactatgtggtgtcccgggaccccactgccttctctgagcctgaaagcttccagccccaccgctggctgagaaacagccagcctgctacccccaggat

SEQ ID NO: 323892 - DNA, 120 bp, Artificial Sequence
  ENSG00000135929_11 (sequence is synthesized)
ccagcacccatttggctctgtgccctttggctatggggtccgggcctgcctgggccgcaggattgcagagctggagatgcagctactcctcgcaaggctgatccagaagtacaaggtggt

SEQ ID NO: 323893 - DNA, 120 bp, Artificial Sequence
  ENSG00000135929_12 (sequence is synthesized)
cctggccccggagacgggggagttgaagagtgtggcccgcattgtcctggttcccaataagaaagtgggcctgcagttcctgcagagacagtgctgagctgagtctccgccttgctgggg

SEQ ID NO: 323894 - DNA, 120 bp, Artificial Sequence
  ENSG00000135929_13 (sequence is synthesized)
cttgtcctagaggctccagctctggcacagtggttcctggctgctgccatgtctcagatgaggagggagagaaggaggccgccagactcgagaggtgggaggaactccttgcacacaccc

SEQ ID NO: 323895 - DNA, 120 bp, Artificial Sequence
  ENSG00000135929_14 (sequence is synthesized)
tgagcttttgccacttctatcatttttgagcaactccctctcagctaaaaggccacccctttatcgcattgctgtccttgggtagaatataaaataaagggacttttatttcttattgga

SEQ ID NO: 323896 - DNA, 120 bp, Artificial Sequence
  ENSG00000135929_15 (sequence is synthesized)
catgaaggaagaaggcatggcttagctaaaaggagaaatgtcccagaaacctccatactgacagccaggaagtagtctcagaggctttggattccaggaaagaagctggtgctttacaag

SEQ ID NO: 323897 - DNA, 120 bp, Artificial Sequence
  ENSG00000135929_16 (sequence is synthesized)
gggagaagccgagggcagcttagccacggccggttcccgttccctccaggacgcgagggtcgccttgggtggggaaccgcgaccgggcgaggacctatcccggtgtggggcttcccgatt

SEQ ID NO: 323898 - DNA, 120 bp, Artificial Sequence
  ENSG00000135929_17 (sequence is synthesized)
tcgaaagaatctcgctgcacccccgcccagagttcagaccaagcgaaaagttatttgagaggcctcgggggcgcggggtgaggagtcgtggcggaggccttggtcggggcgccgtggata

SEQ ID NO: 323899 - DNA, 120 bp, Artificial Sequence
  ENSG00000135929_18 (sequence is synthesized)
tccccgagtcaccgcgtccctctcctgcagctcccgcgtcgctgggaggagcgagggagcgagcgggaaggggtctagctggcctttgctcggccctccccagcgcccggctttgaaccc

SEQ ID NO: 323900 - DNA, 120 bp, Artificial Sequence
  ENSG00000135929_19 (sequence is synthesized)
ggagactctgcggtaggacagaatgctgttctggggggcacaggatctctttgtggggagggaatcagaggaggaaatctgaagtgaagacaggtgggctggggctagtgacaaggatga

SEQ ID NO: 323901 - DNA, 120 bp, Artificial Sequence
  ENSG00000135929_20 (sequence is synthesized)
gatgggagaggtaggggagaaggagtggggcactttgtacccccatgaatccagagcagactccagacattcttttccctgcagtctctaccctgtggtccccacaaactcccggatcat

SEQ ID NO: 323902 - DNA, 120 bp, Artificial Sequence
  ENSG00000135929_21 (sequence is synthesized)
agaaaaggaaattgaagttgatggcttcctcttccccaagaacgtgagtggggctagagagcccgattgcccaggagtgccctatgcccccgaagagaggcattcatgctgcccaatctt

SEQ ID NO: 323903 - DNA, 120 bp, Artificial Sequence
  ENSG00000135929_22 (sequence is synthesized)
aggggctggggaagggaatgggtcagggagaggttgtgctccctctcctcaagggctcctggattccatatgtcctggttctgcctcctgtgatggcctctgtgcactactcagctattt

SEQ ID NO: 323904 - DNA, 120 bp, Artificial Sequence
  ENSG00000135929_23 (sequence is synthesized)
atcagcggtctctcccaggccttttccctcatgctaccagttgtcggagtggctcttggtccttggagatcatgacttttggctttgtcctttcctcttctctgttgctttcacagggaa

SEQ ID NO: 323905 - DNA, 120 bp, Artificial Sequence
  ENSG00000135930_0 (sequence is synthesized)
actccctgaggcagtggcgacagcggcggcgagaggatgaacaacaagttcgacgctttgaaagatgatgacagtggggaccatgatcagaatgaagaaaacagcacacagaaagatggt

SEQ ID NO: 323906 - DNA, 120 bp, Artificial Sequence
  ENSG00000135930_1 (sequence is synthesized)
gagaaggaaaaaacggaacgagacaagaatcagagcagtagcaagagaaaggctgttgtccctggaccggcagagcatcccctgcagtacaactacactttttggtactccaggagaacc

SEQ ID NO: 323907 - DNA, 120 bp, Artificial Sequence
  ENSG00000135930_2 (sequence is synthesized)
cccggccgtcccacgagctcacagagctatgaacagaatatcaaacagattggcacctttgcctctgtggagcagttctggaggttttatagccacatggtacgtcctggggacctgaca

SEQ ID NO: 323908 - DNA, 120 bp, Artificial Sequence
  ENSG00000135930_3 (sequence is synthesized)
ggccacagtgacttccatctcttcaaagaaggaattaaacccatgtgggaggatgatgcaaataaaaatggtggcaagtggattattcggctgcggaagggcttggcctcccgttgctgg

SEQ ID NO: 323909 - DNA, 120 bp, Artificial Sequence
  ENSG00000135930_4 (sequence is synthesized)
tcattttggccatgctgggggaacagttcatggttggggaggagatctgtggggctgtggtgtctgtccgctttcaggaagacattatttcaatatggaataagactgccagtgaccaag

SEQ ID NO: 323910 - DNA, 120 bp, Artificial Sequence
  ENSG00000135930_5 (sequence is synthesized)
caaccacagcccgaatccgggacacacttcggcgagtgcttaacctacctcccaacaccattatggaatacaaaactcacaccgacagcatcaaaatgccaggcaggctgggcccccaaa

SEQ ID NO: 323911 - DNA, 120 bp, Artificial Sequence
  ENSG00000135930_6 (sequence is synthesized)
ggctcctttttcaaaacctctggaagccgcggttgaatgtgccatgaccctctccctctctggatggcaccatcattgaagctggcgtcatcggagtctcttgttctgttggcgtgctac

SEQ ID NO: 323912 - DNA, 120 bp, Artificial Sequence
  ENSG00000135930_7 (sequence is synthesized)
ctggaagatccttctgtcctggacaagaggaattggaagagcattttatgttttaagaacaggctgacacgcagcagctacaacaacagctgagatcacttaataaatggtgctaaacta

SEQ ID NO: 323913 - DNA, 120 bp, Artificial Sequence
  ENSG00000135930_8 (sequence is synthesized)
aggagacttacttgtggagaagggacagaccaggccttccctctagggcttctggctacttgctgcagttctttgtcagcgaggctccctgccacctatactaccaggtgctttgtagca

SEQ ID NO: 323914 - DNA, 120 bp, Artificial Sequence
  ENSG00000135930_9 (sequence is synthesized)
gagagagcccatctgcagaaacccagttgtactacctgggcttgcttaatttctacaggctgtcttgtctttcatatgctaaccactatcttaaaatgaaagacaagtgcttttcttttt

SEQ ID NO: 323915 - DNA, 120 bp, Artificial Sequence
  ENSG00000135930_10 (sequence is synthesized)
cttgctgttttttaagataatttcaccctgcccaccctcaccccacttctgcatgtctttttaacttgttagcttcagtctattttctttgtcctgggatactgactacttatcaggaat

SEQ ID NO: 323916 - DNA, 120 bp, Artificial Sequence
  ENSG00000135930_11 (sequence is synthesized)
gactccatttccttgtgtatagagctgactcttagaagaagggggatagtgtgtgtgtgagagagcagaatcaaagggaagcatgaaggccacagggaaaataagcttggcaatctccct

SEQ ID NO: 323917 - DNA, 120 bp, Artificial Sequence
  ENSG00000135930_12 (sequence is synthesized)
aggactcagggaaatagagctctctgtccacagtgagaatcactgttaggcttgctcctcagtgattgagtgtcagaagtaagctcaggctattgtgaaaaagtgtggggagtggctgtc

SEQ ID NO: 323918 - DNA, 120 bp, Artificial Sequence
  ENSG00000135930_13 (sequence is synthesized)
agattgtctcaaagctggagggagagctagccagctaagagttaggactcttaggtttagttctctcatatggccccataccaatatgtgcctttgacaagtgtctttgcaactttgctt

SEQ ID NO: 323919 - DNA, 120 bp, Artificial Sequence
  ENSG00000135930_14 (sequence is synthesized)
agggtaggctgctctgctcctcggaaaggaaagtccagtgggacctcgctgctctgctcccagggcctgggaggagtttcatggcctggtgaacagcagcggccgctgatcggacgctcc

SEQ ID NO: 323920 - DNA, 120 bp, Artificial Sequence
  ENSG00000135930_15 (sequence is synthesized)
ccctctgtctctcacactcaggggacaattcaagctttcgaaatacaaaaatcacattgtgagagtacacaagctggcaataatccttttctgtatgtgtgtgtttgtccgaaatggatg

SEQ ID NO: 323921 - DNA, 120 bp, Artificial Sequence
  ENSG00000135930_16 (sequence is synthesized)
ccgctagacaccctccagcatcgctgactttataaagcggaaaaacggaaaacgtgactttgtaatagacaaacattgttttttaatggggttccatgggggggcgttcagcctttctgt

SEQ ID NO: 323922 - DNA, 120 bp, Artificial Sequence
  ENSG00000135930_17 (sequence is synthesized)
ttgctgtgtgctgtccagatgcctcttgggcgtcctgttgttctcttcccgtgttgtacgaagggtaccgtggccacgtgtacatgccagagctgttgatgagagttaccagtattatga

SEQ ID NO: 323923 - DNA, 120 bp, Artificial Sequence
  ENSG00000135930_18 (sequence is synthesized)
tctcccctcctccaagcccaccactttctgaagctgtgttactgatgtgatgactgtccaggattttgtatcatcccctgccttatgccctccggtctcctctcctgtgggactctctcc

SEQ ID NO: 323924 - DNA, 120 bp, Artificial Sequence
  ENSG00000135930_19 (sequence is synthesized)
ttcttaggcacagctgcacttagaattgtaatccagtggctctcactggtttcactgaggcagcttagagggaatgccttagtaaactgaactggagcagaatctagtttgattaggagc

SEQ ID NO: 323925 - DNA, 120 bp, Artificial Sequence
  ENSG00000135930_20 (sequence is synthesized)
tagattataatctaggttccaagtacagaatttggagctaaggactgtgactgaaatcattttcccatatgagcagaccctgtgtgtcaggcctgtttcccatatgagcagagcctgtgt

SEQ ID NO: 323926 - DNA, 120 bp, Artificial Sequence
  ENSG00000135930_21 (sequence is synthesized)
agctggttattgccaggcctattaacacttaatatgcaaattctatcatcctgaaactggggcatctgaggaaaaggtgaccttgctggatggctttatttgcatggctctgcctgtctg

SEQ ID NO: 323927 - DNA, 120 bp, Artificial Sequence
  ENSG00000135930_22 (sequence is synthesized)
cagtggttgagtcctcatcacctggtatgtgtatgagcaaatgtgtgctgattgtgatgcccaggcagaaacctcttgaagactgctgcaggcatgctttaaaaatgaccagtcactcat

SEQ ID NO: 323928 - DNA, 120 bp, Artificial Sequence
  ENSG00000135930_23 (sequence is synthesized)
cagagaagctgggtgatctgactccagaaggactgaagtcagagaagtcacaagagcacctaggattcaaataaatagcgtcagagtcctatagcaacctccaagtagcaccgtcttact

SEQ ID NO: 323929 - DNA, 120 bp, Artificial Sequence
  ENSG00000135930_24 (sequence is synthesized)
tggctcttgtgagcaaagactgcagtaccttaaattaaggcctctctttaaaacatatgtggaagactaggggatccttggccacctggtctcagagaaatcatatgagagtaacaggca

SEQ ID NO: 323930 - DNA, 120 bp, Artificial Sequence
  ENSG00000135930_25 (sequence is synthesized)
tttccttattgtatttgtactacactcttcctacttttccattcctgaacaccctctaattaccactgttttggggatgctttttttctgaaagaacggggagtacaggggccaaaaggg

SEQ ID NO: 323931 - DNA, 120 bp, Artificial Sequence
  ENSG00000135930_26 (sequence is synthesized)
aggtgcttctattacagggcaagttagatcagataagaagatctagcagtgatttaaactccaggaatatgaagagtgcattctggtgtccagacagttgtgaagggctcggcaaatata

SEQ ID NO: 323932 - DNA, 120 bp, Artificial Sequence
  ENSG00000135930_27 (sequence is synthesized)
agagcaccattggctacatggagagcaaaggctgtctttgaagaccccagggaggtcttcacttttgcctaaattcagatttgccgtgaaaattccaaagagagcagatatttggatttg

SEQ ID NO: 323933 - DNA, 120 bp, Artificial Sequence
  ENSG00000135930_28 (sequence is synthesized)
ccctcctttgggcatctacctgactgttgtgtgtgtgggaaagtcagtgtgtatgtgtagagtgtgcttaggagtgagtgagtggtcaggcctcctggctaggtgtgttgtccatagttt

SEQ ID NO: 323934 - DNA, 120 bp, Artificial Sequence
  ENSG00000135930_29 (sequence is synthesized)
tgttgttgttgttgttgttgttcagagttttgaatcttacgttttctagagctgctcatgttttcccttcctttttgtcgttgtagtatttgacagttgtcttttccatcaaaaacatac

SEQ ID NO: 323935 - DNA, 120 bp, Artificial Sequence
  ENSG00000135930_30 (sequence is synthesized)
tggccctaggctggttagagcaaggggttatgcctgttaggcagcatcttacgcccagtgttctcccagatattctgcctaacaggtttaagtaggagattaaatagtcagtttatctaa

SEQ ID NO: 323936 - DNA, 120 bp, Artificial Sequence
  ENSG00000135930_31 (sequence is synthesized)
accctctatttttccaaactagcttgagaggtcttttcatctatttttactccatgggcctctgatatgctgagatgtggcacggttatgattatggtatcaccgttacagaggcaaagg

SEQ ID NO: 323937 - DNA, 120 bp, Artificial Sequence
  ENSG00000135930_32 (sequence is synthesized)
gataaaggtctaccagggccaacgtaaccagaatgtgaggagagtgaagagtcggtctccgctttgcacagtaccagaatgtgaggttgccactggagagtggagagtcggtctccactt

SEQ ID NO: 323938 - DNA, 120 bp, Artificial Sequence
  ENSG00000135930_33 (sequence is synthesized)
tgcacagttggagctgttctcctctaactcctttgctgggttttctgtttgaaattggcccctactcctctccagccctttactgggttttctgtttgaaattggcccctactcctctcc

SEQ ID NO: 323939 - DNA, 120 bp, Artificial Sequence
  ENSG00000135930_34 (sequence is synthesized)
gtgtgtgtgtgtgtgtgtgtgttccctatgatactggcagtggcaataattttccacccagagagaagcttgtggtccacaatgctcgaagaatgaatttccaagtatttgccagtggaa

SEQ ID NO: 323940 - DNA, 120 bp, Artificial Sequence
  ENSG00000135930_35 (sequence is synthesized)
aagaatgaatttccaagtatttgccagtggaaacggagcagaggctatgacaagagtgatttagtgttgcactttcagagcaattatctactgcagtaataaattgaaaatatcagcaag

SEQ ID NO: 323941 - DNA, 120 bp, Artificial Sequence
  ENSG00000135930_36 (sequence is synthesized)
gatatgatgtttatttactttcctagtaacctatttaagattctggttttcttaattgactgacctgagtctccggagtcagatttgttcattcttaggtttctcactagatatccatgg

SEQ ID NO: 323942 - DNA, 90 bp, Artificial Sequence
  ENSG00000135930_37 (sequence is synthesized)
atatccatggttagcatgtaggtatcaacaaatatgagaattgtagagttgatcagaagggcataatacaaaagaacagatttggggaga

SEQ ID NO: 323943 - DNA, 120 bp, Artificial Sequence
  ENSG00000135930_38 (sequence is synthesized)
ctggtctggaactcctgaccttaggtaatccacccgccttggcctcccaaaaggctggattacaggagtgagccgctgcacctggccctgtttttttttttgtttgttttgtttgcttgt

SEQ ID NO: 323944 - DNA, 120 bp, Artificial Sequence
  ENSG00000135930_39 (sequence is synthesized)
tgtttttttttttgtttgttttgtttgcttgtttgtttttttttttaagtatatatttatggagtccttactaagttcaaagtgtcatggatacagaagtttataatacatggtgtctat

SEQ ID NO: 323945 - DNA, 120 bp, Artificial Sequence
  ENSG00000135930_40 (sequence is synthesized)
cttcatgaagtttgacagtaaagtgaaaaattttgaaagttttgtatttaagaacctcccattagggttttggctgtattaatgattatgcataaaatatctttttcctgtgttcagaaa

SEQ ID NO: 323946 - DNA, 120 bp, Artificial Sequence
  ENSG00000135930_41 (sequence is synthesized)
gctggggctggggcggcgcaaaccctgcggcaccggcttccctgctgggatccggctgcggccggacctggcctggactggcggggaggagggggctggggagcaatggataccggagtc

SEQ ID NO: 323947 - DNA, 120 bp, Artificial Sequence
  ENSG00000135930_42 (sequence is synthesized)
ccggagaccccagggccgtccgaaccgagggcgaagagctgggcccgggggaggggtggctgtgccgcccggtagggggagattttcggacgccccgccctggtggatgcggattgcctg

SEQ ID NO: 323948 - DNA, 120 bp, Artificial Sequence
  ENSG00000135930_43 (sequence is synthesized)
cgacgtggaggggtggggacctcggcggtttgggtgtttccgcagtctggcagcgctgcctctgaatccagctttccccacacactccctctcccctctgagcctcagttttctcatctg

SEQ ID NO: 323949 - DNA, 120 bp, Artificial Sequence
  ENSG00000135930_44 (sequence is synthesized)
acattgaaggtctgagtgtagaagggttagaaggtcggaaatatgaaaacagagaaagtgtatactttcctccttgcatctttagacatcataatgctgttggaaactggcctttaccct

SEQ ID NO: 323950 - DNA, 120 bp, Artificial Sequence
  ENSG00000135930_45 (sequence is synthesized)
cagtgaggcctgatgaagaaaaattgtttctaccacctgtgcacacataggcaaggcagaaagtacagggagtgccactgtaaattggaagtgtttttggtgacagttgagcatcagctc

SEQ ID NO: 323951 - DNA, 120 bp, Artificial Sequence
  ENSG00000135930_46 (sequence is synthesized)
ggaagtttgaaagatgatgacagtggggaccatgatcagaatgaagaaaacagcacacagaaagatggtgagaaggaaaaaacggaacgagacaagaatcagagcagtagcaagagaaag

SEQ ID NO: 323952 - DNA, 120 bp, Artificial Sequence
  ENSG00000135930_47 (sequence is synthesized)
gtaagaagatgaggcacaaacaggttaagtaacttgacagtgatgaatctcatagaggaggcagtgcttggactgggcatatgctgagataagatacaaagatgaatacctattatatga

SEQ ID NO: 323953 - DNA, 120 bp, Artificial Sequence
  ENSG00000135931_0 (sequence is synthesized)
ttggctgcgccgcccccacgtgacgccggggtggcggcggcggttgcccgggtgacggctgcggaggtggcggccgggctgggatagcgcgagtgtccgcggccgagcagcagagatttt

SEQ ID NO: 323954 - DNA, 120 bp, Artificial Sequence
  ENSG00000135931_1 (sequence is synthesized)
gggatagcgcgagtgtccgcggccgagcagcagagatttttgctgtgagaattaattaccagtaacagttcaatatgggggacattctggctcatgaatctgaattacttggactagtga

SEQ ID NO: 323955 - DNA, 120 bp, Artificial Sequence
  ENSG00000135931_2 (sequence is synthesized)
aagagtatttagattttgctgaatttgaagacaccttgaaaacattttcaaaagaatgcaaaataaaaggaaaaccattgtgtaaaacagtaggcggatctttcagagactccaaatcat

SEQ ID NO: 323956 - DNA, 120 bp, Artificial Sequence
  ENSG00000135931_3 (sequence is synthesized)
tgacaattcagaaggatcttgtcgctgcatttgacaacggagaccagaaggtgttcttcgatctgtgggaggagcacatttcaagttccatccgagatggggactcctttgcccagaagc

SEQ ID NO: 323957 - DNA, 120 bp, Artificial Sequence
  ENSG00000135931_4 (sequence is synthesized)
tggaattctatctccacatccattttgccatctatcttttgaagtactctgtggggagaccggacaaagaggagctggatgaaaagatttcctacttcaaaacctacctggagaccaaag

SEQ ID NO: 323958 - DNA, 120 bp, Artificial Sequence
  ENSG00000135931_5 (sequence is synthesized)
gggcagccttgagccagaccacagagtttcttcctttctatgcccttccttttgttcccaaccctatggtgcacccctcatttaaagaactcttccaggattcctggactccagagttaa

SEQ ID NO: 323959 - DNA, 120 bp, Artificial Sequence
  ENSG00000135931_6 (sequence is synthesized)
agttgaagttgataaagtttctagctttaatatctaaagccagcaacacgccaaagcttttaacaatatataaggagaatggacaaagtaacaaagaaatcttgcagcagctccaccagc

SEQ ID NO: 323960 - DNA, 120 bp, Artificial Sequence
  ENSG00000135931_7 (sequence is synthesized)
agctggttgaagctgaacgtaggtcagtgacatacctcaaacggtacaataagatccaggccgactaccacaatctcattggagtcacagcagagctggtggattctctagaggccacag

SEQ ID NO: 323961 - DNA, 120 bp, Artificial Sequence
  ENSG00000135931_8 (sequence is synthesized)
tcagcggcaagatgatcacccctgagtacctccagagcgtctgtgtccgcctgttcagtaaccagatgcggcagagcctggcgcatagtgtggacttcacgaggcctgggacggcatcca

SEQ ID NO: 323962 - DNA, 120 bp, Artificial Sequence
  ENSG00000135931_9 (sequence is synthesized)
gcacccgtgaaattgaaggatgtcccattactgccctccttggattatgagaaactgaagaaggatttgattttggggagtgaccgcttgaaagccttcttgttgcaggctctgcgctgg

SEQ ID NO: 323963 - DNA, 120 bp, Artificial Sequence
  ENSG00000135931_10 (sequence is synthesized)
cgcttgaccacatcccatcctggagagcagagggagaccgttctgcaagcctacatcagcaatgacctcttggactgttatagccacaaccagaggagtgtgcttcagttgctgcactcc

SEQ ID NO: 323964 - DNA, 120 bp, Artificial Sequence
  ENSG00000135931_11 (sequence is synthesized)
acgagcgacgtggtgcggcagtacatggccaggctcatcaatgcttttgcgtcactggcagaaggtcgcctctaccttgcccagaacacaaaggtgctgcagatgctggagggaaggctg

SEQ ID NO: 323965 - DNA, 120 bp, Artificial Sequence
  ENSG00000135931_12 (sequence is synthesized)
aaggaggaggacaaggatatcatcaccagggagaatgttcttggggccctgcagaagttcagtctcaggcgcccgctgcagacagcgatgattcaagacggcctcatcttctggctggtt

SEQ ID NO: 323966 - DNA, 120 bp, Artificial Sequence
  ENSG00000135931_13 (sequence is synthesized)
gatgttctgaaggaccctgactgcctgtctgactacacgctggagtactcggtggctttgctcatgaacctctgcctccgcagcacagggaagaacatgtgtgccaaggtggcaggcctc

SEQ ID NO: 323967 - DNA, 120 bp, Artificial Sequence
  ENSG00000135931_14 (sequence is synthesized)
gtgctcaaagtcctttcggatcttcttggccatgaaaaccatgagatacagccgtatgtgaatggagctctgtacagcatcctttctgttccatccattcgtgaggaagcaagagcaatg

SEQ ID NO: 323968 - DNA, 120 bp, Artificial Sequence
  ENSG00000135931_15 (sequence is synthesized)
ggaatggaagacatcctacgctgcttcatcaaagaaggcaatgctgaaatgatccgccagatagaattcatcatcaagcagctaaattccgaagagctaccagatggtgttcttgaatct

SEQ ID NO: 323969 - DNA, 120 bp, Artificial Sequence
  ENSG00000135931_16 (sequence is synthesized)
gatgatgatgaagatgaagatgatgaagaggaccatgacatcatggaagccgatctggacaaagacgaactgatccagccccagctcggagaactctcaggagagaagcttctgaccacg

SEQ ID NO: 323970 - DNA, 120 bp, Artificial Sequence
  ENSG00000135931_17 (sequence is synthesized)
gagtacctggggatcatgaccaacacggggaagacaaggcggaaggggctggctaatgtgcagtggagcggggatgagcccctgcaaaggcccgtcacccccggcggccacagaaacggg

SEQ ID NO: 323971 - DNA, 120 bp, Artificial Sequence
  ENSG00000135931_18 (sequence is synthesized)
tacccagtgtaagtcagggctaaaggaagcgggaattgactttcttaagctttgttttgattacagtgtaagatgtatgtatttttaaaattcaaaataaagcattcattttgaaaagca

SEQ ID NO: 323972 - DNA, 120 bp, Artificial Sequence
  ENSG00000135931_19 (sequence is synthesized)
aacggccacccgcaggccctgccagccgctcacgaggctgtctacagggagggcaagcccagcaccccggagtcctgcgtctcctcttcatcagccatcatcgccaagccaggagagtgg

SEQ ID NO: 323973 - DNA, 120 bp, Artificial Sequence
  ENSG00000135931_20 (sequence is synthesized)
ctcccaagaggacgccaggaagagcctcgcccagcccccacggggaccccccgccagccaagggaggcgccccaggacccaggcaatggagtgaccaccagggaatgtgcatcagccttc

SEQ ID NO: 323974 - DNA, 120 bp, Artificial Sequence
  ENSG00000135931_21 (sequence is synthesized)
acctgcaagccccgggccccctgcactccagagatgctggactggaacccacccaaggcaaaggcgtcagttctggcccctctgttctcttcgtgtggcccccagcaggccagccgcccc

SEQ ID NO: 323975 - DNA, 120 bp, Artificial Sequence
  ENSG00000135931_22 (sequence is synthesized)
ggctccacagcgtcctccacaaggggcctgccgagcagccagtctcacaggaagtaaggatgtccccgggtgtccccatcacgttgccggaggaccagccagcttcccgctctcagctgg

SEQ ID NO: 323976 - DNA, 120 bp, Artificial Sequence
  ENSG00000135931_23 (sequence is synthesized)
cagcagctgccggtgatggatgtgaagggacagttgtccacaagactctgggagctgaggggaggccggctctccaggcagcaccagagcaaggccatcgcagccccgccagccgggtca

SEQ ID NO: 323977 - DNA, 120 bp, Artificial Sequence
  ENSG00000135931_24 (sequence is synthesized)
ctttctcccagggcagagccaccaaggagggctggggagagcctggcattgccctcctggagaggggaatttcctgctcacccttcacacacagaggagaggggtggcttttgcccgcag

SEQ ID NO: 323978 - DNA, 120 bp, Artificial Sequence
  ENSG00000135931_25 (sequence is synthesized)
agccctcctcacttgggctgactaccaggacccagaaggaactcagggtgaagctcattttattctcaagcctgcgtctcagcagcaaagttggtgttttcttcctgtgttaaaatctga

SEQ ID NO: 323979 - DNA, 120 bp, Artificial Sequence
  ENSG00000135931_26 (sequence is synthesized)
ctgggtgacagagcgagactccgtccccaaaaaaaaaattctgagaatatggtgtgttccagcctcttcaaagctctgctcttctgcacacgttttttgaaggccttaaaaaggccacca

SEQ ID NO: 323980 - DNA, 120 bp, Artificial Sequence
  ENSG00000135931_27 (sequence is synthesized)
ttgaaggccttaaaaaggccaccagtgtgaccagggagcaccctctgcctccctccctgcactgggaccataaacataaacagctctaccagcaaagtgacccatcccgcgggggaggcc

SEQ ID NO: 323981 - DNA, 120 bp, Artificial Sequence
  ENSG00000135931_28 (sequence is synthesized)
tgcgcacgcccctcaccagggctgtcatcagaatccagtcttaggacagaggaaggatgtttgccttcaggaccagcaagtcacaggtgtcctggatgttacccaagctctaaaatcaaa

SEQ ID NO: 323982 - DNA, 74 bp, Artificial Sequence
  ENSG00000135931_29 (sequence is synthesized)
atgaagggaaatggaaagcagagaaaagtcgcgtgccctcccccaggcacctgatctgcccacagacccttcaa

SEQ ID NO: 323983 - DNA, 120 bp, Artificial Sequence
  ENSG00000135931_30 (sequence is synthesized)
gccctcccccaggcacctgatctgcccacagacccttcaatggggacatctctggtcccaatggtcgtaaataaaggctaagcgctggatttttccatggccccctgactcctcaggagc

SEQ ID NO: 323984 - DNA, 120 bp, Artificial Sequence
  ENSG00000135931_31 (sequence is synthesized)
gcaggcagaggaggtaaacaggaggccaggttacccatgagatgaccagaagctcatccagggccgggaccctggttcatctcgtgaattcttggcagcggctccaggctgggcacatta

SEQ ID NO: 323985 - DNA, 120 bp, Artificial Sequence
  ENSG00000135931_32 (sequence is synthesized)
gatgctgtcatgtgactggcctggtggccacctcttggttctctggaaatgtgtccactctgtgctcagggaagaaggctgccgtcctgacctgtcagccaccaggccctctctgaactc

SEQ ID NO: 323986 - DNA, 120 bp, Artificial Sequence
  ENSG00000135931_33 (sequence is synthesized)
ctcacttgacccggaggcattgggagcaaacacaaagctcgcccctggtgtcagtggtgcagacagaggaaaagcagagggtccgcaaaatgcaactcctccgtggtgagactttgaaaa

SEQ ID NO: 323987 - DNA, 120 bp, Artificial Sequence
  ENSG00000135931_34 (sequence is synthesized)
ggtgtagagtggttgcagacaaacagcaaaggagtggaatggaaaaatctctcttgctccccacaagaagtccactcccctacggattcctcagatgccactggctggcacagcctttcc

SEQ ID NO: 323988 - DNA, 120 bp, Artificial Sequence
  ENSG00000135931_35 (sequence is synthesized)
cgcccttggtgtgggagcagcagaagtccagcgggggtgggagaatcatcggggtcaggtcagtgtctccctcgtctgaagtcaaccactacttttccctcaagcctaccaaagagctaa

SEQ ID NO: 323989 - DNA, 120 bp, Artificial Sequence
  ENSG00000135931_36 (sequence is synthesized)
agtctgatctgtagatgtctgatggtttgaggagaagaaaagatagtcttttagagaagtggggagtatccaacttagggtcaaaatacactgagattaggccgggcacagtggctcaca

SEQ ID NO: 323990 - DNA, 75 bp, Artificial Sequence
  ENSG00000135931_37 (sequence is synthesized)
caaaaaggaggctgaggcacaagaatagcttgaaccgggagatggaagatgcagtgagccaagatcacgcccctg

SEQ ID NO: 323991 - DNA, 120 bp, Artificial Sequence
  ENSG00000135931_38 (sequence is synthesized)
ggcgacagagactccgtcaaaaaaaaaaaaaaaatacattgagattaccaggtggggtatgtgtggttcttccaggaaagtgctgaaaatatcacccaggcctctgcgccacgccctggg

SEQ ID NO: 323992 - DNA, 120 bp, Artificial Sequence
  ENSG00000135931_39 (sequence is synthesized)
agagtacactcctgggctcacgcctctgcattccaaggctgacagctagaaatatactttgtaaaataccaacaacttattcacaaatattccaactatctaccagctccaatgagcttg

SEQ ID NO: 323993 - DNA, 120 bp, Artificial Sequence
  ENSG00000135931_40 (sequence is synthesized)
ctgaggatgggtatgaccccagtctaaggggaaagaatctaaaacacaagtaaacctgtttaaaggccagatctccagatggagatccaagcagatggcgcctaaggtttgcccttgaaa

SEQ ID NO: 323994 - DNA, 120 bp, Artificial Sequence
  ENSG00000135931_41 (sequence is synthesized)
actaccaaggaagccacagagagggatctttggaccttctggaaaatggtaaggccccaggtagattatggctcctctgccctggaggctgagccgcccctctggttacctcacatcttc

SEQ ID NO: 323995 - DNA, 120 bp, Artificial Sequence
  ENSG00000135931_42 (sequence is synthesized)
tggtttcttctgagtgggacttgatctcatttctgcattcacagcaaggtggaactgtctggcaagagcttaaattaggacctgtggtggggactttaataggcaggtggaggtttgaga

SEQ ID NO: 323996 - DNA, 120 bp, Artificial Sequence
  ENSG00000135931_43 (sequence is synthesized)
ggggactttaataggcaggtggaggtttgagatccagtgagatgccagagattagtcaataggtgaggaaagatttggcccaaatcaaaagagctaaaaaaaaaataataaaataaaaat

SEQ ID NO: 323997 - DNA, 120 bp, Artificial Sequence
  ENSG00000135931_44 (sequence is synthesized)
gaaaaaaaaagaaaagaaagaaaaggtaaagaaaagaaatccatgataaaatatcaaactttttaataaaaacaagtctggccctgtacttggatgaccccacctggcttgtctaaccct

SEQ ID NO: 323998 - DNA, 120 bp, Artificial Sequence
  ENSG00000135931_45 (sequence is synthesized)
aatcccagccccagttttaataaaactgtatttacaaaataggcagctgggacgtggaccagagataccaatttgattttttttaaatattacattaaaatattacatcatgtgtcttca

SEQ ID NO: 323999 - DNA, 120 bp, Artificial Sequence
  ENSG00000135931_46 (sequence is synthesized)
cccaggtcaaacagaagcgggtgtctgctcgcaggctggatggaggggccgccagaagggcctgaagatgggatgggcccaagggcccccactctctccctggggcctctctctcaccct

SEQ ID NO: 324000 - DNA, 120 bp, Artificial Sequence
  ENSG00000135931_47 (sequence is synthesized)
tttacagtgattgaacattcagatggaagaccagacacacaagtacctcgggacatccatcaccagcatcaaatcaaagtgaaacccaggaggagagcctccatcctgtcttcatcctca

SEQ ID NO: 324001 - DNA, 120 bp, Artificial Sequence
  ENSG00000135931_48 (sequence is synthesized)
agtggaaattaatagcagagtacaaattgttgctagtgtatcagttcttaagatgtgtgaaatggcattgccaccatctttatttagattattggtttccttgttctatttcagtaaact

SEQ ID NO: 324002 - DNA, 120 bp, Artificial Sequence
  ENSG00000135931_49 (sequence is synthesized)
tgaaaacatctctgtgggttttcacacgtccaagtccaatcacagtcttctagcacaatttttccagtaaagttttaaggtcttcaagtattaaaattcaagtatattttagcgacctaa

SEQ ID NO: 324003 - DNA, 120 bp, Artificial Sequence
  ENSG00000135931_50 (sequence is synthesized)
ccccacaggtggggaaggactattctggcaaagcctaaaggaaaattccagctggtgacattgacaacgccgggtgagctgccaacagcaacagcagagagatttgtcccctggcttggg

SEQ ID NO: 324004 - DNA, 120 bp, Artificial Sequence
  ENSG00000135931_51 (sequence is synthesized)
cctggaccacaatgccagccctcagggaggggaaccagcaccagagagacaacaggggcaccagccaggtcactgggcaggagcaaggcagagcccccgggaaaggaatgatactggcca

SEQ ID NO: 324005 - DNA, 120 bp, Artificial Sequence
  ENSG00000135931_52 (sequence is synthesized)
ttctagccccacgtgtgttagatatcggagtgcgggcacctcatggagtgtggaccaactcagggaacaggatgggagatagtcatcccagaaaggagctgaggtctacaaggcacttca

SEQ ID NO: 324006 - DNA, 120 bp, Artificial Sequence
  ENSG00000135931_53 (sequence is synthesized)
cttctcaggacaggattattctgggtagtgggatgagtctgagccagcaggccttgaggttatggggtcaggagaaggggagctgggcaggaggaggcagagaaagagaagcgtggctgg

SEQ ID NO: 324007 - DNA, 120 bp, Artificial Sequence
  ENSG00000135931_54 (sequence is synthesized)
gctgtctgtggccttacaaaatagccaagagtcttaaaaaaggcatttctgtattcgaaaatgagcggtttataactgatgagtacagcagcacttcctgaaggtggaatggtgtatgct

SEQ ID NO: 324008 - DNA, 120 bp, Artificial Sequence
  ENSG00000135931_55 (sequence is synthesized)
gttggtggatagggaagttagtcattaaacttcagccagaaagcagagtggcatcacatcttcatgcctgcacagtagctttctagactaaatggcattccacaacagtgctgcgacccg

SEQ ID NO: 324009 - DNA, 120 bp, Artificial Sequence
  ENSG00000135931_56 (sequence is synthesized)
tggggcatgcaagcctcagtgagcagggggacactttggtgtcccactggcctcggtccagtgaagtcagtggagtccttccctttagaacgagcgttgggttgagaacatgggtttcta

SEQ ID NO: 324010 - DNA, 120 bp, Artificial Sequence
  ENSG00000135931_57 (sequence is synthesized)
catcttccctcctgggaatggtttggtgtttgatcaaatgtgggtgcaccctgcctgccactttacaagctgggtgctctcctcaagtatggctttagttccttcttttctcctacttcc

SEQ ID NO: 324011 - DNA, 120 bp, Artificial Sequence
  ENSG00000135931_58 (sequence is synthesized)
cttcctttcttctttcaggctttctttaccttcatgtcatttgttcaagaaacaagtgataataagaaagatgtagtagggatagagggaggagtaagtcagctgctctgtccccaggga

SEQ ID NO: 324012 - DNA, 120 bp, Artificial Sequence
  ENSG00000135931_59 (sequence is synthesized)
ctcacagttcagtgcagtgggtgagagacgagtcagtaagcattcattcattagtaagcagcaatcttccagaagtggcgtgaactgtcaggagttctagataaaacgctgagtgtgttc

SEQ ID NO: 324013 - DNA, 120 bp, Artificial Sequence
  ENSG00000135931_60 (sequence is synthesized)
ggggaggaagagatggctgctgagcaaggggatcagggaagacttcgtggaggagaaagtaccaacacctctgcagtgcctgcttcttacctggccctaagccgggcgcttcccttgtgg

SEQ ID NO: 324014 - DNA, 120 bp, Artificial Sequence
  ENSG00000135931_61 (sequence is synthesized)
tgtattgtgaggtcctaccgacaaccctgagaagtggctggtacaacccccattctacagaggaggaagccggggctctttctttctgtaactcctttgtgctaccaacttactgctctt

SEQ ID NO: 324015 - DNA, 120 bp, Artificial Sequence
  ENSG00000135931_62 (sequence is synthesized)
ttgtaaattcttaaaaagacctagcgatgaaccacagagccttcaggaaccctacctgccatgaccaccacccataccgcccgtggaaaaatcatggagtttagagatagactcggcttg

SEQ ID NO: 324016 - DNA, 120 bp, Artificial Sequence
  ENSG00000135931_63 (sequence is synthesized)
aatctcagctgcctgccacttactggaagtgagaccaagaagtctctctttcctctctgtgcctctctgtaaaatgggggataatagtcaacaacatatttgtaaggattaagtgaaata

SEQ ID NO: 324017 - DNA, 120 bp, Artificial Sequence
  ENSG00000135931_64 (sequence is synthesized)
acgggtatggcagaatctagcatgatgccttgaaataaatatttacttacttttccctaaattcccctaaaattatatgctggcttttaattttccccatgctactataatcatgttctg

SEQ ID NO: 324018 - DNA, 120 bp, Artificial Sequence
  ENSG00000135931_65 (sequence is synthesized)
gtaaaaatggagagatttactatttaaaattgcttaggatgatctcagacagtgactgaaatggttgtgattaggatggttaggagcatgatgactttgatgtaacctcattctcattaa

SEQ ID NO: 324019 - DNA, 120 bp, Artificial Sequence
  ENSG00000135931_66 (sequence is synthesized)
ggtgtttatgtctctgcagaggctgacagattctgtggaccaaggctcccactgtttatccattattcattgattctttttttctttatagaagagctaccagatggtgttcttgaatct

SEQ ID NO: 324020 - DNA, 120 bp, Artificial Sequence
  ENSG00000135931_67 (sequence is synthesized)
agtcccacttccagaattgtggcgttatcgtttctcgtgctgttctctctgtccttgggaattatcttttttaacagtccatttattgtagttttactgtggcttagagggagccaaatt

SEQ ID NO: 324021 - DNA, 120 bp, Artificial Sequence
  ENSG00000135931_68 (sequence is synthesized)
ctgagggcttcgtgtaattaattcatttaatttggaagtctgactaacttatttttgccaagtctcatcaaatttcagttggaaaacaaggattccagatgaaatgtttggctttagtct

SEQ ID NO: 324022 - DNA, 120 bp, Artificial Sequence
  ENSG00000135931_69 (sequence is synthesized)
gtttatttcacctctaataaattcaggcagaggaagagaactaccagacccgaagaggaggcgtgtgtttatctctccgtgttcttaaccttgtttttcctcttgacgttttcccccaga

SEQ ID NO: 324023 - DNA, 120 bp, Artificial Sequence
  ENSG00000135931_70 (sequence is synthesized)
gtttgctgtcattgtccacatgggcatggatttcatatgtggctgtgctgtcataatgcttacgaggtacaggcatcctctctcctggacaaagaggagctggatgaaaagatttcctac

SEQ ID NO: 324024 - DNA, 120 bp, Artificial Sequence
  ENSG00000135931_71 (sequence is synthesized)
ttcccagcagtttatattctaatttctatggagatttaataatttctgtaatcaaagctatattcctaaatacctcaagtttttgaaacctcatcaaaataaagtttatttggcaactta

SEQ ID NO: 324025 - DNA, 120 bp, Artificial Sequence
  ENSG00000135931_72 (sequence is synthesized)
gacggtgaggctctgcgctcagggcagggtgcccgtggtctatccccccaaatttaaaaagaatgtaactttaaaaatagcatgaaaaaataacatgcaagaggctgcatttaagctggc

SEQ ID NO: 324026 - DNA, 120 bp, Artificial Sequence
  ENSG00000135931_73 (sequence is synthesized)
gggaggagcagcggtgcgtttggagggccgaggctctgcggacctcttgttccgaggaaaaacccgacgcgcccgctccgccgccgccggatgctaccacttctcgcctgcggtccaggg

SEQ ID NO: 324027 - DNA, 120 bp, Artificial Sequence
  ENSG00000135932_0 (sequence is synthesized)
gcagtgcgcacgtcaaagccgggctcgggccgcaagcggggcgaggggttcggggagcggcgcggcctgggagacacagagccttcaggcgccggggcgggggcacaggcgaagactaag

SEQ ID NO: 324028 - DNA, 80 bp, Artificial Sequence
  ENSG00000135932_1 (sequence is synthesized)
agactaaggcggcgccgggccccacagcagcagccgcagcccaagcgagcgcagcagcgcggcggcagccgcgggagccc

SEQ ID NO: 324029 - DNA, 120 bp, Artificial Sequence
  ENSG00000135932_2 (sequence is synthesized)
gccgggagcaggagcgggcggaagacaacggaggggccgagcgtccgagccactccgcggggaccgaacgagcagcccgaagcggcggcggccgaggacggggacagcgacgacgcggag

SEQ ID NO: 324030 - DNA, 120 bp, Artificial Sequence
  ENSG00000135932_3 (sequence is synthesized)
gcagagaagggaacgcccggcccagccccgtagcacaggcggagtgcagcggaggcccctgccgctgccgtcatgccgttcccgtttgggaagtctcacaaatctccagcagacattgtg

SEQ ID NO: 324031 - DNA, 120 bp, Artificial Sequence
  ENSG00000135932_4 (sequence is synthesized)
aagaatctgaaggagagcatggctgttctggaaaagcaagacatttctgataaaaaagcagaaaaggctacagaagaagtttccaaaaatctggttgccatgaaagaaattctgtatggc

SEQ ID NO: 324032 - DNA, 120 bp, Artificial Sequence
  ENSG00000135932_5 (sequence is synthesized)
acaaatgaaaaagagcctcagacagaagcagtagctcaacttgctcaagaactctataatagtgggctccttagcaccctggtagctgatttacagctcattgactttgagggcaaaaaa

SEQ ID NO: 324033 - DNA, 120 bp, Artificial Sequence
  ENSG00000135932_6 (sequence is synthesized)
gacgtggctcaaattttcaacaatattctcagaagacaaattggtacgagaactcctactgttgaatacatctgcacccaacagaatattttgttcatgttattgaaagggtatgaatct

SEQ ID NO: 324034 - DNA, 120 bp, Artificial Sequence
  ENSG00000135932_7 (sequence is synthesized)
ccagaaatagctctaaattgtggaataatgttaagagaatgcatcagacatgaaccacttgcaaaaatcattttgtggtcggaacagttttatgatttcttcagatatgtcgaaatgtca

SEQ ID NO: 324035 - DNA, 120 bp, Artificial Sequence
  ENSG00000135932_8 (sequence is synthesized)
acatttgacatagcttcagatgcatttgccacattcaaggatttacttacaagacataaattgctcagtgcagaatttttggaacagcattatgatagatttttcagtgaatatgagaag

SEQ ID NO: 324036 - DNA, 120 bp, Artificial Sequence
  ENSG00000135932_9 (sequence is synthesized)
ttacttcattcagaaaattatgtgacaaaaagacagtcactgaagcttctcggtgaactactactagatagacacaacttcacaattatgacaaaatacatcagtaaacctgagaacctc

SEQ ID NO: 324037 - DNA, 120 bp, Artificial Sequence
  ENSG00000135932_10 (sequence is synthesized)
aaattaatgatgaacctgctgcgagacaaaagtcgcaacatccagtttgaggcctttcacgtttttaaggtgtttgtagccaatcctaacaagacgcagcccatcctagacatcctcctc

SEQ ID NO: 324038 - DNA, 120 bp, Artificial Sequence
  ENSG00000135932_11 (sequence is synthesized)
aagaaccaggccaaactcatagagttcctcagcaagtttcagaacgacaggacggaggatgagcagtttaacgacgagaagacctatttagttaaacagatcagggatttgaagagacca

SEQ ID NO: 324039 - DNA, 120 bp, Artificial Sequence
  ENSG00000135932_12 (sequence is synthesized)
gctcagcaagaagcttaatctccaataaacatctatgttaaatccaaattcagcatttgctgttagctattcagcatcaggcactcttattgattcatgaggaacattactgctaatctg

SEQ ID NO: 324040 - DNA, 120 bp, Artificial Sequence
  ENSG00000135932_13 (sequence is synthesized)
ctgttaagtgaacggtttttcattttacccttttgtttttcagtccaggttggagatcgtagctgctgctgcttgcacactagggcacatgtgggctttctcttgatctttgtgtcattt

SEQ ID NO: 324041 - DNA, 120 bp, Artificial Sequence
  ENSG00000135932_14 (sequence is synthesized)
cagaattcaaagactgtgctacgggagttctgaacatggctgggttcatgaaggcaaatgtatggatgagagtgtggtttaggaaagagggcactgatatcagattagacctatgtgttt

SEQ ID NO: 324042 - DNA, 120 bp, Artificial Sequence
  ENSG00000135932_15 (sequence is synthesized)
gcagagctttatctgaaatcagaggggagctatccaaaatgggagtttgggggcagctaaagttgacatgcgaataaattgatactgaaacttagcaacttcttaaaagtgtaaagaagc

SEQ ID NO: 324043 - DNA, 120 bp, Artificial Sequence
  ENSG00000135932_16 (sequence is synthesized)
ctcataagatcataaggaaaatgtatatatgcttttcacagctttctagaattttttgacatttgattttcttgagacttgtaaacctggatatgttgaagggtatttgttaattttact

SEQ ID NO: 324044 - DNA, 120 bp, Artificial Sequence
  ENSG00000135932_17 (sequence is synthesized)
tttcaaagatactttaaaacagtagagctagcaatgacaccttgcatttcatttcaacactgcttcaaggtttcttttgtatataattcttagaatgctcatttcttttaaatggtttaa

SEQ ID NO: 324045 - DNA, 120 bp, Artificial Sequence
  ENSG00000135932_18 (sequence is synthesized)
tttgtacagcagaggaatgttattgtagtagtatgtaactattacctaatactgagtttttgcaaaaaacaatgaatgctcatatgtaattgaaatacttcagatcacatgaaaatgctg

SEQ ID NO: 324046 - DNA, 120 bp, Artificial Sequence
  ENSG00000135932_19 (sequence is synthesized)
atttaacatttaagtatcacagcattaaaagaaaaagaaagtaaaccagtcctttgtattcagttacctaatggggtgccatcaataagctgcgatacagccctggagctcagtcagcca

SEQ ID NO: 324047 - DNA, 120 bp, Artificial Sequence
  ENSG00000135932_20 (sequence is synthesized)
caccttcctgcatcctattggccttattcattttaaatgagttaatgaatctgccagatctgtgaatgatagagattatgctaaattaatgctgattctttgtgtgtgtgggaaatctct

SEQ ID NO: 324048 - DNA, 120 bp, Artificial Sequence
  ENSG00000135932_21 (sequence is synthesized)
gtagagcaccttttctttcttagactaagtaacccagtacaatagttgtgaactgaataattaaaactttggcttctcttaggaaaagacgacttcctagtcataggtgtcctatgggga

SEQ ID NO: 324049 - DNA, 120 bp, Artificial Sequence
  ENSG00000135932_22 (sequence is synthesized)
aatttattttttttaatgtcctgttccttaatgctgcaaattatcagtatttataaagtaactgattttgcaccacttttttgttactgtgaccacggcagaacaatgtcttctagacta

SEQ ID NO: 324050 - DNA, 120 bp, Artificial Sequence
  ENSG00000135932_23 (sequence is synthesized)
tatctatgtaaagttattagaatggtatctgttcattttagtgatatgaagatcacaactaacaactgacaaatcagagtttgccagttcaaattcagcatggctgcagctgattaagaa

SEQ ID NO: 324051 - DNA, 120 bp, Artificial Sequence
  ENSG00000135932_24 (sequence is synthesized)
attgatatgattattctttgctagcctctcttactaatggaattatatactggccagtaaaatgggcctcccaattgctgtttcagcaggttttaaaccttcaggaacaccagttaggaa

SEQ ID NO: 324052 - DNA, 120 bp, Artificial Sequence
  ENSG00000135932_25 (sequence is synthesized)
aatagctccagaaaatatagatatattttatttttattaaaatggcagtctacatcataattggcatttctcaagactgtctttaccagaatctgtgtgaaataaggcaatctagtctcc

SEQ ID NO: 324053 - DNA, 120 bp, Artificial Sequence
  ENSG00000135932_26 (sequence is synthesized)
ttgaaaaaaaaatctcttggatgtttaggaaggaagacttggccgtgatgtggtgtcctggctttgtggtgtagtgctgtgtgtatggagttagtgtaaaaacatggattacaccaagtg

SEQ ID NO: 324054 - DNA, 120 bp, Artificial Sequence
  ENSG00000135932_27 (sequence is synthesized)
gaagaaacgtcttcttgccaagctcattcttagaacttacacatctagaacagcttccactttggcagtgaggtcgtagccttttaggtggaagaagtgagggtgcagcgtgtcagacac

SEQ ID NO: 324055 - DNA, 120 bp, Artificial Sequence
  ENSG00000135932_28 (sequence is synthesized)
aacattcatgttactcttacattggaatctgaaggtagttcagacttcgtgggttttgtttttaagcaaaacaatgtgaaaacatttaagtttgaaatgttgcatttgaagttatgatca

SEQ ID NO: 324056 - DNA, 120 bp, Artificial Sequence
  ENSG00000135932_29 (sequence is synthesized)
tttaatatattcatattaccaagactattatactggaagtggtttttgtgttataaaggtttaattttacataaggcagttacttaatgtgatttttaacccttaaaaaagtggagatgt

SEQ ID NO: 324057 - DNA, 120 bp, Artificial Sequence
  ENSG00000135932_30 (sequence is synthesized)
atacatttgttaacaatgccatgaaagcattttctttctcctaaggaaaagtgaatttcttatcagaatatctggctggccctgtaatttaaattaaaataaaattttggagaaacagca

SEQ ID NO: 324058 - DNA, 120 bp, Artificial Sequence
  ENSG00000135932_31 (sequence is synthesized)
agtcgggcgggcggggaagtgcgggccgggtcaactgtcaccggctgcacccgggcttcagcgcctcgctcccgcccctggtaaacttcctgttgtcgggaggcagataccagctttgtg

SEQ ID NO: 324059 - DNA, 120 bp, Artificial Sequence
  ENSG00000135932_32 (sequence is synthesized)
accaattcaggaaaatgcctaactgatttctggttaggaattgggcggtcggagcgttctggagttcaatggaaccaccccaagcgcagactgcgtgcaggcgccgtagtcggcccgcac

SEQ ID NO: 324060 - DNA, 120 bp, Artificial Sequence
  ENSG00000135932_33 (sequence is synthesized)
cggagggattcaaaggtgaagcgggccccggtcccctcccccgaggagcttaggctctggtgtgagagataagacgagaacacaaataactgcgataccgggaaggaggtgataagtcct

SEQ ID NO: 324061 - DNA, 120 bp, Artificial Sequence
  ENSG00000135932_34 (sequence is synthesized)
gtgaaagaacgacggagtgctagaacggcacccggaaaaaccgaaccgatcacttctgcctcgcagaaacctggaaggcttcctgggcgggggatgctgagcagagtcttgaaggcctga

SEQ ID NO: 324062 - DNA, 120 bp, Artificial Sequence
  ENSG00000135932_35 (sequence is synthesized)
tgccacattcaaggtaacaaaaactgtagaattctaaatatccttgaaagtcagaggtgtgctgtttttctaaaccttcattgccctcctaaatctacacgtggctgccctctagtggga

SEQ ID NO: 324063 - DNA, 120 bp, Artificial Sequence
  ENSG00000135932_36 (sequence is synthesized)
agagaaagatacattttgtatatgtttgtgtgatagaggtatatgcagtaaagtcacagctttaaaagggtggaaaagttagattctaaagtctatctaaaagacaaaagtcctgtgtgg

SEQ ID NO: 324064 - DNA, 120 bp, Artificial Sequence
  ENSG00000135932_37 (sequence is synthesized)
agtttctgatactgttattagtgaggtgagcattaggtgtgaactttgggatactggttactacttaagttgatcctaacacttaaatattttaactttaaaaaattattaaatgtaatt

SEQ ID NO: 324065 - DNA, 120 bp, Artificial Sequence
  ENSG00000135932_38 (sequence is synthesized)
aaagatgaagttgttatcatttgatcatatgtggaagtcaggctccatagtttagaattaatatgcctggccccatgggacatagggacttcacctctcaactcagagccttgatctgag

SEQ ID NO: 324066 - DNA, 120 bp, Artificial Sequence
  ENSG00000135932_39 (sequence is synthesized)
ggctgctctgtacagccacacaggatgaagcacttctcagaagccataaggaaacagctaagaactgaaacaaaactctgtacctccctcccagacgagtcagcagtaagggatgatccg

SEQ ID NO: 324067 - DNA, 120 bp, Artificial Sequence
  ENSG00000135932_40 (sequence is synthesized)
catctctttctaggctacagaagaagtttccaaaaatctggttgccatgaaagaaattctgtatggcacaaatgaaaaagagcctcagacagaagcagtagctcaacttgctcaagaact

SEQ ID NO: 324068 - DNA, 120 bp, Artificial Sequence
  ENSG00000135932_41 (sequence is synthesized)
gtcgtctttcattcgcaaataacggaaattattagcctcactctggtaatccaggtgacttaattaaattcagtcacttttcatatttgtgtgctatgacttttaaacagaaaggtagac

SEQ ID NO: 324069 - DNA, 120 bp, Artificial Sequence
  ENSG00000135932_42 (sequence is synthesized)
ctggaaacgggttactgtttggatctgggaacgagaaggtttgttcatagaagagtgtcatttatctttggcctagaagattagtaactgcaaaacaaaagcatttcttaatgctttctg

SEQ ID NO: 324070 - DNA, 120 bp, Artificial Sequence
  ENSG00000135940_0 (sequence is synthesized)
agttttgctgctagtcgcggacgcaatggcttcaaggttacttcgcggagctggaacgctggccgcgcaggccctgagggctcgcggccccagtggcgcggccgcgatgcgctccatggc

SEQ ID NO: 324071 - DNA, 120 bp, Artificial Sequence
  ENSG00000135940_1 (sequence is synthesized)
atctggaggtggtgttcccactgatgaagagcaggcgactgggttggagagggagatcatgctggctgcaaagaagggactggacccatacaatgtactggccccaaagggagcttcagg

SEQ ID NO: 324072 - DNA, 120 bp, Artificial Sequence
  ENSG00000135940_2 (sequence is synthesized)
gttttggctgcacaaaggcgaggcccagcgatgcccccgctgtggagcccattacaagctggtgccccagcagctggcacactgagcacctgcactaaattactcaaaatgtgctgtaaa

SEQ ID NO: 324073 - DNA, 120 bp, Artificial Sequence
  ENSG00000135940_3 (sequence is synthesized)
gtttcttctttccagtaaagactagccattgcattggctccttctcccatagatggctggtcttatttcttacccgtattctttggtaggcatggaatatgcttattttgggaaaagctg

SEQ ID NO: 324074 - DNA, 120 bp, Artificial Sequence
  ENSG00000135940_4 (sequence is synthesized)
tctgttaatgctagcttgccatccacttactgaaagtgtataaccagtgtatagtgcttagattaataataagaatagatcgacaacccgtaatgcaatgaatgggaccacctggtatga

SEQ ID NO: 324075 - DNA, 120 bp, Artificial Sequence
  ENSG00000135940_5 (sequence is synthesized)
cagtggccgctttacggtccccagtgcctcaggctctgcaggcatctccctgtaattctggaccgctgctcctgccgctccccgaactcactccgctgcgaaaacaaatgtcgacaaatt

SEQ ID NO: 324076 - DNA, 71 bp, Artificial Sequence
  ENSG00000135940_6 (sequence is synthesized)
cccgaactcactccgctgcgaaaacaaatgtcgacaaatttgcctcggtggttggagaaagaaaagctcat

SEQ ID NO: 324077 - DNA, 120 bp, Artificial Sequence
  ENSG00000135940_7 (sequence is synthesized)
actccgtctcaaaaaagaaaaaaaaagctcccccgagtgctgccgcttgtgtggatgggtacttggtggttcttaggggaccatggatatgagtagcctttaggagcttgtgagcccgct

SEQ ID NO: 324078 - DNA, 120 bp, Artificial Sequence
  ENSG00000135940_8 (sequence is synthesized)
taggagcttgtgagcccgctaaaacttatacagaagtttcggggcaccattttccttgatcatttctgtttgtagtttttctatcagtcatttcagtcagcgtcataattcacgttatct

SEQ ID NO: 324079 - DNA, 120 bp, Artificial Sequence
  ENSG00000135940_9 (sequence is synthesized)
tcctttaggtggtgttcccactgatgaagagcaggcgactgggttggagagggagatcatgctggctgcaaagaagggactggacccatacaatgtactggccccaaagggagcttcagg

SEQ ID NO: 324080 - DNA, 80 bp, Artificial Sequence
  ENSG00000135945_0 (sequence is synthesized)
gagccaccgcggagcgcgcgcggggttggttgccgcgagcgtgggggagcgtggaccgcggcgctgctcagcggtggggc

SEQ ID NO: 324081 - DNA, 120 bp, Artificial Sequence
  ENSG00000135945_1 (sequence is synthesized)
actggcggcggcggggccggggtccgcaaggccggagaaggccgccgggcccgggcatggtggtctggggcaacgcggaagaagctccaccatgaggcgaggtggatggaggaagcgagc

SEQ ID NO: 324082 - DNA, 120 bp, Artificial Sequence
  ENSG00000135945_2 (sequence is synthesized)
tgaaaatgatggctgggaaacatggggtgggtatatggctgccaaggtccagaaattggaggaacagtttcgatcagatgctgctatgcagaaggatgggacttcatctacaatttttag

SEQ ID NO: 324083 - DNA, 120 bp, Artificial Sequence
  ENSG00000135945_3 (sequence is synthesized)
tggagttgccatctatgttaatggatacacagatccttccgctgaggaattgagaaaactaatgatgttgcatggaggtcaataccatgtatattattccagatctaaaacaacacatat

SEQ ID NO: 324084 - DNA, 120 bp, Artificial Sequence
  ENSG00000135945_4 (sequence is synthesized)
tattgccacaaatcttcccaatgccaaaattaaagaattaaagggggaaaaagtaattcgaccagaatggattgtggaaagcatcaaagctggacgactcctctcctacattccatatca

SEQ ID NO: 324085 - DNA, 120 bp, Artificial Sequence
  ENSG00000135945_5 (sequence is synthesized)
gctgtacaccaagcagtccagtgtgcagaaaggtctcagctttaatcctgtatgcagacctgaggatcctctgccaggtccaagcaatatagccaaacagctcaacaacagggtaaatca

SEQ ID NO: 324086 - DNA, 120 bp, Artificial Sequence
  ENSG00000135945_6 (sequence is synthesized)
catcgttaagaagattgaaacggaaaatgaagtcaaagtcaatggcatgaacagttggaatgaagaagatgaaaataatgattttagttttgtggatctggagcagacctctccgggaag

SEQ ID NO: 324087 - DNA, 120 bp, Artificial Sequence
  ENSG00000135945_7 (sequence is synthesized)
gaaacagaatggaattccgcatcccagagggagcactgccatttttaatggacacactcctagctctaatggtgccttaaagacacaggattgcttggtgcccatggtcaacagtgttgc

SEQ ID NO: 324088 - DNA, 120 bp, Artificial Sequence
  ENSG00000135945_8 (sequence is synthesized)
cagcaggctttctccagccttttcccaggaggaggataaggctgagaagagcagcactgatttcagagactgcactctgcagcagttgcagcaaagcaccagaaacacagatgctttgcg

SEQ ID NO: 324089 - DNA, 120 bp, Artificial Sequence
  ENSG00000135945_9 (sequence is synthesized)
gaatccacacagaactaattctttctcattatcacctttgcacagtaacactaaaatcaatggtgctcaccactccactgttcaggggccttcaagcacaaaaagcacttcttcagtatc

SEQ ID NO: 324090 - DNA, 120 bp, Artificial Sequence
  ENSG00000135945_10 (sequence is synthesized)
tacgtttagcaaggcagcaccttcagtgccatccaaaccttcagactgcaattttatttcaaacttctattctcattcaagactgcatcacatatcaatgtggaagtgtgaattgactga

SEQ ID NO: 324091 - DNA, 120 bp, Artificial Sequence
  ENSG00000135945_11 (sequence is synthesized)
gtttgtcaataccctacaaagacaaagtaatggtatctttccaggaagggaaaagttaaaaaaaatgaaaacaggcaggtctgcacttgttgtaactgacacaggagatatgtcagtatt

SEQ ID NO: 324092 - DNA, 120 bp, Artificial Sequence
  ENSG00000135945_12 (sequence is synthesized)
gaattctcccagacatcagagctgtataatgcatgttgatatggattgcttctttgtatcagtgggtatacgaaatagaccagatctcaaaggaaaaccagtggctgttacaagtaacag

SEQ ID NO: 324093 - DNA, 120 bp, Artificial Sequence
  ENSG00000135945_13 (sequence is synthesized)
aggcacaggaagggcacctttacgtcctggcgctaacccccagctggagtggcagtattaccagaataaaatcctgaaaggcaaagcagcagatataccagattcatcattgtgggagaa

SEQ ID NO: 324094 - DNA, 120 bp, Artificial Sequence
  ENSG00000135945_14 (sequence is synthesized)
tccagattctgcgcaagcaaatggaattgattctgttttgtcaagggctgaaattgcatcttgtagttatgaggccaggcaacttggcattaagaacggaatgttttttgggcatgctaa

SEQ ID NO: 324095 - DNA, 120 bp, Artificial Sequence
  ENSG00000135945_15 (sequence is synthesized)
acaactatgtcctaatcttcaagctgttccatacgattttcatgcatataaggaagtcgcacaaacattgtatgaaacattggcaagctacactcataacattgaagctgtcagttgtga

SEQ ID NO: 324096 - DNA, 120 bp, Artificial Sequence
  ENSG00000135945_16 (sequence is synthesized)
tgaagcgctggtagacattaccgaaatccttgcagagaccaaacttactcctgatgaatttgcaaatgctgttcgtatggaaatcaaagaccagacgaaatgtgctgcctctgttggaat

SEQ ID NO: 324097 - DNA, 120 bp, Artificial Sequence
  ENSG00000135945_17 (sequence is synthesized)
tggttctaatattctcctggctagaatggcaactagaaaagcaaaaccagatgggcagtaccacctaaaaccagaagaagtagatgattttatcagaggccagctagtgaccaatctacc

SEQ ID NO: 324098 - DNA, 120 bp, Artificial Sequence
  ENSG00000135945_18 (sequence is synthesized)
aggagttggacattcaatggaatctaagttggcatctttgggaattaaaacttgtggagacttgcagtatatgaccatggcaaaactccaaaaagaatttggtcccaaaacaggtcagat

SEQ ID NO: 324099 - DNA, 120 bp, Artificial Sequence
  ENSG00000135945_19 (sequence is synthesized)
ggaaagaaaatctgtttcagctgagatcaactatggaataaggtttactcagccaaaagaggcagaagcttttcttctgagtctttcagaagaaattcaaagaagactagaagccactgg

SEQ ID NO: 324100 - DNA, 120 bp, Artificial Sequence
  ENSG00000135945_20 (sequence is synthesized)
catgaagggtaaacgtctaactctcaaaatcatggtacgaaagcctggggctcctgtagaaactgcaaaatttggaggccatggaatttgtgataacattgccaggactgtaactcttga

SEQ ID NO: 324101 - DNA, 120 bp, Artificial Sequence
  ENSG00000135945_21 (sequence is synthesized)
ccaggcaacagataatgcaaaaataattggaaaggcgatgctaaacatgtttcatacaatgaaactaaatatatcagatatgagaggggttgggattcacgtgaatcagttggttccaac

SEQ ID NO: 324102 - DNA, 120 bp, Artificial Sequence
  ENSG00000135945_22 (sequence is synthesized)
taatctgaacccttccacatgtcccagtcgcccatcagttcagtcaagccactttcctagtgggtcatactctgtccgtgatgtcttccaagttcagaaagctaagaaatccaccgaaga

SEQ ID NO: 324103 - DNA, 120 bp, Artificial Sequence
  ENSG00000135945_23 (sequence is synthesized)
ggagcacaaagaagtatttcgggctgctgtggatctggaaatatcatctgcttctagaacttgcactttcttgccaccttttcctgcacatctgccgaccagtcctgatactaacaaggc

SEQ ID NO: 324104 - DNA, 120 bp, Artificial Sequence
  ENSG00000135945_24 (sequence is synthesized)
tgagtcttcagggaaatggaatggtctacatactcctgtcagtgtgcagtcgagacttaacctgagtatagaggtcccgtcaccttcccagctggatcagtctgttttagaagcacttcc

SEQ ID NO: 324105 - DNA, 120 bp, Artificial Sequence
  ENSG00000135945_25 (sequence is synthesized)
acctgatctccgggaacaagtagagcaagtctgtgctgtccagcaagcagagtcacatggcgacaaaaagaaagaaccagtaaatggctgtaatacaggaattttgccacaaccagttgg

SEQ ID NO: 324106 - DNA, 120 bp, Artificial Sequence
  ENSG00000135945_26 (sequence is synthesized)
gacagtcttgttgcaaataccagaacctcaagaatcgaacagtgacgcaggaataaatttaatagcccttccagcattttcacaggtggaccctgaggtatttgctgcccttcctgctga

SEQ ID NO: 324107 - DNA, 120 bp, Artificial Sequence
  ENSG00000135945_27 (sequence is synthesized)
acttcagagggagctgaaagcagcgtatgatcaaagacaaaggcagggcgagaacagcactcaccagcagtcagccagcgcatctgtgccaaagaatcctttacttcatctaaaggcagc

SEQ ID NO: 324108 - DNA, 120 bp, Artificial Sequence
  ENSG00000135945_28 (sequence is synthesized)
agtgaaagaaaagaaaagaaacaagaagaaaaaaaccattggttcaccaaaaaggattcagagtcctttgaataacaagctgcttaacagtcctgcaaaaactctgccaggggcctgtgg

SEQ ID NO: 324109 - DNA, 120 bp, Artificial Sequence
  ENSG00000135945_29 (sequence is synthesized)
cagtccccagaagttaattgatgggtttctaaaacatgaaggacctcctgcagagaaacccctggaagaactctctgcttctacttcaggtgtgccaggcctttctagtttgcagtctga

SEQ ID NO: 324110 - DNA, 120 bp, Artificial Sequence
  ENSG00000135945_30 (sequence is synthesized)
cccagctggctgtgtgagacctccagcacccaatctagctggagctgttgaattcaatgatgtgaagaccttgctcagagaatggataactacaatttcagatccaatggaagaagacat

SEQ ID NO: 324111 - DNA, 120 bp, Artificial Sequence
  ENSG00000135945_31 (sequence is synthesized)
tctccaagttgtgaaatactgtactgatctaatagaagaaaaagatttggaaaaactggatctagttataaaatacatgaaaaggctgatgcagcaatcggtggaatcggtttggaatat

SEQ ID NO: 324112 - DNA, 120 bp, Artificial Sequence
  ENSG00000135945_32 (sequence is synthesized)
ggcatttgactttattcttgacaatgtccaggtggttttacaacaaacttatggaagcacattaaaagttacataaatattaccagagagcctgatgctctctgatagctgtgccataag

SEQ ID NO: 324113 - DNA, 120 bp, Artificial Sequence
  ENSG00000135945_33 (sequence is synthesized)
tgcttgtgaggtatttgcaaagtgcatgatagtaatgctcggagtttttataattttaaatttcttttaaagcaagtgttttgtacatttcttttcaaaaagtgccaaatttgtcagtat

SEQ ID NO: 324114 - DNA, 120 bp, Artificial Sequence
  ENSG00000135945_34 (sequence is synthesized)
tgcatgtaaataattgtgttaattattttactgtagcatagattctatttacaaaatgtttgtttataaagttttatggatttttacagtgaagtgtttacagttgtttaataaagaact

SEQ ID NO: 324115 - DNA, 120 bp, Artificial Sequence
  ENSG00000135945_35 (sequence is synthesized)
gtatgtatattttgtacaggctcctttttgtgaatccttaaaaactcaactctaggaagcaactactgtttattatactaaaaggctgaaaaacctccaggccagactgctaagctctga

SEQ ID NO: 324116 - DNA, 120 bp, Artificial Sequence
  ENSG00000135945_36 (sequence is synthesized)
aattcctgagaggtctcagaccgggattctacttgttccaagaaagggtaaagcttctaaaccatcttattcttgtctccaagcatgaacacaggagcatgttaagaaaatctttactac

SEQ ID NO: 324117 - DNA, 120 bp, Artificial Sequence
  ENSG00000135945_37 (sequence is synthesized)
ttcttccatgcggagaaatctacatattttgaattagaaacaccctcacacccacttgaagatttttttcctgggaacattatgtcccgtagatcagaggtggtgttgtctttttgcttc

SEQ ID NO: 324118 - DNA, 120 bp, Artificial Sequence
  ENSG00000135945_38 (sequence is synthesized)
tactggccattgagaaactttgatgataaaaaagaacggtatagatttttcaaacgtatataaaatatttttatgttatatgttatgccataactttaaaataaaaatagtttaaaattc

SEQ ID NO: 324119 - DNA, 120 bp, Artificial Sequence
  ENSG00000135945_39 (sequence is synthesized)
ttctcaacttatttttagttgacctaagtgtccattacggtttttaccttaaagttctagtgttccataatttttctttcccccttggttgccagtgtaactaatttggtatttctggct

SEQ ID NO: 324120 - DNA, 120 bp, Artificial Sequence
  ENSG00000135945_40 (sequence is synthesized)
tccttgaagggagactatggcattcacttttataatcttctttgtaactgtttacaacttttctataactcttttaaacagttccatactactttagtactagtgaatacatatggaatg

SEQ ID NO: 324121 - DNA, 120 bp, Artificial Sequence
  ENSG00000135945_41 (sequence is synthesized)
cacactgaagaatatgtaagagctttcagaagtgaacttcaaagagccctcttaacttcatccagtagaagggcaatgtattttccagttccaaatttctggagtaattagttttcaaag

SEQ ID NO: 324122 - DNA, 120 bp, Artificial Sequence
  ENSG00000135945_42 (sequence is synthesized)
aaattttctatattcgattatcagggaaggtatagggaaattagagtttttctttctccctatagggatcttcagggaagaatattcatcttcagctgaaggatatgtcatcgaagacta

SEQ ID NO: 324123 - DNA, 120 bp, Artificial Sequence
  ENSG00000135945_43 (sequence is synthesized)
atgtaggcaggatctgtattgggcattttctaaatttttatctgtatttattccttgttaatgaatggaaattttatggtggctcttgtctttgagacttgggtcactatgctttctctt

SEQ ID NO: 324124 - DNA, 120 bp, Artificial Sequence
  ENSG00000135945_44 (sequence is synthesized)
tttctccaaccgttcctccacattctccatgtgcccgtctagtttgtcaagttttgatgagcagttctctactttgccctccagtgaggacagtgtgtccctgcatttccctgaatctca

SEQ ID NO: 324125 - DNA, 120 bp, Artificial Sequence
  ENSG00000135945_45 (sequence is synthesized)
gatttaacccatttctctaactctgataagcttaaagcagctacccccaaatcttttaaattctgggacttgctttgaaaagtaacaaagcccattcctttgatagctgttagtgacata

SEQ ID NO: 324126 - DNA, 120 bp, Artificial Sequence
  ENSG00000135945_46 (sequence is synthesized)
ttattgccttgccttatggtttatgtttatgaggtcatcattatgttctggtcactagcacagaataaggtccatttatttatttagtttttaaaatttttttttttcaaaaaagggggg

SEQ ID NO: 324127 - DNA, 120 bp, Artificial Sequence
  ENSG00000135945_47 (sequence is synthesized)
cttgttcagctagttgtcctttgagatgaatacattaaaggatgttggttcaaaatgcatcacaaacatcaaacccacatttagtactacccatcatagatgagcaacatgccaaaggtc

SEQ ID NO: 324128 - DNA, 120 bp, Artificial Sequence
  ENSG00000135945_48 (sequence is synthesized)
aaattagtaagtggcaaagcaaagagagaattggagagcctgtactttgggccattgccattcactgcctctcacttggggcaggaggggaggtgtaggctagggagcctgttgtatttg

SEQ ID NO: 324129 - DNA, 120 bp, Artificial Sequence
  ENSG00000135945_49 (sequence is synthesized)
gcagtgtacctgctgttcatcactcccgccaatattttttgagaagtatttcatttaaaaaagataaaaatagtgaagtttccaagtagactgtcctctcttaatttttttttatcctaa

SEQ ID NO: 324130 - DNA, 120 bp, Artificial Sequence
  ENSG00000135945_50 (sequence is synthesized)
tttaaaaccttagttgacgagaacatcagtggaatacagtattccacttgtttggattttctgattttaaagatcttttggtatattttgggagaattggatactctgaagtttgagatg

SEQ ID NO: 324131 - DNA, 120 bp, Artificial Sequence
  ENSG00000135945_51 (sequence is synthesized)
aatgaccactcactagctactttagaaattgtttttgtaataagtcatatagaatgctgtttgaatactttcatttacctttattctagaaacaggatccaggagatagtgaaaaggatt

SEQ ID NO: 324132 - DNA, 120 bp, Artificial Sequence
  ENSG00000135945_52 (sequence is synthesized)
ggtccctcaaagttctggaaccctggctcctgcccagagtgatgtcctaccatgtacaatgctgttggcatctcaaccactgtggagccacttcaggagcatggaattggtcaattggga

SEQ ID NO: 324133 - DNA, 120 bp, Artificial Sequence
  ENSG00000135945_53 (sequence is synthesized)
tcttagaggaccagacgaacaggctaaggatgagactgataatagaggaaagctctgcttgtgcctggattagggttaaaatgaccctgatgaatctctttgtagctcaggatgattaga

SEQ ID NO: 324134 - DNA, 120 bp, Artificial Sequence
  ENSG00000135945_54 (sequence is synthesized)
agcttttgtccttaggagatatgtcagtattgaattctcccagacatcagagctgtataatgcatgttgatatggattgcttctttgtatcagtgggtatacgaaatagaccagatctca

SEQ ID NO: 324135 - DNA, 120 bp, Artificial Sequence
  ENSG00000135945_55 (sequence is synthesized)
agcatattcctgctctgtggtggttgtgatatcaccagcatatggcatgctggcatctctgcaaaggggccagaggtatgagttttaggagaaagcttcagatacaagagccaaacctgg

SEQ ID NO: 324136 - DNA, 120 bp, Artificial Sequence
  ENSG00000135945_56 (sequence is synthesized)
tattttaatgacatagttggcacatctacatgtgtcatttacactattcagacagttgtgacttttgggggaaaacaaggctgtaaattttaatgcctatctttaatccctaatgagaat

SEQ ID NO: 324137 - DNA, 120 bp, Artificial Sequence
  ENSG00000135945_57 (sequence is synthesized)
ggagttaagtggaaattataaattagtggcatggggagatatcaacatatttgataaatatttgagttgaaaacttcctagaataacctccattgtgttttgttctcgctctaggcaact

SEQ ID NO: 324138 - DNA, 120 bp, Artificial Sequence
  ENSG00000135945_58 (sequence is synthesized)
gaaatccaccgaagaggagcacaaagaaggttggtggtcatcaatgtggttcttttttaggtgctgcttatgtccttggaaagacggcagttggttttaaaattgacacagctttatgtg

SEQ ID NO: 324139 - DNA, 120 bp, Artificial Sequence
  ENSG00000135945_59 (sequence is synthesized)
attttaaaaatttatattcttcattatgatgaatcagtaataaagtttttttatttgtaatggacagaggattaaaggccctgcccgatgatctgaagaggctattttatatattttctt

SEQ ID NO: 324140 - DNA, 120 bp, Artificial Sequence
  ENSG00000135951_0 (sequence is synthesized)
gggcgtgcgcctgcgcggcgcggatgggccaggaaggggtccctcctaggtgccctgtaaggcaggcaggtagacgtacgcgtcgctccgtgcgtaggagcgcgcgcacggcttgtagac

SEQ ID NO: 324141 - DNA, 120 bp, Artificial Sequence
  ENSG00000135951_1 (sequence is synthesized)
cccgcgagaaggaaggtcgagccaggttaccaccaaagaatatgattttggtctaggggctccagtttctgaagctgaaaactaccagaatactctccagctagaacaagaagtgagaaa

SEQ ID NO: 324142 - DNA, 120 bp, Artificial Sequence
  ENSG00000135951_2 (sequence is synthesized)
ccaagatagattcatctcgacactgaaattacagattgaagatctcaaacagacaaatcatggcttggaagaatatgttaggaaactcttggatagtaaggaggtggtaagcagtcaagt

SEQ ID NO: 324143 - DNA, 120 bp, Artificial Sequence
  ENSG00000135951_3 (sequence is synthesized)
agatgatttaaccagccacaatgagcatctttgtaaagaattgattaaaattgaccaactagcagagcaactcgaaaaagagaaaaattttgtggtggattccgccaacaaggaacttga

SEQ ID NO: 324144 - DNA, 120 bp, Artificial Sequence
  ENSG00000135951_4 (sequence is synthesized)
agaagccaagattgatctcatttgccagcaaaataatattatagtattggaagatacaataaaaaggcttaaatctacttgattcctttgtcaagactttggaagcagacaaagatcact

SEQ ID NO: 324145 - DNA, 120 bp, Artificial Sequence
  ENSG00000135951_5 (sequence is synthesized)
ataagagtgaagctcaacatttgagaaagatgatgcgaagtaggtctaaaagtccaagacgcccatcaccaactgcccggggtgcaaactgtgatgtagaacttttgaagacaacaacaa

SEQ ID NO: 324146 - DNA, 120 bp, Artificial Sequence
  ENSG00000135951_6 (sequence is synthesized)
gagatcgtgaagaacttaaatgcatgctggaaaaatatgagcgccatttggcagaaattcagggtaatgtcaaggttcttaaatctgagagagacaagatcttccttctttatgaacagg

SEQ ID NO: 324147 - DNA, 120 bp, Artificial Sequence
  ENSG00000135951_7 (sequence is synthesized)
cacaggaagaaattacccgacttcgacgagaaatgatgaaaagctgtaagagtcctaaatcaacaacggcacatgctattctccggcgagtggagactgaaagagatgtagcctttactg

SEQ ID NO: 324148 - DNA, 120 bp, Artificial Sequence
  ENSG00000135951_8 (sequence is synthesized)
atttacgaagaatgaccacagaacgagatagtctaagggagaggctaaagattgctcaagagacagcatttaatgagaaggctcacctggaacaaaggatagaggagctggagtgtacag

SEQ ID NO: 324149 - DNA, 120 bp, Artificial Sequence
  ENSG00000135951_9 (sequence is synthesized)
ttcataatcttgatgatgaacgtatggagcaaatgtcaaatatgactttgatgaaggaaaccataagcactgtggaaaaagaaatgaaatcactagcaagaaaggcaatggataccgaaa

SEQ ID NO: 324150 - DNA, 120 bp, Artificial Sequence
  ENSG00000135951_10 (sequence is synthesized)
gtgaacttggcagacaaaaagcagagaataattctttgagacttttgtatgaaaacacagaaaaagatctttctgatactcagcgacaccttgctaagaaaaaatatgagctacagctta

SEQ ID NO: 324151 - DNA, 120 bp, Artificial Sequence
  ENSG00000135951_11 (sequence is synthesized)
ctcaggagaaaattatgtgcttggatgaaaaaattgataactttacaaggcaaaatattgcacagcgagaagaaatcagcattcttggtggaaccctcaatgatctggctaaagaaaagg

SEQ ID NO: 324152 - DNA, 120 bp, Artificial Sequence
  ENSG00000135951_12 (sequence is synthesized)
tattgcatcccttggagagagtttggcaatgaaagaaaagaccatttcaggcatgaagaatatcattgctgagatggaacaggcatcaagacagtgtactgaggccctaattgtgtgtga

SEQ ID NO: 324153 - DNA, 120 bp, Artificial Sequence
  ENSG00000135951_13 (sequence is synthesized)
acaagacgtttccagaatgcgtcggcaattggatgagacaaatgatgagctggcccagatcgccagggaaagagatatcttggctcatgacaatgacaatctccaggaacagtttgctaa

SEQ ID NO: 324154 - DNA, 120 bp, Artificial Sequence
  ENSG00000135951_14 (sequence is synthesized)
agctaaacaagaaaaccaggcactgtccaaaaaattgaatgacactcataatgaacttaatgacataaaacagaaggttcaagatactaatttggaggttaacaagctgaagaatatatt

SEQ ID NO: 324155 - DNA, 120 bp, Artificial Sequence
  ENSG00000135951_15 (sequence is synthesized)
aaagtctgaagaatctgagaaccggcaaatgatggaacaacttcgaaaagccaatgaagatgctgaaaactgggaaaataaagcccgtcaatcagaggcagataacaataccctcaaact

SEQ ID NO: 324156 - DNA, 120 bp, Artificial Sequence
  ENSG00000135951_16 (sequence is synthesized)
ggaacttatcactgctgaggcagagggtaacagattaaaagaaaaagtagattccctcaacagagaggttgagcaacacttaaatgcagaaaggtcttacaagtcccagatttctacctt

SEQ ID NO: 324157 - DNA, 120 bp, Artificial Sequence
  ENSG00000135951_17 (sequence is synthesized)
acataaatctgttgtaaaaatggaagaggagcttcagaaggttcagtttgaaaaagtgtccgctcttgcagatttgtcttctactagggaactctgtattaaacttgactcaagcaaaga

SEQ ID NO: 324158 - DNA, 120 bp, Artificial Sequence
  ENSG00000135951_18 (sequence is synthesized)
acttcttaatcgacagctggttgctaaagatcaagaaatagaaatgagggagaatgagttagattctgctcattctgaaattgaactcctgaggagtcagatggcaaatgagagaatctc

SEQ ID NO: 324159 - DNA, 120 bp, Artificial Sequence
  ENSG00000135951_19 (sequence is synthesized)
catgcagaatctagaagctttgctggtggccaatcgagacaaagaatatcagtctcagatagcacttcaagaaaaagaatctgaaattcagcttcttaaagaacacctttgtttggcaga

SEQ ID NO: 324160 - DNA, 120 bp, Artificial Sequence
  ENSG00000135951_20 (sequence is synthesized)
aaataaaatggccatccagagtagagatgtggcccagttcagaaatgttgtcacacaattggaagctgatttagacattaccaaaagacaactaggaacagagcgctttgaaagggagag

SEQ ID NO: 324161 - DNA, 120 bp, Artificial Sequence
  ENSG00000135951_21 (sequence is synthesized)
ggccgtacaagaacttcgccgccaaaattattcaagtaatgcttatcatatgagttctacaatgaagccaaatacaaaatgtcattcaccagaacgtgctcaccatcgatctcctgaccg

SEQ ID NO: 324162 - DNA, 120 bp, Artificial Sequence
  ENSG00000135951_22 (sequence is synthesized)
aggcctagatcgatcattagaagagaatctttgctacagagatttctgacacctgaaatgattcttcacatccctgagaaaggtcaaagttacaaactgatttttttttttttgctacat

SEQ ID NO: 324163 - DNA, 120 bp, Artificial Sequence
  ENSG00000135951_23 (sequence is synthesized)
gagtgcatttatcttttaaatgcttggcaatgttaaatgtatttattaactttgtgtctctgaatctctgttctaatgtgccatgttgcagtgatctgagatgacttataaaaacaaaaa

SEQ ID NO: 324164 - DNA, 120 bp, Artificial Sequence
  ENSG00000135951_24 (sequence is synthesized)
tgtatatggctctttctatccatgcagtgatagtgagtgtaaaatctgcttacttcactattgaacactattctgttcactatctggagtaaataaagaagcttattaaaacagggaaaa

SEQ ID NO: 324165 - DNA, 120 bp, Artificial Sequence
  ENSG00000135951_25 (sequence is synthesized)
gagggccggccccctgaagcgcaagagaaggaggggcgcgcagggatcgcgcctagtctctccgcctgcggagccgtggggtcccggcagcccgcaggagtgctaagtaagggtccttca

SEQ ID NO: 324166 - DNA, 120 bp, Artificial Sequence
  ENSG00000135951_26 (sequence is synthesized)
gggcgggaaccaggttccaggcagggacgcaggctacgttcgaataaaagtaccgaaggtcataaggccccagttcagatgggacttccccgcgtgacagcacagagataacggccagcc

SEQ ID NO: 324167 - DNA, 120 bp, Artificial Sequence
  ENSG00000135951_27 (sequence is synthesized)
ctcgacactgaaattacaggcatttggatacctttgtgatagaaaaggcccttttcttcatccattgatggtttgatagtgggctgggaaggaaagctgtgttcctccacattaggcagc

SEQ ID NO: 324168 - DNA, 120 bp, Artificial Sequence
  ENSG00000135951_28 (sequence is synthesized)
tcctttcttggtatctcaaataattggttggttaattttttttctttgtgatttgtgttttcatggctggaaaatctgtgccaaaatgggtacaacttactgatactggtctgggatctg

SEQ ID NO: 324169 - DNA, 120 bp, Artificial Sequence
  ENSG00000135951_29 (sequence is synthesized)
atattccattttggaaccaaccttacatgaattccatgccataatctgatattgaagcagcagaaagtaggagtgttgtcagggttttaaaacctatagtattgtaccactcaaagacta

SEQ ID NO: 324170 - DNA, 120 bp, Artificial Sequence
  ENSG00000135951_30 (sequence is synthesized)
agtaacatacatattctacaattgtgtttactactactgcttttagaaaggtaggtgatggtatatctgtcaagaatgtaagattttattaaaaatctttatttttaataagttttcttt

SEQ ID NO: 324171 - DNA, 120 bp, Artificial Sequence
  ENSG00000135951_31 (sequence is synthesized)
caagtactgcaatcaacttaattgcgattttattttattgtctgtggcagctgtctgtaatctggagtaataagataagtgatgtttccttcctcccccaatttcctaaatctcttacct

SEQ ID NO: 324172 - DNA, 120 bp, Artificial Sequence
  ENSG00000135951_32 (sequence is synthesized)
tatctatccataggctttgatgtaatgttcatattagagcctgaatgctactgtattttactgatataaactatttgtattcttgccattttaataaaaaaaggcttgtcattaatagta

SEQ ID NO: 324173 - DNA, 120 bp, Artificial Sequence
  ENSG00000135951_33 (sequence is synthesized)
ccgtggggtcccggcagcccgcaggagtgctaaatgataatacaggatggagtggatcagaaaacacactgaggctactgatcattcccatttgccaactcactgcagttggcaagaaaa

SEQ ID NO: 324174 - DNA, 120 bp, Artificial Sequence
  ENSG00000135951_34 (sequence is synthesized)
agatgggaaattacaccagcagtcaaggtagcaagatttggaacttgaagatgaatttttcttcctcatcaaaggaatatctaatactgccttcaaatgaataaaattgagtttattcta

SEQ ID NO: 324175 - DNA, 120 bp, Artificial Sequence
  ENSG00000135951_35 (sequence is synthesized)
gagatatctacaaactaatagatacatttattttcgtctattttcacatatgtaattgatttcaatacccattaaaaaagatttttaccaaactaaaaatagaactgccatgtgatccag

SEQ ID NO: 324176 - DNA, 120 bp, Artificial Sequence
  ENSG00000135951_36 (sequence is synthesized)
ttgaatataatatatattagaagtaaggagaagttcaaaaagtacgataatctgcttgaaatagaaaaaagattttattttgattaaaacaacacttttatgattgcatacatagataac

SEQ ID NO: 324177 - DNA, 120 bp, Artificial Sequence
  ENSG00000135951_37 (sequence is synthesized)
acttaatttggggtgggagcctattttgaaacaagaagatagagaataaataactactaattcagagctcatttaaatgttatgggtctaaaatcattcaatttttatcttaaccatttt

SEQ ID NO: 324178 - DNA, 120 bp, Artificial Sequence
  ENSG00000135951_38 (sequence is synthesized)
gataaacatagagtcagagtcagtgagtgcaaactacgtgtcaagtgttgtgtcagatgttttcaggtatacagtttttacttaatcatccccaacttgcgaaaaagtgatgccgtttcc

SEQ ID NO: 324179 - DNA, 120 bp, Artificial Sequence
  ENSG00000135951_39 (sequence is synthesized)
atttatagatgtggaagctgaagttctaagaggttaaataattatgacacttgagtaacaagtgacagaactacgatttctccaaactcccgtgttagccgggatttgaactcaattctc

SEQ ID NO: 324180 - DNA, 120 bp, Artificial Sequence
  ENSG00000135951_40 (sequence is synthesized)
tgaacttcaagttcagtattgttcctgttctcctgatgcttgacatgtaatatagctattaataaaggctattaaaagagatttctttttccaggaagatagagtagacttacttttttt

SEQ ID NO: 324181 - DNA, 120 bp, Artificial Sequence
  ENSG00000135951_41 (sequence is synthesized)
tattcctcctgctaagtacagctaaaaactctgaacattatgtataaaagaatttaagactttgaaaggtggagaggagaaggaacattggctaaggatctcaagacacaaagaacaaca

SEQ ID NO: 324182 - DNA, 120 bp, Artificial Sequence
  ENSG00000135951_42 (sequence is synthesized)
tgtttgttcctgggtttctttttctccgtatgtcgcagacagctgctagaaaaactggcaactagaaataacaataggcacaaaagaaagaccgaagaaaaggaccaggaaaggagcagc

SEQ ID NO: 324183 - DNA, 120 bp, Artificial Sequence
  ENSG00000135951_43 (sequence is synthesized)
ctatcaaggcagacaacttttaagagagtaactatccactccaagcaaataccacagaaaaaactacagccccattcctgccagctcaggccaagtaaagagcctacactttccacgctt

SEQ ID NO: 324184 - DNA, 120 bp, Artificial Sequence
  ENSG00000135951_44 (sequence is synthesized)
gccagactataacaaggagccccacttgtgcctcacctacacacttgtgccccacttgtgcctacacctacccactcctcccacaccagggtgatatcagagaaggctaagtgggaaact

SEQ ID NO: 324185 - DNA, 120 bp, Artificial Sequence
  ENSG00000135951_45 (sequence is synthesized)
tatagtaagaggcactccttcttgctgtggtggagacctgaacttctaccacctatcagcagtaaaggccacccatccatggtgtcagtgggggacacgtagggaactgtaatgaggcac

SEQ ID NO: 324186 - DNA, 120 bp, Artificial Sequence
  ENSG00000135951_46 (sequence is synthesized)
ctctgggattcttcccaggctggtggtaatggcagaggcctagtggggagcctgaactcccattcttgcctagcagtatctaggaacaccaccctttccagatatcaacagatgccaagt

SEQ ID NO: 324187 - DNA, 120 bp, Artificial Sequence
  ENSG00000135951_47 (sequence is synthesized)
agaggaactggacttctactttgatctaacagaaataaggcaatgtcccttctttttagttggagcattgtcacaggaggcctgctaaaacataagatccagagtcttacaatgctaggt

SEQ ID NO: 324188 - DNA, 120 bp, Artificial Sequence
  ENSG00000135951_48 (sequence is synthesized)
ctcaatttttaaaaaaggcattgtaatccaaagaatcaggaagatttgagaaaagacaagagaagccaacactgaaatggaacggatgttacaattatctggcaaggactttaaagcagt

SEQ ID NO: 324189 - DNA, 120 bp, Artificial Sequence
  ENSG00000135951_49 (sequence is synthesized)
catataaatgcttcagcaagcaattatgaacatgctggaaacgaatgaagaaaagttgtctcaggaaaaaataagagatgtaaagaagaaccaaatggacattttggaactaaaaaataa

SEQ ID NO: 324190 - DNA, 120 bp, Artificial Sequence
  ENSG00000135951_50 (sequence is synthesized)
agtaactggtccacacaaaaatcagcctatgaatgtttatagcagcattattataattgccaaaaacttggaagcaaccaagatatctttcaatagatgaatggataagcaaactgttgt

SEQ ID NO: 324191 - DNA, 120 bp, Artificial Sequence
  ENSG00000135951_51 (sequence is synthesized)
acacctatacagtggaatagtattcagtgtattttaaaaatgagctacgtagccatgaaaagacccagagtgaaccttgaaaacatgttacaaagctgaaaaggctacgaaatgtatgat

SEQ ID NO: 324192 - DNA, 120 bp, Artificial Sequence
  ENSG00000135951_52 (sequence is synthesized)
tccaactatatggagatgataaaactatagaaaccataaaaagagcagtagttaccaggaattggagggagaggggatgaataggtggagcacaggatttttaggggagtgaaactattc

SEQ ID NO: 324193 - DNA, 120 bp, Artificial Sequence
  ENSG00000135951_53 (sequence is synthesized)
tgtatgatatactaatagtggatacatgtcatcctatgtgtgtcaaaactcacagaatgaataacgccaagagtgaaccctaaggtaagttatagatactagttattaataatgtaacag

SEQ ID NO: 324194 - DNA, 120 bp, Artificial Sequence
  ENSG00000135951_54 (sequence is synthesized)
cttgtatcccccgctgaggccgagagctgacagtcgcggggatgagctctgggcaggacggcgggccgaggagcccggggagggacccggagctccaggtagaagctgcggaggttacca

SEQ ID NO: 324195 - DNA, 120 bp, Artificial Sequence
  ENSG00000135951_55 (sequence is synthesized)
gagcccccagaagcccagagcagtcaggtcacacgacgggcaggaaggagtaccagcaaatactttttattgagcatacaggtattacgctgggtctttacatatctcctccaaataagt

SEQ ID NO: 324196 - DNA, 120 bp, Artificial Sequence
  ENSG00000135953_0 (sequence is synthesized)
gcttccgctcggggcggggctgggctcccggggtaggtccgcggctgctgctgcgtccgacccccggccggcgcgggtatggagcttgggggtcactgggacatgaactcggccccgagg

SEQ ID NO: 324197 - DNA, 120 bp, Artificial Sequence
  ENSG00000135953_1 (sequence is synthesized)
ctggtctcggagaccgcagagcggaaacaggagcagaagacaggaaccgaggcggaggctgccgactccggtgccgtcggagcccgccgcttcctgctctgtctctacttggtgggcttc

SEQ ID NO: 324198 - DNA, 120 bp, Artificial Sequence
  ENSG00000135953_2 (sequence is synthesized)
ttggatttgtttggtgtcagcatggttgtgcctttattgagccttcatgtcaagtcccttggagcaagtccaacagttgctggaatagtaggctcctcctatggcattttgcaactcttt

SEQ ID NO: 324199 - DNA, 120 bp, Artificial Sequence
  ENSG00000135953_3 (sequence is synthesized)
tctagcacattggtgggctgctggagcgatgtagtgggaagacggtcttccttgctggcatgcattctactcagtgctctgggctatctccttctcggagcagccaccaatgtgtttctg

SEQ ID NO: 324200 - DNA, 120 bp, Artificial Sequence
  ENSG00000135953_4 (sequence is synthesized)
tttgtcctggctagagtcccggcaggtatttttaaacacactctctccatctcaagggctctactttctgatgtggttccagagaaggaacggccgcttgtaatcggacacttcaacaca

SEQ ID NO: 324201 - DNA, 120 bp, Artificial Sequence
  ENSG00000135953_5 (sequence is synthesized)
gcctccggtgtgggcttcatcttgggccccgtggtcggtggctatctcactgaattagaggatgggttttatctcacagccttcatctgctttttggtcttcattctcaatgctggtctc

SEQ ID NO: 324202 - DNA, 120 bp, Artificial Sequence
  ENSG00000135953_6 (sequence is synthesized)
gtttggttctttccatggagggaagcaaaaccgggcagtacagagaagggcctgccattgcgaaagacccatgtgctgttgggaaggagccatgacacagtgcaggaggcagccaccagc

SEQ ID NO: 324203 - DNA, 120 bp, Artificial Sequence
  ENSG00000135953_7 (sequence is synthesized)
cgcagagccagggccagcaagaagactgcccagccctgggtcgaagtagtgttggccttgcggaacatgaagaacctgctgttttccgaaatgtgggacatatttctggtgcgcttgctg

SEQ ID NO: 324204 - DNA, 120 bp, Artificial Sequence
  ENSG00000135953_8 (sequence is synthesized)
atggccatggcagtcatgctgtactacagtaactttgtcctggccctggaggagcgctttggggtgcggcccaaggtgacaggctacctcatcagttacagcagcatgctgggggccgtg

SEQ ID NO: 324205 - DNA, 120 bp, Artificial Sequence
  ENSG00000135953_9 (sequence is synthesized)
gccggccttgccctggggccaatcctacggctgtacaagcacaactcgcaggcactgctgctgcattccagcatactcacctgcacactgctgctgctctactccttggcccccaccatg

SEQ ID NO: 324206 - DNA, 120 bp, Artificial Sequence
  ENSG00000135953_10 (sequence is synthesized)
ggtgcagttgtcctctcctccactctcctgtccttctccactgccattggcaggacgtgcatcacggacctccagctgactgtgggcggggcccaggccagcggcacccttattggcgtg

SEQ ID NO: 324207 - DNA, 120 bp, Artificial Sequence
  ENSG00000135953_11 (sequence is synthesized)
gggcagtctgtgactgcagtgggccgcatcatcgcccctctcctctcgggggttgcccaggaggtcagcccttgcggcccccccagcctgggcgctgtgttagccttagtggccattttc

SEQ ID NO: 324208 - DNA, 120 bp, Artificial Sequence
  ENSG00000135953_12 (sequence is synthesized)
ataatgtctctaaacaagcgacactctagtggtgatgggaatagtaaattaaaaagtgagtagatggatttggacaacataaagcaacaaaatttgagatggttgaatgagggccggagg

SEQ ID NO: 324209 - DNA, 120 bp, Artificial Sequence
  ENSG00000135953_13 (sequence is synthesized)
ccatgatgaaaagggcactttggaaagggttggggtggaagggaaatatttccgggtgggtgtgagctgttgggcttccaggtcagctcttggccatgcagccatgcctgcaggatgatc

SEQ ID NO: 324210 - DNA, 120 bp, Artificial Sequence
  ENSG00000135953_14 (sequence is synthesized)
agaagtcacggcacctcatgggaaggttaagactggagcaaagcttttccaaggtgagcatattcagcgtttacctggaagtctcttcttcccacctgggctaatcaggttacaattttc

SEQ ID NO: 324211 - DNA, 120 bp, Artificial Sequence
  ENSG00000135953_15 (sequence is synthesized)
aagggtaaacaaactaccagctacaggatagggaagtggtggtggaataagagaacatgatacctggaggaagggaagaaaccacaagcattttcctactgaaaaatagggtgacatgtc

SEQ ID NO: 324212 - DNA, 120 bp, Artificial Sequence
  ENSG00000135953_16 (sequence is synthesized)
agtcaaattctgatcaactggaacttgagtttccagttaaattccatacactaggagggagttttctatcaaaatcctgcagattgaagaagctggtttattagaaccagcctgtcgctt

SEQ ID NO: 324213 - DNA, 120 bp, Artificial Sequence
  ENSG00000135953_17 (sequence is synthesized)
ttcaaagctgcttaaaaataagatactgacctcacccctagagatgattcagtgggcctgggtggggccaagaaatccgtggtgttttgtaagcactgctggcgatttctcatggcagta

SEQ ID NO: 324214 - DNA, 120 bp, Artificial Sequence
  ENSG00000135953_18 (sequence is synthesized)
aagaccacactgagactgcactgattttgattaaagtacataggcttggctgtttttacacagctaactaaatttggactcttaaaattgtgtttgtaatcacagtgtgttacacctttc

SEQ ID NO: 324215 - DNA, 120 bp, Artificial Sequence
  ENSG00000135953_19 (sequence is synthesized)
ccagctctcagcagttgtactgcatgatggagcagcgggcccctgggacctgttccctgtgctccctgcctctgagagcccagcttgctctgaagttggactaaaccacttagatgctgg

SEQ ID NO: 324216 - DNA, 120 bp, Artificial Sequence
  ENSG00000135953_20 (sequence is synthesized)
ggttgccacagcctgctcctggaagcctgcattccagtcaggttgcatccttctggtgctgacagaacccagtggtgaagccaaagcacaggaatgctttaaaaatgaacagtttatgca

SEQ ID NO: 324217 - DNA, 120 bp, Artificial Sequence
  ENSG00000135953_21 (sequence is synthesized)
aaaaatgaacagtttatgcagaataagggtcaggagtcatgccagaccagaacttgatgctactgtgtcttgtgttaagaatcatttcctggccaggctcggtggctcaggcctgtaatc

SEQ ID NO: 324218 - DNA, 79 bp, Artificial Sequence
  ENSG00000135953_22 (sequence is synthesized)
ggcgtgatggcgggcgcctgcagtcccagctattcgggaggctgaggaagattgtgccactgctctccagcctgggcga

SEQ ID NO: 324219 - DNA, 120 bp, Artificial Sequence
  ENSG00000135953_23 (sequence is synthesized)
tttatttttagtttcacgcctgcaaacacaagcattctgttgatcaacggaaatattttgatgtgccatttcttgtctaaacaagtttcatatacagcaccgagggggccacgagaggca

SEQ ID NO: 324220 - DNA, 120 bp, Artificial Sequence
  ENSG00000135953_24 (sequence is synthesized)
gaggcccagacagaaggtgaacatagccttgcagggagacatatgccaggcaggatgaccattgggattgcatcaagtattaatcagttacttaagggcttcctgtcagacagttgaagt

SEQ ID NO: 324221 - DNA, 120 bp, Artificial Sequence
  ENSG00000135953_25 (sequence is synthesized)
tcacattccttttacttttcttaattagtccactaggatggtatgcctgttttcaacttaacacatgcatacttgtaaatattttagtatgctacagtaatttgtcatatctttaatatt

SEQ ID NO: 324222 - DNA, 120 bp, Artificial Sequence
  ENSG00000135953_26 (sequence is synthesized)
tattgtttgtaaagcagtaaacatttctgtattttagaagtcatggagtaaaatcaaatatttatgataaataattggaagtatgttttagtttgaagattgtcctttttcctatcttgc

SEQ ID NO: 324223 - DNA, 120 bp, Artificial Sequence
  ENSG00000135953_27 (sequence is synthesized)
tgcaaggaaaaatggacttctgattaggttttacaattgtgaacttttatgtaaatgttaagtgctttcgaggagaccaaactattattaatatataaaatggccttgcccttaaggagc

SEQ ID NO: 324224 - DNA, 120 bp, Artificial Sequence
  ENSG00000135953_28 (sequence is synthesized)
aaattaaatctcatggagattagactcaaaaggcaataaataatcgagggtttatgcaatgaaatagaatttcagaagagtttggatctcaaagattgtccttcactctcagaaacaggc

SEQ ID NO: 324225 - DNA, 120 bp, Artificial Sequence
  ENSG00000135953_29 (sequence is synthesized)
aagtttcttaaaagcccttatagtcgtgtttttattttaaaaatcgtagcactttatttttgaagtttaaaaagcccataaacttaatgagtctttataatcagacacatggaaatatag

SEQ ID NO: 324226 - DNA, 120 bp, Artificial Sequence
  ENSG00000135953_30 (sequence is synthesized)
aaaaccaaagactgatcttagaatatagagtagagagacatgtttgttattctccactagtgactttagtattttgttatgtgatgttttttaggtgcaccttttctcatgactcctttt

SEQ ID NO: 324227 - DNA, 120 bp, Artificial Sequence
  ENSG00000135953_31 (sequence is synthesized)
actttatctaatgtcttcctctttaaagtgtgacccagagaccagtagcatcagcatcacctgagacctgtgaacactgaagctccagctcagacatgttggggaccattttaataagat

SEQ ID NO: 324228 - DNA, 120 bp, Artificial Sequence
  ENSG00000135953_32 (sequence is synthesized)
acctagctgattttttgcacagcaaactttgaaaacccctggtctaaggggtagtatttgtatcacttatggaatataatctcagggaaattaaatctgctcaattgacatttgtggtgt

SEQ ID NO: 324229 - DNA, 120 bp, Artificial Sequence
  ENSG00000135953_33 (sequence is synthesized)
ttcattttttaaattctcttgagtaacttctgtagccctttccagtgtgtcaggttgagccacatgaagttgctatttttgtaagtcaaaaatatcttcatagggtgcaactcactattc

SEQ ID NO: 324230 - DNA, 120 bp, Artificial Sequence
  ENSG00000135953_34 (sequence is synthesized)
tatggaatcttattttaggagtattgaaccttcctgaaatgtctttgaaggaagtgtcaccctttccaacactctgccagccataactgcttgggaacaggtctccaggatttgggttcc

SEQ ID NO: 324231 - DNA, 120 bp, Artificial Sequence
  ENSG00000135953_35 (sequence is synthesized)
atagagcagaaggtaggcctctgccctcatgtctagagggatgaataacattctgaaaaggtacagggtgtgtctagtcacaggagtcacctgcaaggctccaaactcaggctggatggc

SEQ ID NO: 324232 - DNA, 120 bp, Artificial Sequence
  ENSG00000135953_36 (sequence is synthesized)
cccttggggagtgaattctgcaagagttgcacctggggccaacagaaggagctggaatcactgattctgtatcctggctacatgccttagaccacaggaaccagactctgaagcaccaca

SEQ ID NO: 324233 - DNA, 120 bp, Artificial Sequence
  ENSG00000135953_37 (sequence is synthesized)
gatgtttctgtgaacatctggagttgggaatcactgagttagatcaagaatggattcggctgccatgctcgggttgagattgtattgacggatgaaggggaatgacggaagaattcctgc

SEQ ID NO: 324234 - DNA, 120 bp, Artificial Sequence
  ENSG00000135953_38 (sequence is synthesized)
ggtaaagtgctgtgaagacactcctgttttagaaagagctctctagccgcagcaaggaggattaactggaggcccaaggagtagtctggactttggggcagtaactttaggggggccctg

SEQ ID NO: 324235 - DNA, 120 bp, Artificial Sequence
  ENSG00000135953_39 (sequence is synthesized)
agggagagctggtcgcgaggacagggacagcaggcagaggttgtggcccacagggcaatcgcaggagaggttgtgaataattcccaggtgatgagtgtgcagctttgaggaatttcaaag

SEQ ID NO: 324236 - DNA, 120 bp, Artificial Sequence
  ENSG00000135953_40 (sequence is synthesized)
ggttgcttggcgtcttttcctgaagacacttctataaggtatttagaaatctatcaggagtgagaatcagtccagtcagaaaattttaggcatttgggcaactgcattcagaaaacagct

SEQ ID NO: 324237 - DNA, 120 bp, Artificial Sequence
  ENSG00000135953_41 (sequence is synthesized)
atttatttggaatgcataataaaagccatgagactgaatctccatgcctctttgccccctagtagccttcaagaagtctctaaaacagggttaccacagatttagccaggatgatgtgta

SEQ ID NO: 324238 - DNA, 120 bp, Artificial Sequence
  ENSG00000135953_42 (sequence is synthesized)
gcagcttttcttggaacaggttgatggattaaaataactttttttcagctctaatgtttttttcttgaatttgccagtcacatgataattttcttcaaaaataaaactttataattgtaa

SEQ ID NO: 324239 - DNA, 120 bp, Artificial Sequence
  ENSG00000135953_43 (sequence is synthesized)
tgtttggtgtcagcatggttgtgcctttattgagccttcatgtcaagtcccttggagcaagtccaacagttgctggaatagtaggtgagtggtcgatattgctcatttttagagcactga

SEQ ID NO: 324240 - DNA, 120 bp, Artificial Sequence
  ENSG00000135956_0 (sequence is synthesized)
agtgcatcggccccgggtctgtccgggcgttgcgggattggggcctgggaacgctcggcccccggcagccgagaagcccgtgactgggctgagcagcaccatcccagccctggggcctgc

SEQ ID NO: 324241 - DNA, 120 bp, Artificial Sequence
  ENSG00000135956_1 (sequence is synthesized)
tgactgcccagtcccggcttcacctgcagcgaacccggagcgttgctatcctccaccggactgtcaggctctgcgcgccccgcggaggtcggcggcgaccagcagcgactgcggagcgac

SEQ ID NO: 324242 - DNA, 120 bp, Artificial Sequence
  ENSG00000135956_2 (sequence is synthesized)
cagggctgcccggcgggcgccggcggaggagcccgggaggcagcgctctgcccaagcagccggagcgtagcctggcctcggccctgcctggcgccctgtctatcacggcgctgtgcactg

SEQ ID NO: 324243 - DNA, 120 bp, Artificial Sequence
  ENSG00000135956_3 (sequence is synthesized)
tgcctggcgccctgtctatcacggcgctgtgcactgccctcgccgagcccgcctggttgcacatccacggaggcacctgttcgcgccaggagctgggggtctccgacgtgttgggctatg

SEQ ID NO: 324244 - DNA, 120 bp, Artificial Sequence
  ENSG00000135956_4 (sequence is synthesized)
tgcacccggacctgctgaaagatttctgcatgaatccccagacagtgctgctcctgcgggtcatcgccgccttctgtttcctgggcatcctgtgtagtctctccgctttccttctggatg

SEQ ID NO: 324245 - DNA, 120 bp, Artificial Sequence
  ENSG00000135956_5 (sequence is synthesized)
tctttgggccgaagcatcctgctctgaagatcactcgtcgctatgccttcgcccatatcctaacggttctgcagtgtgccaccgtcattggcttttcttattgggcttctgaactcatct

SEQ ID NO: 324246 - DNA, 120 bp, Artificial Sequence
  ENSG00000135956_6 (sequence is synthesized)
tggcccagcagcagcagcataagaagtaccatggatcccaggtctatgtcaccttcgccgttagcttctacctggtggcaggagctggtggagcctcaatcctggccacggcagccaacc

SEQ ID NO: 324247 - DNA, 120 bp, Artificial Sequence
  ENSG00000135956_7 (sequence is synthesized)
tcctgcgccactaccccacagaggaagaggagcaggcgctggagctgctctcagagatggaagagaacgagccctacccggcggaatatgaggtcatcaaccagttccagccaccccctg

SEQ ID NO: 324248 - DNA, 120 bp, Artificial Sequence
  ENSG00000135956_8 (sequence is synthesized)
cttacacaccctaatgccagccctgggctctcttcctcggcagcccctccctcaactctgcagctcctctcgcacccagaggagctcctttccccagcaggcctcactggtaggatcctg

SEQ ID NO: 324249 - DNA, 120 bp, Artificial Sequence
  ENSG00000135956_9 (sequence is synthesized)
accatcttctccaaaccttccccaggagagactctgcctttagggtcatccaagtatccctgctctcagaaccggaggtccactggttttctataatgtactctttccctcctgccacat

SEQ ID NO: 324250 - DNA, 120 bp, Artificial Sequence
  ENSG00000135956_10 (sequence is synthesized)
cctgcccccttcacattcacgagtcattaccagccagggaaggtcatccaagtttcctccagcatgggcgatatctttgggaccgagactttccttggagagctgctgagagcggacagt

SEQ ID NO: 324251 - DNA, 120 bp, Artificial Sequence
  ENSG00000135956_11 (sequence is synthesized)
cccaaaaacaagtgtcaaagggcccaagggaaaggggactgtgccctggaggctcacttcacagggatcagtgtttgctccacagctgtagctctgggctgacgccccccagaccccttc

SEQ ID NO: 324252 - DNA, 120 bp, Artificial Sequence
  ENSG00000135956_12 (sequence is synthesized)
cttctcggagtgacccgcccccaggccacctgctccggggagttctgtgcactttactctttggacttctcctcacgtgtgccctggttttatggggagagggaatcgctgttgggaagg

SEQ ID NO: 324253 - DNA, 120 bp, Artificial Sequence
  ENSG00000135956_13 (sequence is synthesized)
cagagcagttgcaaccctctctgcccttgcttcatgtggctggagcccaggcaaggagagcaggagccagcgtgagactgaggccccctggtgcctatcaaggaccagagtgaaggggac

SEQ ID NO: 324254 - DNA, 120 bp, Artificial Sequence
  ENSG00000135956_14 (sequence is synthesized)
tacatctcccagcccttcaccttttaaatatgagtggttttaaaaggaaaaaaatgaaaccaggcaacagcaacaatattctgtttttaaaatagggacaagactgttgtcactttttag

SEQ ID NO: 324255 - DNA, 120 bp, Artificial Sequence
  ENSG00000135956_15 (sequence is synthesized)
acatgtatcccattccttttggctctgcaatatttggggctgtagctccttccaagcccatggtagtccctccccgagtctctcccagtagaatgcagcctcccttccctggccccttcc

SEQ ID NO: 324256 - DNA, 120 bp, Artificial Sequence
  ENSG00000135956_16 (sequence is synthesized)
ctctcagtgacggtgactccctggggccttctcgtggaacccagaggggctgaggactgtggcctggctggcgggccagcgtggtgctcctcaggactgcagcactgagatggaacctgg

SEQ ID NO: 324257 - DNA, 120 bp, Artificial Sequence
  ENSG00000135956_17 (sequence is synthesized)
cctcagtttaggaacaggggccacaacagggcaggaacccaccaccctccacataggaatacaaccagtggggccacatcatgtgaggcatcagacccacactgtcagcccagcaggccg

SEQ ID NO: 324258 - DNA, 120 bp, Artificial Sequence
  ENSG00000135956_18 (sequence is synthesized)
ggctgtgtccttcagacccagtgctgccctagactctgactcgggactccagcttgccacgtgccctctcccctcttgaatgtactctggtcttgcagtgtgctgctgggactttcttgc

SEQ ID NO: 324259 - DNA, 120 bp, Artificial Sequence
  ENSG00000135956_19 (sequence is synthesized)
tcagccatcactctggtcaccttgtttgctctgggtctggctgaattttctgccctgagatctgggcataaagtggatgaaacttgaaagaccttcagtgtagatccagatggccaacct

SEQ ID NO: 324260 - DNA, 120 bp, Artificial Sequence
  ENSG00000135956_20 (sequence is synthesized)
gtccttgttaagttacttgcttcttgggaatcagtgtcccctgctgagctgaaaaggaaatggattccaatctcttccaacctttaaggtgatagatagtttgagcaagactggagaatg

SEQ ID NO: 324261 - DNA, 120 bp, Artificial Sequence
  ENSG00000135956_21 (sequence is synthesized)
gacaacactatgaagctgtggctagaaagggactgtcatgtcccatcctttggccagattgactggggatgtccggacagatgcctgcatgggtggtgagggccacatctgcacacgagc

SEQ ID NO: 324262 - DNA, 120 bp, Artificial Sequence
  ENSG00000135956_22 (sequence is synthesized)
cagtggctgcttgcagttcactgctgtgatgccagagtgtgttcaaaggtgactctcctgctcttctggactcttctctcaggcaagaaaggctgcaggctgcctgctatgtgatgcctg

SEQ ID NO: 324263 - DNA, 120 bp, Artificial Sequence
  ENSG00000135956_23 (sequence is synthesized)
agcacaaagccaaggaactgaactaagtctttctgttaagtcctgagtttgtcattggcaggtttacttgtggccagctctctctgcccttgggtgtctgagcaggcagaccagaagacc

SEQ ID NO: 324264 - DNA, 120 bp, Artificial Sequence
  ENSG00000135956_24 (sequence is synthesized)
aggcactggacctgcatgccaaagggactggtcatctcctgaggacctgtaaatgaccctgtggactgttccgcacgatccggaacccactttttattcactccccatgtctttggcctt

SEQ ID NO: 324265 - DNA, 120 bp, Artificial Sequence
  ENSG00000135956_25 (sequence is synthesized)
cctcttctttctctttccctctgccatcctgacactgatagtttgtcatataaattccccgggttgtgtttttttttctagaaaaaaattaaaagggaaaacaaaaccaaaaaaaccaga

SEQ ID NO: 324266 - DNA, 120 bp, Artificial Sequence
  ENSG00000135956_26 (sequence is synthesized)
atggctgcctgtcatttttctgtcacgattttcctgatttggtttgttccctttgtctcagagaagcaggagatgttgatgaggctgtatttttttttctttttcttgtttttgagacaa

SEQ ID NO: 324267 - DNA, 120 bp, Artificial Sequence
  ENSG00000135956_27 (sequence is synthesized)
gggattataggcatgaaccaccgtgcctggccaaagatgtaatttaaaatagttagaagggacttggcatgggccagctccgtgcatggcattttcacccccagagcttcctaatcctgt

SEQ ID NO: 324268 - DNA, 120 bp, Artificial Sequence
  ENSG00000135956_28 (sequence is synthesized)
aatcctgttttcacacaggaagtttctaggtctttctagaacagctagaaatagtagctgactcccgcccaaggcccaaccttcaaaccctgagctcttcaggctgcatcctctggtgag

SEQ ID NO: 324269 - DNA, 120 bp, Artificial Sequence
  ENSG00000135956_29 (sequence is synthesized)
ctatagaggagaacgtggctcctaaactctagccatcctgtgggaggaaatagacttctttgggctgtggcttgcagaacaaactacactttttttccctctattgtttaaattttattt

SEQ ID NO: 324270 - DNA, 120 bp, Artificial Sequence
  ENSG00000135956_30 (sequence is synthesized)
aataatttgtgtgtttttctgtctttattttctgtatttcacgtgttccttcactccctagaaactgcactttctttgaaaccataggtaatgaatcttactaggagaggcatggggata

SEQ ID NO: 324271 - DNA, 120 bp, Artificial Sequence
  ENSG00000135956_31 (sequence is synthesized)
gagacagttctgggagtgtgacctgtaagcctcctgtagggcagtgccaggccttgattgcccacgttctctccgttccttcttccttcatacatttgatcacacagcctacacccagcc

SEQ ID NO: 324272 - DNA, 120 bp, Artificial Sequence
  ENSG00000135956_32 (sequence is synthesized)
ccgagtgtgcatcacggtaaaagagctgagggctctcttcagggagcagcccatttaggtctcttttgttgttgttagggagaatacacatctttcttggaagctgggagtgtgttctca

SEQ ID NO: 324273 - DNA, 120 bp, Artificial Sequence
  ENSG00000135956_33 (sequence is synthesized)
tttcatgtccattcagacaaagcaccattaggcaccatgaaatatacagtgacggacaggaccctgtctgcaaggattttatgtccttagttcaggagatggacttgtccacagaaaggc

SEQ ID NO: 324274 - DNA, 120 bp, Artificial Sequence
  ENSG00000135956_34 (sequence is synthesized)
agagtgaagtgggcggccggctcggaaaagtcctgtgcccagaagggagccagttctgacctgagtgataatgaaaggcttcctggaggacgcagcttgagccacacttgatgtgggagt

SEQ ID NO: 324275 - DNA, 120 bp, Artificial Sequence
  ENSG00000135956_35 (sequence is synthesized)
gaactgggatagggacactcctgctgagagaatggcaagagcaaaagcacactggtggccaggaggtggtaagagccgaggttagaaaggtgaggggtgctcatttaaggcactaacagc

SEQ ID NO: 324276 - DNA, 120 bp, Artificial Sequence
  ENSG00000135956_36 (sequence is synthesized)
agaaggagcccaggaaggattttcagaagggaagggagggatgcaaccttattttaatgactggtgacagtaggaagggttctgcctggccttaagtgagggtgttgaaagtgggagaca

SEQ ID NO: 324277 - DNA, 120 bp, Artificial Sequence
  ENSG00000135956_37 (sequence is synthesized)
ggacctgccaaaggggaagagggcggtcacagtcaatcccagggcccagtgtctcagccaggtgctggagttgggaatgcgggagccccagtctctgcccacctgtcacgtggcagctgg

SEQ ID NO: 324278 - DNA, 120 bp, Artificial Sequence
  ENSG00000135956_38 (sequence is synthesized)
aaggtggcatcaactgcacaggcgaagaggggcccgcacacgagaagccatgggatgtgaagggccgcaaggagaggaccctgggacacaggaagaggtggtgcatctggggcagggcgg

SEQ ID NO: 324279 - DNA, 120 bp, Artificial Sequence
  ENSG00000135956_39 (sequence is synthesized)
ctttcccaagatgactagagaatcttcagctggcatcttgcctgaaatatccacgctctcagccactacactaatggaacacagatgctatggggagacagaagggaactgacaaacttc

SEQ ID NO: 324280 - DNA, 120 bp, Artificial Sequence
  ENSG00000135956_40 (sequence is synthesized)
atgcccctgttttcaaatagcctgcaatcttacctcttcctctgcattttttggggggagtgacattttaatgggaggcaggaggtttgtggagaagagaaaatgttttttttgtggggg

SEQ ID NO: 324281 - DNA, 120 bp, Artificial Sequence
  ENSG00000135956_41 (sequence is synthesized)
caccatgttgcccaggctggtctcaaactactggcttcaggcaatccttctgcctcccttcccaaagggttgggattacaggcttgagccactgcaccaagcctgaaaatgtcgttttga

SEQ ID NO: 324282 - DNA, 120 bp, Artificial Sequence
  ENSG00000135956_42 (sequence is synthesized)
gaaaatgtcgttttgaatgagcccacctgaaacgaagacgcttcattagggttactggtttgagaattaagatcagttctggccgggtgcggtggctcacgcctattatcccagcacttt

SEQ ID NO: 324283 - DNA, 120 bp, Artificial Sequence
  ENSG00000135956_43 (sequence is synthesized)
acacacacacaccacacacacacacacaggttcctcaccataagctttggggaaaattcttggcttttttgctgggggagagagcagtgcccagggaagattggctgatctcagagctgg

SEQ ID NO: 324284 - DNA, 120 bp, Artificial Sequence
  ENSG00000135956_44 (sequence is synthesized)
tctcagagctggagggtttatgcgggactggccagccccttcagctgagtgggacagcaacacagtgggtggtaaggggcttcataagatgtacaagatgagggagaggcccctccagcc

SEQ ID NO: 324285 - DNA, 120 bp, Artificial Sequence
  ENSG00000135956_45 (sequence is synthesized)
aaccctgtgtctaaagagtcaggtaacgaagaactttccagagacagctgtgagtccgtctggcttaaggggttgtacaggtgtctgagaatggggcctgaaggtgcagggcctgcaggc

SEQ ID NO: 324286 - DNA, 120 bp, Artificial Sequence
  ENSG00000135956_46 (sequence is synthesized)
tgccctgtttggaaggttcctgtccttctgtcttggtagaaaatggcagctagccttgtaaagggcctccttgtgtagcgagatagaccatgtagccccagatgcccccatggcttcact

SEQ ID NO: 324287 - DNA, 120 bp, Artificial Sequence
  ENSG00000135956_47 (sequence is synthesized)
tccctcttgggggtctctcagtatatgtctagtgccaccactattggtggagagtttccttctggaataaccttggggtggtggatgggttttattttaataaaagaagaatgtctcatt

SEQ ID NO: 324288 - DNA, 120 bp, Artificial Sequence
  ENSG00000135960_0 (sequence is synthesized)
aaacttgcagacagggcagggagcggtcaaggaagagttcccgggaagccctttaaacggaaaggaagcggggctagtgtcagagaggtgtgccaggtcccaggcagccctgctggcccc

SEQ ID NO: 324289 - DNA, 120 bp, Artificial Sequence
  ENSG00000135960_1 (sequence is synthesized)
taaggacatagagtacctgcttctgagagggctgccacggtggccacctgtgaagcctgtcacccagaactggatggtacctgactttcttcatagacccatcttctgctgggactgaag

SEQ ID NO: 324290 - DNA, 120 bp, Artificial Sequence
  ENSG00000135960_2 (sequence is synthesized)
ctgacctccaacagaagccaggtgagcccttgggagaggatggcccatgtgggggactgcacgcagacgccctggctccccgtcctggtggtgtctctgatgtgctcagcccgagcggaa

SEQ ID NO: 324291 - DNA, 120 bp, Artificial Sequence
  ENSG00000135960_3 (sequence is synthesized)
tactcaaactgcggtgagaacgagtactacaaccagactacggggctgtgccaggagtgccccccgtgtgggccgggagaggagccctacctgtcctgtggctacggcaccaaagacgag

SEQ ID NO: 324292 - DNA, 120 bp, Artificial Sequence
  ENSG00000135960_4 (sequence is synthesized)
gactacggctgcgtcccctgcccggcggagaagttttccaaaggaggctaccagatatgcaggcgtcacaaagactgtgagggcttcttccgggccaccgtgctgacaccaggggacatg

SEQ ID NO: 324293 - DNA, 120 bp, Artificial Sequence
  ENSG00000135960_5 (sequence is synthesized)
gagaatgacgctgagtgtggcccttgcctccctggctactacatgctggagaacagaccgaggaacatctatggcatggtctgctactcctgcctcctggcaccccccaacaccaaggaa

SEQ ID NO: 324294 - DNA, 120 bp, Artificial Sequence
  ENSG00000135960_6 (sequence is synthesized)
tgtgtgggagccacttcaggagcttctgccaacttccctggcacctcgggcagcagcaccctgtctcccttccagcacgcccacaaagaactctcaggccaaggacacctggccactgcc

SEQ ID NO: 324295 - DNA, 120 bp, Artificial Sequence
  ENSG00000135960_7 (sequence is synthesized)
ctgatcattgcaatgtccaccatcttcatcatggccatcgccatcgtcctcatcatcatgttctacatcctgaagacaaagccctctgccccagcctgttgcaccagccacccggggaag

SEQ ID NO: 324296 - DNA, 120 bp, Artificial Sequence
  ENSG00000135960_8 (sequence is synthesized)
agcgtggaggcccaagtgagcaaggacgaggagaagaaagaggccccagacaacgtggtgatgttctccgagaaggatgaatttgagaagctgacagcaactccagcaaagcccaccaag

SEQ ID NO: 324297 - DNA, 120 bp, Artificial Sequence
  ENSG00000135960_9 (sequence is synthesized)
agcgagaacgatgcctcatccgagaatgagcagctgctgagccggagcgtcgacagtgatgaggagcccgcccctgacaagcagggctccccggagctgtgcctgctgtcgctggttcac

SEQ ID NO: 324298 - DNA, 120 bp, Artificial Sequence
  ENSG00000135960_10 (sequence is synthesized)
ctggccagggagaagtctgccaccagcaacaagtcagccgggattcaaagccggaggaaaaagatcctcgatgtgtatgccaacgtgtgtggagtcgtggaaggtcttagccccacggag

SEQ ID NO: 324299 - DNA, 120 bp, Artificial Sequence
  ENSG00000135960_11 (sequence is synthesized)
ctgccatttgattgcctcgagaagactagccgaatgctcagctccacgtacaactctgagaaggctgttgtgaaaacgtggcgccacctcgccgagagcttcggcctgaagagggatgag

SEQ ID NO: 324300 - DNA, 120 bp, Artificial Sequence
  ENSG00000135960_12 (sequence is synthesized)
attgggggcatgacagacggcatgcaactctttgaccgcatcagcacggcaggctacagcatccctgagctactcacaaaactggtgcagattgagcggctggatgctgtggagtccttg

SEQ ID NO: 324301 - DNA, 120 bp, Artificial Sequence
  ENSG00000135960_13 (sequence is synthesized)
tgtgcagacatactggagtgggcgggggttgtgccacctgcctcccagccacatgctgcatcctgaaaagcatgcctgtgggctgtcctcccaggacaagccaaggagccaacgagggct

SEQ ID NO: 324302 - DNA, 120 bp, Artificial Sequence
  ENSG00000135960_14 (sequence is synthesized)
ctggagctgtgagtggtgccaaaagactgccaagaatcaaggcttttgtgatatgtcaccgtatgccttaggatgttcaaggagccagacgaaataaggcctgtcttccaatttaaccaa

SEQ ID NO: 324303 - DNA, 120 bp, Artificial Sequence
  ENSG00000135960_15 (sequence is synthesized)
agataaaggactagagccgggatactttcagatgctcgcctgtacctcaccaggcagagtaaatatctactcactcatacagccagcccaccagcccaccattaactcactgaacaatga

SEQ ID NO: 324304 - DNA, 120 bp, Artificial Sequence
  ENSG00000135960_16 (sequence is synthesized)
ggaacgtatgtttacaaaccacttcactggaagacgtcaaacaagctgaatgaaggggcgcttagaaaacgttaatagaagttctaagcgggagatgactccctactgggatgatgaagg

SEQ ID NO: 324305 - DNA, 120 bp, Artificial Sequence
  ENSG00000135960_17 (sequence is synthesized)
atggcatcctagtgaagaagcagctcaaacattttgataaaatggcaacaaaatgcagacaccctgctccaggtattatttcaggtttagtacaagtctgttaataccctatgtggtttc

SEQ ID NO: 324306 - DNA, 120 bp, Artificial Sequence
  ENSG00000135960_18 (sequence is synthesized)
attaggataactttttacctatccttgaggtcatccatattcttacaggccttccagtcaataatggaagagctcactctatacaaaaccaatatgcaaggcatgtgtttgtccaagcaa

SEQ ID NO: 324307 - DNA, 120 bp, Artificial Sequence
  ENSG00000135960_19 (sequence is synthesized)
ttggatgtgtgcagtagccaatttcatttactgcattactctttggcctgggaaccctgtggtctgcactacatgtgaatggccttccacttcagtcttaggcagatttgaccttttagg

SEQ ID NO: 324308 - DNA, 120 bp, Artificial Sequence
  ENSG00000135960_20 (sequence is synthesized)
ggcagcaatgctgaaggacacagcaatttaaattataatgtgtcaggctgtgttttcacttcaaacatgtatgagtagtcagctgtaattagagaaatgatgacttcctaagagttcagc

SEQ ID NO: 324309 - DNA, 120 bp, Artificial Sequence
  ENSG00000135960_21 (sequence is synthesized)
cacgcataattctagatttcaagagcatctaagacttgtggattagcctcatggcatgagagtttcagactcagccttctgagccagtcagggaaagtggagttctgcagcgcaaatgag

SEQ ID NO: 324310 - DNA, 120 bp, Artificial Sequence
  ENSG00000135960_22 (sequence is synthesized)
agcctgggcttgatgtcgagggagctggcttctagttgtgccaccttgggccttgtcttttcctctctctgcctcagtttctcgtctgccaatgagatgttagttagtgattctataatt

SEQ ID NO: 324311 - DNA, 120 bp, Artificial Sequence
  ENSG00000135960_23 (sequence is synthesized)
ggggcaggtagggttcaggtgagcaaaaagaaagtggagctataggaaatgccaggcctttgaggtgctctatggaagtcaacacagtgtggtttgtccatttaaatgggaataaaaaca

SEQ ID NO: 324312 - DNA, 120 bp, Artificial Sequence
  ENSG00000135960_24 (sequence is synthesized)
gaaaaactcagacttggcattttcacaataactgcaatggtttgacataacatttataggcagaaagttaataaactggcattgttcttggcatattattgtactatccctgtaactgcc

SEQ ID NO: 324313 - DNA, 120 bp, Artificial Sequence
  ENSG00000135960_25 (sequence is synthesized)
aagagctcaggagccaggctagtgatcacaccaggggttagagttcactgctgaactccctgatggcaggtctgtgtttattactacattaaaacaaagtctctgacttataaagcgagg

SEQ ID NO: 324314 - DNA, 120 bp, Artificial Sequence
  ENSG00000135960_26 (sequence is synthesized)
ttgtaaaaattacaagttgcatgactgaaaaaatgctttagggggaaaatcagtcatatctttaacaccaacaagcaatttcccaccaacgaatgtagtacatactgtgagaggatcata

SEQ ID NO: 324315 - DNA, 120 bp, Artificial Sequence
  ENSG00000135960_27 (sequence is synthesized)
atgaggtcctgaatatttaatatcatcatttactgtgtctgtttgctgctgtttttcgaacctatttggtttaccctgcaagctaaatactccacggcagagcttaattatccttttaat

SEQ ID NO: 324316 - DNA, 120 bp, Artificial Sequence
  ENSG00000135960_28 (sequence is synthesized)
tcctctttgaaatcctgtggtgcccccttccccctgccttgtgatgatgatgagtgagtctccccttaattagactgcaaatgtcacttgtgatgagtgtgccattccaggataacagct

SEQ ID NO: 324317 - DNA, 120 bp, Artificial Sequence
  ENSG00000135960_29 (sequence is synthesized)
tgcaccctcctcagaatgttttcagcgaaagagtggggtggctgttctctgctcctggtgctttggcctcatttcacactattagaattctggggctgtaaggccagccagtgtcagctc

SEQ ID NO: 324318 - DNA, 120 bp, Artificial Sequence
  ENSG00000135960_30 (sequence is synthesized)
atgttccattggctctccacctgccatttttagggagctattccttatatagttacaaattcccttgtcatttacttatttggaaacatgggatttactctgacaagctttagcctatgt

SEQ ID NO: 324319 - DNA, 120 bp, Artificial Sequence
  ENSG00000135960_31 (sequence is synthesized)
tatgggattcagaacaatgagatcataataattctcactgaccaaagctgggactccatcctgccatttttgtgtggagatattcataattctgcaatactttaaaacatttagaaaaca

SEQ ID NO: 324320 - DNA, 120 bp, Artificial Sequence
  ENSG00000135960_32 (sequence is synthesized)
ccccagggtaggtctgtggcccttagacagtgaagtcttaattgtcaatattatttttgtctaattctgtatatatataacttattatattttataatctcaataaacacattaataaga

SEQ ID NO: 324321 - DNA, 120 bp, Artificial Sequence
  ENSG00000135960_33 (sequence is synthesized)
ggggcagacggccggagagccaggtgtgccagggacctatggcagcagggctgaacgtgcccgctccagcctctccagtgctgggagagacctctagatggtgcaggtgagtttgcaatg

SEQ ID NO: 324322 - DNA, 120 bp, Artificial Sequence
  ENSG00000135960_34 (sequence is synthesized)
ccccaggtgacggcccccatgcgccggtgccctgcttcctggactctccgtcaactccccctgtcggagagcctggctgctcactccctcctctctccccagcctgttgcaccagccacc

SEQ ID NO: 324323 - DNA, 120 bp, Artificial Sequence
  ENSG00000135966_0 (sequence is synthesized)
cagcagatcagccagtagacatgatgagcatcaaagcctttacgcttgtctctgctgtggagcgggagctgctgatgggcgacaaggagcgcgtcaacatagagtgcgtggagtgctgcg

SEQ ID NO: 324324 - DNA, 120 bp, Artificial Sequence
  ENSG00000135966_1 (sequence is synthesized)
gcagggacctctacgtgggcaccaacgactgcttcgtctaccacttcctgttggaggagaggccagtgcctgctgggccagccacgttcactgccaccaaacagctgcagagacacttgg

SEQ ID NO: 324325 - DNA, 120 bp, Artificial Sequence
  ENSG00000135966_2 (sequence is synthesized)
gcttcaagaagcccgtgaacgagctgcgtgcggcctcagcactcaacaggctgctggtgctgtgtgacaactccatcagcctggtcaacatgctgaacctcgagccagtgccttcggggg

SEQ ID NO: 324326 - DNA, 120 bp, Artificial Sequence
  ENSG00000135966_3 (sequence is synthesized)
cccgcatcaagggggcagccacgtttgcactgaacgagaaccctgtgagtggggaccccttctgtgtagaagtttgcatcatctctgtcaaacgcagaaccatccagatgtttctggtgt

SEQ ID NO: 324327 - DNA, 120 bp, Artificial Sequence
  ENSG00000135966_4 (sequence is synthesized)
acgaggaccgggtgcagatcgtcaaggaggtgtcgactgccgagcagcccctcgctgtggctgtggacggccacttcctgtgtctggctctgaccactcagtacatcatccacaattaca

SEQ ID NO: 324328 - DNA, 120 bp, Artificial Sequence
  ENSG00000135966_5 (sequence is synthesized)
gcacaggcgtctcccaggacctgtttccctactgcagtgaggagaggccgccgatcgtcaagaggatagggagacaggagttcctgctggcgggccccggagggctgggcatgtttgcca

SEQ ID NO: 324329 - DNA, 120 bp, Artificial Sequence
  ENSG00000135966_6 (sequence is synthesized)
cagtcgcagggatatcccagcgcgcccccgtgcactggtcggagaatgtgattggggcggctgtgtcctttccatacgtcatagcgctcgatgacgaattcatcacagtccacagcatgt

SEQ ID NO: 324330 - DNA, 120 bp, Artificial Sequence
  ENSG00000135966_7 (sequence is synthesized)
tggatcagcaacagaagcagacgctgccctttaaggagggccatatcctacaggactttgaaggaagagtgatcgttgccacaagtaaaggagtttacatcttggttccattacctttgg

SEQ ID NO: 324331 - DNA, 120 bp, Artificial Sequence
  ENSG00000135966_8 (sequence is synthesized)
aaaaacaaatacaggatcttctagcaagccgcagagtagaagaggctttggttttagcaaaaggagcccggaggaacattccaaaggaaaaatttcaggtaatgtacagaaggattctgc

SEQ ID NO: 324332 - DNA, 120 bp, Artificial Sequence
  ENSG00000135966_9 (sequence is synthesized)
agcaggcgggatttatacagtttgcacaacttcagttcctggaagctaaagagctcttcagaagcggccagcttgatgtccgggagctgatctctctctaccccttcctgttgcccacct

SEQ ID NO: 324333 - DNA, 120 bp, Artificial Sequence
  ENSG00000135966_10 (sequence is synthesized)
cctcctccttcacccggtcccaccctcctcttcatgagtacgcagacctgaaccagctgacccagggggaccaggagaagatggccaagtgcaaacgcttcctcatgagctacctgaacg

SEQ ID NO: 324334 - DNA, 120 bp, Artificial Sequence
  ENSG00000135966_11 (sequence is synthesized)
tgcagaggctgaccacgacagcctgctggacctcctggtcactgagaacttctgtcttctgacggacagtgctgcctggctagagaagcacaaaaagtattttgcacttggactgctcta

SEQ ID NO: 324335 - DNA, 120 bp, Artificial Sequence
  ENSG00000135966_12 (sequence is synthesized)
tcattataataaccaagatgctgctgcagttcagttgtgggtgaacattgtgaatggcgatgtccaggactccacacgctcagacctgtatgaatacatcgtggattttcttacctactg

SEQ ID NO: 324336 - DNA, 120 bp, Artificial Sequence
  ENSG00000135966_13 (sequence is synthesized)
cttagacgaggaactagtgtgggcctatgctgattgggtcctgcagaaaagtgaagaggtcggagttcaggttttcaccaagagacctttggatgaacagcagaagaacagttttaatcc

SEQ ID NO: 324337 - DNA, 120 bp, Artificial Sequence
  ENSG00000135966_14 (sequence is synthesized)
agacgacattatcaattgccttaaaaaataccctaaagcccttgtgaagtatctggaacatcttgtgatagacaagagactgcagaaagaagagtatcacacccacttagctgtgctgta

SEQ ID NO: 324338 - DNA, 120 bp, Artificial Sequence
  ENSG00000135966_15 (sequence is synthesized)
cctggaagaggtgctgctgcagagggcctccgccagtggcaagggtgcagaggccaccgagacgcaggccaagctgcggcggctgctccagaaatctgatttataccgagtccactttct

SEQ ID NO: 324339 - DNA, 120 bp, Artificial Sequence
  ENSG00000135966_16 (sequence is synthesized)
tctcgagaggctgcagggagctggcctgcccatggagagcgccatcctgcacgggaagctgggcgagcatgagaaggcgctgcatatcctggtgcacgagctgcaggactttgcagcggc

SEQ ID NO: 324340 - DNA, 120 bp, Artificial Sequence
  ENSG00000135966_17 (sequence is synthesized)
cgaggactactgcctgtggtgctccgagggccgagacccaccccaccgccagcaactctttcacacgctgctggccatctacctgcatgctggccccactgcccacgagctggccgtggc

SEQ ID NO: 324341 - DNA, 120 bp, Artificial Sequence
  ENSG00000135966_18 (sequence is synthesized)
tgccgtggacctgctgaaccgccacgccaccgaatttgatgcagcccaggtgctgcagatgctgcctgacacctggtcagtgcagctcctctgcccattcctgatgggggccatgaggga

SEQ ID NO: 324342 - DNA, 120 bp, Artificial Sequence
  ENSG00000135966_19 (sequence is synthesized)
cagcatccatgccaggaggaccatgcaggtggctctcggcctggccaggtccgaaaacttaatctacacctacgataagatgaagttgaaaggaagctcaatccaactctcagacaaaaa

SEQ ID NO: 324343 - DNA, 120 bp, Artificial Sequence
  ENSG00000135966_20 (sequence is synthesized)
gctttgtcagatatgccaaaatcccttttgtgagcctgtgtttgttagatacccaaatggtggtcttgtgcacacccactgtgccgccagcagacacacaaaccccagctcatccagtcc

SEQ ID NO: 324344 - DNA, 120 bp, Artificial Sequence
  ENSG00000135966_21 (sequence is synthesized)
tggcactcggacttgaaaagcttggcccaagggtgcgaggggaactccgagttctttctgagcctgctggacatgaagagcagatgaccaccatgctctgtgtcagccaggacgaaggga

SEQ ID NO: 324345 - DNA, 120 bp, Artificial Sequence
  ENSG00000135966_22 (sequence is synthesized)
gacatctgggtgccagggagccttccgtccatacgcaacaaggactcctcgctgctgaccaggctctatgaatgtacatggaaaatccccaaaacagaaacatacaagagttcacctgtc

SEQ ID NO: 324346 - DNA, 120 bp, Artificial Sequence
  ENSG00000135966_23 (sequence is synthesized)
atggaaaacccctaaaaatccccaaaacagaaacatacaagagttcacctgtccaggtacatagtaatccaagacagaggtctactttgaaaaaaaaaaaaagggagtcttcctcatgca

SEQ ID NO: 324347 - DNA, 120 bp, Artificial Sequence
  ENSG00000135966_24 (sequence is synthesized)
gtccagacccaggtgggggatcccccaccacccccacactccaacctttagactcatgtttgcactggaaacgtggcttcaccatggctggcgacaaagtcctctcttgcctgggtgagt

SEQ ID NO: 324348 - DNA, 120 bp, Artificial Sequence
  ENSG00000135966_25 (sequence is synthesized)
ggcgagggcacagagcctcatgggggtcagccttgccctcctgcagaaacacgttctccatccacgccgctcactcatgggcccatttcccagggttacctcgtgggctctgcctttgcc

SEQ ID NO: 324349 - DNA, 120 bp, Artificial Sequence
  ENSG00000135966_26 (sequence is synthesized)
ctcagaaacggctgaccctggagaagtacctttgttccttctttcttcctctccggctctcagctcccaaaagattctgccttgtgtacccaagcactcactcttgggtgaactaatgct

SEQ ID NO: 324350 - DNA, 120 bp, Artificial Sequence
  ENSG00000135966_27 (sequence is synthesized)
tctggctgcctagcaagtgaagatctgttgagaaactgagaacgctccaagagagaagctgctctcccctccttgaagaagccgcggacacgggaaacccacggcgggcaagggcccagc

SEQ ID NO: 324351 - DNA, 120 bp, Artificial Sequence
  ENSG00000135966_28 (sequence is synthesized)
tgtgtgctcctttcctgtcatggcatctgctgatttgaaactccatgacgaacacgttgaactaaacatttttatttaaatttgtatcatgttcgtagttgctctcttgttgagagagtc

SEQ ID NO: 324352 - DNA, 120 bp, Artificial Sequence
  ENSG00000135966_29 (sequence is synthesized)
atctgtcctgtttgttaggggtattttttcttgttaaaatgtatctcctgttgaatactcgggaaattcaaagggaagtgtggtcagcacacactgagcgttcttttctggagaggccgg

SEQ ID NO: 324353 - DNA, 120 bp, Artificial Sequence
  ENSG00000135966_30 (sequence is synthesized)
ttttagcctcgtacctttagcaggaccgacagcgggtggaagggcccgtgtgctggatgggggtgtcgcctcctggatggcacaccctcccgaggacatccagacaggctgtgtcaccct

SEQ ID NO: 324354 - DNA, 120 bp, Artificial Sequence
  ENSG00000135966_31 (sequence is synthesized)
ccagcactttatgtgcctgctctgaggtgtcctgaacacacagcaacggcctctccttcatcacaggccggggattccttttgtgtttctgtataacatcgatgacgagctgaagctgtt

SEQ ID NO: 324355 - DNA, 120 bp, Artificial Sequence
  ENSG00000135966_32 (sequence is synthesized)
gtcacttcactgccctctttggaatttcttcattgtgctgactgattctattaggggctaacaataaaggcagtctacccactactatcatgcttgggaaacaagcgtcagcttgtacat

SEQ ID NO: 324356 - DNA, 120 bp, Artificial Sequence
  ENSG00000135966_33 (sequence is synthesized)
atgacaagagaggaccctgaatacaccctctcttcatcagcccaagccttactgaggtgggatgaagacctcattctctgttctttaaaacatgtttcgtgaactaatattggtccatgt

SEQ ID NO: 324357 - DNA, 120 bp, Artificial Sequence
  ENSG00000135966_34 (sequence is synthesized)
attttttgtccttttgggactctaagtgggtcaagaagcaaaaacatccatgtgttgtttggggggaattggcaccattttttcctgactatgtttcaattaactaaagaataaatgatg

SEQ ID NO: 324358 - DNA, 120 bp, Artificial Sequence
  ENSG00000135966_35 (sequence is synthesized)
aagaaattctccttgtagcacaactgtatgctgtgtaaattggtgtgagctcaaagcccagtcatgtgttttacctgtgggtgactctgttgtagaatggtcatattactgcatatgtta

SEQ ID NO: 324359 - DNA, 120 bp, Artificial Sequence
  ENSG00000135966_36 (sequence is synthesized)
tcatgacaacttgtgagtttgagtttatatttctcaaagaacaagttacccgtatatgcaacattgcgccattaaaagcttatttctctgtacacaaaatgggtaaaatcttgaaaaaac

SEQ ID NO: 324360 - DNA, 60 bp, Artificial Sequence
  ENSG00000135966_37 (sequence is synthesized)
tctctgtacacaaaatgggtaaaatcttgaaaaaacttagtaatttctcattcctaacac

SEQ ID NO: 324361 - DNA, 120 bp, Artificial Sequence
  ENSG00000135966_38 (sequence is synthesized)
caggcgtgagccactgcgcccagccaacactagtcatttttattttttcactgaacattgatcaatactctaaaatgtttgtcatcctttagaataatgggaattaaagttgagcagttt

SEQ ID NO: 324362 - DNA, 120 bp, Artificial Sequence
  ENSG00000135966_39 (sequence is synthesized)
gtcatcctttagaataatgggaattaaagttgagcagttttccatctctaccaaatccttcaccacaagcagcattctattacagtatgaagaattgtctcatatgttaaaactgtactt

SEQ ID NO: 324363 - DNA, 120 bp, Artificial Sequence
  ENSG00000135966_40 (sequence is synthesized)
ttctctaacctttctctcactcctacaaggcccttttctcaaatcatatttctgagagaaatgtatggttctttctcacaggcctgctgatttgtaactgtgccatcgaatagagcaatt

SEQ ID NO: 324364 - DNA, 120 bp, Artificial Sequence
  ENSG00000135966_41 (sequence is synthesized)
agatccatcagacctttttcccctcattaggttcagtggaaccattctggttaaaacagcatgaactgaactcagtttacattcatattctatgggcaataccatttggtttttggaact

SEQ ID NO: 324365 - DNA, 120 bp, Artificial Sequence
  ENSG00000135966_42 (sequence is synthesized)
gtttatctgctgttccctatcaagtattaatgtagggatgtcactcaggctgcgttgcactgggctgagttcaactgcgacgctctcactgacgcgtgcttacatgtgcttctcacttcc

SEQ ID NO: 324366 - DNA, 120 bp, Artificial Sequence
  ENSG00000135966_43 (sequence is synthesized)
ggagcacaggcaggtggctgcggggtcccagctctgaatggatgcccatgatgcaactggggcagcccttgctttttgcttgctctcccacagaaacctttgtccttgcaactttatcct

SEQ ID NO: 324367 - DNA, 120 bp, Artificial Sequence
  ENSG00000135966_44 (sequence is synthesized)
ttgtcccgattgggtcccagatacacaaaatgtacaaatgtaaacttgctcattttattaaaattcttttagttctttgttctttctgtaattttttaaaataaaaattgccttgatgga

SEQ ID NO: 324368 - DNA, 120 bp, Artificial Sequence
  ENSG00000135968_0 (sequence is synthesized)
ccttcgggaaagggtggcctcgggccccctactctacagagtctcctcccacggctgcccagttccctggccgactatcttgcctccaccacatcaccatcagtaccgggcggctgcagg

SEQ ID NO: 324369 - DNA, 120 bp, Artificial Sequence
  ENSG00000135968_1 (sequence is synthesized)
gcagagctgtccagggacctcctcacagcctccagagtcaagaaatgcctcctcagggaagccctctaccgcatccctgacctgtgagtcacggagctcccgggcaccatgctggccaca

SEQ ID NO: 324370 - DNA, 120 bp, Artificial Sequence
  ENSG00000135968_2 (sequence is synthesized)
aatgcctaaggagccccccggaaccagctgtgggtcccgcaggcactcgcaggctagcggacacctttggaggactgagagacctgtcctgcaatccaatgttcctcactctcacaagat

SEQ ID NO: 324371 - DNA, 120 bp, Artificial Sequence
  ENSG00000135968_3 (sequence is synthesized)
tttacagacgtggaaaccgaggcccgaggccccaaggggtaatcggcccgccttcccatgccaataaccggcagtggcgggacccacacctactccgtgacctgcaggcccaggggtcga

SEQ ID NO: 324372 - DNA, 120 bp, Artificial Sequence
  ENSG00000135968_4 (sequence is synthesized)
gccccaggtagaacgtctagacggactccgcccttagcgccgtacggggaaccttctcccggacgcagacacggaagcggaagtgctgccgagctgtagctatggagacgtggggggcgg

SEQ ID NO: 324373 - DNA, 120 bp, Artificial Sequence
  ENSG00000135968_5 (sequence is synthesized)
gccgcccggagagcgcgacctttgacctgcagtagagcctacgtcagaggctggcgcaaacagaagtgcagcggtggcggcggctggttgcgggccggcggcgggctggcggagatggag

SEQ ID NO: 324374 - DNA, 120 bp, Artificial Sequence
  ENSG00000135968_6 (sequence is synthesized)
gatcttgttcaagatggggtggcttcaccagctacccctgggaccgggaaatctaagctggaaacattgcccaaagaagacctcatcaagtttgccaagaaacagatgatgctaatacag

SEQ ID NO: 324375 - DNA, 120 bp, Artificial Sequence
  ENSG00000135968_7 (sequence is synthesized)
aaagctaaatcaaggtgtacagaattggagaaagaaattgaagaactcagatcaaaacctgttactgaaggaactggtgatattattaaggcattaactgaacgtctggatgctcttctt

SEQ ID NO: 324376 - DNA, 120 bp, Artificial Sequence
  ENSG00000135968_8 (sequence is synthesized)
ctggaaaaagcagagactgagcaacagtgtctttctctgaaaaaggaaaatataaaaatgaagcaagaggttgaggattctgtaacaaagatgggagatgcacataaggagttggaacaa

SEQ ID NO: 324377 - DNA, 120 bp, Artificial Sequence
  ENSG00000135968_9 (sequence is synthesized)
tcacatataaactatgtgaaagaaattgaaaatttgaaaaatgagttgatggcagtacgttccaaatacagtgaagacaaagctaacttacaaaagcagctggaagaagcaatgaatacg

SEQ ID NO: 324378 - DNA, 120 bp, Artificial Sequence
  ENSG00000135968_10 (sequence is synthesized)
caattagaactttcagaacaacttaaatttcagaacaactctgaagataatgttaaaaaactacaagaagagattgagaaaattaggccaggctttgaggagcaaattttatatctgcaa

SEQ ID NO: 324379 - DNA, 120 bp, Artificial Sequence
  ENSG00000135968_11 (sequence is synthesized)
aagcaattagacgctaccactgatgaaaagaaggaaacagttactcaactccaaaatatcattgaggctaattctcagcattaccaaaaaaatattaatagtttgcaggaagagctttta

SEQ ID NO: 324380 - DNA, 120 bp, Artificial Sequence
  ENSG00000135968_12 (sequence is synthesized)
cagttgaaagctatacaccaagaagaggtgaaagagttgatgtgccagattgaagcatcagctaaggaacatgaagcagagataaataagttgaacgagctaaaagagaacttagtaaaa

SEQ ID NO: 324381 - DNA, 120 bp, Artificial Sequence
  ENSG00000135968_13 (sequence is synthesized)
caatgtgaggcaagtgaaaagaacatccagaagaaatatgaatgtgagttagaaaatttaaggaaagccacctcaaatgcaaaccaagacaatcagatatgttctattctcttgcaagaa

SEQ ID NO: 324382 - DNA, 120 bp, Artificial Sequence
  ENSG00000135968_14 (sequence is synthesized)
aatacatttgtagaacaagtagtaaatgaaaaagtcaaacacttagaagataccttaaaagaacttgaatctcaacacagtatcttaaaagatgaggtaacttatatgaataatcttaag

SEQ ID NO: 324383 - DNA, 120 bp, Artificial Sequence
  ENSG00000135968_15 (sequence is synthesized)
ttaaaacttgaaatggatgctcaacatataaaggatgagttttttcatgaacgggaagacttagagtttaaaattaatgaattattactagctaaagaagaacagggctgtgtaattgaa

SEQ ID NO: 324384 - DNA, 120 bp, Artificial Sequence
  ENSG00000135968_16 (sequence is synthesized)
aaattaaaatctgagctagcaggtttaaataaacagttttgctatactgtagaacagcataacagagaagtacagagtcttaaggaacaacatcaaaaagaaatatcagaactaaatgag

SEQ ID NO: 324385 - DNA, 120 bp, Artificial Sequence
  ENSG00000135968_17 (sequence is synthesized)
acatttttgtcagattcagaaaaagaaaaattaacattaatgtttgaaatacagggtcttaaggaacagtgtgaaaacctacagcaagaaaagcaagaagcaattttaaattatgagagt

SEQ ID NO: 324386 - DNA, 120 bp, Artificial Sequence
  ENSG00000135968_18 (sequence is synthesized)
ttacgagagattatggaaattttacaaacagaactgggggaatctgctggaaaaataagtcaagagttcgaatcaatgaagcaacagcaagcatctgatgttcatgaactgcagcagaag

SEQ ID NO: 324387 - DNA, 120 bp, Artificial Sequence
  ENSG00000135968_19 (sequence is synthesized)
ctcagaactgcttttactgaaaaagatgcccttctcgaaactgtgaatcgcctccagggagaaaatgaaaagttactatctcaacaagaattggtaccagaacttgaaaataccataaag

SEQ ID NO: 324388 - DNA, 120 bp, Artificial Sequence
  ENSG00000135968_20 (sequence is synthesized)
aaccttcaagaaaagaatggagtatacttacttagtctcagtcaaagagataccatgttaaaagaattagaaggaaagataaattctcttactgaggaaaaagatgattttataaataaa

SEQ ID NO: 324389 - DNA, 120 bp, Artificial Sequence
  ENSG00000135968_21 (sequence is synthesized)
ctgaaaaattcccatgaagaaatggataatttccataagaaatgtgaaagggaagaaagattgattcttgaacttgggaagaaagtagagcaaacaatccagtacaacagtgaactagaa

SEQ ID NO: 324390 - DNA, 120 bp, Artificial Sequence
  ENSG00000135968_22 (sequence is synthesized)
caaaaggtaaatgaattaacaggaggactagaggagactttaaaagaaaaggatcaaaatgaccaaaaactagaaaaacttatggttcaaatgaaagttctctctgaagacaaagaagta

SEQ ID NO: 324391 - DNA, 120 bp, Artificial Sequence
  ENSG00000135968_23 (sequence is synthesized)
ttgtcagctgaagtgaagtctctttatgaggaaaacaataaactcagttcagaaaaaaaacagttgagtagggatttggaggtttttttgtctcaaaaagaagatgttatccttaaagaa

SEQ ID NO: 324392 - DNA, 120 bp, Artificial Sequence
  ENSG00000135968_24 (sequence is synthesized)
catattactcaattagaaaagaaacttcagttaatggttgaagagcaagataatttaaataaactgcttgaaaatgagcaagttcagaagttatttgttaaaactcagttgtatggtttt

SEQ ID NO: 324393 - DNA, 120 bp, Artificial Sequence
  ENSG00000135968_25 (sequence is synthesized)
cttaaagaaatgggatcagaagtttcagaagacagtgaagagaaagatgttgttaatgtcctacaggcagtcggtgaatccttggcaaaaataaatgaggaaaaatgcaacctggctttt

SEQ ID NO: 324394 - DNA, 120 bp, Artificial Sequence
  ENSG00000135968_26 (sequence is synthesized)
cagcgtgatgaaaaagtattagagttagaaaaagagattaagtgccttcaagaagagagtgtagttcagtgtgaagaacttaagtctttattgagagactatgagcaagagaaagttctc

SEQ ID NO: 324395 - DNA, 120 bp, Artificial Sequence
  ENSG00000135968_27 (sequence is synthesized)
ttaaggaaagagttagaagaaatacagtcagaaaaagaggccctgcagtctgatcttctagaaatgaagaatgctaatgaaaaaacaaggcttgaaaatcagaatcttttaattcaagtt

SEQ ID NO: 324396 - DNA, 120 bp, Artificial Sequence
  ENSG00000135968_28 (sequence is synthesized)
gaagaagtatctcaaacatgtagcaaaagtgaaatccataatgaaaaagaaaaatgttttataaaggaacatgaaaacctaaagccactactagaacaaaaagaattacgagataggaga

SEQ ID NO: 324397 - DNA, 120 bp, Artificial Sequence
  ENSG00000135968_29 (sequence is synthesized)
gcagagttgatactattaaaggattccttagcaaaatcaccttctgtaaaaaatgatcctctgtcttcagtaaaagagttggaagaaaaaatagaaaatctggaaaaagaatgcaaagaa

SEQ ID NO: 324398 - DNA, 120 bp, Artificial Sequence
  ENSG00000135968_30 (sequence is synthesized)
aaggaggagaaaataaataagataaaattagttgccgtaaaggcaaagaaagaactagattccagcagaaaagagacccagactgtgaaggaagaacttgaatctcttcgatcagaaaag

SEQ ID NO: 324399 - DNA, 120 bp, Artificial Sequence
  ENSG00000135968_31 (sequence is synthesized)
tggaaaaagaacgtgctaataattttgagcatcgtattgaagaccttacaagacaattaagaaattcgactttgcagtgtgaaacaataaattctgataatgaagatctcctggctcgta

SEQ ID NO: 324400 - DNA, 120 bp, Artificial Sequence
  ENSG00000135968_32 (sequence is synthesized)
ttgagacattacagtctaatgccaaattattagaagtacagattttagaagtccagagagccaaagcaatggtagacaaagaattagaagctgaaaaacttcagaaagaacagaagataa

SEQ ID NO: 324401 - DNA, 120 bp, Artificial Sequence
  ENSG00000135968_33 (sequence is synthesized)
aggaacatgccactactgtaaatgaacttgaagaacttcaggtacaacttcaaaagcaaaagaaacagcttcagaaaaccatgcaagaattagagctggttaaaaaggatgcccaacaaa

SEQ ID NO: 324402 - DNA, 120 bp, Artificial Sequence
  ENSG00000135968_34 (sequence is synthesized)
ccacattgatgaatatggaaatagctgattatgaacgtttgatgaaagaactaaatcaaaagttaactaataaaaacaacaagatagaagatttggagcaagaaataaaaattcaaaaac

SEQ ID NO: 324403 - DNA, 120 bp, Artificial Sequence
  ENSG00000135968_35 (sequence is synthesized)
agaaacaagaaaccctacaagaagaaataacttcattacagtcttcagtacaacaatatgaagaaaaaaacaccaaaatcaagcaattgcttgtgaaaaccaaaaaggaactggcagatt

SEQ ID NO: 324404 - DNA, 120 bp, Artificial Sequence
  ENSG00000135968_36 (sequence is synthesized)
caaagcaagcagaaactgatcacttaatacttcaagcatctttaaaaggtgagctggaggcaagccagcagcaagtagaagtctataaaatacagctggctgaaataacatcagagaagc

SEQ ID NO: 324405 - DNA, 120 bp, Artificial Sequence
  ENSG00000135968_37 (sequence is synthesized)
acaaaatccacgagcacctgaaaacctctgcggaacagcaccagcgtacgctaagtgcataccagcagagagtgacagcactacaggaagagtgccgtgctgccaaggcagaacaagcta

SEQ ID NO: 324406 - DNA, 120 bp, Artificial Sequence
  ENSG00000135968_38 (sequence is synthesized)
ctgtaacctctgaattcgagagctacaaagtccgagttcataatgttctaaaacaacagaaaaataaatctatgtctcaggctgaaactgagggcgctaaacaagaaagggaacatctgg

SEQ ID NO: 324407 - DNA, 120 bp, Artificial Sequence
  ENSG00000135968_39 (sequence is synthesized)
aaatgctgattgaccagctaaaaatcaaattacaagatagccaaaataacttacagattaatgtatctgaacttcaaacattgcagtctgaacatgatacactgctagaaaggcacaaca

SEQ ID NO: 324408 - DNA, 120 bp, Artificial Sequence
  ENSG00000135968_40 (sequence is synthesized)
agatgctgcaggaaactgtgtccaaagaggcggaactccgggaaaaattgtgttcaatacagtcagagaacatgatgatgaaatctgaacatacacagactgtgagtcagctaacatccc

SEQ ID NO: 324409 - DNA, 120 bp, Artificial Sequence
  ENSG00000135968_41 (sequence is synthesized)
agaacgaggtccttcgaaatagcttccgagatcaagtgcgacatttgcaggaagaacacagaaagacagtggagacattacagcagcagctctccaagatggaagcacagctcttccagc

SEQ ID NO: 324410 - DNA, 120 bp, Artificial Sequence
  ENSG00000135968_42 (sequence is synthesized)
ttaagaatgaaccgaccacaagaagcccagtttcctctcaacaatctttgaagaaccttcgagaaaggagaaacacagacctcccgcttctagacatgcacactgtaacccgggaagagg

SEQ ID NO: 324411 - DNA, 120 bp, Artificial Sequence
  ENSG00000135968_43 (sequence is synthesized)
gagaaggcatggagacaactgatacggagtctgtgtcttccgccagcacatacacacagtctttagagcagctgcttaactctcccgaaactaaacttgagcctccattatggcatgctg

SEQ ID NO: 324412 - DNA, 120 bp, Artificial Sequence
  ENSG00000135968_44 (sequence is synthesized)
aatttaccaaagaagaattggttcagaagctcagttccaccacaaaaagtgcagatcacttaaacggcctgcttcgggaaacagaagcaaccaatgcaattcttatggagcaaattaagc

SEQ ID NO: 324413 - DNA, 120 bp, Artificial Sequence
  ENSG00000135968_45 (sequence is synthesized)
agtgaaataagaagattggaaaggaatcaagagcgagagaagtctgcagctaacctggaatacttgaagaacgtcttgctgcagttcattttcttgaaaccaggtagtgaaagagagaga

SEQ ID NO: 324414 - DNA, 120 bp, Artificial Sequence
  ENSG00000135968_46 (sequence is synthesized)
gagagagacttcttcctgttataaatacgatgttgcagctcagccctgaagaaaagggaaaacttgctgcggttgctcaaggtgaggaagaaaatgcttcccgttcttctggatgggcat

SEQ ID NO: 324415 - DNA, 120 bp, Artificial Sequence
  ENSG00000135968_47 (sequence is synthesized)
cctatcttcatagttggtctggacttcgataggttgatggaaggaatatttttattaaccaaatagaatctatttacaaaaatggttcacgtatattaccacaattcttttgtcaaaaag

SEQ ID NO: 324416 - DNA, 120 bp, Artificial Sequence
  ENSG00000135968_48 (sequence is synthesized)
tgtgtatatatgtttgcatctacatatatttgtacatctatatgacagatgtattttaaaagtttcatcttgaagtaaaagtacaacagcttgaagtgttgatagcaggccacagccctc

SEQ ID NO: 324417 - DNA, 120 bp, Artificial Sequence
  ENSG00000135968_49 (sequence is synthesized)
taactcatgtgatttcccatgcatgctgccagaataaaaccaccaggaatgaattcactccccacttctctggaacctcaggacccgcccatttctcggcagtactgtgaattttgaagt

SEQ ID NO: 324418 - DNA, 120 bp, Artificial Sequence
  ENSG00000135968_50 (sequence is synthesized)
taaactaaattttggtaccataccaactggaatttaggctttaaaaataatgtttcaaggccaggtgtggtgattcatgcctgaaatcccactactttgggaggctgaggctggagaatt

SEQ ID NO: 324419 - DNA, 120 bp, Artificial Sequence
  ENSG00000135968_51 (sequence is synthesized)
gcttgaggctagtgagctgtgactcccactgcactccagctcggggaacagagcgagaccttgtctctaaaaataatagtaataaaataaaaataacgttttatgactatttattgcaag

SEQ ID NO: 324420 - DNA, 120 bp, Artificial Sequence
  ENSG00000135968_52 (sequence is synthesized)
gtcagagttacagattgttataaattgttgagaaatttttgtgattagaatatgaaggaaaaagctttgttggtaaaagtgacatgttaaggggctatgaagtaaatatgctgcagttaa

SEQ ID NO: 324421 - DNA, 120 bp, Artificial Sequence
  ENSG00000135968_53 (sequence is synthesized)
ttatgctaagttaaaatacagtttagttatttgctttaaaataaactcttctttttttctttaaagtatactatctcaaaactcattatgttgtcagagccctagagctggctagtgtaa

SEQ ID NO: 324422 - DNA, 120 bp, Artificial Sequence
  ENSG00000135968_54 (sequence is synthesized)
cactgactatgagtaggtgggcccacacttgagttgaggtgatttcatggtgtctttccaggctcttgatagggtgtcactgcatgcaagccatgaatctgttttgagaatcctctccat

SEQ ID NO: 324423 - DNA, 120 bp, Artificial Sequence
  ENSG00000135968_55 (sequence is synthesized)
tttcccaaataaaaacctatcacaacagtgactatatcactcagcattggatctaaatataaaagtggtgctttcagtgtttttggcagatagtgttccataagctttccatcagaaggg

SEQ ID NO: 324424 - DNA, 120 bp, Artificial Sequence
  ENSG00000135968_56 (sequence is synthesized)
attttagacaccttagaggtccgtgctacatcgtcacagttcctccgaataaccttaggtggtagtgttacttgcctttgacacctctgcatatgttttaatgactagatccaaactgtg

SEQ ID NO: 324425 - DNA, 120 bp, Artificial Sequence
  ENSG00000135968_57 (sequence is synthesized)
ttgttcttaaatcaaaaattggataatttgtaatatttatgtgttaatcacacagtatgctctctgaagttctcttaagccttcagtttatactcttaatttaattttctttctgagctg

SEQ ID NO: 324426 - DNA, 120 bp, Artificial Sequence
  ENSG00000135968_58 (sequence is synthesized)
gagaactggctttgcactttggttacacagaacattggtttccaattcagtttaactgaaatttgctgctgatatgttgagtttgttctttaaaaaatagctcatatatctcatctttcc

SEQ ID NO: 324427 - DNA, 120 bp, Artificial Sequence
  ENSG00000135968_59 (sequence is synthesized)
tcctgtcttagaagaacagacctaactagtgaatgtattaatgaaaatgcatctatttcagagctgacatgaagagtttagtttttttactttataaactgtgaatatgagtatgccagc

SEQ ID NO: 324428 - DNA, 120 bp, Artificial Sequence
  ENSG00000135968_60 (sequence is synthesized)
tgcatacgatgtaactaatcatatttaaatatatttcactttctctttgactttagaccttttgaagtctgtataaacttgttttgaaatatagtctctgcttacgaatgtcataacaaa

SEQ ID NO: 324429 - DNA, 120 bp, Artificial Sequence
  ENSG00000135968_61 (sequence is synthesized)
ataattttttgcatgataaaaaattactttgattacaaaaggcatattctttcatggtttctgcaatgagaggaagtgtaatgattattttaatatttctattaaatatgtttaactgta

SEQ ID NO: 324430 - DNA, 120 bp, Artificial Sequence
  ENSG00000135968_62 (sequence is synthesized)
ttttttttttttaatagccttgctccaagggatctcaattttagtgtgcgcaatcgcccatttcctgtttctcccccgcccaccccgatatagaaagactttttgtttgcttcctgctcc

SEQ ID NO: 324431 - DNA, 120 bp, Artificial Sequence
  ENSG00000135968_63 (sequence is synthesized)
tggttagcactgctgggagatcctgctatttttcgaacataaagcagtctaagaaggtttatatagtggtgtagtggaaggagcagtgacatagggtaggaatcaagggattctgatctg

SEQ ID NO: 324432 - DNA, 120 bp, Artificial Sequence
  ENSG00000135968_64 (sequence is synthesized)
ttacttgtttatttcaccagtctttcactgtcagtcaggtgtttaacacagtgataaatgttactggggacccagaatgggtgtaaaactgtttgccattaagttgtttgtagtccatgc

SEQ ID NO: 324433 - DNA, 120 bp, Artificial Sequence
  ENSG00000135968_65 (sequence is synthesized)
gtttgcttcctgctcctggttagcactgctgggagatcctgctatttttcgaacataaagcagtctaagaaggtttatatagtggtgtagtggaaggagcagtgacataggctggaaaca

SEQ ID NO: 324434 - DNA, 70 bp, Artificial Sequence
  ENSG00000135968_66 (sequence is synthesized)
acatgtcttaattctagtattcaccagatttctttcatgttctccgttgttagacatcaaatttgtctac

SEQ ID NO: 324435 - DNA, 120 bp, Artificial Sequence
  ENSG00000135968_67 (sequence is synthesized)
tctttcatgttctccgttgttagacatcaaatttgtctactttttaaatagaaacattagatagagcaaggaacttagaaacactcaagcggcactgaatgtgttagaactgcataacca

SEQ ID NO: 324436 - DNA, 120 bp, Artificial Sequence
  ENSG00000135968_68 (sequence is synthesized)
atatagcttctttgctttcacatttacaattagttggagttttagttcagccacacccagtatcttccattctgcttccaggaagacatggaaaaatgtcagccatgatgatgcagtatt

SEQ ID NO: 324437 - DNA, 120 bp, Artificial Sequence
  ENSG00000135968_69 (sequence is synthesized)
ttagtagcaagttgatggtgttttggtttcccatgggaaatattgtcactggagcattagccgctatcggtcacttattagggtaaaaaagcaacttcagaagaatttaacatatgccaa

SEQ ID NO: 324438 - DNA, 120 bp, Artificial Sequence
  ENSG00000135968_70 (sequence is synthesized)
agaatcaacaaaggaagtaatcagccagggcaaaggtcgcacaagagattgtaatctagcaatcagcagtggaataagcagtcagcttaccagaaacccaggaaaaagcttcaaaaaggg

SEQ ID NO: 324439 - DNA, 120 bp, Artificial Sequence
  ENSG00000135968_71 (sequence is synthesized)
cagtcaggactaaggcaacttaatgaaatgcaaaataaatgaaatctgaagtttaaaaatctagattacaattctggtttctaactcagttatgagaccttgggcaaagtcattaaattt

SEQ ID NO: 324440 - DNA, 120 bp, Artificial Sequence
  ENSG00000135968_72 (sequence is synthesized)
ctctgaacttcagatttttgggagtcaataaaccaatacatgtcaaagggcctggtaaactttacagtttagaccaggcgtggtgtctcacccctgcaatctcagcactttgggagccaa

SEQ ID NO: 324441 - DNA, 120 bp, Artificial Sequence
  ENSG00000135968_73 (sequence is synthesized)
acatgaggccaggagtttgagaccagtctgaacaacatggtgaaatcccatctctattaaaagtacaaaaattatctgggtgggatagcatgcacctggaagtcccagctacttgtgggg

SEQ ID NO: 324442 - DNA, 78 bp, Artificial Sequence
  ENSG00000135968_74 (sequence is synthesized)
aaattatctgggtgggatagcatgcacctggaagtcccagctacttgtggggctgaggtgggaggatggcctgaacac

SEQ ID NO: 324443 - DNA, 120 bp, Artificial Sequence
  ENSG00000135968_75 (sequence is synthesized)
aaaaaaacactatacagtttatcagcaaacaggaaagtcttgctagacaatgtaattgattagttccgtgccctggattctgggctcttactgtatgagcactgtaggtgtgagcagcaa

SEQ ID NO: 324444 - DNA, 120 bp, Artificial Sequence
  ENSG00000135968_76 (sequence is synthesized)
caattaagaagctgcagaggtaaaggtataagggcagtgattgaggatgtctgccaagcagatttcaacaagtgtgtttcaagaagtatgcagcaatctgaaatacctaatcctgaaaaa

SEQ ID NO: 324445 - DNA, 120 bp, Artificial Sequence
  ENSG00000135968_77 (sequence is synthesized)
ttgctagaatctagtcttttaattttggccagtatttagcagtagtttggccctctactctaaattaataaaaaataagtagtactatattatgagctgtgttatctaacagtttatctt

SEQ ID NO: 324446 - DNA, 120 bp, Artificial Sequence
  ENSG00000135968_78 (sequence is synthesized)
agctagtagcaattaatttatagcttctattaaaatgagtaacgtatttaaaagtttgattactaagtttttgtttgtttgttttgtttttgagctggagtctcactctgtcgccaggct

SEQ ID NO: 324447 - DNA, 120 bp, Artificial Sequence
  ENSG00000135968_79 (sequence is synthesized)
accatcttggccaggctggtcttgaacttgctgacctcgtgatccacccaccttagcctcccaaactgctaggattacagatttgagccaccacgcccagctttgatgactaaattttaa

SEQ ID NO: 324448 - DNA, 120 bp, Artificial Sequence
  ENSG00000135968_80 (sequence is synthesized)
acgcccagctttgatgactaaattttaagaaatgctttagcaattcttcatacacctttcacttatcttatagttacttaattcctctactcttatcatttgatattttcattttattgt

SEQ ID NO: 324449 - DNA, 120 bp, Artificial Sequence
  ENSG00000135968_81 (sequence is synthesized)
tagggttctctagagggacagaactaattggatggttggatggatggatgggatggatggatggatgcttattaagtattaccttacacgatcactaggccatctgcaggctgaggagca

SEQ ID NO: 324450 - DNA, 87 bp, Artificial Sequence
  ENSG00000135968_82 (sequence is synthesized)
tggatggatgggatggatggatggatgcttattaagtattaccttacacgatcactaggccatctgcaggctgaggagcagtaggag

SEQ ID NO: 324451 - DNA, 120 bp, Artificial Sequence
  ENSG00000135968_83 (sequence is synthesized)
gatgtaggttgggaggctaggccagtctcgccttttcaggtttttctgcctgctttatattcgctggtagctgattagatggtacctaccagataaagggtgggtctgccttccccagcc

SEQ ID NO: 324452 - DNA, 120 bp, Artificial Sequence
  ENSG00000135968_84 (sequence is synthesized)
cactgactcaaatgttaatccctttggcaacaccctcacagacaacactcaggattaatactttgcatcctttaatccaatcagcttgacacctagtattaaccatcacattgtccaaat

SEQ ID NO: 324453 - DNA, 120 bp, Artificial Sequence
  ENSG00000135968_85 (sequence is synthesized)
ggaaaaattattaaacaaatcttttttaaaataaaatgctagctcttgccctaggcttgaaccataaataagtggtgggaagtttatagtcacaaataggtggtgggtattagaaagcag

SEQ ID NO: 324454 - DNA, 120 bp, Artificial Sequence
  ENSG00000135968_86 (sequence is synthesized)
gtaattaatattactgttcaaaatttagggggaatctgtcatctccctgaaacttcagaatcacctggagtaagggtcatttgtattcatggtcactgaccacgtggggtagaaactgca

SEQ ID NO: 324455 - DNA, 120 bp, Artificial Sequence
  ENSG00000135968_87 (sequence is synthesized)
agtcatggttccttcaggcaaagttaatagtggtgacatggaggcatcatgatagagcagcagactccagaagccaatttgactttgtgatttctgcaaaaattacctgtcaactgtgag

SEQ ID NO: 324456 - DNA, 120 bp, Artificial Sequence
  ENSG00000135968_88 (sequence is synthesized)
cctgtttcatcgtctgtaaagtttgaataatgatacctaccccgcctgatagaagattcttatgagggaacatgatacgtgaccagtaaatgttaatgctttccttatacgtgaaatgac

SEQ ID NO: 324457 - DNA, 120 bp, Artificial Sequence
  ENSG00000135968_89 (sequence is synthesized)
ataaaatcttggaatattaatagataggaagaagatgtgtaataaaactgtctataaacacaattctgacaaatttcagaactgggactcatagggcttgtattcagttagatgacatgc

SEQ ID NO: 324458 - DNA, 120 bp, Artificial Sequence
  ENSG00000135968_90 (sequence is synthesized)
tttacaacagagatactgttttatttgtgtcacctacaacatataatctgttgattgaggtatgccgaatagatgaatggcaaagaaagcagacctataaaatatcacatagtaagatat

SEQ ID NO: 324459 - DNA, 120 bp, Artificial Sequence
  ENSG00000135968_91 (sequence is synthesized)
taagactgttagcagcactaacgctgtaccagacagcaatgtatttctttgttgaaacttctaatatgttgatccttgagataaatgcagattagaaaataaaaaatagacatttctaaa

SEQ ID NO: 324460 - DNA, 120 bp, Artificial Sequence
  ENSG00000135968_92 (sequence is synthesized)
ttggaagaaaaaataggaaaaaatcgactagaaaggggaaaattattgctgcagaagaaggagggagaattgttgctctgatgcttgagtaggtaatgagacgcaggatgaaatgcagat

SEQ ID NO: 324461 - DNA, 120 bp, Artificial Sequence
  ENSG00000135968_93 (sequence is synthesized)
cgcacacagacacttcactatggcagccagagggaaggcaccggtgcaagtaaattaataggccaggacagaaattcagatcataactgaatttttagaaacaaataccaagaagtcctg

SEQ ID NO: 324462 - DNA, 120 bp, Artificial Sequence
  ENSG00000135968_94 (sequence is synthesized)
aactcaggagttcaagctaaagaagttaacagagatcaatattggataggtaaaacatattacaggtttcgttgtgaaaatcagacccagcagccaagaggaggagtgcacttatggagc

SEQ ID NO: 324463 - DNA, 120 bp, Artificial Sequence
  ENSG00000135968_95 (sequence is synthesized)
ataaatgttgatctgcatctgatatctctgatacttgatcctaatttgcacactatcacctaaagtcctagcatacctgcatttccaggaaatctaatgagaaagaagtcctgaaagcct

SEQ ID NO: 324464 - DNA, 120 bp, Artificial Sequence
  ENSG00000135968_96 (sequence is synthesized)
ctaattcctggaaacatatgaaacggctagaaaaaagtagactattttggaggattaaagacaatggaaactttttacattgtttgtctcacataatgaataaaattccactttaaaaaa

SEQ ID NO: 324465 - DNA, 120 bp, Artificial Sequence
  ENSG00000135968_97 (sequence is synthesized)
gaaatatagtagccaaataatgagttgttaaaaacacagttcgtagctgtcttttcctcgagctcacattcttgcccctctaacacctgtttgccttctctttcaaaagtgttactttct

SEQ ID NO: 324466 - DNA, 120 bp, Artificial Sequence
  ENSG00000135968_98 (sequence is synthesized)
attgtttaacccaagcaagattggtgtgatttataaatggcttcatgatttattttggatttttcattcatttagcaaattttatttaaatgcccaactattctagaccctggtgataga

SEQ ID NO: 324467 - DNA, 120 bp, Artificial Sequence
  ENSG00000135968_99 (sequence is synthesized)
aaagtggttgaggtacagaccatgtgctcagagatctcactgttgtttgaggtgtggacaagatacagtactaacagcataggaacttaacactgttttgagttaaaaaaaaaaaaaaaa

SEQ ID NO: 324468 - DNA, 120 bp, Artificial Sequence
  ENSG00000135968_100 (sequence is synthesized)
gaagtgcagcggtggcggcggctggttgcgggccggcggcgggctggcggagatggaggatcttgttcaagatggggtggcttcaccagctacccctgggaccgggaaatctaagaattg

SEQ ID NO: 324469 - DNA, 120 bp, Artificial Sequence
  ENSG00000135968_101 (sequence is synthesized)
gctacccctgggaccgggaaatctaagaattggagaaagaaattgaagaactcagatcaaaacctgttactgaaggaactggtgatattattaagagtcttgctctgtcgcccaggctgg

SEQ ID NO: 324470 - DNA, 120 bp, Artificial Sequence
  ENSG00000135968_102 (sequence is synthesized)
ctcttcttctggaaaaagcagagactgagcaacagtgtctttctctgaaaaaggaaaatataaaaatgaagcaagaggttgagctataatgccatctttactaaaagcgaaaaaaagtaa

SEQ ID NO: 324471 - DNA, 120 bp, Artificial Sequence
  ENSG00000135968_103 (sequence is synthesized)
gttgattttcacacatgactaaataccattatctctttagttctacggtattcagaggcatttcttgcctatttcttgcctattaggtctgggctaatttgagtaatagatttaatattg

SEQ ID NO: 324472 - DNA, 120 bp, Artificial Sequence
  ENSG00000135972_0 (sequence is synthesized)
ggtcctggagctcccacagctaacatggcggcgccctgtgtgtcctacggcggagcagtttcgtaccggcttcttctctggggtaggggtagcctcgcccggaagcaaggcctctggaaa

SEQ ID NO: 324473 - DNA, 120 bp, Artificial Sequence
  ENSG00000135972_1 (sequence is synthesized)
accgcggcccctgagttgcaaacaaatgtcagatcccagatattaaggctaagacatactgcatttgtaataccaaagaaaaacgttcctacctcaaaacgtgaaacttacacagaggat

SEQ ID NO: 324474 - DNA, 120 bp, Artificial Sequence
  ENSG00000135972_2 (sequence is synthesized)
tttattaaaaagcagattgaagagttcaacataggaaagagacatttagccaacatgatgggagaagatccagaaactttcactcaagaagatattgacagagctattgcttaccttttc

SEQ ID NO: 324475 - DNA, 120 bp, Artificial Sequence
  ENSG00000135972_3 (sequence is synthesized)
ccaagtggtttgtttgagaaacgagccaggccagtaatgaagcatcctgaacagatttttccaagacaaagagcaatccagtggggagaagatggccgtccatttcactatctcttctat

SEQ ID NO: 324476 - DNA, 120 bp, Artificial Sequence
  ENSG00000135972_4 (sequence is synthesized)
actggcaaacagtcatactattcattaatgcatgatgtatatggaatgttactcaatttagaaaaacatcaaagtcacttgcaagccaaaagtctgctcccagaaaaaactgtaaccaga

SEQ ID NO: 324477 - DNA, 120 bp, Artificial Sequence
  ENSG00000135972_5 (sequence is synthesized)
tgctagaaaagttattgacatcgcagtgtggtgctgctgaggaagaatttgtgcagaggtttcgaagaagtgtaactcttgaatcaaaaaaacagctgattgaacctgtacagtatgatg

SEQ ID NO: 324478 - DNA, 120 bp, Artificial Sequence
  ENSG00000135972_6 (sequence is synthesized)
agcaaggaatggcctttagcaaaagtgaaggtaaaagaaagactgcaaaagcagaagcaattgtttataaacatggaagtggaagaataaaagtaaatggaattgattaccagctttact

SEQ ID NO: 324479 - DNA, 120 bp, Artificial Sequence
  ENSG00000135972_7 (sequence is synthesized)
tcccgatcacacaggacagagaacagctgatgttccctttccactttgttgaccggctgggaaagcacgacgtgacctgcacagtctcagggggcgggaggtcagcgcaggctggagcaa

SEQ ID NO: 324480 - DNA, 120 bp, Artificial Sequence
  ENSG00000135972_8 (sequence is synthesized)
tacgactggcaatggcaaaagccttgtgcagctttgtcaccgaggacgaggtcgagtggatgagacaagctggactacttactactgatccacgtgtgagggaacggaagaagccaggcc

SEQ ID NO: 324481 - DNA, 120 bp, Artificial Sequence
  ENSG00000135972_9 (sequence is synthesized)
aagagggagcccgcagaaagtttacgtggaagaaacgctaagggtttgctcccaggaaaggagaggaagagctatatatatgtgccgacatgtggcagacacacagtaaataatggctga

SEQ ID NO: 324482 - DNA, 120 bp, Artificial Sequence
  ENSG00000135972_10 (sequence is synthesized)
ccagcatgagggcagtactgtcagaaatttctttgagctgtgagatggatttatttttaaatgctactttgtaaaggtgacctttaaaaaataaaaggaaaataaagaatgttagtttca

SEQ ID NO: 324483 - DNA, 120 bp, Artificial Sequence
  ENSG00000135972_11 (sequence is synthesized)
atctagatgtgcagaagtcattgagagtctgtgagatgcaatcaagagagtagctgagcacagaacgcccaggccagtgactggagaggagcatggagctctgcccacccaatatcctag

SEQ ID NO: 324484 - DNA, 120 bp, Artificial Sequence
  ENSG00000135972_12 (sequence is synthesized)
atctaaatactttttgaaagtgaatttaaatctcaatttcataaacataatacagagaaattgatttttctttgaatgataaatctctttgtttcttgaaagaaaagatttggcactaaa

SEQ ID NO: 324485 - DNA, 120 bp, Artificial Sequence
  ENSG00000135972_13 (sequence is synthesized)
gatacgcaggaaaagtgatgcatctgcatgctgttttaaaagcagcgtgaagatgcagaagtgtcatcctgtcaaaattcatcaggaaaagcaacattggaaagatcaagtatgcaaaaa

SEQ ID NO: 324486 - DNA, 120 bp, Artificial Sequence
  ENSG00000135973_0 (sequence is synthesized)
cagaggtccacagacatccaggaagatgcagccagcagacaaagaatggcagccacccaagtgctgaggggagccctcccggccatttctgtcccagctccaagggtctctccacgatgg

SEQ ID NO: 324487 - DNA, 120 bp, Artificial Sequence
  ENSG00000135973_1 (sequence is synthesized)
cctgcaacagcacgtcccttgaggcttacacatacctgctgctgaacaccagcaacgcctcagactcggggtccacccagttgcccgcacccctcaggatctccttggccatagtgatgc

SEQ ID NO: 324488 - DNA, 120 bp, Artificial Sequence
  ENSG00000135973_2 (sequence is synthesized)
tgctgatgaccgtggtggggttcctgggcaacactgtggtctgcatcatcgtgtaccagaggccggctatgcgctcggccatcaacctgctgctggccaccctggccttctccgacatca

SEQ ID NO: 324489 - DNA, 120 bp, Artificial Sequence
  ENSG00000135973_3 (sequence is synthesized)
tgctgtccctctgctgcatgcccttcaccgccgtcaccctcatcaccgtgcgctggcactttggggaccacttctgccgcctctcagccacgctctactggttttttgtcctggagggcg

SEQ ID NO: 324490 - DNA, 120 bp, Artificial Sequence
  ENSG00000135973_4 (sequence is synthesized)
tggccatcctgctcatcatcagcgtggaccgcttcctcatcatcgtccagcgccaggacaagctgaacccgcgcagggccaaggtgatcatcgcggtctcctgggtgctgtccttctgca

SEQ ID NO: 324491 - DNA, 120 bp, Artificial Sequence
  ENSG00000135973_5 (sequence is synthesized)
tcgcggggccctcgctcacgggctggacgctggtggaggtgccggcgcgggccccacagtgcgtgctgggctacacggagctccccgctgaccgcgcctacgtggtcaccttggtggtgg

SEQ ID NO: 324492 - DNA, 120 bp, Artificial Sequence
  ENSG00000135973_6 (sequence is synthesized)
ccgtgttcttcgcgccctttggcgtcatgctgtgcgcctacatgtgcatcctcaacacggtccgcaagaacgccgtgcgcgtgcacaaccagtcggacagcctggacctgcggcagctca

SEQ ID NO: 324493 - DNA, 120 bp, Artificial Sequence
  ENSG00000135973_7 (sequence is synthesized)
tggacttgagcttcaagaccaaggccttcaccaccatcctgatcctcttcgtgggcttctccctctgctggctgccccactccgtctacagcctcctgtctgtgtttagccagcgctttt

SEQ ID NO: 324494 - DNA, 120 bp, Artificial Sequence
  ENSG00000135973_8 (sequence is synthesized)
actgcggttcctccttctacgccaccagcacctgcgtcctgtggctcagttacctcaagtccgtcttcaaccccatcgtctactgctggagaatcaaaaaattccgcgaggcctgcatag

SEQ ID NO: 324495 - DNA, 120 bp, Artificial Sequence
  ENSG00000135973_9 (sequence is synthesized)
agttgctgccccagaccttccaaatcctccccaaagtgcctgagcggatccgaaggagaatccagccaagcacagtctacgtgtgcaatgaaaaccagtctgcggtttagggggtcaggg

SEQ ID NO: 324496 - DNA, 120 bp, Artificial Sequence
  ENSG00000135973_10 (sequence is synthesized)
ggccacagagaaggggcagctgagccccagtcccagggtggatctgtcctgctctgttccctggcatgttggtcatagtctgcactttgtggtggcaatttaagcacaaaggtactcatt

SEQ ID NO: 324497 - DNA, 120 bp, Artificial Sequence
  ENSG00000135973_11 (sequence is synthesized)
tgtaatcagatgagctgcagctcccaaatttcaaattttggcacgatgaattatttttgtttctctttgcagagagccaaatatggggctgatgggaactgcaacgtcattaagtcaaaa

SEQ ID NO: 324498 - DNA, 120 bp, Artificial Sequence
  ENSG00000135973_12 (sequence is synthesized)
atggagtgggctggggagtgcagaagttgggcagaaagggaggaggagggcaacagggaatgaagctggttgagtgtggggcaggaggactggtcagtcacaagagcttcaacctgccct

SEQ ID NO: 324499 - DNA, 120 bp, Artificial Sequence
  ENSG00000135973_13 (sequence is synthesized)
gcgagccctctctgcacctgctcaagagaaaccctgagaaaccccagtaggtgtgagctcctgggtgttcattcattttgtttgacaccagggttcttcagctattgatgtttgtggtgt

SEQ ID NO: 324500 - DNA, 120 bp, Artificial Sequence
  ENSG00000135974_0 (sequence is synthesized)
cttcgcggggctttgtgggtagccgactggggtctcctggcgacgaccatggcgggggatgtgggcggtcgcagctgcacggactcggaactgctgctgcacccggagctgctgtcccag

SEQ ID NO: 324501 - DNA, 120 bp, Artificial Sequence
  ENSG00000135974_1 (sequence is synthesized)
gagttccttctcctcactctggagcagaagaacatagctgttgaaactgatgtaagagtaaacaaagacagtcttactgacctttatgtccaacatgcaataccattgcctcagagggat

SEQ ID NO: 324502 - DNA, 120 bp, Artificial Sequence
  ENSG00000135974_2 (sequence is synthesized)
ttgccgaagaatagatgggggaaaatgatggaaaagaaaagagaacaacatgagattaaaaatgagactaaaaggagtagcactgtagatgggttaaggaaaagacccctcatcgtattt

SEQ ID NO: 324503 - DNA, 120 bp, Artificial Sequence
  ENSG00000135974_3 (sequence is synthesized)
gatggaagttcaacaagtacaagcataaaagtgaaaaagacagagaatggagataatgatcgactgaagcctcccccgcaggcaagctttaccagtaatgcctttagaaaattatcaaat

SEQ ID NO: 324504 - DNA, 120 bp, Artificial Sequence
  ENSG00000135974_4 (sequence is synthesized)
tcctcttcgagtgtttcacccctaattttgtcttccaatttgcctgtgaacaataaaacggaacacaataataatgacgctaaacagaaccatgacttaacgcataggaaaagtccttca

SEQ ID NO: 324505 - DNA, 120 bp, Artificial Sequence
  ENSG00000135974_5 (sequence is synthesized)
ggccctgtgaagtcgccaccattgtcccctgttggaactactccagtgaagttaaagagagctgctcctaaagaagaggcagaggccatgaataacctgaagcccccacaagcaaaaagg

SEQ ID NO: 324506 - DNA, 120 bp, Artificial Sequence
  ENSG00000135974_6 (sequence is synthesized)
aagatacaacatgttacttggccctgaagaaaagtttccaaaaatgtaaatatactgtaactgtagtttttcaaatatgttcatatatattgacaatatttacagaaatcctgattattg

SEQ ID NO: 324507 - DNA, 120 bp, Artificial Sequence
  ENSG00000135974_7 (sequence is synthesized)
tggaattttcttaagaggtttcaaataggtttaaaaaaataaaggatttattttccttcccttcttccctccctcccttccttttttaaaattcttgcctgtcttgccctgattaggaaa

SEQ ID NO: 324508 - DNA, 120 bp, Artificial Sequence
  ENSG00000135974_8 (sequence is synthesized)
gaatatctttttaaaccaatggcttagtatatgtcatttatattgaccctactgaaattattagctacaaatgtgctataaagcatccattgaattggccaggcgcagtggctcacgcct

SEQ ID NO: 324509 - DNA, 120 bp, Artificial Sequence
  ENSG00000135974_9 (sequence is synthesized)
gcgaaactccatctcaaaaaaaaaaaagcattcagtgaattttcggagttactctcattagccttgttcagagtctttgggggaaatttgagatttttgagattttttttaaaaactcaa

SEQ ID NO: 324510 - DNA, 120 bp, Artificial Sequence
  ENSG00000135974_10 (sequence is synthesized)
tcaaatattttactagtttgcctgccattttatttcttttacaaagcagaagcatataccaatttatcacagtattttagtaaatactgcaacattcatccttaaatgttcaccaagaaa

SEQ ID NO: 324511 - DNA, 120 bp, Artificial Sequence
  ENSG00000135974_11 (sequence is synthesized)
agcatctttgtagtagtgctggaaaactattcagaatatacagataaaaatgctgttctttaattgcttacattgcttcttcccataaaaagcaaaaaggaatcagtgcttgctattgct

SEQ ID NO: 324512 - DNA, 120 bp, Artificial Sequence
  ENSG00000135974_12 (sequence is synthesized)
cctttccttgaagttgtaacaattgatacatatattatgagttgactggtcgattctgtacctggcccatcctttagaatgttcttgtcatgtagcagtcctacgtactcttttcatgag

SEQ ID NO: 324513 - DNA, 120 bp, Artificial Sequence
  ENSG00000135974_13 (sequence is synthesized)
cagtctgtgatctcactctgtgagttcagctattactcgctcgtgggagcttaatcttttcaaaatgaagttgatttaaaaagtcttcaggcagagtaatcatgttagaggtggtattcg

SEQ ID NO: 324514 - DNA, 120 bp, Artificial Sequence
  ENSG00000135974_14 (sequence is synthesized)
atggaagaaagtttagagagttaggagtgggggtagaattctagaatttataagagtccaggaagcatagcagtcaggggcaaaaattagcgtaatatggagtaggcaatagaggagcta

SEQ ID NO: 324515 - DNA, 120 bp, Artificial Sequence
  ENSG00000135974_15 (sequence is synthesized)
ctggagtcagaagtcactgcagagtgcaacataggaagatggactcctagcttacatgagattccctgcagctgtaatatagacaattcccacatggctgttctacacagaattacctgc

SEQ ID NO: 324516 - DNA, 120 bp, Artificial Sequence
  ENSG00000135974_16 (sequence is synthesized)
taagattttttgtttatttttgtttgagtggtattttcactccaattgtataatggaaatcagtgggaaaatagggtttaccttatattcatgagttctagtttctactgttctgctatg

SEQ ID NO: 324517 - DNA, 120 bp, Artificial Sequence
  ENSG00000135974_17 (sequence is synthesized)
tcatacttttttcgttatatgattgatcttcaaattgggatttacctttttcaatatgttttaaagtagtcttattcctcttttgatttgttaaacaagcattttagttcagctattgaa

SEQ ID NO: 324518 - DNA, 120 bp, Artificial Sequence
  ENSG00000135974_18 (sequence is synthesized)
tagccttccaaaaaattaattcagccttgcaggtaagtaccatactaagactttaacccaatagtttttaatcattctgcctttattccaaactgtaaatctgtacacataagataaaac

SEQ ID NO: 324519 - DNA, 120 bp, Artificial Sequence
  ENSG00000135974_19 (sequence is synthesized)
atactaagtattgcataaattgttaacgttacagtaaattgttatctgcagggctgacagacataatgttggtgggcaactgtgatcctatacatacatatatgcaaaaggggattttaa

SEQ ID NO: 324520 - DNA, 120 bp, Artificial Sequence
  ENSG00000135974_20 (sequence is synthesized)
aagtgcagattatagagtagattgacaaattttattttatattcagttgtcctctctgcttccatctgtgttgctctcttagttgagagagagttagccatttgacgattttaagtcagt

SEQ ID NO: 324521 - DNA, 120 bp, Artificial Sequence
  ENSG00000135974_21 (sequence is synthesized)
gggaacttatttttagttactcaataaaattaatattttatttgtattttaacttacagagtaggttggtaataacagctgaactgtgtaacattgttgcttcaaattgaagtttatatt

SEQ ID NO: 324522 - DNA, 120 bp, Artificial Sequence
  ENSG00000135974_22 (sequence is synthesized)
atgaacattcagaatcaatgctcatgtagcagcatattattgagctattttgagtttgaaatgtggagaaacgctaaaccatgtactatgtgttaacataatcccaccttcttagagctt

SEQ ID NO: 324523 - DNA, 120 bp, Artificial Sequence
  ENSG00000135974_23 (sequence is synthesized)
tgttccttctgaaggtgtatagatacagcttgtcttgaaatgtctttctccacataatgaagcatgctgaatgctgggaatctggagcagcagccctgggagccctgagttttgaagtgt

SEQ ID NO: 324524 - DNA, 120 bp, Artificial Sequence
  ENSG00000135974_24 (sequence is synthesized)
tttggtttgcttcaaaggttagaagaacttgatatgtatggcaaacaactttagaatactagttactcactaacatgaggcgggtaatgttgctctagattctatattccagtaaagcca

SEQ ID NO: 324525 - DNA, 120 bp, Artificial Sequence
  ENSG00000135974_25 (sequence is synthesized)
gcttttcttattattggagtaggcaaatgaatggcattagaattagtgggtggcttgtaagttgtagttataggcactttaccacttcctgccattagcaggcatccttgttttttcttt

SEQ ID NO: 324526 - DNA, 120 bp, Artificial Sequence
  ENSG00000135974_26 (sequence is synthesized)
tccctctttgttccttcttttccctttctccttatacattttctttctctactttaattctccttcctccttactgtagatcccaagcttctagcttaggtttgcaagtcatattgcttg

SEQ ID NO: 324527 - DNA, 120 bp, Artificial Sequence
  ENSG00000135974_27 (sequence is synthesized)
gccctccacattcactgagaggtgaagataggctgaccccctgtcctcttacatttgagggatcatagactgctgtgtgaattctggaaagtctcaggtccctaccagggcactgaatgg

SEQ ID NO: 324528 - DNA, 120 bp, Artificial Sequence
  ENSG00000135974_28 (sequence is synthesized)
cttctcaatggctgtagagacagtacagttttccaaagcagcctaattcatctggacagctaccaggcactttggaaagttggttcagttactactatgaggccataatatatttgctgg

SEQ ID NO: 324529 - DNA, 120 bp, Artificial Sequence
  ENSG00000135974_29 (sequence is synthesized)
tattaaaattcttcagaattggaattactatttgaaataatattttggttgacttaagttttgagagacaattctaaaattgatctagagactcattcaatagcaatgtgaccttttaaa

SEQ ID NO: 324530 - DNA, 90 bp, Artificial Sequence
  ENSG00000135974_30 (sequence is synthesized)
gagcttcctctatttactactgttgaacttcagtaatttttagaggctaaataatggtcagaatgtttttaagtgtgctcttttattaca

SEQ ID NO: 324531 - DNA, 120 bp, Artificial Sequence
  ENSG00000135974_31 (sequence is synthesized)
ataatggtcagaatgtttttaagtgtgctcttttattacatgcttgtgcaggttttgtaattcagtacagaaaagtttaaccttgtacatttttgtatgtaaaaagtcttttaagtagtc

SEQ ID NO: 324532 - DNA, 120 bp, Artificial Sequence
  ENSG00000135974_32 (sequence is synthesized)
ttatccttatttaaataaacagaataaaattaccttgagtaggtctgttattcttattaaaatggaaaaatgctctgtaatgacttgatctgtttttatttgagtgaacaattttggaaa

SEQ ID NO: 324533 - DNA, 120 bp, Artificial Sequence
  ENSG00000135974_33 (sequence is synthesized)
gtattctttatagtacaactttctatacctggattgattaagatcagatgtgattcgagtagtccagccatatcttgtagcccttctttgaatgagagggtggctggagtggtctggtgc

SEQ ID NO: 324534 - DNA, 120 bp, Artificial Sequence
  ENSG00000135974_34 (sequence is synthesized)
tgggatatcacggtgctacagagcctgacatgttgactgtcactacatgttgagggatggaaatagaagtctctgaacttcccatgtaatattaaagctcttaacaaaatgagacaaact

SEQ ID NO: 324535 - DNA, 120 bp, Artificial Sequence
  ENSG00000135974_35 (sequence is synthesized)
agagattcagttgagagattttatgttagagtgatctgaaaaaaagttaatttctaaactgctatcttaatattattatatttggagactgatgctgtaaattaaataacttggaaaaga

SEQ ID NO: 324536 - DNA, 120 bp, Artificial Sequence
  ENSG00000135976_0 (sequence is synthesized)
agggcggtttctctgcctcgggcctgttgggcagggccggctaaggtgcgcgtgctcgctggttctaacccttctgttgggcgtttctgctgagaggcgggaggcgctgagagtctgtgc

SEQ ID NO: 324537 - DNA, 120 bp, Artificial Sequence
  ENSG00000135976_1 (sequence is synthesized)
ggaggtccgtggacagactgctttgctcgttgttgctcttcggaggcggcgatccccgaaggcgagctgaaatacggctgcaggctacaatttgcagccgacgattatggaagacggcaa

SEQ ID NO: 324538 - DNA, 120 bp, Artificial Sequence
  ENSG00000135976_2 (sequence is synthesized)
gcgggagaggtggcccaccctcatggagcgcttgtgctcggatggcttcgcatttccccaataccccattaaaccgtatcatctgaagaggatccacagagctgtcttacatggtaatct

SEQ ID NO: 324539 - DNA, 120 bp, Artificial Sequence
  ENSG00000135976_3 (sequence is synthesized)
agagaaactgaagtaccttctgctcacgtattatgacgccaataagagagacaggaaggaaaggaccgccctacatttggcctgtgccactggccaaccggaaatggtacatctcctggt

SEQ ID NO: 324540 - DNA, 120 bp, Artificial Sequence
  ENSG00000135976_4 (sequence is synthesized)
gtccagaagatgtgagcttaacctctgcgaccgtgaagacaggacacctctgatcaaggctgtacaactgaggcaggaggcttgtgcaactcttctgctgcaaaatggcgccaatccaaa

SEQ ID NO: 324541 - DNA, 120 bp, Artificial Sequence
  ENSG00000135976_5 (sequence is synthesized)
tattacggatttctttggaaggactgctctgcactacgctgtgtataatgaagatacatccatgatagaaaaacttctttcacatggtacaaatattgaagaatgcagcaagtgtgaata

SEQ ID NO: 324542 - DNA, 120 bp, Artificial Sequence
  ENSG00000135976_6 (sequence is synthesized)
tcagccactgttatttgctgtgagtcgaagaaaagtgaaaatggtggaatttttattaaagaaaaaagcaaatgtaaatgccattgattatcttggcagatcagccctcatacatgctgt

SEQ ID NO: 324543 - DNA, 120 bp, Artificial Sequence
  ENSG00000135976_7 (sequence is synthesized)
tactcttggagaaaaagatatagtcattcttcttctgcagcacaatattgatgtgctttctcgagatgcgtttcgaaagattgcaggagattatgccattgaggctaagaatagagtcat

SEQ ID NO: 324544 - DNA, 120 bp, Artificial Sequence
  ENSG00000135976_8 (sequence is synthesized)
ttttgatctaatttatgaatacgaaagaaagagatatgaagatcttcctataaatagcaatccagtgtcttctcagaaacaaccagccttgaaggctacaagtggcaaggaagattctat

SEQ ID NO: 324545 - DNA, 120 bp, Artificial Sequence
  ENSG00000135976_9 (sequence is synthesized)
ttcaaatatagccacagaaataaaggatggacaaaaatctgggacagtgtcttctcagaaacaaccggccttgaaggatacaagtgacaaggatgattctgtttcgaacacagccacaga

SEQ ID NO: 324546 - DNA, 120 bp, Artificial Sequence
  ENSG00000135976_10 (sequence is synthesized)
aataaaagatgaacaaaaatctgggacagtgcttcctgctgttgaacagtgtttaaacaggagtctctacagacctgatgctgttgcacagcctgtgacagagaatgagttttctttgga

SEQ ID NO: 324547 - DNA, 120 bp, Artificial Sequence
  ENSG00000135976_11 (sequence is synthesized)
atctgagattatttcaaaactatacatcccaaagagaaagattatttctccacgatctataaaagatgtgcttcctcctgttgaagaggctgttgacaggtgtctctacctactggaccg

SEQ ID NO: 324548 - DNA, 120 bp, Artificial Sequence
  ENSG00000135976_12 (sequence is synthesized)
ttttgcacagcctgtgacaaaggataagtttgctttggaatctgagaatatttcagaaccatactttacgaacagaaggactatttctcaacaatctgcagaaaatttagatgctgcatg

SEQ ID NO: 324549 - DNA, 120 bp, Artificial Sequence
  ENSG00000135976_13 (sequence is synthesized)
tggcattgacaaaacagaaaatggaaacatgtttgaagaccaaaatgttgataaggaaggaaaagcactaccagcaactggacaaaaagcaaatgtgtctcctgagcaaccgcctttatt

SEQ ID NO: 324550 - DNA, 120 bp, Artificial Sequence
  ENSG00000135976_14 (sequence is synthesized)
cacgcatacggtgaaagacagagatcacatttcaactagattcttaggaggtatggattcactaacttccagtgaagaatcttctgagcgacctcctttatccacgcttactctgaaaga

SEQ ID NO: 324551 - DNA, 120 bp, Artificial Sequence
  ENSG00000135976_15 (sequence is synthesized)
ggcagatcccagttcaaaagcagccatgagaaggaaggattcaccacctccaggaaaagtgtcttctcagaaacaaccagctgagaaggctacaagtgacgacaaagattctgtttcaaa

SEQ ID NO: 324552 - DNA, 120 bp, Artificial Sequence
  ENSG00000135976_16 (sequence is synthesized)
tatagccacagaaataaaggagggaccaatatctgggacagtgtcttctcagaaacaaccagctgagaaggctacaagtgacgagaaagattctgtttcaaatatagccacagaaataaa

SEQ ID NO: 324553 - DNA, 120 bp, Artificial Sequence
  ENSG00000135976_17 (sequence is synthesized)
gaagggacaacaatctgggacagtgtctcctcagaaacaatcggcctggaaggttatatttaaaaagaaagtttctcttttgaatattgccacaagaataatgggtggtgggaaatctgg

SEQ ID NO: 324554 - DNA, 120 bp, Artificial Sequence
  ENSG00000135976_18 (sequence is synthesized)
aacagtgtcttctcagaaacaaccagcctcaaaggctacaagtgacaagacagattctgctttgaatatagctacagaaataaaggatggactacagtgtgggacagtgtcttctcagaa

SEQ ID NO: 324555 - DNA, 120 bp, Artificial Sequence
  ENSG00000135976_19 (sequence is synthesized)
acaaccagccttgaaggctacaactgacgaggaagactctgtttcgaatatagccacagaaataaaggatggagaaaaatctgggacagtgtcttctcagaagcaaccagccttgaaggc

SEQ ID NO: 324556 - DNA, 120 bp, Artificial Sequence
  ENSG00000135976_20 (sequence is synthesized)
tacaactgacgaggaagattctgtttcgaatatagccacagaaataaaggatggagaaaaatctgggacagtgtcttctcagaaacaaccagccttgaaggctacaactgatgagaaaga

SEQ ID NO: 324557 - DNA, 120 bp, Artificial Sequence
  ENSG00000135976_21 (sequence is synthesized)
ttctgtttcgaacatagccacagaaataaaggatggagaaaaatctgggacagtgtcttctcagaaaccaccagccttgacggctacaagtgacgaggaaggttctgttttgagtatagc

SEQ ID NO: 324558 - DNA, 120 bp, Artificial Sequence
  ENSG00000135976_22 (sequence is synthesized)
cagagaaaacaaggatggagaaaaatctaggacagtgtcttctcggaaaaaaccagccttgaaggctacaagtgatgagaaggattctttttcgaatataaccagaggaaaaaaggatgg

SEQ ID NO: 324559 - DNA, 120 bp, Artificial Sequence
  ENSG00000135976_23 (sequence is synthesized)
agaaatatctaggaaagtgtcttctcagaaaccaccaaccttgaagggtacaagtgacgaggaagattctgttttgggtatagccagagaaaacaaggatggagaaaaatctaggacagt

SEQ ID NO: 324560 - DNA, 120 bp, Artificial Sequence
  ENSG00000135976_24 (sequence is synthesized)
gtcttctgagaaaccaccaggcttgaaggcttcaagtgccgagaaagattctgttttgaatatagccagaggaaaaaaggatggagaaaaaactaagagagtgtcttctcggaaaaaacc

SEQ ID NO: 324561 - DNA, 120 bp, Artificial Sequence
  ENSG00000135976_25 (sequence is synthesized)
cttctcagaaaccaccagccttgaagggtacaagtgacgaggaagattctgttttgggtatagccagagaaaacaaggatggagaaaaatctaggacagtgtcttctgagaaaccaccag

SEQ ID NO: 324562 - DNA, 120 bp, Artificial Sequence
  ENSG00000135976_26 (sequence is synthesized)
gcttgaaggctacaagtgatgagaaagattctgttttgaatatagccagaggaaaaaaggatggagaaaaaactaggacagtgtcttctcagaaaccaccaaccttgaaggctacaagtg

SEQ ID NO: 324563 - DNA, 120 bp, Artificial Sequence
  ENSG00000135976_27 (sequence is synthesized)
atgaggaagattctgttttgagtatagccagagaaaacaaggatggagaaaaatctaggacagtgtcttctgagaaaccatcaggcttgaaggctacaagtgccgagaaagattctgttt

SEQ ID NO: 324564 - DNA, 120 bp, Artificial Sequence
  ENSG00000135976_28 (sequence is synthesized)
tgaatatagccagaggaaaaaagtatggagaaaaaactaagagagtgtcttctcggaaaaaaccagccttgaaggctacaagtgacgagaaagattctgttttgtatatagccagagaaa

SEQ ID NO: 324565 - DNA, 120 bp, Artificial Sequence
  ENSG00000135976_29 (sequence is synthesized)
aaaaggatggagaaaaatctaggacagtgtcttctccgaaacaaccagcattgaaggctatctgtgacaaggaagattctgttccgaatatggccacggaaaaaaaggatgaacaaatat

SEQ ID NO: 324566 - DNA, 120 bp, Artificial Sequence
  ENSG00000135976_30 (sequence is synthesized)
ctgggacagtgtcttgtcagaaacaaccagccttgaaggctacaagtgacaagaaagattctgtttcgaatatacccacagaaataaaggatggacaacaatctggaacagtgtcttctc

SEQ ID NO: 324567 - DNA, 120 bp, Artificial Sequence
  ENSG00000135976_31 (sequence is synthesized)
agaaacaaccggcctggaaggctacaagtgtcaagaaagattctgtttcgaatatagccacagaaataaaggatggacaaatacgtgggacagtgtctcctcagaaacaatcggcccaga

SEQ ID NO: 324568 - DNA, 120 bp, Artificial Sequence
  ENSG00000135976_32 (sequence is synthesized)
aggttatatttaaaaagaaagtttctcttttgaatattgccacaagaataacaggcggttggaaatctggaacagagtatcctgagaatctgcccaccttgaaggctacaattgaaaata

SEQ ID NO: 324569 - DNA, 120 bp, Artificial Sequence
  ENSG00000135976_33 (sequence is synthesized)
aaaattctgttctgaatacagccaccaaaatgaaggatgtacaaacatccacaccagcagaacaagacttagaaatggcatcagagggagagcaaaagaggcttgaagaatatgaaaata

SEQ ID NO: 324570 - DNA, 120 bp, Artificial Sequence
  ENSG00000135976_34 (sequence is synthesized)
accagccacaggtgaaaaaccaaatacattctagggatgaccttgatgacataattcagtcatctcaaacagtctcagaggacggtgactcgctttgctgtaattgtaagaatgtcatat

SEQ ID NO: 324571 - DNA, 120 bp, Artificial Sequence
  ENSG00000135976_35 (sequence is synthesized)
tactcattgatcaacatgaaatgaagtgtaaagattgtgttcacctattgaaaattaaaaatacattttgtttatggaaaagattaataaaacttaaagataaccactgtgagcaactta

SEQ ID NO: 324572 - DNA, 120 bp, Artificial Sequence
  ENSG00000135976_36 (sequence is synthesized)
gagtaaaaattcgaaaactgaaaaataaggctagtgtactacaaaagagaatatctgaaaaagaagaaataaaatcgcagttaaagcatgaaatacttgaattggaaaaagaactctgta

SEQ ID NO: 324573 - DNA, 120 bp, Artificial Sequence
  ENSG00000135976_37 (sequence is synthesized)
gtttgagatttgccatacagcaagaaaaaaagaaaagaagaaatgttgaagaggtgcaccaaaaagttagggaaaagttaagaataacagaagagcaatataggatagaagctgatgtga

SEQ ID NO: 324574 - DNA, 120 bp, Artificial Sequence
  ENSG00000135976_38 (sequence is synthesized)
caaaaccaattaaaccggctctcaaatcagcagaggtggaattgaagacaggaggaaataattcaaatcaggtttctgaaactgatgaaaaagaagacctgctgcatgaaaaccgcttga

SEQ ID NO: 324575 - DNA, 120 bp, Artificial Sequence
  ENSG00000135976_39 (sequence is synthesized)
tgcaagatgaaattgccaggctcaggctggaaaaagacacaataaaaaaccaaaacctggaaaagaaatacttaaaagactttgaaattgtgaaaagaaagcatgaagaccttcaaaagg

SEQ ID NO: 324576 - DNA, 120 bp, Artificial Sequence
  ENSG00000135976_40 (sequence is synthesized)
ctctaaaacggaatggggaaacattagcaaaaacgatagcctgttatagtggacagcttgctgctctgacagatgaaaacacaacgctccgttccaaactggagaagcaaagagagagca

SEQ ID NO: 324577 - DNA, 120 bp, Artificial Sequence
  ENSG00000135976_41 (sequence is synthesized)
ggcaaagactggaaacagaaatgcaatcataccattgtagactgaatgctgctcgatgtgatcatgatcaaagtcactcatcaaaaagagaccaagagcttgctttccagggcacagtag

SEQ ID NO: 324578 - DNA, 120 bp, Artificial Sequence
  ENSG00000135976_42 (sequence is synthesized)
ataaatgtcgtcacttacaggaaaatttgaattctcatgttctgattctttctctgcaactttctaaagctgagagtaagtccagagtcctcaaaactgagctccattacacaggagagg

SEQ ID NO: 324579 - DNA, 120 bp, Artificial Sequence
  ENSG00000135976_43 (sequence is synthesized)
ctctgaaagaaaaggctttggtttttgaacacgtgcaaagtgagctaaagcaaaaacagagtcaaatgaaggacattgaaaaaatgtacaaaagtggatacaatacaatggaaaaatgca

SEQ ID NO: 324580 - DNA, 120 bp, Artificial Sequence
  ENSG00000135976_44 (sequence is synthesized)
tagaaaaacaggaaagattttgtcaactaaaaaaacaaaatatgttgcttcaacagcaactggatgatgctcgcaacaaagctgacaatcaagaaaaagcaatacttaatattcaagcca

SEQ ID NO: 324581 - DNA, 120 bp, Artificial Sequence
  ENSG00000135976_45 (sequence is synthesized)
gatgtgatgctagagtacaaaaccttcaagctgagtgcagaaagcaccgtcttttactagaagaagacaataaaatgttggtcaatgaactgaatcattcgaaagaaaaagaatgccaat

SEQ ID NO: 324582 - DNA, 120 bp, Artificial Sequence
  ENSG00000135976_46 (sequence is synthesized)
atgaaaaagagaaagcagaaagagaagtagctgtgagacagcttcaacaaaaacgagatgatgtcttaaacaaaggatcagcaacaaaagctctgctggatgcttcatcgcgtcactgca

SEQ ID NO: 324583 - DNA, 120 bp, Artificial Sequence
  ENSG00000135976_47 (sequence is synthesized)
cctatttagaaaatgggatgcaggattcaaggaagaaattagaccagatgagaagtcaatttcaagaaatacaggatcaacttacagctactataagatgtactaaggagatggaaggcg

SEQ ID NO: 324584 - DNA, 120 bp, Artificial Sequence
  ENSG00000135976_48 (sequence is synthesized)
acacacaaaagcttgaagtagaacatgtgatgatgagaaaaattattaaaaaacaggatgaccaaattgagcggcttgagaaaatcctgcagcattcaagtttgatgctgcaggtgtttg

SEQ ID NO: 324585 - DNA, 120 bp, Artificial Sequence
  ENSG00000135976_49 (sequence is synthesized)
agagctagatgaagatatggacatttctggaattaagagccccctctacattgagcacaagacagtgacgaatccacattcttcagccagaaagtcacctctgagagccaaatgtctgac

SEQ ID NO: 324586 - DNA, 120 bp, Artificial Sequence
  ENSG00000135976_50 (sequence is synthesized)
tcccgtcctcccgcctcgcacccatcagcgcggaccccgggggcgacgcagtggcgaagtggggctgtgggcccagcggtggcaccaggcggagaagcaccactcaaccccatccctggg

SEQ ID NO: 324587 - DNA, 120 bp, Artificial Sequence
  ENSG00000135976_51 (sequence is synthesized)
ctgcagagggcccagcgcgggggactccgagcgtcgggagcctgtggaagagaagagcgcgcgggcgacagttaaacaggccctggggcagggcgcgcctcgcgctccagggagccccgc

SEQ ID NO: 324588 - DNA, 120 bp, Artificial Sequence
  ENSG00000135976_52 (sequence is synthesized)
ctccacagtgatcgtcttcacctccagctgtttgcatttacttcttccctctatcctacatgtgttttccttccccttcagatatcaacctatgaattgcctctaccaaaaagcctacaa

SEQ ID NO: 324589 - DNA, 120 bp, Artificial Sequence
  ENSG00000135976_53 (sequence is synthesized)
tattgacacaaacctgggctagtatcccttctatgtcttccaataagtgctgtcttatgcttgtcattgtatgtatgactctgtatgggaattgcctgtttgttttttcagattatagca

SEQ ID NO: 324590 - DNA, 120 bp, Artificial Sequence
  ENSG00000135976_54 (sequence is synthesized)
tacagttgttgaggggcggaccgtatcatctttatcttgtaattccagtgcttgtcctagtaccttagcacatggttgctgaatacatgaacgaagagtgagaaaccagaagctctgata

SEQ ID NO: 324591 - DNA, 120 bp, Artificial Sequence
  ENSG00000135976_55 (sequence is synthesized)
cttaactgccatgataatgaattcggtgtgcaactatgggcaaattatatttaatagtaattgcatattgtacatatttttcattcttattaacactgataagcttttcagcatatactg

SEQ ID NO: 324592 - DNA, 120 bp, Artificial Sequence
  ENSG00000135976_56 (sequence is synthesized)
actttctcttagttaactgtgaaatcatttagataaagaatataattctttttcattctaacttctgaatttaaatctgaatcctctatagcaggggtccccaactcccaggccacacac

SEQ ID NO: 324593 - DNA, 120 bp, Artificial Sequence
  ENSG00000135976_57 (sequence is synthesized)
agttccatgacctgttaggaagcaggctgcacagcaggaggtgagtggcaggcaagcgagtgaagcttcatctgtatttccagccactccctgttgctcacattatcacctgagctctgc

SEQ ID NO: 324594 - DNA, 120 bp, Artificial Sequence
  ENSG00000135976_58 (sequence is synthesized)
ctcctgtcagatcagcaaagccattagattctcacaggagtgaaaatcctactgtgaactgctcgttcaagggatctaggtcacatgctccttatgagactctaatgcctgatgatatgt

SEQ ID NO: 324595 - DNA, 120 bp, Artificial Sequence
  ENSG00000135976_59 (sequence is synthesized)
cattgtctcctatctcttcacgatgggaccatctagttacagaaaaacaagctcaggactcccattgattctccattatgatgagttgtgtaattatttcattatgtattacaatgtagt

SEQ ID NO: 324596 - DNA, 120 bp, Artificial Sequence
  ENSG00000135976_60 (sequence is synthesized)
cataataggaataaagtgcacaatagatgtaatacgcttgaatcaccatcctgaaaccatcccccaaacccccatctgtggaaaaattatctttcacaaaactgctgcctggtgccaaaa

SEQ ID NO: 324597 - DNA, 120 bp, Artificial Sequence
  ENSG00000135976_61 (sequence is synthesized)
aggctggggactgctgctctatagcttctgcactagaatctactaatgagtaaaatttaaatcaataactagttttaaaagcataacaagaatatgtgctgtctggctgcagtggctcat

SEQ ID NO: 324598 - DNA, 70 bp, Artificial Sequence
  ENSG00000135976_62 (sequence is synthesized)
gcataacaagaatatgtgctgtctggctgcagtggctcatgcctgtattctcagcactttgggaggccag

SEQ ID NO: 324599 - DNA, 120 bp, Artificial Sequence
  ENSG00000135976_63 (sequence is synthesized)
tctcagaaacaaccagccgcaacagagcaagactccatgtcaaaaataaaaaaaagaaagttgattgttatgaaaaaaaagtcaatggtgattcagagatttttggttacattttgtaaa

SEQ ID NO: 324600 - DNA, 120 bp, Artificial Sequence
  ENSG00000135976_64 (sequence is synthesized)
gtgccatgagtggatgaagaaactttcagaaggctaaacgagtggatacaagaaacttaggcaaattattacaccacaggggtgtgagaaataatgaatattctctactaggtttcagca

SEQ ID NO: 324601 - DNA, 120 bp, Artificial Sequence
  ENSG00000135976_65 (sequence is synthesized)
aaataatgaatattctctactaggtttcagcaaacataatccaagctgatcaatttaggacacttccactgaagagacgtgaagtgtacgttcaactgaagtgtcattgtaattgtgtgc

SEQ ID NO: 324602 - DNA, 120 bp, Artificial Sequence
  ENSG00000135976_66 (sequence is synthesized)
ttaaagagcatgatgaatgtttgtactataatggtgtaaatccttctgatttcttgcatggaagacatgtggcatcatgtagaacctgctttgacattgattctcaattgtatgagttgc

SEQ ID NO: 324603 - DNA, 120 bp, Artificial Sequence
  ENSG00000135976_67 (sequence is synthesized)
ttctcaattgtatgagttgctcctctgattttagatcacatttgtcctcatcacttggcatatccacattgatattgacacggttttattttagttttagacatatgacaaatcatgcca

SEQ ID NO: 324604 - DNA, 120 bp, Artificial Sequence
  ENSG00000135976_68 (sequence is synthesized)
tgtttgaaattgtaagtatattttgtgaagcctgtattcacctttttcagtgtatttctgtcatattccagtcccgagtcacaaagtagaaaacatcaaagcctatactaatacaggcag

SEQ ID NO: 324605 - DNA, 120 bp, Artificial Sequence
  ENSG00000135976_69 (sequence is synthesized)
gaccagatgagaagtcaagtatgtatgcaactttgcacaccaacaactgttaatctgtagctagttaactaatataaagtgttttggggtactaattttagtggatggctttcttttgta

SEQ ID NO: 324606 - DNA, 120 bp, Artificial Sequence
  ENSG00000135976_70 (sequence is synthesized)
ataattaatgttattaaaattttatagtggatggctttcttctgtattttccttattattaattttattaagattttattataatgcacctatatcttaatctctggctttcattctgcc

SEQ ID NO: 324607 - DNA, 120 bp, Artificial Sequence
  ENSG00000135976_71 (sequence is synthesized)
attctgccattttttatacatatatttttttcttaaatatttaaccttaggaaagttgagaattatgcatcatttctcacagaagttgagagagtttttttttcctgttaaacagtctat

SEQ ID NO: 324608 - DNA, 120 bp, Artificial Sequence
  ENSG00000135976_72 (sequence is synthesized)
ttttaatgatttctctattggcatggtgaggcaagccaggttaattcagaggataatgtctaatggaatgtttcagaaaattatcttctttttagtctctacttttctgaatgtataaag

SEQ ID NO: 324609 - DNA, 120 bp, Artificial Sequence
  ENSG00000135976_73 (sequence is synthesized)
aacctgtgtatacttatttcttagatttcaggttaacttgttcagaaaggccattttactgaataaatttttatttcgatgaaaatccttacttcctttgtattgggctcagagagcaca

SEQ ID NO: 324610 - DNA, 120 bp, Artificial Sequence
  ENSG00000135976_74 (sequence is synthesized)
ctctgtctctatatgaatatggacagttagcatttgccaacatgtatctattttctcttatttgtagagaaagctaaactaaaaagggggttatagaaggtcagcaaaggatgggtttga

SEQ ID NO: 324611 - DNA, 120 bp, Artificial Sequence
  ENSG00000135976_75 (sequence is synthesized)
gatgtttgggttggttaagtgggcatttagacaacagggcttctcctttggcatgtttaatggacatctttgcagtttaagatgacgcttttaaatcacttctctcctaatgatgacctg

SEQ ID NO: 324612 - DNA, 120 bp, Artificial Sequence
  ENSG00000135976_76 (sequence is synthesized)
agtcctgctattcaatgggagagtcaataagatcctgtaggatcttatttggaactgactttgtcgattttaattttgttcctgcttgtttttaaattttcttgttgtttccctagaaag

SEQ ID NO: 324613 - DNA, 120 bp, Artificial Sequence
  ENSG00000135976_77 (sequence is synthesized)
gaaagatgatgcttagttttaaatatttaaaaatgtgcaagttgctttgctataataaaactaaatgcatacatacaaaaaataaaattatagttgatgtggtagtgtttggaattcaaa

SEQ ID NO: 324614 - DNA, 120 bp, Artificial Sequence
  ENSG00000135976_78 (sequence is synthesized)
atataaatgcttagcgtgaggtaatcctttatctttccacattttaccagtttgtaagtttgagtatttaattgataaaatgtaattcaaaagcaagaagaatgttgtgttttagtccta

SEQ ID NO: 324615 - DNA, 120 bp, Artificial Sequence
  ENSG00000135976_79 (sequence is synthesized)
gagcaggggtctgtgaacttttctgtaaagggccagatagtgttatgtaaggctttgtgagccataagatccttgttgcaataactcggccctgcaattacagcacaaaagtagccatga

SEQ ID NO: 324616 - DNA, 120 bp, Artificial Sequence
  ENSG00000135976_80 (sequence is synthesized)
acaatatgcagactgaaggggtgtagcagtgtcccactaaaattacttacaaaaaacaggtaatgggatgatttctcctagattatgaccttttataaataaaaaagattgtgatagtct

SEQ ID NO: 324617 - DNA, 120 bp, Artificial Sequence
  ENSG00000135976_81 (sequence is synthesized)
ccatgtcaaaaataaaaaaaagaaagttgattgttatgaaaaaaaagtcaatggtgattcagagatttttggttacattttgtaaatgaaaatctgagtactcattagttatttgatgtg

SEQ ID NO: 324618 - DNA, 120 bp, Artificial Sequence
  ENSG00000135976_82 (sequence is synthesized)
taatgcatacttttttttttgcataagtgaatgaaaagatggcaagagaactaaagttgagaatccagaagttgaaaatatcagaagccttcatgactgtggatgacatgagtattttta

SEQ ID NO: 324619 - DNA, 120 bp, Artificial Sequence
  ENSG00000135976_83 (sequence is synthesized)
tgagtatttttagaaacgatttttctccaagtagatatctaaagtaatgattgagagcatttcctgccagcagaagcgaatgatacattttcttttctttttttttgagacggagtctca

SEQ ID NO: 324620 - DNA, 120 bp, Artificial Sequence
  ENSG00000135976_84 (sequence is synthesized)
ccaaaaaagtttcatttgtaagctatatcgaaatacatcatttttctacattattcctaaattttgcatattatcaccaaaacacaggtagaaaatgacacagtagcccaatcgtctact

SEQ ID NO: 324621 - DNA, 120 bp, Artificial Sequence
  ENSG00000135976_85 (sequence is synthesized)
tttgtgattgctaagaatttgtgtaattataccttcagaagtttgtttagaatttacatgatttaaaaaaaattacgtgtgagagtaattattttaaaatgcacattttaggcttgaagt

SEQ ID NO: 324622 - DNA, 120 bp, Artificial Sequence
  ENSG00000135976_86 (sequence is synthesized)
aatttttcatatttggaagctcaaacattccttgaatgaaaatattttgaaatgccttaactgtctaagattttactttaaatattggaacttttaaagaagcattatagggaacagcct

SEQ ID NO: 324623 - DNA, 120 bp, Artificial Sequence
  ENSG00000135976_87 (sequence is synthesized)
tttttcatgcacttatggtaaataactataaaaacaaatgaattacaataaatttataattcatgacaactgaatttgggaaaggtaatagttaagtgtttttccactaaattacttttt

SEQ ID NO: 324624 - DNA, 120 bp, Artificial Sequence
  ENSG00000135999_0 (sequence is synthesized)
ggtaatgtccgccatgttggccatggcgcagggagcggatcgggcgggcgagcggcggatctagtgtgtggaggcggccgcgggcgcggggggctgttttcgggcggggtgggcgcccat

SEQ ID NO: 324625 - DNA, 120 bp, Artificial Sequence
  ENSG00000135999_1 (sequence is synthesized)
gtgaggaggaggaggagcgggccggccgcgctgcactgaggaaggaggtggaggaggcggcgggagtcctccccccctccccgcccgccccgccgccgccgcccgggctgttcctgtaag

SEQ ID NO: 324626 - DNA, 120 bp, Artificial Sequence
  ENSG00000135999_2 (sequence is synthesized)
gggctgttcctgtaaggcggggagacaatgagtaaactctccttccgagcgcgggcgctggacgccgccaagccgctgcctatctaccgcggcaaggacatgcctgatctcaacgactgc

SEQ ID NO: 324627 - DNA, 120 bp, Artificial Sequence
  ENSG00000135999_3 (sequence is synthesized)
gtctccatcaaccgggccgtgccccagatgcccaccgggatggagaaggaggaggaatcggaacatcatttacagcgagcaatttcagcacagcaagtgtttagagaaaaaaaagagagt

SEQ ID NO: 324628 - DNA, 120 bp, Artificial Sequence
  ENSG00000135999_4 (sequence is synthesized)
atggtcattcctgttcctgaggcagagagcaacgtcaactattacaatcgcttgtacaaaggagagtttaaacagccaaaacagttcattcatattcagccttttaatctagacaacgag

SEQ ID NO: 324629 - DNA, 120 bp, Artificial Sequence
  ENSG00000135999_5 (sequence is synthesized)
caaccagattatgatatggattcagaagatgagactttattaaatagacttaacagaaagatggaaattaagcctttgcaatttgaaattatgattgacagacttgaaaaagccagttct

SEQ ID NO: 324630 - DNA, 120 bp, Artificial Sequence
  ENSG00000135999_6 (sequence is synthesized)
aatcagcttgtaacacttcaagaagcaaaactgctgctaaacgaagatgattaccttattaaagctgtatatgactactgggtgagaaaacgtaaaaactgcagggggccatccctcatt

SEQ ID NO: 324631 - DNA, 120 bp, Artificial Sequence
  ENSG00000135999_7 (sequence is synthesized)
cctcagataaaacaagagaaaagagatggctctaccaacaatgacccttatgttgcctttcggagaagaacagagaaaatgcaaactcgaaagaatcgtaagaatgatgaagcctcttat

SEQ ID NO: 324632 - DNA, 120 bp, Artificial Sequence
  ENSG00000135999_8 (sequence is synthesized)
gaaaagatgttgaaactgagacgagaatttagtagagccataacaattttggaaatgattaagagaagagagaaaacaaaacgagaattattgcacttaaccttagaagttgtggagaaa

SEQ ID NO: 324633 - DNA, 120 bp, Artificial Sequence
  ENSG00000135999_9 (sequence is synthesized)
agataccatttgggagactatggtggtgaaatccttaatgaagtaaaaatcagtagatcagaaaaagagttatatgccactccagcaactcttcataatggaaatcatcacaaagttcaa

SEQ ID NO: 324634 - DNA, 120 bp, Artificial Sequence
  ENSG00000135999_10 (sequence is synthesized)
gaatgtaaaactaagcaccctcatcatttgtctttgaaagaagaggcttctgatgtggttcgtcaaaagaagaagtacccaaagaagcctaaagcagaggctttgataacatctcagcaa

SEQ ID NO: 324635 - DNA, 120 bp, Artificial Sequence
  ENSG00000135999_11 (sequence is synthesized)
cccactcctgagacattgcctgtgatcaataagagtgacattaagcaatatgattttcacagctcagatgaagatgaatttccacaggtattgtccccagtatcagaaccggaagaagaa

SEQ ID NO: 324636 - DNA, 120 bp, Artificial Sequence
  ENSG00000135999_12 (sequence is synthesized)
aatgatcctgatggtccctgtgctttcagaaggcgggcaggatgccagtattatgctcctcgtttggaccaagctaaccattcatgtgaaaattcagaattggcagatttggataagttg

SEQ ID NO: 324637 - DNA, 120 bp, Artificial Sequence
  ENSG00000135999_13 (sequence is synthesized)
aggtataggcattgccttacaacacttacagtcccaagaagatgtataggatttgcaaggaggcgaattggcagaggtggaagggtcataatggaccgaatatccacagaacatgaccca

SEQ ID NO: 324638 - DNA, 120 bp, Artificial Sequence
  ENSG00000135999_14 (sequence is synthesized)
gtcctgaaacagatagaccctgaaatgctgaatagtttttcaagctcttcccaaactatagacttttcttctaatttctctcggaccaatgcttccagtaaacattgtgaaaatagactg

SEQ ID NO: 324639 - DNA, 120 bp, Artificial Sequence
  ENSG00000135999_15 (sequence is synthesized)
tctctttctgaaatattaagcaatatcagatcatgtcgactacagtgtttccagccaaggctactaaatttacaggacagtgatagtgaagaatgtacctcaagaaaaccagggcagact

SEQ ID NO: 324640 - DNA, 120 bp, Artificial Sequence
  ENSG00000135999_16 (sequence is synthesized)
acaccagcaagaatggcatatcagtaacagggggtatcacagaagagcagtttcagacacatcagcagcagttagttcagatgcaaaggcagcaacttgcccagcttcagcagaaacagc

SEQ ID NO: 324641 - DNA, 120 bp, Artificial Sequence
  ENSG00000135999_17 (sequence is synthesized)
aatctcagcattcctcgcaacagacacatccaaaagcacagggctcaagcacctctgactgtatgtctaaaacacttgactcagccagcgcccactttgctgcatctgcagtggtcagtg

SEQ ID NO: 324642 - DNA, 120 bp, Artificial Sequence
  ENSG00000135999_18 (sequence is synthesized)
cacctgttccaagtcgcagtgaggtagccaaggaacagaacactggccacaacaacataaacggtgttgtccagccttcaggaacctctaaaacattatactccaccaatatggctttat

SEQ ID NO: 324643 - DNA, 120 bp, Artificial Sequence
  ENSG00000135999_19 (sequence is synthesized)
catccagcccagggatttcagctgtacagcttgtaaggacagttggccacaccactacaaaccacttaatcccagcattgtgcacaagcagtcctcagacacttcccatgaacaattcct

SEQ ID NO: 324644 - DNA, 120 bp, Artificial Sequence
  ENSG00000135999_20 (sequence is synthesized)
gcctgacaaatgcagtgcacctcaataatgtcagtgttgtttctccagtcaatgtgcatatcaatacacggacttcagcaccatcgccaacagccttaaaacttgccacagttgctgcca

SEQ ID NO: 324645 - DNA, 120 bp, Artificial Sequence
  ENSG00000135999_21 (sequence is synthesized)
gtatggacagagtgccaaaggttactcccagcagtgccatcagcagcatagcaagagagaaccacgaaccagaaagattgggcttaaatggaatagcagagacaacagtagctatggaag

SEQ ID NO: 324646 - DNA, 120 bp, Artificial Sequence
  ENSG00000135999_22 (sequence is synthesized)
tgacataacctaaaacacgtggctctgacctgtgctgatggtgtgcagtcattcatattccagctgaatgcaaaaggcaacactctgtggatcacagagtgtaacaatggacctaaatgg

SEQ ID NO: 324647 - DNA, 120 bp, Artificial Sequence
  ENSG00000135999_23 (sequence is synthesized)
atggactatagtatattggatgttaaatccatatatgatgtatattttgtaaaattgggaaaatcactaccttgtaaaatagtttatttgtatcatcaatattatttctgttacttgaat

SEQ ID NO: 324648 - DNA, 120 bp, Artificial Sequence
  ENSG00000135999_24 (sequence is synthesized)
gatattcatcatcatgcttttgcacttgaatttgcaactgaatggattttaaaaaataattctttaatgggatcatgagcatgaaatgggatcctgcatcacttgttttaactatttatt

SEQ ID NO: 324649 - DNA, 120 bp, Artificial Sequence
  ENSG00000135999_25 (sequence is synthesized)
ttgccatgtttacattttgtatcttgtaaaaataaatccaactttgtgtctaaaaagttaaagattcatagctaggaaatgaaattcttgtaatttttttctaaaggaactgtaaagttt

SEQ ID NO: 324650 - DNA, 120 bp, Artificial Sequence
  ENSG00000135999_26 (sequence is synthesized)
tcacttggttcattttgtttcacaatttgactagatggactttttggtaaatactttagtggcatttcactgtcaaatatgaagttcaaggcaaaatagtattttctattactgtgcagg

SEQ ID NO: 324651 - DNA, 120 bp, Artificial Sequence
  ENSG00000135999_27 (sequence is synthesized)
ggaaagggatggatcgatacatgcaaatttaatgtagtaactcacttttccatatattttgaatgtatatttctatttatgataccaatttataaaaaataattacacagaaaaaatgga

SEQ ID NO: 324652 - DNA, 120 bp, Artificial Sequence
  ENSG00000135999_28 (sequence is synthesized)
ataggaaaaattatgcatctagcacatttaaactgtgcaaatatgaaaatttttcgaggattacattttatctgaaggctgcatattttaactggctttaaaactgtaacacatcacata

SEQ ID NO: 324653 - DNA, 120 bp, Artificial Sequence
  ENSG00000135999_29 (sequence is synthesized)
aaagatactttaccaggtatgtattgcattatatcattgcaataattattggaagtctagatatcgagccatcccaggtgttgggcggggggagggttgtggcaagattgtcttttcaat

SEQ ID NO: 324654 - DNA, 120 bp, Artificial Sequence
  ENSG00000135999_30 (sequence is synthesized)
tttggagagttttcctgtggctacaaggcaagtaacgggttggaaaaagtctgactgtaagcgttggacaccttcatagtgtagtgttttagtgactttttttatacggttcttgtaaat

SEQ ID NO: 324655 - DNA, 120 bp, Artificial Sequence
  ENSG00000135999_31 (sequence is synthesized)
tagatacgtgtagtggtgtttcagaatgtttgtttatgcactagttcagacaactttccctgttacttgttcttgataagtgaaaactgcagggaaataaaaaatacatatcaaaacatg

SEQ ID NO: 324656 - DNA, 120 bp, Artificial Sequence
  ENSG00000135999_32 (sequence is synthesized)
cttgccgtaagcggcggccgggaatggcgcaggggatgcgctggccgctcttggcgtacggtctctgtttacctttccacctccctctctcaggcgcggggctaattaatggcgtggtat

SEQ ID NO: 324657 - DNA, 120 bp, Artificial Sequence
  ENSG00000135999_33 (sequence is synthesized)
caggattgaagtcttgttcttctaaagagaattttcatttgtttctgccaggcatttggggacactaccaaccggagaccacgttaaagtttttgcttgtttgttttgttcatttgtttt

SEQ ID NO: 324658 - DNA, 120 bp, Artificial Sequence
  ENSG00000135999_34 (sequence is synthesized)
tggaccacagtattagctttaatttaggctgcagatctgctcaaggttcagttctcaggaagattttttgcttctcctttctacctaagggcaagttgagaaatacaaaattctttgctt

SEQ ID NO: 324659 - DNA, 120 bp, Artificial Sequence
  ENSG00000135999_35 (sequence is synthesized)
tccctttctgcatggctaatttatttctttaatcttacactgagggcatagccctttggtaatgtatctttattcagtagcattctatactaatattaacacacaagcataaagcttttt

SEQ ID NO: 324660 - DNA, 120 bp, Artificial Sequence
  ENSG00000135999_36 (sequence is synthesized)
attcaataatagtcatattctctagtatgaatattaggttctttgtaatttgttcccgctttctcctttaacgtcatttatttttgctcttcccttcactctgtgtaccatagggactac

SEQ ID NO: 324661 - DNA, 120 bp, Artificial Sequence
  ENSG00000135999_37 (sequence is synthesized)
gaaaattaccctcattcaccttctttcatatttaacatttccttggatgtgctattgaagtcttctttcccttcctatagctcattaaagacttaactcccttatgaaagccaccttgac

SEQ ID NO: 324662 - DNA, 120 bp, Artificial Sequence
  ENSG00000135999_38 (sequence is synthesized)
ttttctcactctacctgtcttctttgcttatcgtagtatcttttacatacttctgttagaggactcaccatactttattgcaattatttgtaaccattctttctctccttttagactgtg

SEQ ID NO: 324663 - DNA, 120 bp, Artificial Sequence
  ENSG00000135999_39 (sequence is synthesized)
agctccttgagggcaggaactatatattttattttcttttgtgttttcagagtaaagtgcttggtttatagatgctcaataaatgatgtgtttgtcgactgaattgttttaaaatggctt

SEQ ID NO: 324664 - DNA, 120 bp, Artificial Sequence
  ENSG00000135999_40 (sequence is synthesized)
taaaaagtcttttggtggtacagccattttccacagatttcttttctctgaaatagtctagagaaacacacatgcgaaaattatttatgtatatttttttctcctgtgttctttgacttt

SEQ ID NO: 324665 - DNA, 120 bp, Artificial Sequence
  ENSG00000135999_41 (sequence is synthesized)
gagtcctattagctttttgaatttgcctttaccttctatcagtcaggaaggagataactattcataatagaaattttaaggatctctcttaagccaaagtatcaattattttgtattttg

SEQ ID NO: 324666 - DNA, 120 bp, Artificial Sequence
  ENSG00000135999_42 (sequence is synthesized)
ataatattgcagttaggcaggaagaccatttgtaaaaaccattctaggaaaccaagaactaaaaatcgggtgtaactcatgtgggtcaggcccatcgaatacaataaacattattcttgt

SEQ ID NO: 324667 - DNA, 120 bp, Artificial Sequence
  ENSG00000135999_43 (sequence is synthesized)
cacgctcccgggcgcgggcgaacttgcgcacctggcacctgccacacagcgaaagcaccggccagcgagcggaggggcgccgcccccgccccctctccccggagcggaccgagaccgagc

SEQ ID NO: 324668 - DNA, 120 bp, Artificial Sequence
  ENSG00000135999_44 (sequence is synthesized)
cccgccccctctccccggagcggaccgagaccgagcacgctcccgcgggccggcagcgccgcggagagagtggcgcgggcgctggacgccgccaagccgctgcctatctaccgcggcaag

SEQ ID NO: 324669 - DNA, 120 bp, Artificial Sequence
  ENSG00000135999_45 (sequence is synthesized)
tgatgggcaaaatgaaccaaaagatttttaggggggaacaggttaagctttatgacagttgatattgattctgtaagaatttatattttttaaagatttgtggttactagtttttataga

SEQ ID NO: 324670 - DNA, 120 bp, Artificial Sequence
  ENSG00000135999_46 (sequence is synthesized)
ttaagttatcaatttggattgcagattttgggagagttttgtgtatactgtagatcctatacttaattttgttttggcagaatcattgaattttatttagtaaagaactctagtgatcat

SEQ ID NO: 324671 - DNA, 120 bp, Artificial Sequence
  ENSG00000136002_0 (sequence is synthesized)
agaaaaaactcagggcaaggttggccttggctcataagaccttttcaaactttattgagtcaatagttctagagaaagagaacacccatgaacgttccccaagttctcccaagggcgaga

SEQ ID NO: 324672 - DNA, 120 bp, Artificial Sequence
  ENSG00000136002_1 (sequence is synthesized)
aggagaagagcaggctgcgccagggttcctggcgggcgtttctgaaaagcaaagatgccggaagccccaaaaagcccaccctagtgagtctgcctctaggacccgaagttctctccccag

SEQ ID NO: 324673 - DNA, 120 bp, Artificial Sequence
  ENSG00000136002_2 (sequence is synthesized)
cagagaccgacagccactgtgaggaacgggcggaggacaaagagggctatgtttttagcgatcactgggcacccccacttgcctccacacctttgtcctccagtttagtttctccagaac

SEQ ID NO: 324674 - DNA, 120 bp, Artificial Sequence
  ENSG00000136002_3 (sequence is synthesized)
acaggaggaaaagtgaaccgaccatcaagtgcacagccacccaggaaggcgacgctaaaccaagatgagcagaaggaagagagcagggaaggaggccagggtccgcgcggcttgggcaca

SEQ ID NO: 324675 - DNA, 120 bp, Artificial Sequence
  ENSG00000136002_4 (sequence is synthesized)
gtgccctggctcagggaccttcctgggagtgagaaccacatgccctgggaagaaccagcaggtgagaagcccagttgctctcacagtcagaaggcgttccacatggagcctgcccagaag

SEQ ID NO: 324676 - DNA, 120 bp, Artificial Sequence
  ENSG00000136002_5 (sequence is synthesized)
ccctgcttcaccactgacatggtgacatgggccctcctctgcatctctgcagagactgtgcgtggggaggctccttcacagcctaggggcatccctcaccgctcgcccgtcagtgtggat

SEQ ID NO: 324677 - DNA, 120 bp, Artificial Sequence
  ENSG00000136002_6 (sequence is synthesized)
gacctgtggctggagaagacacagagaaagaagttgcagaagcaggcccacgtcgaaaggaggctgcacataggggcagtgcacaaagatggagtcaagtgctggagaaagacgatcatt

SEQ ID NO: 324678 - DNA, 120 bp, Artificial Sequence
  ENSG00000136002_7 (sequence is synthesized)
acctctccagagtctttgaatctccctagaagaagccatccactctcccagagtgctccaacgggactgaaccacatgggctggccagagcacacaccaggcactgccatgcctgatgga

SEQ ID NO: 324679 - DNA, 120 bp, Artificial Sequence
  ENSG00000136002_8 (sequence is synthesized)
gctctggacacagctgtctgcgctgacgaagtggggagcgaggaggacctgtatgatgacctgcacagctccagccaccactacagccaccctggagggggtggggagcagctggctatc

SEQ ID NO: 324680 - DNA, 120 bp, Artificial Sequence
  ENSG00000136002_9 (sequence is synthesized)
aatgagctcatcagcgatggcagtgtggtctgcgctgaagcactctgggaccatgtcaccatggacgaccaggagctgggcttcaaagctggggacgtcatcgaagtgatggatgccacc

SEQ ID NO: 324681 - DNA, 120 bp, Artificial Sequence
  ENSG00000136002_10 (sequence is synthesized)
aacagagagtggtggtggggccgggtcgccgatggcgagggctggtttccagccagcttcgttcggctgagggtgaatcaggacgagcccgcggatgacgacgcccctctggccgggaac

SEQ ID NO: 324682 - DNA, 120 bp, Artificial Sequence
  ENSG00000136002_11 (sequence is synthesized)
agcggagcggaggacggcggggcggaggcgcagagcagcaaggaccagatgcggaccaacgtcatcaacgagatcctcagcactgagcgggactacatcaagcacctgcgcgacatctgc

SEQ ID NO: 324683 - DNA, 120 bp, Artificial Sequence
  ENSG00000136002_12 (sequence is synthesized)
gagggctacgtccggcagtgccgcaagcgcgcagacatgttcagcgaggagcagctgcgtaccatcttcgggaacatcgaggacatctaccgctgccagaaggccttcgtgaaggccctg

SEQ ID NO: 324684 - DNA, 120 bp, Artificial Sequence
  ENSG00000136002_13 (sequence is synthesized)
gagcagaggttcaaccgcgagcgcccacacctgagcgagctgggtgcctgcttcctggagcatcaagccgacttccagatctactcggagtactgcaataaccaccccaacgcctgcgtg

SEQ ID NO: 324685 - DNA, 120 bp, Artificial Sequence
  ENSG00000136002_14 (sequence is synthesized)
gagctctcccggctcaccaagctcagcaagtacgtgtacttcttcgaggcctgccggctgctgcagaagatgattgacatctccctggatggcttcctgctgactccggtgcagaagatc

SEQ ID NO: 324686 - DNA, 120 bp, Artificial Sequence
  ENSG00000136002_15 (sequence is synthesized)
gatgttgaagccgccttgcatgccatgaagaacgtggcccagctcatcaacgagcggaagcggagacttgagaacatcgacaagattgctcagtggcagagctccatagaggactgggag

SEQ ID NO: 324687 - DNA, 120 bp, Artificial Sequence
  ENSG00000136002_16 (sequence is synthesized)
ggagaagatctcttggtcaggagctcagaactcatctactcgggggagctgactcgagttacacagcctcaagccaaaagccagcagcgaatgttctttctctttgaccaccagctcatc

SEQ ID NO: 324688 - DNA, 120 bp, Artificial Sequence
  ENSG00000136002_17 (sequence is synthesized)
tactgtaagaaggacctgctccgccgcgacgtgttgtactacaagggccggctggacatggacggcctggaggtggtggacctggaggacgggaaggacagagacctccatgtgagcatc

SEQ ID NO: 324689 - DNA, 120 bp, Artificial Sequence
  ENSG00000136002_18 (sequence is synthesized)
aagaacgccttccggctgcaccgtggcgccacaggggacagccacctgctgtgcaccaggaagcccgagcagaagcagcgctggctcaaggcctttgccagggagagggagcaggtgcag

SEQ ID NO: 324690 - DNA, 120 bp, Artificial Sequence
  ENSG00000136002_19 (sequence is synthesized)
ctggaccaggagacaggcttctccatcactgaactgcagaggaagcaggccatgctgaatgccagcaagcagcaggtcacagggaagcccaaagctgttggccggccctgctacctgacg

SEQ ID NO: 324691 - DNA, 120 bp, Artificial Sequence
  ENSG00000136002_20 (sequence is synthesized)
cgccagaagcacccagccctgcccagcaaccggccccagcagcaggtcctggtgctggcggagcccaggcgcaagccatctaccttctggcacagcatcagccggctggcacccttccgc

SEQ ID NO: 324692 - DNA, 120 bp, Artificial Sequence
  ENSG00000136002_21 (sequence is synthesized)
aagtgaactggtccctgcctgacagcacctgctgggccttcctgccagtggcccccagtttttcttccccgaggcccactcggcctggccttcctctgcctgcaagtgagcagggatggg

SEQ ID NO: 324693 - DNA, 120 bp, Artificial Sequence
  ENSG00000136002_22 (sequence is synthesized)
ctggggagttgcttgtgccaccaagacgtgccaggtctgtactcctgttgtctttttccctgctcctggtgccctgaagagaccagcaagggggcagaccccgcactcgccacaccgccg

SEQ ID NO: 324694 - DNA, 120 bp, Artificial Sequence
  ENSG00000136002_23 (sequence is synthesized)
ctgcagcttgggccccatccgccctctggacctgtgtagggcctcactgctggagcggggaaaccgcagctcagcccaggcccagctggggagaaggcgctacctgcgtgggaccctctt

SEQ ID NO: 324695 - DNA, 120 bp, Artificial Sequence
  ENSG00000136002_24 (sequence is synthesized)
ctctggaaacctaatcctcctttcatttcctctgggcaggactctctggccttctgtggcctgcaatgccaggccatgtgcccctctgccctctagttctccaagtccccagcccggcca

SEQ ID NO: 324696 - DNA, 120 bp, Artificial Sequence
  ENSG00000136002_25 (sequence is synthesized)
gtggtgccaggcagcttgccacttgggagggcagaagccaggaattccacacccttgtgttgcgcccggagcccgcccttcgcctcccagcccctcaagacaccgctggctgctggacac

SEQ ID NO: 324697 - DNA, 120 bp, Artificial Sequence
  ENSG00000136002_26 (sequence is synthesized)
cctcttcacttgtgtgtgtgtgtgtagcggaaaaggacaagacggtgcagtcggctgcatactcccagtcgggagtgtggtcagtctgcctgctgctgtgcggtagctccagaaccacct

SEQ ID NO: 324698 - DNA, 120 bp, Artificial Sequence
  ENSG00000136002_27 (sequence is synthesized)
cgttcctggttttgtttggattttggcatcttgtttttctaacaacaaacaatggagaaaaagaattgattcttagtgacacagaagattgccttacgctcgtgagcgtgagaagccata

SEQ ID NO: 324699 - DNA, 120 bp, Artificial Sequence
  ENSG00000136002_28 (sequence is synthesized)
agagagagaccgaattctgtggctcagcacacaggactgacccacagcccaggcagcgggtgtgtggagatggcgccctgtcctgccaaggggcgccaggagcagagccagggcctggcg

SEQ ID NO: 324700 - DNA, 120 bp, Artificial Sequence
  ENSG00000136002_29 (sequence is synthesized)
agctggcgtggagcccacaggattcagcagcatggacagtcactcttgcactattccttctccaagccagaaaccacatttaatttcataaataaatttatgaaaagtaacctggctgct

SEQ ID NO: 324701 - DNA, 120 bp, Artificial Sequence
  ENSG00000136002_30 (sequence is synthesized)
tagagagaggaaatgaggccagatgggcagcaagctttggatgctgtggtaaggagttttgactgtcactctgaagcagctctcaggcagaggaatgatgtgatttattgtagtttacca

SEQ ID NO: 324702 - DNA, 120 bp, Artificial Sequence
  ENSG00000136002_31 (sequence is synthesized)
aggaccgctcagggtattgtgcagagggaagaccagctggaggttcttgtgtcactccgtgaagtgtgggggcggcggaggggcagagatgggacctgcactggagccatgcctgatgga

SEQ ID NO: 324703 - DNA, 120 bp, Artificial Sequence
  ENSG00000136002_32 (sequence is synthesized)
cagtcagccagtttgagcattagcagtgtgctgggcactgctgcagccctggggcaacacacagaaaactagccctgtcctgatgagctccttgcaatgggggaagaggatgccaacagg

SEQ ID NO: 324704 - DNA, 120 bp, Artificial Sequence
  ENSG00000136002_33 (sequence is synthesized)
atattaagctctgctctgtgcttgccatttatggagaagagaggggctgtgcatctgatagtgaggatgtggtcaaagggcacagccccagaggaaagcagctccacacgtgggggctgc

SEQ ID NO: 324705 - DNA, 80 bp, Artificial Sequence
  ENSG00000136002_34 (sequence is synthesized)
gctccaggcctgcgtgcgcgcgtgcgtgagcgcgtgccgaccgggcccgcgacccgcactggggtcgccgttgaggctca

SEQ ID NO: 324706 - DNA, 120 bp, Artificial Sequence
  ENSG00000136002_35 (sequence is synthesized)
cgctctgccgggagggcgcctggcctcgctccgagccgcgcgcgccccgcgcctgccaagggtcccagctgccgcggccacagagcccgagcggggggtcggctgagagcctccttaacg

SEQ ID NO: 324707 - DNA, 120 bp, Artificial Sequence
  ENSG00000136002_36 (sequence is synthesized)
gagcggggggtcggctgagagcctccttaacggagccccatgatgtcagccggcccgcacgcccctcgccctccgactgcgaccccggcccgggctcgcgcgccccgtcccccggcagcc

SEQ ID NO: 324708 - DNA, 120 bp, Artificial Sequence
  ENSG00000136002_37 (sequence is synthesized)
ccagccttccccgagcctgtggctggagctcgggcccgcctgcgtgcgggcgcagcaatgccccagcgagtcaagcgggcagacgagtggcgatctcggcactagcagcagcagcagcgc

SEQ ID NO: 324709 - DNA, 120 bp, Artificial Sequence
  ENSG00000136002_38 (sequence is synthesized)
cgggctgtccccgggctccgactcggacagcagcggcgtggtgtgtggcggccgcggaggcaacgggggcatgcgcggcgccgtgtcccgctcctggagcctggagagcctgcgctcggc

SEQ ID NO: 324710 - DNA, 120 bp, Artificial Sequence
  ENSG00000136002_39 (sequence is synthesized)
cggacagcagccccacctcctcggctgcccggtccttaccctgctgacatcattcccttctctgaaccacaaagccaagccagctagccaccaggcctgaggggggcccactgccctttg

SEQ ID NO: 324711 - DNA, 120 bp, Artificial Sequence
  ENSG00000136002_40 (sequence is synthesized)
cagctgtttgttcccaaaggttggtaataaggggccactggggaagcctgggtcagtatatggttgacattcttactctcaacaccttggctcccccagatcagggccattggtgacaat

SEQ ID NO: 324712 - DNA, 120 bp, Artificial Sequence
  ENSG00000136002_41 (sequence is synthesized)
gcttgtttccccagggttccttcctgacaggcatctggggttggtgtagggatggagctgctttccccatttctacagagagccatgcccctgaaacatcacatgcctttgcacaggcca

SEQ ID NO: 324713 - DNA, 120 bp, Artificial Sequence
  ENSG00000136002_42 (sequence is synthesized)
cccccctcttcaggctgctgcaggaggccaggcccaggccagagaccccaggcagcctgagctcttggatgtggtcagctctccaggagcaagtcctgtgtggcaaaactgcctcctacg

SEQ ID NO: 324714 - DNA, 120 bp, Artificial Sequence
  ENSG00000136002_43 (sequence is synthesized)
gcggctctgaagcagagccctgggacggaccccatgctgtccccaacagctggggtggcactctgccctgggcacccatgaccctctgctgtctctccctgttcagctgttggccggccc

SEQ ID NO: 324715 - DNA, 120 bp, Artificial Sequence
  ENSG00000136002_44 (sequence is synthesized)
agtgctgcggccgggctccgggcgtcccggcggccaccatgctcagcgtcgtgcacttcctccggagcttcttcaagactccagagccaggtgcacacctgccaggtgaaggtgagattg

SEQ ID NO: 324716 - DNA, 120 bp, Artificial Sequence
  ENSG00000136002_45 (sequence is synthesized)
aagataaccagctccccacatcccctgcagaacaagtggagcagggatggaaccagcaaacagaccgcgatgattctgaaacgctgtcccagcagagtgaaagtggatcagacacaaaaa

SEQ ID NO: 324717 - DNA, 120 bp, Artificial Sequence
  ENSG00000136002_46 (sequence is synthesized)
ctgacccctttgaaagtgcctctgacacagagtccttgtctgggtacctcccgaggggagtcttccaccctctaagaggtactcccgtagatatagaagcaccttgggaataccctgatg

SEQ ID NO: 324718 - DNA, 120 bp, Artificial Sequence
  ENSG00000136002_47 (sequence is synthesized)
tctcagcaactggaccccctcaggagcagcatttgaccagtgttcctgggcttcatgcaaaggaagaactcgatttgtcccctagcttagaggatgactcttgcaaaaatgggtggcgag

SEQ ID NO: 324719 - DNA, 120 bp, Artificial Sequence
  ENSG00000136002_48 (sequence is synthesized)
cctttgccacagttgctggagaacaggaggcaggacacctctgggactgcgcgaccagcctggagcgagagtctttgctggcaggggttccccgacacacagggtgctgcttacagaggg

SEQ ID NO: 324720 - DNA, 120 bp, Artificial Sequence
  ENSG00000136002_49 (sequence is synthesized)
ccacagacagcagtggtcctgagccagtacagggggtggctgttcaagacctcagagggctctccagtgtttctcttcagaaatccaggtctgagagctatctgggcatcccagtggtct

SEQ ID NO: 324721 - DNA, 120 bp, Artificial Sequence
  ENSG00000136002_50 (sequence is synthesized)
ggcccttccttctctggtgctgtgaactgggtcggagttggccacatatccacaacagggccagggcactggtgctacctagcagaggcccactggacaacacagcccctctggggacca

SEQ ID NO: 324722 - DNA, 120 bp, Artificial Sequence
  ENSG00000136002_51 (sequence is synthesized)
ggacaaagaaggaaagtactctaggccctgcaggggacacagaattgctctggtcccagccccactcggatgtcccctgccagcctcctttgaggacatcttgcctcctacgcaccaacc

SEQ ID NO: 324723 - DNA, 120 bp, Artificial Sequence
  ENSG00000136002_52 (sequence is synthesized)
gtcaccatagtgccccagaaactactggtgacaagaacagggcatcccccagactcaactgtgggcacatgagggcactggtcagggcccattccatagcagggttttcaccagagtgcc

SEQ ID NO: 324724 - DNA, 120 bp, Artificial Sequence
  ENSG00000136002_53 (sequence is synthesized)
ccgaggatcccgtgggacagaatgttgtgaagtctgggacccatgtgaaggaaggggccaaaaatgaacgagatccaagaatacaaaacatcccttcccctgcacccacccagctgtctg

SEQ ID NO: 324725 - DNA, 120 bp, Artificial Sequence
  ENSG00000136002_54 (sequence is synthesized)
gcccgattcctgcttttcagagtggggctccccatctgcagggtccctgcaagcctggtgggtttcgcttgcaaagggcctctcaggacactccttctgcaggtctcctgggggaaaacc

SEQ ID NO: 324726 - DNA, 120 bp, Artificial Sequence
  ENSG00000136002_55 (sequence is synthesized)
agttaagacaggattccaggtcatgtctggtggcttcatgcctcacctcagagttagtgaagctcagtgcagaggaagtgcctgagcccgctgagtgcaagtcagagcaaagcccagaaa

SEQ ID NO: 324727 - DNA, 120 bp, Artificial Sequence
  ENSG00000136002_56 (sequence is synthesized)
gcagaacccaggaaccccaaggcacccaactcgcaccaagagctgctgatgagagagagacacagaagcacctctggggcatttctgtccaggcaggaaaccaaaccagtaattacacat

SEQ ID NO: 324728 - DNA, 120 bp, Artificial Sequence
  ENSG00000136002_57 (sequence is synthesized)
caaagtatgtgctcagcgaggaaagcaagtcacctaccagggccaagttcccacggcagcctagcagtgaggggacccaggtgtggagtggagacttgatgggctgcttggaagtgagtg

SEQ ID NO: 324729 - DNA, 120 bp, Artificial Sequence
  ENSG00000136002_58 (sequence is synthesized)
acagttcagatgcccctgagaccacccagaaatcaagcgcaatagacacttcaaaggcagccgaagaagccatggttctagaccccaactacagggaacaggctttgcaaggtctttcag

SEQ ID NO: 324730 - DNA, 120 bp, Artificial Sequence
  ENSG00000136002_59 (sequence is synthesized)
aattcaaggcagccacggtgtctcactgcggccccggggctgaggagggtgaacaggggcctgggggtgccgggggccggcagctggagcccaaagcaggcggcgaggcctcgaggggca

SEQ ID NO: 324731 - DNA, 120 bp, Artificial Sequence
  ENSG00000136002_60 (sequence is synthesized)
ggggcgccctcatcattgtagctgtggagcagaaaggtcttcaggccagcaggagcaatgcggggcctgttccagaaacactgccccgtgactttcctaaggaaagaccagaatctccct

SEQ ID NO: 324732 - DNA, 120 bp, Artificial Sequence
  ENSG00000136002_61 (sequence is synthesized)
tgagcactggcgagaccccctgtgagtctcccactagggggaaaacaccagccggtaatgagtgtgagttgccagcagcccccatacagggagctggcgatggggctcttcagcgggtgg

SEQ ID NO: 324733 - DNA, 120 bp, Artificial Sequence
  ENSG00000136002_62 (sequence is synthesized)
cccaggccgcagagcttgggagagtgctggtcccccaagctgcttcggaagagacgccgagcacagaggagcccccgggagagagactgcgtggggagagccggagctccgggtcagggg

SEQ ID NO: 324734 - DNA, 120 bp, Artificial Sequence
  ENSG00000136002_63 (sequence is synthesized)
agcccggggccagcgcccccgcgtccccgccttggagccgccccagccgccacgcgggctccgcaagggcgcgcaggagcctgggaagcgcccgacgttttccaaggtgacctccttcag

SEQ ID NO: 324735 - DNA, 120 bp, Artificial Sequence
  ENSG00000136002_64 (sequence is synthesized)
ctgggaagcgcccgacgttttccaaggtgacctccttcaggaagggcaggcccttggccactgagagcccaggaggggtcccggccccgaccaccgagggtcgccgctggggctcttcag

SEQ ID NO: 324736 - DNA, 120 bp, Artificial Sequence
  ENSG00000136002_65 (sequence is synthesized)
gccccgaggggctccccagggagaatccgcccgctgcggccggtcgggacgcaccgcctctgcaccacggggacgccagcgcctggcccgagtttgtcccgcaggctgcaggcgacagga

SEQ ID NO: 324737 - DNA, 120 bp, Artificial Sequence
  ENSG00000136002_66 (sequence is synthesized)
agccctcgggcccagcaggctggaatcgcacacaccctgccttccagctctgcctgctgcctggcatatgaaaaccccgggacgccctgcagacccacgagccccaagcccctgagtccc

SEQ ID NO: 324738 - DNA, 120 bp, Artificial Sequence
  ENSG00000136002_67 (sequence is synthesized)
aggcctagtgctcagcggatgggtctccactaccccgggaggggtagcgccatctccatggtttctcttggaagctacagctacgtggacagcagttcaggggaccctgaaagacccaag

SEQ ID NO: 324739 - DNA, 120 bp, Artificial Sequence
  ENSG00000136002_68 (sequence is synthesized)
gggcgtccaagctgagggccgtccggcggggaggtcccaggccctggtgttcagatgctcctcctgccccagatcccctgggaaactgtccactccgcaccctaagcctttccccaagtt

SEQ ID NO: 324740 - DNA, 120 bp, Artificial Sequence
  ENSG00000136002_69 (sequence is synthesized)
gcatgttagccagcgggcgcgccacccatccccctgcttctgcccgctggggctggcaggagcaggcactggttcaggaactgcagcaagcgctccagcctctgtgccgggcacaagcag

SEQ ID NO: 324741 - DNA, 120 bp, Artificial Sequence
  ENSG00000136002_70 (sequence is synthesized)
ggtctaggaaggaggccaaatcggtattcggatcacactgacggcggctgcgggcgtcggagtcgtcattcctcggtccaggacttgcgtgggtggcgtggtggggggagctggccggcc

SEQ ID NO: 324742 - DNA, 120 bp, Artificial Sequence
  ENSG00000136002_71 (sequence is synthesized)
ccccgtacaccctgcggggcctccgaggcccggttcccgccgctgcggcgcagggcgcggggcgttgctccgagggatgcggggcactgaccggccacgcatggcctgcagctgagggtg

SEQ ID NO: 324743 - DNA, 120 bp, Artificial Sequence
  ENSG00000136002_72 (sequence is synthesized)
tgccccccggcgcccagcgcgtggtggtctccgccgtgctggcgctcctggttctcatcaacgtcgtactgatcttcctgctggccttccgctgagcggccgcgcagggcgccgcgccgg

SEQ ID NO: 324744 - DNA, 120 bp, Artificial Sequence
  ENSG00000136002_73 (sequence is synthesized)
attccccaggctgagagtacgcgagggcgcagcagcggcaaggggctggaactggggtcggggctgttgggctcctgctcggggtgccccctctctggcccgatttccgggcccgctcac

SEQ ID NO: 324745 - DNA, 120 bp, Artificial Sequence
  ENSG00000136002_74 (sequence is synthesized)
catccgggacccactcagttgggacgcctccacctcgctgcccccacaggaaccccaagatgggccgggggctccggggcactgtcaggggtggccggccacaggttgccaagcccgacc

SEQ ID NO: 324746 - DNA, 120 bp, Artificial Sequence
  ENSG00000136002_75 (sequence is synthesized)
cactggtgagttacgcgcctctctcttttgctatgtactctggatcctggcatgaaggacaagaagctagtgctgttggcagctgtatccacttgcctggtagaagtagcttgaaggtga

SEQ ID NO: 324747 - DNA, 120 bp, Artificial Sequence
  ENSG00000136002_76 (sequence is synthesized)
ttgcctggtagaagtagcttgaaggtgagagagataaacaattgtcctcttccttcagttagggaggagtgcctactacccaaagaaagggaattattggctgggcacagtggctcatgc

SEQ ID NO: 324748 - DNA, 120 bp, Artificial Sequence
  ENSG00000136002_77 (sequence is synthesized)
gggctgcgggggcgaggggggaggccaaaatggcgcgtctctgcgagtaaccgaggatgcggattcagctggggctccccggctgcttgtctggaaacggagtgcatgtgaccgctgggt

SEQ ID NO: 324749 - DNA, 120 bp, Artificial Sequence
  ENSG00000136003_0 (sequence is synthesized)
caggcgcaagccggcaagatggcggcggctggggctttccgtctgaggcgggcggcatcggctctgctgctgcggagcccccgcctgcccgcccgggagctgtcggccccggcccgactc

SEQ ID NO: 324750 - DNA, 120 bp, Artificial Sequence
  ENSG00000136003_1 (sequence is synthesized)
actctatcacaagaaggttgttgatcattatgaaaatcctagaaacgtggggtcccttgacaagacatctaaaaatgttggaactggactggtgggggctccagcatgtggtgacgtaat

SEQ ID NO: 324751 - DNA, 120 bp, Artificial Sequence
  ENSG00000136003_2 (sequence is synthesized)
gaaattacagattcaagtggatgaaaaggggaagattgtggatgctaggtttaaaacatttggctgtggttccgcaattgcctccagctcattagccactgaatgggtgaaaggaaagac

SEQ ID NO: 324752 - DNA, 120 bp, Artificial Sequence
  ENSG00000136003_3 (sequence is synthesized)
ggtggaggaagccttgactatcaaaaacacagatatcgccaaggagctctgccttcctcccgtgaaactgcactgctccatgctggctgaagatgcaatcaaggccgccctggctgatta

SEQ ID NO: 324753 - DNA, 120 bp, Artificial Sequence
  ENSG00000136003_4 (sequence is synthesized)
gagaagaaatgagccctccctcggcgaagcctccagcaggccacaccagctgtttcccacctgctgtgcagtcaccttagatgttcagaagccgcttcctctccactgaagagctatgag

SEQ ID NO: 324754 - DNA, 120 bp, Artificial Sequence
  ENSG00000136003_5 (sequence is synthesized)
atacgcacaatacttgctgttcacgttatgactctcatgcaagcaaaatacacagtttcattgttctgaatcctgtggtttctttcagcccacttttatcgccttaacctagttaatgta

SEQ ID NO: 324755 - DNA, 120 bp, Artificial Sequence
  ENSG00000136003_6 (sequence is synthesized)
tattttgaattgtgtgtatgacctcagaactgaaattgataatgaagttgcaagttttgatagcccgtgaagtgcataagtatctaattttacctgaattgatttggggggaaattacca

SEQ ID NO: 324756 - DNA, 120 bp, Artificial Sequence
  ENSG00000136003_7 (sequence is synthesized)
gtagaatgccttggtctgaatatttgatagaaccaattgttgtacataaaacagattgcgcatatatatatatgtataaaaaataataaaataatggaagatgatggtgttctctagtaa

SEQ ID NO: 324757 - DNA, 120 bp, Artificial Sequence
  ENSG00000136003_8 (sequence is synthesized)
gtctcacattcatccctaagagaatcatgccagaaggaggtatgcaccagccatcatactgagcacttcatgggcgtaatttctaaacctcacaaatatccttgagtgcacagtagatgt

SEQ ID NO: 324758 - DNA, 120 bp, Artificial Sequence
  ENSG00000136003_9 (sequence is synthesized)
cattacttccctcttatggatgaggaagctaaggcttgggttgagacgcccacatcacatggctaataagtggaagagccagaatttaagctccaatctttgatttcagaatctgtgctg

SEQ ID NO: 324759 - DNA, 120 bp, Artificial Sequence
  ENSG00000136003_10 (sequence is synthesized)
tttccagcagaggagaaaactcagctttcgccataatcctgtttcctgtgtatttcttcacttcctgtctggatggtattcctgtcggggtctgcatctgtatatatggaacaactaagc

SEQ ID NO: 324760 - DNA, 120 bp, Artificial Sequence
  ENSG00000136003_11 (sequence is synthesized)
ccagttgtacaatgtccccctccctgctatcctaaaaaaaagcccagatgccttaagacttgtacttggctttccagtttggtctctgtattaaatctaatgctttttccatcatttctt

SEQ ID NO: 324761 - DNA, 120 bp, Artificial Sequence
  ENSG00000136003_12 (sequence is synthesized)
tgtctggatggtattcctgtcgggggaaagaaggaatgagaaacattagccttaatgcatcgatggaggtttactaaccaaattagttaaaaatcagcagagagtcaggcctcttgccaa

SEQ ID NO: 324762 - DNA, 120 bp, Artificial Sequence
  ENSG00000136003_13 (sequence is synthesized)
tcttcaggaagcctggtcagacctaagttctttccacttgatctggaattttaagtacccataaagaaaggtcatcacttgtaaacattttcacatggtttcaggaaatccccagccctt

SEQ ID NO: 324763 - DNA, 120 bp, Artificial Sequence
  ENSG00000136003_14 (sequence is synthesized)
ttattaggcctttttaggtactgaaacctttagctgatgttctctgttatttgcttgctttctgctgtcattccagctctctcagtttttattttccccatagcctcactttgaatattg

SEQ ID NO: 324764 - DNA, 120 bp, Artificial Sequence
  ENSG00000136003_15 (sequence is synthesized)
actcctaaataaaagtggtcaaactctcgatcactagagggtgatgtggcaaatgccatcccatcaacagattgacatgatcttttttccaaagggcatgtcaacttttttatcatgaca

SEQ ID NO: 324765 - DNA, 120 bp, Artificial Sequence
  ENSG00000136003_16 (sequence is synthesized)
agattttgtccaaagctagactttgatgggagcaggcaagaagtaacatttcctgtgtccctactatgtgtcagacatcttctgtaagtccccacactatcctggcaagaaaagcatgat

SEQ ID NO: 324766 - DNA, 120 bp, Artificial Sequence
  ENSG00000136003_17 (sequence is synthesized)
ttgccccagcagctgtgagcagacttccacaaatagaagttcatagccaaaatgcaggccagagtcacaaaacaaaagaatattggagtggagggacatatttttcagctgatctttgtc

SEQ ID NO: 324767 - DNA, 120 bp, Artificial Sequence
  ENSG00000136003_18 (sequence is synthesized)
agttgggcctggatagttgtccctgcatttcacttttcatcactgagctctttgaaacaaggcaaagtcagtaattaatgccatcacttagtgtggaaagcaagcccaaagcccttgggg

SEQ ID NO: 324768 - DNA, 120 bp, Artificial Sequence
  ENSG00000136003_19 (sequence is synthesized)
gtatctcaaatctgtgaagtattgtagaggagacacaaaaggaattgggggtcacaaatggttctcattgacatgagtgtagacctttctactcaggtgaaatttggtatttagtgattg

SEQ ID NO: 324769 - DNA, 120 bp, Artificial Sequence
  ENSG00000136003_20 (sequence is synthesized)
actgggagctgtcccctcccacgtctttgccctgactcgctttcccttgctgcgcagtgaggctcactgcaactgataaacaacagttaccgctcatcgggcggcgacttccagggggcc

SEQ ID NO: 324770 - DNA, 120 bp, Artificial Sequence
  ENSG00000136003_21 (sequence is synthesized)
ccgccgctggccgcgacttcgtgcgtcccaattttaaattcgccaacagcccaggaggcagggtcctgttgggacttgtctttctgagtccagggacagacacacccccggagcgggctc

SEQ ID NO: 324771 - DNA, 120 bp, Artificial Sequence
  ENSG00000136003_22 (sequence is synthesized)
cggcttcagccactccgctgccctggccagatgaccttgggctagtcactgcgcctctctgaacctgtttccccaggtgtaaatggggggctctcagctgtcccttacaaaggatactgt

SEQ ID NO: 324772 - DNA, 120 bp, Artificial Sequence
  ENSG00000136003_23 (sequence is synthesized)
gcgtggagtcctggcatggttcctggcacataggccccagcacgaggagaccgtttctgttactgctttaggagtgcataggggagtcaggcttgtaaccaacatgcgtaatgtttttgt

SEQ ID NO: 324773 - DNA, 120 bp, Artificial Sequence
  ENSG00000136003_24 (sequence is synthesized)
tttgtttggggggttttttggcggggaaggagggatagattcatagtctgcagccccttgctgtctggtggcacaaagtcccccagacgtgagactcccactcgagaaacaactaaagaa

SEQ ID NO: 324774 - DNA, 120 bp, Artificial Sequence
  ENSG00000136003_25 (sequence is synthesized)
tgccataaatcaacgtggcacaaaaggcccctacattagatactatcctgaggtcccttttacttggagtcaaaatccttagtcagatggggggaaaaggggactggaagatcggcgtgc

SEQ ID NO: 324775 - DNA, 120 bp, Artificial Sequence
  ENSG00000136003_26 (sequence is synthesized)
ttactactaaccagtaaccaaacctcaaggttattaaggccttctgtgtgccagttcgaatggatgtttattgtgatctggcttctgccctttctccaagggcttcttcactcctccccc

SEQ ID NO: 324776 - DNA, 120 bp, Artificial Sequence
  ENSG00000136003_27 (sequence is synthesized)
tcccgggggtgtgttttgttgagggtacaccctgaagaaacttggactagcagcctttcagcagccagggtgcgctgctgcaccagggtgatgacaggctgtgaaatacggtaatggcac

SEQ ID NO: 324777 - DNA, 120 bp, Artificial Sequence
  ENSG00000136003_28 (sequence is synthesized)
tgtttttattttaaaagacacataaacgtacacattccatagcattgttccctgtgtaacagtcaccttaaggcttctaagaaagctttccctccctgggccatggttatttttagaatt

SEQ ID NO: 324778 - DNA, 120 bp, Artificial Sequence
  ENSG00000136003_29 (sequence is synthesized)
tttaaatagtaatcatcctttgaggatggattttatttgaaaataacaaaactgctgtttgagcccaagtctggtgatgtaggtgggtgaaagtcaagtatttttgtaaaaatcctatgg

SEQ ID NO: 324779 - DNA, 120 bp, Artificial Sequence
  ENSG00000136003_30 (sequence is synthesized)
ctagtctgtctccaggatcacccgcaggagtaactcagctcaggaagcagctgctgacgtgcccagcaactcctcaccccagctttctggcttggttactccattagtccccaccagcac

SEQ ID NO: 324780 - DNA, 120 bp, Artificial Sequence
  ENSG00000136003_31 (sequence is synthesized)
cacttcctcccagctcttaaagattctattcccaagtccatttctttcacatctagaaacttaggcttctttccttccgttacttccagtgctggctgaagatgcaatcaaggccgccct

SEQ ID NO: 324781 - DNA, 120 bp, Artificial Sequence
  ENSG00000136010_0 (sequence is synthesized)
agtgctagcgctcctctccagcatgctgcggcggggcagccaggcgctccggcgcttctccactggccgggtttatttcaaaaacaagctgaagttggcactaattggccagagcctctt

SEQ ID NO: 324782 - DNA, 120 bp, Artificial Sequence
  ENSG00000136010_1 (sequence is synthesized)
tggacaagaagtctatagccacctccgcaaagagggccaccgagtagtaggggtgttcacagttccagacaaggatggaaaagctgaccctctggctttggctgcagagaaagatgggac

SEQ ID NO: 324783 - DNA, 120 bp, Artificial Sequence
  ENSG00000136010_2 (sequence is synthesized)
ccctgtgttcaagcttcctaaatggagggtcaagggcaagaccatcaaagaagtggcagaagcctacagatccgtgggtgcagagctaaatgtgctccctttctgcactcagttcattcc

SEQ ID NO: 324784 - DNA, 120 bp, Artificial Sequence
  ENSG00000136010_3 (sequence is synthesized)
catggatataattgatagtccaaagcacggctctatcatttatcacccatccatcctgcccaggcacagaggagcctctgctatcaattggactctaattatgggagataagaaagctgg

SEQ ID NO: 324785 - DNA, 120 bp, Artificial Sequence
  ENSG00000136010_4 (sequence is synthesized)
gttttctgttttctgggctgatgatggcttggatacaggacccatccttcttcagagatcatgtgatgttgaacccaatgatacagtggatgcactttataatcggtttctttttcctga

SEQ ID NO: 324786 - DNA, 120 bp, Artificial Sequence
  ENSG00000136010_5 (sequence is synthesized)
aggaatcaaggccatggtagaagctgtccaactcatagctgatggaaaagctcctcgtataccccagccagaagaaggggcaacatatgaaggtatccagaaaaaggaaaatgctgagat

SEQ ID NO: 324787 - DNA, 120 bp, Artificial Sequence
  ENSG00000136010_6 (sequence is synthesized)
ttcttgggaccagtctgccgaagttttacataactggattcgaggtcatgataaagtccctggagcttggacagagataaatggacagatggtcactttctatggctcgacattactgaa

SEQ ID NO: 324788 - DNA, 120 bp, Artificial Sequence
  ENSG00000136010_7 (sequence is synthesized)
tagctctgtgcctcctggagaaccactggaaattaaaggtgccaagaagcctggtctcgttaccaaaaatggacttgttctttttggtaacgatggaaaagcactgacggtgagaaatct

SEQ ID NO: 324789 - DNA, 120 bp, Artificial Sequence
  ENSG00000136010_8 (sequence is synthesized)
gcagtttgaagatggaaaaatgatccctgcctctcagtacttttcaacgggtgagacgtcagtggtagaactgacagctgaagaggtgaaagtggcagagaccatcaaggtcatctgggc

SEQ ID NO: 324790 - DNA, 120 bp, Artificial Sequence
  ENSG00000136010_9 (sequence is synthesized)
tggaattttaagcaatgtccccattattgaagactcaacagacttctttaaatctggagcaagctcaatggatgttgccaggctggttgaagagatcagacagaaatgtggtgggcttca

SEQ ID NO: 324791 - DNA, 120 bp, Artificial Sequence
  ENSG00000136010_10 (sequence is synthesized)
gttgcagaatgaagatgtctatatggccaccaagtttgaaggctttatccaaaaggtcgtgaggaaactgagaggagaagatcaagaggtggagctggttgtagattatatttcaaagga

SEQ ID NO: 324792 - DNA, 120 bp, Artificial Sequence
  ENSG00000136010_11 (sequence is synthesized)
ggtcaatgaaatcatggtaaaaatgccataccagtgtttcataaatggacagttcacagatgcagacgatggaaagacttacgacactatcaacccaacagatggatctacaatatgcaa

SEQ ID NO: 324793 - DNA, 120 bp, Artificial Sequence
  ENSG00000136010_12 (sequence is synthesized)
agtatcctacgcttctttggcggatgttgataaagcagtagcagcagcaaaagatgcttttgaaaacggtgaatggggaagaatgaatgcaagagaaagaggaagattgatgtatagact

SEQ ID NO: 324794 - DNA, 120 bp, Artificial Sequence
  ENSG00000136010_13 (sequence is synthesized)
tgcagacctactggaagagaaccaagaagagctggcaactattgaagcccttgattcaggggctgtctataccttggccctgaagacacacattggaatgtctgtgcaaacattcagata

SEQ ID NO: 324795 - DNA, 120 bp, Artificial Sequence
  ENSG00000136010_14 (sequence is synthesized)
ttttgctggctggtgcgacaaaattcagggttctactattccaatcaaccaggcccgtccaaatcgcaatctgaccttcaccaagaaagagccactcggtgtctgtgccattattattcc

SEQ ID NO: 324796 - DNA, 120 bp, Artificial Sequence
  ENSG00000136010_15 (sequence is synthesized)
ctggaactacccgctgatgatgctggcatggaagagtgctgcgtgtttggcagcaggcaataccttagtgctcaagccagcacaggtcacgcccttgactgctttgaagtttgcagaact

SEQ ID NO: 324797 - DNA, 120 bp, Artificial Sequence
  ENSG00000136010_16 (sequence is synthesized)
gtctgtgaaagcaggctttccaaagggggtcatcaacatcattccaggctcaggtggcatagcaggacaacgtctgtctgaacatcctgacatccgcaaacttggtttcactggatccac

SEQ ID NO: 324798 - DNA, 120 bp, Artificial Sequence
  ENSG00000136010_17 (sequence is synthesized)
tcctattggcaaacagatcatgaagagctgtgctgttagcaacttgaagaaagtttcccttgagcttggtggcaagtctccacttataatatttaatgactgtgaacttgacaaggctgt

SEQ ID NO: 324799 - DNA, 120 bp, Artificial Sequence
  ENSG00000136010_18 (sequence is synthesized)
gcgaatgggcatgggagcagtatttttcaacaaaggagagaactgtattgctgctgggcggttgttcgtggaagaatccatccacgacgaatttgtgacaagagtggtagaagaaattaa

SEQ ID NO: 324800 - DNA, 120 bp, Artificial Sequence
  ENSG00000136010_19 (sequence is synthesized)
aaagatgaaaattggtgatccacttgacagatccactgatcatgggccccaaaatcataaggctcatctggaaaagctgctgcaatactgtgaaactggagtgaaagaaggggccacttt

SEQ ID NO: 324801 - DNA, 120 bp, Artificial Sequence
  ENSG00000136010_20 (sequence is synthesized)
ggtgtacgggggaagacaagtccaaaggccaggctttttcatggagccgaccgtgttcacagatgtggaagactacatgtacctcgccaaagaggaatcctttgggcctattatggtcat

SEQ ID NO: 324802 - DNA, 120 bp, Artificial Sequence
  ENSG00000136010_21 (sequence is synthesized)
ttctaaattccaaaatggggacatcgatggagtgttgcagcgagcaaatagtacagagtatggtttggcctcaggggtttttacaagagacataaacaaagctatgtatgtgagtgaaaa

SEQ ID NO: 324803 - DNA, 120 bp, Artificial Sequence
  ENSG00000136010_22 (sequence is synthesized)
actggaagcaggaactgtttttattaacacatacaacaagacagatgtggcggccccatttggcggagttaaacaatctggctttggaaaagacttaggtgaggaagctctaaatgaata

SEQ ID NO: 324804 - DNA, 120 bp, Artificial Sequence
  ENSG00000136010_23 (sequence is synthesized)
tctcaaaaccaagacggtgacactggaatattagagcaacaccatcatcaggaaagccttgacagacagccctttacaactctggacacacttaagaagattgggtgtgttgaggcagga

SEQ ID NO: 324805 - DNA, 120 bp, Artificial Sequence
  ENSG00000136010_24 (sequence is synthesized)
ggtgtcagccacaaaccaaaaaatacacagatggaccatgaagagggccaggccatgttaaagcatttacacatgtgcctgagtattttctaatacaccttccagtgatttggagttgtt

SEQ ID NO: 324806 - DNA, 120 bp, Artificial Sequence
  ENSG00000136010_25 (sequence is synthesized)
gcattttgactatgttgtatatcatacgtatttctaaaataccaagctgtttctcccctacctagacaaatctattcatggttcccatcttgaagatgtcagtaccatgcagttataata

SEQ ID NO: 324807 - DNA, 120 bp, Artificial Sequence
  ENSG00000136010_26 (sequence is synthesized)
cacaaggtgcatttattggaaactttgtataatatgtacaggtttttaacctctgaactatacatagggggttattaaaaagattttctataagtcttctaaggaacagtataacctgta

SEQ ID NO: 324808 - DNA, 120 bp, Artificial Sequence
  ENSG00000136010_27 (sequence is synthesized)
aggaatgtgaaggtagttcttttttagtatttggaaataagatacatctttgtgcctttgatattccattttttaacccactgtgatgggtgatcaacctagaaacattatcttgagtac

SEQ ID NO: 324809 - DNA, 120 bp, Artificial Sequence
  ENSG00000136010_28 (sequence is synthesized)
ctactaggtaccaggtactatattatgttctgaggagtatagagaatttaatgatatgatggctggcccccacatagtttaaattttagtaaatagcttttgaagcaaattttacatatg

SEQ ID NO: 324810 - DNA, 120 bp, Artificial Sequence
  ENSG00000136010_29 (sequence is synthesized)
atatagtagaaggctgatcctggtcgtatcataccatcttcctatctatgtaactttgggaaactctcgcaactcctctgagcctctgcttccctatgtgtaaaacagggatagtaaatg

SEQ ID NO: 324811 - DNA, 120 bp, Artificial Sequence
  ENSG00000136010_30 (sequence is synthesized)
cgtcaccattcttaaaagatattgagatagtttaattaactagatgaattcatttcccacaacccttttcaatcatcaattcctagatatttttctcatccattgttctgacacaatgcc

SEQ ID NO: 324812 - DNA, 120 bp, Artificial Sequence
  ENSG00000136010_31 (sequence is synthesized)
tgatacagcagcactgaaaaatgccacacaatgaaaaatggcaatagtacaaggaaaaggggtgcttttctttgggcagctcgctcgtccttcatgggacatcttactttccatttttct

SEQ ID NO: 324813 - DNA, 120 bp, Artificial Sequence
  ENSG00000136010_32 (sequence is synthesized)
acctattggttctgctgttcactggctgtgtgatcttgggcaagatagtaatctaatatctcagagcctaggttgagtatctataaaatgaaaatcaaatctctatctcagtaggtgttg

SEQ ID NO: 324814 - DNA, 120 bp, Artificial Sequence
  ENSG00000136010_33 (sequence is synthesized)
caaggattcagtgagataatatacataatgcacttaacaaggcgtttggaccatagcattgaagaaatggaaactattaacagcccatttcccattggcagacagaagtagtcaggtgag

SEQ ID NO: 324815 - DNA, 120 bp, Artificial Sequence
  ENSG00000136010_34 (sequence is synthesized)
taaattttcaccatctatgtgtgactagaaggcggcaaatttctgaatcacatgagtctccaaaagatagccagaaagttaaattctattaatcctcctttaaaaataaaatttcagtaa

SEQ ID NO: 324816 - DNA, 120 bp, Artificial Sequence
  ENSG00000136010_35 (sequence is synthesized)
acattcctttttctttggctttgaagaagccttagggaatatttgtcattttggagacttggcagaataacatgaggggattgtagggaatcaataaaaactaaacaacaaaatcagagt

SEQ ID NO: 324817 - DNA, 120 bp, Artificial Sequence
  ENSG00000136010_36 (sequence is synthesized)
cagagaacattttcaaaaggaagaataggaggtttgatcccagcatgataaacagagcgaatttggcctggaagcacttttgattatactatagctcatttaccatcccagagtttggca

SEQ ID NO: 324818 - DNA, 120 bp, Artificial Sequence
  ENSG00000136010_37 (sequence is synthesized)
cagctgaaattttaagttggaatgaatattcactgggcccaaaatgacagttcatatttgaataaaagtgacaaaagcctttttataagtaatcacttttaagtgaaatgttttaactga

SEQ ID NO: 324819 - DNA, 120 bp, Artificial Sequence
  ENSG00000136010_38 (sequence is synthesized)
tttcatgtgatttagaatatgatttaatcaaattattttaatgatagatggaatggcagacaaaaacatgcctgtccttctagactgattttactttaccctctaatattcatctcagta

SEQ ID NO: 324820 - DNA, 120 bp, Artificial Sequence
  ENSG00000136010_39 (sequence is synthesized)
gcagtgttttaaatattctctgggctgcaaaactctttgggaatctgataaaagctatgaacactccctgtgtcccgcttctacccccaaaattcatgtgcacacacacaattctgcaag

SEQ ID NO: 324821 - DNA, 120 bp, Artificial Sequence
  ENSG00000136010_40 (sequence is synthesized)
tatcttcaaagggttcacagacctcccaaaggccatgcttgggccccagattaagaactcctttctccatagcaagttttaaacatttcttaccagcttacatttttagatctggctgat

SEQ ID NO: 324822 - DNA, 120 bp, Artificial Sequence
  ENSG00000136010_41 (sequence is synthesized)
cagaatcaaaggctctgtgtaatacataaagttaccaagtgaactggaattggaacatcaccctccccagcctgctaggtgatttacttaacacatagagtaataaaatcatcgctgttg

SEQ ID NO: 324823 - DNA, 120 bp, Artificial Sequence
  ENSG00000136010_42 (sequence is synthesized)
ctttagatcacggattattttgctaataatgctaaggatgaagctgtgatcttattatcacctgaatcgggaggtgtggacactttaagcagttccactttccttctaattccccatccc

SEQ ID NO: 324824 - DNA, 120 bp, Artificial Sequence
  ENSG00000136010_43 (sequence is synthesized)
catgcctttgctaaagctgtcccttttgctctaacacccttcctggaccttcctaccctagctgggctaagtgtttctcctcagcgttcccacttgtttcaaacatagcacttaccactt

SEQ ID NO: 324825 - DNA, 120 bp, Artificial Sequence
  ENSG00000136010_44 (sequence is synthesized)
gtactaaaattacttgccttcttaattagatatgaacaaccctccccaactccagtatgggccttctgtcaataataatacgatatgacagctaccatttattaagggcctcctgtatga

SEQ ID NO: 324826 - DNA, 120 bp, Artificial Sequence
  ENSG00000136010_45 (sequence is synthesized)
aagaccttaggctaagcatgttttaaatgttatttaatcttcacaatctctgaaaaaaatgaagaaatcaacgtgcttttcttactacctctacccctaagccattattacttttttttt

SEQ ID NO: 324827 - DNA, 120 bp, Artificial Sequence
  ENSG00000136010_46 (sequence is synthesized)
acaggcatgaaccactgcacctggcctgttacctctttcctacaattttgctcaagtctcccaactggtcttctggattcctctcttctgcggtcctgttcaaagcttaagtcagacagt

SEQ ID NO: 324828 - DNA, 120 bp, Artificial Sequence
  ENSG00000136010_47 (sequence is synthesized)
cagacagtgtcacttcactcgtctgtttaaaacctttcaatggcccccatttcacgtagaccaaagtccaacgtatttacctggcctactgatcttgctcctagctacctctgacctcat

SEQ ID NO: 324829 - DNA, 120 bp, Artificial Sequence
  ENSG00000136010_48 (sequence is synthesized)
ctcctgtcaatttccctctcattctgttccaccatcctgactgccttgacttcctcaacagaacaagcctgctcctgcctcagggcctctgtccttattcttcctcttcccaggggtgtg

SEQ ID NO: 324830 - DNA, 120 bp, Artificial Sequence
  ENSG00000136010_49 (sequence is synthesized)
ctggtaaaatatttaacaaatagttctccgggacgggggagaaaaccctcatttgtagcatttgcaggtatctatgtgtaaatactctcatcaaggctatttttgagccactaatttgcc

SEQ ID NO: 324831 - DNA, 120 bp, Artificial Sequence
  ENSG00000136010_50 (sequence is synthesized)
ttcactgaatacagagtttgggaagagatgcatgccatcagaacaaatgcaagccagcaccagcacaccactgcctcttcctgcaactcttgtccatacacaacctcatggctggctggc

SEQ ID NO: 324832 - DNA, 120 bp, Artificial Sequence
  ENSG00000136010_51 (sequence is synthesized)
tcacttcctgcaggtctctcctcaaatatcatctgatgagagacacattccctgactatgctttctaaaataggccatatgcccccacattcataccccatctgctgtcattctttattc

SEQ ID NO: 324833 - DNA, 120 bp, Artificial Sequence
  ENSG00000136010_52 (sequence is synthesized)
tttttataagtgcattattttcatagcacttatcactacctgttgtatattaatcaatgatcttttcccattagaatgtaagtttcatgaacaggtacttgttttaatactgtatctcca

SEQ ID NO: 324834 - DNA, 120 bp, Artificial Sequence
  ENSG00000136010_53 (sequence is synthesized)
gtcctaatgtgtaacaggagcccaataaatgtttgctttcaaatggagaggttaagtaacctgctcaaatcacacagctattaagtggcagaacaggttttcaagcaatgcatctggtgg

SEQ ID NO: 324835 - DNA, 120 bp, Artificial Sequence
  ENSG00000136010_54 (sequence is synthesized)
ttttaactaagtcgagatagtttttattcctaatgcctaaatcagggcctaggtagtgagctgtgggcacatattaagtattggttaaactaaaaataataagcaaaatggacattatct

SEQ ID NO: 324836 - DNA, 120 bp, Artificial Sequence
  ENSG00000136010_55 (sequence is synthesized)
ataaaagcttttgtggaaatggctagagctagggtaaggaaacaaatttggttccccatacctgccctccaagaaaataaagctgtcaaggaaaatctgggctaagagtaggatatgagg

SEQ ID NO: 324837 - DNA, 120 bp, Artificial Sequence
  ENSG00000136010_56 (sequence is synthesized)
gatgatggataaggcatgagacatgagaaataagggggattaaattattattactattatacaaatgatgcctgagtagatttttaaaatgattaaatacccaatgatgtaaaaaacatt

SEQ ID NO: 324838 - DNA, 120 bp, Artificial Sequence
  ENSG00000136010_57 (sequence is synthesized)
tataaaataggaaagtaagactgactcaaccataatttgttgagtcaacccaaaaatctatttggttattttcaaacagaaatagcctacagatgatatctgagattgttccaaactttt

SEQ ID NO: 324839 - DNA, 120 bp, Artificial Sequence
  ENSG00000136010_58 (sequence is synthesized)
tctatgaatatgtatactttttttacataattaacataatactgtatattaatttgttacctgctttttcaattaacaatatatcataagcatctatgccaataaacacaattctgcata

SEQ ID NO: 324840 - DNA, 120 bp, Artificial Sequence
  ENSG00000136010_59 (sequence is synthesized)
aggaacagctcagagaaccactacaaatacagaagaaaaataaatagagaagttgaacacaaaagatgagtcttaccgtatcatagtcattatacagtcctgcacttaccttcccataaa

SEQ ID NO: 324841 - DNA, 120 bp, Artificial Sequence
  ENSG00000136010_60 (sequence is synthesized)
acttgtgaacaccaaacagaaatctgttgcagtgtttgtaattcattgtgtacgttgctatcttgtctcttcagttagttttggaaatatttttgtgccaactggaaatcctcaaatgtt

SEQ ID NO: 324842 - DNA, 120 bp, Artificial Sequence
  ENSG00000136010_61 (sequence is synthesized)
catgggttctcagaagtgtgggttctgggaatgtggttccaatgactggtactggctcagtcattgttctacttcttacacatagatgaggcaagttatatatgcttccaataccctctg

SEQ ID NO: 324843 - DNA, 120 bp, Artificial Sequence
  ENSG00000136010_62 (sequence is synthesized)
cttctcctttgtaattcttgaaacaaatgatttatgaaaatatttgtttaatgtctttcttgcctactggaccatgatctctataagggcagagatctgatccatatgtgtttacctctg

SEQ ID NO: 324844 - DNA, 120 bp, Artificial Sequence
  ENSG00000136010_63 (sequence is synthesized)
aacgctattgaagtacattctaaaatgatcccacctgcaatttggatttttggagaatcgggatcggtgtaaaattctacatgcatacacgtatttgcacaagaatatttatagcaacgt

SEQ ID NO: 324845 - DNA, 120 bp, Artificial Sequence
  ENSG00000136010_64 (sequence is synthesized)
ggtttttaataggaaactatctaaatgttcattacaagtgaattacataaagctcaatacatccatactacgaatcactgaagagctgctaaaatagatgaaatatatttataatggcat

SEQ ID NO: 324846 - DNA, 120 bp, Artificial Sequence
  ENSG00000136010_65 (sequence is synthesized)
tgattacatttatgtttttaagttatacaaacgcgtatgtgcctacgtgtatgtaaattcataggaagacaaatcagaggacggtggttacctggggaaaagcatgtgttgtcctagggt

SEQ ID NO: 324847 - DNA, 120 bp, Artificial Sequence
  ENSG00000136010_66 (sequence is synthesized)
atagctttgcaggagagcttggcagagcctgccaaacctgatcagcttttccacctctcagctactgctttcggctccccagcctcataaactctcagctgccacattacaaatcagcag

SEQ ID NO: 324848 - DNA, 120 bp, Artificial Sequence
  ENSG00000136010_67 (sequence is synthesized)
atgtcttgaggtgaaatgtggtgccaaatgtcaagctcaactttttggatcatctctcctgaatttcagttcctcgaatcctcactgtcctgggtctccaatgccttcaaaaaggatttt

SEQ ID NO: 324849 - DNA, 120 bp, Artificial Sequence
  ENSG00000136010_68 (sequence is synthesized)
gggaaagcgagtcctccgccgtggccgaaggcggccgccatggcgccggcagtgccagcgggcgtcttgcgacccggctcgggcttcgccaccattcactgtgcttctcaagccacttcg

SEQ ID NO: 324850 - DNA, 120 bp, Artificial Sequence
  ENSG00000136010_69 (sequence is synthesized)
gcactctaatttcgccctgctctctctagacgatttttaatacctgggaaagttactccccagtctaacctaaaaaggtagaattgatggggtggggaattaacaggaaggcatgatcct

SEQ ID NO: 324851 - DNA, 120 bp, Artificial Sequence
  ENSG00000136010_70 (sequence is synthesized)
cgaggataacgctgaccaggcgcttcttccaacaagcctgtttccctctctgtcgccaccgtaggagttcctacagctctcccgcacattctgtacggattgttttttagtcaagacgtt

SEQ ID NO: 324852 - DNA, 120 bp, Artificial Sequence
  ENSG00000136010_71 (sequence is synthesized)
cacaatgtaacttaggttttgactagataagtcatttttcccctttgccactgtgctatatacacagcataagattaatgaacatgtaattttctaccataagaataattaacttaaata

SEQ ID NO: 324853 - DNA, 120 bp, Artificial Sequence
  ENSG00000136010_72 (sequence is synthesized)
attagaagttacgcttttgctaaccatcgtagatcatagtatatttttgcttttcagcttcaattaatggccaacataatgggcttttagctgaataaattttagtttttctgcacttga

SEQ ID NO: 324854 - DNA, 120 bp, Artificial Sequence
  ENSG00000136011_0 (sequence is synthesized)
accaagactcctggatttgccatttttcctttctgaaggcaggtctcacctatctcctggttcgatctaggaaaaaggaaaggaagggatttaaaagtaaacagtgaaatgagaaagaat

SEQ ID NO: 324855 - DNA, 120 bp, Artificial Sequence
  ENSG00000136011_1 (sequence is synthesized)
tcactgggagtttatcaaactaagttaaaatagctaagtcagcctgacaggtgcttggcacagagaaggagcaaatatttcctcatgatgctacaacatttagtaattttttgtcttgga

SEQ ID NO: 324856 - DNA, 120 bp, Artificial Sequence
  ENSG00000136011_2 (sequence is synthesized)
ttggttgtacaaaatttctgctccccagctgaaaccacagggcaggcaagaagatgtgataggaagtctcttcttacaattaggaccgagtgccgatcctgcgctctcaaccttggagtc

SEQ ID NO: 324857 - DNA, 120 bp, Artificial Sequence
  ENSG00000136011_3 (sequence is synthesized)
aagtgcccggatggttacaccatgattaccagtggctctgtaggggttcgagattgcaggtacacctttgaggtcagaacatactctctgtctctccccggatgccgccatatttgtagg

SEQ ID NO: 324858 - DNA, 120 bp, Artificial Sequence
  ENSG00000136011_4 (sequence is synthesized)
aaggactatctccaacctcggtgttgtcctggccgctggggcccagactgtatagagtgcccaggtggagcggggtcaccctgcaatggcagaggcagttgtgctgaaggcatggaagga

SEQ ID NO: 324859 - DNA, 120 bp, Artificial Sequence
  ENSG00000136011_5 (sequence is synthesized)
aatggaacctgctcctgccaagaagggtttggtggaacagcctgtgaaacctgtgctgacgacaacttatttggacccagctgttcatcagtgtgcaactgtgtgcatggggtgtgcaac

SEQ ID NO: 324860 - DNA, 120 bp, Artificial Sequence
  ENSG00000136011_6 (sequence is synthesized)
agtggactagatggcgatggaacctgtgagtgctactctgcgtacactggccccaagtgtgacaagcccatccctgaatgtgcagccttgctctgcccagaaaattccagatgttcgcct

SEQ ID NO: 324861 - DNA, 120 bp, Artificial Sequence
  ENSG00000136011_7 (sequence is synthesized)
tccactgaagatgaaaacaaactggaatgcaaatgccttcccaattaccgaggcgatggcaaatactgcgaccccatcaatccatgtttacgaaaaatctgccaccctcatgctcattgt

SEQ ID NO: 324862 - DNA, 120 bp, Artificial Sequence
  ENSG00000136011_8 (sequence is synthesized)
acgtacctgggaccaaatcggcacagttgtacatgccaagaaggctaccgtggggatggccaagtgtgcttgcctgtggacccctgccaaattaactttggaaactgccctacaaagtct

SEQ ID NO: 324863 - DNA, 120 bp, Artificial Sequence
  ENSG00000136011_9 (sequence is synthesized)
acagtgtgcaaatatgatgggcctggacagtctcactgcgagtgtaaggagcattaccagaatttcgtacctggagtggggtgcagtatgactgatatatgtaaatcagataacccgtgt

SEQ ID NO: 324864 - DNA, 120 bp, Artificial Sequence
  ENSG00000136011_10 (sequence is synthesized)
cataggaatgcaaattgcaccaccgtcgcaccaggccgaactgaatgcatttgccagaaaggttacgtgggtgatggcttaacgtgttatggaaacattatggagcgactcagagaatta

SEQ ID NO: 324865 - DNA, 120 bp, Artificial Sequence
  ENSG00000136011_11 (sequence is synthesized)
aatactgaacccagaggaaaatggcaaggaaggctgacctctttcatctcactcctagacaaagcttatgcctggccactgagtaagctgggacccttcacggtgctgttacctacagac

SEQ ID NO: 324866 - DNA, 120 bp, Artificial Sequence
  ENSG00000136011_12 (sequence is synthesized)
aagggactgaaaggattcaatgtaaatgagcttttggtggataataaagctgctcaatactttgtgaaactccacataattgctggtcagatgaacatcgaatatatgaataacacagac

SEQ ID NO: 324867 - DNA, 120 bp, Artificial Sequence
  ENSG00000136011_13 (sequence is synthesized)
atgttctacaccttgactggaaagtcgggggaaatcttcaacagcgataaggacaatcaaataaagcttaaactccatggaggcaaaaagaaggtaaaaattatacaaggggacatcatt

SEQ ID NO: 324868 - DNA, 120 bp, Artificial Sequence
  ENSG00000136011_14 (sequence is synthesized)
gcttccaatgggcttctgcacatccttgacagagccatggacaagttagaacccacatttgagagcaacaatgagcaaaccataatgacaatgctacaaccaaggtacagcaagttcaga

SEQ ID NO: 324869 - DNA, 120 bp, Artificial Sequence
  ENSG00000136011_15 (sequence is synthesized)
tctttgttagaggaaaccaatttgggacatgccttagatgaggatggagttggtggaccatacaccatttttgttccaaataatgaagcattgaataacatgaaggacggcactctcgat

SEQ ID NO: 324870 - DNA, 120 bp, Artificial Sequence
  ENSG00000136011_16 (sequence is synthesized)
tacctcctttctccagagggatctcggaagcttctggaactcgtcagataccacattgtcccatttacccagcttgaagtggccactctcatctccacccctcacatcaggagcatggcc

SEQ ID NO: 324871 - DNA, 120 bp, Artificial Sequence
  ENSG00000136011_17 (sequence is synthesized)
aaccagctcatacagttcaacaccaccgacaatggacagattctggcaaatgatgtggcaatggaagaaattgagatcactgccaaaaatggccgaatttacacactgacaggagttctc

SEQ ID NO: 324872 - DNA, 120 bp, Artificial Sequence
  ENSG00000136011_18 (sequence is synthesized)
attcctccctccattgtcccgattctgccccatcgatgtgatgaaacaaagagagagatgaaactgggcacttgtgtgagctgttctctggtgtactggagcagatgtcctgctaactct

SEQ ID NO: 324873 - DNA, 120 bp, Artificial Sequence
  ENSG00000136011_19 (sequence is synthesized)
gagcccacagcactcttcacacacagatgtgtctacagtggcaggtttgggagcctgaagagcggctgtgcccggtactgcaatgccactgtgaagattccaaagtgctgcaaaggcttc

SEQ ID NO: 324874 - DNA, 120 bp, Artificial Sequence
  ENSG00000136011_20 (sequence is synthesized)
tatggacctgactgcaaccagtgtccaggaggcttctcaaatccatgctcaggaaatggacagtgtgcagatagcctcggcggcaacgggacatgcatttgtgaggagggcttccaaggc

SEQ ID NO: 324875 - DNA, 120 bp, Artificial Sequence
  ENSG00000136011_21 (sequence is synthesized)
tcccagtgtcagttctgctctgatcccaataaatacggacctcggtgtaacaaaaaatgcctgtgcgttcacggaacatgcaataacaggatagacagcgatggggcctgcctcactggc

SEQ ID NO: 324876 - DNA, 120 bp, Artificial Sequence
  ENSG00000136011_22 (sequence is synthesized)
acatgcagagacggctctgccgggagactctgtgataagcagacctcagcctgtgggccctacgtgcagttctgtcacatccacgccacctgtgaatacagcaatgggacagccagttgt

SEQ ID NO: 324877 - DNA, 120 bp, Artificial Sequence
  ENSG00000136011_23 (sequence is synthesized)
atttgcaaagcaggatatgaaggagatggaactctgtgttctgagatggacccttgcacaggactaactccaggaggctgtagccgcaatgcagaatgcatcaaaactggcacgggcacc

SEQ ID NO: 324878 - DNA, 120 bp, Artificial Sequence
  ENSG00000136011_24 (sequence is synthesized)
cacacctgcgtgtgtcagcagggttggacagggaatgggagagactgctcggagatcaacaactgcctgctgcccagtgcaggcggctgccacgacaacgcatcctgtttgtatgtgggt

SEQ ID NO: 324879 - DNA, 120 bp, Artificial Sequence
  ENSG00000136011_25 (sequence is synthesized)
cccgggcagaatgagtgtgagtgcaagaaaggatttcgaggaaatgggattgactgtgaaccaataacttcatgcttggaacaaaccgggaaatgtcatccattggcaagctgtcaatct

SEQ ID NO: 324880 - DNA, 120 bp, Artificial Sequence
  ENSG00000136011_26 (sequence is synthesized)
acttcgtctggtgtctggagctgtgtttgtcaagagggctatgaaggagatggctttctgtgctatggaaacgcagcagtggaattgtcatttctctccgaagcagctatatttaaccga

SEQ ID NO: 324881 - DNA, 120 bp, Artificial Sequence
  ENSG00000136011_27 (sequence is synthesized)
tggataaataatgcttctctacaacccacactgtcagccacctcaaacctcactgtcctcgtgccttcccaacaagctactgaggacatggaccaggatgagaaaagcttctggttgtca

SEQ ID NO: 324882 - DNA, 120 bp, Artificial Sequence
  ENSG00000136011_28 (sequence is synthesized)
cagagcaatattccagccctaataaagtaccatatgctactaggcacatacagagtggcagatctgcagaccctgtcttcttctgacatgttggcaacatctttgcagggcaacttcctt

SEQ ID NO: 324883 - DNA, 120 bp, Artificial Sequence
  ENSG00000136011_29 (sequence is synthesized)
cacttggcaaaggtggatgggaatatcacaattgaaggggcctccattgtcgatggggacaacgcagccacaaatggagtgatacacatcatcaacaaggtgctggtcccacaaagacgt

SEQ ID NO: 324884 - DNA, 120 bp, Artificial Sequence
  ENSG00000136011_30 (sequence is synthesized)
ctaactggctccttaccaaacctgctcatgcggctggaacagatgcctgactattccatcttccggggctacatcattcaatataatctggcgaatgcaattgaggctgccgatgcctac

SEQ ID NO: 324885 - DNA, 120 bp, Artificial Sequence
  ENSG00000136011_31 (sequence is synthesized)
acagtgtttgctccaaacaacaatgccatcgagaattacatcagggagaagaaagtcttgtctctagaggaggacgtcctccggtatcatgtggtcctggaggagaaactcctgaagaat

SEQ ID NO: 324886 - DNA, 120 bp, Artificial Sequence
  ENSG00000136011_32 (sequence is synthesized)
gacctgcacaatggcatgcatcgtgagaccatgctgggtttctcctatttccttagcttctttctccataatgaccagctctatgtaaatgaggctccaataaactacaccaatgtagcc

SEQ ID NO: 324887 - DNA, 120 bp, Artificial Sequence
  ENSG00000136011_33 (sequence is synthesized)
actgataagggagtgatccatggcttgggaaaagttctggaaattcagaagaacagatgtgataataatgacactactattatacgaggaagatgtaggacatgctcctcagagctgacc

SEQ ID NO: 324888 - DNA, 120 bp, Artificial Sequence
  ENSG00000136011_34 (sequence is synthesized)
tattgggtgccagccaaaatgtgtgagaaccgtcattacgagagaatgctgtgccggcttctttggcccccaatgccagccctgcccagggaatgcccagaatgtctgctttggtaatgg

SEQ ID NO: 324889 - DNA, 120 bp, Artificial Sequence
  ENSG00000136011_35 (sequence is synthesized)
catctgtttggatggagtgaatggcacaggtgtgtgtgagtgtggggagggcttcagcggcacagcctgcgagacctgcaccgagggcaagtacggcatccactgtgaccaagcatgttc

SEQ ID NO: 324890 - DNA, 120 bp, Artificial Sequence
  ENSG00000136011_36 (sequence is synthesized)
ttgtgtccatgggagatgcaaccaaggacccttgggagatggctcctgtgactgtgatgttggctggcgaggagtgcattgtgacaatgcaaccacagaagacaactgcaatgggacatg

SEQ ID NO: 324891 - DNA, 120 bp, Artificial Sequence
  ENSG00000136011_37 (sequence is synthesized)
ccataccagcgccaactgcctcaccaactcagatggtacagcttcatgcaagtgtgcagcaggattccaaggaaacgggaccatctgcacagcaatcaatgcctgtgagatcagcaatgg

SEQ ID NO: 324892 - DNA, 120 bp, Artificial Sequence
  ENSG00000136011_38 (sequence is synthesized)
aggttgctctgccaaggctgactgtaagagaaccaccccaggaaggcgagtgtgcacgtgcaaagcaggctacacgggtgatggcattgtgtgcctggaaatcaacccgtgtttggagaa

SEQ ID NO: 324893 - DNA, 120 bp, Artificial Sequence
  ENSG00000136011_39 (sequence is synthesized)
ccatggtggctgtgacaagaatgcggagtgcacacagacaggacccaaccaggctgcctgtaactgtttgccagcatacactggagatggaaaggtctgcacactcatcaatgtctgctt

SEQ ID NO: 324894 - DNA, 120 bp, Artificial Sequence
  ENSG00000136011_40 (sequence is synthesized)
aactaaaaatggcggctgtagtgaatttgccatctgcaaccacactgggcaagtagaaaggacttgtacttgcaagccaaactacattggagatggatttacctgccgcggcagcattta

SEQ ID NO: 324895 - DNA, 120 bp, Artificial Sequence
  ENSG00000136011_41 (sequence is synthesized)
tcaggagcttcccaagaacccgaaaacttcccagtatttcttccagttgcaggagcatttcgtgaaagatctggtcggcccaggccccttcactgtttttgcacctttatctgcagcctt

SEQ ID NO: 324896 - DNA, 120 bp, Artificial Sequence
  ENSG00000136011_42 (sequence is synthesized)
tgatgaggaagctcgggttaaagactgggacaaatacggtttaatgccccaggttcttcggtaccatgtggtcgcctgccaccagctgcttctggaaaacctgaaattgatctcaaatgc

SEQ ID NO: 324897 - DNA, 120 bp, Artificial Sequence
  ENSG00000136011_43 (sequence is synthesized)
tacttccctccaaggagagccaatagtcatctccgtctctcagagcacggtgtatataaacaataaggctaagatcatatccagtgatatcatcagtactaatgggattgttcatatcat

SEQ ID NO: 324898 - DNA, 120 bp, Artificial Sequence
  ENSG00000136011_44 (sequence is synthesized)
agacaaattgctatctcccaaaaatttgcttatcactcccaaagacaactctggaagaattctgcaaaatcttacgactttggcaacaaacaatggctacatcaaatttagcaacttaat

SEQ ID NO: 324899 - DNA, 120 bp, Artificial Sequence
  ENSG00000136011_45 (sequence is synthesized)
acaggactcaggtttgctgagtgtcatcaccgatcccatccacaccccagtcactctcttctggcccaccgaccaagccctccatgccctacctgctgaacaacaggacttcctgttcaa

SEQ ID NO: 324900 - DNA, 120 bp, Artificial Sequence
  ENSG00000136011_46 (sequence is synthesized)
ccaagacaacaaggacaagctgaaggagtatttgaagtttcatgtgatacgagatgccaaggttttagctgtggatcttcccacatccactgcctggaagaccctgcaaggttcagagct

SEQ ID NO: 324901 - DNA, 120 bp, Artificial Sequence
  ENSG00000136011_47 (sequence is synthesized)
gagtgtgaaatgtggagctggcagggacatcggtgacctctttctgaatggccaaacctgcagaattgtgcagcgggagctcttgtttgacctgggtgtggcctacggcattgactgtct

SEQ ID NO: 324902 - DNA, 120 bp, Artificial Sequence
  ENSG00000136011_48 (sequence is synthesized)
gctgattgatcccaccctggggggccgctgtgacacctttactactttcgatgcctcgggggagtgtgggagctgtgtcaatactcccagctgcccaaggtggagtaaaccaaagggtgt

SEQ ID NO: 324903 - DNA, 120 bp, Artificial Sequence
  ENSG00000136011_49 (sequence is synthesized)
gaagcagaagtgtctctacaacctgcccttcaagaggaacctggaaggctgccgggagcggtgcagcctggtgatacagatccccaggtgctgcaagggctacttcgggcgagactgtca

SEQ ID NO: 324904 - DNA, 120 bp, Artificial Sequence
  ENSG00000136011_50 (sequence is synthesized)
ggcctgccctggaggaccagatgccccgtgtaataaccggggtgtctgccttgatcagtactcggccaccggagagtgtaaatgcaacaccggcttcaatgggacggcgtgtgagatgtg

SEQ ID NO: 324905 - DNA, 120 bp, Artificial Sequence
  ENSG00000136011_51 (sequence is synthesized)
ctggccggggagattcgggcctgattgtctgccctgtggctgctcagaccacggacagtgcgatgatggcatcacgggctccgggcagtgcctctgtgaaacggggtggacaggcccctc

SEQ ID NO: 324906 - DNA, 120 bp, Artificial Sequence
  ENSG00000136011_52 (sequence is synthesized)
gtgtgacactcaggcagttttgcctgcagtgtgtacgcctccttgttctgctcatgccacctgtaaggagaacaacacgtgtgagtgtaacctggattatgaaggtgacggaatcacatg

SEQ ID NO: 324907 - DNA, 120 bp, Artificial Sequence
  ENSG00000136011_53 (sequence is synthesized)
cacagttgtggatttctgcaaacaggacaacgggggctgtgcaaaggtggccagatgctcccagaagggcacgaaggtctcctgcagctgccagaagggatacaaaggggacgggcacag

SEQ ID NO: 324908 - DNA, 120 bp, Artificial Sequence
  ENSG00000136011_54 (sequence is synthesized)
ctgcacagagatagacccctgtgcagacggccttaacggagggtgtcacgagcacgccacctgtaagatgacaggcccgggcaagcacaagtgtgagtgtaaaagtcactatgtcggaga

SEQ ID NO: 324909 - DNA, 120 bp, Artificial Sequence
  ENSG00000136011_55 (sequence is synthesized)
tgggctgaactgtgagccggagcagctgcccattgaccgctgcttacaggacaatgggcagtgccatgcagacgccaaatgtgtcgacctccacttccaggataccactgttggggtgtt

SEQ ID NO: 324910 - DNA, 120 bp, Artificial Sequence
  ENSG00000136011_56 (sequence is synthesized)
ccatctacgctccccactgggccagtataagctgacctttgacaaagccagagaggcctgtgccaacgaagctgcgaccatggcaacctacaaccagctctcctatgcccagaaggccaa

SEQ ID NO: 324911 - DNA, 120 bp, Artificial Sequence
  ENSG00000136011_57 (sequence is synthesized)
gtaccacctgtgctcagcaggctggctggagaccgggcgggttgcctaccccacagccttcgcctcccagaactgtggctctggtgtggttgggatagtggactatggacctagacccaa

SEQ ID NO: 324912 - DNA, 120 bp, Artificial Sequence
  ENSG00000136011_58 (sequence is synthesized)
caagagtgaaatgtgggatgtcttctgctatcggatgaaagatgtgaactgcacctgcaaggtgggctatgtgggagatggcttctcatgcagtgggaacctgctgcaggtcctgatgtc

SEQ ID NO: 324913 - DNA, 120 bp, Artificial Sequence
  ENSG00000136011_59 (sequence is synthesized)
cttcccctcactcacaaacttcctgacggaagtgctggcctattccaacagctcagctcgaggccgtgcatttctagaacacctgactgacctgtccatccgcggcaccctctttgtgcc

SEQ ID NO: 324914 - DNA, 120 bp, Artificial Sequence
  ENSG00000136011_60 (sequence is synthesized)
acagaacagtgggctgggggagaatgagaccttgtctgggcgggacatcgagcaccacctcgccaatgtcagcatgtttttctacaatgaccttgtcaatggcaccaccctgcaaacgag

SEQ ID NO: 324915 - DNA, 120 bp, Artificial Sequence
  ENSG00000136011_61 (sequence is synthesized)
gctgggaagcaagctgctcatcactgccagccaggacccactccaaccgacggagaccaggtttgttgatggaagagccattctgcagtgggacatctttgcctccaatgggatcattca

SEQ ID NO: 324916 - DNA, 120 bp, Artificial Sequence
  ENSG00000136011_62 (sequence is synthesized)
tgtcatttccaggcctttaaaagcaccccctgcccccgtgaccttgacccacactggcttgggagcagggatcttctttgccatcatcctggtgactggggctgttgccttggctgctta

SEQ ID NO: 324917 - DNA, 120 bp, Artificial Sequence
  ENSG00000136011_63 (sequence is synthesized)
ctcctactttcggataaaccggagaacaatcggcttccagcattttgagtcggaagaggacattaatgttgcagctcttggcaagcagcagcctgagaatatctcgaaccccttgtatga

SEQ ID NO: 324918 - DNA, 120 bp, Artificial Sequence
  ENSG00000136011_64 (sequence is synthesized)
gagcacaacctcagctcccccagaaccttcctacgaccccttcacggactctgaagaacggcagcttgagggcaatgaccccttgaggacactgtgagggcctggacgggagatgccagc

SEQ ID NO: 324919 - DNA, 120 bp, Artificial Sequence
  ENSG00000136011_65 (sequence is synthesized)
catcactcactgccacctgggccatcaactgtgaattctcagcaccagttgccttttaggaacgtaaagtcctttaagcactcagaagccatacctcatctctctggctgatctgggggt

SEQ ID NO: 324920 - DNA, 120 bp, Artificial Sequence
  ENSG00000136011_66 (sequence is synthesized)
tgtttctgtgggtgagagatgtgttgctgtgcccacccagtacagcttcctcctctgaccctttggctcttcttcctttgtactcttcagctggcacctgctccattctgccctacatga

SEQ ID NO: 324921 - DNA, 120 bp, Artificial Sequence
  ENSG00000136011_67 (sequence is synthesized)
tgggtaactgtgatctttcttccctgttagattgtaagcctccgtctttgtatcccagcccctagcccagtgcctgacacaggaactgtgcacaataaaggtttatggaacagaaacaaa

SEQ ID NO: 324922 - DNA, 120 bp, Artificial Sequence
  ENSG00000136011_68 (sequence is synthesized)
tcaagcagccacgtggaggatgggctgtgacgtggctgtgtcttaaaccataggattcactgaggaaaggaaaagtcctcaaactctcccacggcgcaggcagaagacacagcaaaggag

SEQ ID NO: 324923 - DNA, 120 bp, Artificial Sequence
  ENSG00000136011_69 (sequence is synthesized)
cagcaggctgagttggctcacaccatgaatattcacagatgggtgatgccctgggaccttcttcagccacccaggtccctgcacaccagggctggcccctctgatgacttccttcttctc

SEQ ID NO: 324924 - DNA, 120 bp, Artificial Sequence
  ENSG00000136011_70 (sequence is synthesized)
tggctttgagcttcatggcagccagtataaaaaaggattgacatgacctcatagttttatatcgctcacatgatacatatcacttccaaagaagtagcttttctgagcacaaaatactaa

SEQ ID NO: 324925 - DNA, 120 bp, Artificial Sequence
  ENSG00000136011_71 (sequence is synthesized)
cagaagaacagatgtgataataatgacactactattatacgaggaagatgtaggacatgctcctcagagctgacctgcccattcggaactaaatctctatagccagttgaggaccgcagc

SEQ ID NO: 324926 - DNA, 120 bp, Artificial Sequence
  ENSG00000136011_72 (sequence is synthesized)
tgatttccttttatagttgaagttgcaactaactttctcaaagaaacagatggcagggtaatgagaagaggagatgcatctatacctcctatttcatgggaagacgaaccctgtttattg

SEQ ID NO: 324927 - DNA, 120 bp, Artificial Sequence
  ENSG00000136011_73 (sequence is synthesized)
caagaaagagaggacacttttgttcacccagtggctcaatcaatcagtcaacatctaatgaccacctactgtgtgccaggcacagaggtgcaataggcaaagtgagactttatgggtttt

SEQ ID NO: 324928 - DNA, 120 bp, Artificial Sequence
  ENSG00000136011_74 (sequence is synthesized)
gaggacattaatgttgcagctcttggcaagcagcagcctgagaatatctcgaaccccttgtatgagagcacaacctcagctcccccagaaccttcctacgaccccttcacgatgaagaaa

SEQ ID NO: 324929 - DNA, 120 bp, Artificial Sequence
  ENSG00000136011_75 (sequence is synthesized)
ctgcagccgagttgggatgatttgtcttgggccacccagcttcaagcaggagagactaaaacaggtggccctacccccagcccatcctgcctcccaacacaaggcagcagcacaaacaaa

SEQ ID NO: 324930 - DNA, 120 bp, Artificial Sequence
  ENSG00000136011_76 (sequence is synthesized)
ttcacagtgctcagggagagtcatgcctcagaccagtggccaccagaaagattcaactaggactcaacacacagaatgccctgcccccttacaaccctctcttttccaggactctgaaga

SEQ ID NO: 324931 - DNA, 120 bp, Artificial Sequence
  ENSG00000136014_0 (sequence is synthesized)
agtttccaggaggtgagagtttaagccaaacctgaaagaggttgatttgtaatgatttgcaggggggcactggaggcagccgccaggacttttcacttaggagatcagcatttgccctga

SEQ ID NO: 324932 - DNA, 120 bp, Artificial Sequence
  ENSG00000136014_1 (sequence is synthesized)
tggaaactgggcgatcctgcagggactgacctctgagttatccaaaggccgacctggggaaagactgattttgaggttttaatagttttcagatgcttcaagtgttgtgaacagagactt

SEQ ID NO: 324933 - DNA, 120 bp, Artificial Sequence
  ENSG00000136014_2 (sequence is synthesized)
gtttggattatgcatttctcagctagactaaataaatgctagcaatggatacgtgcaaacatgttgggcagctgcagcttgctcaagaccattccagcctcaaccctcagaaatggcact

SEQ ID NO: 324934 - DNA, 120 bp, Artificial Sequence
  ENSG00000136014_3 (sequence is synthesized)
gtgtggactgcaacacgaccgagtccatttgggcttgccttagctgctcccatgttgcctgtggaagatatattgaagagcatgcactcaagcactttcaagaaagcagtcatcctgttg

SEQ ID NO: 324935 - DNA, 120 bp, Artificial Sequence
  ENSG00000136014_4 (sequence is synthesized)
cattggaggtgaatgagatgtacgttttttgttacctttgtgatgattatgttctgaatgataacacaactggagacctgaagttactacgacgtacattaagtgccatcaaaagtcaaa

SEQ ID NO: 324936 - DNA, 120 bp, Artificial Sequence
  ENSG00000136014_5 (sequence is synthesized)
attatcactgcacaactcgtagtgggaggtttttacggtccatgggtacaggtgatgattcttatttcttacatgacggtgcccaatctctgcttcaaagtgaagatcaactgtatactg

SEQ ID NO: 324937 - DNA, 120 bp, Artificial Sequence
  ENSG00000136014_6 (sequence is synthesized)
ctctttggcacaggagaaggatactaatgggtaaaatctttcgaacatggtttgaacaatcacccattggaagaaaaaagcaagaagaaccatttcaggaaaaaatagtagtaaaaagag

SEQ ID NO: 324938 - DNA, 120 bp, Artificial Sequence
  ENSG00000136014_7 (sequence is synthesized)
aagtaaagaaaagacggcaggaattggagtatcaagttaaagcagaattggaaagtatgcctccaagaaagagtttacgtttacaagggctcgctcagtcgaccataatagaaatagttt

SEQ ID NO: 324939 - DNA, 120 bp, Artificial Sequence
  ENSG00000136014_8 (sequence is synthesized)
ctgttcaggtgccagcacaaacgccagcatcaccagcaaaagataaagtactctctacctcagaaaatgaaatatctcaaaaagtcagtgactcctcagttaaacgaaggccaatagtaa

SEQ ID NO: 324940 - DNA, 120 bp, Artificial Sequence
  ENSG00000136014_9 (sequence is synthesized)
ctcctggtgtaacaggattgagaaatttgggaaatacttgctatatgaattctgttcttcaggtgttgagtcatttacttatttttcgacaatgttttttaaagcttgatctgaaccaat

SEQ ID NO: 324941 - DNA, 120 bp, Artificial Sequence
  ENSG00000136014_10 (sequence is synthesized)
ggctggctatgactgctagcgagaagacaagatcttgtaagcatccaccagtcacagatacagtagtatatcaaatgaatgaatgtcaggaaaaagatacaggttttgtttgctccagac

SEQ ID NO: 324942 - DNA, 120 bp, Artificial Sequence
  ENSG00000136014_11 (sequence is synthesized)
aatcaagtctgtcatcaggactaagtggtggagcatcaaaaggtagaaagatggaacttattcagccaaaggagccaacttcacagtacatttctctttgtcatgaattgcatactttgt

SEQ ID NO: 324943 - DNA, 120 bp, Artificial Sequence
  ENSG00000136014_12 (sequence is synthesized)
tccaagtcatgtggtctggaaagtgggcgttggtctcaccatttgctatgctacactcagtgtggagactcattcctgcctttcgtggttacgcccaacaagacgctcaggaatttcttt

SEQ ID NO: 324944 - DNA, 120 bp, Artificial Sequence
  ENSG00000136014_13 (sequence is synthesized)
gtgaacttttagataaaatacaacgtgaattagagacaactggtaccagtttaccagctcttatccccacttctcaaaggaaactcatcaaacaagttctgaatgttgtaaataacattt

SEQ ID NO: 324945 - DNA, 120 bp, Artificial Sequence
  ENSG00000136014_14 (sequence is synthesized)
ttcatggacaacttcttagtcaggttacatgtcttgcatgtgacaacaaatcaaataccatagaacctttctgggacttgtcattggagtttccagaaaggtatcaatgcagtggaaaag

SEQ ID NO: 324946 - DNA, 120 bp, Artificial Sequence
  ENSG00000136014_15 (sequence is synthesized)
atattgcttcccagccatgtctggttactgaaatgttggccaaatttacagaaactgaagctttagaaggaaaaatctacgtatgtgaccagtgtaactcaaagcgtagaaggttttcct

SEQ ID NO: 324947 - DNA, 120 bp, Artificial Sequence
  ENSG00000136014_16 (sequence is synthesized)
acctacctcaggttctcagactgcacctcaaacgattcaggtggtcaggacgtaataaccgagagaagattggtgttcatgttggctttgaggaaatcttaaacatggagccctattgct

SEQ ID NO: 324948 - DNA, 120 bp, Artificial Sequence
  ENSG00000136014_17 (sequence is synthesized)
gcagggagaccctgaaatccctcagaccagaatgctttatctatgacttgtccgcggtggtgatgcaccatgggaaaggatttggctcagggcactacactgcctactgctataattctg

SEQ ID NO: 324949 - DNA, 120 bp, Artificial Sequence
  ENSG00000136014_18 (sequence is synthesized)
aaggagggttctgggtacactgcaatgattccaaactaagcatgtgcactatggatgaagtatgcaaggctcaagcttatatcttgttttatacccaacgagttactgagaatggacatt

SEQ ID NO: 324950 - DNA, 120 bp, Artificial Sequence
  ENSG00000136014_19 (sequence is synthesized)
ctaaacttttgcctccagagctcctgttggggagccaacatcccaatgaagacgctgatacctcgtctaatgaaatccttagctgatccaaagacaatggggttttcttcctgtgattta

SEQ ID NO: 324951 - DNA, 120 bp, Artificial Sequence
  ENSG00000136014_20 (sequence is synthesized)
ggttttcttcctgtgatttatatatatactttttaaaagactgatgtaccattttaaacttcattttttcttgtgaatcagtgtatactacatttatacattttatatctaacaattttt

SEQ ID NO: 324952 - DNA, 120 bp, Artificial Sequence
  ENSG00000136014_21 (sequence is synthesized)
tatatatcaactgaaggtaactacttttttcatatttggagttttaaacttttggtgtttacctcagactgatgttacctcttttatatttttatgtcttaattggctcggatgatgaac

SEQ ID NO: 324953 - DNA, 120 bp, Artificial Sequence
  ENSG00000136014_22 (sequence is synthesized)
ttgtgcaatcttctaccaacaaagttcaagtggcatcattttatatacatgtatctttttcaggtattttctatacaaattcttaatagatggaaaattagactctactttggtcactaa

SEQ ID NO: 324954 - DNA, 120 bp, Artificial Sequence
  ENSG00000136014_23 (sequence is synthesized)
tagtctttcatttgtatattgaagttaccttgccccttggagttattgaagtgacatgtcaaggtatcacctaaatattcttcagtcacactcactggtatttctgaggctttgtgtgtt

SEQ ID NO: 324955 - DNA, 120 bp, Artificial Sequence
  ENSG00000136014_24 (sequence is synthesized)
aacaggccttgtaattgacattattttggttaatgtaaccccaaaattgctttagtaattgctctttggcatagtcaaactataaatgaaaatggcagctttacaaatagtatatttaag

SEQ ID NO: 324956 - DNA, 120 bp, Artificial Sequence
  ENSG00000136014_25 (sequence is synthesized)
tgaactctggaactatggacatgaaaaaaatgatggctgggatttatgatttttgtctggcagcaaacaggtttgtccagaagtctaataattaagcagtcataaaaagtctgaatttag

SEQ ID NO: 324957 - DNA, 120 bp, Artificial Sequence
  ENSG00000136014_26 (sequence is synthesized)
taaaccagtgtatgatgttattcaaatagtttaccttgggtatgagttcattttataatgtctgatgacattagatctcttaaaactttatgtattttttttagttcaaaggaatagagt

SEQ ID NO: 324958 - DNA, 120 bp, Artificial Sequence
  ENSG00000136014_27 (sequence is synthesized)
cttgaagagaaaaaattatagggcagaaaagataagtgttcaaaattggcaactggactattattatgtctagcatctcattctaaataactaaagcttgatttactcttgctaggatta

SEQ ID NO: 324959 - DNA, 120 bp, Artificial Sequence
  ENSG00000136014_28 (sequence is synthesized)
tgtgactactaggtaggagcctcttaaaacactggccctgagcattaaaaaaaaaaaaaaaaactaaaagctatctatctaaacttgcacaaaaaaaaatacagtgtgagtcactctttt

SEQ ID NO: 324960 - DNA, 120 bp, Artificial Sequence
  ENSG00000136014_29 (sequence is synthesized)
tcttcttctgataatctcactgggtttctttaaagtcctgttgctgctaactttatcttatttggagagggtagaatcaactaatctctgtagaccagctatgtatctaagctctgttaa

SEQ ID NO: 324961 - DNA, 120 bp, Artificial Sequence
  ENSG00000136014_30 (sequence is synthesized)
ccacaggaagatcatgtatcccttttttataagtgggtttatttgcaggttgaagtcttagtgaaagatagtatcctgtagaatgctgttcaccactagtgatcatctgttaagtacaaa

SEQ ID NO: 324962 - DNA, 120 bp, Artificial Sequence
  ENSG00000136014_31 (sequence is synthesized)
cttgaaagaggtctctaccaataaatttttcttaaatttcacaaaacaagtcatctgggttagctgatagtgaggtgcagtgagacttttatcactgaatagacaaatcatttgtgccga

SEQ ID NO: 324963 - DNA, 120 bp, Artificial Sequence
  ENSG00000136014_32 (sequence is synthesized)
aaatacatctggaatattaaatggctatgtttaaaattgttcataatacctatgcaagttgttacctcaactgttacacacttcttaatacctcattaaaaatttacatggtcaagataa

SEQ ID NO: 324964 - DNA, 120 bp, Artificial Sequence
  ENSG00000136014_33 (sequence is synthesized)
gattaccgcgaggtgatgctcgaagccccggggcacttcgggagggcggttgtggcactcggttgaggaggaatgcgcttcccggcgtcttgcccgccttctctccatcgatcggtcccc

SEQ ID NO: 324965 - DNA, 120 bp, Artificial Sequence
  ENSG00000136014_34 (sequence is synthesized)
gcgctgccggcacctgctgccgcttaaagcttgaaaatcagcttcctaaagccattcccgatggccttcgatgggaaagaatgccatatggctgaattcattatgggggataagaaatat

SEQ ID NO: 324966 - DNA, 120 bp, Artificial Sequence
  ENSG00000136014_35 (sequence is synthesized)
cttataatgcttcaaaacttaaagaatgcatgttataattttttccccttactttaatcacctttctgacaaatgaattaacttttaatatcatatacttggctagtaaatgacttacat

SEQ ID NO: 324967 - DNA, 120 bp, Artificial Sequence
  ENSG00000136014_36 (sequence is synthesized)
gggcggggggccggggtgagcgctaagatggccgccccggctcgggctgccaactgtcaagtctgttcggcctcagagtatgttatagagccatgaattaaagttttcagatgcttcaag

SEQ ID NO: 324968 - DNA, 120 bp, Artificial Sequence
  ENSG00000136014_37 (sequence is synthesized)
tcgggctggtgagtgtgcgcgagggcgcgcggccgcggcgattggcggagtgaggacccctgcgggagcggacgtgcgacggcagcccccggggccgggaggcacctgggggcctattct

SEQ ID NO: 324969 - DNA, 120 bp, Artificial Sequence
  ENSG00000136014_38 (sequence is synthesized)
ggcacctgggggcctattctcgccgcgcagggcgctggggggtcctgagagagggagagcctggggctgcgggcgcgcggaagggaatgagccgaggggcgcgcggcggcgacgcgtccg

SEQ ID NO: 324970 - DNA, 120 bp, Artificial Sequence
  ENSG00000136014_39 (sequence is synthesized)
gaattgcccccctgggaagtttcgatttatcttttctgtactacaaagaaagaaagcgtcatatccactctaccaaacttctcctctacacacttgaatctattacagcgttttggtgcc

SEQ ID NO: 324971 - DNA, 120 bp, Artificial Sequence
  ENSG00000136014_40 (sequence is synthesized)
cgtggaggaaaaacccccgtgtaaatttgttgaattggggttttgaatggtagaggatacagaaatttggcttcttggtagccaaaaacaaaacaaaaaaacaaacacgtgctttgaagt

SEQ ID NO: 324972 - DNA, 120 bp, Artificial Sequence
  ENSG00000136014_41 (sequence is synthesized)
ctctgtccttcctgcagtgttaggcagaacaaacgtgggtgccagattctaatggagttgtctggtccagggagattagcgagaggctggggcacgggctcaggagtctaatcaagatag

SEQ ID NO: 324973 - DNA, 120 bp, Artificial Sequence
  ENSG00000136014_42 (sequence is synthesized)
gaaataaatcgtgtgcccgaataattctctgaattcagtaacgggggacagttttgctattaggcccagcctaaataggtgacaaataactgaaatacaggaggattctacaaataatgg

SEQ ID NO: 324974 - DNA, 120 bp, Artificial Sequence
  ENSG00000136021_0 (sequence is synthesized)
agtctttttccccctcccttactcttcgtccccggtccctcccctccccacccctttccttctagctccgacgtttgcggccgcgggggcggcggaggatatggagtaaagccagagtca

SEQ ID NO: 324975 - DNA, 120 bp, Artificial Sequence
  ENSG00000136021_1 (sequence is synthesized)
gtggccaggcacgaaggcagagcaggaacagccaggaggcgtttattaggggggcggggggaaagagccccagcaccgcccctcctggaagaaggaagaggtaagtgaccggccgccggc

SEQ ID NO: 324976 - DNA, 120 bp, Artificial Sequence
  ENSG00000136021_2 (sequence is synthesized)
accgaccgacctccctcaccggcggctctctcgcctgggctcccggagccggcgaggagggaatggaggactcgcgcccgggttaggcctcccagggccgctcaggctggtgggtgttgc

SEQ ID NO: 324977 - DNA, 120 bp, Artificial Sequence
  ENSG00000136021_3 (sequence is synthesized)
ctggtgacgggcctgccggcggccggccgggcgatcggcggtcggcgcccgcgcaaagcggggctggacgagcagcgagctccggggagcggatccgagagggccgagtcctcgaaagag

SEQ ID NO: 324978 - DNA, 120 bp, Artificial Sequence
  ENSG00000136021_4 (sequence is synthesized)
gccttgaggcgacgggagacccgggatcgaagtcagctgccggagggagagccccccatgccggctcgagagctcgggtttcggtggtggagaacgtagtacctttcggggacattggac

SEQ ID NO: 324979 - DNA, 120 bp, Artificial Sequence
  ENSG00000136021_5 (sequence is synthesized)
actactctaggaccgggtaactataactacccaatattgcagccatggagtccatgcttaataaattgaagagtactgttacaaaagtaacagctgatgtcactagtgctgtaatgggaa

SEQ ID NO: 324980 - DNA, 120 bp, Artificial Sequence
  ENSG00000136021_6 (sequence is synthesized)
atcctgtcactagagaatttgatgttggtcgacacattgccagtggtggcaatgggctagcttggaagatttttaatggcacaaaaaagtcaacaaagcaggaagtggcagtttttgtct

SEQ ID NO: 324981 - DNA, 120 bp, Artificial Sequence
  ENSG00000136021_7 (sequence is synthesized)
ttgataaaaaactgattgacaagtatcaaaaatttgaaaaggatcaaatcattgattctctaaaacgaggagtccaacagttaactcggcttcgacaccctcgacttcttactgtccagc

SEQ ID NO: 324982 - DNA, 120 bp, Artificial Sequence
  ENSG00000136021_8 (sequence is synthesized)
atcctttagaagaatccagggattgcttggcattttgtacagaaccagtttttgccagtttagccaatgttcttggtaactgggaaaatctaccttcccctatatctccagacattaagg

SEQ ID NO: 324983 - DNA, 120 bp, Artificial Sequence
  ENSG00000136021_9 (sequence is synthesized)
attataaactttatgatgtagaaaccaaatatggtttgcttcaggtttctgaaggattgtcattcttgcatagcagtgtgaaaatggtgcatggaaatatcactcctgaaaatataattt

SEQ ID NO: 324984 - DNA, 120 bp, Artificial Sequence
  ENSG00000136021_10 (sequence is synthesized)
tgaataaaagtggagcctggaaaataatgggttttgatttttgtgtatcatcaaccaatccttctgaacaagagcctaaatttccttgtaaagaatgggacccaaatttaccttcattgt

SEQ ID NO: 324985 - DNA, 120 bp, Artificial Sequence
  ENSG00000136021_11 (sequence is synthesized)
gtcttccaaatcctgaatatttggctcctgaatacatactttctgtgagctgtgaaacagccagtgatatgtattctttaggaactgttatgtatgctgtatttaataaagggaaaccta

SEQ ID NO: 324986 - DNA, 120 bp, Artificial Sequence
  ENSG00000136021_12 (sequence is synthesized)
tatttgaagtcaacaagcaagatatttacaagagtttcagtaggcagttggatcagttgagtcgtttaggatctagttcacttacaaatatacctgaggaagttcgtgaacatgtaaagc

SEQ ID NO: 324987 - DNA, 120 bp, Artificial Sequence
  ENSG00000136021_13 (sequence is synthesized)
tactgttaaatgtaactccgactgtaagaccagatgcagatcaaatgacaaagattcccttctttgatgatgttggtgcagtaacactgcaatattttgataccttattccaaagagata

SEQ ID NO: 324988 - DNA, 120 bp, Artificial Sequence
  ENSG00000136021_14 (sequence is synthesized)
atcttcagaaatcacagtttttcaaaggactgccaaaggttctaccaaaactgcccaagcgtgtcattgtgcagagaattttgccttgtttgacttcagaatttgtaaaccctgacatgg

SEQ ID NO: 324989 - DNA, 120 bp, Artificial Sequence
  ENSG00000136021_15 (sequence is synthesized)
taccttttgttttgcccaatgttctacttattgctgaggaatgcaccaaagaagaatatgtcaaattaattcttcctgaacttggccctgtgtttaagcagcaggagccaatccagattt

SEQ ID NO: 324990 - DNA, 120 bp, Artificial Sequence
  ENSG00000136021_16 (sequence is synthesized)
tgttaattttcctacaaaaaatggatttgctactaaccaaaacccctcctgatgagataaagaacagtgttctacccatggtttacagagcactagaagctccttccattcagatccagg

SEQ ID NO: 324991 - DNA, 120 bp, Artificial Sequence
  ENSG00000136021_17 (sequence is synthesized)
agctctgtctaaacatcattccaacctttgcaaatcttatagactacccatccatgaaaaacgctttgataccaagaattaaaaatgcttgtctacaaacatcttcccttgcggttcgtg

SEQ ID NO: 324992 - DNA, 120 bp, Artificial Sequence
  ENSG00000136021_18 (sequence is synthesized)
taaattcattagtgtgcttaggaaagattttggaatacttggataagtggtttgtacttgatgatatcctacccttcttacaacaaattccatccaaggaacctgcggtcctcatgggaa

SEQ ID NO: 324993 - DNA, 120 bp, Artificial Sequence
  ENSG00000136021_19 (sequence is synthesized)
ttttaggtatttacaaatgtacttttactcataagaagttgggaatcaccaaagagcagctggccggaaaagtgttgcctcatcttattcccctgagtattgaaaacaatcttaatctta

SEQ ID NO: 324994 - DNA, 120 bp, Artificial Sequence
  ENSG00000136021_20 (sequence is synthesized)
atcagttcaattctttcatttccgtcataaaagaaatgcttaatagattggagtctgaacataagactaaactggagcaacttcatataatgcaagaacagcagaaatctttggatatag

SEQ ID NO: 324995 - DNA, 120 bp, Artificial Sequence
  ENSG00000136021_21 (sequence is synthesized)
gaaatcaaatgaatgtttctgaggagatgaaagttacaaatattgggaatcagcaaattgacaaagtttttaacaacattggagcagaccttctgactggcagtgagtccgaaaataaag

SEQ ID NO: 324996 - DNA, 120 bp, Artificial Sequence
  ENSG00000136021_22 (sequence is synthesized)
aggacgggttacagaataaacataaaagagcatcacttacacttgaagaaaaacaaaaattagcaaaagaacaagagcaggcacagaagctgaaaagccagcagcctcttaaaccccaag

SEQ ID NO: 324997 - DNA, 120 bp, Artificial Sequence
  ENSG00000136021_23 (sequence is synthesized)
tgcacacacctgttgctactgttaaacagactaaggacttgacagacacactgatggataatatgtcatccttgaccagcctttctgttagtacccctaaatcttctgcttcaagtactt

SEQ ID NO: 324998 - DNA, 120 bp, Artificial Sequence
  ENSG00000136021_24 (sequence is synthesized)
ctttcagacttcaggattcaacatgcccgttaatacaaaccagaacttctacagtagtccaagcacagttggagtgaccaagatgactctgggaacacctcccactttgccaaacttcaa

SEQ ID NO: 324999 - DNA, 120 bp, Artificial Sequence
  ENSG00000136021_25 (sequence is synthesized)
tgctttgagtgttcctcctgctggtgcaaagcagacccaacaaagacccacagatatgtctgcccttaataatctctttggccctcagaaacccaaagttagcatgaaccagttatcaca

SEQ ID NO: 325000 - DNA, 120 bp, Artificial Sequence
  ENSG00000136021_26 (sequence is synthesized)
acagaaaccaaatcagtggcttaatcagtttgtacctcctcaaggttctccaactatgggcagttcagtaatggggacacagatgaacgtgataggacaatctgcttttggtatgcaggg

SEQ ID NO: 325001 - DNA, 120 bp, Artificial Sequence
  ENSG00000136021_27 (sequence is synthesized)
taatcctttctttaacccacagaactttgcacagccaccaactactatgaccaatagcagttcagctagcaatgatttaaaagatctttttgggtgaggtgtcttacttctattttgaag

SEQ ID NO: 325002 - DNA, 120 bp, Artificial Sequence
  ENSG00000136021_28 (sequence is synthesized)
gattatttcagtttcaatcatgggtgagctgatttacatctttatatagttggcttggaggaagtacttctatgggaaagtgaacagttctgtgacaggaaacatctctgtccatgccag

SEQ ID NO: 325003 - DNA, 120 bp, Artificial Sequence
  ENSG00000136021_29 (sequence is synthesized)
catagtagttgtatggacttctaaccagttgagttttttaaagcattgaggattttttcctcttaccaactcctcttcaggtttttaaagacccagcccttcccaatctcaaagagaaaa

SEQ ID NO: 325004 - DNA, 120 bp, Artificial Sequence
  ENSG00000136021_30 (sequence is synthesized)
aggaaactgagttatcttgaataacataactttttaatcaaatgtttattttggcttgtggatcttggtgttatttaaaaaattgaggtgatggtcattgcaagctcatctattaagtac

SEQ ID NO: 325005 - DNA, 120 bp, Artificial Sequence
  ENSG00000136021_31 (sequence is synthesized)
tatatggtacacagtctatgagtcattagtcttcattttaatatgtaaaaaatcttgatgctgtattgatttgtttgcatttaagatgacagtgagaaaatgataagcataaagagaagt

SEQ ID NO: 325006 - DNA, 120 bp, Artificial Sequence
  ENSG00000136021_32 (sequence is synthesized)
atcaggttatttgctttttccaaacttttcagatgaactattgtttagtacagagactgagcaaatactacaaaattcaacttaaccttcatttcattggtttaaatgcgttattaacca

SEQ ID NO: 325007 - DNA, 120 bp, Artificial Sequence
  ENSG00000136021_33 (sequence is synthesized)
tcttaagtgcaaactaatcattgtaaattatattttagcatggtctgcctcaaatagtaatgtatttttctgcattcacttggatatatttagaatcacttttttcctcctgtatcaagg

SEQ ID NO: 325008 - DNA, 120 bp, Artificial Sequence
  ENSG00000136021_34 (sequence is synthesized)
aagaggtatgtgctgatttgtttggatatttgacaaggcactctgatgtgacttccctgactactaccttcatatttcatttcaaattcaaacttctgaggttgcagcatatatgaattg

SEQ ID NO: 325009 - DNA, 120 bp, Artificial Sequence
  ENSG00000136021_35 (sequence is synthesized)
cattttcaaaagaagatttgtaagaattaaactatatttatgagtaaacttttgaggtttctgctgtattgtttcaaatgtaataaactttacttctgtaaaaattgagcagttgtatct

SEQ ID NO: 325010 - DNA, 120 bp, Artificial Sequence
  ENSG00000136021_36 (sequence is synthesized)
tctgaccaccaacagattttcagcttgccatgatagtctgacctcattaattactgctactgaagttcaatttttttctaggaattttaggaaccttttgtttaaatattttaatttcta

SEQ ID NO: 325011 - DNA, 120 bp, Artificial Sequence
  ENSG00000136021_37 (sequence is synthesized)
ttagccatttttaggaaggaaagaatcaattctcttaacaggaaacatgctttatttttcaaaacctttctctgatatttttctttaatttgctgattattcaaccacagagccttatgc

SEQ ID NO: 325012 - DNA, 120 bp, Artificial Sequence
  ENSG00000136021_38 (sequence is synthesized)
tataaatgtcatttgtattttaaaaaataatattccactcataaaactttaaaaccatctttcaacgaactatatatgtattatagttgctgccatagagttgatggtttttaattatct

SEQ ID NO: 325013 - DNA, 120 bp, Artificial Sequence
  ENSG00000136021_39 (sequence is synthesized)
ggaaccagcaatcatttaaaataaaccatattaagtttagtatgctggtattgtttattcattttatatgaatattcattgaaaatatatacacaatatatgtaatacacagcacttgat

SEQ ID NO: 325014 - DNA, 120 bp, Artificial Sequence
  ENSG00000136021_40 (sequence is synthesized)
tacaaaatgtaatttaattatattattgctggcagcattcagttaagagggtactttaaaaaatagaagtcagctttcacatctgatttctgtatgggctgtacttggttaacttgattt

SEQ ID NO: 325015 - DNA, 120 bp, Artificial Sequence
  ENSG00000136021_41 (sequence is synthesized)
tagaaaaaggactaacagaattgctaaagaaatgcatccaataaatgaaaaacagtaggaagatcaaatgtttttgtcaaatatattcacaacttgaccagattagctgtcctgtttgta

SEQ ID NO: 325016 - DNA, 120 bp, Artificial Sequence
  ENSG00000136021_42 (sequence is synthesized)
atgcaatattaatatgtcttttgggaaaaagcctacatatggaataaaataagtattgaagaatttttctttgtaacaatttagtagtcactgtttattgagaaattgttttttattttg

SEQ ID NO: 325017 - DNA, 120 bp, Artificial Sequence
  ENSG00000136021_43 (sequence is synthesized)
taaaataacatgatgttagtgttgaactcttaaacagaaagaaagcttaatataacagcttatagaacttgaactactaaatatgaaaataagtcatttgaaaaaaatacagtatgtaaa

SEQ ID NO: 325018 - DNA, 120 bp, Artificial Sequence
  ENSG00000136021_44 (sequence is synthesized)
atttgttcattcgttgaggtaatggtgctatgtttttacaaaattgttcctacaccttttttctacttcaggtattttatttcaaccatttccatcaattgaactgttaccattgccttt

SEQ ID NO: 325019 - DNA, 120 bp, Artificial Sequence
  ENSG00000136021_45 (sequence is synthesized)
ttctgttgagaaattgcctctgaaaaatagtgctatttttcagcttaagtgttcttaagtgaatgaaattttcaaagtactagatcaccttaaaattatttcacgtactgaagacaatta

SEQ ID NO: 325020 - DNA, 120 bp, Artificial Sequence
  ENSG00000136021_46 (sequence is synthesized)
agtccgttatgtttagagtagaaaatgtttaggttaaagagcatctgtcaacagaatctacaaaaaagattcccttgcatttgaattagttctctattctcctattgctaaatgtgtgat

SEQ ID NO: 325021 - DNA, 120 bp, Artificial Sequence
  ENSG00000136021_47 (sequence is synthesized)
atatagagaggatgtataaaaggaaatggaaatagactatgtacttgtctggtttttgtttgtttttattttggaatgcttataagcctcctttacactgaataaggaagtagtttttgt

SEQ ID NO: 325022 - DNA, 120 bp, Artificial Sequence
  ENSG00000136021_48 (sequence is synthesized)
tttcttttgacctgtaaaatacctcacatggttgtttttacacatgaaagaaaaaggtatatgcgaacatacctgatatcaagaggagtatgcaccaaataaattttagctttgataaaa

SEQ ID NO: 325023 - DNA, 120 bp, Artificial Sequence
  ENSG00000136021_49 (sequence is synthesized)
cttttatagattgttgatgtatttcatcttggctgtagataacttgtatatagtactataaaaatgagctgtagttttctttgatacataatttataatattgcattcctaaccttactt

SEQ ID NO: 325024 - DNA, 120 bp, Artificial Sequence
  ENSG00000136021_50 (sequence is synthesized)
tttattgttttatcataattcaactctcctacagatctttggatataggaaatcaaatgaatgtttctgaggagatgaaagttacaaatattgggaatcaggtaagaagcagcttaattt

SEQ ID NO: 325025 - DNA, 120 bp, Artificial Sequence
  ENSG00000136021_51 (sequence is synthesized)
ttgcagaaagtatgcttcatctggagggcttttaatctttaagcagcaaaatcacatttttattgaacttatttaaattattgacatttttctatttcagcaaattgacaaagtttttaa

SEQ ID NO: 325026 - DNA, 120 bp, Artificial Sequence
  ENSG00000136021_52 (sequence is synthesized)
gtgaaaaattcttatactctaagtgttgagttcttatgcattagttttctccctaaaatttatttgcattgtctacgtatatgtctctctttgaaatattaatactttctttacttttgc

SEQ ID NO: 325027 - DNA, 120 bp, Artificial Sequence
  ENSG00000136021_53 (sequence is synthesized)
catgattctgtacttcagtggctaccctgtgctcatgactacaatagtcaaaatagaacatacaagggtatagaatacagttcttgcctgaaagtagctgtccttgctaatttgctagaa

SEQ ID NO: 325028 - DNA, 120 bp, Artificial Sequence
  ENSG00000136021_54 (sequence is synthesized)
ctttatgaaatctaattatttgaaagttggattatgtacatttaatttttcaactgtcagaaaacaggatttattttagccagatatgtcattgcaatctgaataagcaggaattttcta

SEQ ID NO: 325029 - DNA, 120 bp, Artificial Sequence
  ENSG00000136021_55 (sequence is synthesized)
tgcctattaaatggattatttctagaaggcacaaattcagatggttaattttgaattatcccaagaagatcaatatataactgctaagggtgaatttatacaaggcccctgaataatagc

SEQ ID NO: 325030 - DNA, 120 bp, Artificial Sequence
  ENSG00000136021_56 (sequence is synthesized)
tattaaacaactccgggagtaaaactcattattgagacatgttttctggaacttaaaagcctcatcaactatcatatcatcaccaaagatattataaaagcttgctatgatatgccgaat

SEQ ID NO: 325031 - DNA, 80 bp, Artificial Sequence
  ENSG00000136026_0 (sequence is synthesized)
ctcctcggcccggcctccttccccggccgcgcgtcctctcgccgctccgacgccagcagcgcccgcgtgccgctcgccca

SEQ ID NO: 325032 - DNA, 120 bp, Artificial Sequence
  ENSG00000136026_1 (sequence is synthesized)
ccgccgccgcgcccgccatgccctcggccaaacaaaggggctccaagggcggccacggcgccgcgagcccctcggagaagggtgcccacccgtcgggcggcgcggatgacgtggcgaaga

SEQ ID NO: 325033 - DNA, 80 bp, Artificial Sequence
  ENSG00000136026_2 (sequence is synthesized)
gcagcagccgccgccgccgcccgcgccgcacccgcagcagcacccgcagcagcacccgcagaaccaggcgcacggcaagg

SEQ ID NO: 325034 - DNA, 120 bp, Artificial Sequence
  ENSG00000136026_3 (sequence is synthesized)
cggcggcggcggcggcaagtcctcctcctcctcctccgcctccgccgccgctgccgccgccgccgcctcgtcctcggcgtcctgctcgcgcaggctcggcagggcgctcaactttctctt

SEQ ID NO: 325035 - DNA, 120 bp, Artificial Sequence
  ENSG00000136026_4 (sequence is synthesized)
cggcagggcgctcaactttctcttctacctcgccctggtggcggcggccgctttctcgggctggtgcgtccaccacgtcctggaggaggtccagcaggtccggcgcagccaccaggactt

SEQ ID NO: 325036 - DNA, 120 bp, Artificial Sequence
  ENSG00000136026_5 (sequence is synthesized)
ctcccggcagagggaggagctgggccagggcttgcagggcgtcgagcagaaggtgcagtctttgcaagccacatttggaacttttgagtccatcttgagaagctcccaacataaacaaga

SEQ ID NO: 325037 - DNA, 120 bp, Artificial Sequence
  ENSG00000136026_6 (sequence is synthesized)
cctcacagagaaagctgtgaagcaaggggagagtgaggtcagccggatcagcgaagtgctgcagaaactccagaatgagattctcaaagacctctcggatgggatccatgtggtgaagga

SEQ ID NO: 325038 - DNA, 120 bp, Artificial Sequence
  ENSG00000136026_7 (sequence is synthesized)
cgcccgggagcgggacttcacgtccctggagaacacggtggaggagcggctgacggagctcaccaaatccatcaacgacaacatcgccatcttcacagaagtccagaagaggagccagaa

SEQ ID NO: 325039 - DNA, 120 bp, Artificial Sequence
  ENSG00000136026_8 (sequence is synthesized)
ggagatcaatgacatgaaggcaaaggttgcctccctggaagaatctgaggggaacaagcaggatttgaaagccttaaaggaagctgtgaaggagatacagacctcagccaagtccagaga

SEQ ID NO: 325040 - DNA, 120 bp, Artificial Sequence
  ENSG00000136026_9 (sequence is synthesized)
gtgggacatggaggccctgagaagtacccttcagactatggagtctgacatctacaccgaggtccgcgagctggtgagcctcaagcaggagcagcaggctttcaaggaggcggccgacac

SEQ ID NO: 325041 - DNA, 120 bp, Artificial Sequence
  ENSG00000136026_10 (sequence is synthesized)
ggagcggctcgccctgcaggccctcacggagaagcttctcaggtctgaggagtccgtctcccgcctcccggaggagatccggagactggaggaagagctccgccagctgaagtccgattc

SEQ ID NO: 325042 - DNA, 120 bp, Artificial Sequence
  ENSG00000136026_11 (sequence is synthesized)
ccacgggccgaaggaggacggaggcttcagacactcggaagcctttgaggcactccagcaaaagagtcagggactggactccaggctccagcacgtggaggatggggtgctctccatgca

SEQ ID NO: 325043 - DNA, 120 bp, Artificial Sequence
  ENSG00000136026_12 (sequence is synthesized)
ggtggcttctgcgcgccagaccgagagcctggagtccctcctgtccaagagccaggagcacgagcagcgcctggccgccctgcaggggcgcctggaaggcctcgggtcctcagaggcaga

SEQ ID NO: 325044 - DNA, 120 bp, Artificial Sequence
  ENSG00000136026_13 (sequence is synthesized)
caggatggcctggccagcacggtgaggagcctgggcgagacccagctggtgctctacggtgacgtggaggagctgaagaggagtgtgggcgagctccccagcaccgtggaatcactccag

SEQ ID NO: 325045 - DNA, 120 bp, Artificial Sequence
  ENSG00000136026_14 (sequence is synthesized)
aaggtgcaggagcaggtgcacacgctgctcagtcaggaccaagcccaggccgcccgtctgcctcctcaggacttcctggacagactttcttctctagacaacctgaaagcctcagtcagc

SEQ ID NO: 325046 - DNA, 120 bp, Artificial Sequence
  ENSG00000136026_15 (sequence is synthesized)
caagtggaggcggacttgaaaatgctcaggactgctgtggacagtttggttgcatactcggtcaaaatagaaaccaacgagaacaatctggaatcagccaagggtttactagatgacctg

SEQ ID NO: 325047 - DNA, 120 bp, Artificial Sequence
  ENSG00000136026_16 (sequence is synthesized)
aggaatgatctggataggttgtttgtgaaagtggagaagattcacgaaaaggtctaaatgaattgcgtgtgcagggcgcggatttaaagtccaatttctcatgaccaaaaaatgtgtggt

SEQ ID NO: 325048 - DNA, 120 bp, Artificial Sequence
  ENSG00000136026_17 (sequence is synthesized)
tttttcccatgtgtcccctaccccccaatttcttgtcccctcttaaagagcagttgtcaccacctgaacaccaaggcattgtattttcatgcccagttaacttatttacaatatttaagt

SEQ ID NO: 325049 - DNA, 120 bp, Artificial Sequence
  ENSG00000136026_18 (sequence is synthesized)
tctctgcttctgcatttggttggtttcctgaagcgcagcccctgtgaataacaggtggcttttcatggatgtctctagtcagagaaaaatgataaaggcttaaattgaggattaacagaa

SEQ ID NO: 325050 - DNA, 120 bp, Artificial Sequence
  ENSG00000136026_19 (sequence is synthesized)
gcagattaacctcagaaatcctgtctggctggcagatttcaagtaaaaaaaaaaaaaaggtgggttggggggacccttttctttctagttgtctttaaggaaaattaattttactttttt

SEQ ID NO: 325051 - DNA, 120 bp, Artificial Sequence
  ENSG00000136026_20 (sequence is synthesized)
ttttgttctggccgaaatttttatgagatatctctcacttgtcttccactttgaaccggttaaagctcatagctgtcagctctgaatgaggaggggagaagcccctgggtctttctttga

SEQ ID NO: 325052 - DNA, 120 bp, Artificial Sequence
  ENSG00000136026_21 (sequence is synthesized)
aaggaatccgctgcttgagggctgcctccctcatggtgtgcgtgtcgtttctcttcctgacgcatcttgtgatatcagaggtaactatgcaaagcatccaggcggttctgaatgtgaagc

SEQ ID NO: 325053 - DNA, 120 bp, Artificial Sequence
  ENSG00000136026_22 (sequence is synthesized)
actacacccagcagagtcccggtgccctctgtccccactgccggcccatgttctctctccggaggtcaccaaggaatgcacaggtttcgactaccagaaaggggagtccttgggttcttt

SEQ ID NO: 325054 - DNA, 120 bp, Artificial Sequence
  ENSG00000136026_23 (sequence is synthesized)
caaaaaattcgtgaggagagctgtctacagtggaatagggggtctccctggggaatgcaggccaagtccttttattttaacatgatgtccatgaagaggtttgccgtctgggcagccctg

SEQ ID NO: 325055 - DNA, 120 bp, Artificial Sequence
  ENSG00000136026_24 (sequence is synthesized)
tcggcaaggagcgtgcatactgcgtttgtgtaattgtttgctgtatctcccttccctctgagctgtattgttctttaatggctgtcttgcccttccaaaaaaaattgaaaaaaaaaaaaa

SEQ ID NO: 325056 - DNA, 120 bp, Artificial Sequence
  ENSG00000136026_25 (sequence is synthesized)
aaaaaaaacccgaaaagtaaaaaaaaaaaaaaaaagttttgtttagtttactgtgaaatgaactgtatggcttatttacagtatttttaattcttaataaacacttgagctttgttatga

SEQ ID NO: 325057 - DNA, 120 bp, Artificial Sequence
  ENSG00000136026_26 (sequence is synthesized)
atttgaaagcactcctcccacacttgctggtctgttttgttttaatacctgtgcttccccctctggggccctcaacctctcacaaaatggcattgaagctgcttccacacatgactgggt

SEQ ID NO: 325058 - DNA, 120 bp, Artificial Sequence
  ENSG00000136026_27 (sequence is synthesized)
atcttcggccctgggcctcttcaaatcaggcaacttccactggctgtcagggtgatgcatgaaatccctagagaagagaggaaaaggaccacggcagggagcctcctcaagtgggaacca

SEQ ID NO: 325059 - DNA, 89 bp, Artificial Sequence
  ENSG00000136026_28 (sequence is synthesized)
agtgaaacttgtgcacaggaaggcttcccttcctccagagagaacactggaggccactcaccttccagaccaccaaatttaacatcact

SEQ ID NO: 325060 - DNA, 120 bp, Artificial Sequence
  ENSG00000136026_29 (sequence is synthesized)
gaggccactcaccttccagaccaccaaatttaacatcactcatgccagctggaggaggccccagatccctctggccagtgaagttttggttggtgcagtctttgcaagccacatttggaa

SEQ ID NO: 325061 - DNA, 120 bp, Artificial Sequence
  ENSG00000136040_0 (sequence is synthesized)
acaatgggaaagtgaaacgcacaagcgcacccaacctctccagccctccccgcccgcctcgctcctctccgcccgtcccctcccttcccctccgcgcctccccgcgagcgccagcgctgc

SEQ ID NO: 325062 - DNA, 120 bp, Artificial Sequence
  ENSG00000136040_1 (sequence is synthesized)
acacaggaactctccggcgaaggagggcgaggaggaaacggtgccggagcgcgcagggcttgctgccgccaccgccgctgcacaggctgccggagcgagcctgccgcgcgccgccctccc

SEQ ID NO: 325063 - DNA, 80 bp, Artificial Sequence
  ENSG00000136040_2 (sequence is synthesized)
gccctccccgctctccttcctgggcgagctgcggggatggggcggccgcgggagcccgagcgcgcgcaggaaccgccgcc

SEQ ID NO: 325064 - DNA, 80 bp, Artificial Sequence
  ENSG00000136040_3 (sequence is synthesized)
ggtctcccggaggaaggcgccgccgcgccccccgcgccccgcagcgccactgcccctgctcgcctatctgctggcactgg

SEQ ID NO: 325065 - DNA, 120 bp, Artificial Sequence
  ENSG00000136040_4 (sequence is synthesized)
cggctcccggccggggcgcggacgagcccgtgtggcggtcggagcaagccatcggagccatcgcggcgagccaggaggacggcgtgtttgtggcgagcggcagctgcctggaccagctgg

SEQ ID NO: 325066 - DNA, 120 bp, Artificial Sequence
  ENSG00000136040_5 (sequence is synthesized)
actacagcctggagcacagcctctcgcgcctgtaccgggaccaagcgggcaactgcacagagccggtctcgctggcgccccccgcgcggccccggcccgggagcagcttcagcaagctgc

SEQ ID NO: 325067 - DNA, 120 bp, Artificial Sequence
  ENSG00000136040_6 (sequence is synthesized)
ctgctgctgccctaccgcgagggggcggccggcctcggggggctgctgctcaccggctggaccttcgaccggggcgcctgcgaggtgcggcccctgggcaacctgagccgcaactccctg

SEQ ID NO: 325068 - DNA, 120 bp, Artificial Sequence
  ENSG00000136040_7 (sequence is synthesized)
acggcaccgaggtggtgtcgtgccacccgcagggctcgacggccggcgtggtgtaccgcgcgggccggaacaaccgctggtacctggcggtggccgccacctacgtgctgcctgagccgg

SEQ ID NO: 325069 - DNA, 120 bp, Artificial Sequence
  ENSG00000136040_8 (sequence is synthesized)
agacggcgagccgctgcaaccccgcggcatccgaccacgacacggccatcgcgctcaaggacacggaggggcgcagcctggccacgcaggagctggggcgcctcaagctgtgcgagggcg

SEQ ID NO: 325070 - DNA, 120 bp, Artificial Sequence
  ENSG00000136040_9 (sequence is synthesized)
cgggcagcctgcacttcgtggacgcctttctctggaacggcagcatctacttcccctactacccctacaactacacgagcggcgctgccaccggctggcccagcatggcgcgcatcgcgc

SEQ ID NO: 325071 - DNA, 120 bp, Artificial Sequence
  ENSG00000136040_10 (sequence is synthesized)
agagcaccgaggtgctgttccagggccaggcatccctcgactgcggccacggccaccccgacggccgccgcctgctcctctcctccagcctagtggaggccctggacgtctgggcgggag

SEQ ID NO: 325072 - DNA, 120 bp, Artificial Sequence
  ENSG00000136040_11 (sequence is synthesized)
tgttcagcgcggccgctggagagggccaggagcggcgctcccccaccaccacggcgctctgcctcttcagaatgagtgagatccaggcgcgcgccaagagggtcagctgggacttcaaga

SEQ ID NO: 325073 - DNA, 120 bp, Artificial Sequence
  ENSG00000136040_12 (sequence is synthesized)
cggccgagagccactgcaaagaaggggatcaacctgaaagagtccaaccaatcgcatcatctaccttgatccattccgacctgacatccgtttatggcaccgtggtaatgaacaggactg

SEQ ID NO: 325074 - DNA, 120 bp, Artificial Sequence
  ENSG00000136040_13 (sequence is synthesized)
ttttattcttggggactggagatggccagttacttaaggttattcttggtgagaatttgacttcaaattgtccagaggttatctatgaaattaaagaagagacacctgttttctacaaac

SEQ ID NO: 325075 - DNA, 120 bp, Artificial Sequence
  ENSG00000136040_14 (sequence is synthesized)
tcgttcctgatcctgtgaagaatatctacatttatctaacagctgggaaagaggtgaggagaattcgtgttgcaaactgcaataaacataaatcctgttcggagtgtttaacagccacag

SEQ ID NO: 325076 - DNA, 120 bp, Artificial Sequence
  ENSG00000136040_15 (sequence is synthesized)
accctcactgcggttggtgccattcgctacaaaggtgcacttttcaaggagattgtgtacattcagagaacttagaaaactggctggatatttcgtctggagcaaaaaagtgccctaaaa

SEQ ID NO: 325077 - DNA, 120 bp, Artificial Sequence
  ENSG00000136040_16 (sequence is synthesized)
ttcagataattcgaagcagtaaagaaaagactacagtgactatggtgggaagcttctctccaagacactcaaagtgcatggtgaagaatgtggactctagcagggagctctgccagaata

SEQ ID NO: 325078 - DNA, 120 bp, Artificial Sequence
  ENSG00000136040_17 (sequence is synthesized)
aaagtcagcccaaccggacctgcacctgtagcatcccaaccagagcaacctacaaagatgtttcagttgtcaacgtgatgttctccttcggttcttggaatttatcagacagattcaact

SEQ ID NO: 325079 - DNA, 120 bp, Artificial Sequence
  ENSG00000136040_18 (sequence is synthesized)
ttaccaactgctcatcattaaaagaatgcccagcatgcgtagaaactggctgcgcgtggtgtaaaagtgcaagaaggtgtatccaccccttcacagcttgcgacccttctgattatgaga

SEQ ID NO: 325080 - DNA, 120 bp, Artificial Sequence
  ENSG00000136040_19 (sequence is synthesized)
gaaaccaggaacagtgtccagtggctgtcgagaagacatcaggaggaggaagacccaaggagaacaaggggaacagaaccaaccaggctttacaggtcttctacattaagtccattgagc

SEQ ID NO: 325081 - DNA, 120 bp, Artificial Sequence
  ENSG00000136040_20 (sequence is synthesized)
cacagaaagtatcgacattagggaaaagcaacgtgatagtaacgggagcaaactttacccgggcatcgaacatcacaatgatcctgaaaggaaccagtacctgtgataaggatgtgatac

SEQ ID NO: 325082 - DNA, 120 bp, Artificial Sequence
  ENSG00000136040_21 (sequence is synthesized)
aggttagccatgtgctaaatgacacccacatgaaattctctcttccatcaagccggaaagaaatgaaggatgtgtgtatccagtttgatggtgggaactgctcttctgtgggatccttat

SEQ ID NO: 325083 - DNA, 120 bp, Artificial Sequence
  ENSG00000136040_22 (sequence is synthesized)
cctacattgctctgccacattgttcccttatatttcctgctaccacctggatcagtggtggtcaaaatataaccatgatgggcagaaattttgatgtaattgacaacttaatcatttcac

SEQ ID NO: 325084 - DNA, 120 bp, Artificial Sequence
  ENSG00000136040_23 (sequence is synthesized)
atgaattaaaaggaaacataaatgtctctgaatattgtgtggcgacttactgcgggtttttagcccccagtttaaagagttcaaaagtgcgcacgaatgtcactgtgaagctgagagtac

SEQ ID NO: 325085 - DNA, 120 bp, Artificial Sequence
  ENSG00000136040_24 (sequence is synthesized)
aagacacctacttggattgtggaaccctgcagtatcgggaggaccccagattcacggggtatcgggtggaatccgaggtggacacagaactggaagtgaaaattcaaaaagaaaatgaca

SEQ ID NO: 325086 - DNA, 120 bp, Artificial Sequence
  ENSG00000136040_25 (sequence is synthesized)
acttcaacatttccaaaaaagacattgaaattactctcttccatggggaaaatgggcaattaaattgcagttttgaaaatattactagaaatcaagatcttaccaccatcctttgcaaaa

SEQ ID NO: 325087 - DNA, 120 bp, Artificial Sequence
  ENSG00000136040_26 (sequence is synthesized)
ttaaaggcatcaagactgcaagcaccattgccaactcttctaagaaagttcgggtcaagctgggaaacctggagctctacgtcgagcaggagtcagttccttccacatggtattttctga

SEQ ID NO: 325088 - DNA, 120 bp, Artificial Sequence
  ENSG00000136040_27 (sequence is synthesized)
ttgtgctccctgtcttgctagtgattgtcatttttgcggccgtgggggtgaccaggcacaaatcgaaggagctgagtcgcaaacagagtcaacaactagaattgctggaaagcgagctcc

SEQ ID NO: 325089 - DNA, 120 bp, Artificial Sequence
  ENSG00000136040_28 (sequence is synthesized)
ggaaagagatacgtgacggctttgctgagctgcagatggataaattggatgtggttgatagttttggaactgttcccttccttgactacaaacattttgctctgagaactttcttccctg

SEQ ID NO: 325090 - DNA, 120 bp, Artificial Sequence
  ENSG00000136040_29 (sequence is synthesized)
agtcaggtggcttcacccacatcttcactgaagatatgcataacagagacgccaacgacaagaatgaaagtctcacagctttggatgccctaatctgtaataaaagctttcttgttactg

SEQ ID NO: 325091 - DNA, 120 bp, Artificial Sequence
  ENSG00000136040_30 (sequence is synthesized)
tcatccacacccttgaaaagcagaagaacttttctgtgaaggacaggtgtctgtttgcctccttcctaaccattgcactgcaaaccaagctggtctacctgaccagcatcctagaggtgc

SEQ ID NO: 325092 - DNA, 120 bp, Artificial Sequence
  ENSG00000136040_31 (sequence is synthesized)
gagacgcacggagtccgtcgtcgaaaaactcctcacaaactggatgtccgtctgcctttctggatttctccgggagactgtcggagagcccttctatttgctggtgacgactctgaacca

SEQ ID NO: 325093 - DNA, 120 bp, Artificial Sequence
  ENSG00000136040_32 (sequence is synthesized)
gaaaattaacaagggtcccgtggatgtaatcacttgcaaagccctgtacacacttaatgaagactggctgttgtggcaggttccggaattcagtactgtggcattaaacgtcgtctttga

SEQ ID NO: 325094 - DNA, 120 bp, Artificial Sequence
  ENSG00000136040_33 (sequence is synthesized)
aaaaatcccggaaaacgagagtgcagatgtctgtcggaatatttcagtcaatgttctcgactgtgacaccattggccaagccaaagaaaagattttccaagcattcttaagcaaaaatgg

SEQ ID NO: 325095 - DNA, 120 bp, Artificial Sequence
  ENSG00000136040_34 (sequence is synthesized)
ctctccttatggacttcagcttaatgaaattggtcttgagcttcaaatgggcacacgacagaaagaacttctggacatcgacagttcctccgtgattcttgaagatggaatcaccaagct

SEQ ID NO: 325096 - DNA, 120 bp, Artificial Sequence
  ENSG00000136040_35 (sequence is synthesized)
aaacaccattggccactatgagatatcaaatggatccactataaaagtctttaagaagatagcaaattttacttcagatgtggagtactcggatgaccactgccatttgattttaccaga

SEQ ID NO: 325097 - DNA, 120 bp, Artificial Sequence
  ENSG00000136040_36 (sequence is synthesized)
ttcggaagcattccaagatgtgcaaggaaagagacatcgagggaagcacaagttcaaagtaaaagaaatgtatctgacaaagctgctgtcgaccaaggtggcaattcattctgtgcttga

SEQ ID NO: 325098 - DNA, 120 bp, Artificial Sequence
  ENSG00000136040_37 (sequence is synthesized)
aaaactttttagaagcatttggagtttacccaacagcagagctccatttgctataaaatacttttttgactttttggacgcccaggctgaaaacaaaaaaatcacagatcctgacgtcgt

SEQ ID NO: 325099 - DNA, 120 bp, Artificial Sequence
  ENSG00000136040_38 (sequence is synthesized)
acatatttggaaaacaaacagccttcctcttcgcttctgggtaaacatcctgaagaaccctcagtttgtctttgacattaagaagacaccacatatagacggctgtttgtcagtgattgc

SEQ ID NO: 325100 - DNA, 120 bp, Artificial Sequence
  ENSG00000136040_39 (sequence is synthesized)
ccaggcattcatggatgcattttctctcacagagcagcaactagggaaggaagcaccaactaataagcttctctatgccaaggatatcccaacctacaaagaagaagtaaaatcttatta

SEQ ID NO: 325101 - DNA, 120 bp, Artificial Sequence
  ENSG00000136040_40 (sequence is synthesized)
caaagcaatcagggatttgcctccattgtcatcctcagaaatggaagaatttttaactcaggaatctaagaaacatgaaaatgaatttaatgaagaagtggccttgacagaaatttacaa

SEQ ID NO: 325102 - DNA, 120 bp, Artificial Sequence
  ENSG00000136040_41 (sequence is synthesized)
atacatcgtaaaatattttgatgagattctaaataaactagaaagagaacgagggctggaagaagctcagaaacaactcttgcatgtaaaagtcttatttgatgaaaagaagaaatgcaa

SEQ ID NO: 325103 - DNA, 120 bp, Artificial Sequence
  ENSG00000136040_42 (sequence is synthesized)
gtggatgtaagcactctggggcctggcttaatctggcaaagttcttcagacgacttgggagcaaaatggctgcttgagctactctgtgtcgttaatttgttgtttgcacataggttccac

SEQ ID NO: 325104 - DNA, 120 bp, Artificial Sequence
  ENSG00000136040_43 (sequence is synthesized)
tttgggcactgtctttttaagagaccaaggcacatgcacagcttttagaaagcataccaacccttgtgcctgtgtgtataccgtgggaacccttctgtaaatagagttgaagtggttgtt

SEQ ID NO: 325105 - DNA, 120 bp, Artificial Sequence
  ENSG00000136040_44 (sequence is synthesized)
gcaaacagcctccttgtttacagagaatacaaggccagtaagcgaatgtcagtattgtaactacagtctccacttaagcacaatgatataagtggttttgtttgaaaactacagctatgt

SEQ ID NO: 325106 - DNA, 120 bp, Artificial Sequence
  ENSG00000136040_45 (sequence is synthesized)
agcacttgtgctacactgcacctctgcattgtaaagggatactgccagtgctcaaaacaaaatgtgaaatgagtcatttggaaacaaggtgggggtgttagggcaacctcgaggatttgc

SEQ ID NO: 325107 - DNA, 120 bp, Artificial Sequence
  ENSG00000136040_46 (sequence is synthesized)
agcattgaaactttccccagtagttcttggaaaagctgaccgcagaatttggtagtgtacacttagcatttgtgagtgtgtgtgtgtgtttaaaccaaaaactaacagtgttgcaacatt

SEQ ID NO: 325108 - DNA, 120 bp, Artificial Sequence
  ENSG00000136040_47 (sequence is synthesized)
gttgaaagggctcgtgtttttcagtggtcatcaactgcactccatcaaactcacctccatttcaccaaggagctctaaagtaaggagagtgggctttatttaaatgaacagcattttaac

SEQ ID NO: 325109 - DNA, 120 bp, Artificial Sequence
  ENSG00000136040_48 (sequence is synthesized)
cagatactttgtcctaatgtatgttccttttcttcatctgttttttcatactaaatgtatttgatagtggacatgttggatattatacaaaaaaatcattaattcatttctgttccaaaa

SEQ ID NO: 325110 - DNA, 120 bp, Artificial Sequence
  ENSG00000136040_49 (sequence is synthesized)
cctttgatcagaacgatctgtggaagagtaactccatttctatatgagtgagtgtctccttgctttagatttctggtgaaccctgtggttatgaatacttgtgtgtgatttaaaaaaaaa

SEQ ID NO: 325111 - DNA, 120 bp, Artificial Sequence
  ENSG00000136040_50 (sequence is synthesized)
aagatacattttacattttatcgaattgctgttcacactggagtattatatataaatatatatatttgaggcccaaggcctgaaaaatattagtatacaacttggtatcttagtcttact

SEQ ID NO: 325112 - DNA, 120 bp, Artificial Sequence
  ENSG00000136040_51 (sequence is synthesized)
atgtactttttgaaagtattcctcgcaggagaaagaatttaaaatacccattttattcatgcctttctttttaaagaattctctatccagttatactgtagtctttttagtgctgatttt

SEQ ID NO: 325113 - DNA, 120 bp, Artificial Sequence
  ENSG00000136040_52 (sequence is synthesized)
ttaattcctgaatttttgctgctcatgaccagttttaataccactgtgttttccttctattaaaccagaagaagtaaacagcataattggcaactcttgagcttttcttgtggcaggcac

SEQ ID NO: 325114 - DNA, 120 bp, Artificial Sequence
  ENSG00000136040_53 (sequence is synthesized)
cttttacccttggtgctccaaatcccccatctaggaaagaaaattttttcaagtcaaataacattgatcacatattccttgaaatcatttaccaacactgtatggagcattaggatttaa

SEQ ID NO: 325115 - DNA, 120 bp, Artificial Sequence
  ENSG00000136040_54 (sequence is synthesized)
atatgaatttgtcttaaaggcaattcctttttgcttctgtattatctggaaaagcatgagagaggtgacacctcaacaaactgatcagagaaaataagcagttactaccctgataggcac

SEQ ID NO: 325116 - DNA, 120 bp, Artificial Sequence
  ENSG00000136040_55 (sequence is synthesized)
cttcccaatcctgttgcttttgaccattgtctgtccaacggacacacctcaaacaaacaaaactaccaaatagatgacagatcagaataaaggtgagaggtctggtccccattgaaggct

SEQ ID NO: 325117 - DNA, 120 bp, Artificial Sequence
  ENSG00000136040_56 (sequence is synthesized)
gctacagtcttcaaagaggtgaaggagttcataagagaacaacagtaggaaagttgagagccaagggtaggagagttgcccaaaagacttcccctactactttagggtactgaaaactca

SEQ ID NO: 325118 - DNA, 120 bp, Artificial Sequence
  ENSG00000136040_57 (sequence is synthesized)
aaggatcagctacagctttatctaagtatttactaaatgctacatgagggtgtccctgtccagctttctggcacatgagtcctgtgtggagagttacctcctcttccagggactgtgctg

SEQ ID NO: 325119 - DNA, 120 bp, Artificial Sequence
  ENSG00000136040_58 (sequence is synthesized)
ttgggaactttgggcaagtcacttacctctttgtgcctcaatttctgtataatatttctaagctacctcactgaggtggtatgaagattcactaatgtatgtagcgtgtttgtcaatcct

SEQ ID NO: 325120 - DNA, 120 bp, Artificial Sequence
  ENSG00000136040_59 (sequence is synthesized)
ccagtgaaaagcactatctagatcacattttggatcacattagccaaatgcagtaaatggccaaattagatgtgtgctgaagacaatcagtcactgggtctatattaaacagcaaccaga

SEQ ID NO: 325121 - DNA, 120 bp, Artificial Sequence
  ENSG00000136040_60 (sequence is synthesized)
gcaacaaatggcaaacaatttctattttcaagtttctttgcatatttttttggtgcaaaaccatttataaacttttttttctaacactagtgtctacagcagcattcaaaaaaattctgt

SEQ ID NO: 325122 - DNA, 120 bp, Artificial Sequence
  ENSG00000136040_61 (sequence is synthesized)
taccttttctgtattaggatttaaagtctatttcttattgtatacctgattgaagctgttcttggagatgaatgttttaaatgtctatatccaaaaaataaacattttgatgtaactgtg

SEQ ID NO: 325123 - DNA, 120 bp, Artificial Sequence
  ENSG00000136040_62 (sequence is synthesized)
acgttttcatttttagcccagtgactgcctgatgttcatagtgttatcatcatcactatcatctctattattattactttgaatttttattgtgggttttttttggatcatgaattcaat

SEQ ID NO: 325124 - DNA, 120 bp, Artificial Sequence
  ENSG00000136040_63 (sequence is synthesized)
attgaataattcattgtcttggaaaacccattgtgggtctactttctaactttaaacttatatatgattttgtattatactatatatttttttctttttatcagaacagagacgccaacg

SEQ ID NO: 325125 - DNA, 120 bp, Artificial Sequence
  ENSG00000136040_64 (sequence is synthesized)
tttagctttcacttgtaaaatgagtaaggttttggtttttttctgctgcattttggcatcttcctcttcagagtgacccctcactgggaaattttcttataagatccagctttttaatgc

SEQ ID NO: 325126 - DNA, 120 bp, Artificial Sequence
  ENSG00000136040_65 (sequence is synthesized)
tattttctagtttcattctagctcctgctctctgtccctatctgttttgtttttgtttttgtttttaagaactgtaaagattgctatttgttttcatttttggtttttgagttaccatgt

SEQ ID NO: 325127 - DNA, 120 bp, Artificial Sequence
  ENSG00000136040_66 (sequence is synthesized)
tcagcttaatgaaattggtcttggtaaggcggtgcgggagctatgtggtcccaggccctgatgagtgtccctccctgcctgccctccctccctgtcccccctccctgcccccaccagctt

SEQ ID NO: 325128 - DNA, 120 bp, Artificial Sequence
  ENSG00000136040_67 (sequence is synthesized)
ccattcagtgacacttacacagccaggttgttcctggagggcatgtctaggggccaagagactgctttggtctctcatgggcatcctgattcttcgaaggaagcacggtccttcaaagat

SEQ ID NO: 325129 - DNA, 120 bp, Artificial Sequence
  ENSG00000136040_68 (sequence is synthesized)
ggcgtttgttgttgttgtctttaaatattacgtctgtaaatcagattgatgagattgcaggccctgagactgcacggaatcaccttgcatcatgaaatacagaaaggtgtcaacacagtg

SEQ ID NO: 325130 - DNA, 120 bp, Artificial Sequence
  ENSG00000136040_69 (sequence is synthesized)
aaccttttgggttgctggtcttacctatgttctcacgcctccattttctcacccactcactcagccttctccatttaccctcccaagtctttggcgaggtacactcatcctgcgtatcat

SEQ ID NO: 325131 - DNA, 120 bp, Artificial Sequence
  ENSG00000136040_70 (sequence is synthesized)
cactgccatgtcctgataccccagctctgccatattgcccttcttttttgcggtatgatgaccacatagaggcccaacctcttaaacacatcaataccaatgatcacatttcaatctaga

SEQ ID NO: 325132 - DNA, 120 bp, Artificial Sequence
  ENSG00000136040_71 (sequence is synthesized)
cttctaagcaacggctgaaatctctccaggccaaaggagagtttgtatcaccttaccagaagcttctccggaacaattggccagaagcctagagttcagaaacccagacacatgcagtaa

SEQ ID NO: 325133 - DNA, 120 bp, Artificial Sequence
  ENSG00000136040_72 (sequence is synthesized)
aatcaggcacaaggatgtggttatagcattctgtcagtttcagaacagctctggcatcccaaaaggccagaaagggaagccaggaagcctgtctgagatgggggatcctggcactgagcc

SEQ ID NO: 325134 - DNA, 120 bp, Artificial Sequence
  ENSG00000136040_73 (sequence is synthesized)
agaccctgtacatggctgccccccttacagttttatcatgctgcccacatttggaccagcctgaatttacatttgagttcatggggcctacagccaccctgactcaagttaactttgatg

SEQ ID NO: 325135 - DNA, 120 bp, Artificial Sequence
  ENSG00000136040_74 (sequence is synthesized)
ggcagaacacttgttgccctactttaacgatccattccagtgacctgagggaactgatctcttcctcgactaaaatcttgttgtgcaatcctaatgaattctcgaaggtgtttccagcgg

SEQ ID NO: 325136 - DNA, 120 bp, Artificial Sequence
  ENSG00000136040_75 (sequence is synthesized)
cgtccgtgctatgcaatcactggacccgggagctccccagtctcggggcgggaggggcaggtgtgcagccttcaggagaacgggagagagcaggcaggtttggcttttactttctccaga

SEQ ID NO: 325137 - DNA, 120 bp, Artificial Sequence
  ENSG00000136040_76 (sequence is synthesized)
cccatacagtctgatgctcatggcaagagagacgtgaccaaaagctgccgtggaagtcccaaaaagaggcactactctcagcctgggaggatctgggaggcttcagagagaaagaagggg

SEQ ID NO: 325138 - DNA, 120 bp, Artificial Sequence
  ENSG00000136040_77 (sequence is synthesized)
tttttttttttttttgccttcttttaaatgcttgcatgccacatcacagagggaaattctaggatgtgaacattgtcctaaaacgcaggaattaagtcagttttctgtgttgctagatgc

SEQ ID NO: 325139 - DNA, 120 bp, Artificial Sequence
  ENSG00000136040_78 (sequence is synthesized)
tttactttctaccaaaattcccttttgtgtctttggttttttaaccaagtttcacttaattagcgcaatacatcaatggctggacactcacataaaataaattaaaactctgtaattatg

SEQ ID NO: 325140 - DNA, 120 bp, Artificial Sequence
  ENSG00000136040_79 (sequence is synthesized)
acagtgctgattcaagagcgtctcgagcactctgagtggtgagggggcggctcggctcgccaggaggaagtggcatccagccagtcggcgatactttcactttcagtggaataattcccg

SEQ ID NO: 325141 - DNA, 120 bp, Artificial Sequence
  ENSG00000136040_80 (sequence is synthesized)
ctggtgcaggggtctgatgtccctccaccaggtgctcaagggggtctgggacaccgacagccctagtcctcctgtcctaccccacagacgtttagtgggtgacagtagctccgtgaccgc

SEQ ID NO: 325142 - DNA, 120 bp, Artificial Sequence
  ENSG00000136044_0 (sequence is synthesized)
caggcgtggacgcgcgcggggccgccgcgggcacggagtggccgccgcgtcgcctgagcccagagccggggagtgctctcggccgccgcgtctcctgccctctgtccttccaacccagcc

SEQ ID NO: 325143 - DNA, 120 bp, Artificial Sequence
  ENSG00000136044_1 (sequence is synthesized)
tctgtccttccaacccagccctcggctgagccgcgccgcaccatgcccgccgtggacaagctcctgctagaggaggcgttgcaggacagcccccagactcgctctttactgagcgtgttt

SEQ ID NO: 325144 - DNA, 120 bp, Artificial Sequence
  ENSG00000136044_2 (sequence is synthesized)
gaagaagatgctggcaccctcacagactataccaaccagctgctccaggcaatgcagcgcgtctatggagcccagaatgagatgtgcctggccacacaacagctttctaagcaactgctg

SEQ ID NO: 325145 - DNA, 120 bp, Artificial Sequence
  ENSG00000136044_3 (sequence is synthesized)
gcatatgaaaaacagaactttgctcttggcaaaggtgatgaagaagtaatttcaacactccactatttttccaaagtggtggatgagcttaatcttctccatacagagctggctaaacag

SEQ ID NO: 325146 - DNA, 120 bp, Artificial Sequence
  ENSG00000136044_4 (sequence is synthesized)
ttggcagacacaatggttctacctatcatacaattccgagaaaaggatctcacagaagtaagcactttaaaggatctatttggactcgctagcaatgagcatgacctctcaatggcaaaa

SEQ ID NO: 325147 - DNA, 120 bp, Artificial Sequence
  ENSG00000136044_5 (sequence is synthesized)
tacagcaggctgcctaagaaaaaggagaatgagaaggtgaagaccgaagtcggaaaagaggtggccgcggcccggcggaagcagcacctctcctcccttcagtactactgtgccctcaac

SEQ ID NO: 325148 - DNA, 120 bp, Artificial Sequence
  ENSG00000136044_6 (sequence is synthesized)
gcgctgcagtacagaaagcaaatggccatgatggagcccatgataggctttgcccatggacagattaacttttttaagaagggagcagagatgttttccaaacgtatggacagcttttta

SEQ ID NO: 325149 - DNA, 120 bp, Artificial Sequence
  ENSG00000136044_7 (sequence is synthesized)
tcctccgttgcagacatggttcaaagcattcaggtagaactggaagccgaggcggaaaagatgcgggtgtcccagcaagaattactttctgttgatgaatctgtttacactccagactct

SEQ ID NO: 325150 - DNA, 120 bp, Artificial Sequence
  ENSG00000136044_8 (sequence is synthesized)
gatgtggccgcaccacagatcaacaggaacctcatccagaaggctggttaccttaatcttagaaacaaaacagggctggtcaccaccacctgggagaggctttatttcttcacccaaggc

SEQ ID NO: 325151 - DNA, 120 bp, Artificial Sequence
  ENSG00000136044_9 (sequence is synthesized)
gggaatctcatgtgtcagcccaggggagccgtggctggaggtttgatccaggacctggacaactgctcagtgatggccgtggattgcgaagaccggcgctactgcttccagatcaccacg

SEQ ID NO: 325152 - DNA, 120 bp, Artificial Sequence
  ENSG00000136044_10 (sequence is synthesized)
cccaatggaaaatcgggaataatcctccaggctgagagcagaaaggaaaatgaagagtggatatgtgcaataaacaacatctccagacagatctacctgaccgacaaccctgaggcagtc

SEQ ID NO: 325153 - DNA, 120 bp, Artificial Sequence
  ENSG00000136044_11 (sequence is synthesized)
gcgatcaagttgaatcagaccgctctgcaagcagtgactcccattacaagttttggaaaaaaacaagaaagctcatgccccagccagaacctgaaaaattcagagatggaaaatgaaaat

SEQ ID NO: 325154 - DNA, 120 bp, Artificial Sequence
  ENSG00000136044_12 (sequence is synthesized)
gacaagattgttcccaaagcaacagccagtctacctgaagcagaggagctgatcgcgcctggaacgccgattcaattcgatattgtgcttcctgctacagaattccttgatcagaacaga

SEQ ID NO: 325155 - DNA, 120 bp, Artificial Sequence
  ENSG00000136044_13 (sequence is synthesized)
gaagcagaagattctcttttgcagcagatgtttatagttcggtttttgggatcaatggcagttaaaacagacagcactactgaagtgatttatgaagcgatgagacaagtattggctgct

SEQ ID NO: 325156 - DNA, 120 bp, Artificial Sequence
  ENSG00000136044_14 (sequence is synthesized)
cgggctattcataacatcttccgcatgacagaatcccatctgatggtcaccagtcaatctttgaggttgatagatccacagactcaagtatcaagggccaattttgaacttaccagtgtc

SEQ ID NO: 325157 - DNA, 120 bp, Artificial Sequence
  ENSG00000136044_15 (sequence is synthesized)
acacaatttgctgctcatcaagaaaacaagagactggttggttttgtcatccgtgttcctgaatccactggagaagaatctctgagtacatacatttttgaaagcaactcagaaggcgaa

SEQ ID NO: 325158 - DNA, 120 bp, Artificial Sequence
  ENSG00000136044_16 (sequence is synthesized)
aagatatgttatgctattaatttgggaaaagaaattattgaggttcagaaggatccagaagcactggctcaattaatgctgtccataccactaaccaatgacggaaaatatgtactgtta

SEQ ID NO: 325159 - DNA, 120 bp, Artificial Sequence
  ENSG00000136044_17 (sequence is synthesized)
aacgatcaaccagatgacgatgatggaaatccaaacgaacatagaggcgcagaatccgaagcataactcacttgcgcctgtgggggaagagcaaacaggaaggagagctacctcctaagg

SEQ ID NO: 325160 - DNA, 120 bp, Artificial Sequence
  ENSG00000136044_18 (sequence is synthesized)
gttttaacgtctctgacatacaggcacactgacctgatttccgaaggctgacaatcgtttgtggaatgtaatcttgatgccttgatactgagacttgggagggaaactaagaaatggttg

SEQ ID NO: 325161 - DNA, 120 bp, Artificial Sequence
  ENSG00000136044_19 (sequence is synthesized)
acagcgttcccacccatctacaatgttattttaggtgctttgtggtaagtcttttttcttagattgcgctaaaatttcttagattgttcagcgctcagaacaaaagtttgaaaaatgcat

SEQ ID NO: 325162 - DNA, 120 bp, Artificial Sequence
  ENSG00000136044_20 (sequence is synthesized)
tgttcatatgaatgtcatctcttttcagtttccagtatcctttttaaaaaatggcaaaagcctagatttacaatttgatgaacactaaatatttcttattaatataatctatttttgtat

SEQ ID NO: 325163 - DNA, 120 bp, Artificial Sequence
  ENSG00000136044_21 (sequence is synthesized)
tttacttaatgagctttaagtgcctgtcgttctgaaaattgtgtatttataattcagcttatctcataattggacctaatagcatttctttgtgcagttaggtgatgagcactgctttga

SEQ ID NO: 325164 - DNA, 120 bp, Artificial Sequence
  ENSG00000136044_22 (sequence is synthesized)
ggcccaagcactagtagagatgcgcgatacaggtctagtttcggtaactgttccagacatcaagcaataaaaaaatgaataccacaaaagatgtttgattttacagtggagccttactga

SEQ ID NO: 325165 - DNA, 120 bp, Artificial Sequence
  ENSG00000136044_23 (sequence is synthesized)
accagcattcagaagtttaaggtcctcctaggtatgagtatttttagtagtggatcactgtggacagggtgcagctctaccagttcctgtttcttctgagccagaccctcttcagggaag

SEQ ID NO: 325166 - DNA, 120 bp, Artificial Sequence
  ENSG00000136044_24 (sequence is synthesized)
ggaccaattaattttaaaactcacttgaagcacagctggtcatggggcttggtataaagttcctatttccaccctgatacttccaattcctggaaccccagcccactcccccatccctcc

SEQ ID NO: 325167 - DNA, 120 bp, Artificial Sequence
  ENSG00000136044_25 (sequence is synthesized)
tccctatcaaactagtataatgattttgaatcggtacagtgtgtttaactgtaactaagttcaacagactattattatctttgtaataaattaacctagcaataaaaaatattctgtttc

SEQ ID NO: 325168 - DNA, 120 bp, Artificial Sequence
  ENSG00000136044_26 (sequence is synthesized)
aaacccaggggagccgtggctggaggtttgatccaggacctggacaactgctcagtgatggccgtggattgcgaagaccggcgctactgcttccagatcaccacgcccaatggaaaatcg

SEQ ID NO: 325169 - DNA, 120 bp, Artificial Sequence
  ENSG00000136044_27 (sequence is synthesized)
tttcatgctgatctgacatctctgggaggtcacggggagggttctaactgtggagggtcgcacagagcctctgtccaccccagaaatgctcgctaacagtgcccttgccttagctgccaa

SEQ ID NO: 325170 - DNA, 120 bp, Artificial Sequence
  ENSG00000136044_28 (sequence is synthesized)
tattcataaatatctggggcacattggcagagttttctccagatctcttgttgtgaatattggagtttcacatgtcacaagcctgggaacccagcttagctttgctgtggttttagaaga

SEQ ID NO: 325171 - DNA, 120 bp, Artificial Sequence
  ENSG00000136044_29 (sequence is synthesized)
tctattcatggactcctttttagtttgcagtgctgcacgatgcattgtaaaactagtctgtgtgcatacacatgcgttatttctgcttacctctcatatgtgggaagctgaacattttag

SEQ ID NO: 325172 - DNA, 120 bp, Artificial Sequence
  ENSG00000136044_30 (sequence is synthesized)
ggattaagaaatctgcctccattgttgtttagaagcctctgctccttgcctggcactactggctgttgggaatgtgaagataaataagagtgactacccttgactggttcacagtttgtt

SEQ ID NO: 325173 - DNA, 120 bp, Artificial Sequence
  ENSG00000136044_31 (sequence is synthesized)
ccagagacagataatgaggcaacagttccagtacagtgtgaatcctgctgcgataggaacacaaatgcagctttgagctcctgcagcttgtacttcttcaggggcttattctcttgtcct

SEQ ID NO: 325174 - DNA, 120 bp, Artificial Sequence
  ENSG00000136044_32 (sequence is synthesized)
gagctttagctacacaggttccttaaaggcagaaagcaggacacgtggtcacacacagctatctcgcctcaccctctaacaggctttatctctatttcggggaatttgtatttattctgg

SEQ ID NO: 325175 - DNA, 120 bp, Artificial Sequence
  ENSG00000136044_33 (sequence is synthesized)
acttctacaaactcttctaggaatattaaatttatccaacatttgtgacataatgtatcttttaaaatttcaggttgatagatccacagactcaagtatcaagggccaattttgaactta

SEQ ID NO: 325176 - DNA, 84 bp, Artificial Sequence
  ENSG00000136044_34 (sequence is synthesized)
gaaagaaagaaaaagaaacaaggaaatcgtagtaccataagaggaaagaatgacacactcctacactcctgcaagacatccaag

SEQ ID NO: 325177 - DNA, 120 bp, Artificial Sequence
  ENSG00000136044_35 (sequence is synthesized)
aaagaatgacacactcctacactcctgcaagacatccaagattacaaaaaaccagactgctggttcctgctgggatgatcacactacagctgtgctagatgaccacaccccagactcgct

SEQ ID NO: 325178 - DNA, 120 bp, Artificial Sequence
  ENSG00000136044_36 (sequence is synthesized)
agcccatgataggctttgcccatggacaggtaggggagtccctccctgagggctgaaacctaagctagctgtggcgttctgctgagagggcacgcaggagacactgaagcatcgtcgtag

SEQ ID NO: 325179 - DNA, 120 bp, Artificial Sequence
  ENSG00000136044_37 (sequence is synthesized)
aaagaaacataaatgcacaatctccctggctactttgtgggattcagcacttggacagcttccagttgagctgggtcatcttcagctggacatgcattggcctcaagttaggccatatgt

SEQ ID NO: 325180 - DNA, 120 bp, Artificial Sequence
  ENSG00000136044_38 (sequence is synthesized)
gatattgtgcttcctgctacagaattccttgatcagaacagagggagcaggcgtaccaacccttttggtgaaactgaggatgaatcatttccagaagcagaagttaaaacagacagcact

SEQ ID NO: 325181 - DNA, 120 bp, Artificial Sequence
  ENSG00000136044_39 (sequence is synthesized)
aaatacatttaagagagagaagaaaaattcctattaagaacttttaacactggaattacctgagtttcacttacctggaatattttttgtgtggcataaattggcaacagaggtcaggac

SEQ ID NO: 325182 - DNA, 120 bp, Artificial Sequence
  ENSG00000136044_40 (sequence is synthesized)
agttggacgcaaatgccccgggccctatgtgatgagtctcctgcagccaggtcctgtgttcccaagtgggaacagtgagaacagtgacctcactgtactcccaaatcacatttgttctaa

SEQ ID NO: 325183 - DNA, 120 bp, Artificial Sequence
  ENSG00000136044_41 (sequence is synthesized)
caatgtaagtaccgcatacaggttcatgttagtgattactccttaattcacctttgtatctaccttaaacacagcctaggcactttattaataaagatctgccactaataggactaatag

SEQ ID NO: 325184 - DNA, 120 bp, Artificial Sequence
  ENSG00000136045_0 (sequence is synthesized)
agcggccctgtgcagatccctgagcgtgtggcagcagtgcggtcgtggtccctccctatgcagcctggtttctagcgtgacacgcccttgacttgaggaccatgaaccgcagccgccagg

SEQ ID NO: 325185 - DNA, 120 bp, Artificial Sequence
  ENSG00000136045_1 (sequence is synthesized)
tgacgtgcgtggcctgggtccgctgcggcgtggccaaagagacaccagacaaggtagagctgagtaaagaagaagtaaaacgcctcattgctgaggcaaaggagaaattgcaagaagaag

SEQ ID NO: 325186 - DNA, 120 bp, Artificial Sequence
  ENSG00000136045_2 (sequence is synthesized)
gtggtggcagtgatgaagaggagacaggcagtccttcagaagatggcatgcagagtgcacgcacccaggcacgcccaagagagcccctggaggatggtgacccagaggatgacaggacgc

SEQ ID NO: 325187 - DNA, 120 bp, Artificial Sequence
  ENSG00000136045_3 (sequence is synthesized)
ttgatgatgatgagctggctgagtacgacttagataaatatgatgaggaaggtgacccagatgctgagactcttggtgaatctctcttgggtcttacggtctacgggagtaatgatcaag

SEQ ID NO: 325188 - DNA, 120 bp, Artificial Sequence
  ENSG00000136045_4 (sequence is synthesized)
atccttacgttactctgaaagatacagaacaatatgaacgtgaagatttcttgattaagcccagtgataatcttatagtttgtggccgagctgaacaggaccagtgcaatttagaggtgc

SEQ ID NO: 325189 - DNA, 120 bp, Artificial Sequence
  ENSG00000136045_5 (sequence is synthesized)
atgtttataatcaagaagaagactctttttatgtacaccatgatatactcttgtctgcatatcctctgagtgtggaatggctgaattttgatcctagcccagatgattctactggaaatt

SEQ ID NO: 325190 - DNA, 120 bp, Artificial Sequence
  ENSG00000136045_6 (sequence is synthesized)
acattgctgtaggaaacatgacccctgttattgaagtgtgggaccttgatatagtggactctttagagccagtcttcacactcggaagtaaactttcaaaaaagaagaaaaagaaaggaa

SEQ ID NO: 325191 - DNA, 120 bp, Artificial Sequence
  ENSG00000136045_7 (sequence is synthesized)
agaagagttcctcagcagaagggcataccgatgctgtccttgacctttcatggaataagctaatcagaaatgttttagcaagtgcatcagctgacaacactgtaattctgtgggatatgt

SEQ ID NO: 325192 - DNA, 120 bp, Artificial Sequence
  ENSG00000136045_8 (sequence is synthesized)
ccttggggaaaccagcagctagcctcgctgtacacacagacaaggtccaaacactgcagtttcatccatttgaagcacagactctgatttctggctcatatgataagtcagtggctttgt

SEQ ID NO: 325193 - DNA, 120 bp, Artificial Sequence
  ENSG00000136045_9 (sequence is synthesized)
atgactgccgaagtccagatgaaagccatcgaatgtggcgattcagtgggcagatagagagagtgacttggaatcacttttcaccttgtcatttcttggccagtacagatgacggctttg

SEQ ID NO: 325194 - DNA, 120 bp, Artificial Sequence
  ENSG00000136045_10 (sequence is synthesized)
ccaatttttacacttaatgcacacaatgatgaaatctctggtcttgatcttagcagtcaaatcaagggctgtctcgtgactgcttcagctgacaaatacgtgaagatctgggacatctta

SEQ ID NO: 325195 - DNA, 120 bp, Artificial Sequence
  ENSG00000136045_11 (sequence is synthesized)
ggagataggccaagtctagttcattctagggacatgaaaatgggagttctcttctgttcttcatgttgccctgatttgccatttatttatgcctttggaggtcaaaaagaagggcttcgg

SEQ ID NO: 325196 - DNA, 120 bp, Artificial Sequence
  ENSG00000136045_12 (sequence is synthesized)
gtctgggatataagcacagtctcttcagtaaatgaagcatttggaagacgagagaggcttgttcttgggagtgcaagaaattcatctattagtggcccttttggcagcaggagctcagat

SEQ ID NO: 325197 - DNA, 120 bp, Artificial Sequence
  ENSG00000136045_13 (sequence is synthesized)
acacccatggagtcttaatgaagatcatctaatttcctgcttaccttaactgggaattttaaaaagttggcctaaaaatgttccatgcgtggcagcaaccatgcagagtgactgaaacac

SEQ ID NO: 325198 - DNA, 120 bp, Artificial Sequence
  ENSG00000136045_14 (sequence is synthesized)
aattcatttctgactgacattcctttctgcaactgcggtggcaccacaaatatccggtctttgtgcttgctcttcagatggatggtttgtaaggctcttgttgcatttcttaaaaaagag

SEQ ID NO: 325199 - DNA, 120 bp, Artificial Sequence
  ENSG00000136045_15 (sequence is synthesized)
taataaaaaggatttttaaaaagtaattccttaaacataccatctgtcacagttaatctagatttgtaaataggtagtaatttatagaatttttaaagcgtaaaatccggtaatattaaa

SEQ ID NO: 325200 - DNA, 120 bp, Artificial Sequence
  ENSG00000136045_16 (sequence is synthesized)
agataggtaaacctaggcctggaaaggctgttatttggctaaaattgcacaggaggccatgaacagaggcaagtgccccagagactccactttcattcctaactgttctcaaattaatgc

SEQ ID NO: 325201 - DNA, 120 bp, Artificial Sequence
  ENSG00000136045_17 (sequence is synthesized)
tcatgattgagtattctcagtgcaactcgtagagtttgataagtaaaagttacatgcccctgttttcctagcatgatattcactgttatcaaagacaagaggcagaccattcattcattc

SEQ ID NO: 325202 - DNA, 120 bp, Artificial Sequence
  ENSG00000136045_18 (sequence is synthesized)
tcaaaacactgaatgccattctgtgcctagtgctatacaaggcatgggagattcagtgtgaataagtctttgctctccacctaacaagggacagttttaattatagattgtcttcctatt

SEQ ID NO: 325203 - DNA, 120 bp, Artificial Sequence
  ENSG00000136045_19 (sequence is synthesized)
aagtatgagttttagtaggcattaaaaatcgtaattagtttgataatatgagacccaaccctaacttgccagaagagtaatcagttcatgaaccattgatatttcctgtatatttcatga

SEQ ID NO: 325204 - DNA, 120 bp, Artificial Sequence
  ENSG00000136045_20 (sequence is synthesized)
atgtgacttcagtcattctagtgttaatactgtggaatgtcattggtgtagcaacgtgggttcaccaaaacacctttttatacaaaagacagatgtgtgaattaaagagattaaaggata

SEQ ID NO: 325205 - DNA, 120 bp, Artificial Sequence
  ENSG00000136045_21 (sequence is synthesized)
aacgtggacccggaactcggggcgttggctggtgcgactggctggggtgagggcggctttgcccggattgtcgcgactagagctgcagttcagaaggtagagctgagtaaagaagaagta

SEQ ID NO: 325206 - DNA, 120 bp, Artificial Sequence
  ENSG00000136045_22 (sequence is synthesized)
ccaactctagatgatccagagttagttataaaatagatgattgcatctaagtccaagaatggatgtcataggaaatatgtttttgtcaagatgactattttattattgtagtttgtcaat

SEQ ID NO: 325207 - DNA, 80 bp, Artificial Sequence
  ENSG00000136048_0 (sequence is synthesized)
actctggcccggcagcctcgccgcccgcagcctcgctccgctcctcgcgcttcccctccctccggggctgggcctgcccc

SEQ ID NO: 325208 - DNA, 120 bp, Artificial Sequence
  ENSG00000136048_1 (sequence is synthesized)
ccgcctccaggcagcccggagcaacccggcgcccggccccgctgggcgcagcactccgtcggcggcggcggcggcgcgatgctgtgcttcctgaggggaatggctttcgtccccttcctc

SEQ ID NO: 325209 - DNA, 120 bp, Artificial Sequence
  ENSG00000136048_2 (sequence is synthesized)
gtccccttcctcttggtgacctggtcgtcagccgccttcattatctcctacgtggtcgccgtgctctccgggcacgtcaaccccttcctcccgtatatcagtgatacgggaacaacacct

SEQ ID NO: 325210 - DNA, 120 bp, Artificial Sequence
  ENSG00000136048_3 (sequence is synthesized)
ccagagagtggtatttttggatttatgataaacttctctgcatttcttggtgcagccacgatgtatacaagatacaaaatagtacagaagcaaaatcaaacctgctatttcagcactcct

SEQ ID NO: 325211 - DNA, 120 bp, Artificial Sequence
  ENSG00000136048_4 (sequence is synthesized)
gtttttaacttggtgtctttagtgcttggattggtgggatgtttcggaatgggcattgtcgccaattttcaggagttagctgtgccagtggttcatgacgggggcgctcttttggccttt

SEQ ID NO: 325212 - DNA, 120 bp, Artificial Sequence
  ENSG00000136048_5 (sequence is synthesized)
gtctgtggtgtcgtgtacacgctcctacagtccatcatctcttacaaatcatgtccccagtggaacagtctctcgacatgccacatacggatggtcatctctgccgtttcttgcgcagct

SEQ ID NO: 325213 - DNA, 120 bp, Artificial Sequence
  ENSG00000136048_6 (sequence is synthesized)
gtcatccccatgattgtctgtgcttcactaatttccataaccaagctggagtggaatccaagagaaaaggattatgtatatcacgtagtgagtgcgatctgtgaatggacagtggccttt

SEQ ID NO: 325214 - DNA, 120 bp, Artificial Sequence
  ENSG00000136048_7 (sequence is synthesized)
ggttttattttctacttcctaactttcatccaagatttccagagtgtcaccctaaggatatccacagaaatcaatggtgatatttgaagaaagaagaattcagtctcactcagtgaatgt

SEQ ID NO: 325215 - DNA, 120 bp, Artificial Sequence
  ENSG00000136048_8 (sequence is synthesized)
cgcaggccatttctaaaagtgctacagaggacagacagggttttgaggccaccctgattattgggatgcatctgcagcacatccaggacttgaatttcattacgagttcctaatagttgt

SEQ ID NO: 325216 - DNA, 120 bp, Artificial Sequence
  ENSG00000136048_9 (sequence is synthesized)
atttctaaagatgtgtttcctagagaatgtacagccttatgacactgtagtgatgtttttataattttctaagtagatttttttatattaacaaattcatatacagaaaaaataaggtgt

SEQ ID NO: 325217 - DNA, 120 bp, Artificial Sequence
  ENSG00000136048_10 (sequence is synthesized)
tacaaaaaatggagagctcttatttttgtacagattctgtcgtttttgttttatttgtgtgagatttatggaaatacactaaatgagtaattcaggttcagtacatttattacaaagtga

SEQ ID NO: 325218 - DNA, 120 bp, Artificial Sequence
  ENSG00000136048_11 (sequence is synthesized)
aatcaggggatattcatttgtaaattttattcttagtgaatgaactgtataattttttttatcaggagagcacttataaaattcaatttataaagatcatatacccaaatcataaagatt

SEQ ID NO: 325219 - DNA, 120 bp, Artificial Sequence
  ENSG00000136048_12 (sequence is synthesized)
tagttgatacattaacactaagatactctgatttttagccgaactaaacaaagtgcttctactgagaggcctttataccaccatgtacagtaactctaagtgaatacggaagaccttggt

SEQ ID NO: 325220 - DNA, 120 bp, Artificial Sequence
  ENSG00000136048_13 (sequence is synthesized)
tcgcaccttttgctcttgctgctaattgcccattcgtagtgggtgtaatgccaggtggaatggtttcaacaagtcaggtgaaaaccatcctttattgttgctggcacaacttgatatata

SEQ ID NO: 325221 - DNA, 120 bp, Artificial Sequence
  ENSG00000136048_14 (sequence is synthesized)
gtctgactcagaactgaagctcacatctcaaattcatttcatgccagtaaatgtggcaaagagaagaaaggcccaagagcgagacaagaagaatggagaagggggcagccaagaagaact

SEQ ID NO: 325222 - DNA, 120 bp, Artificial Sequence
  ENSG00000136048_15 (sequence is synthesized)
tctgggttcagggtactgtttatttgctccttctcttcatgcctgtggctggatgtcccacaacactataagaaatataagtcaagccctttgtgttaagcaagaactacagactccatc

SEQ ID NO: 325223 - DNA, 120 bp, Artificial Sequence
  ENSG00000136048_16 (sequence is synthesized)
ttttcacccaaatcatgaatgaccaataaaaagcaagttattccagaggaagaagcagcccttgaaatgttaaggcttaggcttgaaaggtgaagagcaggaattctctctttcaaatcc

SEQ ID NO: 325224 - DNA, 120 bp, Artificial Sequence
  ENSG00000136048_17 (sequence is synthesized)
tagagcataaacccatgtgtggccaagtgagatcagccctcaagggcacatgccaagggcagagcagcccatgtagacagcttcggagggcatgggggtgtagggagttcggggtagctc

SEQ ID NO: 325225 - DNA, 120 bp, Artificial Sequence
  ENSG00000136048_18 (sequence is synthesized)
ctcattaactatttgttgggtgagtaaaggggtgaggctcagtggcaggtacctctgcaatgacaagctgcctcccctctatgtgtttagcatatgttattagaacatgtccgacacccc

SEQ ID NO: 325226 - DNA, 120 bp, Artificial Sequence
  ENSG00000136048_19 (sequence is synthesized)
taccgctgccatttgggccctttaataaagccaagtagagaaatctggcaataaaaggcaaatgtaagcatgctttctttaagacgcatcataaatggttttctttaagtgaatggaaga

SEQ ID NO: 325227 - DNA, 90 bp, Artificial Sequence
  ENSG00000136048_20 (sequence is synthesized)
aagacgcatcataaatggttttctttaagtgaatggaagagtttgacagagatacacctttgtaagaaaacattaagaatgctggctggc

SEQ ID NO: 325228 - DNA, 120 bp, Artificial Sequence
  ENSG00000136048_21 (sequence is synthesized)
ttcgagaccagactgggaaacatggcaaaatcccatctctacaacaaaaatacaaaaattagccaagtgcggtggtgtgcctgtagtcctagttacttgggaggctgaggtgggagaatc

SEQ ID NO: 325229 - DNA, 120 bp, Artificial Sequence
  ENSG00000136048_22 (sequence is synthesized)
catttctgggttcactgcgactcactgtagtgctggggatcccccttgtaacactggaactgaaagacagtgatgaaagctatgtcaagcattcattattctgaagaggaggagaaatgc

SEQ ID NO: 325230 - DNA, 120 bp, Artificial Sequence
  ENSG00000136048_23 (sequence is synthesized)
cacatacctttcccatgggacctgtggtggaatgaatccatacttctgcctcacttcgagcagacttttgttctcggcgctcctcacgatggagtttcatgcttcattttcacatctctc

SEQ ID NO: 325231 - DNA, 120 bp, Artificial Sequence
  ENSG00000136048_24 (sequence is synthesized)
tgcacaattagattgggagctccttgagggcagagtacgtgccttaatctttatctttgtaatgccacaatgaacagagtgcctcctggtacactgtaggagcttaagaaatactcactg

SEQ ID NO: 325232 - DNA, 120 bp, Artificial Sequence
  ENSG00000136048_25 (sequence is synthesized)
aatgcatgaatgaatgaatgaacaaatgaaggaatgactaaggatgtttgtagtgctataatatagaatgggatttactctgctttaccagttagtttcataataaacaaatagtctgta

SEQ ID NO: 325233 - DNA, 67 bp, Artificial Sequence
  ENSG00000136048_26 (sequence is synthesized)
gccgtgctctccgggcacgtcaaccccttcctcccgtatatcagttattttttgagatgaagcctca

SEQ ID NO: 325234 - DNA, 120 bp, Artificial Sequence
  ENSG00000136048_27 (sequence is synthesized)
ccacatacggatggtcatctctgccgtttcttgcgcagctgtcatccccatgattgtctgtgcttcactaatttccataaccaagctggagtggaatccaagagaaaaggtaatacagga

SEQ ID NO: 325235 - DNA, 120 bp, Artificial Sequence
  ENSG00000136048_28 (sequence is synthesized)
ctaataaatatagtcaagtgctgcataatgttttggtcaacatcccctaagattataaaaccatatttgactgcaccttttctacatttagatacacaaataccactgtgttacaactgc

SEQ ID NO: 325236 - DNA, 120 bp, Artificial Sequence
  ENSG00000136048_29 (sequence is synthesized)
ctacagtattcagtacagtgacatgctgtgcaggtttgtagcctagaagcaataggtttgtgtaagtacacttgttatgaaatccacaatgtttgtacaataaaaccgcctaatgacgca

SEQ ID NO: 325237 - DNA, 120 bp, Artificial Sequence
  ENSG00000136048_30 (sequence is synthesized)
ggtataatctggagctttttcagttatgaggagtggtggagtgtatgtgtctgaagagagcagcagaaatgcaagaggcacacttatgccattatagccattaaatgcttgatgagttta

SEQ ID NO: 325238 - DNA, 120 bp, Artificial Sequence
  ENSG00000136048_31 (sequence is synthesized)
tcctttggttgaaactcctcattgtatttcagtatgtacattaaagtgagtctttttcggctaaattctgtttctttattattgcattaggattatgtatatcacgtagtgagtgcgatc

SEQ ID NO: 325239 - DNA, 120 bp, Artificial Sequence
  ENSG00000136051_0 (sequence is synthesized)
aagtcacgtgctgtgacagtagctggggtgaggccgtcgtcgccgcacgggctggttggggctgtgtctgtgggaggcgccggggtgatggcggtggagactctgtccccggactgggag

SEQ ID NO: 325240 - DNA, 120 bp, Artificial Sequence
  ENSG00000136051_1 (sequence is synthesized)
tttgaccgcgttgacgacggctcgcagaaaattcatgccgaagtccaacttaagaattatgggaaatttcttgaggagtatacctctcaactgagaagaattgaggacgctctggatgac

SEQ ID NO: 325241 - DNA, 120 bp, Artificial Sequence
  ENSG00000136051_2 (sequence is synthesized)
tcaattggagatgtttgggatttcaatcttgatcctatagcattaaagcttttgccttatgaacagtcctctcttttggaactcataaagactgaaaacaaggtcttaaacaaagtcatc

SEQ ID NO: 325242 - DNA, 120 bp, Artificial Sequence
  ENSG00000136051_3 (sequence is synthesized)
actgtttatgctgcactttgttgtgaaatcaagaaattaaaatatgaggctgaaactaaattttacaatggtctcttgttttatggagaaggagctacagatgccagcatggtggaaggt

SEQ ID NO: 325243 - DNA, 120 bp, Artificial Sequence
  ENSG00000136051_4 (sequence is synthesized)
gattgccaaattcaaatggggagatttatttcattcttacaggaactgtcttgctttgttacgaggtgctatgaagtggtgatgaacgtagtccaccagttggctgccctctatatcagt

SEQ ID NO: 325244 - DNA, 120 bp, Artificial Sequence
  ENSG00000136051_5 (sequence is synthesized)
aacaagattgcacccaaaattatagagacaactggagttcattttcagactatgtatgagcacttgggagaactgctaacagttttgctcaccctggatgaaattattgataatcatatc

SEQ ID NO: 325245 - DNA, 120 bp, Artificial Sequence
  ENSG00000136051_6 (sequence is synthesized)
acactgaaagaccactggactatgtacaaaaggttactgaaatctgtccatcacaatccttcaaaatttggaattcaggaagaaaaattaaagccatttgaaaagttcttgctgaagcta

SEQ ID NO: 325246 - DNA, 120 bp, Artificial Sequence
  ENSG00000136051_7 (sequence is synthesized)
gaagggcaattactggatggaatgatattccaggcctgtatagaacaacaatttgattctctcaatggaggagtatctgtgtcaaaaaatagtacttttgctgaggaatttgcacatagt

SEQ ID NO: 325247 - DNA, 120 bp, Artificial Sequence
  ENSG00000136051_8 (sequence is synthesized)
attcggtcaatttttgcaaatgtagaagccaaacttggagaaccttctgaaattgaccagagagacaagtatgttggaatttgtggactctttgtattgcactttcagatttttcgaact

SEQ ID NO: 325248 - DNA, 120 bp, Artificial Sequence
  ENSG00000136051_9 (sequence is synthesized)
attgataaaaagttttataagtctttattggacatttgtaagaaggtaccagccatcactctaactgctaatattatttggtttcctgataattttctgatccagaaaataccagcagct

SEQ ID NO: 325249 - DNA, 120 bp, Artificial Sequence
  ENSG00000136051_10 (sequence is synthesized)
gccaaactgctagacagaaaaagtcttcaagccattaaaatacacagggatacttttctacaacagaaagctcaatcacttaccaaagatgtacagtcttactacgtctttgtgagctca

SEQ ID NO: 325250 - DNA, 120 bp, Artificial Sequence
  ENSG00000136051_11 (sequence is synthesized)
tggatgatgaaaatggaatctattttgtctaaagagcagagaatggataaatttgctgaagatctcaccaatagatgtaatgtttttatacagggcttcttgtatgcatatagtattagt

SEQ ID NO: 325251 - DNA, 120 bp, Artificial Sequence
  ENSG00000136051_12 (sequence is synthesized)
accattattaaaaccacaatgaatctctacatgtccatgcaaaagccaatgaccaaaacctcagttaaggcattgtgcaggcttgttgaacttctcaaggcaatagagcatatgttctac

SEQ ID NO: 325252 - DNA, 120 bp, Artificial Sequence
  ENSG00000136051_13 (sequence is synthesized)
aggagaagcatggttgtggctgattcagtttcacatataacacagcaccttcaacatcaggctcttcattctatttctgtggccaagaaaagagtgatttctgacaaaaaatacagcgaa

SEQ ID NO: 325253 - DNA, 120 bp, Artificial Sequence
  ENSG00000136051_14 (sequence is synthesized)
cagcgtcttgatgtgctctctgctctagttttggctgaaaacactctaaatggaccaagcacaaagcaacggcgacttattgtttctttggcactaagtgttggcacacaaatgaaaaca

SEQ ID NO: 325254 - DNA, 120 bp, Artificial Sequence
  ENSG00000136051_15 (sequence is synthesized)
tttaaagatgaagaactctttccacttcaagtagtcatgaaaaaactggatcttattagtgaacttagagaacgagtccaaacacaatgtgactgttgttttttatactggcatcgagct

SEQ ID NO: 325255 - DNA, 120 bp, Artificial Sequence
  ENSG00000136051_16 (sequence is synthesized)
gtcttcccaatttatttagatgatgtatatgaaaatgctgttgatgcagccagattacattacatgttcagtgctttgcgcgactgtgtacctgctatgatgcatgcaaggcatttagag

SEQ ID NO: 325256 - DNA, 120 bp, Artificial Sequence
  ENSG00000136051_17 (sequence is synthesized)
tcctatgagatacttctggattgctatgacaaggaaattatggaaattttaaatgagcatttgctggacaaattatgcaaagaaatagagaaagatctgcgactttctgtgcatactcat

SEQ ID NO: 325257 - DNA, 120 bp, Artificial Sequence
  ENSG00000136051_18 (sequence is synthesized)
ttaaagctggatgaccgaaaccctttcaaagttggcatgaaagacctggctctttttttctctctgaatccaattcggtttttcaatcgtttcattgacattcgggcttacgtaactcac

SEQ ID NO: 325258 - DNA, 120 bp, Artificial Sequence
  ENSG00000136051_19 (sequence is synthesized)
tacctagacaagactttctacaatctaacaactgtagcccttcatgactgggccacttatagtgagatgagaaacttagctactcagcgttatggactggttatgacagaggcacatctt

SEQ ID NO: 325259 - DNA, 120 bp, Artificial Sequence
  ENSG00000136051_20 (sequence is synthesized)
cccagtcagactttggaacagggccttgatgttttagaaattatgagaaacattcatatatttgtgtcccgatacctctataatctcaacaatcagatttttattgaacgaacaagcaat

SEQ ID NO: 325260 - DNA, 120 bp, Artificial Sequence
  ENSG00000136051_21 (sequence is synthesized)
aacaagcatttgaatactattaatattcggcatattgctaattcaattcgaacacatggcacgggaattatgaatacaactgttaatttcacctaccagtttttgaaaaagaagttctat

SEQ ID NO: 325261 - DNA, 120 bp, Artificial Sequence
  ENSG00000136051_22 (sequence is synthesized)
atatttagccaatttatgtatgatgaacacatcaaatccagattgattaaagatattcgatttttcagggaaattaaggaccaaaatgatcataagtatccttttgatagagcagaaaaa

SEQ ID NO: 325262 - DNA, 120 bp, Artificial Sequence
  ENSG00000136051_23 (sequence is synthesized)
ttcaatcgaggcatcagaaaacttggagtaacacctgagggacagagctaccttgatcaattcaggcaactcatcagccagattggtaatgctatgggctatgtacgaatgataagatct

SEQ ID NO: 325263 - DNA, 120 bp, Artificial Sequence
  ENSG00000136051_24 (sequence is synthesized)
atattgtaaattttgaagaactagtaaaagaagaaggtcttgcagaagaaacattaaaagcagcaaggcatttggattcagtcctcagtgatcacacacgaaattctgccgaaggcacag

SEQ ID NO: 325264 - DNA, 120 bp, Artificial Sequence
  ENSG00000136051_25 (sequence is synthesized)
aatatttcaaaatgcttgtagacgtttttgctccagaatttcgaaggccaaagaatatacatctccgaaatttctatataattgttccccctctgaccctcaactttgtagagcattcca

SEQ ID NO: 325265 - DNA, 120 bp, Artificial Sequence
  ENSG00000136051_26 (sequence is synthesized)
ttagttgcaaggaaaaattaaataaaaaaaataaaattggagctgcctttactgatgatggctttgccatgggtgtggcttacattctaaagcttttggatcagtatcgggagtttgatt

SEQ ID NO: 325266 - DNA, 120 bp, Artificial Sequence
  ENSG00000136051_27 (sequence is synthesized)
cacttcactggttccagtctgttagagagaaatacctgaaggagataagagcagttgctaagcaacagaatgtacagtcagccagtcaagatgaaaaactcttacaaaccatgaatctca

SEQ ID NO: 325267 - DNA, 120 bp, Artificial Sequence
  ENSG00000136051_28 (sequence is synthesized)
ctcagaagcgactggatgtctatctacaggaatttgaattgctgtatttctcactgagcagtgcaagaattttcttcagagcagacaagactgcggctgaagaaaaccaagaaaagaaag

SEQ ID NO: 325268 - DNA, 120 bp, Artificial Sequence
  ENSG00000136051_29 (sequence is synthesized)
agaaggaagaagaaactaaaacaagcaatggagacctgtctgacagcactgtgtctgctgatcctgttgtgaaatgatacggatggtattcactgcacatatgatgaaatcatcagaatt

SEQ ID NO: 325269 - DNA, 120 bp, Artificial Sequence
  ENSG00000136051_30 (sequence is synthesized)
gttaaaacttttgccagtggaatggataaactattgatgaattgtttcctgggtcacatctctggaaaatagatgttacagttcttaaaggcagtgctttaaagtgaagttcattctgtt

SEQ ID NO: 325270 - DNA, 120 bp, Artificial Sequence
  ENSG00000136051_31 (sequence is synthesized)
tccaaaggctctactttcaaaggttaagaatgagattttaaaattggatttttgcctggacttgagggtacaagatgtttctatttgaagtgaagttataaaagggcaaatccagattca

SEQ ID NO: 325271 - DNA, 120 bp, Artificial Sequence
  ENSG00000136051_32 (sequence is synthesized)
taaactatcacctcggatttcttgtaatctacatgtttgtaatttgtatttgcatagatctttgatctatagttatttcaagtcatgggaaattcaatgcatatactatatacagccagt

SEQ ID NO: 325272 - DNA, 120 bp, Artificial Sequence
  ENSG00000136051_33 (sequence is synthesized)
aaatacatgcttaacaaaaggaatgagcctgaagttcataaagaatacatatcaatattcttataaaaggaatatatgaagatggctttgatactagaggtgaggcacaagtgttttatg

SEQ ID NO: 325273 - DNA, 120 bp, Artificial Sequence
  ENSG00000136051_34 (sequence is synthesized)
tactctcagtgtacagtataactgatgatccttctttcattgttaatttcatgtgactcacaagagctgctgatgtctttgatgagacattttataactagtttacattgctttgagaac

SEQ ID NO: 325274 - DNA, 120 bp, Artificial Sequence
  ENSG00000136051_35 (sequence is synthesized)
atttaacctccaacagctgctttaaatttaagatttacttaatactcagaaaattcagataaagccatagagtcctgtttgaagcttcacttctattttggttgaaggcatgatgtatga

SEQ ID NO: 325275 - DNA, 120 bp, Artificial Sequence
  ENSG00000136051_36 (sequence is synthesized)
tgtcagaaaaaaaattgaatgaattatttctacatccaaactcaggtttcttctacattagattgaattgaaattttggtgatggtttgggtagactttttttttatatcaagtataatt

SEQ ID NO: 325276 - DNA, 120 bp, Artificial Sequence
  ENSG00000136051_37 (sequence is synthesized)
taaaacatcagattaaataattacactgttcaggcttttaaaaaaataccactgtgagaataaagcgctagcaagatacatcacttactgattttaaaaatacagaaagattttgagtaa

SEQ ID NO: 325277 - DNA, 120 bp, Artificial Sequence
  ENSG00000136051_38 (sequence is synthesized)
attttgtgcccagcaagctgttagttttatttttgtaaaggtatgtaagttattaaatggttaatcatggccttttaaaaataaaataaagtgatacctttacaatgaagacaaaagttt

SEQ ID NO: 325278 - DNA, 120 bp, Artificial Sequence
  ENSG00000136051_39 (sequence is synthesized)
aaaactttctaatacaaacaccattttgggaaatgcttgatttttttctattgcatttgtctgctaaacatttctttggataaatcctgcaaatacttctaacattattctttgattcca

SEQ ID NO: 325279 - DNA, 120 bp, Artificial Sequence
  ENSG00000136051_40 (sequence is synthesized)
gcttttagaatgggtgtacaatgccctgtttgtacttactggttagggtcagggtaacttgccagcccaagataaatactttaattgttaaaagtcagaagagacagaatatgtaggaaa

SEQ ID NO: 325280 - DNA, 120 bp, Artificial Sequence
  ENSG00000136051_41 (sequence is synthesized)
tgttttttgtttattatgtaaacatggcttacagaattatgaacagtggatagattaaaggcatttaatatttgtaattcataataactgtagaaatggccctaaagcatgctgcataat

SEQ ID NO: 325281 - DNA, 120 bp, Artificial Sequence
  ENSG00000136051_42 (sequence is synthesized)
taataatttatattttcattattataagtgtttatattaatgatcttgcatttgattatatcaaattcgtcatttcatagcaacagtattgttttctctgtttttcttctctaacttctc

SEQ ID NO: 325282 - DNA, 120 bp, Artificial Sequence
  ENSG00000136051_43 (sequence is synthesized)
tgaaatcatctcctattaagggatagaaattgttactagaagagaatcacatgttctgtgttcattatccctacacatgtaaattaattattttatcaatactagatagagttcacatgc

SEQ ID NO: 325283 - DNA, 120 bp, Artificial Sequence
  ENSG00000136051_44 (sequence is synthesized)
tgactccctggatacctacagttgagaagaaaatgacagacaattatttttcctttaggtcaaaataatgtcactgctatctggataaattataagttcatatatttgaaataagatcct

SEQ ID NO: 325284 - DNA, 120 bp, Artificial Sequence
  ENSG00000136051_45 (sequence is synthesized)
ggaaacgaatttaaatggtgtcaaactgcagagcaacagggcttcagtatattcacatctaataggttaatatgtacatttggatgatgatttttcttgataacattaacattaatttta

SEQ ID NO: 325285 - DNA, 120 bp, Artificial Sequence
  ENSG00000136051_46 (sequence is synthesized)
ttttttcagacatactgtaatttaaaaattaatgtgagcgtttgttttaagttcacagaaaacttaataattcaaattctcaggaattaaggactcaccataacattgtcagttctaatg

SEQ ID NO: 325286 - DNA, 120 bp, Artificial Sequence
  ENSG00000136051_47 (sequence is synthesized)
aaattttgtaaaagatggcaagtttgttacctcacttgagtggggttttccttttcccccaattctaagagaatataatgtgtatactaaaacattaataaacataattttgaaaatttc

SEQ ID NO: 325287 - DNA, 120 bp, Artificial Sequence
  ENSG00000136051_48 (sequence is synthesized)
gttatatataagtatgtatgtttatattttaagtgtagaaatatgtaacagttttactttttatgataagaactgaagtaaaatatagcaaaatattttggttcttaggagtggaaacct

SEQ ID NO: 325288 - DNA, 120 bp, Artificial Sequence
  ENSG00000136051_49 (sequence is synthesized)
gagtggaaaccttgtaatttactactgtatgtaactatattcctattagaatttagagttatttatataaatatctgatttttttgtgtggtttttaaggtaatgctatgggctatgtac

SEQ ID NO: 325289 - DNA, 120 bp, Artificial Sequence
  ENSG00000136051_50 (sequence is synthesized)
agagctgtaggaactcctacggtggcgacagagagggaaacaggcttgttggaagaagcgcctggtcagcgttatcctcgaggatcatgccttcctgttaattccccaccccatcaattc

SEQ ID NO: 325290 - DNA, 120 bp, Artificial Sequence
  ENSG00000136051_51 (sequence is synthesized)
cccgtttaatagcttggaacgtggttttctcatagaatattgcggtaaacatacactactagtttatattttacatgaatttccattttttttctggttagtaattaaaatgtctggtcc

SEQ ID NO: 325291 - DNA, 120 bp, Artificial Sequence
  ENSG00000136051_52 (sequence is synthesized)
taaaattgtgttggatgtgatgggagctgtgatacaaaagacactttagggtagattaccatctcagagccatcattataaatagtgctagatatttgaggacatcagcacattaatata

SEQ ID NO: 325292 - DNA, 120 bp, Artificial Sequence
  ENSG00000136051_53 (sequence is synthesized)
tgtgtgtgcacacatatatatatgtttatctgtgttgatctgtgatccctgaaagtttacttttgaaagtcaacaatagatagtaatttacttaatgttatttatgccctttttggggca

SEQ ID NO: 325293 - DNA, 120 bp, Artificial Sequence
  ENSG00000136051_54 (sequence is synthesized)
attcggggtgagtgttttgctttccttcttagagtcatattctcttttttttttttttttaccctactgttaaacaaaactttgagggtatatttaaattttgtgttgttattctttaat

SEQ ID NO: 325294 - DNA, 120 bp, Artificial Sequence
  ENSG00000136051_55 (sequence is synthesized)
ccttttgatagagcagaaaaattcaatcgaggcatcagaaaacttggagtaacacctgagggacagagctaccttgatcaattcaggcaactcatcagccagattggacatgttggctct

SEQ ID NO: 325295 - DNA, 120 bp, Artificial Sequence
  ENSG00000136051_56 (sequence is synthesized)
ggaggcgccggggtgatggcggtggagactctgtccccggactgggagtttgaccgcgttgacgacggctcgcagacttttgccttatgaacagtcctctcttttggaactcataaagac

SEQ ID NO: 325296 - DNA, 120 bp, Artificial Sequence
  ENSG00000136051_57 (sequence is synthesized)
agaaactaccattttcacaagtgagatgaatagtggcaaaaagattatattttaaaatgagtgctatttggaagccatttgactcacatcttaaaaatgggcgggttacttatttcagtt

SEQ ID NO: 325297 - DNA, 120 bp, Artificial Sequence
  ENSG00000136051_58 (sequence is synthesized)
tctgtatttatgatttccactagagcttttaaaaataataataagaggcataaaaatgcatatatttttggtattttgccataataagtatttttggtttttatttcaaatttttaaatt

SEQ ID NO: 325298 - DNA, 120 bp, Artificial Sequence
  ENSG00000136052_0 (sequence is synthesized)
gtggaaatattttctacacaatgaagtcaacaacttaatttaaaccagtgtttgtgcggttctgattcatctgctgtggttcccgaagcttgagatctaaggagtacagggtcttttgtg

SEQ ID NO: 325299 - DNA, 120 bp, Artificial Sequence
  ENSG00000136052_1 (sequence is synthesized)
atgacaatatgactaatagtaaaggaagatctattaccgataaaacaagtggtggtccaagtagtggaggaggttttgtagattggactttacgtttaaacacaattcaatccgacaagt

SEQ ID NO: 325300 - DNA, 120 bp, Artificial Sequence
  ENSG00000136052_2 (sequence is synthesized)
ttttaaatttactcttgagtatggttccagtgatttaccagaaaaaccaagaagacaggcacaaaaaagcaaacggcatttggcaagatggattatcaactgcagtacagacttttagta

SEQ ID NO: 325301 - DNA, 120 bp, Artificial Sequence
  ENSG00000136052_3 (sequence is synthesized)
atagatctgagcaacacatggagtatcacagtttctcagagcagtcttttcatgccaataatgggcacgcatcatcaagctgcagccaaaagtatgatgactatgccaattataattact

SEQ ID NO: 325302 - DNA, 120 bp, Artificial Sequence
  ENSG00000136052_4 (sequence is synthesized)
gtgatggaagggagacttcagaaaccactgccatgttacaagatgaagatatatctagtgatggtgatgaagatgctattgtagaagtgaccccaaaattaccaaaggaatccagtggca

SEQ ID NO: 325303 - DNA, 120 bp, Artificial Sequence
  ENSG00000136052_5 (sequence is synthesized)
tcatggcattgcaaatacttgtgccctttttgctagctggttttggaacagtttcagctggcatggtactggatatagtacagcactgggaggtgttcagaaaagttacagaagttttca

SEQ ID NO: 325304 - DNA, 120 bp, Artificial Sequence
  ENSG00000136052_6 (sequence is synthesized)
ttttagtccctgcacttcttggtctcaaagggaacttggaaatgacattggcatccagattatccactgcagtaaatattgggaagatggattcacccattgaaaagtggaacctaataa

SEQ ID NO: 325305 - DNA, 120 bp, Artificial Sequence
  ENSG00000136052_7 (sequence is synthesized)
ttggcaacttggctttaaagcaggttcaggcaacagtagtgggttttctagcagctgtggcagcaattatattgggctggattccagaaggaaaatattaccttgatcattccatacttc

SEQ ID NO: 325306 - DNA, 120 bp, Artificial Sequence
  ENSG00000136052_8 (sequence is synthesized)
tgtgctctagcagtgtggcaactgccttcattgcatctcttctgcagggaataataatggttggggttatcgttggttcaaagaagactggtataaatcctgataatgttgctacaccca

SEQ ID NO: 325307 - DNA, 120 bp, Artificial Sequence
  ENSG00000136052_9 (sequence is synthesized)
ttgctgctagttttggcgaccttataactcttgccatattggcttggataagtcagggcttatactcctgtcttgagacctattactacatttctccattagttggtgtatttttcttgg

SEQ ID NO: 325308 - DNA, 120 bp, Artificial Sequence
  ENSG00000136052_10 (sequence is synthesized)
ctctaacccctatttggattataatagctgccaaacatccagccacaagaacagttctccactcaggctgggagcctgtcataacagctatggttataagtagcattgggggccttattc

SEQ ID NO: 325309 - DNA, 120 bp, Artificial Sequence
  ENSG00000136052_11 (sequence is synthesized)
tggacacaactgtatcagacccaaacttggttgggattgttgtttacacgccagttattaatggtattggtggtaatttggtggccattcaggctagcaggatttctacctacctccatt

SEQ ID NO: 325310 - DNA, 120 bp, Artificial Sequence
  ENSG00000136052_12 (sequence is synthesized)
tacatagcattccaggagaattgcctgatgaacccaaaggttgttactacccatttagaactttctttggtccaggagtaaataataagtctgctcaagttctactgcttttagtgattc

SEQ ID NO: 325311 - DNA, 120 bp, Artificial Sequence
  ENSG00000136052_13 (sequence is synthesized)
ctggacatttaattttcctctacactattcatttgatgaaaagtggtcatacttctttaactataatcttcatagtagtgtatttatttggcgctgtgttacaggtatttaccttgctgt

SEQ ID NO: 325312 - DNA, 120 bp, Artificial Sequence
  ENSG00000136052_14 (sequence is synthesized)
ggattgctgactggatggtccatcacttctggaggaaaggaaaggacccggatagtttctccatcccctacctaacagcattgggtgatctgctcgggacagctctgttagccttaagtt

SEQ ID NO: 325313 - DNA, 120 bp, Artificial Sequence
  ENSG00000136052_15 (sequence is synthesized)
ttcattttctttggcttattggagatcgagatggagatgttggagactaataaattctacaaactgctctcaagttaccaaggaagaaaatacacgacaaccacttatggctctttttca

SEQ ID NO: 325314 - DNA, 120 bp, Artificial Sequence
  ENSG00000136052_16 (sequence is synthesized)
aaactcttaaatcagtagtttgacttttgccagggtaatcttcagttggccctgattcaattaaatggccttaatttttttttaaggaatttgtgtcaaaaccagaatgaagagtattcg

SEQ ID NO: 325315 - DNA, 120 bp, Artificial Sequence
  ENSG00000136052_17 (sequence is synthesized)
tgctgcttttcatagaataaatgataatttgacatagacatagatataagttccagctctgaaattaattaggaaagaatataggatgtttacagtgaataattttaaaaccacaaacat

SEQ ID NO: 325316 - DNA, 120 bp, Artificial Sequence
  ENSG00000136052_18 (sequence is synthesized)
gtactttattattaaatttgtaatgcaggattagaagaagcagagctctagtttagcctttcttgtctcacagatgtgctgtatcccaggcatactataaaacgaagagtgcccaaccaa

SEQ ID NO: 325317 - DNA, 120 bp, Artificial Sequence
  ENSG00000136052_19 (sequence is synthesized)
gctttgaatcgtattaacaatgcccacctctatgctagctgaggataaatttaccagttgctcatatttaaactgacctaaatatgttttgctgagcataagataaactcacttttacct

SEQ ID NO: 325318 - DNA, 120 bp, Artificial Sequence
  ENSG00000136052_20 (sequence is synthesized)
ccatctaaaattatcctgttctgatgccaattcaatttcagctctgcaagttcttgtcaggctaatctttaaacattgagtgatcttgagagattgttaatgaaagcagtgagtcatttt

SEQ ID NO: 325319 - DNA, 120 bp, Artificial Sequence
  ENSG00000136052_21 (sequence is synthesized)
ttgatgattgatttgttggaaaaatgttgatgtgttttaaaaaatgtaatcttcaaaaacagaatataacctgagatgcatttgtagagacaagacggtacgagaatgtgtgtgtgtgtg

SEQ ID NO: 325320 - DNA, 120 bp, Artificial Sequence
  ENSG00000136052_22 (sequence is synthesized)
tgtgtgagagagagagacttttgatgaagaactaaatcttggattgctgatagcaaagatcatagtgctgttggaatatcagcaatatagagttattcttaaacacattctattaacatg

SEQ ID NO: 325321 - DNA, 120 bp, Artificial Sequence
  ENSG00000136052_23 (sequence is synthesized)
agcaatatagagttattcttaaacacattctattaacatgtttttgtcattgggtccaaaaattttgctgctgaccagaatttactatttgttacctatattcttttttttttttttttt

SEQ ID NO: 325322 - DNA, 120 bp, Artificial Sequence
  ENSG00000136052_24 (sequence is synthesized)
tacctacactctaattaataattaataatttcttattttaaaaagtagtactatttaatataatcaagataggagatttaaaatgagcaagtgattcatttgctcttttaaagaagcccg

SEQ ID NO: 325323 - DNA, 120 bp, Artificial Sequence
  ENSG00000136052_25 (sequence is synthesized)
cccgttgacttacgcttttaaaaaagaagttggtgggttacctcaattattgttcatgcttaaacatatccatttgtacaggcttatttctacgtgggacccaatcatatatactatatt

SEQ ID NO: 325324 - DNA, 120 bp, Artificial Sequence
  ENSG00000136052_26 (sequence is synthesized)
tctcaaataatttttctaaaactctggcctatattctaaacacttgaccaacaccttagttattgaataggtaaccatttttaaagtacatgtggttcattttttaaaattcaatctctc

SEQ ID NO: 325325 - DNA, 120 bp, Artificial Sequence
  ENSG00000136052_27 (sequence is synthesized)
aagaccgttagatatttaataatttaagctgataagggtatcaaaatgcacattaactttgatcatcatgatttaagttgtaactttgtgttattatataaatattaggttgtttataaa

SEQ ID NO: 325326 - DNA, 120 bp, Artificial Sequence
  ENSG00000136052_28 (sequence is synthesized)
tatattgcagaaagtattcttgttaagctcttttaaatgaggggactgtggtttagagttatatatttttgcttatttttaaacttcaattattccattcttctgccttataataaaact

SEQ ID NO: 325327 - DNA, 120 bp, Artificial Sequence
  ENSG00000136052_29 (sequence is synthesized)
tttaaggcagagaactgaactaattatagaatttctcctttggagagttataatgttacatagtgaacattcttataaaagaaagaataagtttaagttgatgaatatttagctgcaaag

SEQ ID NO: 325328 - DNA, 120 bp, Artificial Sequence
  ENSG00000136052_30 (sequence is synthesized)
attttttacttaaaaaaatccatgaatatctttgattttattataaagcatttgtaaattatttgcatttgagctgtaagattcataaacatttacatttcccaatgatttctattttga

SEQ ID NO: 325329 - DNA, 120 bp, Artificial Sequence
  ENSG00000136052_31 (sequence is synthesized)
tttttaaaaaatatacagggcaagctacatttttaaagcattaatcaacaactttattatattacacattccagtgcacaaacacacaatatcatttaatactcacagtagtacctgtga

SEQ ID NO: 325330 - DNA, 120 bp, Artificial Sequence
  ENSG00000136052_32 (sequence is synthesized)
aatatatcagatggatattcctatctctattttacagcagaggaaaccgaaattcagagaacttacatttctaaggttgtacagctgcaaaatgaccaaattgtgaagtccctaacatcc

SEQ ID NO: 325331 - DNA, 120 bp, Artificial Sequence
  ENSG00000136052_33 (sequence is synthesized)
aggttttcataatgccagtactctttctatgacatgtttatgaccctccaaatgtaccaaaactacctaactaattcactgagaggaagccaactgcaaaaataggatttttaaaagtac

SEQ ID NO: 325332 - DNA, 120 bp, Artificial Sequence
  ENSG00000136052_34 (sequence is synthesized)
aatagagtattactacattttatggatttcagacaaagaaacctccgtttattatatcctgatggtgagtattgccagctctaaattattcatatttctaagaccaaggaaaatataggt

SEQ ID NO: 325333 - DNA, 120 bp, Artificial Sequence
  ENSG00000136052_35 (sequence is synthesized)
aaatgaaaattttgaaataaagaacaatgccttaatttgtaaaatctatcattgctaccaccctgcccaggtctggccatttgccataaatgctggtaaataaatacaatgactgataga

SEQ ID NO: 325334 - DNA, 120 bp, Artificial Sequence
  ENSG00000136052_36 (sequence is synthesized)
gcgccgacggccgggctgtcagcttggggccgcagccgcgcgaggaggcgcgggagcaggaaggagctgtgggctgggagccgctgtcctccccgccaccaccggtgccgggcaccagat

SEQ ID NO: 325335 - DNA, 120 bp, Artificial Sequence
  ENSG00000136052_37 (sequence is synthesized)
cgggcaccagatcctcttctcatgtagacggctttcttccaagtggtggtgatgatggtggtggtagaaggagctttgtgaggaggaagacacagtgacagaaagtttcagaattaagtc

SEQ ID NO: 325336 - DNA, 120 bp, Artificial Sequence
  ENSG00000136052_38 (sequence is synthesized)
actatgcgctgctgggccgaaagacacgtggttcggttttaactccagtctgcaagaaacatgacctcagccaaaaagaggccgctggtctgagaagagaaatcatgagtcatggattcg

SEQ ID NO: 325337 - DNA, 120 bp, Artificial Sequence
  ENSG00000136052_39 (sequence is synthesized)
gctgtcagcttggggccgcagccgcgcgaggaggcgcgggagcaggaaggagctgtgggctgggagccgctgtcctccccgccaccaccggtgccgggcaccaggtgaatgccccttcca

SEQ ID NO: 325338 - DNA, 120 bp, Artificial Sequence
  ENSG00000136052_40 (sequence is synthesized)
tcccccgcccctggtgtctcggtctggtctgaggagacggggacccttctcacaccggccgctgccgccgccgcgctccggaacagatccagtccttctgtggaacttctgaacatcttt

SEQ ID NO: 325339 - DNA, 120 bp, Artificial Sequence
  ENSG00000136052_41 (sequence is synthesized)
gctgtcagcttggggccgcagccgcgcgaggaggcgcgggagcaggaaggagctgtgggctgggagccgctgtcctccccgccaccaccggtgccgggcaccagatccagtccttctgtg

SEQ ID NO: 325340 - DNA, 120 bp, Artificial Sequence
  ENSG00000136059_0 (sequence is synthesized)
gagggcgggaagggccctctgtggggctgccattttggctgggacctaaatgcagtaaaggagcagctacgggaatatagagagtggggcttccaggcagagaagcctgcagtgcaaagg

SEQ ID NO: 325341 - DNA, 120 bp, Artificial Sequence
  ENSG00000136059_1 (sequence is synthesized)
tctgcagacaacgacctgggcgtcttcaagggacacaaggaatcatattgccagaacacattgtacaggtagccaggtgtcggtctccagcctgagaactctggctgttgttccttgtgt

SEQ ID NO: 325342 - DNA, 120 bp, Artificial Sequence
  ENSG00000136059_2 (sequence is synthesized)
cgtcccatattcctgcctggcctgcgatggacatcagcaagggcctcccaggcatgcagggaggcctccacatatggatctctgagaaccggaagatggtgccggtacccgagggggctt

SEQ ID NO: 325343 - DNA, 120 bp, Artificial Sequence
  ENSG00000136059_3 (sequence is synthesized)
acgggaacttttttgaggaacactgctatgtcatcctccacgtcccccagagcccgaaggccacgcagggggcgtccagcgacctgcactactgggtcgggaagcaggcgggtgcggaag

SEQ ID NO: 325344 - DNA, 120 bp, Artificial Sequence
  ENSG00000136059_4 (sequence is synthesized)
cgcagggcgctgcggaggccttccagcagcgcctacaggacgagctggggggccagaccgtgctgcaccgcgaggcgcagggccacgagtccgactgcttctgcagctacttccgcccgg

SEQ ID NO: 325345 - DNA, 120 bp, Artificial Sequence
  ENSG00000136059_5 (sequence is synthesized)
gaatcatctacaggaagggaggcctagcatctgacctcaagcatgtggagaccaacttgttcaacatccagcgactgctgcacatcaaagggaggaagcacgtgtctgccactgaggtgg

SEQ ID NO: 325346 - DNA, 120 bp, Artificial Sequence
  ENSG00000136059_6 (sequence is synthesized)
agctctcctggaacagctttaataagggtgacatcttcctgctggacctaggcaagatgatgattcagtggaatgggcccaagaccagcatttctgagaaggctcgggggctggctttga

SEQ ID NO: 325347 - DNA, 120 bp, Artificial Sequence
  ENSG00000136059_7 (sequence is synthesized)
cctacagcctccgggacagggaacgtggtggtggtcgtgcacagattggtgtggtggatgatgaggccaaagccccggacctcatgcagatcatggaggctgtgctgggccgcagggtgg

SEQ ID NO: 325348 - DNA, 120 bp, Artificial Sequence
  ENSG00000136059_8 (sequence is synthesized)
gcagcctgcgtgccgccacgcccagcaaggatatcaaccagctgcagaaggccaatgttcgcctgtaccatgtctatgagaagggcaaagacctggtggtcctggagttggcgacccccc

SEQ ID NO: 325349 - DNA, 120 bp, Artificial Sequence
  ENSG00000136059_9 (sequence is synthesized)
cactgacccaggacctgctgcaggaggaggacttctacatcctggaccagggtggcttcaagatctatgtgtggcagggacgcatgtctagcctccaggagagaaaggctgccttcagcc

SEQ ID NO: 325350 - DNA, 120 bp, Artificial Sequence
  ENSG00000136059_10 (sequence is synthesized)
gggctgtgggcttcatccaggccaagggctacccgacctacaccaacgtggaggtggtgaacgacggcgccgagtcggccgcgttcaagcagctcttccggacttggtctgagaagcggc

SEQ ID NO: 325351 - DNA, 120 bp, Artificial Sequence
  ENSG00000136059_11 (sequence is synthesized)
gcaggaaccagaagctcggcgggagggataaatcgattcatgtaaagctggacgtgggcaagctgcacacccagcctaagttagcggcccagctcaggatggtggacgacggctctggga

SEQ ID NO: 325352 - DNA, 120 bp, Artificial Sequence
  ENSG00000136059_12 (sequence is synthesized)
tgctctacacataccagaggctgggccgtgtccagtacatcctgtacctatggcagggccaccaggccactgcggatgagattgaggccctgaacagcaacgctgaggaactagatgtca

SEQ ID NO: 325353 - DNA, 120 bp, Artificial Sequence
  ENSG00000136059_13 (sequence is synthesized)
tgtatggtggcgtcctagtacaggagcatgtgaccatgggcagcgagcccccccacttcctcgccatcttccagggccagctggtgatcttccaggagagagctgggcaccatggaaagg

SEQ ID NO: 325354 - DNA, 120 bp, Artificial Sequence
  ENSG00000136059_14 (sequence is synthesized)
ggcagtcagcatccaccacaaggcttttccaagtgcaaggcactgacagccacaacaccaggaccatggaggtgccagcccgtgcctcatccctcaactccagtgacatcttcttgctgg

SEQ ID NO: 325355 - DNA, 120 bp, Artificial Sequence
  ENSG00000136059_15 (sequence is synthesized)
tcacagccagcgtctgctacctctggtttgggaagggctgtaatggtgatcagcgtgagatggcacgggtggtggtcactgtcatttccaggaagaatgaggaaacggtgctggagggtc

SEQ ID NO: 325356 - DNA, 120 bp, Artificial Sequence
  ENSG00000136059_16 (sequence is synthesized)
aggagcctccccacttctgggaggccctgggaggccgggccccctaccccagcaacaagaggctccctgaggaggtccccagcttccagccacgactgtttgagtgctccagccacatgg

SEQ ID NO: 325357 - DNA, 120 bp, Artificial Sequence
  ENSG00000136059_17 (sequence is synthesized)
gctgcctggtcctcgcagaagtggggttcttcagccaggaggacctggacaagtatgacatcatgttactggacacctggcaggagatcttcctgtggcttggggaagctgcaagtgagt

SEQ ID NO: 325358 - DNA, 120 bp, Artificial Sequence
  ENSG00000136059_18 (sequence is synthesized)
ggaaggaggcggtggcctggggccaggagtacctgaagactcacccagcagggaggagcccggccacacccatcgtgctggtcaagcagggccatgagcctcccaccttcattggatggt

SEQ ID NO: 325359 - DNA, 120 bp, Artificial Sequence
  ENSG00000136059_19 (sequence is synthesized)
tcttcacttgggacccctacaagtggactagccacccgtcccacaaggaagtggtggatggcagcccggcagcagcatcaaccatctctgagataacagcagaagtcaacaacttgcggc

SEQ ID NO: 325360 - DNA, 120 bp, Artificial Sequence
  ENSG00000136059_20 (sequence is synthesized)
tatccagatggccgggcaatggcagggcaggtgccgtggccctgcaggccctcaagggctcccaggacagctcagagaatgatctggtgcgaagccccaagtcggctggcagcagaacca

SEQ ID NO: 325361 - DNA, 120 bp, Artificial Sequence
  ENSG00000136059_21 (sequence is synthesized)
gcagctccgtcagcagcaccagcgccacgatcaacgggggcctgcgccgggaacaactgatgcaccaggctgttgaggacctgccagagggcgtggaccctgcccgcagggagttctatc

SEQ ID NO: 325362 - DNA, 120 bp, Artificial Sequence
  ENSG00000136059_22 (sequence is synthesized)
tctcagactctgacttccaagatatctttgggaaatccaaggaggaattctacagcatggccacgtggaggcagcggcaggagaaaaagcagctgggcttcttctgaacccaagccctct

SEQ ID NO: 325363 - DNA, 120 bp, Artificial Sequence
  ENSG00000136059_23 (sequence is synthesized)
cgactgcccctatcccctggaccccaacatacctacaatgctggggaggccctgcttccactcccctcagaggcttttggtcatcctctgcgtgtcagtaaaagcaggcagcccatacga

SEQ ID NO: 325364 - DNA, 120 bp, Artificial Sequence
  ENSG00000136059_24 (sequence is synthesized)
cggaagcccctgcctagcgtctccccatggcccttggtacatcctccccttctccacccgcacctccgtcttccccgcaacacatatacacaaacacccggaccctaggtcccccagagc

SEQ ID NO: 325365 - DNA, 120 bp, Artificial Sequence
  ENSG00000136059_25 (sequence is synthesized)
ctggccacagcctgcccagttctgcatgggccatggcccccgcacacacttctaagcaccttctctttgggcctggggcctgcttatcatcccctagtttcccagagcttgtccaaggcc

SEQ ID NO: 325366 - DNA, 120 bp, Artificial Sequence
  ENSG00000136059_26 (sequence is synthesized)
caggagctccaaggttggccccctgcctgagtttccctccccagtcccagagccagatgaggaatttgagttgaaagggagccaggggcttgcctggggctgcacactagcaaacctggt

SEQ ID NO: 325367 - DNA, 120 bp, Artificial Sequence
  ENSG00000136059_27 (sequence is synthesized)
ccccactttccacctccaaggcctgagcacccatgccccaaccactcagagatggggggaaaggtccatttaaaaagggtctgtccctgtcccagactgatgggattcctgcactccaca

SEQ ID NO: 325368 - DNA, 120 bp, Artificial Sequence
  ENSG00000136059_28 (sequence is synthesized)
cttagagggtcctgtactcctcatgtgaaatcaccagtgagggccttgatggcttcaagcaagggtccctgagctctgaggcaatatgtcccacactgggacaggaaggcgcccctggga

SEQ ID NO: 325369 - DNA, 120 bp, Artificial Sequence
  ENSG00000136059_29 (sequence is synthesized)
tcactgccaacacagggcctacctgggatttgaccagagtccgcctggctccaggctctgccacccacaggaagaagaaactacactgacagatgtgagacagtgtttccccttcagtct

SEQ ID NO: 325370 - DNA, 120 bp, Artificial Sequence
  ENSG00000136059_30 (sequence is synthesized)
ttgaacaggctttgtgttttctaaatgacactggataaaagggaattcattcaagagctccaaggcttccctttccgcccggcttctgttgccctggcctgagcagcgagcagctgggag

SEQ ID NO: 325371 - DNA, 120 bp, Artificial Sequence
  ENSG00000136059_31 (sequence is synthesized)
gggactgaactgcccctaaccagggttgtggctggtggggttgggactagggctgggcatgtggctgggattgggcccatctcccaagtgtggtgggtttcaggggtccgtggggaaagg

SEQ ID NO: 325372 - DNA, 120 bp, Artificial Sequence
  ENSG00000136059_32 (sequence is synthesized)
gtcacctgcagatccttgtacaaagcccagcacaaggcccagaatgggcctggagctgagggtgggcccctggcctgcgtggatgaggaaggcctcagaggctggggagagctttccggt

SEQ ID NO: 325373 - DNA, 120 bp, Artificial Sequence
  ENSG00000136059_33 (sequence is synthesized)
tgggtacaggatgggtgggctggttcaggaagagcagccacctgtgcccattggtcccttattccccaggtgtggtgcatccaggacttacacaggcagcccgtggaccccaagcgtcat

SEQ ID NO: 325374 - DNA, 120 bp, Artificial Sequence
  ENSG00000136059_34 (sequence is synthesized)
aaagcccaagggctgggctctgggagtgaaatgtgagagctgggccaggccctcactcactgcccccacctgcagggccaccaggccactgcggatgagattgaggccctgaacagcaac

SEQ ID NO: 325375 - DNA, 120 bp, Artificial Sequence
  ENSG00000136059_35 (sequence is synthesized)
actgaccacttgattcatgcccagatgtagtggtgccaggctgggggtgggtcctctccacagggcatgcagactttgagtccagcctcagataggccgatggggggaatggggagggga

SEQ ID NO: 325376 - DNA, 120 bp, Artificial Sequence
  ENSG00000136059_36 (sequence is synthesized)
agaagccacagggtcccctctagaacttggggaaagttacaaagtgacaggtggacctgagagtccgcaggtcagagccaggcccaggccgcctcccctccttactgcctggagcacagg

SEQ ID NO: 325377 - DNA, 120 bp, Artificial Sequence
  ENSG00000136059_37 (sequence is synthesized)
gcatgtcccttcccaggtctcttgggaaaaggggaggcctatgccagtttgctggagttttctctaatattcagcataaactatgactgaccctctaagcctgggggcctcctatcccat

SEQ ID NO: 325378 - DNA, 120 bp, Artificial Sequence
  ENSG00000136059_38 (sequence is synthesized)
gctctggaccctgcgagggtcccagaccctgcgatccagatcaactggggacacaggcctgtagggtgaggaagatgccttgttcactggtgtcctgctgtcagcttaggcctcctgtga

SEQ ID NO: 325379 - DNA, 120 bp, Artificial Sequence
  ENSG00000136059_39 (sequence is synthesized)
aacaagaggtaacagggttgggaggagagtgttcttacccagaggaggaattgaggcccagagaggagggtgggtgactgggattcacacagagagctggcaagacgagactagaaccaa

SEQ ID NO: 325380 - DNA, 120 bp, Artificial Sequence
  ENSG00000136059_40 (sequence is synthesized)
ggactctcagtttcccactcacagaggctcccacaagtacagcccacgcttcgctcccaggcctgggtaacttgcgtctctcagatgctggggagagtgggggcagtggcgacctctgct

SEQ ID NO: 325381 - DNA, 120 bp, Artificial Sequence
  ENSG00000136059_41 (sequence is synthesized)
ggcagcatcccctccctgcattgtcctggtcctgggccaggggacaaagcacccttccccaccctacagtcctcagggatcacggtgcccagtgtgtgtgtatacagtgtcatatgatgt

SEQ ID NO: 325382 - DNA, 120 bp, Artificial Sequence
  ENSG00000136059_42 (sequence is synthesized)
gtgggtatacagtgtgtgtggatgtgcaagaacaggtgtattcagggtgttgtgtgtggtgtgtaagtggacagggtgtgtgtaggaggtaggagtgaggcctcaaggggaggagggagc

SEQ ID NO: 325383 - DNA, 120 bp, Artificial Sequence
  ENSG00000136059_43 (sequence is synthesized)
tgagtcctggtcgctcttggtctgcctgtggggcttggtttatgtgctgcactccccacaattctcctgagctcagtactcccgtctccttctcccagcctggcttgcctccttccactt

SEQ ID NO: 325384 - DNA, 120 bp, Artificial Sequence
  ENSG00000136059_44 (sequence is synthesized)
tgggccggagacctactctctgccaggggtgggctgaggagctcctcccatcccagggagggcgagactccagctcaggccctcccctacccctgcagccctctcctagggaaattcatg

SEQ ID NO: 325385 - DNA, 120 bp, Artificial Sequence
  ENSG00000136059_45 (sequence is synthesized)
gggcaccttgcgtcacagctgggtggggcgagagctttctccatgagcagagagggaccctgtacccagagcagagcggagtgctcggggagaaaccacggggctcagaggagggcccag

SEQ ID NO: 325386 - DNA, 120 bp, Artificial Sequence
  ENSG00000136059_46 (sequence is synthesized)
ggctcccactcctgagaagtggcttcccaggccctggggtggggcacttgtgccatgggctggggtgcccctctgggtggctcacagccttgctgtccgtgctggccaggctccctgagg

SEQ ID NO: 325387 - DNA, 120 bp, Artificial Sequence
  ENSG00000136059_47 (sequence is synthesized)
tgggaggggctgcagttggaggtaagaggcctgtgggttcagtgcagcctccctgtgggctactgattccccatcttccccagcctgaggctcctctctggacaggaagtcaacaacttg

SEQ ID NO: 325388 - DNA, 120 bp, Artificial Sequence
  ENSG00000136059_48 (sequence is synthesized)
cgcggcgggacctggaatcttggagggatggttgaggagtgggcggggcggagatggtgttgggggggggcagagggcgccactgacgcctactgtccccccttcagataaatcgattca

SEQ ID NO: 325389 - DNA, 120 bp, Artificial Sequence
  ENSG00000136059_49 (sequence is synthesized)
tagggtggcagagcaagaccctgtctcgaaaaaactggaaaaaaaaattgtcaagtgtttatgcctaatctgcccaacccactcatatcagctgagcctgtcacttgctgcagaatctga

SEQ ID NO: 325390 - DNA, 120 bp, Artificial Sequence
  ENSG00000136059_50 (sequence is synthesized)
agttacagtggtggggaccaggagtagggaggcagagactggccccgtgccaggcctagcactgcccacaggcagggcgaaggcgcgggagcagtttccagcagttgtacaggtagccag

SEQ ID NO: 325391 - DNA, 120 bp, Artificial Sequence
  ENSG00000136068_0 (sequence is synthesized)
gcggccaggggcgggcggccgcagagcagcaccggccgtggctccggtagcagcaagttcgaaccccgctcccgctccgcttcggttctcgctccttcggcccttgggcctccaaacacc

SEQ ID NO: 325392 - DNA, 120 bp, Artificial Sequence
  ENSG00000136068_1 (sequence is synthesized)
agtccccggcagctcgttgcgcattgcgctctccccgccaccaggatgccggtaaccgagaaggatctagctgaggacgcgccttggaagaagatccagcagaacacgttcacacgctgg

SEQ ID NO: 325393 - DNA, 120 bp, Artificial Sequence
  ENSG00000136068_2 (sequence is synthesized)
tgcaacgagcacctcaagtgcgtgaacaaacgcatcggcaacctgcagaccgacctgagcgacgggctgcggctcatcgcgctgctcgaggtgctcagccagaagcgcatgtaccgcaag

SEQ ID NO: 325394 - DNA, 120 bp, Artificial Sequence
  ENSG00000136068_3 (sequence is synthesized)
taccatcagcggcccacctttcgccagatgcagctcgagaatgtgtccgtggcgctcgagttcctggaccgtgagagcatcaagctcgtgtccatcgatagcaaagccattgtggatggg

SEQ ID NO: 325395 - DNA, 120 bp, Artificial Sequence
  ENSG00000136068_4 (sequence is synthesized)
aacctgaagctcatcttgggtctggtgtggacgctgatcctccactactccatctccatgcccgtgtgggaggatgaaggggatgatgatgccaagaagcagacgccaaagcagaggctg

SEQ ID NO: 325396 - DNA, 120 bp, Artificial Sequence
  ENSG00000136068_5 (sequence is synthesized)
ctggggtggattcagaacaagatcccctacttgcccatcaccaactttaaccagaactggcaagacggcaaagccctgggagccctggtagacagctgtgctccaggtctgtgcccagac

SEQ ID NO: 325397 - DNA, 120 bp, Artificial Sequence
  ENSG00000136068_6 (sequence is synthesized)
tgggaatcctgggacccgcagaagcctgtggataatgcacgagaagccatgcagcaggcagatgactggctgggtgtcccacaggtcatcactcctgaagaaatcattcacccggatgtg

SEQ ID NO: 325398 - DNA, 120 bp, Artificial Sequence
  ENSG00000136068_7 (sequence is synthesized)
gacgagcactcagttatgacttacctgtcccagttccccaaagccaagctcaagccgggggctcctctcaaacccaaactcaacccgaagaaagccagggcctatggcagaggaatcgag

SEQ ID NO: 325399 - DNA, 120 bp, Artificial Sequence
  ENSG00000136068_8 (sequence is synthesized)
cccactggaaacatggtgaagcagccagccaagttcactgtggacaccatcagcgccgggcaaggagacgtgatggtgtttgttgaggacccagaagggaacaaagaggaggcacaagtg

SEQ ID NO: 325400 - DNA, 120 bp, Artificial Sequence
  ENSG00000136068_9 (sequence is synthesized)
acccctgacagtgacaagaacaagacatactctgtggagtatctgcccaaggtcaccgggctacacaaagtcacagtcctctttgcaggacagcacatctccaagagcccatttgaagtg

SEQ ID NO: 325401 - DNA, 120 bp, Artificial Sequence
  ENSG00000136068_10 (sequence is synthesized)
agtgttgacaaggcccagggagatgccagtaaagtcactgcaaaaggtccagggttggaagctgtagggaacatcgccaataagcccacctactttgacatctatacggcaggagctggt

SEQ ID NO: 325402 - DNA, 120 bp, Artificial Sequence
  ENSG00000136068_11 (sequence is synthesized)
gtgggtgacattggtgtggaggtggaagatccccaggggaagaacaccgtggagttgctcgtggaagacaaaggaaaccaggtgtatcgatgtgtgtacaaacccatgcagcctggccct

SEQ ID NO: 325403 - DNA, 120 bp, Artificial Sequence
  ENSG00000136068_12 (sequence is synthesized)
cacgtggtcaagatcttctttgctggggacactattcctaagagtcccttcgttgtgcaggttggggaagcctgcaatccaaatgcctgccgggccagtggccgaggcctacaacccaaa

SEQ ID NO: 325404 - DNA, 120 bp, Artificial Sequence
  ENSG00000136068_13 (sequence is synthesized)
ggcgtccgtatccgggagaccacagatttcaaggttgacaccaaagctgcaggaagtggggagctcggtgtaaccatgaagggtcctaagggtctggaggagctggtgaagcagaaagac

SEQ ID NO: 325405 - DNA, 120 bp, Artificial Sequence
  ENSG00000136068_14 (sequence is synthesized)
tttctggatggggtctacgcattcgagtattaccccagcaccccggggagatacagcattgccatcacatgggggggacaccacattccaaagagcccctttgaagttcaagttggccct

SEQ ID NO: 325406 - DNA, 120 bp, Artificial Sequence
  ENSG00000136068_15 (sequence is synthesized)
gaagcgggtatgcagaaagtccgtgcttggggccctgggctccatggtgggattgtcgggcggtcagcggacttcgtggtagaatccattggctctgaagtggggtctctggggtttgcc

SEQ ID NO: 325407 - DNA, 120 bp, Artificial Sequence
  ENSG00000136068_16 (sequence is synthesized)
attgaaggcccctctcaggcaaagattgagtacaacgaccagaatgatggatcgtgtgatgtcaaatactggcccaaggagcctggcgaatatgctgttcacatcatgtgtgacgacgaa

SEQ ID NO: 325408 - DNA, 120 bp, Artificial Sequence
  ENSG00000136068_17 (sequence is synthesized)
gacatcaaggacagcccgtacatggccttcatccacccagccacgggaggctacaaccctgatctggttcgagcatacgggccaggtttggagaaatctggatgcattgtcaacaacctg

SEQ ID NO: 325409 - DNA, 120 bp, Artificial Sequence
  ENSG00000136068_18 (sequence is synthesized)
gccgagttcactgtggatcctaaggatgctggaaaagctcccttaaagatatttgctcaggatggggaaggccaacgcattgacatccagatgaagaaccggatggacggcacatatgca

SEQ ID NO: 325410 - DNA, 120 bp, Artificial Sequence
  ENSG00000136068_19 (sequence is synthesized)
tgctcatacaccccggtgaaggccatcaagcacaccattgctgtggtctggggaggcgtgaacatcccgcacagcccctacagggtcaacatcgggcaaggtagccatcctcagaaggtc

SEQ ID NO: 325411 - DNA, 120 bp, Artificial Sequence
  ENSG00000136068_20 (sequence is synthesized)
aaagtgtttgggccaggtgtggagagaagtggtctgaaggcaaatgaacctacacacttcacggtggactgtactgaggctggggaaggtgatgtcagtgttggcattaagtgtgatgcc

SEQ ID NO: 325412 - DNA, 120 bp, Artificial Sequence
  ENSG00000136068_21 (sequence is synthesized)
cgggtgttaagtgaagatgaggaagacgtggattttgacattattcacaatgccaatgatacgttcacagtcaaatatgtgcctcctgctgctgggcgatacactatcaaagttctcttt

SEQ ID NO: 325413 - DNA, 120 bp, Artificial Sequence
  ENSG00000136068_22 (sequence is synthesized)
gcatctcaggaaatccccgccagccctttcagagtcaaagttgacccttcccacgatgccagcaaagtgaaggcagaaggcccagggctcagcaaagcaggtgtggaaaatgggaaaccg

SEQ ID NO: 325414 - DNA, 120 bp, Artificial Sequence
  ENSG00000136068_23 (sequence is synthesized)
acccacttcactgtctacaccaagggggctgggaaagccccgctcaacgtgcagttcaacagccctcttcctggcgatgcagtgaaggatttggatatcatcgataattatgactactct

SEQ ID NO: 325415 - DNA, 120 bp, Artificial Sequence
  ENSG00000136068_24 (sequence is synthesized)
cacacggttaaatatacacccacccaacagggcaacatgcaggttctggtgacttacggtggcgatcccatccctaaaagccctttcactgtgggtgttgctgcaccgctggatctgagc

SEQ ID NO: 325416 - DNA, 120 bp, Artificial Sequence
  ENSG00000136068_25 (sequence is synthesized)
aagataaaactcaatgggctggaaaacagggtggaagttgggaaggatcaggagttcaccgttgataccaggggggcaggaggccaggggaagctggacgtgacaatcctcagcccctct

SEQ ID NO: 325417 - DNA, 120 bp, Artificial Sequence
  ENSG00000136068_26 (sequence is synthesized)
cggaaggtcgtgccatgcctagtgacacctgtgacaggccgggagaacagcacggccaagttcatccctcgggaggaggggctgtatgctgtagacgtgacctacgatggacaccctgtg

SEQ ID NO: 325418 - DNA, 120 bp, Artificial Sequence
  ENSG00000136068_27 (sequence is synthesized)
cccgggagcccctacacagtggaggcctcgctgccaccagatcccagcaaggtgaaggcccacggtcccggcctcgaaggtggtctcgtgggcaagcctgccgagttcaccatcgatacc

SEQ ID NO: 325419 - DNA, 120 bp, Artificial Sequence
  ENSG00000136068_28 (sequence is synthesized)
aaaggagctggtactggaggtctgggcttaacggtggaaggtccgtgcgaggccaaaatcgagtgctccgacaatggtgatgggacctgctccgtctcttaccttcccacaaaacccggg

SEQ ID NO: 325420 - DNA, 120 bp, Artificial Sequence
  ENSG00000136068_29 (sequence is synthesized)
gagtacttcgtcaacatcctctttgaagaagtccacatacctgggtctcccttcaaagctgacattgaaatgccctttgacccctctaaagtcgtggcatcggggccaggtctcgagcac

SEQ ID NO: 325421 - DNA, 120 bp, Artificial Sequence
  ENSG00000136068_30 (sequence is synthesized)
gggaaggtgggtgaagctggcctccttagcgtcgactgctcggaagcgggaccgggggccctgggcctggaagctgtctcggactcgggaacaaaagccgaagtcagtattcagaacaac

SEQ ID NO: 325422 - DNA, 120 bp, Artificial Sequence
  ENSG00000136068_31 (sequence is synthesized)
aaagatggcacctacgcggtgacctacgtgcccctgacggccggcatgtacacgttgaccatgaagtatggtggcgaactcgtgccacacttccccgcccgggtcaaggtggagcccgcc

SEQ ID NO: 325423 - DNA, 120 bp, Artificial Sequence
  ENSG00000136068_32 (sequence is synthesized)
gtggacaccagcaggatcaaagtctttggaccaggaatagaagggaaagatgtgttccgggaagctaccaccgactttacagttgactctcggccgctgacccaggttgggggtgaccac

SEQ ID NO: 325424 - DNA, 120 bp, Artificial Sequence
  ENSG00000136068_33 (sequence is synthesized)
atcaaggcccacattgccaacccctcaggggcctccaccgagtgctttgtcacagacaatgcggatgggacctaccaggtggaatacacaccctttgagaaaggtctccatgtagtggag

SEQ ID NO: 325425 - DNA, 120 bp, Artificial Sequence
  ENSG00000136068_34 (sequence is synthesized)
gtgacatatgatgacgtgcctatcccaaacagtcccttcaaggtggctgtcactgaaggctgccagccatctagggtgcaagcccaaggacctggattgaaagaggcctttaccaacaag

SEQ ID NO: 325426 - DNA, 120 bp, Artificial Sequence
  ENSG00000136068_35 (sequence is synthesized)
cccaatgtcttcaccgtggttaccagaggcgcaggaattggtgggcttggcataactgttgagggaccatcagagtcgaagataaattgcagagacaacaaggatggcagctgcagtgct

SEQ ID NO: 325427 - DNA, 120 bp, Artificial Sequence
  ENSG00000136068_36 (sequence is synthesized)
gagtacattcctttcgcaccgggggattacgatgttaatatcacatatggaggagcccacatccccggcagccccttcagggttcctgtgaaggatgttgtggaccccagcaaggtcaag

SEQ ID NO: 325428 - DNA, 120 bp, Artificial Sequence
  ENSG00000136068_37 (sequence is synthesized)
attgccggccccgggctgggctcaggcgtccgagcccgtgtcctgcagtccttcacggtggacagcagcaaggctggcctggctccgctggaagtgagggttctgggcccacgaggcttg

SEQ ID NO: 325429 - DNA, 120 bp, Artificial Sequence
  ENSG00000136068_38 (sequence is synthesized)
gtggagccagtgaacgtggtggacaatggagatggcacacacacagtaacctacaccccatctcaggagggaccttacatggtctcagttaaatatgctgatgaagagattcctcgcagt

SEQ ID NO: 325430 - DNA, 120 bp, Artificial Sequence
  ENSG00000136068_39 (sequence is synthesized)
ttgcaattgatgcccgagatgccggggaaggcctgcttgctgttcaaataacggaccaagaaggaaaacccaaaagagccattgtccatgacaataaagatggcacgtatgctgtcacct

SEQ ID NO: 325431 - DNA, 120 bp, Artificial Sequence
  ENSG00000136068_40 (sequence is synthesized)
acatccccgacaagactgggcgctatatgattggagtcacctacgggggtgacgacatcccactttctccttatcgcatccgagccacacagacgggtgatgccagcaagtgcctggcca

SEQ ID NO: 325432 - DNA, 120 bp, Artificial Sequence
  ENSG00000136068_41 (sequence is synthesized)
cgggtcctggaatcgcctccactgtgaaaactggcgaagaagtaggctttgtggttgatgccaagactgccgggaagggtaaagtgacctgcacggttctgaccccagatggcactgagg

SEQ ID NO: 325433 - DNA, 120 bp, Artificial Sequence
  ENSG00000136068_42 (sequence is synthesized)
ccgaggccgatgtcattgagaatgaagatggaacctatgacatcttctacacagctgccaagccgggcacatatgtgatctatgtgcgcttcggtggtgttgatattcctaacagcccct

SEQ ID NO: 325434 - DNA, 120 bp, Artificial Sequence
  ENSG00000136068_43 (sequence is synthesized)
tcactgtcatggccacagatggggaagtcacagccgtggaggaggcaccggtaaatgcatgtccccctggattcaggccctgggtgaccgaagaggcctatgtcccagtgagtgacatga

SEQ ID NO: 325435 - DNA, 120 bp, Artificial Sequence
  ENSG00000136068_44 (sequence is synthesized)
acggcctgggatttaagccttttgacctggtcattccgtttgctgtcaggaaaggagaaatcactggagaggtccacatgccttctgggaagacagccacacctgagattgtggacaaca

SEQ ID NO: 325436 - DNA, 120 bp, Artificial Sequence
  ENSG00000136068_45 (sequence is synthesized)
aggacggcacggtcactgttagatatgcccccactgaggtcgggctccatgagatgcacatcaaatacatgggcagccacatccctgagagcccactccagttctacgtgaactacccca

SEQ ID NO: 325437 - DNA, 120 bp, Artificial Sequence
  ENSG00000136068_46 (sequence is synthesized)
acagtggaagtgtttctgcatacggtccaggcctcgtgtatggagtggccaacaaaactgccaccttcaccatcgtcacagaggatgcaggagaaggtggtctggacttggctattgagg

SEQ ID NO: 325438 - DNA, 120 bp, Artificial Sequence
  ENSG00000136068_47 (sequence is synthesized)
gcccctcaaaagcagaaatcagctgcattgacaataaagatgggacatgcacagtgacctacctgccgactctgccaggcgactacagcattctggtcaagtacaatgacaagcacatcc

SEQ ID NO: 325439 - DNA, 120 bp, Artificial Sequence
  ENSG00000136068_48 (sequence is synthesized)
ctggcagccccttcacagccaagatcacagatgacagcaggcggtgctcccaggtgaagttgggctcagccgctgacttcctgctcgacatcagtgagactgacctcagcagcctgacgg

SEQ ID NO: 325440 - DNA, 120 bp, Artificial Sequence
  ENSG00000136068_49 (sequence is synthesized)
ccagcattaaggccccatctggccgagacgagccctgtctcctgaagaggctgcccaacaaccacattggcatctccttcatcccccgggaagtgggcgaacatctggtcagcatcaaga

SEQ ID NO: 325441 - DNA, 120 bp, Artificial Sequence
  ENSG00000136068_50 (sequence is synthesized)
aaaatggcaaccatgtggccaacagccccgtgtctatcatggtggtccagtcggagattggtgacgcccgccgagccaaagtctatggccgcggcctgtcagaaggccggactttcgaga

SEQ ID NO: 325442 - DNA, 120 bp, Artificial Sequence
  ENSG00000136068_51 (sequence is synthesized)
tgtctgacttcatcgtggacacaagggatgcaggttatggtggcatatccttggcggtggaaggccccagcaaagtggacatccagacggaggacctggaagatggcacctgcaaagtct

SEQ ID NO: 325443 - DNA, 120 bp, Artificial Sequence
  ENSG00000136068_52 (sequence is synthesized)
cctacttccctaccgtgcctggggtttatatcgtctccaccaaattcgctgacgagcacgtgcctgggagcccatttaccgtgaagatcagtggggagggaagagtcaaagagagcatca

SEQ ID NO: 325444 - DNA, 120 bp, Artificial Sequence
  ENSG00000136068_53 (sequence is synthesized)
cccgcaccagtcgggccccgtccgtggccactgtcgggagcatttgtgacctgaacctgaaaatcccagaaatcaacagcagtgatatgtcggcccacgtcaccagcccctctggccgtg

SEQ ID NO: 325445 - DNA, 120 bp, Artificial Sequence
  ENSG00000136068_54 (sequence is synthesized)
tgactgaggcagagattgtgcccatggggaagaactcacactgcgtccggtttgtgccccaggagatgggcgtgcacacggtcagcgtcaagtaccgtgggcagcacgtcaccggcagcc

SEQ ID NO: 325446 - DNA, 120 bp, Artificial Sequence
  ENSG00000136068_55 (sequence is synthesized)
ccttccagttcaccgtggggccacttggtgaaggaggcgcccacaaggtgcgggcaggaggccctggcctggagagaggagaagcgggagtcccagctgagttcagcatttggacccggg

SEQ ID NO: 325447 - DNA, 120 bp, Artificial Sequence
  ENSG00000136068_56 (sequence is synthesized)
aagcaggcgctggaggcctctccatcgctgttgagggccccagtaaggccgagattacattcgatgaccataaaaatgggtcgtgcggtgtatcttatattgcccaagagcctggtaact

SEQ ID NO: 325448 - DNA, 120 bp, Artificial Sequence
  ENSG00000136068_57 (sequence is synthesized)
acgaggtgtccatcaagttcaatgatgagcacatcccggaaagcccctacctggtgccggtcatcgcaccctccgacgacgcccgccgcctcactgttatgagccttcaggaatcgggat

SEQ ID NO: 325449 - DNA, 120 bp, Artificial Sequence
  ENSG00000136068_58 (sequence is synthesized)
taaaagttaaccagccagcatcctttgctataaggttgaatggcgcaaaaggcaagattgatgcaaaggtgcacagcccctctggagccgtggaggagtgccacgtgtctgagctggagc

SEQ ID NO: 325450 - DNA, 120 bp, Artificial Sequence
  ENSG00000136068_59 (sequence is synthesized)
cagataagtatgctgttcgcttcatccctcatgagaatggtgtccacaccatcgatgtcaagttcaatgggagccacgtggttggaagccccttcaaagtgcgcgttggggagcctggac

SEQ ID NO: 325451 - DNA, 120 bp, Artificial Sequence
  ENSG00000136068_60 (sequence is synthesized)
aagcggggaaccctgccctggtgtccgcctatggcacgggactcgaagggggcaccacaggtatccagtcggaattctttattaacaccacccgagcaggtccagggacattatccgtca

SEQ ID NO: 325452 - DNA, 120 bp, Artificial Sequence
  ENSG00000136068_61 (sequence is synthesized)
ccatcgaaggcccatccaaggttaaaatggattgccaggaaacacctgaagggtacaaagtcatgtacacccccatggctcctggtaactacctgatcagcgtcaaatacggtgggccca

SEQ ID NO: 325453 - DNA, 120 bp, Artificial Sequence
  ENSG00000136068_62 (sequence is synthesized)
accacatcgtgggcagtcccttcaaggccaaggtgacaggccagcgtctagttagccctggctcagccaacgagacctcatccatcctggtggagtcagtgaccaggtcgtctacagaga

SEQ ID NO: 325454 - DNA, 120 bp, Artificial Sequence
  ENSG00000136068_63 (sequence is synthesized)
cctgctatagcgccattcccaaggcatcctcggacgccagcaaggtgacctctaagggggcagggctctcaaaggcctttgtgggccagaagagttccttcctggtggactgcagcaaag

SEQ ID NO: 325455 - DNA, 120 bp, Artificial Sequence
  ENSG00000136068_64 (sequence is synthesized)
ctggctccaacatgctgctgatcggggtccatgggcccaccaccccctgcgaggaggtctccatgaagcatgtaggcaaccagcaatacaacgtcacatacgtcgtcaaggagaggggcg

SEQ ID NO: 325456 - DNA, 120 bp, Artificial Sequence
  ENSG00000136068_65 (sequence is synthesized)
attatgtgctggctgtgaagtggggggaggaacacatccctggcagcccttttcatgtcacagtgccttaaaacagttttctcaaatcctggagagagttcttgtggttgcttttgttgc

SEQ ID NO: 325457 - DNA, 120 bp, Artificial Sequence
  ENSG00000136068_66 (sequence is synthesized)
ttgtttgtaattcattttatacaaagccctccagcctgtttgtggggctgaaaccccatccctaaaatattgctgttgtaaaatgccttcagaaataagtcctagactggactcttgagg

SEQ ID NO: 325458 - DNA, 120 bp, Artificial Sequence
  ENSG00000136068_67 (sequence is synthesized)
gacatattggagaatcttaagaaatgcaagcttgttcagggggctgagaagatcctgagtacactaggtgcaaaccagaactcttggtggaacagaccagccactgcagcagacagacca

SEQ ID NO: 325459 - DNA, 120 bp, Artificial Sequence
  ENSG00000136068_68 (sequence is synthesized)
ggaacacaatgagactgacatttcaaaaaaacaaaactggctagcctgagctgctggttcactcttcagcatttatgaaacaaggctaggggaagatgggcagagaaaaaggggacacct

SEQ ID NO: 325460 - DNA, 120 bp, Artificial Sequence
  ENSG00000136068_69 (sequence is synthesized)
agtttggttgtcatttggcaaaggagatgacttaaaatccgcttaatctcttccagtgtccgtgttaatgtatttggctattagatcactagcactgctttaccgctcctcatcgccaac

SEQ ID NO: 325461 - DNA, 120 bp, Artificial Sequence
  ENSG00000136068_70 (sequence is synthesized)
acccccatgctctgtggccttcttacacttctcagagggcagagtggcagccgggcaccctacagaaactcagagggcagagtggcagccaggcccacatgtctctcaagtacctgtccc

SEQ ID NO: 325462 - DNA, 120 bp, Artificial Sequence
  ENSG00000136068_71 (sequence is synthesized)
ctcgctctggtgattatttcttgcagaatcaccacacgagaccatcccggcagtcatggttttgctttagttttccaagtccgtttcagtcccttccttggtctgaagaaattctgcagt

SEQ ID NO: 325463 - DNA, 120 bp, Artificial Sequence
  ENSG00000136068_72 (sequence is synthesized)
ggcgagcagtttcccacttgccaaagatcccttttaaccaacactagcccttgtttttaacacacgctccagcccttcatcagcctgggcagtcttaccaaaatgtttaaagtgatctca

SEQ ID NO: 325464 - DNA, 120 bp, Artificial Sequence
  ENSG00000136068_73 (sequence is synthesized)
gaggggcccatggattaacgccctcatcccaaggtccgtcccatgacataacactccacacccgccccagccaacttcatgggtcactttttctggaaaataatgatctgtacagacagg

SEQ ID NO: 325465 - DNA, 120 bp, Artificial Sequence
  ENSG00000136068_74 (sequence is synthesized)
acagaatgaaactcctgcgggtctttggcctgaaagttgggaatggttgggggagagaagggcagcagcttattggtggtcttttcaccattggcagaaacagtgagagctgtgtggtgc

SEQ ID NO: 325466 - DNA, 120 bp, Artificial Sequence
  ENSG00000136068_75 (sequence is synthesized)
agaaatccagaaatgaggtgtagggaattttgcctgccttcctgcagacctgagctggctttggaatgaggttaaagtgtcagggacgttgcctgagcccaaatgtgtagtgtggtctgg

SEQ ID NO: 325467 - DNA, 120 bp, Artificial Sequence
  ENSG00000136068_76 (sequence is synthesized)
gcaggcagacctttaggttttgctgcttagtcctgaggaagtggccactcttgtggcaggtgtagtatctggggcgagtgttgggggtaaaagcccaccctacagaaagtggaacagccc

SEQ ID NO: 325468 - DNA, 120 bp, Artificial Sequence
  ENSG00000136068_77 (sequence is synthesized)
ggagcctgatgtgaaaggaccacgggtgttgtaagctgggacacggaagccaaactggaatcaaacgccgactgtaaattgtatcttataacttattaaataaaacatttgctccgtaaa

SEQ ID NO: 325469 - DNA, 120 bp, Artificial Sequence
  ENSG00000136068_78 (sequence is synthesized)
tgtggaaatgaagcatctctttctgttttctctttgagatggtttgagttagattgtgtctcttccaagcttgccacaccccagtgcctccagtcatctgctttcttgaaggatggccac

SEQ ID NO: 325470 - DNA, 120 bp, Artificial Sequence
  ENSG00000136068_79 (sequence is synthesized)
gctggtgaattctagacaaattctaacccggggagagggctggagaatttctggtcctggttgggagatactccctgttaaaccttcggatatgctgacctagctgaggtagccaggggc

SEQ ID NO: 325471 - DNA, 120 bp, Artificial Sequence
  ENSG00000136068_80 (sequence is synthesized)
tatttaaaaattcaaaatctcagatctggctgtggataaacccccaaggtggtacgtgcagtacttggaggcgtgagggcagaaggtcctccccagcagtttgtacgggacacatcatct

SEQ ID NO: 325472 - DNA, 120 bp, Artificial Sequence
  ENSG00000136068_81 (sequence is synthesized)
atgggatattagtaaatatccttaaggaaaggcttctgtggtcaaaaccaggttcagcaggttatttcactatggggcttctcaggacgcttaacctactcatccccctctgggctttgc

SEQ ID NO: 325473 - DNA, 120 bp, Artificial Sequence
  ENSG00000136068_82 (sequence is synthesized)
aaacgaggccgccattgctttctttctgctatgtagaaatagattgaggcgtaagggtcggatgtcctttctccattcatcaggctccctcttcctgaggagctgctgtcagaacagcct

SEQ ID NO: 325474 - DNA, 120 bp, Artificial Sequence
  ENSG00000136068_83 (sequence is synthesized)
tggcccagaacacagtatccaagtcggctgtgctgaccttttcatttcacttcatttcattatgttcttctatgtttattttcacagagtctcatccaagaaaaacaaatgtttaccttg

SEQ ID NO: 325475 - DNA, 120 bp, Artificial Sequence
  ENSG00000136068_84 (sequence is synthesized)
ctacctttttcctcttccaaataaaaatagctttattgtgtcacatgggggaaacgtagatatgcttttagatttttagattaactatctgtcaaatagaatcatgtcagtgaaagaact

SEQ ID NO: 325476 - DNA, 120 bp, Artificial Sequence
  ENSG00000136068_85 (sequence is synthesized)
ggccctgccgatgccagggtctggaagtatttaagaggtggcagcccagcggcatccttctagtatttctctttcattcctgaaattagaacgagggctgtgctgcagaactcgctgggc

SEQ ID NO: 325477 - DNA, 120 bp, Artificial Sequence
  ENSG00000136068_86 (sequence is synthesized)
cacatctagccctttggtggtgaattgttcttcttgggccccgattagccagtcaacaggtcacacagtctgtctgaaatgtgttccaagttctttctataaagaatccttccagaggga

SEQ ID NO: 325478 - DNA, 120 bp, Artificial Sequence
  ENSG00000136068_87 (sequence is synthesized)
agccactgtgagtgaaaattttgaggctcctctgcccagaagttggcatgtcctgtggaattgcacaaattctacagagaagggaaatctaaatcgtcttcagatggagcttgtgttgcg

SEQ ID NO: 325479 - DNA, 120 bp, Artificial Sequence
  ENSG00000136068_88 (sequence is synthesized)
agctctggagagggggttgtctttctacactgcatctcccatccttcctaacgagtcacggagctgtcgactccgccttcttggctttagttaacaggttcttcttgtgtagtcacatca

SEQ ID NO: 325480 - DNA, 120 bp, Artificial Sequence
  ENSG00000136068_89 (sequence is synthesized)
acgtcgggtcacatgggaatgtggtaaagcctcattactgtagagttcagacatgatcacttaaaaagagctttattgggccgggcgcggtggcttactcctataatcccagcactttgg

SEQ ID NO: 325481 - DNA, 120 bp, Artificial Sequence
  ENSG00000136068_90 (sequence is synthesized)
cttctaaaattgcttacacctgcctcatctgctttgcttaatgagcatgccatcctttgattaacctaccctggagttgacccatccttgactgtcacgttggaagctgggatctggact

SEQ ID NO: 325482 - DNA, 120 bp, Artificial Sequence
  ENSG00000136068_91 (sequence is synthesized)
ctgcaacccaacgcgtgccttgattatgttttagcataatctctaacatctccacaggcttcaccttgagggtccccttgccccatgagattggcaccctcacctgccctgcacctatgc

SEQ ID NO: 325483 - DNA, 120 bp, Artificial Sequence
  ENSG00000136068_92 (sequence is synthesized)
cccagcatgctggtaccacagtgttctttgctcaaaggtggccacaagtcttgactagccagcccattggttaatttttgctcttcacaattctggactctttggcagtgtctcagctgt

SEQ ID NO: 325484 - DNA, 120 bp, Artificial Sequence
  ENSG00000136068_93 (sequence is synthesized)
agagtaaaattgccacatcctaagcgtgcctaaccagcttgaaaggttatattgtgtcttcaacacacatcatccacatacaccctccagcagcaagcacaggcagtctccttaattata

SEQ ID NO: 325485 - DNA, 120 bp, Artificial Sequence
  ENSG00000136068_94 (sequence is synthesized)
ctctagggcagactgagtgtattttagccaacaaaaagctaaaggtgtctctcggggtcatttctgcaaccatgaattggggatcctgtgatttttttcaggcctgtgattatggttgct

SEQ ID NO: 325486 - DNA, 120 bp, Artificial Sequence
  ENSG00000136068_95 (sequence is synthesized)
ggcctttttgttactcatcagtggaaaccaatagctcttggggatggatgtggtcctatttcagactcagccaagggtggagtaaaggtgaggccaggcagctccttaaacctctcatct

SEQ ID NO: 325487 - DNA, 120 bp, Artificial Sequence
  ENSG00000136068_96 (sequence is synthesized)
gtcagatcaatcatagtggaaactatggatggttttagatgtgttaaagctactttgaactttgaatgtcagtaaatagtatgagatgtcagagggcagtgtttgaaacttacaaaagtc

SEQ ID NO: 325488 - DNA, 120 bp, Artificial Sequence
  ENSG00000136068_97 (sequence is synthesized)
cacagagtggagccgtgcagaagttgagaaagcatgttaggatgttaggtggttttctatctctaacaggaaagaatacatattgaaatcttacgtatttgtttagatcagggtctgaaa

SEQ ID NO: 325489 - DNA, 120 bp, Artificial Sequence
  ENSG00000136068_98 (sequence is synthesized)
aatcccctgatttctaattttcacttgaaaaataatcaaaaagttttcctatacttataaaaatgtgtctcctccaaaacactggaaaaaataccaaactatgaaaaccacttcacagcc

SEQ ID NO: 325490 - DNA, 120 bp, Artificial Sequence
  ENSG00000136068_99 (sequence is synthesized)
accacccaaggtaaccaccataaacactgtagtaaatcccttccacacgtcatgattcactgttacataaagaatgtaggttcatcgcaggaaaattagaaaattcagatagaaaaatca

SEQ ID NO: 325491 - DNA, 120 bp, Artificial Sequence
  ENSG00000136068_100 (sequence is synthesized)
tcctttctcatccacagaatcattttttgatatttcattatatgtcatcccaaacttttacactgcttatacatagactattttatgtcaatagaaagatgtgaattccacaggcacatc

SEQ ID NO: 325492 - DNA, 120 bp, Artificial Sequence
  ENSG00000136068_101 (sequence is synthesized)
tttggtgggtagggggtggggggattgggagggtccttggccttgtcagccaaggccagactcatccatttgcccagaaagccagatcctagttgtatgggggtgggatcctaggggttt

SEQ ID NO: 325493 - DNA, 120 bp, Artificial Sequence
  ENSG00000136068_102 (sequence is synthesized)
agaagacattatgggtgtgagatacaggtgtggtggcttttgtgttggggtgcgcgggctctcctggggttactgtgtagggtactcgcctgtcctctggctgagagacccctcttgatc

SEQ ID NO: 325494 - DNA, 120 bp, Artificial Sequence
  ENSG00000136068_103 (sequence is synthesized)
cagtttcatactggctctaggtgatggcagtgctccgtgccccgcatgcggccgcctggcctcaccacggcagtgcaggcacagtcgttggcatgacaaatcaacagcagtgatatgtcg

SEQ ID NO: 325495 - DNA, 120 bp, Artificial Sequence
  ENSG00000136068_104 (sequence is synthesized)
cacagctgcagtgtgcatggaatgaaaaggtatctgtgcttggccgccagagcgcccagtatcctgaccttctgaacaaagcaaacctccctctgtttttaatgggtatccagtcggaat

SEQ ID NO: 325496 - DNA, 120 bp, Artificial Sequence
  ENSG00000136068_105 (sequence is synthesized)
gaaatcctcaagccccatgaaagctttttacacgtactccccgtggaaactggggtcatgcacacttcggaggcgcttgctgtccaaagctgttttgggagttgcggtttgacccacgat

SEQ ID NO: 325497 - DNA, 120 bp, Artificial Sequence
  ENSG00000136068_106 (sequence is synthesized)
tccctttgcccacagctcacgtggagtgcgtcaatccattgtccccagcatcagggctgccctggatgagttgttaaaaggaaactcttaaaacaaggcaactctctccctaacacccct

SEQ ID NO: 325498 - DNA, 120 bp, Artificial Sequence
  ENSG00000136068_107 (sequence is synthesized)
agtgatgcttaggaaacttcagcaatggaccttggaccttgcttgggttctgcttggggttggagaaagaggaaagggctagcaacagacgaaacctagcactgcaggtttgaacaagga

SEQ ID NO: 325499 - DNA, 120 bp, Artificial Sequence
  ENSG00000136068_108 (sequence is synthesized)
atttttgaatcacacaggatgctattctagactttttagatatatccaggaatagagtaaaaaataaaatccctcctgcataaaggcaccaggctttttccaagctttgtttatttttta

SEQ ID NO: 325500 - DNA, 120 bp, Artificial Sequence
  ENSG00000136098_0 (sequence is synthesized)
gcggaagccgccggttgccaggccaaggagtggactagggtcgccggggaagcggtttgggagagcccatggtgactgcgtgagtggagcccagctgtgtggatgccccagcatggatga

SEQ ID NO: 325501 - DNA, 120 bp, Artificial Sequence
  ENSG00000136098_1 (sequence is synthesized)
ctacatggtcctgagaatgattggggagggctccttcggcagagctcttttggttcagcatgaaagcagtaatcagatgtttgccatgaaagaaataaggcttcccaagtctttctctaa

SEQ ID NO: 325502 - DNA, 120 bp, Artificial Sequence
  ENSG00000136098_2 (sequence is synthesized)
tacacagaattctaggaaggaggctgttcttttagccaaaatgaaacaccctaatattgttgccttcaaagaatcatttgaagctgaaggacacttgtatattgtgatggaatactgtga

SEQ ID NO: 325503 - DNA, 120 bp, Artificial Sequence
  ENSG00000136098_3 (sequence is synthesized)
tggaggggatctaatgcaaaagattaaacagcagaaaggaaagttatttcctgaagacatgatacttaattggtttacccaaatgtgccttggagtaaatcacattcacaagaaacgtgt

SEQ ID NO: 325504 - DNA, 120 bp, Artificial Sequence
  ENSG00000136098_4 (sequence is synthesized)
gctacacagagatatcaagtccaagaatatcttcctcactcagaatggaaaagtgaaattgggagactttggatctgcccgtcttctctccaatccgatggcatttgcttgtacctatgt

SEQ ID NO: 325505 - DNA, 120 bp, Artificial Sequence
  ENSG00000136098_5 (sequence is synthesized)
gggaactccttattatgtgcctccagaaatttgggaaaacctgccttataacaataaaagtgacatctggtccttgggttgcatcctgtatgaactctgtacccttaagcatccatttca

SEQ ID NO: 325506 - DNA, 120 bp, Artificial Sequence
  ENSG00000136098_6 (sequence is synthesized)
ggcaaatagttggaaaaatcttatcctcaaagtatgtcaagggtgcatcagtccactgccgtctcattactcctatgaacttcagttcctagtcaagcagatgtttaaaaggaatccctc

SEQ ID NO: 325507 - DNA, 120 bp, Artificial Sequence
  ENSG00000136098_7 (sequence is synthesized)
acatcgcccctcggctacaacgcttctctctcgaggcatcgtagctcggcttgtccagaagtgcttaccccccgagatcatcatggaatatggtgaggaagtattagaagaaataaaaaa

SEQ ID NO: 325508 - DNA, 120 bp, Artificial Sequence
  ENSG00000136098_8 (sequence is synthesized)
gaacaagatagaaagggtagccatactgatttggaaagcattaatgaaaatttagttgaaagtgcattgagaagagtaaacagagaagaaaaaggtaataagtcagtccatctgaggaaa

SEQ ID NO: 325509 - DNA, 120 bp, Artificial Sequence
  ENSG00000136098_9 (sequence is synthesized)
gccagttcaccaaatcttcatagacgacagtgggagaaaaatgtacccaatacagctcttacagctttggaaaatgcatccatactcacctccagtttaacagcagaggacgatagaggt

SEQ ID NO: 325510 - DNA, 120 bp, Artificial Sequence
  ENSG00000136098_10 (sequence is synthesized)
ggttctgtaataaagtacagcaaaaatactactcgtaagcagtggctcaaagagacccctgacactttgttgaacatccttaagaatgctgatctcagcttggcttttcaaacatacaca

SEQ ID NO: 325511 - DNA, 120 bp, Artificial Sequence
  ENSG00000136098_11 (sequence is synthesized)
atatatagaccaggttcagaagggttcttgaaaggccccctgtctgaagaaacagaagcatcggacagtgttgatggaggtcacgattctgtcattttggatccagagcgacttgagcct

SEQ ID NO: 325512 - DNA, 120 bp, Artificial Sequence
  ENSG00000136098_12 (sequence is synthesized)
gggctagatgaggaggacacggactttgaggaggaagatgacaaccccgactgggtgtcagagctgaagaagcgagctggatggcaaggcctgtgcgacagataatgcctgaggaaatgt

SEQ ID NO: 325513 - DNA, 120 bp, Artificial Sequence
  ENSG00000136098_13 (sequence is synthesized)
tcctgagtcacgctgaggagaggcttcactcaggagttcatgctgagatgatcatgagttcatgcgacgtatattttcctttggaaacagaatgaagcagaggaaactcttaatacttaa

SEQ ID NO: 325514 - DNA, 120 bp, Artificial Sequence
  ENSG00000136098_14 (sequence is synthesized)
aatcgttcttgattagtatcgtgagtttgaaaagtctagaactcctgtaagtttttgaactcaagggagaaggtatagtggaatgagtgtgagcatcgggctttgcagtcccatagaaca

SEQ ID NO: 325515 - DNA, 120 bp, Artificial Sequence
  ENSG00000136098_15 (sequence is synthesized)
gaaatgggatgctagcgtgccactacctacttgtgtgattgtgggaaattacttaacctcttcaagccccaatttcctcaaccataaaatgaagataataatgcctacctcagagggatg

SEQ ID NO: 325516 - DNA, 120 bp, Artificial Sequence
  ENSG00000136098_16 (sequence is synthesized)
ctgaccacagacctttatagcagcccgtatgatattattcacattatgatatgtgtttattattatgtgactctttttacatttcctaaaggtttgagaattaaatatatttaattatga

SEQ ID NO: 325517 - DNA, 120 bp, Artificial Sequence
  ENSG00000136098_17 (sequence is synthesized)
gtccccgccctggcgggctgcctctagaacgaggagggcggcgcgtggtcgcggcgcggagccgagtgggagcgaggggtagacgcgccccggacgcgcggccgcgcccctcacttccgc

SEQ ID NO: 325518 - DNA, 120 bp, Artificial Sequence
  ENSG00000136098_18 (sequence is synthesized)
cccgcggtctggaccactcgccgcaaacccgcaagtccctcgccgccttggggtctgggcgcgcggtgccgtgggggtcagcagggcggagcggcttttccaggagaaagggccctcacg

SEQ ID NO: 325519 - DNA, 120 bp, Artificial Sequence
  ENSG00000136098_19 (sequence is synthesized)
ggtgagcggggcgactgggctcccccgcggtgcagttgccccgcgggcgccggccccggctcaacggattcttctcgctcgctgcccggaaagaaccatttgggagagcccatggtgact

SEQ ID NO: 325520 - DNA, 120 bp, Artificial Sequence
  ENSG00000136098_20 (sequence is synthesized)
cacatagctagtaagttctagctagcactgagtgctgtgcccgtgaaatttatctacataggctttcacttaacctgcagacagaactcagttagtcggggacaatttccctcaatgtta

SEQ ID NO: 325521 - DNA, 120 bp, Artificial Sequence
  ENSG00000136098_21 (sequence is synthesized)
acagcactgttccaccgcaacgtggaacaacagctttaaaacgtgctcttcgtaggcccggctactccaagaacagtgcctcccgccagacccaggcggcttccttcacccgcaacccga

SEQ ID NO: 325522 - DNA, 120 bp, Artificial Sequence
  ENSG00000136098_22 (sequence is synthesized)
attgtgcctttcctctctcagggagtgccaagaaaccatctggttcatgccagaaacttgggagtcaaccttgcccccttctctgcttgccccccataaatctgccaccacaaatcctgt

SEQ ID NO: 325523 - DNA, 120 bp, Artificial Sequence
  ENSG00000136098_23 (sequence is synthesized)
caactgttcttacatctttccttcccattttttctgaccccattgcctccactctattccatttcattattttcctgccttttctattgttggagcctcctaactggcctgtgtctctga

SEQ ID NO: 325524 - DNA, 120 bp, Artificial Sequence
  ENSG00000136098_24 (sequence is synthesized)
gctggccttcctgcccctcctccactggtccatttaatctgcaatctgagtgaatgttttttctaatatgcaaatatgattatattgccttcttggttaaaatgcttcagcagcttgtta

SEQ ID NO: 325525 - DNA, 120 bp, Artificial Sequence
  ENSG00000136098_25 (sequence is synthesized)
cattcttctttcaatttcttgaactgaatgtaatttctttagctcttaaatatgcaatttcctcttccttgattactcttttcctcctctttgtctagccaagtttcattcatccttcag

SEQ ID NO: 325526 - DNA, 120 bp, Artificial Sequence
  ENSG00000136098_26 (sequence is synthesized)
gcttcagcttaaatagcctacatttgttgaggtttatggttatctctgcatgggatgtccacgttggcagggactatgagagatttttcagattataacatctgactcagagttggtgct

SEQ ID NO: 325527 - DNA, 120 bp, Artificial Sequence
  ENSG00000136098_27 (sequence is synthesized)
cagtgtctgcctgttgtatgtagtataggggaggaaaaacattttttctctgccctcttaggttcagtagctgggccctgcaaaataaactgatgaaagatagattaacaggaaaaaagg

SEQ ID NO: 325528 - DNA, 120 bp, Artificial Sequence
  ENSG00000136098_28 (sequence is synthesized)
tttatgcataaatgtaaagaagtggttagaccagggggctcatatgccattttaacaaagagtgataaattatagagaagtaactagacaaaagtaggggaatgcttcttgggtaaattg

SEQ ID NO: 325529 - DNA, 120 bp, Artificial Sequence
  ENSG00000136098_29 (sequence is synthesized)
taggaaggtaaatatatggcggaagctaacataagataagggttattcagtaaagtttgttatgtggactcaagttggtgccttccccattggtaagagttgctctcctcttcctggtac

SEQ ID NO: 325530 - DNA, 120 bp, Artificial Sequence
  ENSG00000136098_30 (sequence is synthesized)
tggaaaggaagacacatttacaaatggatatttattacctgtacataggaaaatttatgccctgcatttatacaaaaaagggagggcaaagagcaaattggtttcagctcaaaacaattc

SEQ ID NO: 325531 - DNA, 120 bp, Artificial Sequence
  ENSG00000136098_31 (sequence is synthesized)
ttacatgaaagtggcatattttggggtagcatacactgatcctcttcaaaaggaataatttgcttttctcttatcatggttatgagagctactttgaattaatttttgctttttgaaagt

SEQ ID NO: 325532 - DNA, 120 bp, Artificial Sequence
  ENSG00000136098_32 (sequence is synthesized)
tgtcatatctagctgagccctaataatgtgacagattctagttggcagtttgcttccctaggatgaagtcattataaaagtttgtatatgtttccagtgcagtcatctgccctgagttag

SEQ ID NO: 325533 - DNA, 120 bp, Artificial Sequence
  ENSG00000136098_33 (sequence is synthesized)
ttttgtagcatatactaataggaaatttccattattcagtttggctgtgcaatacataacctttctctctctttctttctcttttcctcttttctttctttttgctattcttaatttttt

SEQ ID NO: 325534 - DNA, 120 bp, Artificial Sequence
  ENSG00000136099_0 (sequence is synthesized)
agcttctgtaagagacggagaggcgcagagtgagggcgggtccgcgcgtcctcagagcccgctggaggctcggagctgctacccgcagacttctcccgcacagggctcgcaaagagcgtg

SEQ ID NO: 325535 - DNA, 120 bp, Artificial Sequence
  ENSG00000136099_1 (sequence is synthesized)
attccgagagcctgagactgacgcccgacctggaaaccagagaagacttccttagcctttcggatcgcacttgaggctggaggcatgagtcctgtgaggcgttggggcagcccctgcctt

SEQ ID NO: 325536 - DNA, 120 bp, Artificial Sequence
  ENSG00000136099_2 (sequence is synthesized)
ttccccttgcagctcttcagcctctgctgggtgctctcagtggcccagagcaaaacagtccgatacagcaccttcgaggaggatgcccccggcacggtcatcgggaccctggccgaggac

SEQ ID NO: 325537 - DNA, 120 bp, Artificial Sequence
  ENSG00000136099_3 (sequence is synthesized)
ctgcatatgaaagtatcgggtgacacaagcttccgcctgatgaagcaattcaacagctctctgctccgggtgcgcgaaggcgacgggcagctgaccgtcggggacgccggcctggaccgc

SEQ ID NO: 325538 - DNA, 120 bp, Artificial Sequence
  ENSG00000136099_4 (sequence is synthesized)
gagcggctgtgtggccaggccccgcagtgcgtgctggccttcgatgtggtcagcttctcgcaggagcagttccggctggtgcacgtggaggtagaggtgagggacgtcaacgaccacgcg

SEQ ID NO: 325539 - DNA, 120 bp, Artificial Sequence
  ENSG00000136099_5 (sequence is synthesized)
ccgcgcttccccagggcccagatcccggtagaggtgtccgagggtgcggcagtgggcacgcgcatccccttggaggtgccggtggacgaggacgtgggcgccaacgggctgcagaccgtg

SEQ ID NO: 325540 - DNA, 120 bp, Artificial Sequence
  ENSG00000136099_6 (sequence is synthesized)
cgcctggccgagccgcacagcccctttcgcgtggagctgcagacgcgagcggacggcgctcagtgcgcagacctggtgctgctgcaggagctggaccgcgagagccaggccgcctacagc

SEQ ID NO: 325541 - DNA, 120 bp, Artificial Sequence
  ENSG00000136099_7 (sequence is synthesized)
ctggagctggtggcccaggacggcggccgcccgccgcgctccgccacggctgccctcagcgtgcgcgtcctggatgcgaatgaccacagcccggccttcccgcagggcgccgtggccgaa

SEQ ID NO: 325542 - DNA, 120 bp, Artificial Sequence
  ENSG00000136099_8 (sequence is synthesized)
gtggagctggcggaagacgcgcccgtgggctccctgcttctcgacctggacgcagccgaccccgacgagggacctaacggcgacgtggtgttcgcatttggcgcccgcaccccgccggag

SEQ ID NO: 325543 - DNA, 120 bp, Artificial Sequence
  ENSG00000136099_9 (sequence is synthesized)
gcgcgccgcctctttcggcttgacccgcgatcaggccgcctcaccctggccgggcccgtggactacgagcgtcaggacacctacgagctggacgtgcgggcgcaggaccgcggacccggg

SEQ ID NO: 325544 - DNA, 120 bp, Artificial Sequence
  ENSG00000136099_10 (sequence is synthesized)
ccccgcgctgccacctgcaaggtcatcgtgcgcatccgagacgtcaatgacaacgcacccgacatcgccatcaccccgctggccgccccaggcgcgccggcaacctcacccttcgccgct

SEQ ID NO: 325545 - DNA, 120 bp, Artificial Sequence
  ENSG00000136099_11 (sequence is synthesized)
cgccgctgcactcgggggagcggacgctagctcgccggcgggagccgggacgccggaggctggtgccacttcgctggtgccggagggggcggcgcgcgagagcctggtggccctggtcag

SEQ ID NO: 325546 - DNA, 120 bp, Artificial Sequence
  ENSG00000136099_12 (sequence is synthesized)
ctggtcagcacctcggacagggactcgggcgccaacgggcaagtgcgctgcgccctctatgggcacgagcacttccggctgcagccggcctacgcgggcagctacctggtggtgaccgcg

SEQ ID NO: 325547 - DNA, 120 bp, Artificial Sequence
  ENSG00000136099_13 (sequence is synthesized)
gcgtcgctggaccgcgaacgcatcgccgagtacaacttgacgctggtggccgaggatcgcggcgcgcccccgctgcgcacagtgcggccctacacggtgcgtgtgggcgacgagaacgac

SEQ ID NO: 325548 - DNA, 120 bp, Artificial Sequence
  ENSG00000136099_14 (sequence is synthesized)
aacgcgccgctcttcacgcggccggtctatgaggtgtcggtgcgcgagaacaacccgccaggcgcctacctggccacggtggccgcccgcgaccgggacctgggccgcaacggccaggtc

SEQ ID NO: 325549 - DNA, 120 bp, Artificial Sequence
  ENSG00000136099_15 (sequence is synthesized)
acctaccggctgctggaggccgaggtgggccgcgccgggggcgccgtgtccacttatgtctcggtggacccagctaccggagccatctacgcgctgcgcagcttcgactatgagacgctg

SEQ ID NO: 325550 - DNA, 120 bp, Artificial Sequence
  ENSG00000136099_16 (sequence is synthesized)
cgccaactcgacgttcgcatccaagctagcgacggcggctcccctcagctttccagcagcgccctagtgcaagtgcgcgtgctggaccagaacgaccatgcgccagtcctggtgcacccg

SEQ ID NO: 325551 - DNA, 120 bp, Artificial Sequence
  ENSG00000136099_17 (sequence is synthesized)
gcgccagccaatggctccctagaagtggcggtgcctgggcgcaccgcaaaggacacggttgtggcccgtgtgcaggcccgggatgcagacgagggagccaacggggagctggcgttcgag

SEQ ID NO: 325552 - DNA, 120 bp, Artificial Sequence
  ENSG00000136099_18 (sequence is synthesized)
ctgcagcagcaggagccgcgcgaagccttcgccatcggccgccgcacgggggagatactgctcaccggcgacctctcgcaggagccacccggtcgcgtgttcagggcgctcctggtcata

SEQ ID NO: 325553 - DNA, 120 bp, Artificial Sequence
  ENSG00000136099_19 (sequence is synthesized)
tccgacggcggccgtcccccgctcaccaccaccgcaactgtcagcttcgtggtaacagcagggggcgggcgtgggccggctgcgcctgccagtgcaggaagcccggagcgttcccgcccg

SEQ ID NO: 325554 - DNA, 120 bp, Artificial Sequence
  ENSG00000136099_20 (sequence is synthesized)
cctggctctcggctcggggtgtccgggtcggtgctgcaatgggacacgccgctgatcgtcatcatcgtgctggccgggagctgcacgctgctgctggccgccatcatcgccatcgccacc

SEQ ID NO: 325555 - DNA, 120 bp, Artificial Sequence
  ENSG00000136099_21 (sequence is synthesized)
cggcgggcggcggagcctcggctcccggctccccggaggaggccgcccggggagccgggcccaggcccaacatgttcgacgtgctcaccttccctggcaccggcaaagcgccctttggca

SEQ ID NO: 325556 - DNA, 120 bp, Artificial Sequence
  ENSG00000136099_22 (sequence is synthesized)
aaagcgccctttggcagccccgcggcggacgcgcctccgcctgcggtcgccgcggccgaagtgccgggctcagagggcggcagcgccactggggaaagcgcctgtcacttcgaggggcag

SEQ ID NO: 325557 - DNA, 120 bp, Artificial Sequence
  ENSG00000136099_23 (sequence is synthesized)
cagcggctccgcggcgcgcacgccgagccctacggtgcctccccgggttttggaaaggagccggcgccccctgtggcggtgtggaaaggacactccttcaacaccatttctggcagagaa

SEQ ID NO: 325558 - DNA, 120 bp, Artificial Sequence
  ENSG00000136099_24 (sequence is synthesized)
gcagagaagttcagcggcaaagacagcggtaaaggggacagtgatttcaacgacagcgattccgacatcagcggggacgctctgaaaaaggatctcatcaaccacatgcagagtggactg

SEQ ID NO: 325559 - DNA, 120 bp, Artificial Sequence
  ENSG00000136099_25 (sequence is synthesized)
tgggcgtgcaccgctgagtgtaagatcctgggccactctgaccgctgctggagcccatcctgcagcgggcccaacgcacatccatcgcctcacccaccagcccagatgtcaaccttctgt

SEQ ID NO: 325560 - DNA, 120 bp, Artificial Sequence
  ENSG00000136099_26 (sequence is synthesized)
aagagcacgtcactgcctcgggatcctctgcgcagggacaattactaccaggcccagctgcccaagacagtggggctgcagagcgtctatgagaaagtactgcacagagactatgacagg

SEQ ID NO: 325561 - DNA, 120 bp, Artificial Sequence
  ENSG00000136099_27 (sequence is synthesized)
acagtcactctgctctcccctccccgtccagggaggctcccagacctgcaggagattggagtacccctctaccagtcccctcctggcaggtacctgtccccgaagaagggagccaatgaa

SEQ ID NO: 325562 - DNA, 120 bp, Artificial Sequence
  ENSG00000136099_28 (sequence is synthesized)
aatgtgtaatcccatgctgcatgtcttcacacatatacaggtcactccgagaagcccctaagttattgaccggtttcagtgttgtatatataaatatgcaagatgtgccttacaatgaag

SEQ ID NO: 325563 - DNA, 120 bp, Artificial Sequence
  ENSG00000136099_29 (sequence is synthesized)
ttgttggaagctatttccaatcacattggtactgtttggtatttgcaaacaaaaatgtagttaatgtaatttttatgaaatgtgtgcagtatttaatttttcttatgctattgactttga

SEQ ID NO: 325564 - DNA, 120 bp, Artificial Sequence
  ENSG00000136099_30 (sequence is synthesized)
tttcaattgcggcttgccattttcttagtgtttttaacctgtacattgtgtaatgtaatgtttgtatataatgaaattttgttatatttttatataataaaagctaaagtggaagttatt

SEQ ID NO: 325565 - DNA, 120 bp, Artificial Sequence
  ENSG00000136099_31 (sequence is synthesized)
gccaaaggaactgtctgtaagacaaaaaacaaaacatgttggaattacttaattgaaatttatctttcacctgaaacaacctagtgtttgagaaattttgccttgccaagtataacttgt

SEQ ID NO: 325566 - DNA, 120 bp, Artificial Sequence
  ENSG00000136099_32 (sequence is synthesized)
atatcttgactctgtggtagatttcaagttcaatgttatttaattacatttggttttccgtaaaccgtgtcacttataagcacagtaataaaagatttgtcatgtgtttgaagaatctgc

SEQ ID NO: 325567 - DNA, 120 bp, Artificial Sequence
  ENSG00000136099_33 (sequence is synthesized)
caattgcttttcatgaagctgcctatagtcagacattcacaaataatttgagtatcagaatgaaaccttctttcaagtgctaattatttgggcattattaatgttcatgacaatattaaa

SEQ ID NO: 325568 - DNA, 120 bp, Artificial Sequence
  ENSG00000136099_34 (sequence is synthesized)
cctgtaggatttcaagtattgcaaaatgtcacccaagtattaaaaacgtgtgttgatttcataaattatgtgcatctccatatgtattagtctataaaatccctgctctcatttattcac

SEQ ID NO: 325569 - DNA, 120 bp, Artificial Sequence
  ENSG00000136099_35 (sequence is synthesized)
taggtaaatattcattgagcagccaccaaaaagtgaagaaagctaagtttgggttgttcattcactaattaaacaagcatctgtagaacttttactagctgctggtacctcctcctcaag

SEQ ID NO: 325570 - DNA, 120 bp, Artificial Sequence
  ENSG00000136099_36 (sequence is synthesized)
ctggagtttgaggtgaagaagacgtagtcccaaagagccctcagcttattcggggtgttagtatcaaaaagactaacatcttagtcttttggaatataataggttcccactacattctgt

SEQ ID NO: 325571 - DNA, 120 bp, Artificial Sequence
  ENSG00000136099_37 (sequence is synthesized)
cctacttcctctttccttgccttcctctggagccagtctccaaagtaactatcagctctattccactcaaatttatgggcaaaatgacatgatgtttgggattcgctttaaaatgttcta

SEQ ID NO: 325572 - DNA, 120 bp, Artificial Sequence
  ENSG00000136099_38 (sequence is synthesized)
gaaaaaaacacagggagctatgtgaaacaagatcgatttgataagatattgataattgtcaatgctagcataggtgcatgtgaggtagggaaatttcagcagtatctctaaatgtttgtg

SEQ ID NO: 325573 - DNA, 120 bp, Artificial Sequence
  ENSG00000136099_39 (sequence is synthesized)
tttgaaaatgtacataatggaaagtcttaaaaaaagacactcaagagtactatgcctatgtcttatactctatggatttcatttgaaattaaaatgatgataagcataatgagacctaac

SEQ ID NO: 325574 - DNA, 120 bp, Artificial Sequence
  ENSG00000136099_40 (sequence is synthesized)
atttactgagcaagtcttctgtgagcagagctccttaccaagcattctgcatgaattatctcatttaatcagcaaactacccccaggatatgggaagtatcattaactccattttgcaat

SEQ ID NO: 325575 - DNA, 120 bp, Artificial Sequence
  ENSG00000136099_41 (sequence is synthesized)
taaagaaaccgaggcacaagaaggttagataaaatgccaaaaatcacacagctaataagtatccagggtgagattcaaacctaggttattcagtgcaaaaaataaaacaaagtaatgaaa

SEQ ID NO: 325576 - DNA, 120 bp, Artificial Sequence
  ENSG00000136100_0 (sequence is synthesized)
gctcgcggcctcggagggccggggctgggtggcagcggccatggaccgcttcgtttggaccagcggcctcctggagatcaacgagaccctggtgatccagcagcgcggggtgcgaatcta

SEQ ID NO: 325577 - DNA, 120 bp, Artificial Sequence
  ENSG00000136100_1 (sequence is synthesized)
cgatggcgaggagaagataaaatttgatgctgggactctccttcttagtacacaccgactgatttggagagatcagaaaaatcatgagtgttgcatggccattctcctttcccaaattgt

SEQ ID NO: 325578 - DNA, 120 bp, Artificial Sequence
  ENSG00000136100_2 (sequence is synthesized)
gttcattgaagaacaggcggctggaattgggaagagtgccaaaatagtggttcatcttcacccagctcctcctaacaaagaacctggcccattccagagtagtaagaactcctacatcaa

SEQ ID NO: 325579 - DNA, 120 bp, Artificial Sequence
  ENSG00000136100_3 (sequence is synthesized)
actctccttcaaagaacatggccagattgagttttacaggcgtttatcagaggaaatgacacaaagaagatgggagaatatgccagtttcccagtcattacaaacaaatagaggacccca

SEQ ID NO: 325580 - DNA, 120 bp, Artificial Sequence
  ENSG00000136100_4 (sequence is synthesized)
gccaggaagaataagggctgtaggaattgtaggtattgaaaggaaactggaagaaaaaagaaaagaaactgacaaaaacatttctgaggcctttgaagacctcagcaaactaatgatcaa

SEQ ID NO: 325581 - DNA, 120 bp, Artificial Sequence
  ENSG00000136100_5 (sequence is synthesized)
ggctaaggaaatggtggaattatcaaaatcaattgctaataaaattaaagacaaacaaggtgacatcacagaagatgagaccatcaggtttaaatcctacttgctgagcatgggaatagc

SEQ ID NO: 325582 - DNA, 120 bp, Artificial Sequence
  ENSG00000136100_6 (sequence is synthesized)
taacccagttaccagagaaacctacggctcaggcacacagtaccacatgcagctggccaaacaactggctggaatattgcaggtgcctttagaggaacgagggggaataatgtcactcac

SEQ ID NO: 325583 - DNA, 120 bp, Artificial Sequence
  ENSG00000136100_7 (sequence is synthesized)
ggaggtgtactgcttagtaaaccgagctcgaggaatggaattgctctcaccagaagatttagtgaatgcgtgcaagatgctggaagcactgaaattacctctcaggctccgtgtgtttga

SEQ ID NO: 325584 - DNA, 120 bp, Artificial Sequence
  ENSG00000136100_8 (sequence is synthesized)
cagtggcgtcatggtaattgagcttcagtctcacaaggaagaggaaatggtggcctcggccctggagacagtttcagaaaagggatccctaacatcagaagagtttgctaagcttgtggg

SEQ ID NO: 325585 - DNA, 120 bp, Artificial Sequence
  ENSG00000136100_9 (sequence is synthesized)
aatgtctgtcctcctagccaaagaaaggttgctgcttgcagagaagatgggccatctttgccgtgatgactcagtggaaggcctgcgtttttacccaaatttatttatgacacagagcta

SEQ ID NO: 325586 - DNA, 120 bp, Artificial Sequence
  ENSG00000136100_10 (sequence is synthesized)
agggttttgtatttaaaatcctttttgtccatatgcttgcgtcatgtagaggttgtatgacattgagctaagagataaaccccgatcaattgagaatttattggaacttcacagtgcaat

SEQ ID NO: 325587 - DNA, 120 bp, Artificial Sequence
  ENSG00000136100_11 (sequence is synthesized)
gtaaatctcttttaatttctcactaaatatggtccaggaaatttatttagtatacgcataggaaaattcagaaaagtgaatgccaatatgaatttaaaatcatgctatagtgcagaaccc

SEQ ID NO: 325588 - DNA, 120 bp, Artificial Sequence
  ENSG00000136100_12 (sequence is synthesized)
tcagagtttaacttggaatatagtggattttaacttgatcctcaaatctaatcattttataaagaagggaatttagttttgcagagaataaaaagagaagttgcatgttcagacaggtta

SEQ ID NO: 325589 - DNA, 120 bp, Artificial Sequence
  ENSG00000136100_13 (sequence is synthesized)
gattattattttggtgtaactgaaattcactgattgcacatgacaatgttgggacaaaatatactgcagcatgctatatgaggctcctccccagggcttttagaagcagtcatagacatg

SEQ ID NO: 325590 - DNA, 120 bp, Artificial Sequence
  ENSG00000136100_14 (sequence is synthesized)
tcttcaacataccaaataaaatacctttaaaaatgaaataattttatttgacacatatatttatatatattctatctagtttctctttgtttttttaagtgatgatttcatgactggcat

SEQ ID NO: 325591 - DNA, 120 bp, Artificial Sequence
  ENSG00000136100_15 (sequence is synthesized)
ttaaagaatgcaactgtgtcattttgtttccaaatgctgtggattttgaaactgaactagagagctgtatagacatgcccagagttatgattacaaatttaggaggtagacggctcagga

SEQ ID NO: 325592 - DNA, 120 bp, Artificial Sequence
  ENSG00000136100_16 (sequence is synthesized)
attccctgggattgttgtgctggtggaatggcagagggaacttcacaggaaccttagtgttcttttacctcaaagccacagacaggaaatagaaagtggaaaagtaatatctccttttct

SEQ ID NO: 325593 - DNA, 120 bp, Artificial Sequence
  ENSG00000136100_17 (sequence is synthesized)
tttccataaggagtttcaacactgaactttaaaaagtctatcatattccagcaatattttttctttgtcctttatgttgtaagttgtgtggaaaaactacttcggtaagaaatgttactg

SEQ ID NO: 325594 - DNA, 120 bp, Artificial Sequence
  ENSG00000136100_18 (sequence is synthesized)
caaactcagggaccccacaggacaggagacaccctttctgaaactgagttggaagtgaaagggtggtgatggttttggccaagcctgcgggagggaaagtattgtattgggagcaccctt

SEQ ID NO: 325595 - DNA, 120 bp, Artificial Sequence
  ENSG00000136100_19 (sequence is synthesized)
gggaccaggaagagggatgcccaggttcacactctgggacccctaagacattgtcagtgggtaaggtggagggccactgccagaggctgctgcagtgccctctgggaagtgccagggacc

SEQ ID NO: 325596 - DNA, 120 bp, Artificial Sequence
  ENSG00000136100_20 (sequence is synthesized)
ctcagctgcagacccaggggatcccaatcccttatctctgcctgaaaagtggctattgctgcttcgtatcctccagtgtcacaggaatgctgtgcctgagacatcccactttagtttttg

SEQ ID NO: 325597 - DNA, 120 bp, Artificial Sequence
  ENSG00000136100_21 (sequence is synthesized)
ttttccaaacctgtcactgactcttcattgtggtgacagatcctctggttcccccattgctcagcctcaggtttattttgagggtaactcagtgtctgactgcccaagtcttttaggggt

SEQ ID NO: 325598 - DNA, 120 bp, Artificial Sequence
  ENSG00000136100_22 (sequence is synthesized)
tagttggaccattgtgtaagcttgtttgtatgtctcacctctttctggttggtacttactgtctcacactgctctggcaaacttgtacacacacacacactctctctctctctcacctgg

SEQ ID NO: 325599 - DNA, 120 bp, Artificial Sequence
  ENSG00000136100_23 (sequence is synthesized)
ctaaggcttttaaaattatgaagataaataatctgtttcaccagctggagtgagttgcaaggaagattgctggagctactcaatctagcgctaatggtttggattcattactgcaaacct

SEQ ID NO: 325600 - DNA, 120 bp, Artificial Sequence
  ENSG00000136100_24 (sequence is synthesized)
acataatttaacatatttgtttactttagtgtgacaactgatgaaaaaaaatggagcaatctgaattgtataaaataacttaagaaggaagaaaagtgatatataaatatattttgcaaa

SEQ ID NO: 325601 - DNA, 120 bp, Artificial Sequence
  ENSG00000136100_25 (sequence is synthesized)
tgtcacattaatttaaaaatgagtatgattgattttatttttaaagtgggcattcttcactgtttcgagacctttgtatgtatttgtgtatttttatctttttttttcaggccattatta

SEQ ID NO: 325602 - DNA, 120 bp, Artificial Sequence
  ENSG00000136100_26 (sequence is synthesized)
taaggtgttattttggccctctaatgtagaagttatgtttaaatacaaccaatcaggccctaagtgcaaaaaagttctgtcttggtgcttatcactggtataattattatttttttgttt

SEQ ID NO: 325603 - DNA, 120 bp, Artificial Sequence
  ENSG00000136100_27 (sequence is synthesized)
tcctaactttgctcttaggagcatgagcctctttgtagctttatggtaatgcaatatttctggtcatttactgtcaaaaaatttttttacattgtgttagtgaagactgtgttttcaggg

SEQ ID NO: 325604 - DNA, 120 bp, Artificial Sequence
  ENSG00000136100_28 (sequence is synthesized)
ttaaatgattggtatcaatgtatatagagtaaaattattgcaaaatttaaaaatgatttttcttggcattctttttaaatactctgaaacatatatgcaaatgagaaacctttaatcata

SEQ ID NO: 325605 - DNA, 120 bp, Artificial Sequence
  ENSG00000136100_29 (sequence is synthesized)
ctaaagccagttatgttaagaatttttcctttggattttataattaagagttgcttataaatacttatgacattgagctcttactgttttagttgtcttaaaacaatgggacatgtcatg

SEQ ID NO: 325606 - DNA, 120 bp, Artificial Sequence
  ENSG00000136100_30 (sequence is synthesized)
aactggtttctttttttaaaaaattcttgatgtgaattccactgttacctgaccatgtatattcagatgaatgtactctttcttgttccttgttaccagattaatctgagagaatgtgga

SEQ ID NO: 325607 - DNA, 120 bp, Artificial Sequence
  ENSG00000136100_31 (sequence is synthesized)
ttcatcctgtcatctttctcatactcaaatacttaaaatggttcttttgcccaaaagtctcagagtcttcattttggtacagtggagtcacaacttgtaaggtggttaggttttaaagac

SEQ ID NO: 325608 - DNA, 120 bp, Artificial Sequence
  ENSG00000136100_32 (sequence is synthesized)
cgtgcctaaggacaaaattgagcatgctcagaatggtccttgaaaatctcctaaattaccaataaatttctctttgtagtcttaaagtttaaatccctgtggagtgatatgtaggtatga

SEQ ID NO: 325609 - DNA, 120 bp, Artificial Sequence
  ENSG00000136100_33 (sequence is synthesized)
atatattatgcttatattaagtacaaaaatacaaactgcatatcaagagattcttatagcattaataatttccatgcatgtgtctttttccagtaggtatggttgaatttatgtaaattt

SEQ ID NO: 325610 - DNA, 120 bp, Artificial Sequence
  ENSG00000136100_34 (sequence is synthesized)
attgctaatcccatcccttacgatctagagtataagctgcgcaagggcagaagtttttatctggtttgttcatggatgtattctaagagctgagaacagggcctggacacaataagcatt

SEQ ID NO: 325611 - DNA, 120 bp, Artificial Sequence
  ENSG00000136100_35 (sequence is synthesized)
caataaatatttactgaatgaatgaactcctacctatattcctatttataatttggctccactttatcctactttagctcccattcaattcaataaaaaaaacatttttttgaacacata

SEQ ID NO: 325612 - DNA, 120 bp, Artificial Sequence
  ENSG00000136100_36 (sequence is synthesized)
gtgtgtgtgtgtgtgtgtgtgttgtggcttgttaatatgatggaaggtagtattatacaacataccagatttcaccatatttttacaataaaatttttattatatcttaagccttagcag

SEQ ID NO: 325613 - DNA, 120 bp, Artificial Sequence
  ENSG00000136100_37 (sequence is synthesized)
ttttacaataaaatttttattatatcttaagccttagcagtgagtggagaatatgaagtttaggtttcagtgggaatgggaagcagaggttgtgttcccaaggaaggaacagaggctgga

SEQ ID NO: 325614 - DNA, 120 bp, Artificial Sequence
  ENSG00000136100_38 (sequence is synthesized)
aaatacactaagtcatgccattcgcctgctagcagagttttcagtggtatagtttagttaaaggaacagagtgtaaatgcagtggtatgttgaactatctcagtatctgaaggttcccca

SEQ ID NO: 325615 - DNA, 120 bp, Artificial Sequence
  ENSG00000136100_39 (sequence is synthesized)
gcggccgcttccctccgcccggaatgcttccgggagcgcacagctgcagtgcccgggagaaggagcgctcgccgtctgcgggcgccgggcggcgatccggcagtcgacttccttggcgtg

SEQ ID NO: 325616 - DNA, 120 bp, Artificial Sequence
  ENSG00000136100_40 (sequence is synthesized)
gttccagaccccctgacgacaccaacctcggcgtcggcaccggacagccccgtttcgcctttctgtgaggagggcgcggtggccgtacagtccgtgccccagcggaagctttagcttgga

SEQ ID NO: 325617 - DNA, 120 bp, Artificial Sequence
  ENSG00000136100_41 (sequence is synthesized)
actatgtctcttctgggtacttcaacttttgtaggattaagcattagttaaaatttagttatagtgtgaatgttctttggattttagtaggacattcagtaaattatttcttgcatatac

SEQ ID NO: 325618 - DNA, 120 bp, Artificial Sequence
  ENSG00000136100_42 (sequence is synthesized)
atacattctgcctaccattagaacccagagtgtgtttaaattagtgtcctaaattaattacattttttttctgctgtgtgtttctattaggtttcagaaaagggatccctaacatcagaa

SEQ ID NO: 325619 - DNA, 120 bp, Artificial Sequence
  ENSG00000136100_43 (sequence is synthesized)
gagtttgctaagcttgtgggaatgtctgtcctcctagccaaagaaagattaatctgagagaatgtggattcatcctgtcatctttctcatactcaaatacttaaaatggttcttttgccc

SEQ ID NO: 325620 - DNA, 120 bp, Artificial Sequence
  ENSG00000136100_44 (sequence is synthesized)
ctaggattacaggtgtgagccactgtgcatggcctctttttatttttttaatgtggctactataaaatttgcagtgacatatgtggcatgcatattttattgggtaccactgctttaagg

SEQ ID NO: 325621 - DNA, 120 bp, Artificial Sequence
  ENSG00000136100_45 (sequence is synthesized)
aatagaagtctttggttcctttgtcaatcttttttgctttgtagtgattaaatcacctaaaattattgataaatggtaattttaaaatatactcttctgttttagtgatcattaccattg

SEQ ID NO: 325622 - DNA, 120 bp, Artificial Sequence
  ENSG00000136100_46 (sequence is synthesized)
ttgcactccagcctgggcagcaagagcgaaattccttctaaaaaaaaagccagtaattttatttagcatgtagattttagttcataattttattatctgtgtattcatgagctgtttatg

SEQ ID NO: 325623 - DNA, 120 bp, Artificial Sequence
  ENSG00000136100_47 (sequence is synthesized)
ccattgttgcttgggtttgatatgttttaaatgttgttttgtttaatattgccctcatatctgggcataaaagaaggtataaaagatgtcctccttttcagcagttgaatatcctagata

SEQ ID NO: 325624 - DNA, 120 bp, Artificial Sequence
  ENSG00000136100_48 (sequence is synthesized)
gtaattgagcttcagtctcacaaggaagaggaaatggtggcctcggccctggagacagtatgtgaagccgattttctccagtctttagagcttgctatgaagacccgaaggcttagcaac

SEQ ID NO: 325625 - DNA, 120 bp, Artificial Sequence
  ENSG00000136100_49 (sequence is synthesized)
tcaaaaaacaggatttccttttgaatttaactttactgaaaaagtaacattcacacacccaaataaaaatggtttatcactaacaatgaatcaatattaaccaaagtcatacattaagag

SEQ ID NO: 325626 - DNA, 120 bp, Artificial Sequence
  ENSG00000136100_50 (sequence is synthesized)
ctttttgaaacttcttgacactcttaacatcttacatgtaaggagaattagaattagtgagtgaggtgctttcttttctattaaagctcagtattgagaacaggtttttaactttatcag

SEQ ID NO: 325627 - DNA, 120 bp, Artificial Sequence
  ENSG00000136100_51 (sequence is synthesized)
atgttacaacacaattaaactttgtcttccagtaacacctacataagcagcttgataaaacgccacaagttttatgaaaataattgcttcaaaaaatataaaaagcaactgtagtttaga

SEQ ID NO: 325628 - DNA, 120 bp, Artificial Sequence
  ENSG00000136100_52 (sequence is synthesized)
tggattttactggccaaactgccaatattactcattaggatgcttgaaatagtactgtcttcatagcttctatggtgagcctgtataatttgaataacttatatttattatccttctcat

SEQ ID NO: 325629 - DNA, 120 bp, Artificial Sequence
  ENSG00000136100_53 (sequence is synthesized)
tttcaactagatgaaaaccccaagactacagatatttctaccacatattttaaactaaacccatatgtaaagtcccttcgctggagcgttaatatgtactcagaatttgttacatattcc

SEQ ID NO: 325630 - DNA, 120 bp, Artificial Sequence
  ENSG00000136100_54 (sequence is synthesized)
cagatgaccagcatggataagaagaacccaggaaaagggaatggaatatgcaaggcacattcaagagtactgaagtggaaaatcaagaatatactgagttactgatgctaatagccaaag

SEQ ID NO: 325631 - DNA, 120 bp, Artificial Sequence
  ENSG00000136100_55 (sequence is synthesized)
ttagccctatgtcattagaaatgttaacaagagcataactattttcatgatatggttattgtcaactgacatgttttttttttctttcaggtatattaaataagttcattgtgcttatta

SEQ ID NO: 325632 - DNA, 120 bp, Artificial Sequence
  ENSG00000136104_0 (sequence is synthesized)
ccgctggctagaccatggagggccgctgggtgcagccacagagcgcggggccccggcgaccccgccccgctccgcgtcactcggcgccctgcggcgcgcgatgagcacctaccactagcg

SEQ ID NO: 325633 - DNA, 120 bp, Artificial Sequence
  ENSG00000136104_1 (sequence is synthesized)
gagccgcgagggagaggccgcggccccttcccgttgcctgcggccaccggccggcattcagagcccctcgcctggcgctaaatttaaaaacgtaacacgagcagcaggctggtctcggaa

SEQ ID NO: 325634 - DNA, 120 bp, Artificial Sequence
  ENSG00000136104_2 (sequence is synthesized)
acgaaacgaaattcggtccctgggcctcctcccgggcgctgccggtccctcagcgcgccgcgccacccggaacagacccttctcccgccattttcggcggggctgggagactgaggcccg

SEQ ID NO: 325635 - DNA, 120 bp, Artificial Sequence
  ENSG00000136104_3 (sequence is synthesized)
cggcgctgagcctgcggcgccccggaagaggcgggcggcatggccgctggcgtggactgcggggacggggttggcgcccggcagcacgtgttcctggtttcagaatatttaaaagatgct

SEQ ID NO: 325636 - DNA, 120 bp, Artificial Sequence
  ENSG00000136104_4 (sequence is synthesized)
tcaaagaagatgaaaaatgggctaatgtttgtaaaactggttaacccctgttcaggagaaggagccatttacttgttcaatatgtgtctacagcagctgtttgaagtaaaagttttcaag

SEQ ID NO: 325637 - DNA, 120 bp, Artificial Sequence
  ENSG00000136104_5 (sequence is synthesized)
gaaaaacaccattcttggtttataaatcaatcagttcaatcaggaggtcttctccattttgccacacctgtggatcctctatttctgcttctccactacctcataaaggctgataaggag

SEQ ID NO: 325638 - DNA, 120 bp, Artificial Sequence
  ENSG00000136104_6 (sequence is synthesized)
cttcctggacttgagaagttacttcatcatgtgacagaggaaaaaggtaatccagaaatagacaacaagaaatattacaagtacagcaaagagaagacattaaagtggctggaaaaaaag

SEQ ID NO: 325639 - DNA, 120 bp, Artificial Sequence
  ENSG00000136104_7 (sequence is synthesized)
gttaatcaaactgtggcagcattaaaaaccaataatgtgaatgtcagttcccgggtacagtcaactgcatttttctctggtgaccaagcttccactgacaaggaagaggattatattcgt

SEQ ID NO: 325640 - DNA, 120 bp, Artificial Sequence
  ENSG00000136104_8 (sequence is synthesized)
tatgcccatggtctgatatctgactacatccctaaagaattaagtgatgacttatctaaatacttaaagcttccagaaccttcagcctcattgccaaatcctccatcaaagaaaataaag

SEQ ID NO: 325641 - DNA, 120 bp, Artificial Sequence
  ENSG00000136104_9 (sequence is synthesized)
ttatcagatgagcctgtagaagcaaaagaagattacactaagtttaatactaaagatttgaagactgaaaagaaaaatagcaaaatgactgcagctcagaaggctttggctaaagttgac

SEQ ID NO: 325642 - DNA, 120 bp, Artificial Sequence
  ENSG00000136104_10 (sequence is synthesized)
aagagtggaatgaaaagtattgataccttttttggggtaaaaaataaaaaaaaaattggaaaggtttgaaactttgaaaataaaatctagcaaaaatatttgctttttacatgtttcagt

SEQ ID NO: 325643 - DNA, 120 bp, Artificial Sequence
  ENSG00000136104_11 (sequence is synthesized)
ttgtccttcctgactgttaatgactacctttggttgggggaaggaagaggccaatttcatgttctcttaaacatttctttgcatttggtttttgtgttcctgaacaaaatatgggaaagt

SEQ ID NO: 325644 - DNA, 120 bp, Artificial Sequence
  ENSG00000136104_12 (sequence is synthesized)
gtctaacttcatggctatggccttttggagtctcatctgacataatgaaaagtaatcacttgaagagaattaacatatagcatcatgattttctcaataaactgatgtgtgacaatgtta

SEQ ID NO: 325645 - DNA, 120 bp, Artificial Sequence
  ENSG00000136104_13 (sequence is synthesized)
gcccaagaactggcggagcggcccgcgaccccgggcgcgccgccccccaccccggtggctcccactacccggcccggcgcgggatgggattctctctgggacagctggccccgcattttg

SEQ ID NO: 325646 - DNA, 120 bp, Artificial Sequence
  ENSG00000136104_14 (sequence is synthesized)
ctggccccgcattttggtcacacgtcatagcaagccgcggttttcaaacccggaagcgccgaaaaggaccgagcgtgtttcccgggccctgatccccggtggctcgggtgggagggtgga

SEQ ID NO: 325647 - DNA, 120 bp, Artificial Sequence
  ENSG00000136104_15 (sequence is synthesized)
tgggttggaaccagggatccagtaggctcgaagtggcctcagacggtgcgcagttttaagaaagcaaagggacaggcctgcagtggcgaggcaggagggaagcgggatgggagtcgcggt

SEQ ID NO: 325648 - DNA, 120 bp, Artificial Sequence
  ENSG00000136104_16 (sequence is synthesized)
taggccaagggtagttcaaagcgattcagcaggatgatgaccacaggagtgctggagccgggcctttcagcccccgtgtggatgatgaccggccatccaggacatgcgagggcttgggac

SEQ ID NO: 325649 - DNA, 120 bp, Artificial Sequence
  ENSG00000136104_17 (sequence is synthesized)
agtggacagccagtgccacacaaggaaggaccgattaaatgacacagttaaaggaatttggcctagggagtgcaagccagaaaggtttggtctttttatatatgtaacattggaaaaaag

SEQ ID NO: 325650 - DNA, 120 bp, Artificial Sequence
  ENSG00000136104_18 (sequence is synthesized)
gaacatctcctgttccctgtattaagttttgactttagctcagcaaatgcagtgtttgtggcagtaaatatactctgataacaatattctttcccaggaatttagagttttatgatggtt

SEQ ID NO: 325651 - DNA, 120 bp, Artificial Sequence
  ENSG00000136104_19 (sequence is synthesized)
attgaaaatgtttacatgacaggctgtcaataatattttttgcctctaaaaataaaacatacataaagtgtacggattttaagtatgcaactcactgaacttttcatacgtatacaccac

SEQ ID NO: 325652 - DNA, 120 bp, Artificial Sequence
  ENSG00000136104_20 (sequence is synthesized)
cctagtaaccatcccccagttcaagatgtagactgtttccaataacgcctcatgcctgttcctagatagccccaggaacctctatgctgacctctgtcaccagagattagttttgcctgt

SEQ ID NO: 325653 - DNA, 120 bp, Artificial Sequence
  ENSG00000136104_21 (sequence is synthesized)
ttgaataagagtgtaccctttgtgtctggcttctttcactctgaaagattcatccttgttgtgaaattcattcatgttgtagcagttgtttggttggttggttagttttttcattgctgc

SEQ ID NO: 325654 - DNA, 120 bp, Artificial Sequence
  ENSG00000136104_22 (sequence is synthesized)
ttctgtttaattgtatgagtatccatactatgtatctctactgtggatggacatttgggttgtttccagtttgcaactattacaagttacacttctcagagcattcctttaggcggcttt

SEQ ID NO: 325655 - DNA, 120 bp, Artificial Sequence
  ENSG00000136104_23 (sequence is synthesized)
tggtagacatgggcactcatatctctagggtgtataccctggagtggaatggctggttctagtacttgtgtgtagagctgtagttgacaatgttaaatggttttccaaagtggttatact

SEQ ID NO: 325656 - DNA, 120 bp, Artificial Sequence
  ENSG00000136104_24 (sequence is synthesized)
gatttatattcccacaagcagtgtatgagagttcccattgctgcacatcctcggtaaaaacgtttgggtggtaaaacagctaatgcaaaattcagggttttgacagaatctcgcaaaggg

SEQ ID NO: 325657 - DNA, 120 bp, Artificial Sequence
  ENSG00000136104_25 (sequence is synthesized)
ctacccgtatacatgcttttcattagaaaaatcatcctttcttctcacttcgtcacatcaagacaattagattttcagagtaggaactctaatcattctttcagaatcaagtgcattatt

SEQ ID NO: 325658 - DNA, 120 bp, Artificial Sequence
  ENSG00000136104_26 (sequence is synthesized)
gttatttcagatatacacaatagctgatgataatttgagcttcttattttgttgttctgtttaatcagtattgacatcgtcattttatacgtgtgtttgtgtccttgtattaaacacaaa

SEQ ID NO: 325659 - DNA, 120 bp, Artificial Sequence
  ENSG00000136104_27 (sequence is synthesized)
accctcaaaagaattaaatattgattgtatccctgaaaattgtaggttttaatatatctactgctgggttgtgggaagagtttcagttgagtttctgttcagagctgagatctactgtga

SEQ ID NO: 325660 - DNA, 120 bp, Artificial Sequence
  ENSG00000136104_28 (sequence is synthesized)
ccttttaaggcattgggggaggctgagcagctgttggaactgctagaaagagctgtgtggtcaggggggcaggaactcttaacagttaaaaacttgagctaccagctcctgcaattcttc

SEQ ID NO: 325661 - DNA, 120 bp, Artificial Sequence
  ENSG00000136104_29 (sequence is synthesized)
aggtttgacagcgactgcagtgcaacactagttctcaaacttgagggcatcatttacctggggagctgggcctcagttcccagaggtgctggttcagtaggtcctgggctggggccagag

SEQ ID NO: 325662 - DNA, 120 bp, Artificial Sequence
  ENSG00000136104_30 (sequence is synthesized)
aatgtgcattggtaacaagttcccaagagatactgatgctgctggtccggaaaccactgcccccaccccaggaaccactgcagtaaagactttgggaactagattgggatataagaatga

SEQ ID NO: 325663 - DNA, 120 bp, Artificial Sequence
  ENSG00000136104_31 (sequence is synthesized)
caagcctcatgtttggccctctttgtggtgggccagaatttatatggtcaaggaagtgcatgtaagtgcagagtgtgaggctcatcttcccagatgtagttgtcgtcttttccagaagat

SEQ ID NO: 325664 - DNA, 120 bp, Artificial Sequence
  ENSG00000136104_32 (sequence is synthesized)
gagaaatcagcctgcttagttacccattcgggagttggaaacgatatgcccttggctgagggagcaccatactccagtaaagctgggcccttaataaagaaaacaaagattattaaacat

SEQ ID NO: 325665 - DNA, 120 bp, Artificial Sequence
  ENSG00000136104_33 (sequence is synthesized)
ttttcaaaagtatttggcggaggcggcttgtattcggttttagaaaacttgggatctgaagaacttactttgtgtactgaaaagtgagcacatgaacccacaggccaacagaactttaaa

SEQ ID NO: 325666 - DNA, 120 bp, Artificial Sequence
  ENSG00000136104_34 (sequence is synthesized)
gggatttatccgtgagacaagggtaaagatgcctaaccttgcaatgatacttttttccaacatttaattcatgctgttcatcgagttgcctgccacagcactgtgttatatcttgaagga

SEQ ID NO: 325667 - DNA, 120 bp, Artificial Sequence
  ENSG00000136104_35 (sequence is synthesized)
tatatttaaatgtttgatttaggtatctttgcctctagttttcagtttgtttggagaagctggctatctcagataaacaaatctggaacttggaagagatactgtgagatatgcagactt

SEQ ID NO: 325668 - DNA, 120 bp, Artificial Sequence
  ENSG00000136104_36 (sequence is synthesized)
attaagtgatgacttatctaaatacttaaagtgagtattgattatcttcagtcataatgaagtaccatttgcttcttggtttccccagcagtggggtttccttatggcttatcatatcac

SEQ ID NO: 325669 - DNA, 120 bp, Artificial Sequence
  ENSG00000136104_37 (sequence is synthesized)
tgtttatgatacaagattattcttcagctatgtcatatactttgtgctttggggatgatttttaatggatgattggaatgaactgatttgatggatacggattgcaggaactagtgaatg

SEQ ID NO: 325670 - DNA, 120 bp, Artificial Sequence
  ENSG00000136104_38 (sequence is synthesized)
tcaagattggaattatggcttggtctgattttagaggattaactatgttaaaattttatcctcaattatacttaactaatttggttctttgtgatcgttttaagaggaagaaaggaggga

SEQ ID NO: 325671 - DNA, 120 bp, Artificial Sequence
  ENSG00000136104_39 (sequence is synthesized)
tggaaagagtagatggaatatagacttttttttaatttacaaaatattgatatcattttcactattatcactagatgttcactaaagggactttatgccaaagacttggaagtcaaagta

SEQ ID NO: 325672 - DNA, 120 bp, Artificial Sequence
  ENSG00000136104_40 (sequence is synthesized)
aagggttttaagaatggtttaatgtatgttcctttctttataaagagcttatacatttagactttaagttgaaaaagaagtgttagaagtgtttattttctagatttttgcaaaatcgtt

SEQ ID NO: 325673 - DNA, 120 bp, Artificial Sequence
  ENSG00000136104_41 (sequence is synthesized)
acttaattttgttgttaagattttatgtgtgtgatgatttaatagcttttcctgatccttataaatcctttttatcctctgagtcatgaagataaaatgactttttaatagatacagttg

SEQ ID NO: 325674 - DNA, 120 bp, Artificial Sequence
  ENSG00000136104_42 (sequence is synthesized)
ttggttttagcaaattccagaggtcctactttaaaaaacaatgattggaaactggtttctataatagttaaagtgtgctgaaagcctgcttcaaattgataatcatatccttctgcttaa

SEQ ID NO: 325675 - DNA, 120 bp, Artificial Sequence
  ENSG00000136104_43 (sequence is synthesized)
tatatccccagatttctatgctgcttgtcttgttagagacctcatgtctttgtactccattgtttgtatagattcctttctttccactaacatttttaagttttggttgaagagttcaga

SEQ ID NO: 325676 - DNA, 120 bp, Artificial Sequence
  ENSG00000136104_44 (sequence is synthesized)
agaaaggtatgccaattaaactgctttctaatggaagaaaagttgaaatttatgtggctttttgtgaacagttaaaatgattttcacctttaaatatatgttagcatcttcactatgaag

SEQ ID NO: 325677 - DNA, 120 bp, Artificial Sequence
  ENSG00000136104_45 (sequence is synthesized)
aaaaaatactccaacaccgaaacacaaatttatagaggctaaagaaaaggaactctgttccaacagatgggttctaattttattttttagttcagacaacaccaaaacaaggacttacat

SEQ ID NO: 325678 - DNA, 120 bp, Artificial Sequence
  ENSG00000136104_46 (sequence is synthesized)
atcaaaataaagactcatttattgagaaaactttcattctttacactgagttgattgaacaggaagatatatggaggtaaagctgtaagttgaaaagtaggacttactaagtcttaagtt

SEQ ID NO: 325679 - DNA, 120 bp, Artificial Sequence
  ENSG00000136104_47 (sequence is synthesized)
ggccctgtctttctgtttgtttgtctatgaaaaacgatgactttgattgttatttttaactttcttaggcttccagaaccttcagcctcattgccaaatcctccatcaaagaaaataaag

SEQ ID NO: 325680 - DNA, 120 bp, Artificial Sequence
  ENSG00000136104_48 (sequence is synthesized)
aggcttggcggttttccctgcaacttcagacactcccagaggactcggactttttcttctgcacttttttggaaaatcgccaggtgccaaaaggtgcattttaaagcgctgactgtaaat

SEQ ID NO: 325681 - DNA, 120 bp, Artificial Sequence
  ENSG00000136104_49 (sequence is synthesized)
gctttatttctttgattagtaccactagtctatgtgggcagcggcattcctccctggagcactcagctaggcggttccgtccaggagcttgaaagcatcccagcggtgcacctgttcagt

SEQ ID NO: 325682 - DNA, 120 bp, Artificial Sequence
  ENSG00000136104_50 (sequence is synthesized)
ctgaggacctcaagcttgggtcaggccagcatgttttaggtatggatgtggtgacttaaagtacttgattgtcttgatttcaccctgaaagctttggcaaaccaagtttcaacccttact

SEQ ID NO: 325683 - DNA, 120 bp, Artificial Sequence
  ENSG00000136104_51 (sequence is synthesized)
ttaaaaatctgacactgctttactccatatcaatttggaagcttctaattcataaatatacctaaacgttggcattttatctctccaggagttattaaacatttcttcctttttagaaga

SEQ ID NO: 325684 - DNA, 120 bp, Artificial Sequence
  ENSG00000136104_52 (sequence is synthesized)
tggcctatttttgttttatatttaattacttaaatcatctagagaatgtgtaattatgtttaaatatgctgtgaggtaaagctgtaatttaattattttctcaccagtttagtttttcat

SEQ ID NO: 325685 - DNA, 120 bp, Artificial Sequence
  ENSG00000136104_53 (sequence is synthesized)
tctgtaggattattttgtcaagttctaagagtaagttccaatgggatttttactgagattttgttagatgcataacttactttgggaaaacaaacatctttacaaacttaaatattctta

SEQ ID NO: 325686 - DNA, 120 bp, Artificial Sequence
  ENSG00000136104_54 (sequence is synthesized)
tttgggaatatagtatttctttttagttactcaagtcttaagaatacctttcactaatgttcggttcttcatcttcaataggttctagacatatctttgtatgagtatgtgtagatattt

SEQ ID NO: 325687 - DNA, 120 bp, Artificial Sequence
  ENSG00000136104_55 (sequence is synthesized)
tcaagcttgggtcaggccagcatgttttagagtaaggacataggagatgacggaaggttggaagtagatgccaaaaagtgatttggtggggaatctgaaatttttctagataaacatgtt

SEQ ID NO: 325688 - DNA, 120 bp, Artificial Sequence
  ENSG00000136104_56 (sequence is synthesized)
tagaaagcaattttatatatgccatggaggagaggttgttaggaggtactgaggaaagtgcagacctagtgatcttggtaaagtgaacatcagatccacagctttgatgtcagcatggtt

SEQ ID NO: 325689 - DNA, 120 bp, Artificial Sequence
  ENSG00000136104_57 (sequence is synthesized)
gggagttgggtgctcttgcctacttcctcagtgacttaggagagtttacttcatgtcactcagagccagtcttcgaagatggggacaaatcatggtttattaattgattctgagattcat

SEQ ID NO: 325690 - DNA, 120 bp, Artificial Sequence
  ENSG00000136104_58 (sequence is synthesized)
tctgatcattcaataagaaaatgtataaaatgtgcctagcacagacctgaataaacattagtttcttatgttttattaacaaatcatatttttcatcacaatatcttagctaatattatg

SEQ ID NO: 325691 - DNA, 120 bp, Artificial Sequence
  ENSG00000136104_59 (sequence is synthesized)
tatttgctaagtggcaggtgttgtgctctaggatttgtatggattatcacatttcatgctcagaatagcccagtgagaaaaaaacctctctttacacatgggggaacaggctttgagcac

SEQ ID NO: 325692 - DNA, 120 bp, Artificial Sequence
  ENSG00000136104_60 (sequence is synthesized)
gaggcggcttcccaaggagacagcatgtgctggggtatgcatgagccctggtagcatggctcagtctgtgctctctgccccttcttagagaataattcccagaggtagaggagaagcctc

SEQ ID NO: 325693 - DNA, 120 bp, Artificial Sequence
  ENSG00000136104_61 (sequence is synthesized)
ctagtggggctcagggagtgggagacaggaaggaaaacagcagcagatggtagacattctttgagaaaatttggaggtagaggcaagaaagaagtgagatgccagatcagggtaggattt

SEQ ID NO: 325694 - DNA, 120 bp, Artificial Sequence
  ENSG00000136104_62 (sequence is synthesized)
tcaggagaaccttgagcagtgagcttcttttggagtttttttttcctcaggcaatgaacataacttctaaaagccattcagcgtcatatatttatttagtgattgctgtatgctcttaaa

SEQ ID NO: 325695 - DNA, 120 bp, Artificial Sequence
  ENSG00000136104_63 (sequence is synthesized)
attcccctggtttgtacatcggttgggacatgggctccagggaaattgagtccggtctcattggctttggcttacagtaggctgtttgcccaggtagtcctggctccaaaacagcagaca

SEQ ID NO: 325696 - DNA, 120 bp, Artificial Sequence
  ENSG00000136104_64 (sequence is synthesized)
ttgcaccttggaattctgacactcctgacaatgcttttgcacctgtccctcttttttgttactgtagtgacatgtcctgagaagatggctgcagatgtccagcccccaatccatcctgcc

SEQ ID NO: 325697 - DNA, 120 bp, Artificial Sequence
  ENSG00000136104_65 (sequence is synthesized)
tcatcttgcctgcagcattgacaaccataggctgaaacagagaggaaattcacaggaactaaggccagggacctcccaacctctctcccatacagtttaacagactgcagaaaatgaacc

SEQ ID NO: 325698 - DNA, 120 bp, Artificial Sequence
  ENSG00000136104_66 (sequence is synthesized)
ctgaatgggcagttttcatttcccatcaaaaggtgggagggagaaagagcctcattctatataactcagaggtggtaaattcacatcaggcccaagggttgctagtggtcataaagataa

SEQ ID NO: 325699 - DNA, 120 bp, Artificial Sequence
  ENSG00000136104_67 (sequence is synthesized)
atcctgcatggacagaggaggctggaatagaagtgctgcccttgctaattgcacagacagaagaaatcccatgaatgaaaagggttgcagaggaaatcatggtttaatgtcatggtatat

SEQ ID NO: 325700 - DNA, 120 bp, Artificial Sequence
  ENSG00000136104_68 (sequence is synthesized)
aaggctgggtggattgtggggaagttaagtgtaatttataagaggtgaaacttttatctccataaagggccagattgagcctaccataaatctaaatcttctcaaatagctatgattatg

SEQ ID NO: 325701 - DNA, 120 bp, Artificial Sequence
  ENSG00000136104_69 (sequence is synthesized)
tttttcctgaatgtatgtagtgaacttcatagatacctgcatttcgtttcaattttctttattgggattttcatttttattttaagaaaaaaagtggttcattgaaaacattgaggtgag

SEQ ID NO: 325702 - DNA, 120 bp, Artificial Sequence
  ENSG00000136104_70 (sequence is synthesized)
cttaaaattattcagaacagttaagactgcttagtatgctaatgtgaacacaaaatatctgagacaggtctcagtcaatttaggaaagtttattttaccaaagttaaagatgcacccatg

SEQ ID NO: 325703 - DNA, 120 bp, Artificial Sequence
  ENSG00000136104_71 (sequence is synthesized)
accaaagttaaagatgcacccatgacacagcctcaggaagtcctgagacatgtgccccacggtggttgggggtacagtttgcttttatgtatttcagggagacatgagacatcaatcaat

SEQ ID NO: 325704 - DNA, 120 bp, Artificial Sequence
  ENSG00000136104_72 (sequence is synthesized)
gtccagtaaggcagcaacaactcaaagtgggggtttccacgttagacatagataggagacaaaaggtggcattcttttgatcagccttccactgaatacacaatgtagtctggcttgagt

SEQ ID NO: 325705 - DNA, 120 bp, Artificial Sequence
  ENSG00000136104_73 (sequence is synthesized)
agaatttccctgcctcctgtccctatcaacaagattattttcctttcacattagtttgctgaggttttaaaattaccttttctacagagttgtttgtataatttgaaggttttcttaaat

SEQ ID NO: 325706 - DNA, 120 bp, Artificial Sequence
  ENSG00000136104_74 (sequence is synthesized)
cagagttgtttgtataatttgaaggttttcttaaattcttactcatttagtggttgatgactcctgaggtagccacattactactaacatttaaaaaaacatttcaagtatgttctcagg

SEQ ID NO: 325707 - DNA, 120 bp, Artificial Sequence
  ENSG00000136104_75 (sequence is synthesized)
tttgtaaattaagcttttcaagaatttaaacttacaaaatattctttaaatggttaacttgtatatgatacaaccttaggagtttattttttttttaattcattgtgctgagtctttttt

SEQ ID NO: 325708 - DNA, 120 bp, Artificial Sequence
  ENSG00000136104_76 (sequence is synthesized)
gagaacagacagaaaggacaatcagctaggactgtgctgagaaaatgaactgaaacagcacagtgaaagttggacaagccaaacctgactccatcaatttgggttgatgcctctgacaat

SEQ ID NO: 325709 - DNA, 120 bp, Artificial Sequence
  ENSG00000136104_77 (sequence is synthesized)
tcaaacaagacttggtcagcgcagaactgcaaggctgtcttggaattttcacacatatatgtttgacattctactccaattcagttccacaatccagatgctggaagaattttgtttact

SEQ ID NO: 325710 - DNA, 120 bp, Artificial Sequence
  ENSG00000136104_78 (sequence is synthesized)
tgagatggattctcgtccatcatctttcgctcccacaaaaccattgttcacaacccccaaggactgcctatgagtaccatcattttgttacagttaatgctcattgttgtgcacagttgg

SEQ ID NO: 325711 - DNA, 120 bp, Artificial Sequence
  ENSG00000136104_79 (sequence is synthesized)
gaaatgtagccttctggttaattacattttccaattaatagaaattacaaggtacatcttccatgtgttgctgacatctagacacctgggatactctaagcaccaaagctaacttgaaca

SEQ ID NO: 325712 - DNA, 120 bp, Artificial Sequence
  ENSG00000136104_80 (sequence is synthesized)
agtttagtctttcttggaaaatttagaggaaacttcaggactcatggaacatcaagggtaccaaagtgtgttgtagatgtgggtagtataagataattgggattttcatttggtacaatg

SEQ ID NO: 325713 - DNA, 120 bp, Artificial Sequence
  ENSG00000136104_81 (sequence is synthesized)
taaaagtggtttgggggtatgtaatagcacaagtcacatgggaaataagggtaccatgtgaagcacattatatctttttaaaattatcctcctcagtattattaagtgtttaaatgttca

SEQ ID NO: 325714 - DNA, 120 bp, Artificial Sequence
  ENSG00000136104_82 (sequence is synthesized)
aaggaaagaaattcatgccctgccagattacaaaacagtatatacatgacaattccatttttgtaagaaaaagcatgtctgtatacacatatacacagcctcccatataaaagtcaggga

SEQ ID NO: 325715 - DNA, 120 bp, Artificial Sequence
  ENSG00000136104_83 (sequence is synthesized)
tcaaagatccagagaatggagaagccaatcataaaccacacctgactgcaaattgcagcgttccttcagcccaggccagatctcagatgagttaaactctgctccaagacagggaaataa

SEQ ID NO: 325716 - DNA, 120 bp, Artificial Sequence
  ENSG00000136104_84 (sequence is synthesized)
acatgtgcaccagcttgtcagtgaggtcatttcttcagccagcaaagtaacggatgccttgagaatgtaaaatggacatattgtggatgttacaaactttccttctcccttgcattgttt

SEQ ID NO: 325717 - DNA, 120 bp, Artificial Sequence
  ENSG00000136104_85 (sequence is synthesized)
atttcccatttcagcaaggttccattcaactttattttccacaaagctaagccatttgctccagctcagcttctccgtcttgactttgtgtctgcctggaatcctgcctgctcttcactt

SEQ ID NO: 325718 - DNA, 120 bp, Artificial Sequence
  ENSG00000136104_86 (sequence is synthesized)
gagaaagtatggcaagctatcacgtgttcttaaatgattgagaagattttacccttaaaacccaagaaagctgcatttgcagaaattgatcagatgcagtttttgtgtcttcaggaggag

SEQ ID NO: 325719 - DNA, 120 bp, Artificial Sequence
  ENSG00000136104_87 (sequence is synthesized)
ttgtcagtacacgagaggtagagcgagctagaagtgggtcatgggcaaggccatacatctggtacagtctggtgtccccaaatcagggggctaataccttaatttagacaaacttcacct

SEQ ID NO: 325720 - DNA, 120 bp, Artificial Sequence
  ENSG00000136104_88 (sequence is synthesized)
ctacttgctactagtacagttacgaaaaactagacctaattccaaagaatgatgttgtgaatccatatggtctgcacttctggcccactggcaaccaggccatataaacttctgtggctg

SEQ ID NO: 325721 - DNA, 120 bp, Artificial Sequence
  ENSG00000136104_89 (sequence is synthesized)
agcctgatttagcctgtctgcagcttcccatgacttctccctctggctgtcttttcttttattctggtctaaatttggaagcattgtgaggcagctttgacaggggtagattcacttttg

SEQ ID NO: 325722 - DNA, 120 bp, Artificial Sequence
  ENSG00000136104_90 (sequence is synthesized)
tattttctttttgtggcgggtgcttctttcatcatccctagagtgatgatggggaggcagatgtatgtctgggcctggtctgggcttgttccaatgtgacagtcaggactcttgctctgt

SEQ ID NO: 325723 - DNA, 120 bp, Artificial Sequence
  ENSG00000136104_91 (sequence is synthesized)
gaccacagctggttcttcaaattgaatgggttggaccatccccaggcagtctccaccatctttgcaagcttctgtggcttccagtgcttttgtagattgattttcttccccatttcattt

SEQ ID NO: 325724 - DNA, 120 bp, Artificial Sequence
  ENSG00000136104_92 (sequence is synthesized)
ggggactgtacacccaaggtagatggtgtgctgtgtgggactccagtgctcacaggagcttcctgaagggagctggggtccgtcctagagcctgtcccattgtagggattccttagatgg

SEQ ID NO: 325725 - DNA, 120 bp, Artificial Sequence
  ENSG00000136104_93 (sequence is synthesized)
tggcttctgcactaagtttaaaggcccagccatgagttaatgtgtctttttctctttttttctgaatgtctttgttgaatgaaatgcttgctttccaactaactgttttttcaggggaag

SEQ ID NO: 325726 - DNA, 120 bp, Artificial Sequence
  ENSG00000136104_94 (sequence is synthesized)
acagttgcacgcttgattgtgattacagttttgaccaggaagaattattaacttgcatttctgtgacttaataattaagaattgcatatgacaatgaaaatgttaagcaactaagactta

SEQ ID NO: 325727 - DNA, 120 bp, Artificial Sequence
  ENSG00000136104_95 (sequence is synthesized)
ttattagtcagagaaaaacaatatactacttatcaagagtgtgcctaaattttgctatgtattcatagagtgatagggtgggaaaggagggaggaagctctacaggtaattttttgtcaa

SEQ ID NO: 325728 - DNA, 120 bp, Artificial Sequence
  ENSG00000136104_96 (sequence is synthesized)
ccctgctgcccagaagcagaaattatgatgataaaaattaataatttcaccattcagcattcaccctggcaaatggcattttggtaacagtccttacttagttttatacatgcattataa

SEQ ID NO: 325729 - DNA, 120 bp, Artificial Sequence
  ENSG00000136104_97 (sequence is synthesized)
atacatatgtggcctttaacattggcattataatactcagttctgggctttttatttaacattaaattgtgaaaatgttcacatatcattaaacattctttgaaaaaatattcatgtttt

SEQ ID NO: 325730 - DNA, 120 bp, Artificial Sequence
  ENSG00000136104_98 (sequence is synthesized)
tatgatattcagtcatgggtgtttgtttcaccatatggaatgtaatttaatcatttccctatatttggacatataggttacttctgatttttttattttttgtttttattgaagtgatag

SEQ ID NO: 325731 - DNA, 120 bp, Artificial Sequence
  ENSG00000136104_99 (sequence is synthesized)
acattcttatttacagtctgtatctccaatcatttcattagacacaattttgaactaagactaagagcttggagaacatgaattctttcataattgaaatatatatagctaaagtgcttt

SEQ ID NO: 325732 - DNA, 120 bp, Artificial Sequence
  ENSG00000136104_100 (sequence is synthesized)
atcttgcatttttgacgacattgagtattgcttttattcttgaacattgttgcctgtcaaattaggctacatttctttaactagaaaggttctttttccaaatgcttatggcccatttgc

SEQ ID NO: 325733 - DNA, 120 bp, Artificial Sequence
  ENSG00000136104_101 (sequence is synthesized)
atttttgcaaattgttggttcctgtcgcttgcctgtttttatgttgagatagtaatgtttctctgttgctttgtatgagctcattctaaattaaggctattaacacttttcatgaaatat

SEQ ID NO: 325734 - DNA, 120 bp, Artificial Sequence
  ENSG00000136104_102 (sequence is synthesized)
aggatacaaacttgttttaactttttcatttgattttttaacagtgttaaatttttctgagtgttaagtacagaaattgtttccctttatgatttttccattgtttttatgcttaggaag

SEQ ID NO: 325735 - DNA, 120 bp, Artificial Sequence
  ENSG00000136104_103 (sequence is synthesized)
gccttgcccatctcaagataagttaactttcacttagattttaaaaatactaactgccctttgagtttaatgttttttagaactgttattcttgaatcaatatgtaatttatttgggcat

SEQ ID NO: 325736 - DNA, 120 bp, Artificial Sequence
  ENSG00000136104_104 (sequence is synthesized)
atgatactgaggatagttcgatttaagatctgcccaaatagcgagttatctcgatgctgtgtcaacagggacattgtcagtttctctgagagaaatctttgtgccccgcccttctgtggg

SEQ ID NO: 325737 - DNA, 120 bp, Artificial Sequence
  ENSG00000136104_105 (sequence is synthesized)
agtgccacttattgtatccacttgggcacagcatggagaatgtcttaaatgcaccagataagtctgaaacagactgttgctttgcaccattgagtcaaaaataagcctactaaattataa

SEQ ID NO: 325738 - DNA, 120 bp, Artificial Sequence
  ENSG00000136104_106 (sequence is synthesized)
gtgacagaatgtgaaaagcagaattgtgggaatcatatactgtgcctctaaaaaatactttatcaatgactttgtcttacagttcccagggagacaggtgatttttttgttttctgattc

SEQ ID NO: 325739 - DNA, 120 bp, Artificial Sequence
  ENSG00000136104_107 (sequence is synthesized)
ccatcatttatgcttcttctgaacaatttgtggtgcatctgcatcaaagttaaatcagctgctatttaccttctgcaagtgctttatataagacatggaagaaaaaaattcagtgaccag

SEQ ID NO: 325740 - DNA, 120 bp, Artificial Sequence
  ENSG00000136104_108 (sequence is synthesized)
agagagatagaaatgtacagggcagaattatttggagtcagctttttggaaagtattgctttgttggaggaaaaataaggcagctatcctgctggtctgggatgctttgcaacacaagtc

SEQ ID NO: 325741 - DNA, 120 bp, Artificial Sequence
  ENSG00000136104_109 (sequence is synthesized)
atcttttgaatatcatagggttgtccttggtttcccatggagcaaatgaataaaatcagatggtaaattggtgtgaattattcatcatgtggtaatacaaggctgtaattcctacctctg

SEQ ID NO: 325742 - DNA, 120 bp, Artificial Sequence
  ENSG00000136104_110 (sequence is synthesized)
acaattgcggcctgtgtcagttccattgtttgtgttattgtactttatgcaccctccagaattatctaccccctccccagtgtaaaccattggttggaacattctgcttcttagaaggca

SEQ ID NO: 325743 - DNA, 120 bp, Artificial Sequence
  ENSG00000136104_111 (sequence is synthesized)
gcagttttgtcttctgcctcttttaacatattctgtctcttaggtctgaattctgaatagaaatcagaactttttcactcccttatgaagcatgttagtgggggatgcttaccttcctta

SEQ ID NO: 325744 - DNA, 120 bp, Artificial Sequence
  ENSG00000136104_112 (sequence is synthesized)
atgaaacttgagacatgcagtcttctttgatttccatatatgattaataaatgttacattcataacaatttttctctcttattttcattaacagaaaaatagcaaaatgactgcagctca

SEQ ID NO: 325745 - DNA, 120 bp, Artificial Sequence
  ENSG00000136104_113 (sequence is synthesized)
ttatggctggtagaaaggatggaccttgcctaagaacgtggctgcttacagacacactgaatgtaaggcttattctgtgtccaccatagggaaaactatcattcagatttgctaacactg

SEQ ID NO: 325746 - DNA, 120 bp, Artificial Sequence
  ENSG00000136104_114 (sequence is synthesized)
ccagcactgttcctctattgctttggagtgtttagtctttggaactacaaccatggcagtctagggcctacgtccacagggcaggaatcacaaggtgtggcttcagtctcacttcttctt

SEQ ID NO: 325747 - DNA, 120 bp, Artificial Sequence
  ENSG00000136104_115 (sequence is synthesized)
tgaactagttctgtgacatcaggcaagtcactcagctgccttctgcctcagatgtctcattgtaaaattacgtaaaacctgtaccttaatagatggaagcatttatcgagcaccttccaa

SEQ ID NO: 325748 - DNA, 120 bp, Artificial Sequence
  ENSG00000136104_116 (sequence is synthesized)
aaagcatatgttgcacattagtgctaagctctagatacttatgaataagacattgtccttttcttcactttgcgcccagtctgatgggggtcaatgacaagctgagcagtgaccgcacag

SEQ ID NO: 325749 - DNA, 120 bp, Artificial Sequence
  ENSG00000136104_117 (sequence is synthesized)
tgtaacggaagtgaactctgaatttactggggatgcacaggacaggtttctaatctggcggggttgggtggggaatgtaggtgggtagatgttgtgttgctttcctgggggaaatgacct

SEQ ID NO: 325750 - DNA, 120 bp, Artificial Sequence
  ENSG00000136104_118 (sequence is synthesized)
ctttatggagtcctgaaggatagtcagagaagcagtgtaacagaggctcagatgtatggaaaagtttgtcaggttcaggaagttccaaggagttcaaagtataggattctggggaaggat

SEQ ID NO: 325751 - DNA, 120 bp, Artificial Sequence
  ENSG00000136104_119 (sequence is synthesized)
gtaggttggtaaggaatgaggcgggaatgctgggcatgggtccagatggtaaagggccctgtgtgtgtttggactttgcttaatggtagtggagtgtctgtgaagttttaagcatggcag

SEQ ID NO: 325752 - DNA, 120 bp, Artificial Sequence
  ENSG00000136104_120 (sequence is synthesized)
tctgcagtgtggagagtatattggagaagccaggtccaccaaggctgttgcagtgatccagacaggagataatggtggccttgatcttaggagatagaacaagaagaaagtagccattta

SEQ ID NO: 325753 - DNA, 120 bp, Artificial Sequence
  ENSG00000136104_121 (sequence is synthesized)
gagatggacccaactgcatctggttgttgggtggtggtcaaggagaaggaggagtcaagagtgacttctcggtttgtgcctgacccaaaggatgtgtagtggtgggatcctggacacagg

SEQ ID NO: 325754 - DNA, 120 bp, Artificial Sequence
  ENSG00000136104_122 (sequence is synthesized)
gaacatgggctggaggagcaggatagggtaatgaagagatgcgttttcactatcattcatttaatttttcagagggaaaagtaaggcagtgtgtgtgaatgtgttttgacaggttagaaa

SEQ ID NO: 325755 - DNA, 120 bp, Artificial Sequence
  ENSG00000136104_123 (sequence is synthesized)
tagtataaaaacttggctttggtgtcttaaaaaatcatccaagtagtttcagggttaatatggaaacaaagtgtgggaaccagagcatcaggctgataagttgtggctgtttgggtcata

SEQ ID NO: 325756 - DNA, 120 bp, Artificial Sequence
  ENSG00000136104_124 (sequence is synthesized)
gatggtttggccaactatgacagttcttctgggaccaagaaagtggtgattccaagaagtgtaagcttacagtgggaaagagaagaaccttattgattgcattttatgtttaaggggtcc

SEQ ID NO: 325757 - DNA, 120 bp, Artificial Sequence
  ENSG00000136104_125 (sequence is synthesized)
agtaaattcatacttggccacacttggagctccagtttggaactgaggggtatatggtgccagggttttatcaaagcagttccattaaagacattccctgatgctgagtttggcagaaga

SEQ ID NO: 325758 - DNA, 120 bp, Artificial Sequence
  ENSG00000136104_126 (sequence is synthesized)
cagcagtctttttgtgggtgacctgaattagcccataaccacttttaaaagataaagtaatgaagaataatttaattaagccatgttaatttttgtcaacttaatgcaagctgaaaatgc

SEQ ID NO: 325759 - DNA, 120 bp, Artificial Sequence
  ENSG00000136104_127 (sequence is synthesized)
atgttagtgcctcagcatttgtttccttacagtctgcagccgagagcaagaggctctctctgtgtcatcccttccctcttgtacaccgaactcctgaccatttattgcatcattatctga

SEQ ID NO: 325760 - DNA, 120 bp, Artificial Sequence
  ENSG00000136104_128 (sequence is synthesized)
acttgtcttagtctcctttgcttctcaatattgcctaacttttggaagttctgtacttccattttcaaagtagctatattattagcctttatatttgccagatttcaaaaaccctaggcc

SEQ ID NO: 325761 - DNA, 120 bp, Artificial Sequence
  ENSG00000136104_129 (sequence is synthesized)
tcaatttttttctttatttttaagtgatgggcaaaacataaaatactttagaataaatttcacacagtaaaagatgtattcaatctctagaggtttggcagtttctttttatcaaattct

SEQ ID NO: 325762 - DNA, 120 bp, Artificial Sequence
  ENSG00000136104_130 (sequence is synthesized)
gtttggcagtttctttttatcaaattcttcccttaataagctgcagcctgtgaatctcaaaataatggaagttttaaaaacagaaagaaaaagatttttatttttatttttttattttta

SEQ ID NO: 325763 - DNA, 88 bp, Artificial Sequence
  ENSG00000136104_131 (sequence is synthesized)
gcacaatcacggctcactgcagcctcaatctctggggctcaagcaatcttcctacctcagcctcctgagtagctaagaccttcatttt

SEQ ID NO: 325764 - DNA, 89 bp, Artificial Sequence
  ENSG00000136104_132 (sequence is synthesized)
ctctctatgttaggaacctcccgcctcagcctcctaaagtgccgagattataggtgtgagtcaccatgcccattctcaaaaagattttt

SEQ ID NO: 325765 - DNA, 120 bp, Artificial Sequence
  ENSG00000136104_133 (sequence is synthesized)
ataggtgtgagtcaccatgcccattctcaaaaagatttttaaatggggggaaaaatacgtaagattctcaaatgcctcatccttaagaagatattggaaaatcaaatatctaaaaattaa

SEQ ID NO: 325766 - DNA, 120 bp, Artificial Sequence
  ENSG00000136104_134 (sequence is synthesized)
atatataaaacctaagcgggctttattgcaagaattcataattggttgagcatttaccataatttaccatatttatgcattacaaaattgtatgattatctcaaaagacacagaaaaggt

SEQ ID NO: 325767 - DNA, 120 bp, Artificial Sequence
  ENSG00000136104_135 (sequence is synthesized)
atttgataaaattcagtcatgatatatattatcagcaaatgaagaataaaagggaacttccaagggcatctatggcaaacttaaacagctaacatcatcttcattgtaaaagactgaaca

SEQ ID NO: 325768 - DNA, 120 bp, Artificial Sequence
  ENSG00000136104_136 (sequence is synthesized)
caatcttcccccaagactggatacaagagaaggatgcctgctcttaccacttctattcaccatgtggtggatgtcctagcatgtgcaataagacaagaaaaagacatacagattggaaag

SEQ ID NO: 325769 - DNA, 120 bp, Artificial Sequence
  ENSG00000136104_137 (sequence is synthesized)
tcagtagtacaactgtctttattcatagacaatattgtcatgtatgaaaaaatccaaaagaatctacaaaagaagttactagaattgataagcaaagtttcaggatacaagttcaatata

SEQ ID NO: 325770 - DNA, 120 bp, Artificial Sequence
  ENSG00000136104_138 (sequence is synthesized)
caaatattagttgtgtttctatatactgacattgaacaattggataatggaataaaaacataccatttatactaccattaaaaataacattctagtgctaaatgtaacacaatatgttca

SEQ ID NO: 325771 - DNA, 120 bp, Artificial Sequence
  ENSG00000136104_139 (sequence is synthesized)
agaccaatatgctgaacattacaaaatattgctgagagaaattaaagaaaaattaaataaatggagaaataggccatgtttgtggattggaagactcaatatttttaaggtatctatttt

SEQ ID NO: 325772 - DNA, 120 bp, Artificial Sequence
  ENSG00000136104_140 (sequence is synthesized)
ccccaaattacactataattacactatataattacattatagattcagtgtaatacttagccagctccatttttttttctttttttttggtaggtattgataaactgattctagaattta

SEQ ID NO: 325773 - DNA, 120 bp, Artificial Sequence
  ENSG00000136104_141 (sequence is synthesized)
tatgactatgtaaagcagcagaagcagcagtctccaacctaattttggcagcaggaactggttttgaggaagacaatttttccatggatggggcagggagggggatggctttggggtgaa

SEQ ID NO: 325774 - DNA, 120 bp, Artificial Sequence
  ENSG00000136104_142 (sequence is synthesized)
ggagcacacaacctagatccctcgcatgtgcagttgacaatagggttcgcactcctatgagaatctaatgccatcactgttctgacaggaggcagagctcagccagtaatgctcacttgc

SEQ ID NO: 325775 - DNA, 120 bp, Artificial Sequence
  ENSG00000136104_143 (sequence is synthesized)
tctgacaggaggcagagctcagccagtaatgctcacttgcctgacactcattcctgctgtgtggcccagttcctcacaggccatggattggtaccagtacatggcttagggactggggag

SEQ ID NO: 325776 - DNA, 120 bp, Artificial Sequence
  ENSG00000136104_144 (sequence is synthesized)
ccctgatgtaaaggacctataatattcaaaacaattttgaaaaagaagaatttggagaacttacacaaactgaattaaagacttactataatcaagaaaatgtggagatcaggcacaatg

SEQ ID NO: 325777 - DNA, 120 bp, Artificial Sequence
  ENSG00000136104_145 (sequence is synthesized)
actcatgcctgtaatcctagcggtttgggaggccgaagcaggaggattgcttgaggctgagagttcgagaacagcctgagcaaagtagcaaaaccccatttctacagaaagtttaaaaat

SEQ ID NO: 325778 - DNA, 64 bp, Artificial Sequence
  ENSG00000136104_146 (sequence is synthesized)
caaagtagcaaaaccccatttctacagaaagtttaaaaattaggcaggcaggtggatcatgacg

SEQ ID NO: 325779 - DNA, 120 bp, Artificial Sequence
  ENSG00000136104_147 (sequence is synthesized)
aagtgatttggtggggaatctggtgcgtagtgcatatgttttagcaggtagtgggaggttttgtgcaaaaatgtctgtggatttgagctggcttgtccacttgacatgcaagaggaatgt

SEQ ID NO: 325780 - DNA, 120 bp, Artificial Sequence
  ENSG00000136104_148 (sequence is synthesized)
gtgggtgctgctcagctgatcttcccgcattcacacaggaccccaatctgcttcttcaggaaataattttgtttctgaatctctgactacaaggagtattaataattagatcctagttct

SEQ ID NO: 325781 - DNA, 120 bp, Artificial Sequence
  ENSG00000136104_149 (sequence is synthesized)
gggaagtagtctgccacttttccacacctcccttcacatgtagaaatttttgttaacctcaaaggactttaaaaattcctgcccttctgtagtggaaaagtgaatcttccctctgcaaaa

SEQ ID NO: 325782 - DNA, 120 bp, Artificial Sequence
  ENSG00000136104_150 (sequence is synthesized)
accaaagccactagatattgataatgtccaagtttgtcactagaaaccctgctgtcttacctgtgccccaagtttctgttccaacactttaaattcaaacacctaacattacaagatttc

SEQ ID NO: 325783 - DNA, 120 bp, Artificial Sequence
  ENSG00000136104_151 (sequence is synthesized)
attgggttgttttttttcttttcacaagtaattcatgatacattctcacaaaaagagaaggcagaagtgatccccacctcccactgccagcactactcaggctcccctgggtgactgcat

SEQ ID NO: 325784 - DNA, 120 bp, Artificial Sequence
  ENSG00000136104_152 (sequence is synthesized)
ccttgaccctgaatcaagcatgtttcttagttatccagtttcccacttccagtttctatcttttgccttgcagcccgagcagccctacagtcactgttcatgcaatccatttcatcgttt

SEQ ID NO: 325785 - DNA, 73 bp, Artificial Sequence
  ENSG00000136104_153 (sequence is synthesized)
atgggaaaattaaaattaagacaaatcaagaaatagaaaactccagcacttgaataagcccttttctctattg

SEQ ID NO: 325786 - DNA, 65 bp, Artificial Sequence
  ENSG00000136104_154 (sequence is synthesized)
acccccctttcttcttcatgcccactgccaccaagcataaggctgttctcttgagggcagagacc

SEQ ID NO: 325787 - DNA, 120 bp, Artificial Sequence
  ENSG00000136104_155 (sequence is synthesized)
tgccaccaagcataaggctgttctcttgagggcagagaccatatgggccatgtatcaaatagagacaaacccgcggtgctaagaacaccaagatagcactgagcatgccgcatgtatccc

SEQ ID NO: 325788 - DNA, 120 bp, Artificial Sequence
  ENSG00000136104_156 (sequence is synthesized)
ccactcagcgcatgagtcactgacacacaaggtgacatactccttccctatcaagttgtcaaggacttttagaaaacagccatgctcagagctagagaggaggtgggaagtgggccttgc

SEQ ID NO: 325789 - DNA, 120 bp, Artificial Sequence
  ENSG00000136104_157 (sequence is synthesized)
tggtaagaatagaaaatggtacaacttttggagaccaacttggaaataaatatgaaaagcctgaatttgttgcattttctttgtttcagcaatatccattgttagaaatacagccttagg

SEQ ID NO: 325790 - DNA, 120 bp, Artificial Sequence
  ENSG00000136104_158 (sequence is synthesized)
aaataatcatgaatatgtgcaaagatttagctacaagaatattcactgtggttctgtttaaatagtaagtaattggaaaaaaactaaattagaaggctgaaattattttttaaacttttt

SEQ ID NO: 325791 - DNA, 75 bp, Artificial Sequence
  ENSG00000136104_159 (sequence is synthesized)
aaactaaattagaaggctgaaattattttttaaacttttttactgggctgtgtgtggtggctctatgtgcctagg

SEQ ID NO: 325792 - DNA, 120 bp, Artificial Sequence
  ENSG00000136104_160 (sequence is synthesized)
tctagaaaaaataaaaattaaaagaaaaattagctggtcatggtggcatgtgcttatagtctcaggtacttgggaggttgaggtggaagaatggtttgagtctgggaggtcgaggctgcg

SEQ ID NO: 325793 - DNA, 77 bp, Artificial Sequence
  ENSG00000136104_161 (sequence is synthesized)
aggtggaagaatggtttgagtctgggaggtcgaggctgcgatgagctattgatcacaccactgcactccagcctagg

SEQ ID NO: 325794 - DNA, 120 bp, Artificial Sequence
  ENSG00000136104_162 (sequence is synthesized)
taagtaatatctctttttctctctctttccccacttccttctttccttcttttctctcctttttttcctttctccttgtctcccttttttagaaatttttctagataaacatgttactat

SEQ ID NO: 325795 - DNA, 120 bp, Artificial Sequence
  ENSG00000136104_163 (sequence is synthesized)
tatgctaatacaaaaataaaactactcagttggttattttataccattagtccctcataattttcctctccagattataatctcttttaaaatttttgtgtctcatttagtaagtttctt

SEQ ID NO: 325796 - DNA, 120 bp, Artificial Sequence
  ENSG00000136104_164 (sequence is synthesized)
ggaggaagaaccatactatatatgtttcgcagttttttgcttagcattcaagtagatcttagcaaatcctaccagtatcaaataattgcccttcttctatccccacacctttagagtttc

SEQ ID NO: 325797 - DNA, 120 bp, Artificial Sequence
  ENSG00000136104_165 (sequence is synthesized)
aggtctctactatccgattccttgacttcccaacccagtcaaagatacatgatttgcttggaattgtgtgtttggggcatgtacacacatgctgaaattaattaattttgctttgaagat

SEQ ID NO: 325798 - DNA, 120 bp, Artificial Sequence
  ENSG00000136104_166 (sequence is synthesized)
ttcctaagagccctagaaataattgcaaatgctctgcagtatatcacaaccaggactgataattactgtttctgtctacaaaactaaggggagagagaaaaacatactactgaatgagca

SEQ ID NO: 325799 - DNA, 120 bp, Artificial Sequence
  ENSG00000136104_167 (sequence is synthesized)
gaacacagaagccagtgaatgtttcacacttggtgacgtgcagtttttgctgtttttttgccctagcagattgtaaccaaattgctcaacttcacagaaataactgtagagactcaattt

SEQ ID NO: 325800 - DNA, 120 bp, Artificial Sequence
  ENSG00000136104_168 (sequence is synthesized)
ctgaatgctcgtaattggcttttcaaaagaactttatagggataaattaattgctactatacttttaatggttttaaagttacttaggccacttctagaaatatgtaaaattgtatgatc

SEQ ID NO: 325801 - DNA, 120 bp, Artificial Sequence
  ENSG00000136104_169 (sequence is synthesized)
ctaacttaatgtttcatttctccctcagtttttatgtgatttgataatataatgaagggaactataaaaatttgatattgttggggcctttttagaaaattgagatacatttttctttgt

SEQ ID NO: 325802 - DNA, 120 bp, Artificial Sequence
  ENSG00000136104_170 (sequence is synthesized)
atcattgttgctaaaagaggttaaatattgctacttattacctaggagaaagaacagcattttgtggcaaaataagtaggttataccgaatttgacagacttctctcctgaccgattttg

SEQ ID NO: 325803 - DNA, 120 bp, Artificial Sequence
  ENSG00000136104_171 (sequence is synthesized)
gagcacatatcttcatgtgccttgtaaaactagagatgcattcagttttcaatgttcccagatatattttaccactctatttttcccatatagcatctcaataaactgctgtttcataaa

SEQ ID NO: 325804 - DNA, 120 bp, Artificial Sequence
  ENSG00000136104_172 (sequence is synthesized)
tggtggctccaaagacattgtccttagaaaaggacagaaaattgaaagtacagcagtgtttgtttgggcctatgttcagcatgttgtcaaaaaaaaatgcatgttttactctcttggaga

SEQ ID NO: 325805 - DNA, 120 bp, Artificial Sequence
  ENSG00000136104_173 (sequence is synthesized)
atagcactgggcagaagtctgttgctgtaagatctaaggactgctctaggccagacccatgcgtctttcattccggtagttaatctctgacagtagctctagaggacctagagaggcaca

SEQ ID NO: 325806 - DNA, 120 bp, Artificial Sequence
  ENSG00000136104_174 (sequence is synthesized)
gttgtcttgctgaaactaagagggtaggttctcagcgtgcttcttatttttcttcatccaaaaatgaagcagatttttttctcccaaatatctatcttccttagtaacttagagatcatt

SEQ ID NO: 325807 - DNA, 120 bp, Artificial Sequence
  ENSG00000136104_175 (sequence is synthesized)
catgaattgatctaaacctattcttgaaagctttaaccttggataccttttggagtaatatgtttcataactttattcttctctgctcctgatttctgttttcttattttaattttcaga

SEQ ID NO: 325808 - DNA, 120 bp, Artificial Sequence
  ENSG00000136104_176 (sequence is synthesized)
gaagcagatggactctattgcagctactcaactctgctgttgtattgtgaaaacagccacagataatacataaacgaatgagcatggctgtgttccagtaaaacttcatttataaaagca

SEQ ID NO: 325809 - DNA, 120 bp, Artificial Sequence
  ENSG00000136104_177 (sequence is synthesized)
ggcagccagctggatttggcccctgggccatcatttgccaagccctgattttgattttggcatcttgctcttcctaaaccccagccttgtcttctatattatttgagttgcttttcgagg

SEQ ID NO: 325810 - DNA, 120 bp, Artificial Sequence
  ENSG00000136104_178 (sequence is synthesized)
tcttctactctgtgtctttctggggttccagtgtacacatgacaaactatactagacgatgtaccatcgtttaaacaagcgtagaacatatcttctgctagctttcctgtctgtatccag

SEQ ID NO: 325811 - DNA, 120 bp, Artificial Sequence
  ENSG00000136104_179 (sequence is synthesized)
gatttgattgatttttacagtaatatagttgactgtttccaggaaatatattccagtagtcattaggtatctttgtatctatgttgtaatcgatagcgtggagcctgtcatctttaatat

SEQ ID NO: 325812 - DNA, 120 bp, Artificial Sequence
  ENSG00000136104_180 (sequence is synthesized)
gttttatattattttcctttactatcatatgtctgcctttgttgaaactcagcttccaaccctcacttgctccagtcttttcaatttgtcactgtcagcaagcagagttgaatgcaacca

SEQ ID NO: 325813 - DNA, 120 bp, Artificial Sequence
  ENSG00000136104_181 (sequence is synthesized)
gtgggtttggagatgttcccgagttccttcttgcaaatcatttgtaagaaggcctaacattatccctgtggtactctgcagtttgttctctttccagaactgtatccatttagtcatagc

SEQ ID NO: 325814 - DNA, 120 bp, Artificial Sequence
  ENSG00000136104_182 (sequence is synthesized)
ctttgttactgtctttctgagccacttctctgctgaaacaatctcccaaatccatagggatttggtcttttaaataacaaaaattttagtaaatgcttcaatcatctttttttccaatat

SEQ ID NO: 325815 - DNA, 120 bp, Artificial Sequence
  ENSG00000136104_183 (sequence is synthesized)
attcaacagtgcactgggaataacatacaaactagttatatgtagaggctaccacaatcattttctttttttaaacacttgtaactggtatcttgttttgttgtgagctattaaaacacc

SEQ ID NO: 325816 - DNA, 120 bp, Artificial Sequence
  ENSG00000136104_184 (sequence is synthesized)
gataaggaggtgagtttccagctcggagcatccacagtgaggaaacagaatcaactatttttgtttgatctcctctctctccttttaatgatccaaaggtaatccagaaatagacaacaa

SEQ ID NO: 325817 - DNA, 120 bp, Artificial Sequence
  ENSG00000136104_185 (sequence is synthesized)
ggcagctggccctgcttctgtgatcctactgggttggaaccagggatccagtaggctcgaagtggcctcagacgaatatttaaaagatgcttcaaagaagatgaaaaatgggctaatgtt

SEQ ID NO: 325818 - DNA, 120 bp, Artificial Sequence
  ENSG00000136104_186 (sequence is synthesized)
atttctccaattaaacattttatgtccatacaaaagtacctttcatcttaagttcttgtaatgaacactttttatttgaattatcaatgaaaagtgaacctcatcagttcagtggcacac

SEQ ID NO: 325819 - DNA, 120 bp, Artificial Sequence
  ENSG00000136104_187 (sequence is synthesized)
acttgtagtcttagctactcaggaggctaaggcagaaggtcgcttgagcccaggagttcaaggctgtagtatatgatgatcgcaactatgaatagccaccgcactccagcctgggcaaca

SEQ ID NO: 325820 - DNA, 120 bp, Artificial Sequence
  ENSG00000136104_188 (sequence is synthesized)
cagtgaaaccctgtctctaaagaaaaaaagggaataatgtctaagtgtttataatgacatctgtgttaggaacattttgccatagagaaggaacacaagcatcctcataacttcaagctt

SEQ ID NO: 325821 - DNA, 120 bp, Artificial Sequence
  ENSG00000136104_189 (sequence is synthesized)
tttgtgttttgaaaatattttggccttcagcattattagctgtgagtttcaccctcctagctgaagatacctttctagtaaaaaatgtgcatcacctaaacaccctttgctgtcttaatt

SEQ ID NO: 325822 - DNA, 90 bp, Artificial Sequence
  ENSG00000136104_190 (sequence is synthesized)
aaaaatgtgcatcacctaaacaccctttgctgtcttaatttaaatagaaacatgtatttttttttttgagacagagtcttgccgtgtcat

SEQ ID NO: 325823 - DNA, 63 bp, Artificial Sequence
  ENSG00000136104_191 (sequence is synthesized)
ctgggactacaggcacatgccaccatgcgcagctaatttttgcctcaagtgaccgcccacctc

SEQ ID NO: 325824 - DNA, 120 bp, Artificial Sequence
  ENSG00000136104_192 (sequence is synthesized)
taacaaagttgcaaatatacattcacttggtgctgataggtggttcatttgtgatggattagtctttttcttttaatgattcatttgctagaggttgctgtgtggccaagaggttttcct

SEQ ID NO: 325825 - DNA, 120 bp, Artificial Sequence
  ENSG00000136104_193 (sequence is synthesized)
atagtgtgtggtatattcccaggatgagcctctgtttttttacagcaaacaattttaagacatggtgttttatcctcttgggttatgggataaaacaccatgggctgtggaatcttttag

SEQ ID NO: 325826 - DNA, 120 bp, Artificial Sequence
  ENSG00000136104_194 (sequence is synthesized)
caccaactctacccgttctttgtttagcaaagcaggggcatgaagaatgaagctgggaagaagtctgtttcctaggttagatccatgttgggtctggtcaacctggtgtctccataaaca

SEQ ID NO: 325827 - DNA, 120 bp, Artificial Sequence
  ENSG00000136104_195 (sequence is synthesized)
gcctgaaaattataaaaatctgggttgtgatcaccatgcagtcaattctccatgttcaacagcaagacttgtcttccctgcttttgtaccttttacataataagtgtggcatgatttctt

SEQ ID NO: 325828 - DNA, 120 bp, Artificial Sequence
  ENSG00000136104_196 (sequence is synthesized)
ctatattgtgatcattaaggccttgacaagattctcacattcactggtgtaaaatgttcatgtgaaaggagaaaatattaagtaaaggtctgacttagttgcattgggcctaatggaaag

SEQ ID NO: 325829 - DNA, 120 bp, Artificial Sequence
  ENSG00000136104_197 (sequence is synthesized)
aacactgtatcagaattgaaatcttggccaaagtcctctacttggtgaccttaagctattcatttagcctctctgtgcttccctctcttactggctgcttgcttgtgcaaggttgttctt

SEQ ID NO: 325830 - DNA, 120 bp, Artificial Sequence
  ENSG00000136104_198 (sequence is synthesized)
gcatggataaagtaagataaatattgtcccttcattcataagtggacattaaactggcccaggaggtaaatgaaatagggattctggctggacacctggcccccttcaagagactattct

SEQ ID NO: 325831 - DNA, 120 bp, Artificial Sequence
  ENSG00000136104_199 (sequence is synthesized)
cattttgacttctgtgccttgcattcatctggtaattagcaatcccctcatgcccaccacacctggcacctacaaagcctgtgtttgctggaccagctaaggggctcagccatgtactta

SEQ ID NO: 325832 - DNA, 120 bp, Artificial Sequence
  ENSG00000136104_200 (sequence is synthesized)
cccaatcatatccaccatcaccaaggctgcttcttaggagtgatgtgtggctcaattccctagatgattggcaaaatgtaaaggagcctgtaaaaagtaagccctttgctgggtctgctg

SEQ ID NO: 325833 - DNA, 120 bp, Artificial Sequence
  ENSG00000136104_201 (sequence is synthesized)
tcccattcgcctctgtagaggtctaaattatacatgttgggtttttttttaatggattgatgttgtgtcaaagtgacatttgacaccacttcactgctctaatgttgcagaaaataaagt

SEQ ID NO: 325834 - DNA, 120 bp, Artificial Sequence
  ENSG00000136104_202 (sequence is synthesized)
tcacactgctgagtgaggagaggagctgagattggagtatggacccttctgattctgggtccaatgttctttctatgctgacatcattgaagaaatagacataagttaaaaaatatttaa

SEQ ID NO: 325835 - DNA, 66 bp, Artificial Sequence
  ENSG00000136104_203 (sequence is synthesized)
ctccgccttctaccaactggtcattttgtgatggcagcacaaagacagaaaaggggcaagtgatgg

SEQ ID NO: 325836 - DNA, 120 bp, Artificial Sequence
  ENSG00000136104_204 (sequence is synthesized)
tgaagacagagccaggtcctgcctgtgccctcctgggaattgctgagacagttaatgcctcttgggacaaatcaagtcaagtggaaacgtcagaaaaaagaaaacgtgttctcaacgtag

SEQ ID NO: 325837 - DNA, 120 bp, Artificial Sequence
  ENSG00000136104_205 (sequence is synthesized)
cccctaccctactttttaggaaattggaaaactgcctcttccctttcggatcaatctctcaaacaggtggggagcaacaggaaaggagtgagtgattaccttgaagtttgagtgtagtcc

SEQ ID NO: 325838 - DNA, 120 bp, Artificial Sequence
  ENSG00000136104_206 (sequence is synthesized)
cttttcttcaaaatgaaattgactgtaattggtcagctatatttagaaatcttagttatatatcagactaagttgacgtgagaaatatttcttcaagagaagttttaggtagcagtaaag

SEQ ID NO: 325839 - DNA, 120 bp, Artificial Sequence
  ENSG00000136108_0 (sequence is synthesized)
gcagactgcggcggcggtggtctgaggaagttctatcttggcgctaaagcggagacgcatcccccgacccgaggctacgatgagcacaccggccgtgccccaggacctgcagctgccccc

SEQ ID NO: 325840 - DNA, 120 bp, Artificial Sequence
  ENSG00000136108_1 (sequence is synthesized)
gagtcagagggcgcagtccgcattcaaagagcaaagaagacaaaaactcaaggaacatctgttgagaagaaaaacgctttttgcatacaagcaggaaaatgagatgttatccagtagaga

SEQ ID NO: 325841 - DNA, 120 bp, Artificial Sequence
  ENSG00000136108_2 (sequence is synthesized)
tcagagagttgtgacatctgaggaccaagttcaagaagggactaaagtgctgaaacttaaaacaaaaatggctgataaagaaaacatgaagagacctgcagagagcaaaaataatacagt

SEQ ID NO: 325842 - DNA, 120 bp, Artificial Sequence
  ENSG00000136108_3 (sequence is synthesized)
ggtggggaaacattgtattcctttaaaaccttcaaatgaactaaccaattcaactgtagtaattgacacacataaacctaaggatagtaatcaaactccgcatttgttactaactgaaga

SEQ ID NO: 325843 - DNA, 120 bp, Artificial Sequence
  ENSG00000136108_4 (sequence is synthesized)
tgatccccaaagtcaacatatgacattaagccaggcatttcaccttaaaaacaatagtaaaaagaaacaaatgactacagaaaaacaaaagcaagatgctaacatgcccaagaaacctgt

SEQ ID NO: 325844 - DNA, 120 bp, Artificial Sequence
  ENSG00000136108_5 (sequence is synthesized)
gcttggatcttatcgtggccagattgttcagtctaagattaattcatttagaaaacctctacaagtcaaagatgagagttctgcagcaacaaagaaactttcagccactatacctaaagc

SEQ ID NO: 325845 - DNA, 120 bp, Artificial Sequence
  ENSG00000136108_6 (sequence is synthesized)
cacaaaacctcagcctgtaaacaccagcagtgtaacagtgaaaagtaatagatcctccaatatgactgccactactaaatttgtgagcactacatctcagaacacacaacttgtgcgacc

SEQ ID NO: 325846 - DNA, 120 bp, Artificial Sequence
  ENSG00000136108_7 (sequence is synthesized)
tcctattagaagtcatcacagtaatacccgggacactgtgaaacaaggcatcagtagaacttctgccaatgttacaatccggaaagggcctcatgaaaaagaactattacaatcaaaaac

SEQ ID NO: 325847 - DNA, 120 bp, Artificial Sequence
  ENSG00000136108_8 (sequence is synthesized)
agctttatctagtgtcaaaaccagttcttctcaaggtataataagaaataagactctatcaagatccatagcatctgaagttatagccaggcctgcttcattgtctaatgataaactgat

SEQ ID NO: 325848 - DNA, 120 bp, Artificial Sequence
  ENSG00000136108_9 (sequence is synthesized)
ggaaaagtcagagcccgttgaccagcgaagacatactgcaggaaaagcaattgttgatagtagatcagctcagcccaaagaaacctcggaagagagaaaagctcgtctgagtgagtggaa

SEQ ID NO: 325849 - DNA, 120 bp, Artificial Sequence
  ENSG00000136108_10 (sequence is synthesized)
agctggcaaaggaagagtgctaaaaaggccccctaattcagtagttactcagcatgagcctgcaggacaaaatgaaaaaccagttgggtctttttggactaccatggcagaagaagatga

SEQ ID NO: 325850 - DNA, 120 bp, Artificial Sequence
  ENSG00000136108_11 (sequence is synthesized)
acaaagattatttactgaaaaagtaaacaacacattttctgaatgcctgaacttgattaatgagggatgtccaaaagaagatatactggtcacactgaatgacctgattaaaaatattcc

SEQ ID NO: 325851 - DNA, 120 bp, Artificial Sequence
  ENSG00000136108_12 (sequence is synthesized)
agatgccaaaaagcttgttaagtattggatatgtcttgcacttattgaaccaatcacaagtcctattgaaaatattattgcaatctatgagaaagccattctggcaggggctcagcctat

SEQ ID NO: 325852 - DNA, 120 bp, Artificial Sequence
  ENSG00000136108_13 (sequence is synthesized)
tgaagagatgcgacacacgattgtagatattctaacaatgaagagtcaagaaaaagctaatttaggagaaaatatggagaagtcttgtgcaagcaaggaagaagtcaaagaagtcagtat

SEQ ID NO: 325853 - DNA, 120 bp, Artificial Sequence
  ENSG00000136108_14 (sequence is synthesized)
tgaagatacaggtgttgatgtagatccagaaaaactggaaatggagagtaaacttcatagaaatttgctatttcaagattgtgaaaaagagcaagacaacaaaacaaaagatccaaccca

SEQ ID NO: 325854 - DNA, 120 bp, Artificial Sequence
  ENSG00000136108_15 (sequence is synthesized)
ccaatacagaaacgaggacaagttgcttaattaaatataatgtgtctactacgccatacttgcaaagtgtgaaaaaaaaggtgcagtttgatggaacaaattccgcatttaaagagctga

SEQ ID NO: 325855 - DNA, 120 bp, Artificial Sequence
  ENSG00000136108_16 (sequence is synthesized)
agtttttaacaccagtgagacgttctcgacgtcttcaagagaaaacttctaaattgccagatatgttaaaagatcattatccttgtgtgtcttcattggaacagctaacggagttgggaa

SEQ ID NO: 325856 - DNA, 120 bp, Artificial Sequence
  ENSG00000136108_17 (sequence is synthesized)
gagaaactgatgcttttgtatgccgccctaatgcagcactgtgccgggtgtactatgaggctgatacaacataagagaaataaagctctgttagggaatggggtttttattatttgtggg

SEQ ID NO: 325857 - DNA, 120 bp, Artificial Sequence
  ENSG00000136108_18 (sequence is synthesized)
gtgttttgttttgagtagctttatattgctcttaggtctggagttggccatgtacctatgtatcctaagcattcacggcagtgagctcctttactaacattcatgttatggcaagagttg

SEQ ID NO: 325858 - DNA, 120 bp, Artificial Sequence
  ENSG00000136108_19 (sequence is synthesized)
tcctctacattggaaagctaatcctaccttgtcagtttcaaccaactgagttttttctttaagaaaggtaaattttgtcagctagtttactatgttccttgaatataaacaggttataat

SEQ ID NO: 325859 - DNA, 120 bp, Artificial Sequence
  ENSG00000136108_20 (sequence is synthesized)
actaccctgttcactttactaaatataagtacagtaatgatgcataattagaaaatgaggtattctaggtaaaatgtatgtttgccttgacatgtttttaaaagttatgatgtacctccc

SEQ ID NO: 325860 - DNA, 120 bp, Artificial Sequence
  ENSG00000136108_21 (sequence is synthesized)
tgcctttaaacagaatacttttttcttttttttggcctttctcagattagtcaaaaattctatagaatgactcacttcgaatactaagacacaggaggtttagcctgctttcttaccaaa

SEQ ID NO: 325861 - DNA, 120 bp, Artificial Sequence
  ENSG00000136108_22 (sequence is synthesized)
ttcatgttacccagacttgtgttctcttgcgtcccttggactgcctgttgattgatggaaagtgtctgcactgacacttttcgtcagtagtctgtagtttcgtggcctcttttgattata

SEQ ID NO: 325862 - DNA, 120 bp, Artificial Sequence
  ENSG00000136108_23 (sequence is synthesized)
actggggtcaccaagaaggtttacttaattaaataccgcatttctaagagaagatactttgtgtaagaaaagatgccacatttagtggtttaacttttgtaacttcacttgatagttttt

SEQ ID NO: 325863 - DNA, 120 bp, Artificial Sequence
  ENSG00000136108_24 (sequence is synthesized)
aagcaattagaatggagttagggaaagaacatatcatactgaacaaatgtcattctagtttagatagcatttctaagataactgatactaatacttgttttcttccctataacataaaaa

SEQ ID NO: 325864 - DNA, 120 bp, Artificial Sequence
  ENSG00000136108_25 (sequence is synthesized)
acttcactgttaagtcatgtcccttgaaacatgatagttacatacacagttttctctccacacataaataacaccactaaagttgttttgtaaggttccaaactaatatggcatatatca

SEQ ID NO: 325865 - DNA, 120 bp, Artificial Sequence
  ENSG00000136108_26 (sequence is synthesized)
actctacagtttcaaataaatgactttttaattgtaaaagattagttgaaaaactgtatgaatgtgaagatcacatgcttagtcatttttatgttcattccactttgtatatcttttcta

SEQ ID NO: 325866 - DNA, 120 bp, Artificial Sequence
  ENSG00000136108_27 (sequence is synthesized)
tttattgacttctcatgttctagagagtaggacttttattccgtgtacctgatatatatacaattaaaatatctgtgtaattatgttttaatgaagtttatttcaacagatattttatga

SEQ ID NO: 325867 - DNA, 120 bp, Artificial Sequence
  ENSG00000136108_28 (sequence is synthesized)
aatgcagtttaaccacagtgaatgaattttagctttgcttttgaaatacattgtaagatttgacttgaggtttttgacacttaagtacatgcttaatgatatattttcaaaagtcatcag

SEQ ID NO: 325868 - DNA, 120 bp, Artificial Sequence
  ENSG00000136108_29 (sequence is synthesized)
tctacttacataaactttacctaatttttttcactttaacaaaaacataactatgcccttgttttttcatactttgacccaaaatatgccattttgaaataaaatttaagctttgataca

SEQ ID NO: 325869 - DNA, 120 bp, Artificial Sequence
  ENSG00000136108_30 (sequence is synthesized)
tgcgcctgcgctgggtcctccgcctcttaggtccctagcgaatttctgcagggctggggtcgcatcatgtgttatttccaatttcacagcttctccttcgactttatggaaaccgagggt

SEQ ID NO: 325870 - DNA, 120 bp, Artificial Sequence
  ENSG00000136108_31 (sequence is synthesized)
cgcttgtgaagcattccctaaccatctccctataccacaggcaaagttagttgtttctttttgtgggttttaataatcctttgttcttatttcatatatagcatttatttcattttataa

SEQ ID NO: 325871 - DNA, 120 bp, Artificial Sequence
  ENSG00000136108_32 (sequence is synthesized)
tagtatttgttatatagttggcagcagtatttgctgaggaaaaggaatggttcagagatggcaatcgtgttcttttattttgaaaatgtggccaactaggaacaactttaatgtcttctg

SEQ ID NO: 325872 - DNA, 120 bp, Artificial Sequence
  ENSG00000136108_33 (sequence is synthesized)
gatctttacaattacagtgtagtagacaattcggaattaatttgaaacacatcacaacataacttgagaaaattttctttgtatatgtagtggtaataaatgtttaaaggctgcaaggat

SEQ ID NO: 325873 - DNA, 120 bp, Artificial Sequence
  ENSG00000136108_34 (sequence is synthesized)
tgcattataaaagctgtttgttggctttctaagtcttttattcctgtattgggaataatcagattttagaaaatggatataagctgaaatgtatatttaatgaaactttctgcatgaaat

SEQ ID NO: 325874 - DNA, 120 bp, Artificial Sequence
  ENSG00000136108_35 (sequence is synthesized)
gttttagcatattattgtatgcatttcctggttggaagtttactgggagactgaatgtaatattaaaatttgtttattgaatataaagcaaaagggattaaattcgctttttaaatgtta

SEQ ID NO: 325875 - DNA, 120 bp, Artificial Sequence
  ENSG00000136110_0 (sequence is synthesized)
aggcgggaccgtgcaccgtgtgtgcgcgcggcgttgaaatgccctgcacgtcggggcagcgggacagatcccagggtgcccagggagtctccaagtgcctcactcctcccgccgcaaaca

SEQ ID NO: 325876 - DNA, 120 bp, Artificial Sequence
  ENSG00000136110_1 (sequence is synthesized)
tgacagagaactccgacaaagttcccattgccctggtgggacctgatgacgtggaattctgcagccccccggcgtacgctacgctgacggtgaagccctccagccccgcgcggctgctca

SEQ ID NO: 325877 - DNA, 120 bp, Artificial Sequence
  ENSG00000136110_2 (sequence is synthesized)
aggtgggagccgtggtcctcatttcgggagctgtgctgctgctctttggggccatcggggccttctacttctggaaggggagcgacagtcacatttacaatgtccattacaccatgagta

SEQ ID NO: 325878 - DNA, 120 bp, Artificial Sequence
  ENSG00000136110_3 (sequence is synthesized)
tcaatgggaaattacaagatgggtcaatggaaatagacgctgggaacaacttggagacctttaaaatgggaagtggagctgaagaagcaattgcagttaatgatttccagaatggcatca

SEQ ID NO: 325879 - DNA, 120 bp, Artificial Sequence
  ENSG00000136110_4 (sequence is synthesized)
caggaattcgttttgctggaggagagaagtgctacattaaagcgcaagtgaaggctcgtattcctgaggtgggcgccgtgaccaaacagagcatctcctccaaactggaaggcaagatca

SEQ ID NO: 325880 - DNA, 120 bp, Artificial Sequence
  ENSG00000136110_5 (sequence is synthesized)
tgccagtcaaatatgaagaaaattctcttatctgggtggctgtagatcagcctgtgaaggacaacagcttcttgagttctaaggtgttagaactctgcggtgaccttcctattttctggc

SEQ ID NO: 325881 - DNA, 120 bp, Artificial Sequence
  ENSG00000136110_6 (sequence is synthesized)
caaaagaaatccagagggaaagaagagaagtggtaagaaaaattgttccaactaccacaaaaagaccacacagtggaccacggagcaacccaggcgctggaagactgaataatgaaacca

SEQ ID NO: 325882 - DNA, 120 bp, Artificial Sequence
  ENSG00000136110_7 (sequence is synthesized)
gacccagtgttcaagaggactcacaagccttcaatcctgataatccttatcatcagcaggaaggggaaagcatgacattcgaccctagactggatcacgaaggaatctgttgtatagaat

SEQ ID NO: 325883 - DNA, 120 bp, Artificial Sequence
  ENSG00000136110_8 (sequence is synthesized)
gtaggcggagctacacccactgccagaagatctgtgaacccctggggggctattacccatggccttataattatcaaggctgccgttcggcctgcagagtcatcatgccatgtagctggt

SEQ ID NO: 325884 - DNA, 120 bp, Artificial Sequence
  ENSG00000136110_9 (sequence is synthesized)
gggtggcccgtatcttgggcatggtgtgaaatcacttcatatatcatgtgctgtaaaataagaactagctgaagagacaaccaaagaagcattaaggcaggttgatgctgataggaccac

SEQ ID NO: 325885 - DNA, 120 bp, Artificial Sequence
  ENSG00000136110_10 (sequence is synthesized)
aaaatatttttacactcaacctgagcggttattcttgacactcttaacagaattttttcaattgttttccagaactttagtatatgcaaatgtactgaaagggtagttcaagtctaaaat

SEQ ID NO: 325886 - DNA, 120 bp, Artificial Sequence
  ENSG00000136110_11 (sequence is synthesized)
gccataacccctttattatttgttattttttatttgcattgctttgccataagtcttcccttgcttgtatcttccaaagctattttgaaataaacatgaaaatttacagtttgccaaaaa

SEQ ID NO: 325887 - DNA, 120 bp, Artificial Sequence
  ENSG00000136110_12 (sequence is synthesized)
ccgactgcaaaggaccctcgggagggagcgcggcgaaaggggcacccgtaggagcccgggcgagctgtttcccgcccgactccccactccctgggggctaccgcgtggggcccgggtgcg

SEQ ID NO: 325888 - DNA, 120 bp, Artificial Sequence
  ENSG00000136111_0 (sequence is synthesized)
agtgtctgccccaggcgagcgcggcggccgcagcggggctgcagcgctggagccggcggccgcggggaccctcggcgtggtcctctgaccctgcaaacccgcgacggaggaaggggaggt

SEQ ID NO: 325889 - DNA, 120 bp, Artificial Sequence
  ENSG00000136111_1 (sequence is synthesized)
cctgcccgaggcgccagcccaaggaggaggatgcccatttaacccgccctcgcctgccgggcgcttgcctcggtgcccgccgccggagcctccgagccgcgcccgtggaagtgctgcatg

SEQ ID NO: 325890 - DNA, 120 bp, Artificial Sequence
  ENSG00000136111_2 (sequence is synthesized)
gggcagggctgctgaagcgcggagttcggggtcgcgccgctcccaggcaggcgcgggagcccggtgcggcagttggcacagtttcggcggcgccttctgcgcgggagtggggggcgcggt

SEQ ID NO: 325891 - DNA, 120 bp, Artificial Sequence
  ENSG00000136111_3 (sequence is synthesized)
gcgcccggccggcctccgcggtgccctggtgaggcgagagttatggagccgcccagctgcattcaggatgagccgttcccgcaccccctggagcccgagccgggcgtctcagctcagccc

SEQ ID NO: 325892 - DNA, 120 bp, Artificial Sequence
  ENSG00000136111_4 (sequence is synthesized)
ggccccgggaagccaagcgataagcggttccggctgtggtacgttggggggtcgtgcctggaccacaggaccacgctgcctatgctgccctggctcatggccgagatccgcaggcgcagc

SEQ ID NO: 325893 - DNA, 120 bp, Artificial Sequence
  ENSG00000136111_5 (sequence is synthesized)
gctcatggccgagatccgcaggcgcagccagaagcccgaggcgggcggctgcggggcgccggcggcccgagaggtgatcctggtgctcagcgcgcccttcctgcgttgcgtccccgcgcc

SEQ ID NO: 325894 - DNA, 120 bp, Artificial Sequence
  ENSG00000136111_6 (sequence is synthesized)
ccgtcggccacgcagcccaacccggcggtattcatcttcgagcacaaggcgcagcatatctcgcgcttcatccacaacagccacgacctcacctactttgcctacctgatcaaggcgcag

SEQ ID NO: 325895 - DNA, 120 bp, Artificial Sequence
  ENSG00000136111_7 (sequence is synthesized)
cccgacgaccccgagtcgcagatggcctgccacgttttccgcgccacagaccccagccaggttcctgatgttattagcagcataaggcaattatctaaagcggccatgaaagaggatgcc

SEQ ID NO: 325896 - DNA, 120 bp, Artificial Sequence
  ENSG00000136111_8 (sequence is synthesized)
aaacccagcaaagataatgaggacgccttttacaactctcagaagttcgaagtcctgtactgtggaaaggtgaccgtgacccacaagaaggccccctcaagcctcatcgatgactgcatg

SEQ ID NO: 325897 - DNA, 120 bp, Artificial Sequence
  ENSG00000136111_9 (sequence is synthesized)
gagaagttcagcctgcacgaacagcagcgcctgaagatccaaggggagcagcgcggtccggacccaggagaggacctggctgacttggaggtggtggtgcccgggtcccccggagactgc

SEQ ID NO: 325898 - DNA, 120 bp, Artificial Sequence
  ENSG00000136111_10 (sequence is synthesized)
ctgccggaggaggctgacggcaccgacacccaccttggcttacctgccggggccagccagcctgccctgaccagctctcgggtctgcttccctgagcggattttggaagattctggcttt

SEQ ID NO: 325899 - DNA, 120 bp, Artificial Sequence
  ENSG00000136111_11 (sequence is synthesized)
gatgagcagcaggagtttcggtctcggtgcagcagtgtcaccggcgtgcaacggagagttcacgagggcagccagaaatcccagccgcgacggagacacgcgagcgcacccagtcacgtc

SEQ ID NO: 325900 - DNA, 120 bp, Artificial Sequence
  ENSG00000136111_12 (sequence is synthesized)
cagccctcggactcggagaagaacaggaccatgctcttccaggttgggcgatttgagattaaccttatcagtccagacactaaatcagttgtgctagaaaagaattttaaagatatctcc

SEQ ID NO: 325901 - DNA, 120 bp, Artificial Sequence
  ENSG00000136111_13 (sequence is synthesized)
tcttgttctcagggtataaagcatgtggatcactttggctttatctgccgggagtctccagagcctggacttagccagtatatttgttatgtattccagtgtgccagcgaatctctggtt

SEQ ID NO: 325902 - DNA, 120 bp, Artificial Sequence
  ENSG00000136111_14 (sequence is synthesized)
gatgaggtaatgctgactctgaaacaggccttcagtacggcggctgccctgcagagtgccaagacgcagattaaactgtgtgaggcctgcccgatgcactctttgcataagctctgtgaa

SEQ ID NO: 325903 - DNA, 120 bp, Artificial Sequence
  ENSG00000136111_15 (sequence is synthesized)
aggattgaaggtctctacccaccaagagccaagctggtgatacagaggcatctctcatcactgacagataatgagcaagctgacatctttgaaagagttcagaaaatgaagccagtcagt

SEQ ID NO: 325904 - DNA, 120 bp, Artificial Sequence
  ENSG00000136111_16 (sequence is synthesized)
gaccaggaagaaaatgaacttgtgattttacacctgaggcagctgtgtgaagccaagcagaagacacacgtgcacatcggggaaggcccttctactatttcaaatagtacaatcccagaa

SEQ ID NO: 325905 - DNA, 120 bp, Artificial Sequence
  ENSG00000136111_17 (sequence is synthesized)
aatgcaacaagcagtggaaggttcaaacttgacattctgaaaaataaagctaagagatccttaactagctccctggaaaatatcttctcaaggggagctaacagaatgagaggtcggctt

SEQ ID NO: 325906 - DNA, 120 bp, Artificial Sequence
  ENSG00000136111_18 (sequence is synthesized)
ggaagtgtggacagttttgaacggtccaacagtcttgcttcagagaaggactactcaccaggggattctccaccagggacaccgccagcgtccccaccgtcctcagcttggcaaacgttt

SEQ ID NO: 325907 - DNA, 120 bp, Artificial Sequence
  ENSG00000136111_19 (sequence is synthesized)
cccgaagaggattccgactccccgcagtttcgaagacgggcacacacgttcagccacccaccttcaagcacaaagagaaagctgaatttgcaggatgggagggctcagggtgtgcgttcc

SEQ ID NO: 325908 - DNA, 120 bp, Artificial Sequence
  ENSG00000136111_20 (sequence is synthesized)
cctctgctgaggcagagctccagtgaacagtgcagcaatctttcgtcagttcgacgcatgtacaaggagagtaattcttcctccagtcttccaagtcttcacacttccttctctgcccct

SEQ ID NO: 325909 - DNA, 120 bp, Artificial Sequence
  ENSG00000136111_21 (sequence is synthesized)
tccttcactgccccctctttcctgaaaagcttttaccagaattcaggtagactgtccccacagtatgaaaatgaaatcagacaagacactgcttcagaatcaagtgatggagaagggaga

SEQ ID NO: 325910 - DNA, 120 bp, Artificial Sequence
  ENSG00000136111_22 (sequence is synthesized)
aaaaggacctcatctacctgcagcaatgagtccctaagtgtgggaggaacctctgtcactcctcgccggatctcctggcggcagcgcattttcctcagggttgcttctcccatgaacaaa

SEQ ID NO: 325911 - DNA, 120 bp, Artificial Sequence
  ENSG00000136111_23 (sequence is synthesized)
tctccctcagcaatgcaacagcaagatggattggacaggaacgagctgctgccactgtcccccctctctccaaccatggaggaggaaccgctggttgtattcctgtctggggaggatgac

SEQ ID NO: 325912 - DNA, 120 bp, Artificial Sequence
  ENSG00000136111_24 (sequence is synthesized)
ccagaaaagattgaagaaagaaagaaatcaaaagaactgaggagcttgtggagaaaagctatacaccaacaaatcttgttacttcgaatggaaaaagaaaaccagaaacttgaagcaagc

SEQ ID NO: 325913 - DNA, 120 bp, Artificial Sequence
  ENSG00000136111_25 (sequence is synthesized)
agagatgaactccagtccagaaaagttaaattagactatgaagaagttggtgcatgtcagaaagaggtcttaataacttgggataagaagttgttaaactgcagagctaaaatcagatgt

SEQ ID NO: 325914 - DNA, 120 bp, Artificial Sequence
  ENSG00000136111_26 (sequence is synthesized)
gatatggaagatattcatactcttcttaaagaaggagttcccaaaagtcgacgaggagaaatttggcagtttctggctttacagtaccgactcagacacagattgcctaataaacaacag

SEQ ID NO: 325915 - DNA, 120 bp, Artificial Sequence
  ENSG00000136111_27 (sequence is synthesized)
cctcctgacatatcctataaggaacttttgaagcagctcactgctcagcagcatgcgattctcgtggatttaggaaggacgtttcctactcacccttacttttcagtacagcttgggcca

SEQ ID NO: 325916 - DNA, 120 bp, Artificial Sequence
  ENSG00000136111_28 (sequence is synthesized)
ggacagctgtcactgtttaacctcctgaaagcctattctttgctggacaaagaagtgggatactgtcaggggatcagctttgtggctggagtcctgcttctgcacatgagtgaagagcaa

SEQ ID NO: 325917 - DNA, 120 bp, Artificial Sequence
  ENSG00000136111_29 (sequence is synthesized)
gcctttgaaatgctgaaattcctcatgtatgacctcggcttccgcaagcagtacagacctgacatgatgtcgctgcagattcaaatgtaccagctgtccaggctccttcatgactatcac

SEQ ID NO: 325918 - DNA, 120 bp, Artificial Sequence
  ENSG00000136111_30 (sequence is synthesized)
agagatctctacaatcaccttgaagaaaatgaaatcagccccagtctttatgctgccccctggttcctcacattgtttgcctctcagttttcattaggatttgtagccagagtttttgat

SEQ ID NO: 325919 - DNA, 120 bp, Artificial Sequence
  ENSG00000136111_31 (sequence is synthesized)
tattcaaggttgcactcagcctactgagcagccaagagacacttataatggaatgtgagagctttgaaaatattgttgagtttcttaaaaacacgctacctgatatgaatacctctgaaa

SEQ ID NO: 325920 - DNA, 120 bp, Artificial Sequence
  ENSG00000136111_32 (sequence is synthesized)
tggaaaaaattattacccaggtttttgagatggatatttctaagcagttgcatgcctatgaggtggaatatcatgtgctacaggatgagcttcaggaatcttcatattcctgtgaggata

SEQ ID NO: 325921 - DNA, 120 bp, Artificial Sequence
  ENSG00000136111_33 (sequence is synthesized)
gtgaaactttggagaagctggagagggccaatagccaactgaaaagacaaaacatggacctcctagaaaaattacaggtagctcatactaaaatccaggccttggaatcaaacctggaaa

SEQ ID NO: 325922 - DNA, 120 bp, Artificial Sequence
  ENSG00000136111_34 (sequence is synthesized)
atcttttgacgagagagaccaaaatgaagtctttaatccggaccctggaacaagaaaaaatggcttatcaaaagacagtggagcaactccggaagctgctgcccgcggatgctctagtca

SEQ ID NO: 325923 - DNA, 120 bp, Artificial Sequence
  ENSG00000136111_35 (sequence is synthesized)
attgtgacctgttgctgagagacctaaactgcaaccctaacaacaaagccaagataggaaataagccataattgaagaggcacggcctcagcagaaagtgctccttagaatactacagag

SEQ ID NO: 325924 - DNA, 120 bp, Artificial Sequence
  ENSG00000136111_36 (sequence is synthesized)
aggaagagcctgcatgtcgctggcccaaggctggaccctgaagctgatggaaccacctaatactggtgctgagcgcctagtcacagcaggtggacctcgtgctcatcagagcatgccaat

SEQ ID NO: 325925 - DNA, 120 bp, Artificial Sequence
  ENSG00000136111_37 (sequence is synthesized)
cctaagccattggacatatgtagactggtttttgttgttgctatgtacatataaatatatatataaaatgaacatagttcatgctttcagataaaatgagtagatgtatatttagattaa

SEQ ID NO: 325926 - DNA, 120 bp, Artificial Sequence
  ENSG00000136111_38 (sequence is synthesized)
tttttttagtcagaacttcatgaaatccacaccaaaggaaaggtaaactgaaatttcccttggacatatgtgaaatctttttgtctttatagtgaaacaaagccagagcatctttgtata

SEQ ID NO: 325927 - DNA, 120 bp, Artificial Sequence
  ENSG00000136111_39 (sequence is synthesized)
ttgcaatatacttgaaaaaaatgaatgtatttttttctccaaagaacagcatgtttcactcaatggtgaaaaggtggaaacatttatgtaactttatgtgtatctgtcttgatatctact

SEQ ID NO: 325928 - DNA, 120 bp, Artificial Sequence
  ENSG00000136111_40 (sequence is synthesized)
gacattgtctatatgaggaaaatgattactggtcatgctcctgtgagttttttgggaaggtagggtcatttctccctgcctgctttgtgccaactagcatgttgcatctacatgcattat

SEQ ID NO: 325929 - DNA, 120 bp, Artificial Sequence
  ENSG00000136111_41 (sequence is synthesized)
gagtctggttaggcattactttaaacatacataaagagacagtaggacattgtggctgagtctacccagctcaaggtaaaggagaatgttgctaattttttagcaaactagaccagcatt

SEQ ID NO: 325930 - DNA, 120 bp, Artificial Sequence
  ENSG00000136111_42 (sequence is synthesized)
attactcaaactaaaaatatcacacctgaaaaatttaatttaggacctaaaatgtctagattagctttctgctttttttatttgaataactcattcagttgtgaatgaattcctctttat

SEQ ID NO: 325931 - DNA, 120 bp, Artificial Sequence
  ENSG00000136111_43 (sequence is synthesized)
ttggtgccacagtcaccaaatgacaaggatttgccactttcccaccaaattgtgagtgcttgtaatttaggtctctctaccttaaattcagtataaggaaacgtaattatgattgatttt

SEQ ID NO: 325932 - DNA, 120 bp, Artificial Sequence
  ENSG00000136111_44 (sequence is synthesized)
ttccaaagatgacaagctgtgttgaaatacattttttcttttgaccaattgacagaatctaataagctttaataatcttccccttttatgtgaaaagttttgagaactgtgaaatgttta

SEQ ID NO: 325933 - DNA, 120 bp, Artificial Sequence
  ENSG00000136111_45 (sequence is synthesized)
ggaacaaactgttgaaatccattggaagggaaaaaagaaagtggtaccagtgttaccagctcaactaaaacctgcaattctgcatttcaactcttcacttcctcagcctacaaatagctc

SEQ ID NO: 325934 - DNA, 120 bp, Artificial Sequence
  ENSG00000136111_46 (sequence is synthesized)
attagatgacattcacgcatgctgggtataggcaaggaaagtaattttcaaagtacatttgcagttctctttttcagagatgattctatgatagtgcctctgaaagttgatgcagcattt

SEQ ID NO: 325935 - DNA, 120 bp, Artificial Sequence
  ENSG00000136111_47 (sequence is synthesized)
ttgcctttccaaaaagtatttatcctcactgctttttgcagtacttgtattttcacagatggattatctggggtaattttcttcaaagggagtttgttatacacagtgaaaatgtattat

SEQ ID NO: 325936 - DNA, 120 bp, Artificial Sequence
  ENSG00000136111_48 (sequence is synthesized)
agagtagaatagtaaagctctaggggtttcagaaagctttgatgaacagatgacaaacatctgaaaccccctccgcactgttacccagtgtgtatataatgacttgttatagctcagtgt

SEQ ID NO: 325937 - DNA, 120 bp, Artificial Sequence
  ENSG00000136111_49 (sequence is synthesized)
gcccttgaatccatacagtttcttaaaagacaataaaatcttattaataaagttaatgtaacttctaagttctagaaaatgctgattctgtctgccccattcaattgggggctactaatt

SEQ ID NO: 325938 - DNA, 120 bp, Artificial Sequence
  ENSG00000136111_50 (sequence is synthesized)
gatttgttgcttggatttcctgagaatttctctatttgtaggaggggttttttctttttacggtctgttgatgacaattactttatgggtgtgatgcaccgatggtagccaaggaatctg

SEQ ID NO: 325939 - DNA, 120 bp, Artificial Sequence
  ENSG00000136111_51 (sequence is synthesized)
ttggggaagttcggaaagaaaccttttctttcttttattcagtttaaagtaaactttatcctggatgtttagaatcaacattaagagttatattatggtgttcagagattaagctgactt

SEQ ID NO: 325940 - DNA, 120 bp, Artificial Sequence
  ENSG00000136111_52 (sequence is synthesized)
ggatacaatattttcttttgaaaatgaattttctttttcatttgtgatttttaaaaaatgttgcaccagttatgcttcatgcatcgttacatcttcatcaggttaatgtaatgtctagtt

SEQ ID NO: 325941 - DNA, 120 bp, Artificial Sequence
  ENSG00000136111_53 (sequence is synthesized)
cctttgcaataaatatattgctgcagctttcttgacgtatactgttacttttcgggagagaagcagctcttggttagagtcttttactgcaggggtccctgggtacctgtctgtggcctg

SEQ ID NO: 325942 - DNA, 120 bp, Artificial Sequence
  ENSG00000136111_54 (sequence is synthesized)
gtctgtggcctgttatgaaccaggctgcacagcagtggtgggcatgcgagcaagcatgactgcctgagctctgactcctgtcagatcagccacggcattagattctcataggagcgcaaa

SEQ ID NO: 325943 - DNA, 74 bp, Artificial Sequence
  ENSG00000136111_55 (sequence is synthesized)
aatctcgtctagttgcaggaaaacagtcagggttcccactaattctacattatggtgagtatataataataata

SEQ ID NO: 325944 - DNA, 120 bp, Artificial Sequence
  ENSG00000136111_56 (sequence is synthesized)
ccagatgggatcgtctagttgcaggaaaacagtcagggttcccactaattctacattatggtgagtatataataataatatggtgaggatataataataataatagaaataaagtgcaca

SEQ ID NO: 325945 - DNA, 120 bp, Artificial Sequence
  ENSG00000136111_57 (sequence is synthesized)
cctgccaccagtctgtggaaagattgtcttccatgaaaccagtccctggtgtcaagaaggttgaagaccgctgctttacaagatctgcatggtgaaaccccatctctagggaaaatacaa

SEQ ID NO: 325946 - DNA, 120 bp, Artificial Sequence
  ENSG00000136111_58 (sequence is synthesized)
tagccaggcgtggtggtgtgcatctgtaatctcagctactcaggagagtaggagaggcatatattgctacttataggaggctggagaatagtttgaacctgggaggcggagcttgcagtg

SEQ ID NO: 325947 - DNA, 120 bp, Artificial Sequence
  ENSG00000136111_59 (sequence is synthesized)
agtgagcttgcagtgagccatcatgccactgcactctagcctgggccacagagtgagactttgacaaaaaaaaagaaaaacaaacaaccaaacaaaaaagatctgcatggtttggattgt

SEQ ID NO: 325948 - DNA, 120 bp, Artificial Sequence
  ENSG00000136111_60 (sequence is synthesized)
acctacttaaaattgctacacaaataattcttcctaatagagtcagacaacaaagataatttaggagacatttatgtaagtacattgttaccatttttcaacttactttctcaatggaga

SEQ ID NO: 325949 - DNA, 120 bp, Artificial Sequence
  ENSG00000136111_61 (sequence is synthesized)
cttttgaaagaaaaatataagcaaccacattgacagatttgcattctacccttttattttccaggccccctcatagatagcaagggagagagagccacaagaaaatacaaaattttccaa

SEQ ID NO: 325950 - DNA, 120 bp, Artificial Sequence
  ENSG00000136111_62 (sequence is synthesized)
ctggacgcagataattaagaattaaggacatttactgatggatgtgatatgaatgtttttatataaaatatgcatctcttggagtattctcatgtatatttgtaatccaataaaaataca

SEQ ID NO: 325951 - DNA, 120 bp, Artificial Sequence
  ENSG00000136111_63 (sequence is synthesized)
agaaagagagaacttagagctaatactgaggactacaccagtttggcaaaatcattgctcttcgtgaccacctccagtttccagctggcttcctgatcaaaggtttgcacggttgagtgt

SEQ ID NO: 325952 - DNA, 120 bp, Artificial Sequence
  ENSG00000136111_64 (sequence is synthesized)
acttcctagccatgtgaacttggggcaattacttcatctctttctgcctcagctttctgtctataaagtggacctaatagtaattgcctaccttatagttgagttgttttctgagtgcat

SEQ ID NO: 325953 - DNA, 120 bp, Artificial Sequence
  ENSG00000136111_65 (sequence is synthesized)
gtgcttagtagctaggcaccctcaataaatgttttattaatgctcagtcagcaacgggtgatgttattgttaatattgtcattatcgagttcccaaaagtcgacgaggagaaatttggca

SEQ ID NO: 325954 - DNA, 120 bp, Artificial Sequence
  ENSG00000136114_0 (sequence is synthesized)
gtgggagccgaacgccgcggggtcagggcgtgcagtctgggacgcgggatgcttggcgctctacctcgccgcccctgagccttcccgtccgcctcgccacgcgcccggacggcctggggt

SEQ ID NO: 325955 - DNA, 120 bp, Artificial Sequence
  ENSG00000136114_1 (sequence is synthesized)
tgctgcccgtcagtctcgaaaggtgtttttggggaaaaaaatcacaatctggacgtgagaaaggacatgaggagactaaagacctgggattttgtcaatcagaatgaaaccaatgttgaa

SEQ ID NO: 325956 - DNA, 120 bp, Artificial Sequence
  ENSG00000136114_2 (sequence is synthesized)
agacttttcaaatctattgttggtggtactctgtgactatgttcttggagaagctgaatatcttctcttgagagagccaggccatgtagcactaagcaacgacacagtgtatgtggattt

SEQ ID NO: 325957 - DNA, 120 bp, Artificial Sequence
  ENSG00000136114_3 (sequence is synthesized)
ccagtattttgatggtgctaatgggacactgaggaatgtatctgtcctgctgttggaggccaacaccaatcagactgtaactaccaagtacctcctgaccaaccagtcccagggaacact

SEQ ID NO: 325958 - DNA, 120 bp, Artificial Sequence
  ENSG00000136114_4 (sequence is synthesized)
aaagtttgagtgcttctatttcaaggaggctggtgactactggttcacaatgactccagaagcaacagacaacagcactccattcccctggtgggagaaaagtgcctttctgaaggtgga

SEQ ID NO: 325959 - DNA, 120 bp, Artificial Sequence
  ENSG00000136114_5 (sequence is synthesized)
atggcctgtctttcacgttgacttgaataggagtgccaaggcagcagaaggcaccttccaagtgggcctatttaccagtcaaccactgtgcccgtttcctgtggacaagcccaacatcgt

SEQ ID NO: 325960 - DNA, 120 bp, Artificial Sequence
  ENSG00000136114_6 (sequence is synthesized)
agtggatgtcatcttcaccaacagtcttcctgaggcaagaagaaattcaagacagccgctggaaataagaaccagcaaaaggacagaacttgctcaaggtcagtgggttgagtttggctg

SEQ ID NO: 325961 - DNA, 120 bp, Artificial Sequence
  ENSG00000136114_7 (sequence is synthesized)
tgcacccttggggccagaagcctatgtcaccgtggtgctgaagctgcttgggcgagactcagtcattacctccacaggacccattgacctggcccagaaatttggatacaaactggtgat

SEQ ID NO: 325962 - DNA, 120 bp, Artificial Sequence
  ENSG00000136114_8 (sequence is synthesized)
ggtgccagaactcacatgtgagtccggggtagaggtgacagtgctgcctccaccatgcaccttcgtccaaggagtggtcactgtcttcaaggaggcccccagataccctgggaagaggac

SEQ ID NO: 325963 - DNA, 120 bp, Artificial Sequence
  ENSG00000136114_9 (sequence is synthesized)
cattcacttggctgaaaacagcctgcccctgggagagaggaggacaatttttaactgtactttgtttgacatggggaagaataagtactgctttgactttggcatttcaagcagaagcca

SEQ ID NO: 325964 - DNA, 120 bp, Artificial Sequence
  ENSG00000136114_10 (sequence is synthesized)
tttttctgcaaaggaggagtgcatgctaattcagagaaatacagaaacttggggactgtggcagccatggagccagtgtagtgccacatgtggggatggtgtcagagagcgtcgccgagt

SEQ ID NO: 325965 - DNA, 120 bp, Artificial Sequence
  ENSG00000136114_11 (sequence is synthesized)
gtgtctcacttccttcccctccagtcctgtctgccctggaatgtccttggaggcctccctgtgttccctggaggagtgtgctgctttccagccatccagcccatctcctcttcagcccca

SEQ ID NO: 325966 - DNA, 120 bp, Artificial Sequence
  ENSG00000136114_12 (sequence is synthesized)
tgactgtcactggtatatccttgtgcttgttcatcatcattgccactgtgctcatcacgctgtggaggaggttcggccggccagccaagtgcagcacacctgctcgacacaactccatcc

SEQ ID NO: 325967 - DNA, 120 bp, Artificial Sequence
  ENSG00000136114_13 (sequence is synthesized)
actcccccagcttccggaagaactcggacgaggagaatatctgcgagctgagcgagcagcgcgggagcttctcggatgggggagacgggcccacggggagtccaggggacacaggcatcc

SEQ ID NO: 325968 - DNA, 120 bp, Artificial Sequence
  ENSG00000136114_14 (sequence is synthesized)
ctctgacctacaggcggagcgggccggtacctcccgaggatgatgcctctggcagcgagagcttccagtccaacgcccagaagataatcccacctctgttcagctaccgccttgcccagc

SEQ ID NO: 325969 - DNA, 120 bp, Artificial Sequence
  ENSG00000136114_15 (sequence is synthesized)
agcagttaaaggagatgaaaaagaaaggtctgacggaaactaccaaagtgtatcacgtgtctcagagtcccctgacagacactgccattgatgcggcccccagcgctcccttagatttgg

SEQ ID NO: 325970 - DNA, 120 bp, Artificial Sequence
  ENSG00000136114_16 (sequence is synthesized)
aaagcccggaagaagctgcagcaaacaagttccggatcaaatccccatttccggagcagcccgcggtcagtgccggggaaaggcctccctccaggctggatctaaatgtgactcaggcca

SEQ ID NO: 325971 - DNA, 120 bp, Artificial Sequence
  ENSG00000136114_17 (sequence is synthesized)
gttgtgccataagccccagccagactctgatccgcaagtcacaggcaaggcacgtgggcagcagagggggcccgtccgaaaggagccatgccaggaacgcccatttcaggaggacagcga

SEQ ID NO: 325972 - DNA, 120 bp, Artificial Sequence
  ENSG00000136114_18 (sequence is synthesized)
gtttccatgaagccaggcaggcccggccgttccgagagaggagcatgtccactctgactccacggcaggcccctgcctacagctctaggacgcggacctgcgagcaggcagaggacagat

SEQ ID NO: 325973 - DNA, 120 bp, Artificial Sequence
  ENSG00000136114_19 (sequence is synthesized)
ttaggcctcagagtcgaggtgcccacctgtttcctgaaaaactggagcatttccaagaggcaagtggaacccgtggtccattaaaccctctccctaaatcctacactttggggcagccct

SEQ ID NO: 325974 - DNA, 120 bp, Artificial Sequence
  ENSG00000136114_20 (sequence is synthesized)
tgaggaaaccagaccttggggatcaccaggcaggattagtggccggaattgagagaacagagccccacagagctcgtcggggaccgtcccccagtcacaagagtgtctcaaggaagcagt

SEQ ID NO: 325975 - DNA, 120 bp, Artificial Sequence
  ENSG00000136114_21 (sequence is synthesized)
cttctcccatatcccccaaagataactaccagagggtcagttctctgagcccttctcagtgtagaaaagacaagtgtcaaagcttccccactcaccctgagtttgccttctatgacaata

SEQ ID NO: 325976 - DNA, 120 bp, Artificial Sequence
  ENSG00000136114_22 (sequence is synthesized)
cgtcgtttggcctcactgaggctgagcagaggatgctggacctcccaggatattttgggtcaaatgaagaggatgaaaccacaagtacacttagcgtggagaagctggtgatctagactg

SEQ ID NO: 325977 - DNA, 120 bp, Artificial Sequence
  ENSG00000136114_23 (sequence is synthesized)
agaatcagcctgagctttacacagctggggtctgctactcgcgttttgtagacttttgtgtaactatttgtaccgtaggacagaatgtgaggaggaagtaacacacagaggaggatgtgt

SEQ ID NO: 325978 - DNA, 120 bp, Artificial Sequence
  ENSG00000136114_24 (sequence is synthesized)
gtgtatgcatgtgtttgaattcacaaggaagaaattatttatcttgagctttttcctttgttattcaatttctattgatttattagtaataacaatgataataaaatgtaaatgagcaaa

SEQ ID NO: 325979 - DNA, 120 bp, Artificial Sequence
  ENSG00000136114_25 (sequence is synthesized)
actagagtagaagtgattgaatgtgaagtgtcaggagattgctcgctcgtccttcgttaaacccctggtccggctgtgtgctgtggatgcgggtgtgtgttgaggggacctgcgtctgcc

SEQ ID NO: 325980 - DNA, 120 bp, Artificial Sequence
  ENSG00000136114_26 (sequence is synthesized)
ggggccgcaccccctcccgcaggaccttggctggccgcgcgtttcctgcctgtttcctgtccagcagctggcgagctggggaccggcaggaaaggatgcgctgcccagaaggggcgggaa

SEQ ID NO: 325981 - DNA, 120 bp, Artificial Sequence
  ENSG00000136114_27 (sequence is synthesized)
tctttttaggctttagtacagtgactgttacattatagagagcttgatcttgatatttgagcctctactatgtctcttctgggtacttcaacttttgtaggattaagcattagttaaaat

SEQ ID NO: 325982 - DNA, 120 bp, Artificial Sequence
  ENSG00000136114_28 (sequence is synthesized)
ttagttatagtgtgaatgttctttggattttagtaggacattcagtaaattatttcttgcatatactggtatacattctgcctaccattagaacccagagtgtgtttaaattagtgtcct

SEQ ID NO: 325983 - DNA, 120 bp, Artificial Sequence
  ENSG00000136114_29 (sequence is synthesized)
aaattaattacattttttttctgctgtgtgtttctattaggtttcagaaaagggatccctaacatcagaagagtttgctaagcttgtgggaatgtctgtcctcctagccaaagaaaggtg

SEQ ID NO: 325984 - DNA, 120 bp, Artificial Sequence
  ENSG00000136122_0 (sequence is synthesized)
atggcgggacgacacgattggctagtcgctcacaagccccgtgccctggttggcccaagacagcgcggaagcggggagttaaagagtctatgcctgtcgtggaagctggcctggcccccg

SEQ ID NO: 325985 - DNA, 120 bp, Artificial Sequence
  ENSG00000136122_1 (sequence is synthesized)
gagctccctggagtcggtactgggggcttcgttttgtacgcaccgttttctctctgtgctatgggagatgtcaaggaatcaaagatgcaaataacaccagaaactccaggaaggatccct

SEQ ID NO: 325986 - DNA, 120 bp, Artificial Sequence
  ENSG00000136122_2 (sequence is synthesized)
gttttaaatccttttgaaagtcctagtgattattctaatctccatgaacaaactctcgccagtccttctgtttttaaatcaacaaaattaccaactccagggaaatttagatggtctatt

SEQ ID NO: 325987 - DNA, 120 bp, Artificial Sequence
  ENSG00000136122_3 (sequence is synthesized)
gatcaactagctgtaataaatcctgtagaaatagacccagaagatattcatcgtcaagctttatacttaagtcattctcgaatagataaagatgtggaagacaaaagacaaaaagccatt

SEQ ID NO: 325988 - DNA, 120 bp, Artificial Sequence
  ENSG00000136122_4 (sequence is synthesized)
gaagagtttttcactaaagatgtcatcgtaccctctccttggactgatcatgaagggaaacagctttcacaatgtcattccagtaaatgcactaacataaatagtgactctccagttgga

SEQ ID NO: 325989 - DNA, 120 bp, Artificial Sequence
  ENSG00000136122_5 (sequence is synthesized)
aaaaagctgaccattcattctgagaaaagcgatgctgcttgtcagacattgctgtctcttcctgtggattttaatttagaaaatatattaggtgactattttagagctgatgaatttgca

SEQ ID NO: 325990 - DNA, 120 bp, Artificial Sequence
  ENSG00000136122_6 (sequence is synthesized)
gatcaatctcctggaaacctcagttcttcatccctcagaagaaagctgtttttagatgggaacggaagcatctccgactccttaccttcggcttctcccggaagtcctcacagtggtgtt

SEQ ID NO: 325991 - DNA, 120 bp, Artificial Sequence
  ENSG00000136122_7 (sequence is synthesized)
ttgcagacaccaagttcggggcagttttcttctagccctattcaggctagtgcaaaaaaatacagcttgggaagcataactagtccttcgcctatttcttcacccactttctcaccaatt

SEQ ID NO: 325992 - DNA, 120 bp, Artificial Sequence
  ENSG00000136122_8 (sequence is synthesized)
gaatttcagataggagagactccactctcagaacaaaggaagtttactgttcattctcctgatgcttcatctggaacaaattctaatgggataactaatccgtgtatcagaagtccttat

SEQ ID NO: 325993 - DNA, 120 bp, Artificial Sequence
  ENSG00000136122_9 (sequence is synthesized)
atagatggctgctcgccaattaaaaattggtctcctatgagacttcagatgtatagtggtggtactcagtatcggacctcagtgattcagataccttttactcttgagactcaaggtgaa

SEQ ID NO: 325994 - DNA, 120 bp, Artificial Sequence
  ENSG00000136122_10 (sequence is synthesized)
gatgaggaagataaagagaatattccttccacagatgtctcatcacccgccatggatgctgctggaatacacctacggcagtttagtaatgaggcttctacccatggtacacatttggtt

SEQ ID NO: 325995 - DNA, 120 bp, Artificial Sequence
  ENSG00000136122_11 (sequence is synthesized)
gtgactgccatgtctgttacacaaaatcagtccagtgcttctgagaaagaattagcactgttgcaggatgttgaaagggagaaagacaataacactgtggatatggttgatcctatagag

SEQ ID NO: 325996 - DNA, 120 bp, Artificial Sequence
  ENSG00000136122_12 (sequence is synthesized)
atagcagatgagaccacttggattaaggagccggttgataatggcagtttacccatgactgattttgtaagtggcattgccttcagtattgaaaactctcatatgtgcatgtcacctctt

SEQ ID NO: 325997 - DNA, 120 bp, Artificial Sequence
  ENSG00000136122_13 (sequence is synthesized)
gctgaaagcagtgtcattccttgtgaaagcagtaacattcagatggatagtggctataatacgcagaattgtggaagcaatattatggatacagttggggcagaaagttactgcaaagaa

SEQ ID NO: 325998 - DNA, 120 bp, Artificial Sequence
  ENSG00000136122_14 (sequence is synthesized)
agtgatgcacaaacatgtgaagttgagagtaaatctcaagcatttaatatgaagcaagaccacacaacacagaggtgttggatgaaaacagcaagcccttttcaatgcagcagtccatag

SEQ ID NO: 325999 - DNA, 120 bp, Artificial Sequence
  ENSG00000136122_15 (sequence is synthesized)
agactaagcttaagagttcctcgcatatatcgttgtgcacaggatcaacatgatggtgactgggaaaaaattacttcaagtaacatgcttagctttccctccttaatgtgaaaaatcaag

SEQ ID NO: 326000 - DNA, 120 bp, Artificial Sequence
  ENSG00000136122_16 (sequence is synthesized)
ggcttactgacataggaacaacagaaatgctcctggaacttcaagttgctgaattataagtttattttttatcaataaatatttttatacttacattgagtgatgtgtttaacaacaaat

SEQ ID NO: 326001 - DNA, 120 bp, Artificial Sequence
  ENSG00000136122_17 (sequence is synthesized)
tgtgacagagctgagtgctcctatcttacagggtcaatgaactacttattaagccttactggtagcactgaatttagcagttctgagaacatgtgaaactatgttaaaactgaaggcact

SEQ ID NO: 326002 - DNA, 120 bp, Artificial Sequence
  ENSG00000136122_18 (sequence is synthesized)
atatatttttacataaaagcttgaacatacagatgaattataacctatgtgaagaaatcttagatataaaactaacttttcaaagatacaaaagaaattaaacaggtttcctgaaatttt

SEQ ID NO: 326003 - DNA, 120 bp, Artificial Sequence
  ENSG00000136122_19 (sequence is synthesized)
agttcttggtctgttcacctctgtggggaaaattcttagttccagtgataactgttctagttactacttttaagtatgtaaatactagaaaggtagtactagtgacatcatcacgtgtat

SEQ ID NO: 326004 - DNA, 120 bp, Artificial Sequence
  ENSG00000136122_20 (sequence is synthesized)
tgttatctatggggcaaatgtgtggtgcccagaataaaatatacctcatgcctagggtagggacatcctttccagctcaaacgtgggtagggatgtgggagaataagaatgtgggagaac

SEQ ID NO: 326005 - DNA, 120 bp, Artificial Sequence
  ENSG00000136122_21 (sequence is synthesized)
caagagaaaaagtggggctgggagagtggagttcccgtagggcataggcctgtgaagtaacactggggcagatatgtatgttatatacaactatttttttaaaaaacttatatccatgtt

SEQ ID NO: 326006 - DNA, 120 bp, Artificial Sequence
  ENSG00000136122_22 (sequence is synthesized)
gggagtagatgggtatataacagtttggaaatactatctttggagaatgtatttttgtatttataaatcaacttttaaaaactgtctcattcaaaagggaataaagacctgtgttatcaa

SEQ ID NO: 326007 - DNA, 120 bp, Artificial Sequence
  ENSG00000136122_23 (sequence is synthesized)
agcgcggaagcggggagttaaagagtctatgcctgtcgtggaagctggcctggcccccggagctccctggagtcggtactgggggcttcgttttgtacgcaccggtaggtacgctctttg

SEQ ID NO: 326008 - DNA, 120 bp, Artificial Sequence
  ENSG00000136122_24 (sequence is synthesized)
tggtccctggcctttcctcctgtctgaatggagaggtttcttttcccagctcctgacttgcctgcccgctcgcccctggtgaatgggagcagtcagggagtaggtgtggaagagaggggc

SEQ ID NO: 326009 - DNA, 120 bp, Artificial Sequence
  ENSG00000136122_25 (sequence is synthesized)
accagaaagagtggccacgtagggttgggggcgacgcctccttcgcactccatccagggaagccggctgcatctcaaccttccagaagtagactcttttccaccccaccccgccaagttt

SEQ ID NO: 326010 - DNA, 120 bp, Artificial Sequence
  ENSG00000136122_26 (sequence is synthesized)
caaaattaccagcactaacataaatagtgactctccagttggaaaaaagctgaccattcattctgagaaaagcgatgctgcttgtcagacattgctgtctcttcctgtggattttaattt

SEQ ID NO: 326011 - DNA, 120 bp, Artificial Sequence
  ENSG00000136141_0 (sequence is synthesized)
cttcaagaccgagctgccacggccgcctccccgcccgccccccattctacgcgcctgcccacaccctcctcccctccttccagcgcctttcggtggagcactgcggcactcagcccgagc

SEQ ID NO: 326012 - DNA, 120 bp, Artificial Sequence
  ENSG00000136141_1 (sequence is synthesized)
tgccgttttcccctcgcggggaacgctgtgacccccccgcaggagcggcggggcggggtgggggggcccgggagaagatggcgacgccgggaagcgaaccccaacctttcgtcccggccc

SEQ ID NO: 326013 - DNA, 120 bp, Artificial Sequence
  ENSG00000136141_2 (sequence is synthesized)
tttcggtagctactctgcacccacttcatcatccccaccaccaccaccaccaccatcagcaccacggaggaaccggcgcccccggcggggcgggtggtggcggcggtggcagcgggggct

SEQ ID NO: 326014 - DNA, 120 bp, Artificial Sequence
  ENSG00000136141_3 (sequence is synthesized)
tcaacctgcccttgaaccggggtctggagcgcgcgcttgaggaggcggccaactccggggggctgaacctgagcgccaggaaattgaaggaatttccccgtaccgcagcccccgggcacg

SEQ ID NO: 326015 - DNA, 120 bp, Artificial Sequence
  ENSG00000136141_4 (sequence is synthesized)
acctctcggacacggtgcaggcagacttatctaaaaacagactggttgaagttccaatggaattgtgccattttgtatcactggaaattcttaatctgtatcacaactgtatcagagtca

SEQ ID NO: 326016 - DNA, 120 bp, Artificial Sequence
  ENSG00000136141_5 (sequence is synthesized)
ttcctgaggccatcgttaatctgcagatgctgacttacctgaacttgagtcgaaatcagctgtccgccctgcctgcctgcctgtgtggtctgcctctcaaagtcttaatcgcaagtaaca

SEQ ID NO: 326017 - DNA, 120 bp, Artificial Sequence
  ENSG00000136141_6 (sequence is synthesized)
acaaacttggatcattaccagaagagataggtcagctcaaacagttaatggagctggatgtcagctgcaacgagatcacagcgttgccccagcagataggtcagttgaaatctctacgag

SEQ ID NO: 326018 - DNA, 120 bp, Artificial Sequence
  ENSG00000136141_7 (sequence is synthesized)
aactgaatgtcagaagaaattaccttaaagttttaccacaagaactagtagatctttccttggtaaagtttgacttttcctgcaacaaagtgctcgtgattccaatttgttttagagaga

SEQ ID NO: 326019 - DNA, 120 bp, Artificial Sequence
  ENSG00000136141_8 (sequence is synthesized)
tgaagcagctgcaagtgttactacttgagaataaccctctgcagtctcctccagcacagatttgcacaaagggcaaagttcacatatttaagtatctgagcatacaagcatgccagatta

SEQ ID NO: 326020 - DNA, 120 bp, Artificial Sequence
  ENSG00000136141_9 (sequence is synthesized)
agacagctgactccctttatctccacaccatggagaggccacatttacaccagcacgtggaagatggcaagaaggattctgattcgggagttggaagtgataatggagataagcgattat

SEQ ID NO: 326021 - DNA, 120 bp, Artificial Sequence
  ENSG00000136141_10 (sequence is synthesized)
ctgccaccgagccttctgacgaagacactgttagcctcaatgtgccaatgtcaaacatcatggaagaagaacagatcatcaaggaggactcgtgccatcgccttagccccgttaaagggg

SEQ ID NO: 326022 - DNA, 120 bp, Artificial Sequence
  ENSG00000136141_11 (sequence is synthesized)
aatttcatcaggaatttcaaccggagccttcccttttgggtgacagcaccaactcaggagaagaaagagaccagtttactgatagagcagatggtctccattcggaatttatgaactata

SEQ ID NO: 326023 - DNA, 120 bp, Artificial Sequence
  ENSG00000136141_12 (sequence is synthesized)
aggcaagggcagaagactgtgaagagctgttacggatagaagaggatgtgcactggcaaactgagggcataataagttcatccaaagatcaggacatggatatagcaatgatcgagcagc

SEQ ID NO: 326024 - DNA, 120 bp, Artificial Sequence
  ENSG00000136141_13 (sequence is synthesized)
tgagagaagcagtagatttgctgcaagatcccaatggattaagcacagatattacagagagaagtgttttaaacctatatcctatgggatcagcagaagccttagaattacaagattctg

SEQ ID NO: 326025 - DNA, 120 bp, Artificial Sequence
  ENSG00000136141_14 (sequence is synthesized)
cactgaatggtcaaatacagctggagacatctccggtgtgtgaggtgcaaagtgatctaacattacagagtaacgggagccagtattctccaaatgagattagagagaactcccctgcag

SEQ ID NO: 326026 - DNA, 120 bp, Artificial Sequence
  ENSG00000136141_15 (sequence is synthesized)
tctctcctaccacaaacagcacagctccatttggcctgaagcctcgatcagtgtttctaagacctcagagaaatttggaatctatagacccgcagtttacaatccggaggaaaatggagc

SEQ ID NO: 326027 - DNA, 120 bp, Artificial Sequence
  ENSG00000136141_16 (sequence is synthesized)
agatgagagaagagaaagagctggtggaacaacttcgtgagagcattgagatgagattgaaggtcagtctacacgaagacctgggggcagccctcatggatggtgtcgtcctctgccatc

SEQ ID NO: 326028 - DNA, 120 bp, Artificial Sequence
  ENSG00000136141_17 (sequence is synthesized)
cagcggttcccaaacttagcatggccaaatgcagaagaaatgtggaaaactttttggaagcatgccgaaaattaggagtaccagaggctgacctctgctctccgtgtgacatcctgcagt

SEQ ID NO: 326029 - DNA, 120 bp, Artificial Sequence
  ENSG00000136141_18 (sequence is synthesized)
tggattttcgtcacattcgaaagactgttgacactctgctggcactcggggagaaagccccaccaccaacttctgccctccgctccagggaccttataggcttctgtcttgtccatattc

SEQ ID NO: 326030 - DNA, 120 bp, Artificial Sequence
  ENSG00000136141_19 (sequence is synthesized)
tctttatagtgctggtctatatcacttaccactggaatgctctgtccgcataatgtctgcacgtgcatccaaacgctgtgctctgtcgccctcaacctttgcagggtccttcctaccttt

SEQ ID NO: 326031 - DNA, 120 bp, Artificial Sequence
  ENSG00000136141_20 (sequence is synthesized)
gagcctttgccttgcaaacttccatccctgtcatgtcttcagttatctctcgagttttgaagctgaacagtagcaaatcagattttccagaagcacaaactttgtagaatacagtttagt

SEQ ID NO: 326032 - DNA, 120 bp, Artificial Sequence
  ENSG00000136141_21 (sequence is synthesized)
ataattcctctcacttactgaaatacaacgacgacgactgcaaagtgtatgcacaccgcatgcttcctcatccacatagtgccagcagcagtgccacgcagttcctcctctccctcccgg

SEQ ID NO: 326033 - DNA, 120 bp, Artificial Sequence
  ENSG00000136141_22 (sequence is synthesized)
tgagctgctgccctgggcagaggggaggagaattccaggacaagagtgtcaaggacagggatttagcatatggaagtctttcctttgggtcagtattgaactagaattctaattcgggac

SEQ ID NO: 326034 - DNA, 120 bp, Artificial Sequence
  ENSG00000136141_23 (sequence is synthesized)
tgggcaattgagctgtataggggccaccttgcagggaggacagaaaactaacattttggcccaacttgatctatacaaaactttaataataccactactgaccaagttggacgtgtacac

SEQ ID NO: 326035 - DNA, 120 bp, Artificial Sequence
  ENSG00000136141_24 (sequence is synthesized)
gtactcacactgccttgatggccattcgattggattcctcccaaatttcctaaaaagggagccgcgaagggcgctgggcagtgtggccgccaacttccaccccggcaagcccctctgtcc

SEQ ID NO: 326036 - DNA, 120 bp, Artificial Sequence
  ENSG00000136141_25 (sequence is synthesized)
tatgcagaagggcgctcaagggaaggaagtgtcgttgctgttagagcctcacgtggaggagtcacttaaacaccagttttttactgcttaattccttgttaggtcttctcttgaggctct

SEQ ID NO: 326037 - DNA, 120 bp, Artificial Sequence
  ENSG00000136141_26 (sequence is synthesized)
tagaaaagcgttttccagagagatttctatttttgaacaatggaacggatcactgcttttttgccacatcacatagtaactgccggtccagaatgtgacggattcgactctattcatttt

SEQ ID NO: 326038 - DNA, 120 bp, Artificial Sequence
  ENSG00000136141_27 (sequence is synthesized)
caaataaagccatgagccgtggaacattcttggtcctggtgcttgggttatgatggcaggagtcaagaagaagattactttcattctagaagaatgtagtttctctaattatttgaaatg

SEQ ID NO: 326039 - DNA, 120 bp, Artificial Sequence
  ENSG00000136141_28 (sequence is synthesized)
ttcatttagcctttgattttcactgatattaactagcaaactgctttaagtcagctcaaaggattatatagtaactatatctgcatttggagcaatgtgatcagtttgcatttaaaagga

SEQ ID NO: 326040 - DNA, 120 bp, Artificial Sequence
  ENSG00000136141_29 (sequence is synthesized)
aaaaaaagaattttatcttagccagaatgtccctggattcaggggtgtctttgtataatatgagagggccttgttccaaggtcaaggcagcctccttattttacatgctgtttgccaaat

SEQ ID NO: 326041 - DNA, 120 bp, Artificial Sequence
  ENSG00000136141_30 (sequence is synthesized)
cttgtttcttagcttggggagatgatggacttagcttcctcaagataaatttctagtttattaagatgcaaacagctctcatagatggctactacgaagaaaatcttatttttctgaaca

SEQ ID NO: 326042 - DNA, 120 bp, Artificial Sequence
  ENSG00000136141_31 (sequence is synthesized)
ttttcatgaatccaggggacttgaaaatatggaagacccacatagttagaagaatatatttataaagattccttgctgctaagtcagatcagatttgctaacaggaagcattctttacat

SEQ ID NO: 326043 - DNA, 120 bp, Artificial Sequence
  ENSG00000136141_32 (sequence is synthesized)
gacagtatcttgagttatgtgagttttttttcctcctgactttgtgttgattggtgaaatgcagggtatgtggaagttatctaattaacctcagttgtatatgaataacccacagatgta

SEQ ID NO: 326044 - DNA, 120 bp, Artificial Sequence
  ENSG00000136141_33 (sequence is synthesized)
ctgaattacttttggtgctatcttgtactcttcaatctgtaacacaataaaatccctttgtacgatgtctaatgagcaccctgagccataaattgcttaataaacacattttgggtgatt

SEQ ID NO: 326045 - DNA, 120 bp, Artificial Sequence
  ENSG00000136141_34 (sequence is synthesized)
gttcacatgaaactaccccttctccattgggggctcagactctgctctcatccaggatcctgaactctgctccaggcacctgttcaaccctctctcccacccactgcctgtcacttcact

SEQ ID NO: 326046 - DNA, 120 bp, Artificial Sequence
  ENSG00000136141_35 (sequence is synthesized)
gactccagttacattgaaacaattttcagtctaagggaggattttctacctttcagagctgacctccgactttaagacttgacaggtatttatcttgaaaccagagagggagctggagga

SEQ ID NO: 326047 - DNA, 120 bp, Artificial Sequence
  ENSG00000136141_36 (sequence is synthesized)
aaaaaaaactgagcagcacatcaatgccttttccaccctccttcatcctttccacactcaccgactgccattaccaaaacgccaagcacaaccgttttgcagcaagacgcattcgtttta

SEQ ID NO: 326048 - DNA, 120 bp, Artificial Sequence
  ENSG00000136141_37 (sequence is synthesized)
ttaaaaccaaactcgttatgtatttagtggggggaggggggcacaatcaggtttttcaccaccaaatttttcgagaggtttcttgagaccattgccttttaaaaaactattttcgacata

SEQ ID NO: 326049 - DNA, 120 bp, Artificial Sequence
  ENSG00000136141_38 (sequence is synthesized)
tcgacatacaaaatatttatataaatattatttattagtgagttgttattcatcctttggatgcaaattgtaaattaggaaactattttattactgcttttttgtggttaaacactttat

SEQ ID NO: 326050 - DNA, 120 bp, Artificial Sequence
  ENSG00000136141_39 (sequence is synthesized)
aaatgttgagttattttctatcctctttggtgtgcggtagtttaggtctcagtaatgtttctggtatatatgattccaaaaaaaagcgaaaaacaggtgcttttaggacacaacttttct

SEQ ID NO: 326051 - DNA, 120 bp, Artificial Sequence
  ENSG00000136141_40 (sequence is synthesized)
ggggaggcaatattgacactttggtttgtggaacgttggtcttatttatatttctgcattccatccagtttcctacattccagcagccctctgtcccccaatataatgaactgactaaaa

SEQ ID NO: 326052 - DNA, 120 bp, Artificial Sequence
  ENSG00000136141_41 (sequence is synthesized)
tcaagagagcaccccaaagttatttgtaaatagctgtgatggaaaaaaaaaagacatattaaacttgaagctaaaatgtgaacaattattttttggattcatacttcttttgctatgcac

SEQ ID NO: 326053 - DNA, 120 bp, Artificial Sequence
  ENSG00000136141_42 (sequence is synthesized)
aaaacattcacgttttaacacaaagaaataataagtgttagcatcgtgtgtcttgaagtatacttttgcactgtaacttgggttacgttaaagagagcttagcaccaaaggtagataatg

SEQ ID NO: 326054 - DNA, 120 bp, Artificial Sequence
  ENSG00000136141_43 (sequence is synthesized)
aagaaatggcataggaaagtggagatgataaaaagttgattgttgaaccaaaaagggtttgaagggaagcttcgactgagtatcagaaattacttaaggcacataggacctgaatcagga

SEQ ID NO: 326055 - DNA, 120 bp, Artificial Sequence
  ENSG00000136141_44 (sequence is synthesized)
aaccagcacttcttacaactgccagttttaaaagaggaaatgattctgagatgtgctcattttattttaatttggtggttggtggttttccaagtagtctgtaaaatcctgcaagattca

SEQ ID NO: 326056 - DNA, 120 bp, Artificial Sequence
  ENSG00000136141_45 (sequence is synthesized)
cagtctctggtgtgaaacctcagaagtgagtcgttgtgagcctgtgggcagcaccaccaaggcaggctaaggggagggtgcagtaagtggagtttgtgaggctgagtggctgaggaggga

SEQ ID NO: 326057 - DNA, 120 bp, Artificial Sequence
  ENSG00000136141_46 (sequence is synthesized)
gcaagtgcaacaaaatagggctagagaagaaccagccaaggagtggaacccatgctgctctcagagattcacggaacacggcagccttctgcaggcagttccatgcatgtgcactcacgc

SEQ ID NO: 326058 - DNA, 120 bp, Artificial Sequence
  ENSG00000136141_47 (sequence is synthesized)
tgcaatcacagatgtcccagtaattaacctttctaagtcttgtgaatgctgactgcactttcacctcctcgaaaagccattggaagtttttagagcagcagcagccacagtttgtaagac

SEQ ID NO: 326059 - DNA, 120 bp, Artificial Sequence
  ENSG00000136141_48 (sequence is synthesized)
aaatgtagagggggacgcaaaagaaaagacaccaccaggaggaggattcagtgtgcagtcagcacagaccaacatcaaccaaggcaatggctgccctccactcttgggaagatgggggga

SEQ ID NO: 326060 - DNA, 120 bp, Artificial Sequence
  ENSG00000136141_49 (sequence is synthesized)
ggtttctgaaaacggaaatttggattggcagctagcagttatttcctatcagatgtactgtgcactttaacctaacttaaaatgtattttaatatttttctgtactgcacaaatacctgt

SEQ ID NO: 326061 - DNA, 120 bp, Artificial Sequence
  ENSG00000136141_50 (sequence is synthesized)
tttgtcaaatagcataatgatgtaaagaaacattttggacaaagagtgtatacaatttaagcaacattcaaaggttgactatataagtaggagtttagcctgctgcaccttcacgggcat

SEQ ID NO: 326062 - DNA, 120 bp, Artificial Sequence
  ENSG00000136141_51 (sequence is synthesized)
tcagaatgcggggtcctgaaatattttcttacgtgtatatatggtagcatgaagctttgtaatcattgttttgagagatttttttttcaaaattaaagtatttcttttgatattaatttt

SEQ ID NO: 326063 - DNA, 120 bp, Artificial Sequence
  ENSG00000136141_52 (sequence is synthesized)
tattattttcttgaagttggttgtgtaatgtaaatggcttcagtcttctgtaaaattgcttttttttcttttaaatgcagtccttctatggctaagacgtcttcaagatccttgtacact

SEQ ID NO: 326064 - DNA, 120 bp, Artificial Sequence
  ENSG00000136141_53 (sequence is synthesized)
gtttatatgtgcaataaaatgcatggccagctgacagtatcgtcagtggacagaatgtatatagtgcaaatatccttccttttattatttaacagccattaaaatcttggatttgtacaa

SEQ ID NO: 326065 - DNA, 120 bp, Artificial Sequence
  ENSG00000136141_54 (sequence is synthesized)
tggtggtttttcccttctttctggggagaaaatgggaaaaaaaaaaagaaaacttactgggttgccaccttaaaataatatcaataaaaactgagtaggacactcatgtaagagtagatt

SEQ ID NO: 326066 - DNA, 120 bp, Artificial Sequence
  ENSG00000136141_55 (sequence is synthesized)
taattttcagtgttgatatagttcaattaaaacatgttaaagacaaattaaaagacatttatattttaattctggcatccaaagtattctttggacgcactttgattttttttgtgtcat

SEQ ID NO: 326067 - DNA, 120 bp, Artificial Sequence
  ENSG00000136141_56 (sequence is synthesized)
taatttgtctgtactctgctgcgctgcacttcttgggatttattggatgatgttttttcattagtagtatggtaactagcagaacacaattaatttagtcctttaggcaaaaatttgaat

SEQ ID NO: 326068 - DNA, 120 bp, Artificial Sequence
  ENSG00000136141_57 (sequence is synthesized)
gaactgttctgtccattgccaacccattaatttctaatcagaatattaagcttctctgtggtttttctccaaggtacccgtgcaccagcccatatgctaactggatgcctgcggatgcct

SEQ ID NO: 326069 - DNA, 120 bp, Artificial Sequence
  ENSG00000136141_58 (sequence is synthesized)
gcccttgcagcttgactggggatacctggctgacctccttagagtctgagaagtagtcagggatgtcactgagtggtttattgtgctgaccaaatctcctcctcacaagaaagaccgttt

SEQ ID NO: 326070 - DNA, 120 bp, Artificial Sequence
  ENSG00000136141_59 (sequence is synthesized)
tttcagtactcccttccaatgttagataaaaggagccaagtatctatttacattttattttgaaatagccatttgtattctctttctccagtttctccaactggtggcaactctccactc

SEQ ID NO: 326071 - DNA, 120 bp, Artificial Sequence
  ENSG00000136141_60 (sequence is synthesized)
agtgtcaggaattccaaaatttgtgacacctaatttctaatcatctttcctatttatggatttctggtttgttatttttagggagagacacttatgaaatggggctggtggaaaggggcc

SEQ ID NO: 326072 - DNA, 120 bp, Artificial Sequence
  ENSG00000136141_61 (sequence is synthesized)
ccgcagaactacaatgtatgataatcgagtataaatttcatcaatgagagtagataaataaaggcacttgatagcctgctgctatttgtttgtaagaaattaaaactagcgcgtggtgag

SEQ ID NO: 326073 - DNA, 120 bp, Artificial Sequence
  ENSG00000136141_62 (sequence is synthesized)
ctgggttatctctcgaaaactcatgtagatgcctgattgagtcataaggacaaaagggtgttttgcctttgcctgtggggaaaaagtagggatgatattttaaaattttaagaaactgaa

SEQ ID NO: 326074 - DNA, 120 bp, Artificial Sequence
  ENSG00000136141_63 (sequence is synthesized)
agttgttttggattaggtgaaaaatactttaatatgattttatttcaggagacttgatttttaaaaattaggcttcgtatttcaaaattagttctcaataaacaatcaatttggtatata

SEQ ID NO: 326075 - DNA, 120 bp, Artificial Sequence
  ENSG00000136141_64 (sequence is synthesized)
cactgaatggtcaaatacagctggagacatctccggtgtgtgaggtaaggctgctggtagattcaccagaactctgtgcaatattttgccatggaatactggccaccacattctgtaaag

SEQ ID NO: 326076 - DNA, 120 bp, Artificial Sequence
  ENSG00000136141_65 (sequence is synthesized)
atttgtcagggagtgaaacatctttattaatgaggccaatattcagatttgttcaggacacatttttcaacttgtttatacgtttgcctctttagttctgcttttctgctatacctcacc

SEQ ID NO: 326077 - DNA, 120 bp, Artificial Sequence
  ENSG00000136141_66 (sequence is synthesized)
ctctgttgaagatgagagttggctatttctattagattctgtagatttttttacctcagatcatcttgctgagtcaagcgatggcaactaaaatacatagggaatctgcctgtgtgtcag

SEQ ID NO: 326078 - DNA, 120 bp, Artificial Sequence
  ENSG00000136141_67 (sequence is synthesized)
atcgggtggtatccattgagcactgtcctggtgaggacaggttgatagatcacctgaagccttttagatgagaccaggatgtcagctgcaacgagatcacagcgttgccccagcagatag

SEQ ID NO: 326079 - DNA, 120 bp, Artificial Sequence
  ENSG00000136141_68 (sequence is synthesized)
gaaacgaggctctgctgccttctatggtgaaaggggagagcttttccaggttcaaaagtaaagcgggatatttaaggccttgatctcactggaatcatttgtatctttagttctgtgatg

SEQ ID NO: 326080 - DNA, 120 bp, Artificial Sequence
  ENSG00000136143_0 (sequence is synthesized)
agaaatggcggcctccatgttctacggcaggctagtggccgtggccacccttcggaaccaccggcctcggacggcccagcgggctgctgctcaggttctgggaagttctggattgtttaa

SEQ ID NO: 326081 - DNA, 120 bp, Artificial Sequence
  ENSG00000136143_1 (sequence is synthesized)
taaccatggactccaagtacagcagcaacagcaaaggaatctctcactacatgaatacatgagtatggaattattgcaagaagctggtgtctccgttcccaaaggatatgtggcaaagtc

SEQ ID NO: 326082 - DNA, 120 bp, Artificial Sequence
  ENSG00000136143_2 (sequence is synthesized)
accagatgaagcttatgcaattgccaaaaaattaggttcaaaagatgtcgtgataaaggcacaggttttagctggtggtagaggaaaaggaacatttgaaagtggcctcaaaggaggagt

SEQ ID NO: 326083 - DNA, 120 bp, Artificial Sequence
  ENSG00000136143_3 (sequence is synthesized)
gaagatagttttctctccagaagaagcaaaagctgtttcttcacaaatgattgggaaaaaattgtttaccaagcaaacgggagaaaagggcagaatatgcaatcaagtattggtctgtga

SEQ ID NO: 326084 - DNA, 120 bp, Artificial Sequence
  ENSG00000136143_4 (sequence is synthesized)
gcgaaaatatcccaggagagaatactactttgcaataacaatggaaaggtcatttcaaggtcctgtattaataggaagttcacatggtggtgtcaacattgaagatgttgctgctgagtc

SEQ ID NO: 326085 - DNA, 120 bp, Artificial Sequence
  ENSG00000136143_5 (sequence is synthesized)
tcctgaagcaataattaaagaacctattgatattgaagaaggcatcaaaaaggaacaagctctccagcttgcacagaagatgggatttccacctaatattgtggaatcagcagcagaaaa

SEQ ID NO: 326086 - DNA, 120 bp, Artificial Sequence
  ENSG00000136143_6 (sequence is synthesized)
catggtcaagctttacagcctttttctgaaatacgatgcaaccatgatagaaataaatccaatggtggaagattcagatggagctgtattgtgtatggatgcaaagatcaattttgactc

SEQ ID NO: 326087 - DNA, 120 bp, Artificial Sequence
  ENSG00000136143_7 (sequence is synthesized)
taattcagcctatcgccaaaagaaaatctttgatctacaggactggacccaggaagatgaaagggacaaagatgctgctaaggcaaatctcaactacattggcctcgatggaaatatagg

SEQ ID NO: 326088 - DNA, 120 bp, Artificial Sequence
  ENSG00000136143_8 (sequence is synthesized)
ccaacttccttgatgttggtggtggtgctacagtccatcaagtaacagaagcatttaagcttatcacttcagataaaaaggtactggctattctggtcaacatttttggaggaatcatgc

SEQ ID NO: 326089 - DNA, 120 bp, Artificial Sequence
  ENSG00000136143_9 (sequence is synthesized)
gctgtgatgttattgcacagggtatagtcatggcagtaaaagacttggaaattaaaatacctgttgtggtacggttacaaggtacacgagtcgatgatgctaaggcactgatagcggaca

SEQ ID NO: 326090 - DNA, 120 bp, Artificial Sequence
  ENSG00000136143_10 (sequence is synthesized)
gtggacttaaaatacttgcttgtgatgacttggatgaagctgctagaatggttgtaaagctctctgaaatagtgaccttagcgaagcaagcacatgtggatgtgaaatttcagttgccaa

SEQ ID NO: 326091 - DNA, 120 bp, Artificial Sequence
  ENSG00000136143_11 (sequence is synthesized)
tatgatctgaaaacccagtggatggctgaaggtgttaaatgtgctataatcattaagaatactgtgttctgtgttattgttctttttctttttagtgtgtggagattgtaattgccatct

SEQ ID NO: 326092 - DNA, 120 bp, Artificial Sequence
  ENSG00000136143_12 (sequence is synthesized)
aggcacacaaacatttaaaaggatttggactgcatttaattgtaccattcagaatggactgtttgtacgaagcatgtataatgcagttatcttctttcttttgtcgcagccagtcttttt

SEQ ID NO: 326093 - DNA, 120 bp, Artificial Sequence
  ENSG00000136143_13 (sequence is synthesized)
tgcttctcctacaaaacgtaacttgcaatttgccagtttattattgttggatacaaagttcttcattgataagagtcctataaataagataaatacgaagataaagctttattctttagt

SEQ ID NO: 326094 - DNA, 120 bp, Artificial Sequence
  ENSG00000136143_14 (sequence is synthesized)
gttaaaatacagtatatctaataactagcctcattagtagagcagtatattaaaacaatgttttatgtaaaaagtgtttatcttcagcaccaaatacatgataaatgtatcaatcactat

SEQ ID NO: 326095 - DNA, 120 bp, Artificial Sequence
  ENSG00000136143_15 (sequence is synthesized)
ttataaacagagctttcaaacactcctcagaatattcttctaagtattttgatgaagtaactttgtaattatttgaacattgttttaatcattaggaaacactgattaactgcaagtctt

SEQ ID NO: 326096 - DNA, 120 bp, Artificial Sequence
  ENSG00000136143_16 (sequence is synthesized)
catgattctgtcatattaagaaacacctgtaggtttgcttcaaataaaggcatatataccaaggacttacagacaaaattaagaatgtcaatttaagttaataaaaatctcccaatatga

SEQ ID NO: 326097 - DNA, 120 bp, Artificial Sequence
  ENSG00000136143_17 (sequence is synthesized)
atgtcaagagtagataatgttgatgactaatggaagagtagtttatacagcgtggatacgctgggcaaagagatggttcacattccacttggagcaggatggtgcaagatttcatcacac

SEQ ID NO: 326098 - DNA, 120 bp, Artificial Sequence
  ENSG00000136143_18 (sequence is synthesized)
tcagttgagagtgacaattccagagtgaccagctgagcatgtaatatgaaggaaactggagaaaagcctcaactactttatgattattcctatgatttgttcttaaagcagagaagcatc

SEQ ID NO: 326099 - DNA, 120 bp, Artificial Sequence
  ENSG00000136143_19 (sequence is synthesized)
tgctaagattacaggcgtgagccaccgcgtccggtcccttcattgttgttgactgataagtctcataggtcttttataacttacaggtttctcttttttgctgtcatcttttttctttca

SEQ ID NO: 326100 - DNA, 120 bp, Artificial Sequence
  ENSG00000136143_20 (sequence is synthesized)
aggtttctcttttttgctgtcatcttttttctttcagttcagttgttgaagaaactgaggtgattattattcattgtttttcgtagtctggattttatatctccatggtttaagtggtta

SEQ ID NO: 326101 - DNA, 120 bp, Artificial Sequence
  ENSG00000136143_21 (sequence is synthesized)
aacatttaaaatattcctgtgtcccctttattttctgtaaattgtgtagaatggatgggacactgtcttatatatctccataatagagctgtggtttatgaatgattttaagaattcgat

SEQ ID NO: 326102 - DNA, 120 bp, Artificial Sequence
  ENSG00000136143_22 (sequence is synthesized)
gatgcccatgaaggggaaaaataagcaggcaaaaaccaaaaaacagaaaccaactctcaaaactccagcagaaggcaatgaagctgttaatattttggagttgattgaccaccagttgag

SEQ ID NO: 326103 - DNA, 120 bp, Artificial Sequence
  ENSG00000136143_23 (sequence is synthesized)
caagtaataagaagcagcaaaatattatgtgctaggaactctcccagacgcttgttaacatctatgaatacaacaaagattctgccctcctgggcctcttttctgatggggaagcaaaac

SEQ ID NO: 326104 - DNA, 120 bp, Artificial Sequence
  ENSG00000136143_24 (sequence is synthesized)
ccattcttccccccactaaaaaaaagcccccattgagtttaatattaaggcctgtgagagttgcttggtaatatttgtaatgctgctatcgaattaaattgtttgctttggatataaaaa

SEQ ID NO: 326105 - DNA, 120 bp, Artificial Sequence
  ENSG00000136143_25 (sequence is synthesized)
ccaccgcgcccagcccttttcatgttctttgactgtttttctattgactgttcattcttcctagtattaataactttttgtatatttgagattaaccatttttgcctattatgtatttta

SEQ ID NO: 326106 - DNA, 120 bp, Artificial Sequence
  ENSG00000136143_26 (sequence is synthesized)
tatatatgtcatatgtcattttaaatataatgaaatgtattagtctttgtggtttctagttttcatgatatgttttgaaaggcttaattgttttgttacaaagtctgaacttgagttatg

SEQ ID NO: 326107 - DNA, 120 bp, Artificial Sequence
  ENSG00000136143_27 (sequence is synthesized)
aatgcaaatttcccctctcaaatgcctaatctgtttcccaaacaccatttacttatcccttaagggatttacttttccctatttgatctatttcccaccaattttaaaatgtcatcttta

SEQ ID NO: 326108 - DNA, 120 bp, Artificial Sequence
  ENSG00000136143_28 (sequence is synthesized)
tcatatactaacttcctgtatgttcttgcgtgtatatgaaactggcacatacagggagactctttatttaacttttacttaaagtaggaggtaggaaagagatctgttgaaaccatgaca

SEQ ID NO: 326109 - DNA, 120 bp, Artificial Sequence
  ENSG00000136143_29 (sequence is synthesized)
gagagtgttgcagcgcctgtcaaagttatccttgcttatttgtagaaaaattgaactttccattttcctaactttcaacttgcaattgaatgacactgattctactaggaaaaaagtaaa

SEQ ID NO: 326110 - DNA, 120 bp, Artificial Sequence
  ENSG00000136143_30 (sequence is synthesized)
agctatactatttgatgccagatgtatgactgtgggctgatgaggaagaactggaaacaaatgacagatatgcaggaggagatatctttttatggcttagcagaatgctgctcaaagcgc

SEQ ID NO: 326111 - DNA, 82 bp, Artificial Sequence
  ENSG00000136143_31 (sequence is synthesized)
gatatctttttatggcttagcagaatgctgctcaaagcgccagtctctgaagctctttgttcctgacttgcaaccagacaaa

SEQ ID NO: 326112 - DNA, 120 bp, Artificial Sequence
  ENSG00000136143_32 (sequence is synthesized)
cagcctcctgaatagctgggaccacaggtgttctgggactcagtgttagaagctgtctgtctgtaagaatcttgctgtctctgcctcatgaaaacaattgcagtgatgagaaccagttac

SEQ ID NO: 326113 - DNA, 120 bp, Artificial Sequence
  ENSG00000136143_33 (sequence is synthesized)
agaaccagttactaatggcatacatcacacatttcaggctatttggaagaatgcgattcaggtacttccagtcagatacatccgtgcaagacttggatagagaagtaacataaggaggca

SEQ ID NO: 326114 - DNA, 120 bp, Artificial Sequence
  ENSG00000136143_34 (sequence is synthesized)
ccaggacccactttgacttgtgagccccacagcctgctggaaggctgccaaatgccagctttctgcctgtgcacctggacagccaggttgctccttcccctgatcctggaaccgaagtct

SEQ ID NO: 326115 - DNA, 120 bp, Artificial Sequence
  ENSG00000136143_35 (sequence is synthesized)
gtcgctctgtcctccagatgtagactgtctgcagccttttgtcttttgggtactttttgctgaatcatctggatggaacgtgcagtacctttgtttccctgctgccggacctgttgtaga

SEQ ID NO: 326116 - DNA, 120 bp, Artificial Sequence
  ENSG00000136143_36 (sequence is synthesized)
agtttaaagttgcattctaattctcatggagtgaaagataagactaattatactgcctgtatgactgagaaagaaggatgaccttgtcccatatgctaaaggacctgaaatctagagaac

SEQ ID NO: 326117 - DNA, 120 bp, Artificial Sequence
  ENSG00000136143_37 (sequence is synthesized)
aacttgacacatctatttccagccagagcagcagtgactggcaggaagacaaagaggaggcgggtctataaggaagacgtctggttggcagcggacatccaagctgcatgaggagaggct

SEQ ID NO: 326118 - DNA, 120 bp, Artificial Sequence
  ENSG00000136143_38 (sequence is synthesized)
cacgtagggggaaaccgaggtttgcagcagcgactcgccaggcgtgtgagtgagccaacctggaagcagatcctccagttccagtgaagtgtgtggatgacatcagctccagccttcatt

SEQ ID NO: 326119 - DNA, 120 bp, Artificial Sequence
  ENSG00000136143_39 (sequence is synthesized)
ttgaccacaactcatgagatgccctaagccagaaccacccttgaagctgcttttaaattccgaaagtggaaataatatattttattgttttaaatcactacattttggggtagtgatttg

SEQ ID NO: 326120 - DNA, 120 bp, Artificial Sequence
  ENSG00000136143_40 (sequence is synthesized)
ttttgcatgccatttgttatgttgcaatggataaccaatacatcttgacttttggaaaccatgaggagggatcaatgttttaaaaagattcattgtcctcatttaggtagtcactattat

SEQ ID NO: 326121 - DNA, 120 bp, Artificial Sequence
  ENSG00000136143_41 (sequence is synthesized)
tatttcttaagggagtatgcctaccaggactataacatttccaaggaagtgtttatgaatacagcactgccatggatatttaaaagcaagcttgtggattccacaccagctttgaaatag

SEQ ID NO: 326122 - DNA, 120 bp, Artificial Sequence
  ENSG00000136143_42 (sequence is synthesized)
aatatctggcacctagcagttagcataagataaaaggaattatttcccaaataaagccatatgttattgctatcatcatcatcatcatcaccatcactgccattaaacatctaggtgcag

SEQ ID NO: 326123 - DNA, 120 bp, Artificial Sequence
  ENSG00000136143_43 (sequence is synthesized)
ataatacccataatagtgtccctttgaatgagagaaatcaacaaaggtcccaaaaggcaattgcacaggtccttatttactgatttttcctaaataatcaaatagatcttttaccttaaa

SEQ ID NO: 326124 - DNA, 120 bp, Artificial Sequence
  ENSG00000136143_44 (sequence is synthesized)
tgcagataatatcataattcatcaaactaatttataatggtgaactgccgcttaaatattgtcttataaatgatgccttttgaagttaaaagtgatgttgattcaatcaattttgaaaaa

SEQ ID NO: 326125 - DNA, 120 bp, Artificial Sequence
  ENSG00000136143_45 (sequence is synthesized)
atatctagaacatattaaacaaatgatattagaagtgaaaaaaactgtcttctattaagtcttctaagaaagacaattatgataagttcctggtcagataaaaaccattccatcattaaa

SEQ ID NO: 326126 - DNA, 120 bp, Artificial Sequence
  ENSG00000136143_46 (sequence is synthesized)
caagcacggcgtgagttcgtccctctgcgcacgccccggtttcctcgcgtccgcggctgctcacccgaactccagatgacctccagggagttggaaactgccagctccaaccgagccttt

SEQ ID NO: 326127 - DNA, 120 bp, Artificial Sequence
  ENSG00000136143_47 (sequence is synthesized)
cctcttccccaggaggacgcaacgcggatgcttgcagctggtcaccacgactccgactccgactcctggccgccgcccgcgcggctgtgcgctggccgtcatagcgcgcgggaggacgcg

SEQ ID NO: 326128 - DNA, 90 bp, Artificial Sequence
  ENSG00000136143_48 (sequence is synthesized)
ccccgtcccgcggccgcagccaatctctccccgcgagggcggaggcgccgaaatcaaagcgagagcgcctcggcctctccagctgtccgc

SEQ ID NO: 326129 - DNA, 120 bp, Artificial Sequence
  ENSG00000136143_49 (sequence is synthesized)
ggatcaagggttctgggaagttctggattgtttaataaccatggactccaagtacagcagcaacagcaaaggaatctctcactacatgaatacatgagtatggaattattgcaagaagct

SEQ ID NO: 326130 - DNA, 120 bp, Artificial Sequence
  ENSG00000136143_50 (sequence is synthesized)
agaaatggcggcctccatgttctacggcaggctagtggccgtggccacccttcggaaccaccggcctcggacggcccagcgggctgctgctcagggtcctgtattaataggaagttcaca

SEQ ID NO: 326131 - DNA, 120 bp, Artificial Sequence
  ENSG00000136143_51 (sequence is synthesized)
tctggttttccctctataagcaagaaatgaccttaatgtgttagtgagacatatttcttcacctattgacggtcactcagtgctctcatgtctataagatctgttgtgtcacctctgctg

SEQ ID NO: 326132 - DNA, 120 bp, Artificial Sequence
  ENSG00000136143_52 (sequence is synthesized)
accttctcaggcatctccacaggaggatggggaaatgcccatcctcttcaagagggctcgacccaagtaaggaatcagctcagggctttccttgcactggcttccttctttctaaagcac

SEQ ID NO: 326133 - DNA, 120 bp, Artificial Sequence
  ENSG00000136143_53 (sequence is synthesized)
tccaatgcagaaggaaaacccagcctgatgagtcattatccagccatgatgtccaccttaaccttccaaacatcactgatgtgaggcagaaccatcacagactggaatggctacagaatc

SEQ ID NO: 326134 - DNA, 120 bp, Artificial Sequence
  ENSG00000136143_54 (sequence is synthesized)
tttctgacccagtggatccaccactcctagaccctctccaactgaccccggtacagtcaattattcttcctccaagtaattactttcctcttgtcttaaaatccttaatatgtataagtg

SEQ ID NO: 326135 - DNA, 120 bp, Artificial Sequence
  ENSG00000136143_55 (sequence is synthesized)
tggtgatgcttatattagtgtgatgtagccagtgttccatgggaacagacatttgtgagtcaaggcaagagcactgaatatgtaagcattgcattgaaaatgctactgtcaactcagcca

SEQ ID NO: 326136 - DNA, 120 bp, Artificial Sequence
  ENSG00000136143_56 (sequence is synthesized)
ggactacgagcgagcccatgtttgcgcggctctgacccagcccttagtccgcgaggatccccggcggcccggccgtggctgctcctgcagtttctaagagatgggcgggagcaggttctg

SEQ ID NO: 326137 - DNA, 120 bp, Artificial Sequence
  ENSG00000136143_57 (sequence is synthesized)
ttgtttttgatatccttgtttgatgaaaccagcatcgttttagaaaaaatatctttgttttagtaaaaatgacacatactcattgaaaaaataaaccccttcaaaactggaatgatacaa

SEQ ID NO: 326138 - DNA, 120 bp, Artificial Sequence
  ENSG00000136143_58 (sequence is synthesized)
gcgaaaatatcccaggagagaatactactttgcaataacaatggaaaggtcatttcaagtgagtaattgtagacatgatacatacgggataaatttatgacattcaatttcaaaagtcca

SEQ ID NO: 326139 - DNA, 120 bp, Artificial Sequence
  ENSG00000136143_59 (sequence is synthesized)
ttattgtttctatttatgtgggaaagattttaaaagtacaaattataatctgtttgtatgtcatgagcatgatatttatgtcatttaaaaaacagcttctttaatgccgtaaaatttgat

SEQ ID NO: 326140 - DNA, 120 bp, Artificial Sequence
  ENSG00000136143_60 (sequence is synthesized)
atatcatgatcttaaaattataggaaaaattctgctgtaataaatttcatgggattctcaaattgttaattcactaaaagcagcttaaatcatctctggatcatctccagattgagaaaa

SEQ ID NO: 326141 - DNA, 120 bp, Artificial Sequence
  ENSG00000136143_61 (sequence is synthesized)
ttatatctagcatagtaaaatattctaatgaaagagaaagttgctgaacccactagaagaatgtgtatccattgcctcatcttctgttttctcaacttcttgggtttgtttttttttttt

SEQ ID NO: 326142 - DNA, 120 bp, Artificial Sequence
  ENSG00000136143_62 (sequence is synthesized)
taatagtttcgggtttgtttcactatatgattcaatatttggtaaattgagggatgacattaagtagcaaacaatatggttttaaggagtattacattagcacagctctcctctctttat

SEQ ID NO: 326143 - DNA, 120 bp, Artificial Sequence
  ENSG00000136143_63 (sequence is synthesized)
ggaacctaaaatgttgaacataaagcttctggtgaagagaaaatccctttatagacctggtgtttggaagagagcattgataatcattttatactagaattatctgtttttcgagggtat

SEQ ID NO: 326144 - DNA, 120 bp, Artificial Sequence
  ENSG00000136143_64 (sequence is synthesized)
taggttttacaagctgaatctgtgtgttaactagcttgttttttgaagcaactgggtatatatttgaaagccccagtacggatttcatgtagaacattaattgtgtagaatttagagtaa

SEQ ID NO: 326145 - DNA, 120 bp, Artificial Sequence
  ENSG00000136143_65 (sequence is synthesized)
tcatgtagaacattaattgtgtagaatttagagtaacaaaaattttaagagtcatgaaaataattttcttatgtagaacaacttttttaaaaataacaactttctgtattgtgatttttc

SEQ ID NO: 326146 - DNA, 120 bp, Artificial Sequence
  ENSG00000136144_0 (sequence is synthesized)
cagagatgtcggcttatttataggaattgcttgaagccagagtcatggtggatgtcggaaagtggcccatcttcactctactctcccctcaagagatcgcgtctattcggaaggcgtgtg

SEQ ID NO: 326147 - DNA, 120 bp, Artificial Sequence
  ENSG00000136144_1 (sequence is synthesized)
tcttcggcacctcagccagtgaagcactgtacgttactgacaatgatgaggtctttgtatttggactgaactatagtaactgtctaggaactggagataaccagagtacacttgtaccca

SEQ ID NO: 326148 - DNA, 120 bp, Artificial Sequence
  ENSG00000136144_2 (sequence is synthesized)
aaaagctagaaggcttatgtggaaagaagattaaaagcctcagttacgggagtggaccacatgttcttctcagcaccgaagatggagtggtttatgcctggggccacaatggatatagcc

SEQ ID NO: 326149 - DNA, 120 bp, Artificial Sequence
  ENSG00000136144_3 (sequence is synthesized)
agcttgggaatgggacgaccaaccaaggcattgctcccgtccaggtctgtaccaatctcttgatcaagcaagtggtggaagtagcttgtggctcacatcattcaatggctctggcagctg

SEQ ID NO: 326150 - DNA, 120 bp, Artificial Sequence
  ENSG00000136144_4 (sequence is synthesized)
atggagaggtgtttgcttggggttataacaactgtggccaagtgggatcaggttctacagcaaatcaaccaactcctcgaaaagttacaaactgtttacatattaagagggtagttggca

SEQ ID NO: 326151 - DNA, 120 bp, Artificial Sequence
  ENSG00000136144_5 (sequence is synthesized)
ttgcctgtggtcagacttcatccatggctgttctggacaatggcgaggtatatggctggggttacaatggcaacggtcagctgggcctgggaaacaatggcaaccagctgacccctgtga

SEQ ID NO: 326152 - DNA, 120 bp, Artificial Sequence
  ENSG00000136144_6 (sequence is synthesized)
gagtggcagctttgcacagcgtgtgtgtgaaccagattgtctgcggttacgcacatactctagcactaacagatgagggcttgctgtatgcctggggagctaacacatatgggcagctgg

SEQ ID NO: 326153 - DNA, 120 bp, Artificial Sequence
  ENSG00000136144_7 (sequence is synthesized)
gaactggcaataaaaataacctgctaagcccagcacacatcatggtggagaaagaaagggtggtagagattgcagcctgtcactctgcccacacgtctgcagccaagacgcagggtgggc

SEQ ID NO: 326154 - DNA, 120 bp, Artificial Sequence
  ENSG00000136144_8 (sequence is synthesized)
acgtgtacatgtggggccagtgccggggtcagtccgtgatcctcccgcacctcacccacttctcctgcaccgacgacgtgtttgcctgctttgccactcccgccgtctcgtggcgcctcc

SEQ ID NO: 326155 - DNA, 120 bp, Artificial Sequence
  ENSG00000136144_9 (sequence is synthesized)
tgtctgtggagcatgaagactttttaacagttgcagagtcactgaagaaagaatttgatagtccagaaactgctgatctgaagtttcgaattgatggaaaatatattcatgtccataaag

SEQ ID NO: 326156 - DNA, 120 bp, Artificial Sequence
  ENSG00000136144_10 (sequence is synthesized)
ctgttttgaaaatcaggtgtgagcattttcgatccatgttccagtcgtattggaatgaagacatgaaggaagtgatagaaatcgatcagttttcttacccagtgtatcgtgcctttctcc

SEQ ID NO: 326157 - DNA, 120 bp, Artificial Sequence
  ENSG00000136144_11 (sequence is synthesized)
agtacctctacacagacacagtcgacctgccgccagaagatgctataggtcttctggatttggcgacatcttactgtgaaaacagactgaaaaaactttgtcagcacattatcaagagag

SEQ ID NO: 326158 - DNA, 120 bp, Artificial Sequence
  ENSG00000136144_12 (sequence is synthesized)
gaattactgtggagaatgccttttcgctattctctgctgcagtcagatatgatgcagaggatttagaagaattctgctttaagttttgcatcaatcatttgacagaagttacacagactg

SEQ ID NO: 326159 - DNA, 120 bp, Artificial Sequence
  ENSG00000136144_13 (sequence is synthesized)
cagcattttggcaaatggatggccctctgctaaaggaattcattgctaaagccagtaaatgtggagcctttaagaactgaagcgcaaggctgctgggttctgtgtgagtgctctggggca

SEQ ID NO: 326160 - DNA, 120 bp, Artificial Sequence
  ENSG00000136144_14 (sequence is synthesized)
ctgttgaggatgtgtccagtttgtgctctacgggtgatgtgattctgcaggtaaaagaccatcaggttgtttttttccacatctgggacacagttgtttgtgtaggaacataacaagggt

SEQ ID NO: 326161 - DNA, 120 bp, Artificial Sequence
  ENSG00000136144_15 (sequence is synthesized)
agggtgaaagttagtcgtttttggtcttcttttcatttttgattagaggaacttctgaacttggaaaggggaagttggcagcaactctcctgggccacgtatcaacaatcttctgacagc

SEQ ID NO: 326162 - DNA, 120 bp, Artificial Sequence
  ENSG00000136144_16 (sequence is synthesized)
aggagcagtgatagttggggaattgtgagatgaatggagaggccccatcgtgaattaaagatgctgacctggggattgttaagtgctgccttagttgctagtttagtagccttactgtga

SEQ ID NO: 326163 - DNA, 120 bp, Artificial Sequence
  ENSG00000136144_17 (sequence is synthesized)
aggaataattaagattgtttcagacttttgtttgtgtgcttgcgttgatgacttttttaacttcaagataaatcaaagtaataagtttaacgtatattaaacctgttgaaatgataatta

SEQ ID NO: 326164 - DNA, 120 bp, Artificial Sequence
  ENSG00000136144_18 (sequence is synthesized)
tgtaaagataaatattctaggttagtcaagatttctcttaagatttaagtgcataaagaatagtaatttagaagtatccgtgaaaagttgataatgaaagaaatttgatgaaggtgaata

SEQ ID NO: 326165 - DNA, 120 bp, Artificial Sequence
  ENSG00000136144_19 (sequence is synthesized)
ttttataaattagaatctccactacttatccaatggtgttttatttcattaaggtagaacttgagaactcaagtttaaattgtcccccaccaccttcttctataaatgcaaacttaagag

SEQ ID NO: 326166 - DNA, 120 bp, Artificial Sequence
  ENSG00000136144_20 (sequence is synthesized)
gaaaataatgacatgtatagtatactcttgccttcctaaattatgactgctgaatcatcatatctactatatatgactggaagaagtggttcttcaagtcaaccctcttacaagacttag

SEQ ID NO: 326167 - DNA, 120 bp, Artificial Sequence
  ENSG00000136144_21 (sequence is synthesized)
tggaatttgctttatctactttaggccaaatccatcacacattggcttatgtgaaactttatcatctttcacttttggttttcctctgtttttaaacatcttaggtataacagcacaatt

SEQ ID NO: 326168 - DNA, 120 bp, Artificial Sequence
  ENSG00000136144_22 (sequence is synthesized)
tcaccttgaaaaagcaccaaaattatggtgttcctgaaaagatcctattaaaagacagtagtttatttgaactggttatggaaggtgactttgggatgtaagagtgttcaactgtgagtt

SEQ ID NO: 326169 - DNA, 120 bp, Artificial Sequence
  ENSG00000136144_23 (sequence is synthesized)
tcatcatgtgtgtccgttgagcttgcttttaagagcaatgttttgctttgctctctggtccatgaactcatttccatttgagtgagttcccttagtgaattttgtctcctgcttggaaag

SEQ ID NO: 326170 - DNA, 120 bp, Artificial Sequence
  ENSG00000136144_24 (sequence is synthesized)
tctctcttctgaacctggagcctgaatacattttcagagccaaattacaagtgggtgaagacatgctacaactactatttttagcaatgtttttaaatttgtgtctattggggtgggaag

SEQ ID NO: 326171 - DNA, 120 bp, Artificial Sequence
  ENSG00000136144_25 (sequence is synthesized)
gggagtgaggccctaaagataggaattcactgatagctgaaatagatacaagcctaggagccccagcccccttttcttgaccatatcacaagtgattgaagcccagtgaattagtcggtt

SEQ ID NO: 326172 - DNA, 120 bp, Artificial Sequence
  ENSG00000136144_26 (sequence is synthesized)
agaattcgttctacaacatgatagaacttttcttactagcttcagaaatgcacattgatttgtgctatgatgggtggtgtttgtaacaatcactgttctataggcttatgatctgagcaa

SEQ ID NO: 326173 - DNA, 120 bp, Artificial Sequence
  ENSG00000136144_27 (sequence is synthesized)
aatgtgaacttcagtatgtttactattgctcttacttgaaaactttttttcaaaaaaagcacaaattaaagtagtaaattcatatccatagatagttcattcattcaacaaatatttacc

SEQ ID NO: 326174 - DNA, 120 bp, Artificial Sequence
  ENSG00000136144_28 (sequence is synthesized)
aagttcctaatataagtgaaggaccacttctcatattagattactaagtcatttgtatgaatatgtgtggcagtgaagagaacaggtctttcaaaaagcatttgattattttttttaaat

SEQ ID NO: 326175 - DNA, 120 bp, Artificial Sequence
  ENSG00000136144_29 (sequence is synthesized)
acactctcttatttttctacttgtttttttgttaatcatagcaggatatgacaactcttatttgaattgattttttcatctaatgtaataatggaagccaaagtattcatatttcttaag

SEQ ID NO: 326176 - DNA, 120 bp, Artificial Sequence
  ENSG00000136144_30 (sequence is synthesized)
atagccctaaatgtactcttgaacttcttactggaacaatgtttgatactctagtatgtaagctgtatttatgtaatatttagaacgacatgttaataaacaaagtaacattaaaacagg

SEQ ID NO: 326177 - DNA, 120 bp, Artificial Sequence
  ENSG00000136144_31 (sequence is synthesized)
gctcctcctcttcgctgccggtgggcaccgccgctcgctcgcacttctgcgcccattggagcttcggagatccctgcggtcccgcgggacggcgcggcagcagctgacctcgcagacagg

SEQ ID NO: 326178 - DNA, 120 bp, Artificial Sequence
  ENSG00000136144_32 (sequence is synthesized)
gcgatgtggccttggggctgtgtgtggcagagctgtggtgtttggctttgtgattcttctgtttattaacattctcattttggacaaaagagataaccttcccttctcccttcccccttc

SEQ ID NO: 326179 - DNA, 120 bp, Artificial Sequence
  ENSG00000136144_33 (sequence is synthesized)
gtgagaacaacctgggcagaggcagatgtctcggctcaagttgctggaaacttcttcctcacttttagctaagatctgtcctaggaagtttacagaaaaagcctctgctgctgcttcctg

SEQ ID NO: 326180 - DNA, 120 bp, Artificial Sequence
  ENSG00000136144_34 (sequence is synthesized)
tgccagcagagctcaacttggggatgctagatgactttgccttcgtgctgtgggccaaaatgctaggaagatggagactacctgcttccaatgtttcttgtctttctacgaaagtacctg

SEQ ID NO: 326181 - DNA, 120 bp, Artificial Sequence
  ENSG00000136146_0 (sequence is synthesized)
gcgccggtggcgggactctggggaaaatggctgcgtcttcgagtggtgagaaggagaaggagcggctgggaggcggtttgggagtggcgggtggtaacagcacacgagagcggctgctgt

SEQ ID NO: 326182 - DNA, 120 bp, Artificial Sequence
  ENSG00000136146_1 (sequence is synthesized)
ctgcgcttgaggacttggaggtcctgtctagggaacttatagaaatgctggcaatttcaagaaaccaaaagttgttacaggctggagaggaaaaccaggtcctggagttgttaattcacc

SEQ ID NO: 326183 - DNA, 120 bp, Artificial Sequence
  ENSG00000136146_2 (sequence is synthesized)
gagatggggaatttcaagaactaatgaaattggcacttaatcagggaaaaattcatcatgaaatgcaagttttagaaaaagaagtagagaagagagacagtgatattcagcagctacaaa

SEQ ID NO: 326184 - DNA, 120 bp, Artificial Sequence
  ENSG00000136146_3 (sequence is synthesized)
aacagctaaaggaagcagaacaaatactggcaacagctgtttaccaagcgaaggagaaactcaagtcaatagaaaaagcaagaaaaggtgctatctcctctgaagaaataattaagtatg

SEQ ID NO: 326185 - DNA, 120 bp, Artificial Sequence
  ENSG00000136146_4 (sequence is synthesized)
cacataggatcagtgcaagtaatgctgtatgtgctccactgacctgggttccaggggacccccggagaccctacccaactgatttagagatgagaagtgggttactgggtcagatgaaca

SEQ ID NO: 326186 - DNA, 120 bp, Artificial Sequence
  ENSG00000136146_5 (sequence is synthesized)
atccttccactaatggcgtgaatggccatttaccaggagatgcacttgcagcaggaagattgccagatgtccttgctccacagtatccatggcagtcaaatgacatgtcgatgaatatgt

SEQ ID NO: 326187 - DNA, 120 bp, Artificial Sequence
  ENSG00000136146_6 (sequence is synthesized)
taccaccaaatcatagtagtgactttttgttggaacctcctgggcataataaagaaaatgaagatgatgtagagattatgtcaacggactcctcaagcagtagtagtgagtctgattgaa

SEQ ID NO: 326188 - DNA, 120 bp, Artificial Sequence
  ENSG00000136146_7 (sequence is synthesized)
aaaccttaaaagacaatatacagaattgaatactgtagaattctgtttctttaacagtagcagggaaatgtaaactacaggtgacaaaaaatacccaggtaaacactggctttggtagaa

SEQ ID NO: 326189 - DNA, 120 bp, Artificial Sequence
  ENSG00000136146_8 (sequence is synthesized)
ttgtgcagtcattaaaagtcaaaattttttgactttctttttaaagccaaagaccatagttttagttttaagccactaggtagatatttaggggaatagtcaaaatttactgttgaaaaa

SEQ ID NO: 326190 - DNA, 120 bp, Artificial Sequence
  ENSG00000136146_9 (sequence is synthesized)
atacatatcactaataggcttcttggaattatttagaaaagcatttttaaactggcagtggatgactgaataggcatcatatttctttttgtgtgtcatttaaaagtaacaaaaactgcc

SEQ ID NO: 326191 - DNA, 120 bp, Artificial Sequence
  ENSG00000136146_10 (sequence is synthesized)
atttgacagtaaaggctcttggcttctgttggaggcatgggaaattgtctcaatttgtacagtttgtaattgtaatttttgtaaataaatttgtttgtacattgtatgctttttttttag

SEQ ID NO: 326192 - DNA, 120 bp, Artificial Sequence
  ENSG00000136146_11 (sequence is synthesized)
tttaaatatactgtcagtgtaggtaggaaattatttctgtaaatccagttgcattttataatacttgagtgactaactgaattgaaacctattacaattaatagggttctcaaaggccta

SEQ ID NO: 326193 - DNA, 120 bp, Artificial Sequence
  ENSG00000136146_12 (sequence is synthesized)
ttcctattagaagaaataattttttttaataattgaaaaaatttaccacagccttgtctgattttaagaatagattgtgtgaagatttagaatggaaagcaaccatttcttcccttcacc

SEQ ID NO: 326194 - DNA, 120 bp, Artificial Sequence
  ENSG00000136146_13 (sequence is synthesized)
ttcctcttcttacagttccccaggagtcatttttaaccacttttaatttctgttggtaacctctgtgtttaggtaatatgcttatacaactatttcttgatgtatcagttttagacaatg

SEQ ID NO: 326195 - DNA, 120 bp, Artificial Sequence
  ENSG00000136146_14 (sequence is synthesized)
tatcttctgatttcaaaggtaatacaacatttaatgtgaaacatttagtgaatacagtaaaggagaaaataaaattgttagcattctacccagagataatatcaattcatattgtagtgt

SEQ ID NO: 326196 - DNA, 120 bp, Artificial Sequence
  ENSG00000136146_15 (sequence is synthesized)
agatttttttaaagttcacatacacttttttgtaaaatgagaataatgtttatttcctgagatactgctgtattttttaattgctaatctgtattcttcaaatgaactgagaattccatt

SEQ ID NO: 326197 - DNA, 120 bp, Artificial Sequence
  ENSG00000136146_16 (sequence is synthesized)
tttccatcattttttccttttgattattttcgatctctagaaaaattggaaaataggagattaatcttatattttcaccatctagaattaaggacatacaatgtttgaatgtctttccct

SEQ ID NO: 326198 - DNA, 120 bp, Artificial Sequence
  ENSG00000136146_17 (sequence is synthesized)
ccagggttatttttaggaatggactaacacaatatctaattttaaccttgccttgtccgtatactaggaatattgatccatgtgtatacattcttgaaagatttactttaatggctaaaa

SEQ ID NO: 326199 - DNA, 120 bp, Artificial Sequence
  ENSG00000136146_18 (sequence is synthesized)
cttcgagtggtgagaaggagaaggagcggctgggaggcggtttgggagtggcgggtggtaacagcacacgagagcggctgctgtctgcgcttgaggacttggaggtcctgtctagggccg

SEQ ID NO: 326200 - DNA, 120 bp, Artificial Sequence
  ENSG00000136146_19 (sequence is synthesized)
tttgggaggccaaggcgggcggatcattggaacttcttcacagaatgaagctgctctggtggtgtgactggcttccagaaaggtctcatgtgttcactcagagggaacttatagaaatgc

SEQ ID NO: 326201 - DNA, 120 bp, Artificial Sequence
  ENSG00000136147_0 (sequence is synthesized)
gcagctgcagcacagtcatggcccaggcgtcgccgccccggcccgagagggtgctcggcgccagcagcccggaggcccggcccgcgcaggaggcgctcctccttcccaccggtgtctttc

SEQ ID NO: 326202 - DNA, 120 bp, Artificial Sequence
  ENSG00000136147_1 (sequence is synthesized)
ggaggcgctcctccttcccaccggtgtctttcaggttgcagaaaagatggaaaaaaggacatgtgcactctgccccaaagatgtcgaatataatgtcctatactttgcacaatcagagaa

SEQ ID NO: 326203 - DNA, 120 bp, Artificial Sequence
  ENSG00000136147_2 (sequence is synthesized)
tatagctgctcatgagaattgtttgctgtattcttcaggacttgtggaatgtgaggatcaggatccacttaatcctgatagaagttttgatgtggaatcagtaaagaaagaaatccagag

SEQ ID NO: 326204 - DNA, 120 bp, Artificial Sequence
  ENSG00000136147_3 (sequence is synthesized)
aggaaggaagttgaaatgcaaattttgtcataaaagaggagccaccgtgggatgtgatttaaaaaactgtaacaagaattaccactttttctgtgccaagaaggacgacgcagttccaca

SEQ ID NO: 326205 - DNA, 120 bp, Artificial Sequence
  ENSG00000136147_4 (sequence is synthesized)
gtctgatggagttcgaggaatttataaactgctttgccagcaacatgctcaattcccgatcatcgctcaaagtgctaaattttcaggagtgaaaagaaaaagaggaaggaagaaacccct

SEQ ID NO: 326206 - DNA, 120 bp, Artificial Sequence
  ENSG00000136147_5 (sequence is synthesized)
atgtaatacattcataagacaagtgaaagaagagcatggcagacacacagatgcaactgtgaaagttccttttcttaagaaatgcaaggaagcaggacttcttaattacttacttgaaga

SEQ ID NO: 326207 - DNA, 120 bp, Artificial Sequence
  ENSG00000136147_6 (sequence is synthesized)
aatattagacaaagttcattcaattccagaaaaactcatggatgagactacttcagaatcagactatgaagaaatcgggagtgcactttttgactgtagattgttcgaagacacatttgt

SEQ ID NO: 326208 - DNA, 120 bp, Artificial Sequence
  ENSG00000136147_7 (sequence is synthesized)
aaattttcaagcagcaatagagaaaaaaattcatgcatctcaacaaaggtggcagcagttgaaggaagagattgagctacttcaggacttaaaacaaaccttgtgctcttttcaagaaaa

SEQ ID NO: 326209 - DNA, 120 bp, Artificial Sequence
  ENSG00000136147_8 (sequence is synthesized)
tagagatcttatgtcaagttctacatcaatatcatccctgtcttattagggattaccgtttcctaagccaagagtcatgtcaaattgcaatcaggctcaaaaccagagaccaggctgtga

SEQ ID NO: 326210 - DNA, 120 bp, Artificial Sequence
  ENSG00000136147_9 (sequence is synthesized)
aatccacacatctttagaactagtcgtctcctcttggcctcagcagctcttccctgttcttactggttgacattttgatcactctttgcacactcttgtgttttttgctcactgtcacat

SEQ ID NO: 326211 - DNA, 120 bp, Artificial Sequence
  ENSG00000136147_10 (sequence is synthesized)
tcccagcacctagtatgctcagtaaatgtttgtggaataagtgcataaaatgttcttaacctttgattctacttacagcccatgatagcctcttagatataataaatttggattatacta

SEQ ID NO: 326212 - DNA, 120 bp, Artificial Sequence
  ENSG00000136147_11 (sequence is synthesized)
agcccagtgcttccaccacaaccgatgtcaactctcctagcgcccctccgctcaccggtaaaccaggacagtggaggggcgccctgatgcgggcaagactcagccaaaggtggaaaagtt

SEQ ID NO: 326213 - DNA, 120 bp, Artificial Sequence
  ENSG00000136147_12 (sequence is synthesized)
gaaggggtgttcccagcagagaggatgacacaaaggcaccaaaccacaaaacgtcacacgtaaacatcatacgtggcaaccacaagccaatcagttggatatttcattcattggtataca

SEQ ID NO: 326214 - DNA, 120 bp, Artificial Sequence
  ENSG00000136147_13 (sequence is synthesized)
taattttatgtaaatggttttcaaatgagaacaaagccagtttgggggatgcacaggggttatgtgaattttgaatttcagtgaaaaatctatatatatatatatattattttagtcaca

SEQ ID NO: 326215 - DNA, 120 bp, Artificial Sequence
  ENSG00000136147_14 (sequence is synthesized)
atatcttgaataatgagatcaatgttaggacagcatgtttttttaaatatgatttttgtgagctatgttacattcgtaagatgatttttaaaaattccattcagaggctgatgtttttcc

SEQ ID NO: 326216 - DNA, 120 bp, Artificial Sequence
  ENSG00000136147_15 (sequence is synthesized)
tgccagtgggcatatattcctaattttcccatagtgttccaggcactattttatttatttatttaataaccacttgctttatgccaggcatagttctaagtgctttacaaatgttaactc

SEQ ID NO: 326217 - DNA, 120 bp, Artificial Sequence
  ENSG00000136147_16 (sequence is synthesized)
atttaatcctcataatagtcaactgaggtagatactattatctccattttccagaggaggaaactggggccttgagacactcagtgacttgtccccaggttacacagctggtcagtggca

SEQ ID NO: 326218 - DNA, 120 bp, Artificial Sequence
  ENSG00000136147_17 (sequence is synthesized)
gagctgggctgcaggacttccaagtcctcgctctttgccaccttgttgtcttcaggtatggggactatatattctaaaacaagagggcaagcctaccattgaaagaagcttgctaaataa

SEQ ID NO: 326219 - DNA, 120 bp, Artificial Sequence
  ENSG00000136147_18 (sequence is synthesized)
cacagaaccaaactaagacatgggaaaaagccttgacttttgggactgcttctcttccataagaattttcagtagataaaattttaaaagtgctgcaccttccctgagtgaaaattccct

SEQ ID NO: 326220 - DNA, 120 bp, Artificial Sequence
  ENSG00000136147_19 (sequence is synthesized)
aaggatgcatggttagcatttcagttctaattaaggcagactggatcctggctaactggagtcatggggtatactttcattcatgagtggaacagcagtgtcttagcagcactacatctg

SEQ ID NO: 326221 - DNA, 120 bp, Artificial Sequence
  ENSG00000136147_20 (sequence is synthesized)
caatgttcattgtgaagtggagtcaggacctcgttggaagacttcgttctgcgtcatgccaactgcattttatgctaaattttcaggagtgaaaagaaaaagaggaaggaagaaacccct

SEQ ID NO: 326222 - DNA, 120 bp, Artificial Sequence
  ENSG00000136147_21 (sequence is synthesized)
cgctggacgaacttggctcaccactcgcgtgcctgttggtgggggagggggccagaggacagggcgcggcccaggccagttccacaggtggctctgactgcccatggtttcgcgcgagtg

SEQ ID NO: 326223 - DNA, 120 bp, Artificial Sequence
  ENSG00000136147_22 (sequence is synthesized)
gtgggcacgcttcggtttacctcccccgcgggtgacagcccagtgcttccaccacaaccgatgtcaactctcctagcgcccctccgctcaccgggcaagactcagccaaaggtggaaaag

SEQ ID NO: 326224 - DNA, 120 bp, Artificial Sequence
  ENSG00000136147_23 (sequence is synthesized)
actgctcccggcgtttgggttttttaagctattcaaattaagactagactggaatctggagcagtgtgtgtgacaacccctctctgcacacccaactttccccgggccggctagtgactc

SEQ ID NO: 326225 - DNA, 120 bp, Artificial Sequence
  ENSG00000136147_24 (sequence is synthesized)
ttttgactttgtaaaaacttttggcatatgagttgtatatttcatgtagtcaaacagtaatcttttcctttatggattccaatttttaaatggtttatatttttagctaaattttcagga

SEQ ID NO: 326226 - DNA, 120 bp, Artificial Sequence
  ENSG00000136147_25 (sequence is synthesized)
ttgcgctaagtgttgtctgtaacaaatatggcctacaatacttataaaaatgtcaacccacctgtttcaaacttggtatcccgcctaaatctttattcttctaggcttgtggtaattaat

SEQ ID NO: 326227 - DNA, 120 bp, Artificial Sequence
  ENSG00000136147_26 (sequence is synthesized)
gagtataaatctttatcgcaactgtccactctattgtaatcccagcatatcaagataacttaggttggaatggtccattgcattcagtattaagaaaagatagacttctattaataaaga

SEQ ID NO: 326228 - DNA, 120 bp, Artificial Sequence
  ENSG00000136147_27 (sequence is synthesized)
aaactgtgacaagaagtgacaggggctgttatgtcaaagacttaagggtaatttttaaaaatcctcttaattcaactacatatcgggtacagtgtacactgctcaggtgacaggtgcacc

SEQ ID NO: 326229 - DNA, 120 bp, Artificial Sequence
  ENSG00000136147_28 (sequence is synthesized)
aacatctcagaaatcaccactgaagaacttatccatgtaacctgaaaccacctgttccccaaaaggtattgaaatttaaaaagttacagttttatatgtttaaaaaagcctcttaattca

SEQ ID NO: 326230 - DNA, 120 bp, Artificial Sequence
  ENSG00000136147_29 (sequence is synthesized)
tatagttattgtaagcagagaaattttcatttttactttttgtaacattttattcattgtttcagctggccaaaaaaaatgaggtatgatgaaattataattaataaaaagggtgaaggt

SEQ ID NO: 326231 - DNA, 120 bp, Artificial Sequence
  ENSG00000136147_30 (sequence is synthesized)
gctgtattattttactaagtatgtgcatccaccactaggcaaggtctgaagaaataagcataaagtaatttatgattagctgccctaagactatttccttctcaaatgtttgtcttattc

SEQ ID NO: 326232 - DNA, 120 bp, Artificial Sequence
  ENSG00000136147_31 (sequence is synthesized)
ggtgggcacgcttcggtttacctcccccgcgggtgacagcccagtgcttccaccacaaccgatgtcaactctcctagcgcccctccgctcaccggtaaaccaggacagtggaggggcgcc

SEQ ID NO: 326233 - DNA, 120 bp, Artificial Sequence
  ENSG00000136147_32 (sequence is synthesized)
ctgatgcggtgaggcagggggcggccctgagggaagagctgggtctcacgttcacggaggacgtgactggaacccgtctccccttctccagtcgttccagtcctccccggccctctactt

SEQ ID NO: 326234 - DNA, 120 bp, Artificial Sequence
  ENSG00000136147_33 (sequence is synthesized)
aagaaaaaagagaaatgccaagaattacatttctgacagcttccctgtagtgctgctgctgctgttgccatctaacattaaagttccatggcacatgactgctctctttcctttcccctg

SEQ ID NO: 326235 - DNA, 120 bp, Artificial Sequence
  ENSG00000136147_34 (sequence is synthesized)
ttttggattacatatataaatggaggagtttctgcctatacaaactgtttaatattgaaaatgtttctctccctccagactatgaagaaatcgggagtgcactttttgactgtagattgt

SEQ ID NO: 326236 - DNA, 120 bp, Artificial Sequence
  ENSG00000136147_35 (sequence is synthesized)
cgcagctgcagcacagtcatggcccaggcgtcgccgccccggcccgagagggtgctcggcgccagcagcccggaggcccggcccgcgcaggaggcgctcctccttcccaccgggcaagac

SEQ ID NO: 326237 - DNA, 120 bp, Artificial Sequence
  ENSG00000136147_36 (sequence is synthesized)
gtgtgcctgagaaccacctgtagggctggtgaggacacagatagctgggcctatcccacagagattctgattcagtacaaataccaagaattgggggccaggcgcggtggctcacgcctg

SEQ ID NO: 326238 - DNA, 120 bp, Artificial Sequence
  ENSG00000136147_37 (sequence is synthesized)
ctcaattcccgatcatcgctcaaagtggtaagtttctaaaatttagcactgtgggttttaaagaaaggtaaacatttatgtaacataaggaatagtctaattttctagcctcgttgaatt

SEQ ID NO: 326239 - DNA, 120 bp, Artificial Sequence
  ENSG00000136147_38 (sequence is synthesized)
ctccacttgtttatgagtctggtctgacttctctatcaaggctgccacacacagctgggcaggccgggcacagagtcaaacagcattggtggatggctccccctgaagttgcacaacaga

SEQ ID NO: 326240 - DNA, 120 bp, Artificial Sequence
  ENSG00000136152_0 (sequence is synthesized)
gcagtgttggaagctccggttctcccggaagtggcccaggtctctctgtcggggtcccctccatctcgctgctgctgaaggccgcgagggcggcggcgatggcggaggcggcgctgttgc

SEQ ID NO: 326241 - DNA, 120 bp, Artificial Sequence
  ENSG00000136152_1 (sequence is synthesized)
tgctgcctgaggcggcggcggagcgggacgctagggaaaagctggctctctgggatcggagaccggacacgacggcgccgctgaccgacaggcagacggactcggtattggagctgaagg

SEQ ID NO: 326242 - DNA, 120 bp, Artificial Sequence
  ENSG00000136152_2 (sequence is synthesized)
cggcggcagagaacttgccggtgccagctgagcttccaattgaagacttgtgcagtttaacatcccagtcactgcccattgaactgacttcagtagtgcctgaatctacagaagacattc

SEQ ID NO: 326243 - DNA, 120 bp, Artificial Sequence
  ENSG00000136152_3 (sequence is synthesized)
tcttgaagggcttcacttccttaggaatggaagaagaaagaattgaaaccgcacagcagtttttctcatggtttgcaaagctgcaaactcagatggatcaagatgaaggaactaaatata

SEQ ID NO: 326244 - DNA, 120 bp, Artificial Sequence
  ENSG00000136152_4 (sequence is synthesized)
gacagatgagggattacttgtctgggtttcaggagcagtgtgatgctatattgaatgatgtaaacagtgctcttcagcatctggagtctttgcagaaacagtatctttttgtgtccaata

SEQ ID NO: 326245 - DNA, 120 bp, Artificial Sequence
  ENSG00000136152_5 (sequence is synthesized)
agacaggaaccctacatgaagcctgtgaacagctcctaaaagaacagtcggaacttgttgatctggctgaaaacattcaacaaaagctttcctattttaacgaattggaaactattaaca

SEQ ID NO: 326246 - DNA, 120 bp, Artificial Sequence
  ENSG00000136152_6 (sequence is synthesized)
caaaattgaattcccctacattgtcggtgaatagtgacggatttatacctatgctggccaagttagatgattgtataacatatatctcatctcatcctaattttaaagattatcccatat

SEQ ID NO: 326247 - DNA, 120 bp, Artificial Sequence
  ENSG00000136152_7 (sequence is synthesized)
atttgctgaagtttaaacagtgtctttctaaagctttgcacctcatgaagacatatactgtgaacacactacagaccctcacaagtcagttactgaaaagggatccttcatctgtaccta

SEQ ID NO: 326248 - DNA, 120 bp, Artificial Sequence
  ENSG00000136152_8 (sequence is synthesized)
atgcagacaatgccttcacattattttatgtgaaatttcgagctgctgcccccaaagtcagaactcttattgaacaaatagaactgcggtctgaaaaaatacctgaataccaacaactgc

SEQ ID NO: 326249 - DNA, 120 bp, Artificial Sequence
  ENSG00000136152_9 (sequence is synthesized)
taaatgatatccaccagtgttaccttgatcagcgggagctccttttgggccctagtattgcttgcactgttgcagagttaaccagccaaaataatagagatcactgtgccttggttcgta

SEQ ID NO: 326250 - DNA, 120 bp, Artificial Sequence
  ENSG00000136152_10 (sequence is synthesized)
gtggctgtgccttcatggttcatgtctgccaggatgaacaccaactttacaatgaatttttcacaaaaccaacatcaaaattagatgagcttttggagaaactgtgtgtgtcattgtatg

SEQ ID NO: 326251 - DNA, 120 bp, Artificial Sequence
  ENSG00000136152_11 (sequence is synthesized)
atgtcttcaggccattgatcattcatgttattcacttagagactctgtcggaactttgtgggattcttaaaaatgaggtgcttgaagatcatgtgcagaacaatgctgagcaactggggg

SEQ ID NO: 326252 - DNA, 120 bp, Artificial Sequence
  ENSG00000136152_12 (sequence is synthesized)
catttgcagctggagtcaagcagatgttagaagatgtacaggagcggctcgtctaccgaacccacatctatattcagacggacatcacgggctataaaccagctcctggagatctggcat

SEQ ID NO: 326253 - DNA, 120 bp, Artificial Sequence
  ENSG00000136152_13 (sequence is synthesized)
atcccgataagttagtcatgatggagcagattgcacagagtttgaaagatgaacagaagaaggtaccttcagaagcttcattttcagatgttcacttagaagaaggagagtctaacagtc

SEQ ID NO: 326254 - DNA, 120 bp, Artificial Sequence
  ENSG00000136152_14 (sequence is synthesized)
tgacaaaatctggttcaacagaatccctcaatcctagaccacagaccacaatttctccagcagatcttcatggaatgtggtatcctacggttcgaagaactcttgtctgtctctccaaat

SEQ ID NO: 326255 - DNA, 120 bp, Artificial Sequence
  ENSG00000136152_15 (sequence is synthesized)
tatacagatgcatagatagggcagtgttccaaggattatcacaggaagcattgtctgcctgcattcagtccttacttggagcgtcagagtctatcagcaaaaacaagactcagattgatg

SEQ ID NO: 326256 - DNA, 120 bp, Artificial Sequence
  ENSG00000136152_16 (sequence is synthesized)
gacaacttttcttaattaagcaccttttgatacttcgtgaacaaattgctccatttcacactgaattcaccattaaggaaatttccctggacctcaagaaaactagagatgcagcattta

SEQ ID NO: 326257 - DNA, 120 bp, Artificial Sequence
  ENSG00000136152_17 (sequence is synthesized)
aaatcctgaaccctatgactgtcccaagattttttaggctgaatagcaacaatgccttgatagagttcttgttggagggtactcctgagataagagaacattatcttgactctaaaaaag

SEQ ID NO: 326258 - DNA, 120 bp, Artificial Sequence
  ENSG00000136152_18 (sequence is synthesized)
cagtcagggaggccccaagtatactctctcacagcagccttgggcacaaccagcaaaggtcaatgaccttgcggcaactgcatataagacaataaaaacaaagctgcctgtgacattgag

SEQ ID NO: 326259 - DNA, 120 bp, Artificial Sequence
  ENSG00000136152_19 (sequence is synthesized)
aagtatgtccttgtacctatccaataaagataccgagttcatcttgtttaaacctgtgaggaataatattcagcaagtcttccagaagttccacgctctgttaaaggaagagttcagccc

SEQ ID NO: 326260 - DNA, 120 bp, Artificial Sequence
  ENSG00000136152_20 (sequence is synthesized)
tgaagacatccagatcattgcctgtccatctatggaacagctgagccttctgctgttggtttctaaataagcaggccagccgggctgtgcacctaaatgtctgtctgggaggagcaggct

SEQ ID NO: 326261 - DNA, 120 bp, Artificial Sequence
  ENSG00000136152_21 (sequence is synthesized)
gagaagtcttgcagtctgcaggacaccgaggaatcgtatgtgggaacgtccccgagaaccacacgagcgtgctgctcagtgctgactgcagaatgaaatagaagcaaagtgttacaggat

SEQ ID NO: 326262 - DNA, 120 bp, Artificial Sequence
  ENSG00000136152_22 (sequence is synthesized)
cagtgttttcttttctaaaacatcaaaatgccaaagattaatctgtgattggtgataactgcctcgtttaaatggtcacaagaaatgtgaagagagagctagggcagacatgcagtgaaa

SEQ ID NO: 326263 - DNA, 120 bp, Artificial Sequence
  ENSG00000136152_23 (sequence is synthesized)
tggttctttgttaaaaatgtgcaataaaaatagattacaataagtagtgcaaagaactttacagaaatcaagcgaattagaaggcctgtaagagtaaggtttgctaaaacgtgaaacact

SEQ ID NO: 326264 - DNA, 120 bp, Artificial Sequence
  ENSG00000136152_24 (sequence is synthesized)
gtaacacttttaaccactgagcattccacagtgaaatgttatttctatgctcttatttaatgtaatgtttctcctgtcatttttgaagttgagtttggagtagattggttgcttctgaga

SEQ ID NO: 326265 - DNA, 120 bp, Artificial Sequence
  ENSG00000136152_25 (sequence is synthesized)
acacattctgccttcctgggaagtcggggtgtcatcctttcctctgtttgatgtgaggtagtttaaagatacaaggactttgtgtgaagctccagcatctgtgccccttgaattgcttag

SEQ ID NO: 326266 - DNA, 120 bp, Artificial Sequence
  ENSG00000136152_26 (sequence is synthesized)
gtgcagacagttctaaagcaaggagctgcagcattctcatcatagatacgtgcagtatctttaatgagtatcttcatggtatgatagtgtgtgtttgtgagtgcgaagtaccaattaagg

SEQ ID NO: 326267 - DNA, 120 bp, Artificial Sequence
  ENSG00000136152_27 (sequence is synthesized)
tgtcttaaatttggcgcatagaggagagaaggaaacctgaggagtagtgttcctcctgaatgaaggttcaggtcaccagccttctgtacactgcctttggttttagcagttctttgaaaa

SEQ ID NO: 326268 - DNA, 120 bp, Artificial Sequence
  ENSG00000136152_28 (sequence is synthesized)
gcaaacactttcatgtcctgtctattcattcagctggctgtgctgtgctgtggaccagctgtgtggatctctagcccagctacagcagaatacattttaccagcaaacctaaggatgaca

SEQ ID NO: 326269 - DNA, 120 bp, Artificial Sequence
  ENSG00000136152_29 (sequence is synthesized)
aacactatccacatctgaaaactaccacaccatatcagggatcataaattatgcatatctatgaattttccaacaaattcctacttcctgattggattggttttgccgctgatgttaagg

SEQ ID NO: 326270 - DNA, 120 bp, Artificial Sequence
  ENSG00000136152_30 (sequence is synthesized)
cagccagcttcttagttcaaaaagaattctgagtttttcaaacactagtctagaggtggacattgtcaggggttctggaatgggaccaggggaccttttggtgcagtgggtgcctgtaac

SEQ ID NO: 326271 - DNA, 120 bp, Artificial Sequence
  ENSG00000136152_31 (sequence is synthesized)
tcattagacgtactgaggcagcacttctgcagggtgcataccctgattgttgtcatttgtaacaggtcacttccttttcactcagtttaaattggtgatggacgttgcttgattgagctt

SEQ ID NO: 326272 - DNA, 120 bp, Artificial Sequence
  ENSG00000136152_32 (sequence is synthesized)
attactctctattttgagaaggtagaaggtaagagggcccatattcattctttgccatgaaatgaatgaattaggaagattgtatttacttaactgttttttaaatacatgtttaatgaa

SEQ ID NO: 326273 - DNA, 120 bp, Artificial Sequence
  ENSG00000136152_33 (sequence is synthesized)
ataaactgtaaaatatccagttttgtgtattatatgtacatttgatttttaatagcctttccaaagaaatgagggcatgattattgtacagtaagtacgtgactgatttaatttgattta

SEQ ID NO: 326274 - DNA, 120 bp, Artificial Sequence
  ENSG00000136152_34 (sequence is synthesized)
cagagcggagtgtgttcttataaaaatatttaatgacattggttcttgtcttttgatcttttatttctgaaacactcaaacaccttacaaagtgctgagtaggtaatagtgacccaactt

SEQ ID NO: 326275 - DNA, 120 bp, Artificial Sequence
  ENSG00000136152_35 (sequence is synthesized)
gtttgctaaatgattatttgtttaaatctgtacagttttaagtgttcacttatacaaagagtgtatatactttcaaataatttaaaatgctttatattatttggctagaaattgctgttt

SEQ ID NO: 326276 - DNA, 120 bp, Artificial Sequence
  ENSG00000136152_36 (sequence is synthesized)
ttaataaatgtgaattttttaaaaataaagatttttgcttcctaccttgtcctcacgtgtctgatacgtgtgtgcattccttgaggaaaatttctttaattaaaattttaattgagataa

SEQ ID NO: 326277 - DNA, 120 bp, Artificial Sequence
  ENSG00000136152_37 (sequence is synthesized)
tagataaatttaatatttttgaagcttggcttgatgccttaccccttcttgaatgaagttgcaccttattctgtcactaaagacacaatcagatagggaaagaatcttaaaatctgggta

SEQ ID NO: 326278 - DNA, 120 bp, Artificial Sequence
  ENSG00000136152_38 (sequence is synthesized)
aaattagtaataaaataattatagtcagttttctttctggcatctggaatccagatagaacacatcgttacttttgggttaggcatttctagcacactgttaccagaatacaaaatacat

SEQ ID NO: 326279 - DNA, 120 bp, Artificial Sequence
  ENSG00000136152_39 (sequence is synthesized)
aaataaataattgaatatattgtatacttttgattaaaaaacaggaattgttttgtgtatattcataataatagttgatctgttttgaaattacaaataaagaaaagcggttctctggaa

SEQ ID NO: 326280 - DNA, 120 bp, Artificial Sequence
  ENSG00000136152_40 (sequence is synthesized)
agattgatggacaacttttcttaattaagcaccttttgatacttcgtgaacaaattgctccatttcacactgaattcaccattaaggaaatttccctggacctcaagaaaactagaggtt

SEQ ID NO: 326281 - DNA, 79 bp, Artificial Sequence
  ENSG00000136152_41 (sequence is synthesized)
gcctgtccatctatggaacaggttactggggtacaggtggtatttggctacacgagtaagttcttcagtggtgatttgc

SEQ ID NO: 326282 - DNA, 120 bp, Artificial Sequence
  ENSG00000136152_42 (sequence is synthesized)
tggaagttactgagtacccaaaaaaccccttagccattagcagatcctgcatttccccgtcttctttttgtctctgtggatttgcctattctggatatttcattaaatggaatcatacaa

SEQ ID NO: 326283 - DNA, 120 bp, Artificial Sequence
  ENSG00000136152_43 (sequence is synthesized)
gaacttgccggtgccagctgagctggtgctcgccggaacccagtcctcccccagcagcatgggacggttggcccggagccttgcaccgaacgttttgccccagacgaggcgtcctgtcag

SEQ ID NO: 326284 - DNA, 120 bp, Artificial Sequence
  ENSG00000136152_44 (sequence is synthesized)
ccgaggcgtaatcctgctgcccactctctcccagaaggagaggcagtcaacccgaggtgctgtgctgcaggacagtctccagcgcgtgctcgtttaccgccttaatgattcacctaggtt

SEQ ID NO: 326285 - DNA, 120 bp, Artificial Sequence
  ENSG00000136152_45 (sequence is synthesized)
cctcactagcctctgcccaggatatctctccactcctccctggccatggtggcggatccggtgggaggggcctcatctcccaggctgtcaggcttcgctctgcctgcgaccccgactcta

SEQ ID NO: 326286 - DNA, 120 bp, Artificial Sequence
  ENSG00000136152_46 (sequence is synthesized)
ggtcctgagtgagtttcatttatcgcacattgaactatgagctctcaatcaagtgcaagttatgggagatcagatttatttcacctattgcaaagcaataaaaatgaattttatttgaaa

SEQ ID NO: 326287 - DNA, 120 bp, Artificial Sequence
  ENSG00000136152_47 (sequence is synthesized)
gtgccagctgaggatatggtaccggaagtggatctgaaatcaatgaaggcgcaggtggaaatttctttggctcagctatcaaactcttttataccctggataataaaagttgtttgctct

SEQ ID NO: 326288 - DNA, 120 bp, Artificial Sequence
  ENSG00000136152_48 (sequence is synthesized)
cctgtttcctggtaaaatattgtggaatatagcatttacttataggcacagaagtttaaagctgttttggcagtaggatttgtttaacatgattgaattttgaggctctttgagagaaac

SEQ ID NO: 326289 - DNA, 120 bp, Artificial Sequence
  ENSG00000136153_0 (sequence is synthesized)
ggaaagaagtggaataattaggaacctagggtggggtagggtagcaggacatttcaaacattaatgagcatatgagattccaggtcttgttaaaatgcaaattctgattcagctggtagg

SEQ ID NO: 326290 - DNA, 120 bp, Artificial Sequence
  ENSG00000136153_1 (sequence is synthesized)
tgaggtctgagattgtgcatttctaacaagcactcagataatcttaaggctgttggccccagggtcacacttatagtgattttctagaacccagttggggaagtgaatcttgggcaggag

SEQ ID NO: 326291 - DNA, 120 bp, Artificial Sequence
  ENSG00000136153_2 (sequence is synthesized)
aaatacacacctcttgcattgagtttggagatctcatctgatataactttttaagaaagaaaaataattttccaaatatccaattgataagctttcccactaagtggctttcccactaag

SEQ ID NO: 326292 - DNA, 120 bp, Artificial Sequence
  ENSG00000136153_3 (sequence is synthesized)
tggctgcgttatgaaaattgcttcactttgaaacttctggtcttggtaatatagaatttctgtgttctcacagtgcttgattgagaatatgatattgagattatggcataaaatatagtg

SEQ ID NO: 326293 - DNA, 120 bp, Artificial Sequence
  ENSG00000136153_4 (sequence is synthesized)
gctgtacaaaaaaaaatacattattaggatctctaacaattatgtaaaagtcattgcttcatgggtagagctcaaactttggtgtgagacctggttttattcttggcacttactctgagt

SEQ ID NO: 326294 - DNA, 120 bp, Artificial Sequence
  ENSG00000136153_5 (sequence is synthesized)
tgtcttaggcaaattaataccttaagcaaaaatattctcatgtacattttacatgagaattataaatgaagtacataaagtccagcagtcacaaatgttatctattattaccatcgtcct

SEQ ID NO: 326295 - DNA, 120 bp, Artificial Sequence
  ENSG00000136153_6 (sequence is synthesized)
aagactgcaatcagctatagtgaaagtagtctcaaagattgtttcataaatcatcagattcacctaattttctaaagaatttaaataaggagatggaatgaatagattgcattttgtttc

SEQ ID NO: 326296 - DNA, 120 bp, Artificial Sequence
  ENSG00000136153_7 (sequence is synthesized)
catgcacaggggaactgtgcatatttcttctgtgactcggaaatggtttaacttttaaaaatcccaaaatagctgaagttagcagacatgcaatttaccaaggatgattggaatttttat

SEQ ID NO: 326297 - DNA, 120 bp, Artificial Sequence
  ENSG00000136153_8 (sequence is synthesized)
ctttcctgtaataatactatacccaagcacactgctcatgaggaaaacatttttatgtgaatcttttactcttgggggcaaagaatgctgtttttctttttgataactatgtttatagaa

SEQ ID NO: 326298 - DNA, 120 bp, Artificial Sequence
  ENSG00000136153_9 (sequence is synthesized)
tctaaatcaccctgagcaattatttcaacatctaaagttattattaccattcatgtttcatttatagctatttgaattttgatgaatttcaatatggtgctacagtgatagggcaagtgc

SEQ ID NO: 326299 - DNA, 120 bp, Artificial Sequence
  ENSG00000136153_10 (sequence is synthesized)
aaataagttcaatatatgggtacggtctaaagctattttaatttttttattacaactgctatgaagaaaattaggatatgccatattttcacgttttacagttggatgtcctatgatgtt

SEQ ID NO: 326300 - DNA, 120 bp, Artificial Sequence
  ENSG00000136153_11 (sequence is synthesized)
ctcttccagagaacagagctcggagctctggaaatttggaggcaactgatatgtgctcatgtctgcatctgtgtgggttggctgtatctcagggacagagtctgcagcaaaaaagatata

SEQ ID NO: 326301 - DNA, 120 bp, Artificial Sequence
  ENSG00000136153_12 (sequence is synthesized)
attttgaggactgaacaaaattcaggaaggactattctcattaaggcagtaacagagaagaattttgaaacaaaagattttcgagcctctctagaaaatggtgttctgctgtgtgatttg

SEQ ID NO: 326302 - DNA, 120 bp, Artificial Sequence
  ENSG00000136153_13 (sequence is synthesized)
attaataagcttaaacctggcgtcattaagaagatcaatagactgtctacaccaatagcaggattggataatataaacgttttcttgaaagcttgtgaacagattggattgaaagaagcc

SEQ ID NO: 326303 - DNA, 120 bp, Artificial Sequence
  ENSG00000136153_14 (sequence is synthesized)
cagcttttccatcctggagatctacaggatttatcaaatcgagtcactgtcaagcaagaagagactgacaggagagtgaaaaatgttttgataacattgtactggctgggaagaaaagca

SEQ ID NO: 326304 - DNA, 120 bp, Artificial Sequence
  ENSG00000136153_15 (sequence is synthesized)
caaagcaacccgtactataatggtccccatcttaatttgaaagcgtttgagaatcttttaggacaagcactgacgaaggcactcgaagactccagcttcctgaaaagaagtggcagggac

SEQ ID NO: 326305 - DNA, 120 bp, Artificial Sequence
  ENSG00000136153_16 (sequence is synthesized)
agtggctacggtgacatctggtgtcctgaacgtggagaatttcttgctcctccaaggcaccataagagagaagattcctttgaaagcttggactctttgggctcgaggtcattgacaagc

SEQ ID NO: 326306 - DNA, 120 bp, Artificial Sequence
  ENSG00000136153_17 (sequence is synthesized)
tgctcctctgatatcacgttgagaggggggcgtgaaggttttgaaagtgacacagattcggaatttacatttaagatgcaggattataataaagatgatatgtcgtatcgaaggatttcg

SEQ ID NO: 326307 - DNA, 120 bp, Artificial Sequence
  ENSG00000136153_18 (sequence is synthesized)
gctgttgagccaaagactgcgttacccttcaatcgttttttacccaacaaaagtagacagccatcctatgtaccagcacctctgagaaagaaaaagccagacaaacatgaggataacaga

SEQ ID NO: 326308 - DNA, 120 bp, Artificial Sequence
  ENSG00000136153_19 (sequence is synthesized)
agaagttgggcaagcccggtttatacagaagcagatggaacattttcaagactctttcaaaagatttatggtgagaatgggagtaagtccatgagtgatgtcagcgcagaagatgttcaa

SEQ ID NO: 326309 - DNA, 120 bp, Artificial Sequence
  ENSG00000136153_20 (sequence is synthesized)
aacttgcgtcagctgcgttacgaggagatgcagaaaataaaatcacaattaaaagaacaagatcagaaatggcaggatgaccttgcaaaatggaaagatcgtcgaaaaagttacacttca

SEQ ID NO: 326310 - DNA, 120 bp, Artificial Sequence
  ENSG00000136153_21 (sequence is synthesized)
gatctgcagaagaaaaaagaagagagagaagaaattgaaaagcaggcacttgagaagtctaagagaagctctaagacgtttaaggaaatgctgcaggacagggaatcccaaaatcaaaag

SEQ ID NO: 326311 - DNA, 120 bp, Artificial Sequence
  ENSG00000136153_22 (sequence is synthesized)
tctacagttccgtcaagaaggagaatgtattcttttgatgatgtgctggaggaaggaaagcgaccccctacaatgactgtgtcagaagcaagttaccagagtgagagagtagaagagaag

SEQ ID NO: 326312 - DNA, 120 bp, Artificial Sequence
  ENSG00000136153_23 (sequence is synthesized)
ggagcaacttatccttcagaaattcccaaagaagattctaccacttttgcaaaaagagaggaccgtgtaacaactgaaattcagcttccttctcaaagtcctgtggaagaacaaagccca

SEQ ID NO: 326313 - DNA, 120 bp, Artificial Sequence
  ENSG00000136153_24 (sequence is synthesized)
gcctctttgtcttctctgcgttcacggagcacacaaatggaatcaactcgtgtttcagcttctctccccagaagttaccggaaaactgatacagtcaggttaacatctgtggtcacacca

SEQ ID NO: 326314 - DNA, 120 bp, Artificial Sequence
  ENSG00000136153_25 (sequence is synthesized)
agaccctttggctctcagacaaggggaatctcatcactccccagatcttacacgatggatgatgcttggaagtataatggagatgttgaagacattaagagaactccaaacaatgtggtc

SEQ ID NO: 326315 - DNA, 120 bp, Artificial Sequence
  ENSG00000136153_26 (sequence is synthesized)
agcacccctgcaccaagcccggacgcaagccaactggcttcaagcttatctagccagaaagaggtagcagcaacagaagaagatgtgacaaggctgccctctcctacatcccccttctca

SEQ ID NO: 326316 - DNA, 120 bp, Artificial Sequence
  ENSG00000136153_27 (sequence is synthesized)
tctctttcccaagaccaggctgccacttctaaagccacattgtcttccacatctggtcttgatttaatgtctgaatctggagaaggggaaatctccccacaaagagaagtctcaagatcc

SEQ ID NO: 326317 - DNA, 120 bp, Artificial Sequence
  ENSG00000136153_28 (sequence is synthesized)
caggatcagttcagtgatatgagaatcagcataaaccagacgcctgggaagagtcttgactttgggtttacaataaaatgggatattcctgggatcttcgtagcatcagttgaagcaggt

SEQ ID NO: 326318 - DNA, 120 bp, Artificial Sequence
  ENSG00000136153_29 (sequence is synthesized)
agcccagcagaattttctcagctacaagtagatgatgaaattattgctattaacaacaccaagttttcatataacgattcaaaagagtgggaggaagccatggctaaggctcaagaaact

SEQ ID NO: 326319 - DNA, 120 bp, Artificial Sequence
  ENSG00000136153_30 (sequence is synthesized)
ctggttcacctgaaacaaagtggattgatgcaacttctggaatttacaactcagaaaaatcttcaaatctatctgtaacaactgatttctccgaaagccttcagagttctaatattgaat

SEQ ID NO: 326320 - DNA, 120 bp, Artificial Sequence
  ENSG00000136153_31 (sequence is synthesized)
ccaaagaaatcaatggaattcatgatgaaagcaatgcttttgaatcaaaagcatctgaatccatttctttgaaaaacttaaaaaggcgatcacaattttttgaacaaggaagctctgatt

SEQ ID NO: 326321 - DNA, 120 bp, Artificial Sequence
  ENSG00000136153_32 (sequence is synthesized)
cggtggttcctgatcttccagttccaaccatcagtgccccgagtcgctgggtgtgggatcaagaggaggagcggaagcggcaggagaggtggcagaaggagcaggaccgcctactgcagg

SEQ ID NO: 326322 - DNA, 120 bp, Artificial Sequence
  ENSG00000136153_33 (sequence is synthesized)
aaaaatatcaacgtgagcaggagaaactgagggaagagtggcaaagggccaaacaggaggcagagagagagaattccaagtacttggatgaggaactgatggtcctaagctcaaacagca

SEQ ID NO: 326323 - DNA, 120 bp, Artificial Sequence
  ENSG00000136153_34 (sequence is synthesized)
tgtctctgaccacacgggagccctctcttgccacctgggaagctacctggagtgaagggtccaagtcttcagacagagaaggaacccgagcaggagaagaggagaggagacagccacaag

SEQ ID NO: 326324 - DNA, 120 bp, Artificial Sequence
  ENSG00000136153_35 (sequence is synthesized)
aggaagttgttcatgaggaccaaggaaagaagccgcaggatcagcttgttattgagagagagaggaaatgggagcaacagcttcaggaagagcaagagcaaaagcggcttcaggctgagg

SEQ ID NO: 326325 - DNA, 120 bp, Artificial Sequence
  ENSG00000136153_36 (sequence is synthesized)
ctgaggagcagaagcgtcctgcggaggagcagaagcgccaggcagagatagagcgggaaacatcagtcagaatataccagtacaggaggcctgttgattcctatgatataccaaagacag

SEQ ID NO: 326326 - DNA, 120 bp, Artificial Sequence
  ENSG00000136153_37 (sequence is synthesized)
aagaagcatcttcaggttttcttcctggtgacaggaataaatccagatctactactgaactggatgattactccacaaataaaaatggaaacaataaatatttagaccaaattgggaaca

SEQ ID NO: 326327 - DNA, 120 bp, Artificial Sequence
  ENSG00000136153_38 (sequence is synthesized)
tgacctcttcacagaggagatccaagaaagaacaagtaccatcaggagcagaattggagaggcaacaaatccttcaggaaatgaggaagagaacaccccttcacaatgacaacagctgga

SEQ ID NO: 326328 - DNA, 120 bp, Artificial Sequence
  ENSG00000136153_39 (sequence is synthesized)
tccgacagcgcagtgccagtgtcaacaaagagcctgttagtcttcctgggatcatgagaagaggcgaatctttagataacctggactccccccgatccaattcttggagacagcctcctt

SEQ ID NO: 326329 - DNA, 120 bp, Artificial Sequence
  ENSG00000136153_40 (sequence is synthesized)
ggctcaatcagcccacaggattctatgcttcttcctctgtgcaagactttagtcgcccaccacctcagctggtgtccacatcaaaccgtgcctacatgcggaacccctcctccagcgtgc

SEQ ID NO: 326330 - DNA, 120 bp, Artificial Sequence
  ENSG00000136153_41 (sequence is synthesized)
ccccaccttcagctggctccgtgaagacctccaccacaggtgtggccaccacacagtcccccaccccgagaagccattccccttcagcttcacagtcaggctctcagctgcgtaacaggt

SEQ ID NO: 326331 - DNA, 120 bp, Artificial Sequence
  ENSG00000136153_42 (sequence is synthesized)
cagtcagtgggaagcgcatatgctcctactgcaataacattctgggcaaaggagccgccatgatcatcgagtccctgggtctttgttatcatttgcattgttttaagtgtgttgcctgtg

SEQ ID NO: 326332 - DNA, 120 bp, Artificial Sequence
  ENSG00000136153_43 (sequence is synthesized)
agtgtgacctcggaggctcttcctcaggagctgaagtcaggatcagaaaccaccaactgtactgcaacgactgctatctcagattcaaatctggacggccaaccgccatgtgatgtaagc

SEQ ID NO: 326333 - DNA, 120 bp, Artificial Sequence
  ENSG00000136153_44 (sequence is synthesized)
ctccatacgaaagcactgttgcagatagaagaagaggtggttgctgctcatgtagatctataaatatgtgttgtatgtcttttttgctttttttttaaaaaaaagaataactttttttgc

SEQ ID NO: 326334 - DNA, 120 bp, Artificial Sequence
  ENSG00000136153_45 (sequence is synthesized)
ctctttagattacatagaagcattgtagtcttggtagaaccagtatttttgttgtttatttataaggtaattgtgtgtggggaaaagtgcagtatttacctgttgaattcagcatcttga

SEQ ID NO: 326335 - DNA, 120 bp, Artificial Sequence
  ENSG00000136153_46 (sequence is synthesized)
gagcacaagggaaaaaataagaacctacgaatatttttgaggcagataatgatctagtttgactttctagttagtggtgttttgaagagggtattttattgttttttaaaaaaaggttct

SEQ ID NO: 326336 - DNA, 120 bp, Artificial Sequence
  ENSG00000136153_47 (sequence is synthesized)
taaacattatttgaaatagttaatataaatacataattgcatttgctctgtttattgtaatgtattctaaattaatgcagaaccatatggaaaatttcattaaaatctatccccaaatgt

SEQ ID NO: 326337 - DNA, 120 bp, Artificial Sequence
  ENSG00000136153_48 (sequence is synthesized)
gctttctgtatccttccttctacctattattctgatttttaaaaatgcagttaatgtaccatttatttgcttgatgaagggagctctattttctttaccagaaatgttgctaagtaattc

SEQ ID NO: 326338 - DNA, 120 bp, Artificial Sequence
  ENSG00000136153_49 (sequence is synthesized)
ccaatagaaagctgcttattttcattaatgaaaaataaccatggtttgtatactagaagtcttcttcagaaactggtgagcctttctgttcaattgcatttgtaaataaacttgctgatg

SEQ ID NO: 326339 - DNA, 120 bp, Artificial Sequence
  ENSG00000136153_50 (sequence is synthesized)
catttaacgagtgggtcgtctttttcttaggtgtatgtgtctgacctcaggccttttagccatatttcagtatgtggccttttttgatgttatgttttatccagtagctttactaaggta

SEQ ID NO: 326340 - DNA, 120 bp, Artificial Sequence
  ENSG00000136153_51 (sequence is synthesized)
taattgatgtaataaactgcatatatttaaagtgtatactttgacaaattttgacatggtgtataccttcgaaactatgccacagtctggatgtgtttactgaaacattttaataaggaa

SEQ ID NO: 326341 - DNA, 120 bp, Artificial Sequence
  ENSG00000136153_52 (sequence is synthesized)
gtttatttttgataaagttatgtttttggatacaatatatttgtatggtgagagtgatgaattgttggatcatttgaataaaatcttttactaaccccatgataaaaggagaagacaaca

SEQ ID NO: 326342 - DNA, 120 bp, Artificial Sequence
  ENSG00000136153_53 (sequence is synthesized)
gtgagcttagaatatctataaagcaaaaaatgtagtctcttgtttaaaaaatctggagcgggaatgcaaggatacaaaactttagcatgctttgagcaaaaatttaaacttactggaatc

SEQ ID NO: 326343 - DNA, 120 bp, Artificial Sequence
  ENSG00000136153_54 (sequence is synthesized)
ttttataataatgtaagtggaatggaggattctaggaactgagaactgtattggaataggttcaaaatatgtaagaaatgctaatgtgggagataaaaattttatttagtacttattctg

SEQ ID NO: 326344 - DNA, 120 bp, Artificial Sequence
  ENSG00000136153_55 (sequence is synthesized)
attattattaaagtaataatgtgttccttgaggataacttgtcaaatgccccaaagcataaagaatataattctgaatcccaaattccaaagacaagaactctgtgtttgaattcattct

SEQ ID NO: 326345 - DNA, 120 bp, Artificial Sequence
  ENSG00000136153_56 (sequence is synthesized)
gcatataattatttataagtatagattgtgaatttttccatgttcttaaaattatttttatcttttttcatggttgcatagtgctccattgtttggccttggtaatatttagttgataat

SEQ ID NO: 326346 - DNA, 120 bp, Artificial Sequence
  ENSG00000136153_57 (sequence is synthesized)
tccattactgtgtatttttcacttgtttctaagatcaaacattttaatatgtgcatgttatatataaatatgtaaattctgtgatactctatgatcatctctttctttatattattttca

SEQ ID NO: 326347 - DNA, 120 bp, Artificial Sequence
  ENSG00000136153_58 (sequence is synthesized)
tagacatgaaatagttgctcagagattatgcattttaagacactcatagtatatattgccaaagtggtttccagaaaggcactgctggcttcgactcctataagcagcacgtgggcttgt

SEQ ID NO: 326348 - DNA, 120 bp, Artificial Sequence
  ENSG00000136153_59 (sequence is synthesized)
tcatctcactgcatgtttatgaagatacagttcttttgccttgttctctgcctgatgtgtatgcagaggcagccctcaatatgcagtggttgaataaatgaatgaagaaaccactatcaa

SEQ ID NO: 326349 - DNA, 120 bp, Artificial Sequence
  ENSG00000136153_60 (sequence is synthesized)
agaagttgggcaagcccggtttatacagaagcagatggaacattttcaagtaatcagaggaggatttggggcaccaatgtggagaactggccaactgtacaaggaacttcaaagtcctct

SEQ ID NO: 326350 - DNA, 120 bp, Artificial Sequence
  ENSG00000136153_61 (sequence is synthesized)
tgttatttggaagaggaaaaagcaaagacaagaagcatacccaacattgtaaaggatgatctttatgtgcgcaagctcagtccagtcatgccaaacccagggaatgcttttgatcagttt

SEQ ID NO: 326351 - DNA, 120 bp, Artificial Sequence
  ENSG00000136153_62 (sequence is synthesized)
cttcccaaatgttggaccccagaagatgtgaactggaaaagaataaaaagggaaacttataagccatggtataaagaatttcagggattcagtcagtttttactgcttcaggccctccaa

SEQ ID NO: 326352 - DNA, 120 bp, Artificial Sequence
  ENSG00000136153_63 (sequence is synthesized)
acatactctgatgacatcttgtcttctgaaacacataccaaaattgatcccacttctggcccaaggctcataacccgcaggaagaatctctcttatgcaccaggctatagaagagatgac

SEQ ID NO: 326353 - DNA, 120 bp, Artificial Sequence
  ENSG00000136153_64 (sequence is synthesized)
ctcgagatggcagccctggatcctgacttagagaatgatgatttctttgtcagaaagactggggctttccatgcaaatccatatgttctccgagcttttgaagactttagaaagttctct

SEQ ID NO: 326354 - DNA, 120 bp, Artificial Sequence
  ENSG00000136153_65 (sequence is synthesized)
gagcaagatgattctgtagagcgagatataattttacagtgtagagaaggtgaacttgtacttccggatttggaaaaagatgatatgattgttcgccgaattccagcacagaagaaagaa

SEQ ID NO: 326355 - DNA, 120 bp, Artificial Sequence
  ENSG00000136153_66 (sequence is synthesized)
gtgccgctgtctggggccccagatagataccacccagtcccttttcccgaaccctggactcttcctccagaaattcaagcaaaatttctctgtgtacttgaaaggacatgcccatccaaa

SEQ ID NO: 326356 - DNA, 120 bp, Artificial Sequence
  ENSG00000136153_67 (sequence is synthesized)
gaaaaaagtaatagctgtagaatattagttccttcatatcggcagaagaaagatgacatgctgacacgtaagattcagtcctggaaactgggaactaccgtgcctcccatcagtttcacc

SEQ ID NO: 326357 - DNA, 120 bp, Artificial Sequence
  ENSG00000136153_68 (sequence is synthesized)
cctggcccctgcagtgaggctgacttgaagagatgggaggccatccgggaggccagcagacttaggcacaagaaaaggctgatggtggagagactctttcaaaagatttatggtgagaat

SEQ ID NO: 326358 - DNA, 120 bp, Artificial Sequence
  ENSG00000136153_69 (sequence is synthesized)
aaactgtcgtcggggctggtgccgcgcgctgccgctgggcacccgcttcgcttcccgcgtcctgcctgactgcccgggtccccgcgggccttgggtcgctttcaggagtttagagaaagc

SEQ ID NO: 326359 - DNA, 120 bp, Artificial Sequence
  ENSG00000136153_70 (sequence is synthesized)
caggtcttcacgttcgtgtaggttcgagaccttaacgaactgcagagcgcaacaaagggaactagagccccggcgccttcgcagccggagcggaagccggagttgtgggaggcccgcgtg

SEQ ID NO: 326360 - DNA, 120 bp, Artificial Sequence
  ENSG00000136153_71 (sequence is synthesized)
ccctccccgcccgtggggcccagacgcgcggggacaacccctcccctccacgcatcccgagtctctctctccctcccttgtcctagccatggaagggctggaggaggcagaggccaactg

SEQ ID NO: 326361 - DNA, 120 bp, Artificial Sequence
  ENSG00000136153_72 (sequence is synthesized)
tccagttggagtgaatagtttcagtgatgtaataagatactctggcacattctgtctgctagaaagggtgtatagaaattcaggtgtgcccctgctgatgtgatttttctgtcaggacct

SEQ ID NO: 326362 - DNA, 120 bp, Artificial Sequence
  ENSG00000136153_73 (sequence is synthesized)
ggtattccacagtcgttctgtaatttgtaatcatagaaacagaatgttcctcctcttatttcttccctgccaacagtttctgggtgggtgaatgtcagtagctggagttatttttaaaga

SEQ ID NO: 326363 - DNA, 120 bp, Artificial Sequence
  ENSG00000136153_74 (sequence is synthesized)
ggagaggtgaggcttgccgtgcaaagctggaaagagggcgtttgtttgcagagcagagctgacatcaaagtgtagattactgctcagtggctaggcacttgtcctgtaacaggataatat

SEQ ID NO: 326364 - DNA, 120 bp, Artificial Sequence
  ENSG00000136153_75 (sequence is synthesized)
gacttttgaagggtggggtctgtaggaagaatccatgcattgctctgggaagtggcctcaggaagtagagggctggggacagaatcactcatgagttgcagttgttctgggcaacaaagc

SEQ ID NO: 326365 - DNA, 120 bp, Artificial Sequence
  ENSG00000136153_76 (sequence is synthesized)
aaggcggatacttattctggtagcagggtggagtttgaactgggcagttacctctgctcaagccccttgaagaatttcagattccctgttaaccatggaggcatgggctggaagctgggt

SEQ ID NO: 326366 - DNA, 120 bp, Artificial Sequence
  ENSG00000136153_77 (sequence is synthesized)
catttgaaattctttttttttttttttttcctgttaggccaaactatgagatgctgcccagtttattaataaaagaaccctgaagcttcttcagaaatatccattgatcctactctaata

SEQ ID NO: 326367 - DNA, 120 bp, Artificial Sequence
  ENSG00000136153_78 (sequence is synthesized)
cctagagctagggtttattttggcatctgtatcttccttttactaactttgaatttgaaagatgagtaacagatggaactgttacacctggagaaaaaaggatttactgactattgttta

SEQ ID NO: 326368 - DNA, 120 bp, Artificial Sequence
  ENSG00000136153_79 (sequence is synthesized)
gggaggggacggcgctcacctggcggctgggccggatcgcggcgggagagcgggtagcgggctcagctggccggggctcaggcagtaacagagaagaattttgaaacaaaagattttcga

SEQ ID NO: 326369 - DNA, 120 bp, Artificial Sequence
  ENSG00000136153_80 (sequence is synthesized)
aacaggtaatgtttaacgtgccagtcacaaagatcacagaaacagtgtatgcccgggcataagatagcacgactgtgtatgctctggaggactgaaaggctgtacaagccctatgtattt

SEQ ID NO: 326370 - DNA, 120 bp, Artificial Sequence
  ENSG00000136153_81 (sequence is synthesized)
tttttcaaatatacatatgcatgggtcttgctgctgcctcttttgctgactgtaattggactttgaagcttcgaagttatatcataaaaatttgtaacctttgtctgagagagagctcag

SEQ ID NO: 326371 - DNA, 89 bp, Artificial Sequence
  ENSG00000136153_82 (sequence is synthesized)
gatataattttgaggactgaacaaaattcaggaaggactattctcattaagagacgaactcccaagctcaagcaatccgcccaccccag

SEQ ID NO: 326372 - DNA, 120 bp, Artificial Sequence
  ENSG00000136153_83 (sequence is synthesized)
acaggcatgagccaccgcactcagccaatatatttttaagtgtacgatacattattgttgaccataggtattattctttcctttttgaagctaaaatattactgctatccaccttgtagt

SEQ ID NO: 326373 - DNA, 120 bp, Artificial Sequence
  ENSG00000136153_84 (sequence is synthesized)
actgctatccaccttgtagtcatagaataggggaatgaaggggttattataaaaattgtagtttaaacttctataggaagtataaatttcctctaatgtatgggttgtttcctctctgag

SEQ ID NO: 326374 - DNA, 120 bp, Artificial Sequence
  ENSG00000136153_85 (sequence is synthesized)
tccaatttcagaatgtaaacaagaattgcaattacaattctaaagtacagatggtcctccaacttacgattttttgactacgatgatgcaaaagagatgcacatttagccaaaaccgtac

SEQ ID NO: 326375 - DNA, 120 bp, Artificial Sequence
  ENSG00000136153_86 (sequence is synthesized)
ttaagagtatccatacaaccattctttcactttcagtacagtagtcaataaattacataagatattcaacaacttattataaaataggctttgcattagatgattttgcccaactgtagg

SEQ ID NO: 326376 - DNA, 120 bp, Artificial Sequence
  ENSG00000136153_87 (sequence is synthesized)
ctaatgtatgtgttgtgaggatgtttaaggaggctagactaagctataatgtttggtaggttaaatacttaacaatattttcaacttataatgggtttatcaaaagtaaccccatcataa

SEQ ID NO: 326377 - DNA, 120 bp, Artificial Sequence
  ENSG00000136153_88 (sequence is synthesized)
gttgaggagtatctgtattaataatatagtgcatactgtgcttaaatatttttccctgcctttttagcaaaacaatttgaattgatagtaaggttatttctcttaccaaataaagttaat

SEQ ID NO: 326378 - DNA, 120 bp, Artificial Sequence
  ENSG00000136153_89 (sequence is synthesized)
acacacacacaaataaatgtattttagggaaaactggacttgactatttttatctttgattatccttactaaagatatcctacgggaaacacagactttatttttttttcgtttcatggg

SEQ ID NO: 326379 - DNA, 120 bp, Artificial Sequence
  ENSG00000136153_90 (sequence is synthesized)
cttcaggaagagaagcttagtaaacatacattctctccttcctctttcccagaagctgcaatagtttattttaaagctaattctagggtaggtccttttgatctcactgctatcacttag

SEQ ID NO: 326380 - DNA, 120 bp, Artificial Sequence
  ENSG00000136153_91 (sequence is synthesized)
agaattataatgtggttttgcaattctagctagaatgggggacctttaaaaaaggtcttggatttatgttaaatgattttagttcaatgataggaaacccctctacttgttaaaaaaaaa

SEQ ID NO: 326381 - DNA, 120 bp, Artificial Sequence
  ENSG00000136153_92 (sequence is synthesized)
aaacacaaaaacctcaaaaaaagctcttaagatctttatagtaggaagaaaacaaccaactgcttttcaaattatggggttggtcccatgttttgaaagttaccatctcagttgatctct

SEQ ID NO: 326382 - DNA, 120 bp, Artificial Sequence
  ENSG00000136153_93 (sequence is synthesized)
taatgagatgtctgtgtacatgagacaaaggtcgataagaacttgagggcttctcatctatcccttctcagttaacaatccagtagcttcagaagacaaatttaggacccttgcctttgt

SEQ ID NO: 326383 - DNA, 120 bp, Artificial Sequence
  ENSG00000136153_94 (sequence is synthesized)
ccactgggtgaagcattcatcatcctaaagctgcactggaaacttcctggaggtttgtcttctttttggaggaatgttctgatatgggattcactttgtttttctccttttgctttctgg

SEQ ID NO: 326384 - DNA, 120 bp, Artificial Sequence
  ENSG00000136153_95 (sequence is synthesized)
tgcatacatgttttccctcttatgttcatttcttaatcattatctgtaacattttggcttccttttcctctggctttgatttccaagtatggaattgaaccttcttgtctgaataccatt

SEQ ID NO: 326385 - DNA, 120 bp, Artificial Sequence
  ENSG00000136153_96 (sequence is synthesized)
atgtaagtactgacaacatcacatctttttattactgacactgaaggatgtattttttgtgggtagaaatggggtagagatgggataggtataattcttattaaacttatttttaatcta

SEQ ID NO: 326386 - DNA, 120 bp, Artificial Sequence
  ENSG00000136153_97 (sequence is synthesized)
ggcgactattgctgagtacagatgtgatcaaaggaagatagtatcagaaactgcaggatggactaattacactgaaattgctcatttatgtgaataggtgtcaagggtctcagagctgcc

SEQ ID NO: 326387 - DNA, 120 bp, Artificial Sequence
  ENSG00000136153_98 (sequence is synthesized)
atggagatggttcaaagttagagtataatcaaggcactctttagttggctggtaaaagttattctcccacagatatatgtatagagcttttcttaaattattatcagtgttaatagcaga

SEQ ID NO: 326388 - DNA, 120 bp, Artificial Sequence
  ENSG00000136153_99 (sequence is synthesized)
gagatagaaaataaagagagataattctagtgactattttttcctaaagtaatcctttcatgcattgacctctttaaatatgaaccttgggtttttgtttgtttgcttgttttttgtttt

SEQ ID NO: 326389 - DNA, 120 bp, Artificial Sequence
  ENSG00000136153_100 (sequence is synthesized)
tttgtttgtttgttttttttgagacttgtatagggctaatctagccattttgtgaaaaaattcacactcgagtgctcttgtttctgagttttggaaaaacaccatttatctctgtagtgc

SEQ ID NO: 326390 - DNA, 120 bp, Artificial Sequence
  ENSG00000136153_101 (sequence is synthesized)
ttatggttttgatttgcatttccctgatcactagtgatgtcaatcatcactgtcacttttaaaaggtactaatcccaaagcttttgatttgtttttaatttaggaaacaataaatattta

SEQ ID NO: 326391 - DNA, 120 bp, Artificial Sequence
  ENSG00000136153_102 (sequence is synthesized)
cagattcaaatgtaagagagcaaatcagagagaaaatttcttgccttttaaggaggccacgggttcccatgcatttccctgaacctgcagcgagctcccctccaagttcactgccatagg

SEQ ID NO: 326392 - DNA, 120 bp, Artificial Sequence
  ENSG00000136153_103 (sequence is synthesized)
gtaatttgtaatcatagaaacagaatgttcctcctcttatttcttccctgccaacagtttctgggtgggtgaatgtcagtagctggagttatttttaaagaggagaggataatataaacg

SEQ ID NO: 326393 - DNA, 120 bp, Artificial Sequence
  ENSG00000136153_104 (sequence is synthesized)
agttagcagtggcagcactgggtttctaagggaaagacaaagcaggcgcgctgtgtgggtttcagttaggcgaataatctggagagtaaagcaaattcttgtgccttctttataggtttt

SEQ ID NO: 326394 - DNA, 120 bp, Artificial Sequence
  ENSG00000136153_105 (sequence is synthesized)
acacctagtgatggatgtgaggcgctatggaaaggctgactggggcaaagaccaaccttccctgccatttatacggcataaaaccctcaatctcaccagtatggctaccaaaattatagg

SEQ ID NO: 326395 - DNA, 120 bp, Artificial Sequence
  ENSG00000136153_106 (sequence is synthesized)
acaattcatgcactttcatggaattgttctccctctccactcttcctcatggtctgtggtgctgggcactgagcctcttcaatttgtctgtcattatgaccaagcgacataacccatttc

SEQ ID NO: 326396 - DNA, 120 bp, Artificial Sequence
  ENSG00000136153_107 (sequence is synthesized)
cattctttccctagggtcatcaggcttttcttacagttcatgggtctacctctgtggtaatgggtctttgtgtgtcctttgtatacctctaaacattttacttttttttttttaactttg

SEQ ID NO: 326397 - DNA, 120 bp, Artificial Sequence
  ENSG00000136153_108 (sequence is synthesized)
cttgccttttaaggaggccacgggttcccatgcatttccctgaacctgcagcgagctcccctccaagttcactgccataggattccaggtttcaagaattgtagtgtgttcccttcaaag

SEQ ID NO: 326398 - DNA, 120 bp, Artificial Sequence
  ENSG00000136153_109 (sequence is synthesized)
agtgtgtatagtgaatgggtcactgctcagggttccagctacacaggagtgggttgtggggccaaggaatggagaggaacagtgtccaaaagtcaggatggtgtcttgtgttatctgccc

SEQ ID NO: 326399 - DNA, 120 bp, Artificial Sequence
  ENSG00000136153_110 (sequence is synthesized)
agagtccgcagagacctttaatgactcaagaatacaaacaaaccaaaacacttaaatgaatcttctatgtaggatttgtttcttgactaaagattggtccctcatcaacttctattattt

SEQ ID NO: 326400 - DNA, 120 bp, Artificial Sequence
  ENSG00000136153_111 (sequence is synthesized)
aacaatgggctttgattatgtgatttagaatatgaccaactttaaaaaatattgttccatgtaatacaaaataagtcagtttatgctttatgttaatatatgtcaatatataattttaaa

SEQ ID NO: 326401 - DNA, 120 bp, Artificial Sequence
  ENSG00000136153_112 (sequence is synthesized)
aggaaagtattaactatggtgtttcagtgtcatttttggaaaaaatgagtttttcaaaaaacttcaaatgctactttgcatctaagcatgtgtttgtgtgttataaaaggtaggctagca

SEQ ID NO: 326402 - DNA, 120 bp, Artificial Sequence
  ENSG00000136153_113 (sequence is synthesized)
taactaggttgtgtgttgtgtatagctacagcaagacaagtattactgctgttttatattttaaaccttgatgctggtaacatgtgtttcttccttattgtgaaagggtgttacaagtgg

SEQ ID NO: 326403 - DNA, 120 bp, Artificial Sequence
  ENSG00000136153_114 (sequence is synthesized)
tatcagcaaaatcatttgcttttgaactctgaggtatttatatggcccctatgtgaagagtgctttggaaatggtttaagcccagtcaactctcttttatctgtcggtgggttctgagcc

SEQ ID NO: 326404 - DNA, 120 bp, Artificial Sequence
  ENSG00000136153_115 (sequence is synthesized)
ttcctgctgcagctgtccagtcctttcctggatgctgacactgaggttggagaaagtcaaggctgggcatgtactggtggggggtgtgtgtatgtgtgtgtgtttttctctctctcatca

SEQ ID NO: 326405 - DNA, 120 bp, Artificial Sequence
  ENSG00000136153_116 (sequence is synthesized)
ttcatttttactccatttttacaaataaagaattccagagacgagacactgagacttgcctagctttatcctaagagtgagtgacaggttactctttctacctcattgggccactttctg

SEQ ID NO: 326406 - DNA, 120 bp, Artificial Sequence
  ENSG00000136155_0 (sequence is synthesized)
aggtagaggttgagactccactgaataaactctaggttcccatttctttcagccagatcctcccagggaatcactacaggctggttagccaaaaagtcctgattttctgctcaatagagg

SEQ ID NO: 326407 - DNA, 120 bp, Artificial Sequence
  ENSG00000136155_1 (sequence is synthesized)
tccttactggaaggcagcatgtccaatgttaccttgagaaaaatgtctcccacaggaaatgagatgaagagcaccactcagggaaccacacggaagcagcaggattttcacgaggtgaac

SEQ ID NO: 326408 - DNA, 120 bp, Artificial Sequence
  ENSG00000136155_2 (sequence is synthesized)
aaaagaagaactttcttacaggataacagttggataaagaaacgccctgaagaagaaaaagatgaaaattacggtagggtggtgctcaaccgacataattcccatgatgcattggacagg

SEQ ID NO: 326409 - DNA, 120 bp, Artificial Sequence
  ENSG00000136155_3 (sequence is synthesized)
aaagtaaatgagagagatgtgccaaaagctacaattagtcggtacagttctgatgacactttggacaggatctcagacagaaatgatgctgctaaaacatataaggccaataccttggat

SEQ ID NO: 326410 - DNA, 120 bp, Artificial Sequence
  ENSG00000136155_4 (sequence is synthesized)
aaccaactaaccaataggagcatgtccatgtttagatcactggaagtaacaaagttgcaacctggcggttcattgaatgccaacacctccaacaccatagcatccacttctgctactact

SEQ ID NO: 326411 - DNA, 120 bp, Artificial Sequence
  ENSG00000136155_5 (sequence is synthesized)
cctgtaaagaagaagaggcagtcctggtttccaccgccccctccaggttacaatgcctcctcgagcacaggaaccaggagacgggaaccaggtgttcaccctccaatacctccaaagccc

SEQ ID NO: 326412 - DNA, 120 bp, Artificial Sequence
  ENSG00000136155_6 (sequence is synthesized)
agttctcctgtttcttctcctaaccagctgagacaggataataggcagatacatccacctaaaccaggtgtatatacagaaaccaacagatctgctgaaagaaatataaggagtcaggat

SEQ ID NO: 326413 - DNA, 120 bp, Artificial Sequence
  ENSG00000136155_7 (sequence is synthesized)
cttgataacatcgtcaaagtggccacttcacttcagagaagtgacaaaggtgaagaattggataatctcatcaaaatgaacaaaagcttgaataggaatcaaggtcttgatagtctcttc

SEQ ID NO: 326414 - DNA, 120 bp, Artificial Sequence
  ENSG00000136155_8 (sequence is synthesized)
agagcaaatccaaaggtagaagaaagagagaaaagagccaaaagccttgaaagtctcatctatatgagtacccggacagataaagatggcaaaggaatccaaagccttggaagtccgatt

SEQ ID NO: 326415 - DNA, 120 bp, Artificial Sequence
  ENSG00000136155_9 (sequence is synthesized)
aaagttaatcaaaggactgacaaaaatgagaaaggaagacaaaatctcgaatctgttgctaaagtgaatgccaggatgaataaaacgagcagaagaagtgaagaccttgataatgctact

SEQ ID NO: 326416 - DNA, 120 bp, Artificial Sequence
  ENSG00000136155_10 (sequence is synthesized)
gaagtaaatcccaaaggacatgaaaataccactggaaaaaaagaccttgatgggcttattaaagtggatcctgaaacaaataaaaatattacgaggggccagagccttgataatctcatc

SEQ ID NO: 326417 - DNA, 120 bp, Artificial Sequence
  ENSG00000136155_11 (sequence is synthesized)
aaagtgacccctgaagtaaagagaagtaaccaaggttccaaagaccttaataacttcatcaaagtgtatccaggaacagaaaaaagtactgaagggggccaaagtctcgacagcctcatt

SEQ ID NO: 326418 - DNA, 120 bp, Artificial Sequence
  ENSG00000136155_12 (sequence is synthesized)
aaagtgactcctgaaagaaacagaactaaccaagggaaccaagacttggaaaatcttatcaaagtgatcccttcagcaaacaaaagcagtgaacaaggtcttgatgaacatattaatgtc

SEQ ID NO: 326419 - DNA, 120 bp, Artificial Sequence
  ENSG00000136155_13 (sequence is synthesized)
cacaaacaaccaaagaaaccaagatcttgctaacctcatcaaagtaaatcctgcagtaatcagaaacaatcagagccaagacttggacaatcttattaaagtgaaaccttcagctcttag

SEQ ID NO: 326420 - DNA, 120 bp, Artificial Sequence
  ENSG00000136155_14 (sequence is synthesized)
aaacactaatcgagaccagaacctggaaaatttaattgaagtaaattctcatgtgtctgaaaacaagaatggaagctctaacactggagccaagcaggcaggaccacaggatactgttgt

SEQ ID NO: 326421 - DNA, 120 bp, Artificial Sequence
  ENSG00000136155_15 (sequence is synthesized)
gtacacaaggacatatgtggagaatagtaaatcacccaaggatggatatcaggagaatatctctggaaaatacatacaaactgtttattcaacttctgataggtctgtcattgaaagaga

SEQ ID NO: 326422 - DNA, 120 bp, Artificial Sequence
  ENSG00000136155_16 (sequence is synthesized)
tatgtgcacttactgccgaaaacccttgggtgtagaaactaaaatgattttagatgaattacaaatttgctgccattctacttgctttaagtgtgaaatatgcaagcagcctttggaaaa

SEQ ID NO: 326423 - DNA, 120 bp, Artificial Sequence
  ENSG00000136155_17 (sequence is synthesized)
tctacaagcgggtgatagtatttggatttatagacagacaatacactgtgaaccttgctactctaaaattatggcaaagtggattccataactctggcacaaggaaatcaagatgaaaag

SEQ ID NO: 326424 - DNA, 120 bp, Artificial Sequence
  ENSG00000136155_18 (sequence is synthesized)
cactcattaaggaattaaagttacaagttttatcttaataatatgtaatctagaaaagctttcacattgaagatcaactcttgtacaaaattaacaattctgttattgcataagtaatct

SEQ ID NO: 326425 - DNA, 120 bp, Artificial Sequence
  ENSG00000136155_19 (sequence is synthesized)
aattgtcttcaataaggtcacacacataaaaagagccatctggtctctggctagagttagcaataaaaagttcaaatggttccagattccagtgtcaaaggagtgatgcattacactcca

SEQ ID NO: 326426 - DNA, 120 bp, Artificial Sequence
  ENSG00000136155_20 (sequence is synthesized)
gccaggtccatccctgctccgtatgttggctgtgagtggtggtttccatttaaaccaagtttctcatttcttcacctttttttctctaagaatttggattcgtagacattgacatcccga

SEQ ID NO: 326427 - DNA, 120 bp, Artificial Sequence
  ENSG00000136155_21 (sequence is synthesized)
agaactgtcaaggaagcaagatatgctttcttcatctgcaaaagaaatactaacaacaattttcttatacagtttggcagaaagatgttaacataaaaagtttatatacctcaaaaatca

SEQ ID NO: 326428 - DNA, 120 bp, Artificial Sequence
  ENSG00000136155_22 (sequence is synthesized)
ctaaactttccagatctctgtcctattatttgtaacacaaggggcattggataaaatgatttctagggttccttttgcttcccaaattctctgattctaaagcagtttttagaatcatta

SEQ ID NO: 326429 - DNA, 120 bp, Artificial Sequence
  ENSG00000136155_23 (sequence is synthesized)
gctctttggaaacatatatgcatacatgtttgttaagcctattgaactaggtaggacatataaacaatttaattttagtgtcattgtttaatcacagacttagtgtttgaaaactgtgtt

SEQ ID NO: 326430 - DNA, 120 bp, Artificial Sequence
  ENSG00000136155_24 (sequence is synthesized)
ttaaaaacagaaacagattgatgggtaacaggtaaaatatgacatgtatagcttacatgttattatttgttaaattttctttgtatacatttcaaaatctgggtatacttataatccatt

SEQ ID NO: 326431 - DNA, 120 bp, Artificial Sequence
  ENSG00000136155_25 (sequence is synthesized)
agaagtaatggttatggactaaaaagatatgttctttagtatgttatatatactcatattacatagcagtatgtttacaaaaggcttataaaaataaaatgaactatcagttacatagaa

SEQ ID NO: 326432 - DNA, 120 bp, Artificial Sequence
  ENSG00000136155_26 (sequence is synthesized)
gagaaagggtaagtcaatctcctaccttgatggagctctttttattcaggttagcttttttacctcattaggaatgggagtgttatgctttcctttgtggcagtgaactcttgtactgct

SEQ ID NO: 326433 - DNA, 120 bp, Artificial Sequence
  ENSG00000136155_27 (sequence is synthesized)
ttattccgtattttcttaaataattaagagatgagtcaaattttaatttaaattaagaaatataaaggacaaaattgcacagcgagagccacattgagaagcctttctaaactgatttag

SEQ ID NO: 326434 - DNA, 120 bp, Artificial Sequence
  ENSG00000136155_28 (sequence is synthesized)
acacatttaaatgaaatgctattgtggaaattactaaaggtaagttaaggataattacatcaaagctctttttggtcatttggtcctgaaaacacctgacaccacattcagggacattct

SEQ ID NO: 326435 - DNA, 120 bp, Artificial Sequence
  ENSG00000136155_29 (sequence is synthesized)
tgattatacagatttcagagaaaattgtactgtaacctaactgacaagttttggtgttttttccaaagaagacaaaatctcgaatctgttgctaaagtgaatgccaggatgaataaaacg

SEQ ID NO: 326436 - DNA, 120 bp, Artificial Sequence
  ENSG00000136155_30 (sequence is synthesized)
agcagaaggtgagaactgaacagatgtctctaaatattggttattttctctcatattaattatgtgatattgagggcaccacatctttgtttggcttctctcttctgtgtctaatccctg

SEQ ID NO: 326437 - DNA, 120 bp, Artificial Sequence
  ENSG00000136155_31 (sequence is synthesized)
gtgccctgatcttcacttcaaagaatctacagtatattcgatctaaatttacatttacatatagcccaataaaatcctaaggattaattaaactatgttattgattggcaatttttatac

SEQ ID NO: 326438 - DNA, 120 bp, Artificial Sequence
  ENSG00000136155_32 (sequence is synthesized)
ttaaagccaatttaatgtcagtataataattttctccaaaagcttgaattaatcattgggaatacagaagatgtatgtgtctaatattatgggaatgttttgaaactgatataaactttt

SEQ ID NO: 326439 - DNA, 120 bp, Artificial Sequence
  ENSG00000136155_33 (sequence is synthesized)
gaacaaatgttttctagaagctacgtgtgcaagtacattgcacaatgctgtaattaatcagtgtacctatgtgtggactcaattaaaatgaagaattggataatctcatcaaaatgaaca

SEQ ID NO: 326440 - DNA, 120 bp, Artificial Sequence
  ENSG00000136156_0 (sequence is synthesized)
agtagccgcctctgccgccgcggagcttcccgaacctcttcagccgcccggagccgctcccggagcccggccgtagaggctgcaatcgcagccgggagcccgcagcccgcgccccgagcc

SEQ ID NO: 326441 - DNA, 120 bp, Artificial Sequence
  ENSG00000136156_1 (sequence is synthesized)
cgccgccgcccttcgagggcgccccaggccgcgccatggtgaaggtgacgttcaactccgctctggcccagaaggaggccaagaaggacgagcccaagagcggcgaggaggcgctcatca

SEQ ID NO: 326442 - DNA, 120 bp, Artificial Sequence
  ENSG00000136156_2 (sequence is synthesized)
tcccccccgacgccgtcgcggtggactgcaaggacccagatgatgtggtaccagttggccaaagaagagcctggtgttggtgcatgtgctttggactagcatttatgcttgcaggtgtta

SEQ ID NO: 326443 - DNA, 120 bp, Artificial Sequence
  ENSG00000136156_3 (sequence is synthesized)
ttctaggaggagcatacttgtacaaatattttgcacttcaaccagatgacgtgtactactgtggaataaagtacatcaaagatgatgtcatcttaaatgagccctctgcagatgccccag

SEQ ID NO: 326444 - DNA, 120 bp, Artificial Sequence
  ENSG00000136156_4 (sequence is synthesized)
ctgctctctaccagacaattgaagaaaatattaaaatctttgaagaagaagaagttgaatttatcagtgtgcctgtcccagagtttgcagatagtgatcctgccaacattgttcatgact

SEQ ID NO: 326445 - DNA, 120 bp, Artificial Sequence
  ENSG00000136156_5 (sequence is synthesized)
ttaacaagaaacttacagcctatttagatcttaacctggataagtgctatgtgatccctctgaacacttccattgttatgccacccagaaacctactggagttacttattaacatcaagg

SEQ ID NO: 326446 - DNA, 120 bp, Artificial Sequence
  ENSG00000136156_6 (sequence is synthesized)
ctggaacctatttgcctcagtcctatctgattcatgagcacatggttattactgatcgcattgaaaacattgatcacctgggtttctttatttatcgactgtgtcatgacaaggaaactt

SEQ ID NO: 326447 - DNA, 120 bp, Artificial Sequence
  ENSG00000136156_7 (sequence is synthesized)
acaaactgcaacgcagagaaactattaaaggtattcagaaacgtgaagccagcaattgtttcgcaattcggcattttgaaaacaaatttgccgtggaaactttaatttgttcttgaacag

SEQ ID NO: 326448 - DNA, 120 bp, Artificial Sequence
  ENSG00000136156_8 (sequence is synthesized)
tcaagaaaaacattattgaggaaaattaatatcacagcataaccccaccctttacattttgtgcagtgattattttttaaagtcttctttcatgtaagtagcaaacagggctttactatc

SEQ ID NO: 326449 - DNA, 120 bp, Artificial Sequence
  ENSG00000136156_9 (sequence is synthesized)
ttttcatctcattaattcaattaaaaccattaccttaaaatttttttctttcgaagtgtggtgtcttttatatttgaattagtaactgtatgaagtcatagataatagtacatgtcacct

SEQ ID NO: 326450 - DNA, 120 bp, Artificial Sequence
  ENSG00000136156_10 (sequence is synthesized)
taggtagtaggaagaattacaatttctttaaatcatttatctggatttttatgttttattagcattttcaagaagacggattatctagagaataatcatatatatgcatacgtaaaaatg

SEQ ID NO: 326451 - DNA, 120 bp, Artificial Sequence
  ENSG00000136156_11 (sequence is synthesized)
gaccacagtgacttatttgtagttgttagttgccctgctacctagtttgttagtgcatttgagcacacattttaattttcctctaattaaaatgtgcagtattttcagtgtcaaatatat

SEQ ID NO: 326452 - DNA, 120 bp, Artificial Sequence
  ENSG00000136156_12 (sequence is synthesized)
ttaactatttagagaatgatttccacctttatgttttaatatcctaggcatctgctgtaataatattttagaaaatgtttggaatttaagaaataacttgtgttactaatttgtataacc

SEQ ID NO: 326453 - DNA, 120 bp, Artificial Sequence
  ENSG00000136156_13 (sequence is synthesized)
catatctgtgcaatggaatataaatatcacaaagttgtttaactagactgcgtgttgtttttcccgtataataaaaccaaagaatagtttggttcttcaaatcttaagagaatccacata

SEQ ID NO: 326454 - DNA, 120 bp, Artificial Sequence
  ENSG00000136156_14 (sequence is synthesized)
aaaattcacttctatatatacaatgagtaaaatcacagattttttctttaaataaaaataagtcattttaataactaaaccagattctttgtggatactattaaagtaacatttaagcct

SEQ ID NO: 326455 - DNA, 120 bp, Artificial Sequence
  ENSG00000136156_15 (sequence is synthesized)
ttaaagtaacatttaagcctcaaccttgaatgatgttgtttaatataaaatgcttttatttttgatggaaaggcaatcaaagcctaaagtttccaaggaacgtaaaataactgtgcttct

SEQ ID NO: 326456 - DNA, 120 bp, Artificial Sequence
  ENSG00000136156_16 (sequence is synthesized)
ctgagaatgcccgcctcacaagtggaacattttgagttaataatgatgatttttatgtttctaaggttgcttcctctctgaaataattcagaatccacccccatttaataaaatacctat

SEQ ID NO: 326457 - DNA, 120 bp, Artificial Sequence
  ENSG00000136156_17 (sequence is synthesized)
gattcatttcacctcaagttcctaagacaaaaaatttcaattctgactttaggaggtcagagtttttaaagcttccaactcttaaaggatttagtctagaaaccaattctaattcaaaag

SEQ ID NO: 326458 - DNA, 120 bp, Artificial Sequence
  ENSG00000136156_18 (sequence is synthesized)
gatattatttactcatggcttttcatttcatttcagtaatattgtcagaactttaagtcagtgagttgggtattcaggaattaacaattttagaagacaatatgtttcaataaaatgaga

SEQ ID NO: 326459 - DNA, 120 bp, Artificial Sequence
  ENSG00000136156_19 (sequence is synthesized)
attggtttttcctactttccaggctctaaaattacatgaattttcagggagctgtgaacatttaggagcacattattcattcagcatcttttatatgcccaacatatgatattgtgttga

SEQ ID NO: 326460 - DNA, 120 bp, Artificial Sequence
  ENSG00000136156_20 (sequence is synthesized)
agatatatctgcaaagaagaaaaaaagccactgccgtcgtggagactcacaatctaggaaaagagagggacagcaaacaactcattacaatacattgggatcagtagtgtgagggagaaa

SEQ ID NO: 326461 - DNA, 120 bp, Artificial Sequence
  ENSG00000136156_21 (sequence is synthesized)
aacaggtctaggttctttggaaaacatttaggagagtcaatgagactttcagaatgtgaagtgcatgggattaggtcatggaagaagaccatgtatgtcatcttgaggacttcattctgt

SEQ ID NO: 326462 - DNA, 120 bp, Artificial Sequence
  ENSG00000136156_22 (sequence is synthesized)
agaccatgggccactattgaagttttgcattttggaaggagcttattagtttgttttcctgttgattatagtagtaatgcagtatcagggtagctgaactgcaataataatcccaacatc

SEQ ID NO: 326463 - DNA, 120 bp, Artificial Sequence
  ENSG00000136156_23 (sequence is synthesized)
tcactggcttcatgcagtaggaatatgctttcatcacagtccagtatggcaggcaacctccagactcccagggacccaaacttacactttactaaatgtaattctttcatttgaattttt

SEQ ID NO: 326464 - DNA, 120 bp, Artificial Sequence
  ENSG00000136156_24 (sequence is synthesized)
aaaggtttttgtataatcatcttagtaaaacatttgataattcttcacaacatttgcaatcattgatttggccagattggtctaacatggtacccatgattttacttcatttccagtact

SEQ ID NO: 326465 - DNA, 120 bp, Artificial Sequence
  ENSG00000136156_25 (sequence is synthesized)
attctgataatttcctttagagtcaattgagtagagagtacccctctcacctaagcttagtcatgtcccaggaattttggaactccaactgagatttcaggctcattattcattctaggg

SEQ ID NO: 326466 - DNA, 120 bp, Artificial Sequence
  ENSG00000136156_26 (sequence is synthesized)
ctgaatgaataatgtgccctttgaacccttgtgccatgctggaaactgtggtcttggtgtggcatggaaaaaccagagggtgagggatgtggatgagaagatgacagagaatcagacatg

SEQ ID NO: 326467 - DNA, 120 bp, Artificial Sequence
  ENSG00000136156_27 (sequence is synthesized)
cagagaggactgccaggtctcccagtgggttccagggagactcagctatccttccctcttcttgagttctgtcttagtccattcgggctactataacaaaataccatagactgagtggct

SEQ ID NO: 326468 - DNA, 120 bp, Artificial Sequence
  ENSG00000136156_28 (sequence is synthesized)
ttaaacaacagaagcttgtttctcacagttccagaagctggaaagttcaagatcaagtcacctgcagattcagtgtctgatgaggtcctccttcctcacagaaagctctcttctctctgt

SEQ ID NO: 326469 - DNA, 120 bp, Artificial Sequence
  ENSG00000136156_29 (sequence is synthesized)
gaccttatatcacagatgactctgggttcctcttacaaggacactagttccattcatgggggttccactctcatgacctaacacctctcaaaggccccatttcctaatactgtcaccttg

SEQ ID NO: 326470 - DNA, 120 bp, Artificial Sequence
  ENSG00000136156_30 (sequence is synthesized)
ggggtaaggatttcaacatgaattctggggggacacaaacattcaaaccatagcaagttccataatgcaccccatcatatgtgtgtgtgtgtgtatttatttatttatctaagatagctc

SEQ ID NO: 326471 - DNA, 120 bp, Artificial Sequence
  ENSG00000136156_31 (sequence is synthesized)
tagtttgctgctttgcaacacattctgcccctattgcattggtttaaaaaaaaagtacagaagtcaagatgagactatataaatcttgacaagttgttggccgtgattgctcttttgtga

SEQ ID NO: 326472 - DNA, 120 bp, Artificial Sequence
  ENSG00000136156_32 (sequence is synthesized)
tgcaggagtgagaatctggagaatctggcttaagaggtggctgagaattaaaataataggcatgaaaatgcttcatacagctctgtacagttgttgacagtgccttttttgaaacctatc

SEQ ID NO: 326473 - DNA, 120 bp, Artificial Sequence
  ENSG00000136156_33 (sequence is synthesized)
actgctatatgttagcaagcaaacactgatcttgttttgtaatgtgtaattgttcacttctgctttccctgtatccctttttagattccacacccatattagtgagaagcaagaaaaaaa

SEQ ID NO: 326474 - DNA, 120 bp, Artificial Sequence
  ENSG00000136156_34 (sequence is synthesized)
aatgtacacagtgtcctaaatgttgtttatctcgaataatagaagtaggagtgtaaaacttaaaggctgattaataatgcaaatgaaaaggcaaatggattattgaatagaaaaggtcta

SEQ ID NO: 326475 - DNA, 120 bp, Artificial Sequence
  ENSG00000136156_35 (sequence is synthesized)
gattctatgtttgaatgtggttatgaattaatatgggcagaatctctaagattctgctaagtgaacatttagtagtttactagacatcttctcttccacctagcaaagagtttgttgccc

SEQ ID NO: 326476 - DNA, 120 bp, Artificial Sequence
  ENSG00000136156_36 (sequence is synthesized)
agagttatataaatcctactctattgcacactaatctttgcatgtttaactctttgggacttaggttcctagataaggacttcatgtgtatctatttagaaaaagaacatttcttcattt

SEQ ID NO: 326477 - DNA, 120 bp, Artificial Sequence
  ENSG00000136156_37 (sequence is synthesized)
ccacaaagctacacagccatcagttcgttcaatatcttgtccaaagttattgctagcgttcttctttctgagtctttgtggctaatgcttttttgaggaagaagcatgatttagtctcag

SEQ ID NO: 326478 - DNA, 120 bp, Artificial Sequence
  ENSG00000136156_38 (sequence is synthesized)
ctctctattgatcattttaggcttttatcttactgaaaaaattaagcacaatttaagattttttttgaaatatttactgaattttgaggccataaattatttcctgatagcacacatgta

SEQ ID NO: 326479 - DNA, 120 bp, Artificial Sequence
  ENSG00000136156_39 (sequence is synthesized)
tgggttgtagattccacacttttaatcttccagccacctattgcagattggttctgagaagcaggatgagtgggagtgggcttaggggtcaaaattgagacctaagtggtataaaacaag

SEQ ID NO: 326480 - DNA, 120 bp, Artificial Sequence
  ENSG00000136156_40 (sequence is synthesized)
ataatcctagcttcctcccacttaaaataatttgatgggacttctgtatctgatttttaagcttgcatttgtgtttatattttcattgtaaaaatatcaaataatacagtttttgaaggt

SEQ ID NO: 326481 - DNA, 120 bp, Artificial Sequence
  ENSG00000136156_41 (sequence is synthesized)
aaaaagtaaatgttcccgcccttctaccatcctccttcctcagtcccattccccaacagtttaacgtgcgatacaataatgtgtgacacaaaatgacctagttcttgccctagtgactaa

SEQ ID NO: 326482 - DNA, 120 bp, Artificial Sequence
  ENSG00000136156_42 (sequence is synthesized)
aacgccttcttctttccaaacagtgtggtcttatccccgtcgcaaatggaggatatttaagaaacccaagccagaaaccccacagtcttcacagtcactgtgtcctccacctcctagcag

SEQ ID NO: 326483 - DNA, 120 bp, Artificial Sequence
  ENSG00000136156_43 (sequence is synthesized)
cttcctgctgttctgctctagtggttctctctgcttccccacacccacccgtaagccacaacaatctttccaaaacacgaacttgatggtttcattgtcacaccccagcttaaaacactt

SEQ ID NO: 326484 - DNA, 120 bp, Artificial Sequence
  ENSG00000136156_44 (sequence is synthesized)
tcctggcttcccctggttcttaggataaagaccaaaatacttaatgctgcacagtccagtcccaacccactctccagcttcatcttaatcacacccctctttgctcctagtgtcctacca

SEQ ID NO: 326485 - DNA, 120 bp, Artificial Sequence
  ENSG00000136156_45 (sequence is synthesized)
cattgcctgacttactgtttcttggtaaatgctattcttacttcctgaagattatttccatctcctcacccgacacccttcagttagcttccactcaaccttcagaatttagttcaggtg

SEQ ID NO: 326486 - DNA, 120 bp, Artificial Sequence
  ENSG00000136156_46 (sequence is synthesized)
acccttcctcaagagaagattttcctgaaccattaggaaaggcttctcttgtttctcagtctcatagcatcatctgtctcttttttgtgacttgaatataattaatattttatattttgt

SEQ ID NO: 326487 - DNA, 120 bp, Artificial Sequence
  ENSG00000136156_47 (sequence is synthesized)
ccttgttgcttgtttggttaatagatttccaccactagactgctcaatacgttagtagggcacctgacacatagttgcagctcttatttattgaatgaatgaatgattccttcccgtacc

SEQ ID NO: 326488 - DNA, 120 bp, Artificial Sequence
  ENSG00000136156_48 (sequence is synthesized)
accctagtcttgcccactgtcatttttattctgggtattatatttcccaaccagttgtctgactttctcctcagatctcatccccatgggtctgagtgagttgccttgaatataagattc

SEQ ID NO: 326489 - DNA, 120 bp, Artificial Sequence
  ENSG00000136156_49 (sequence is synthesized)
agtgatggtgtcctgctgcacttaagagaaaatccttttttcaagccctaaaatcctgccctcactagacttctctcaccatttctctgtttgcatcctagccttttagttttggcctca

SEQ ID NO: 326490 - DNA, 120 bp, Artificial Sequence
  ENSG00000136156_50 (sequence is synthesized)
tataagcttgcagccctgcctgaaacagttgtctctgtccccactctaccccctgccctccacaaagaaaagttaactcttactcatctttcagatctcagactaaaagtttcctcagag

SEQ ID NO: 326491 - DNA, 120 bp, Artificial Sequence
  ENSG00000136156_51 (sequence is synthesized)
atgccaccatagctctctatttctcatacctttcatgatacttcatcacctgtcttcatgaagtcctcctctagactattagcaaaatgctcatactgtgtcctcagtatttggcacata

SEQ ID NO: 326492 - DNA, 120 bp, Artificial Sequence
  ENSG00000136156_52 (sequence is synthesized)
ataggttttcttgacactgaaggaaggaataaacatctggtaactatagctagaaaaaaaggaaatacggtatctacttcactaaaaccaaagggggtttttttgggcagacaatcttca

SEQ ID NO: 326493 - DNA, 120 bp, Artificial Sequence
  ENSG00000136156_53 (sequence is synthesized)
ttattcagatggaaattaatgtttgttgaatgaatgagctacatttcatggattaactccatgaaatggagttcagctagtaagggttatactttgaggctatttcatcttgatgggctt

SEQ ID NO: 326494 - DNA, 120 bp, Artificial Sequence
  ENSG00000136156_54 (sequence is synthesized)
gttgttcaaagttagagcctcattttaagtaaaatgttctgtgggggccatattaagattttcatatgacagaagtgtatatatatccacaaatgtttcaagccaagattatgtcttctt

SEQ ID NO: 326495 - DNA, 120 bp, Artificial Sequence
  ENSG00000136156_55 (sequence is synthesized)
ccataatgccaccttcttctaggatagtatttttgggccagatggttttccacatttaaaacataccaacattcttttaaggcccagtgattatcaaaagggattggcactacattttaa

SEQ ID NO: 326496 - DNA, 120 bp, Artificial Sequence
  ENSG00000136156_56 (sequence is synthesized)
aatgtaggggggatttttgattgtcacaggactagaggatgccatttgtatttagtagatgaggccaggcaggatgctaaatgtcttaaaagtccgggagtcctgcacaaaaaattactg

SEQ ID NO: 326497 - DNA, 120 bp, Artificial Sequence
  ENSG00000136156_57 (sequence is synthesized)
cccttcttgatttgccaattatgcccctgctgggaagcatgaaaggagagagaagagctttcagaatgtcagggataaatatatccattaagccttcagactaagatgcaggaatagttt

SEQ ID NO: 326498 - DNA, 120 bp, Artificial Sequence
  ENSG00000136156_58 (sequence is synthesized)
tccatttgggtatgaatacggcaagttcttagaacatttcttaaaacataattagccaaatactagtgtaacagctacaacttatctagttttaatcaactccagggaacattacacttt

SEQ ID NO: 326499 - DNA, 120 bp, Artificial Sequence
  ENSG00000136156_59 (sequence is synthesized)
atttaacccctaattatctgataacccaagttctgtcagaaacactgctgaggcatccaggaagatgagcctgtgaaatttgagaatccttcatgtctctggaatgagtccctagattct

SEQ ID NO: 326500 - DNA, 120 bp, Artificial Sequence
  ENSG00000136156_60 (sequence is synthesized)
agccctgcagctagctgacactctaaaaaattatgagtgccttcctttagctccccatagaaatgtctttgtataaccatggcatgatattattctcttgacttttgttgaggattgata

SEQ ID NO: 326501 - DNA, 120 bp, Artificial Sequence
  ENSG00000136156_61 (sequence is synthesized)
gaaataaaaatgagccagaaatgtttcttcagcttttgtaaagtgctgttaaaagcattatgtcatatctagtacttcttatctaagtattttaaaatttagtgttaggaaaattttttt

SEQ ID NO: 326502 - DNA, 120 bp, Artificial Sequence
  ENSG00000136156_62 (sequence is synthesized)
cacataggatacatgttaatattaggtagtacatctaaagaattcatttgcttcccttttgccttggttgctgggaaactcagagccaaactcggtgcttagattaattactttcagcct

SEQ ID NO: 326503 - DNA, 120 bp, Artificial Sequence
  ENSG00000136156_63 (sequence is synthesized)
aggtttttctgtatatcaccctttcggtagggcttgaagtaacccttcagtttgctcatattttgttgtgagttttatagatagtttacatgcaacgaaatgcatatatcttaagtgttc

SEQ ID NO: 326504 - DNA, 120 bp, Artificial Sequence
  ENSG00000136156_64 (sequence is synthesized)
aactcagtgagttttgacacttttctttgtccatgttaacaatcatcaaaacattttcattgccccagaaaataccattgtgctcctttccggcaaatattccttccctctgctaaaact

SEQ ID NO: 326505 - DNA, 120 bp, Artificial Sequence
  ENSG00000136156_65 (sequence is synthesized)
actttttcatttctatgaccatagttcagtttttggctattcttgaactttatttgaatggaatcgtacatatataatctttttgtttggcttttaaaactcagtataacgttttgacat

SEQ ID NO: 326506 - DNA, 120 bp, Artificial Sequence
  ENSG00000136156_66 (sequence is synthesized)
acatttgtccatgttgttgcatgactcagcagttctttcttttcagttgctgtgtagtagtccatttcttttggttttgtgtgtgtgtgtgtgctttttaaatttattttttattttttt

SEQ ID NO: 326507 - DNA, 120 bp, Artificial Sequence
  ENSG00000136156_67 (sequence is synthesized)
agtggcatcatctcggctcactgcaatttctgtctcccaggctcaagccatcctctaacctcagcctcccgagtagctaagactctacaggcgtatgccaccatacctagtttgtttttg

SEQ ID NO: 326508 - DNA, 89 bp, Artificial Sequence
  ENSG00000136156_68 (sequence is synthesized)
gctcaagccatcctctaacctcagcctcccgagtagctaagactctacaggcgtatgccaccatacctagtttgtttttgttattttcc

SEQ ID NO: 326509 - DNA, 120 bp, Artificial Sequence
  ENSG00000136156_69 (sequence is synthesized)
tcccaaagtgctaggattacaagtgtgaggcactgtgccctgccagtattccattttttgtgtataccacaatttatcatttttttctgtgtaggtattttcattgtttccaagttggga

SEQ ID NO: 326510 - DNA, 120 bp, Artificial Sequence
  ENSG00000136156_70 (sequence is synthesized)
agttgggaagtatgaataaagttgctatgaacatgcatgtacaagtctttgtagatagctcatgttttaaaaagtgtttgtttaatgatttcattgcaaaatcatctttattgtaaacat

SEQ ID NO: 326511 - DNA, 120 bp, Artificial Sequence
  ENSG00000136156_71 (sequence is synthesized)
atctttttgagggtagattggtaaaatatacataataaatacatgacaatgcaggagtccaagtattattaggtttacagtcataacaaacaccaagaaccatttataaatttcagtttc

SEQ ID NO: 326512 - DNA, 120 bp, Artificial Sequence
  ENSG00000136156_72 (sequence is synthesized)
tcattgttttagaatggaaggtctaaccaaatatgtaatgtatcccttcaagtaaactagtataacttgggtaccttctcatataaattccccttaaggcatacgttgctgtcttttcca

SEQ ID NO: 326513 - DNA, 120 bp, Artificial Sequence
  ENSG00000136156_73 (sequence is synthesized)
aattcccattttgcttgtccaataggcattatcagatacaacatgttcaaaggcaaacttgattttcctcccatggtttcctcatctcagctcctttttttttccagttgcacaggctaa

SEQ ID NO: 326514 - DNA, 120 bp, Artificial Sequence
  ENSG00000136156_74 (sequence is synthesized)
aaataggaagtcattctagattcctctctttttcataaacctcacatcaaatccatcagccaatctggtgtgctctaccttcaagatacggattatccagaattcagccgcttctcactg

SEQ ID NO: 326515 - DNA, 120 bp, Artificial Sequence
  ENSG00000136156_75 (sequence is synthesized)
tctctactgctaacatagtagtcaaagctgctatcatctcttgcttggattggtgcaatggcctcacaactgatcttcctgcttccatacttgacccctagagcctcttctaaacagagt

SEQ ID NO: 326516 - DNA, 120 bp, Artificial Sequence
  ENSG00000136156_76 (sequence is synthesized)
agctagagcgatcttttctaaatctaagccacatcatgtcactcccctgctcaaatcccaacattttattcagaataaaagtcgaacaatgccctacctgtaggtaatctaggcctccaa

SEQ ID NO: 326517 - DNA, 120 bp, Artificial Sequence
  ENSG00000136156_77 (sequence is synthesized)
agctcttcttacatcacctcctgtaactctccccctttctcactcctctacagccacacagctgcctcactttcctttgaacgtaccaagggcaatcctgcttcagagcctttgcacttg

SEQ ID NO: 326518 - DNA, 120 bp, Artificial Sequence
  ENSG00000136156_78 (sequence is synthesized)
ctgtttctgggccaggaattccacaccctccttccctcacatgtatcccaaggctcactgccttccttcagttaagtctgctggaatgtcacttcattaggtattgcctgatcacctttt

SEQ ID NO: 326519 - DNA, 120 bp, Artificial Sequence
  ENSG00000136156_79 (sequence is synthesized)
ctaaagtgagtctcacctccaccctcaatgctggcaatgtctgtctgtagtgtattcttaacaatacagattagcacaatgcaggccagaccatgaagactgtttcaagttcgaggatgg

SEQ ID NO: 326520 - DNA, 120 bp, Artificial Sequence
  ENSG00000136156_80 (sequence is synthesized)
gcaaaaataatgactaggacttggctcaagattcctcaaacagccaataaacaatgcaaagaataaatgagagagtaattggagacaagctttcccttggcttcccttcttttctcacag

SEQ ID NO: 326521 - DNA, 120 bp, Artificial Sequence
  ENSG00000136156_81 (sequence is synthesized)
aggcttttccagaaggtggtcatttccatagcccatgtggaatgagatgtccactagggcagagaagcacagaaccgtgggcactgcttcccttcctttaaccctatcatattgctgccc

SEQ ID NO: 326522 - DNA, 120 bp, Artificial Sequence
  ENSG00000136156_82 (sequence is synthesized)
agtgagcaatatggtcattggtcaagaaggcttatgcccaggtatccctgtggctatgagcattgctccttatctatgcctctgctcttagacttttccattctgccctcttaggggcct

SEQ ID NO: 326523 - DNA, 120 bp, Artificial Sequence
  ENSG00000136156_83 (sequence is synthesized)
tcctggccatgaccacactaccttatttttctctatagtacttatcaccatctgacatgtatttatgtttgtatttgtttattgtctgtctctacaaataaaatgtaaattccctaaaaa

SEQ ID NO: 326524 - DNA, 120 bp, Artificial Sequence
  ENSG00000136156_84 (sequence is synthesized)
atacttgtacaaatattttgcacttcaaagtttctctcttgttgcccagactggagtccaatggcgcgatctcggctcactgcaccctctgtctcccgggttcaggctggagtgcggtgg

SEQ ID NO: 326525 - DNA, 120 bp, Artificial Sequence
  ENSG00000136156_85 (sequence is synthesized)
tgcaatcacagctcactgtagcctcaacctcttgggctcaggcaatcctcccgcctcaacctccccaggagtagctaggactacagccagatgacgtgtactactgtggaataaagtaca

SEQ ID NO: 326526 - DNA, 120 bp, Artificial Sequence
  ENSG00000136156_86 (sequence is synthesized)
ttcggtagtggcaggtgaacttcacctggagaggggacgaagggacagtccgcccgaattttacctagggccgtgctaggcatcttaagcagagaaggcaaattcagtgtctcctgggct

SEQ ID NO: 326527 - DNA, 120 bp, Artificial Sequence
  ENSG00000136156_87 (sequence is synthesized)
gagagagcccggcgctcccgtttcctgtgggtccgcagctcctttgtaaggaagcttgaacagcacttggactaagtccagcaactgtaagcgtcttaattttaaaagcgtttctttacc

SEQ ID NO: 326528 - DNA, 120 bp, Artificial Sequence
  ENSG00000136158_0 (sequence is synthesized)
ggggggactgggaaagagaagaggggcggaggtagggagtccagctttgaagaaggaggccagggatcggatcggcagaaatcacttaaaaaataaaaacaaaaaagcccccttttattt

SEQ ID NO: 326529 - DNA, 120 bp, Artificial Sequence
  ENSG00000136158_1 (sequence is synthesized)
caaagatgctactttgactgcaagcaaatctgcaccgaaagtttacagctccgggagctgggtcctgcgcgcccggagtgagcagtgggaccctggaaaatgccctttttttaaaaagcc

SEQ ID NO: 326530 - DNA, 120 bp, Artificial Sequence
  ENSG00000136158_2 (sequence is synthesized)
atttttctttcactttaagaaatatgatatcttttttttttctctcgacccaaaaggagataggcgtgtgcagattacaggcaatgcccccttcggtcagtgcagcgtggagtcgccgtg

SEQ ID NO: 326531 - DNA, 120 bp, Artificial Sequence
  ENSG00000136158_3 (sequence is synthesized)
tgtgcgtgggttggacttgtgcgtcctggctgcgtgtctcaggcagggctttcgtgctcgcagtgtcggggtgggaaacctgtgccggatgtccgaggggctttgcagaaagcctggcag

SEQ ID NO: 326532 - DNA, 120 bp, Artificial Sequence
  ENSG00000136158_4 (sequence is synthesized)
tgggcggcgtgacctctgcctgggggcggagtggctccttggggctggaaggcagttctcttgagttgggggagatcttagctggggagagggaggcgggggaagtgtgctcctgcattt

SEQ ID NO: 326533 - DNA, 120 bp, Artificial Sequence
  ENSG00000136158_5 (sequence is synthesized)
cgtgacacgtacccttcggaggcgcccgcggcccccgcctgtctgagtctggggatcgtaagcaggggggcagcctggcccatggacagcgtcagtccgcctggagaaactcccctgggg

SEQ ID NO: 326534 - DNA, 120 bp, Artificial Sequence
  ENSG00000136158_6 (sequence is synthesized)
atcggctgtgtcccacctgctggggacggtgttggggcacagagaggcgataaactaagtgaaagcaaagagcagcgttgtcttctgccattcttttggaggtgaggagatccggtttcc

SEQ ID NO: 326535 - DNA, 120 bp, Artificial Sequence
  ENSG00000136158_7 (sequence is synthesized)
agcactgccttgctccgaattgggagacgtttgtcacctgccttgttcgctgtggcctctattctaaagagcggagatcggataaaggagttcagatgtgttctaagcctgctggagtga

SEQ ID NO: 326536 - DNA, 120 bp, Artificial Sequence
  ENSG00000136158_8 (sequence is synthesized)
ccacacttccaagacctgatggaggccagagctcagagtggcaacgggtcgcagcccttgctgcagacgccccgtgacggtggcagacagcgtggggagcccgaccccagagacgccctc

SEQ ID NO: 326537 - DNA, 120 bp, Artificial Sequence
  ENSG00000136158_9 (sequence is synthesized)
acccagcaggtacatgtcttgtctctggatcagatcagagccatccgaaacaccaatgagtacacagaggggcctactgtcgtcccaagacctgggctcaagcctgctcctcgcccctcc

SEQ ID NO: 326538 - DNA, 120 bp, Artificial Sequence
  ENSG00000136158_10 (sequence is synthesized)
actcagcacaaacacgagagactccacggtctgcctgagcaccgccagcctcctaggctccagcactcgcaggtccattcttctgcacgagcccctctgtccagatccataagcacggtc

SEQ ID NO: 326539 - DNA, 120 bp, Artificial Sequence
  ENSG00000136158_11 (sequence is synthesized)
atcatccttctcctccgggcctgttgctgatggcataatccgggtgcaacccaaatctgagctcaagccaggtgagcttaagccactgagcaaggaagatttgggcctgcacgcctacag

SEQ ID NO: 326540 - DNA, 120 bp, Artificial Sequence
  ENSG00000136158_12 (sequence is synthesized)
gtgtgaggactgtggcaagtgcaaatgtaaggagtgcacctacccaaggcctctgccatcagactggatctgcgacaagcagtgcctttgctcggcccagaacgtgattgactatgggac

SEQ ID NO: 326541 - DNA, 120 bp, Artificial Sequence
  ENSG00000136158_13 (sequence is synthesized)
ttgtgtatgctgtgtgaaaggtctcttctatcactgttctaatgatgatgaggacaactgtgctgacaacccatgttcttgcagccagtctcactgttgtacacgatggtcagccatggg

SEQ ID NO: 326542 - DNA, 120 bp, Artificial Sequence
  ENSG00000136158_14 (sequence is synthesized)
tgtcatgtccctctttttgccttgtttatggtgttaccttccagccaagggttgccttaaattgtgccaggggtgttatgaccgggttaacaggcctggttgccgctgtaaaaactcaaa

SEQ ID NO: 326543 - DNA, 120 bp, Artificial Sequence
  ENSG00000136158_15 (sequence is synthesized)
cacagtttgctgcaaagttcccactgtcccccctaggaactttgaaaaaccaacatagcatcattaatcaggaatattacagtaatgaggattttttctttctttttttaatacacatat

SEQ ID NO: 326544 - DNA, 120 bp, Artificial Sequence
  ENSG00000136158_16 (sequence is synthesized)
gcaaccaactaaacagttataatcttggcactgttaatagaaaggtgggatagtctttgctgtttgcggtgaaatgctttttgtccatgtgccgttttaactgatatgcttgttagaact

SEQ ID NO: 326545 - DNA, 120 bp, Artificial Sequence
  ENSG00000136158_17 (sequence is synthesized)
cagctaatggagctcaaagtatgagatacagaacttggtgacccatgtattgcataagctaaagcaacacagacactcctaggcaaagtttttgtttgtgaatagtacttgcaaaacttg

SEQ ID NO: 326546 - DNA, 120 bp, Artificial Sequence
  ENSG00000136158_18 (sequence is synthesized)
taaattagcagatgacttttttccattgttttctccagagagaatgtgctatatttttgtatatacaataatatttgcaactgtgaaaaacaagttgtgccatactacatggcacagaca

SEQ ID NO: 326547 - DNA, 120 bp, Artificial Sequence
  ENSG00000136158_19 (sequence is synthesized)
caaaatattatactaatatgttgtacattcggaagaatgtgaatcaatcagtatgtttttagattgtattttgccttacagaaagcctttattgtaagactctgatttccctttggactt

SEQ ID NO: 326548 - DNA, 120 bp, Artificial Sequence
  ENSG00000136158_20 (sequence is synthesized)
tctgatttccctttggacttcatgtatattgtacagttacagtaaaattcaacctttattttctaattttttcaacatattgtttagtgtaaagaatatttatttgaagttttattattt

SEQ ID NO: 326549 - DNA, 120 bp, Artificial Sequence
  ENSG00000136158_21 (sequence is synthesized)
ttaagaggcatcttacaaattttgccccttttatgaggatgtgatagttgctgcaaatgaggggttacagatgcatatgtccaatataaaatagaaaatatattaacgtttgaaattaaa

SEQ ID NO: 326550 - DNA, 80 bp, Artificial Sequence
  ENSG00000136158_22 (sequence is synthesized)
agtctgcaccgccgagagctgcgcgccgcagcgctagcggaggagaggggccggcggagcgcgcagcgcccaggcccccg

SEQ ID NO: 326551 - DNA, 120 bp, Artificial Sequence
  ENSG00000136158_23 (sequence is synthesized)
tccgctacgacgcggccccggccgcaccacttggcgatctggctttaggttctccgtaaggccgttttcttttcccattcgctcatctgccaggaaaagggacttgccgttggcgcttcg

SEQ ID NO: 326552 - DNA, 120 bp, Artificial Sequence
  ENSG00000136158_24 (sequence is synthesized)
gcctcttgttcattgagaaaaaagaggaaatactccgcgtgcgcttgtagaaggggagtcgtctccagctccgaaccccggagtgttcatcagcggggaatctggctccgaattctcttt

SEQ ID NO: 326553 - DNA, 120 bp, Artificial Sequence
  ENSG00000136158_25 (sequence is synthesized)
ttttctcccgccgattgctcggaagttggtctaaagcagaggttggaaagaaaggaaaaaagtttgcatcgagactggatttatttgcacatcgcagaaagaagagaatccaagggagag

SEQ ID NO: 326554 - DNA, 120 bp, Artificial Sequence
  ENSG00000136159_0 (sequence is synthesized)
aggcgcgtcctcccgcgcgctatgacggccagcgcacagccgcgcgggcggcggccaggagtcggagtcggagtcgtggtgaccagctgcaagcatccgcgttgcgtcctcctggggaag

SEQ ID NO: 326555 - DNA, 120 bp, Artificial Sequence
  ENSG00000136159_1 (sequence is synthesized)
aggaaaggctcggttggagctggcagtttccaactccctggaggtcatctggagttcggtgaaacctgggaagaatgtgctcaaagggaaacctgggaagaagcagctcttcacctgaaa

SEQ ID NO: 326556 - DNA, 120 bp, Artificial Sequence
  ENSG00000136159_2 (sequence is synthesized)
aatgttcactttgcctcagttgtgaattctttcattgagaaggagaattaccattatgttactatattaatgaaaggagaagtggatgtgactcatgattcagaaccaaagaatgtagag

SEQ ID NO: 326557 - DNA, 120 bp, Artificial Sequence
  ENSG00000136159_3 (sequence is synthesized)
cctgaaaaaaatgaaagttgggagtgggttccttgggaagaactacctcccctggaccagcttttctggggactgcgttgtttaaaagaacaaggctatgatccatttaaagaagatctg

SEQ ID NO: 326558 - DNA, 120 bp, Artificial Sequence
  ENSG00000136159_4 (sequence is synthesized)
aaccatctggtgggatacaaaggaaatcatctctaggtggccgagaagatttgattttctttaaaaagacaagaataaggtctggttagggaatgaaaaatgtatacatttcggaacaac

SEQ ID NO: 326559 - DNA, 120 bp, Artificial Sequence
  ENSG00000136159_5 (sequence is synthesized)
tccattttatctaaaaaagttcttgtgattgccagtttatttgcagtctcttaatgtatcccccactctttcagccagtacttgagaaaatttttctgaaatatgtcattgaattgtatt

SEQ ID NO: 326560 - DNA, 120 bp, Artificial Sequence
  ENSG00000136159_6 (sequence is synthesized)
ccagacacagaatacatgataaatactgatattatgggtaatctgctttccatatttacctatgatatttactgtgcagtttgtcattactagcttgcatggagtaggatgcagtcaaat

SEQ ID NO: 326561 - DNA, 120 bp, Artificial Sequence
  ENSG00000136159_7 (sequence is synthesized)
ttgccttagtgtttctgttcaaatagagacctgaattcaaatattgtagtttaggttcaaacagagtatggctgttgcaaaatttaccaaatttgttgattacctcttttattaaagaaa

SEQ ID NO: 326562 - DNA, 120 bp, Artificial Sequence
  ENSG00000136159_8 (sequence is synthesized)
atattgtgacaatttttgcaacttacagggaataggacaggtcattagggtgtatttcccaggtttccaattgagaatctaaaccaagagaagtgagacaaaccatctaatatctgtatc

SEQ ID NO: 326563 - DNA, 120 bp, Artificial Sequence
  ENSG00000136159_9 (sequence is synthesized)
atgctattaataggctgtgatgttgagtttctcacttactctttctgaggtccagggtccttatatgaagagattcatatatatgaagagattcgtctagagcagtggttgtcaaagtgt

SEQ ID NO: 326564 - DNA, 120 bp, Artificial Sequence
  ENSG00000136159_10 (sequence is synthesized)
ggtctgggggggcctcaagagcctttcaagggtattctaggtcaaagctgtttttataacactaagacatcatttcactatttatagcttttccttttttttatttgagaaggagtcttg

SEQ ID NO: 326565 - DNA, 87 bp, Artificial Sequence
  ENSG00000136159_11 (sequence is synthesized)
tttatagcttttccttttttttatttgagaaggagtcttgctctgttgcccacatgcctccgccacctgggttcaagcaattctcct

SEQ ID NO: 326566 - DNA, 120 bp, Artificial Sequence
  ENSG00000136159_12 (sequence is synthesized)
ttacaggtatgagccacaacgcccagccatcatttatctttttcactcattttttcatgagtatgcagaggagttttcaagaggctatctggtgtgatattgtaataggctgaatgcaaa

SEQ ID NO: 326567 - DNA, 120 bp, Artificial Sequence
  ENSG00000136159_13 (sequence is synthesized)
agcagatacaagattccagctttcgtctgtcatcagacattgaagagatttggagaaatgtaaagcagcagtactcttctcactaatttttgttgtggttagttagaaaaatggttattt

SEQ ID NO: 326568 - DNA, 120 bp, Artificial Sequence
  ENSG00000136159_14 (sequence is synthesized)
ttagtgggttttaatatgtgaaaaaaataaaattagctatttgccaaaaatgtttttatgtgtttatatatacttggttcttgttacttgcaaatgattaataaaaattttaagaaattt

SEQ ID NO: 326569 - DNA, 120 bp, Artificial Sequence
  ENSG00000136160_0 (sequence is synthesized)
attcgggcttggtgttgaattaaaatcattgattgaaccttattctggggcttcggtttggcttactagtttgggattttaaaaaaataaaaattaagcctatagagagggcaaattaaa

SEQ ID NO: 326570 - DNA, 120 bp, Artificial Sequence
  ENSG00000136160_1 (sequence is synthesized)
attaggttgggtaaaggaaggagcgcgagtgtttgaagccgtttggagggaacagcggtttccaagttcctgctgacttgagaagtctctgcgggtttccgaatctccggcgcactcctg

SEQ ID NO: 326571 - DNA, 120 bp, Artificial Sequence
  ENSG00000136160_2 (sequence is synthesized)
ggcgcgctgcgggagctgtagctcagccagccagggagtagcggctttcatccgccgggaggagtctttcgagttcaatcgcggggctctgaaactgcggagcggccaccggacgccttc

SEQ ID NO: 326572 - DNA, 120 bp, Artificial Sequence
  ENSG00000136160_3 (sequence is synthesized)
tggagcaggtagcagcatgcagccgcctccaagtctgtgcggacgcgccctggttgcgctggttcttgcctgcggcctgtcgcggatctggggagaggagagaggcttcccgcctgacag

SEQ ID NO: 326573 - DNA, 120 bp, Artificial Sequence
  ENSG00000136160_4 (sequence is synthesized)
ggccactccgcttttgcaaaccgcagagataatgacgccacccactaagaccttatggcccaagggttccaacgccagtctggcgcggtcgttggcacctgcggaggtgcctaaaggaga

SEQ ID NO: 326574 - DNA, 120 bp, Artificial Sequence
  ENSG00000136160_5 (sequence is synthesized)
caggacggcaggatctccgccacgcaccatctcccctcccccgtgccaaggacccatcgagatcaaggagactttcaaatacatcaacacggttgtgtcctgccttgtgttcgtgctggg

SEQ ID NO: 326575 - DNA, 120 bp, Artificial Sequence
  ENSG00000136160_6 (sequence is synthesized)
gatcatcgggaactccacacttctgagaattatctacaagaacaagtgcatgcgaaacggtcccaatatcttgatcgccagcttggctctgggagacctgctgcacatcgtcattgacat

SEQ ID NO: 326576 - DNA, 120 bp, Artificial Sequence
  ENSG00000136160_7 (sequence is synthesized)
ccctatcaatgtctacaagctgctggcagaggactggccatttggagctgagatgtgtaagctggtgcctttcatacagaaagcctctgtgggaatcactgtgctgagtctatgtgctct

SEQ ID NO: 326577 - DNA, 120 bp, Artificial Sequence
  ENSG00000136160_8 (sequence is synthesized)
gagtattgacagatatcgagctgttgcttcttggagtagaattaaaggaattggggttccaaaatggacagcagtagaaattgttttgatttgggtggtctctgtggttctggctgtccc

SEQ ID NO: 326578 - DNA, 120 bp, Artificial Sequence
  ENSG00000136160_9 (sequence is synthesized)
tgaagccataggttttgatataattacgatggactacaaaggaagttatctgcgaatctgcttgcttcatcccgttcagaagacagctttcatgcagttttacaagacagcaaaagattg

SEQ ID NO: 326579 - DNA, 120 bp, Artificial Sequence
  ENSG00000136160_10 (sequence is synthesized)
ccatcactgcatttttttatacactaatgacctgtgaaatgttgagaaagaaaagtggcatgcagattgctttaaatgatcacctaaagcagagacgggaagtggccaaaaccgtctttt

SEQ ID NO: 326580 - DNA, 120 bp, Artificial Sequence
  ENSG00000136160_11 (sequence is synthesized)
gcctggtccttgtctttgccctctgctggcttccccttcacctcagcaggattctgaagctcactctttataatcagaatgatcccaatagatgtgaacttttgagctttctgttggtat

SEQ ID NO: 326581 - DNA, 120 bp, Artificial Sequence
  ENSG00000136160_12 (sequence is synthesized)
tggactatattggtatcaacatggcttcactgaattcctgcattaacccaattgctctgtatttggtgagcaaaagattcaaaaactgctttaagtcatgcttatgctgctggtgccagt

SEQ ID NO: 326582 - DNA, 120 bp, Artificial Sequence
  ENSG00000136160_13 (sequence is synthesized)
catttgaagaaaaacagtccttggaggaaaagcagtcgtgcttaaagttcaaagctaatgatcacggatatgacaacttccgttccagtaataaatacagctcatcttgaaagaagaact

SEQ ID NO: 326583 - DNA, 120 bp, Artificial Sequence
  ENSG00000136160_14 (sequence is synthesized)
attcactgtatttcattttctttatattggaccgaagtcattaaaacaaaatgaaacatttgccaaaacaaaacaaaaaactatgtatttgcacagcacactattaaaatattaagtgta

SEQ ID NO: 326584 - DNA, 120 bp, Artificial Sequence
  ENSG00000136160_15 (sequence is synthesized)
attattttaacactcacagctacatatgacattttatgagctgtttacggcatggaaagaaaatcagtgggaattaagaaagcctcgtcgtgaaagcacttaattttttacagttagcac

SEQ ID NO: 326585 - DNA, 120 bp, Artificial Sequence
  ENSG00000136160_16 (sequence is synthesized)
ttcaacatagctcttaacaacttccaggatattcacacaacacttaggcttaaaaatgagctcactcagaatttctattctttctaaaaagagatttatttttaaatcaatgggactctg

SEQ ID NO: 326586 - DNA, 120 bp, Artificial Sequence
  ENSG00000136160_17 (sequence is synthesized)
tctgatataaaggaagaataagtcactgtaaaacagaacttttaaatgaagcttaaattactcaatttaaaattttaaaatcctttaaaacaacttttcaattaatattatcacactatt

SEQ ID NO: 326587 - DNA, 120 bp, Artificial Sequence
  ENSG00000136160_18 (sequence is synthesized)
gattgtaattagatgcaaatgagagagcagtttagttgttgcatttttcggacactggaaacatttaaatgatcaggagggagtaacagaaagagcaaggctgtttttgaaaatcattac

SEQ ID NO: 326588 - DNA, 120 bp, Artificial Sequence
  ENSG00000136160_19 (sequence is synthesized)
actttcactagaagcccaaacctcagcattctgcaatatgtaaccaacatgtcacaaacaagcagcatgtaacagactggcacatgtgccagctgaatttaaaatataatacttttaaaa

SEQ ID NO: 326589 - DNA, 120 bp, Artificial Sequence
  ENSG00000136160_20 (sequence is synthesized)
agaaaattattacatcctttacattcagttaagatcaaacctcacaaagagaaatagaatgtttgaaaggctatcccaaaagacttttttgaatctgtcattcacataccctgtgaagac

SEQ ID NO: 326590 - DNA, 120 bp, Artificial Sequence
  ENSG00000136160_21 (sequence is synthesized)
attattaaaatcttcttctttcactatcgtagcttaaactctgtttggttttgtcatctgtaaatacttacctacatacactgcatgtagatgattaaatgagggcaggccctgtgctca

SEQ ID NO: 326591 - DNA, 120 bp, Artificial Sequence
  ENSG00000136160_22 (sequence is synthesized)
tagctttacgatggagagatgccagtgacctcataataaagactgtgaactgcctggtgcagtgtccacatgacaaaggggcaggtagcaccctctctcacccatgctgtggttaaaatg

SEQ ID NO: 326592 - DNA, 120 bp, Artificial Sequence
  ENSG00000136160_23 (sequence is synthesized)
aatggtttctagcatatgtataatgctatagttaaaatactatttttcaaaatcatacagattagtacatttaacagctacctgtaaagcttattactaatttttgtattatttttgtaa

SEQ ID NO: 326593 - DNA, 120 bp, Artificial Sequence
  ENSG00000136160_24 (sequence is synthesized)
ccaatagaaaagtttgcttgacatggtgcttttctttcatctagaggcaaaactgctttttgagaccgtaagaacctcttagctttgtgcgttcctgcctaatttttatatcttctaagc

SEQ ID NO: 326594 - DNA, 120 bp, Artificial Sequence
  ENSG00000136160_25 (sequence is synthesized)
aaagtgccttaggatagcttgggatgagatgtgtgtgaaagtatgtacaagagaaaacggaagagagaggaaatgaggtggggttggaggaaacccatggggacagattcccattcttag

SEQ ID NO: 326595 - DNA, 120 bp, Artificial Sequence
  ENSG00000136160_26 (sequence is synthesized)
cctaacgttcgtcattgcctcgtcacatcaatgcaaaaggtcctgattttgttccagcaaaacacagtgcaatgttctcagagtgactttcgaaataaattgggcccaagagctttaact

SEQ ID NO: 326596 - DNA, 120 bp, Artificial Sequence
  ENSG00000136160_27 (sequence is synthesized)
cggtcttaaaatatgcccaaatttttactttgtttttcttttaataggctgggccacatgttggaaataagctagtaatgttgttttctgtcaatattgaatgtgatggtacagtaaacc

SEQ ID NO: 326597 - DNA, 120 bp, Artificial Sequence
  ENSG00000136160_28 (sequence is synthesized)
aaaacccaacaatgtggccagaaagaaagagcaataataattaattcacacaccatatggattctatttataaatcacccacaaacttgttctttaatttcatcccaatcactttttcag

SEQ ID NO: 326598 - DNA, 120 bp, Artificial Sequence
  ENSG00000136160_29 (sequence is synthesized)
catcccaatcactttttcagaggcctgttatcatagaagtcattttagactctcaattttaaattaattttgaatcactaatattttcacagtttattaatatatttaatttctatttaa

SEQ ID NO: 326599 - DNA, 120 bp, Artificial Sequence
  ENSG00000136160_30 (sequence is synthesized)
ccatgtactgaatttttacatcctgataccttttccttctccatgtcagtatcatgttctctaattatcttgccaaattttgaaactacacacaaaaagcatacttgcattatttataat

SEQ ID NO: 326600 - DNA, 120 bp, Artificial Sequence
  ENSG00000136160_31 (sequence is synthesized)
aaaattgcattcagtggctttttaaaaaaatgtttgattcaaaactttaacatactgataagtaagaaacaattataatttctttacatactcaaaaccaagatagaaaaaggtgctatc

SEQ ID NO: 326601 - DNA, 120 bp, Artificial Sequence
  ENSG00000136160_32 (sequence is synthesized)
gttcaacttcaaaacatgtttcctagtattaaggactttaatatagcaacagacaaaattattgttaacatggatgttacagctcaaaagatttataaaagattttaacctattttctcc

SEQ ID NO: 326602 - DNA, 120 bp, Artificial Sequence
  ENSG00000136160_33 (sequence is synthesized)
cttattatccactgctaatgtggatgtatgttcaaacaccttttagtattgatagcttacatatggccaaaggaatacagtttatagcaaaacatgggtatgctgtagctaactttataa

SEQ ID NO: 326603 - DNA, 120 bp, Artificial Sequence
  ENSG00000136160_34 (sequence is synthesized)
aagtgtaatataacaatgtaaaaaattatatatctgggaggattttttggttgcctaaagtggctatagttactgattttttattatgtaagcaaaaccaataaaaatttaagttttttt

SEQ ID NO: 326604 - DNA, 120 bp, Artificial Sequence
  ENSG00000136160_35 (sequence is synthesized)
aacaactaccttatttttcactgtacagacactaattcattaaatactaattgattgtttaaaagaaatataaatgtgacaagtggacattatttatgttaaatatacaattatcaagca

SEQ ID NO: 326605 - DNA, 120 bp, Artificial Sequence
  ENSG00000136160_36 (sequence is synthesized)
aagaaaaacagctgagagggcatcaggaaggagtttcgacccgcgctggcgagtcatgagcgccaagtttcccactggcgcgcaaacttgagttacttttgagcgtggatactggcgaag

SEQ ID NO: 326606 - DNA, 120 bp, Artificial Sequence
  ENSG00000136160_37 (sequence is synthesized)
aggctgcgggcggtattagcgtttgcagcgacttggctcgggcagctgacccaagtgtcctgtcttccttcctctgcttgtctctaggctctgaaactgcggagcggccaccggacgcct

SEQ ID NO: 326607 - DNA, 120 bp, Artificial Sequence
  ENSG00000136160_38 (sequence is synthesized)
acattccggtgggggactctggccagcccgagcaacgtggatcctgagagcactcccaggtaggcatttgccccggtgggacgccttgccagagcagtgtgtggcaggcccccgtggagg

SEQ ID NO: 326608 - DNA, 120 bp, Artificial Sequence
  ENSG00000136160_39 (sequence is synthesized)
aaacagccttttgggacctgtccccggacgaggactgcccccctccctcgggcaactactactgatgctgtccaggcatcgcccaaggggaaaggttgcagcggggtcggaaggcgcggg

SEQ ID NO: 326609 - DNA, 120 bp, Artificial Sequence
  ENSG00000136160_40 (sequence is synthesized)
aggagtctggcggtgattgatgggaagggatgaatgaataaaagtacttgtctgatggcagcagagaccccgagcaaacggtggaggctacactgtctggcattctcgcagcgtttcgtc

SEQ ID NO: 326610 - DNA, 120 bp, Artificial Sequence
  ENSG00000136160_41 (sequence is synthesized)
agagccggacccgcctgcagctcaagggaggcgtgctcctctcccagagcaggctggaacccagctgggttccgcctcccgggaaggtggtctccattcgtcgctctgcatctggtttgt

SEQ ID NO: 326611 - DNA, 120 bp, Artificial Sequence
  ENSG00000136160_42 (sequence is synthesized)
aaggtaagagactatcccaaaataaaaagctctttgtaatatggctcaaatataagctttcaaaactgctaatatatctatccagacagatttagtaaattatcttatagtttccctttt

SEQ ID NO: 326612 - DNA, 120 bp, Artificial Sequence
  ENSG00000136160_43 (sequence is synthesized)
attacatcatggatgatttttttaaatacaacttttgcttgtaaatcactataattgttttttcctataaatcctagtcagccactccctactgcctcagccaatcagttacactcatgg

SEQ ID NO: 326613 - DNA, 120 bp, Artificial Sequence
  ENSG00000136160_44 (sequence is synthesized)
aattgttgaccaaaaagtaataaaaattacatgcattgatgtctgataggcatcacataataaaataagggctaaacatgaattaaaggccctgttccctgtttttggtagattctgaac

SEQ ID NO: 326614 - DNA, 120 bp, Artificial Sequence
  ENSG00000136161_0 (sequence is synthesized)
aggagaggaggggcgagacgccgtcgccagccccctcctcttgtctgcgctcccttcgtttccgtctcggccgggcacccgagcgcatcccgccgaggccgggccgtttcagggggaggc

SEQ ID NO: 326615 - DNA, 120 bp, Artificial Sequence
  ENSG00000136161_1 (sequence is synthesized)
gccaactcatcgcggcgccgggcccctgaccgtgcagtaaccgctacccaggaggcggagcggacaaggctccggcctgcgaggagtcacattaactttgctctagaagacaactttaca

SEQ ID NO: 326616 - DNA, 120 bp, Artificial Sequence
  ENSG00000136161_2 (sequence is synthesized)
aggatctaaaaggaacaggattaaagatgactgaatactgggttccagaaatttaaaacaatcagcttagcaaatcatatattcttctgtggagctgagaattgatgtccgctcttcccc

SEQ ID NO: 326617 - DNA, 120 bp, Artificial Sequence
  ENSG00000136161_3 (sequence is synthesized)
gtgatttggaactttccaatcccagagaaaagttgacaaagggactgcccaggactgagtccatatggaagaagaacttcctcttttctctggagacagtggcaagccagtacaggctac

SEQ ID NO: 326618 - DNA, 120 bp, Artificial Sequence
  ENSG00000136161_4 (sequence is synthesized)
tctgtcatctttgaagatgttagatgtgggaaagtggccaattttttccctttgttctgaagaagaactacagttaattcgtcaggcttgtgtctttggcagtgctggcaatgaagtttt

SEQ ID NO: 326619 - DNA, 120 bp, Artificial Sequence
  ENSG00000136161_5 (sequence is synthesized)
atacactacagtaaatgatgagatttttgtgcttggcacaaactgctgtggctgtttggggttaggtgacgtccagagcaccattgaacctcggagactggattctttaaatggcaaaaa

SEQ ID NO: 326620 - DNA, 120 bp, Artificial Sequence
  ENSG00000136161_6 (sequence is synthesized)
aatagcctgcctcagctatgggagtggtccacatattgtccttgcaacaacagaaggagaagtctttacctggggtcataatgcttatagccagctgggcaatgggacaactaatcatgg

SEQ ID NO: 326621 - DNA, 120 bp, Artificial Sequence
  ENSG00000136161_7 (sequence is synthesized)
tttagtgccctgtcatatctctactaatctgtcaaacaaacaagtcattgaagttgcctgtgggtcttaccattctttggtgctaacatctgatggagaggtatttgcctggggttataa

SEQ ID NO: 326622 - DNA, 120 bp, Artificial Sequence
  ENSG00000136161_8 (sequence is synthesized)
taactctgggcaggtaggatctggatcaacagttaatcagccaatccctcgaagagtcactggctgcctacaaaataaagtagttgtgaccatagcatgtgggcagatgtgctgcatggc

SEQ ID NO: 326623 - DNA, 120 bp, Artificial Sequence
  ENSG00000136161_9 (sequence is synthesized)
agtagtagacacgggggaggtctatgtctggggttacaacggaaacgggcagcttggactcggcaacagtggcaaccagccaaccccttgcagagtggcagctttgcaaggcatccgtgt

SEQ ID NO: 326624 - DNA, 120 bp, Artificial Sequence
  ENSG00000136161_10 (sequence is synthesized)
ccagagggtcgcctgtggctacgcacacacattagtattaacagatgaaggccaagtgtatgcttggggcgccaattcttatgggcagttgggcactggcaataaaagcaaccagtccta

SEQ ID NO: 326625 - DNA, 120 bp, Artificial Sequence
  ENSG00000136161_11 (sequence is synthesized)
tcctactcctgtcactgtggaaaaggacaggattatcgagattgcagcctgtcactccacacacacgtctgcggccaagacgcagggtgggcacgtgtacatgtggggccagtgccgggg

SEQ ID NO: 326626 - DNA, 120 bp, Artificial Sequence
  ENSG00000136161_12 (sequence is synthesized)
tcagtccgtgatcctcccgcacctcacccacttctcctgcactgacgacgtgtttgcctgctttgccacgcccgccgtcacgtggcgcctcctctccgtggaacctgatgaccacctcac

SEQ ID NO: 326627 - DNA, 120 bp, Artificial Sequence
  ENSG00000136161_13 (sequence is synthesized)
gagcattttcgttcgtcattggaagataacgaggatgatattgtagaaatgagtgaattttcatatcctgtttaccgggccttcctggaatacctatacacagacagcatcagcctttct

SEQ ID NO: 326628 - DNA, 120 bp, Artificial Sequence
  ENSG00000136161_14 (sequence is synthesized)
cctgaggaggcagtaggactgctagacttggctacattttatagagaaaatcgtttgaaaaagctctgccaacaaactatcaagcaaggcatctgcgaggagaatgccatcgctctgctc

SEQ ID NO: 326629 - DNA, 120 bp, Artificial Sequence
  ENSG00000136161_15 (sequence is synthesized)
tcggctgcggtgaagtatgatgcacaggatttagaagaattctgcttcaggttttgcataaaccatctgactgtagtaacacaaacatcaggttttgcagaaatggaccatgatctcctg

SEQ ID NO: 326630 - DNA, 120 bp, Artificial Sequence
  ENSG00000136161_16 (sequence is synthesized)
aagaactttatcagcaaagcaagcagagttggagcctttaaaaattgatcccatctgcaggaaagtttttgagcctttccatttcccctgcaaaagccagagatgaatcacttctcttta

SEQ ID NO: 326631 - DNA, 120 bp, Artificial Sequence
  ENSG00000136161_17 (sequence is synthesized)
attaatagtatgtatgatgagctatgtttggctgagtacttgtaactgtcagaagaaggatggtggtgagtggtctttgtctgcctaaacccagagtttatgtagaaagcattgaatgtt

SEQ ID NO: 326632 - DNA, 120 bp, Artificial Sequence
  ENSG00000136161_18 (sequence is synthesized)
ctgatcagatgtgactaaggtcaaggaaaaaaaattgaaatatcttatttaccatttcctctttttgagtcacttaaattggacacctttggtaccctggtctcagtatatgctattctg

SEQ ID NO: 326633 - DNA, 120 bp, Artificial Sequence
  ENSG00000136161_19 (sequence is synthesized)
gcccaaatgttccattattcagctggctgataccacatagatagcttgacaaggagtgctgtctgtccttaccacattttcagcactcagcacagtgccttgtgtataataggcactcaa

SEQ ID NO: 326634 - DNA, 120 bp, Artificial Sequence
  ENSG00000136161_20 (sequence is synthesized)
tttattataaatcttcagtatgtcctgagaacagctttagtcatggaatactgggagaaggaataactttcacaaaataaacttaaaacagcctgtaattattgaggttcatattcttct

SEQ ID NO: 326635 - DNA, 120 bp, Artificial Sequence
  ENSG00000136161_21 (sequence is synthesized)
ggtatatcattctgagaaattgtggctaatttagaacattgtttagaattgacaaaaggccctggcaattaaattgtcaaggcccaagggctaattttaattttctttttacttggagtc

SEQ ID NO: 326636 - DNA, 120 bp, Artificial Sequence
  ENSG00000136161_22 (sequence is synthesized)
attcattaatttctcacatgggattatggagtatgaagtattatctttgaatgaaattcctgggctgatctgccttacataatcacataaggtcctttgcttttctttgtgttaagaggg

SEQ ID NO: 326637 - DNA, 120 bp, Artificial Sequence
  ENSG00000136161_23 (sequence is synthesized)
acttgcctctgtaaatgaaaatgacaatgtgcttttcttgtagttgactttcatgtcactcactataaaataggtctcttaacctggcaccagtataactataaagcactagctgagaag

SEQ ID NO: 326638 - DNA, 120 bp, Artificial Sequence
  ENSG00000136161_24 (sequence is synthesized)
gaactgatacttacatttcatggacagcattaacaagaatgagataaatttgtactttttagatcaaaacaaattacctaattgcaaaagagaaactgaaatggaacatagtctcagatt

SEQ ID NO: 326639 - DNA, 120 bp, Artificial Sequence
  ENSG00000136161_25 (sequence is synthesized)
cttctaatgtgtatctcacaatgtcatgtaatgtaaaggaaacccttttggaattagaattcttgttctgatgctgaactatttggtaataaagtgcttatttgcagataacagaacaaa

SEQ ID NO: 326640 - DNA, 120 bp, Artificial Sequence
  ENSG00000136161_26 (sequence is synthesized)
aattccgctggcgtgggcccggtgcgctgctcgcgactacatcctgcccaggccgccggcccaggctgcgctgcgcatgcgcgagtcctctgtcacattaactttgctctagaagacaac

SEQ ID NO: 326641 - DNA, 120 bp, Artificial Sequence
  ENSG00000136161_27 (sequence is synthesized)
agcagttttagcgcagtgaggcgggaagtctgatcggagcgtggaagtagaggaactgaagatggggaatagaggcagcttttcatggtaattttattataaagataaaaaggaagagct

SEQ ID NO: 326642 - DNA, 120 bp, Artificial Sequence
  ENSG00000136167_0 (sequence is synthesized)
gcagatcagaaagaaggggttcctggtcatacaccagtactaccaaggacagcttttttcctgcaagatctgttacctaaagcaataaaaaatggccagaggatcagtgtccgatgagga

SEQ ID NO: 326643 - DNA, 120 bp, Artificial Sequence
  ENSG00000136167_1 (sequence is synthesized)
aatgatggagctcagagaagcttttgccaaagttgatactgatggcaatggatacatcagcttcaatgagttgaatgacttgttcaaggctgcttgcttgcctttgcctgggtatagagt

SEQ ID NO: 326644 - DNA, 120 bp, Artificial Sequence
  ENSG00000136167_2 (sequence is synthesized)
acgagaaattacagaaaacctgatggctacaggtgatctggaccaagatggaaggatcagctttgatgagtttatcaagattttccatggcctaaaaagcacagatgttgccaagacctt

SEQ ID NO: 326645 - DNA, 120 bp, Artificial Sequence
  ENSG00000136167_3 (sequence is synthesized)
tagaaaagcaatcaataagaaggaagggatttgtgcaatcggtggtacttcagagcagtctagcgttggcacccaacactcctattcagaggaagaaaagtatgcctttgtcaactggat

SEQ ID NO: 326646 - DNA, 120 bp, Artificial Sequence
  ENSG00000136167_4 (sequence is synthesized)
aaacaaagccctggaaaatgatcctgattgtcggcatgtcatcccaatgaacccaaacacgaatgatctctttaatgctgttggagatggcattgtcctttgtaaaatgatcaacctgtc

SEQ ID NO: 326647 - DNA, 120 bp, Artificial Sequence
  ENSG00000136167_5 (sequence is synthesized)
agtgccagacacaattgatgaaagaacaatcaacaaaaagaagctaacccctttcaccattcaggaaaatctgaacttggctctgaactctgcctcagccatcgggtgccatgtggtcaa

SEQ ID NO: 326648 - DNA, 120 bp, Artificial Sequence
  ENSG00000136167_6 (sequence is synthesized)
cataggggctgaggacctgaaggaggggaagccttatctggtcctgggacttctgtggcaagtcatcaagattgggttgtttgctgacattgaactcagcagaaatgaagctctgattgc

SEQ ID NO: 326649 - DNA, 120 bp, Artificial Sequence
  ENSG00000136167_7 (sequence is synthesized)
tcttttgagagaaggtgagagcctggaggatttgatgaaactctcccctgaagagctcttgctgaggtgggctaattaccacctggaaaatgcaggctgcaacaaaattggcaacttcag

SEQ ID NO: 326650 - DNA, 120 bp, Artificial Sequence
  ENSG00000136167_8 (sequence is synthesized)
tactgacatcaaggactcaaaagcttattaccacctgcttgagcaggtggctccaaaaggagatgaagaaggtgttcctgctgttgttattgacatgtcaggactgcgggagaaggatga

SEQ ID NO: 326651 - DNA, 120 bp, Artificial Sequence
  ENSG00000136167_9 (sequence is synthesized)
catccagagggcagaatgcatgctgcagcaggcggagaggctgggctgccggcagtttgtcacagccacagatgttgtccgagggaaccccaagttgaacttggcttttattgccaacct

SEQ ID NO: 326652 - DNA, 120 bp, Artificial Sequence
  ENSG00000136167_10 (sequence is synthesized)
ctttaacagataccctgccctgcacaaaccagagaaccaggacattgactggggggctcttgaaggtgagacgagagaagagcggacatttaggaactggatgaactccctgggtgttaa

SEQ ID NO: 326653 - DNA, 120 bp, Artificial Sequence
  ENSG00000136167_11 (sequence is synthesized)
ccctcgagtcaatcatttgtacagtgacttatcagatgccctggtcatcttccagctctatgaaaagatcaaagttcctgttgactggaacagagtaaacaaaccgccataccccaaact

SEQ ID NO: 326654 - DNA, 120 bp, Artificial Sequence
  ENSG00000136167_12 (sequence is synthesized)
gggaggcaatatgaagaagcttgagaattgtaactacgcggtagaattggggaagaatcaagcgaagttctccctggttggcatcggtggacaagatctcaatgaaggaaaccgcactct

SEQ ID NO: 326655 - DNA, 120 bp, Artificial Sequence
  ENSG00000136167_13 (sequence is synthesized)
cacactggccttgatttggcagctaatgagaaggtatacactgaatatcctcgaagaaattggtggtggccagaaggtcaatgatgacattattgtcaactgggtgaatgaaacattgag

SEQ ID NO: 326656 - DNA, 120 bp, Artificial Sequence
  ENSG00000136167_14 (sequence is synthesized)
ggaagcaaagaaaagttcatccatctctagtttcaaggacccgaagattagtacaagtctgcctgttctggacctcatcgatgccatccaaccaggttccattaactatgaccttctgaa

SEQ ID NO: 326657 - DNA, 120 bp, Artificial Sequence
  ENSG00000136167_15 (sequence is synthesized)
tatgccatctctatggcccgaaaaattggagcaagagtgtatgccctgccagaagacctggttgaagtgaaccccaaaatggtcatgaccgtgtttgcctgcctcatggggaaaggaatg

SEQ ID NO: 326658 - DNA, 120 bp, Artificial Sequence
  ENSG00000136167_16 (sequence is synthesized)
aagagggtgtgaggcccaatggggctgggtgggaggcggtgcactcactcctgactgcccggcacagatgctccagggatgattcaagccattccaaagttcaacttggtgacactctat

SEQ ID NO: 326659 - DNA, 120 bp, Artificial Sequence
  ENSG00000136167_17 (sequence is synthesized)
aagattccaaaaagcacatattagtgcagccaagtagcctctcctgtatttaacaaaaagtgcttcattctttgcaggaggcccaacctcctatatataggtttctattcttgatttatt

SEQ ID NO: 326660 - DNA, 120 bp, Artificial Sequence
  ENSG00000136167_18 (sequence is synthesized)
tgcttcttcgaaaatctagaggaaaagaaagaagttattttccaggtacccttctcgcttttgccattagccaaggatagaagctgcagtggtattaattttgatataatctttcaaacc

SEQ ID NO: 326661 - DNA, 120 bp, Artificial Sequence
  ENSG00000136167_19 (sequence is synthesized)
agcttcatgtggcttcccttttctttgttcaagatgagggccaggaggggaaacatcacacctgccctaaaccctgttcctggaggtcagcatttgatctgttgcaagcccctctttctg

SEQ ID NO: 326662 - DNA, 120 bp, Artificial Sequence
  ENSG00000136167_20 (sequence is synthesized)
tcccctcttcctaccctgcctcccttgactttgctcctcacacttttggaaccatgccttccgggggggcccatctcttctggccgtccttgtctctgggccacttggagtgtgtgataa

SEQ ID NO: 326663 - DNA, 120 bp, Artificial Sequence
  ENSG00000136167_21 (sequence is synthesized)
atcagtcaagctgttgaagtctcaggagtctctggtagcctgcagaagtaagcctcatcatcagagcctttcctcaaaactggagtcccaaatgtcatcaggttttgttttttttcagcc

SEQ ID NO: 326664 - DNA, 120 bp, Artificial Sequence
  ENSG00000136167_22 (sequence is synthesized)
actaagaacccctctgcttttaactctagaatttgggcttggaccagatctaacatcttgaatactctgccctctagagccttcagccttaatggaaggttggatccaaggagggtgtaa

SEQ ID NO: 326665 - DNA, 120 bp, Artificial Sequence
  ENSG00000136167_23 (sequence is synthesized)
tggagcatcaagccactcggcggcagcatggagctataactaagcatcctttagggttctgcctctccaggcatttagccctcacattagatctagttactgtggtatggctaatacctg

SEQ ID NO: 326666 - DNA, 120 bp, Artificial Sequence
  ENSG00000136167_24 (sequence is synthesized)
tcaacatttggaggcaatcctaccttgcttttgcttctagagcttagcatatctgattgttgtcaggccatattatcaatgtttacttttttggtactataaaagctttctgccacccct

SEQ ID NO: 326667 - DNA, 120 bp, Artificial Sequence
  ENSG00000136167_25 (sequence is synthesized)
aaactccaggggggacaatatgtgccaatcaatagcacccctactcacatacacacacacctagccagctgtcaagggcagaatgaatctatgctggataagaaatggtggaactgcgtt

SEQ ID NO: 326668 - DNA, 120 bp, Artificial Sequence
  ENSG00000136167_26 (sequence is synthesized)
atgaagagctaatttactggacaaagaattccaaagcaaaaccagaacagtatgaatttgagcaggtctcataggttgagcaatttccccctaaaccaactgaaggctaaaaagcaacag

SEQ ID NO: 326669 - DNA, 120 bp, Artificial Sequence
  ENSG00000136167_27 (sequence is synthesized)
gccattgtgaaccaatgcaagacgccctctatcatggtgaaaagctccatcaatgaggtatcttctttagtggtggtatgtaatggaacttagccatttttcaaagcaattgaaatgcat

SEQ ID NO: 326670 - DNA, 120 bp, Artificial Sequence
  ENSG00000136167_28 (sequence is synthesized)
tgctctggatctgttccttggcagtggactcagaaagccaacatgtggctcctcccagcccataaccagtatttttgctgcttctgaatacaaattggttggttttgacttcagattgaa

SEQ ID NO: 326671 - DNA, 120 bp, Artificial Sequence
  ENSG00000136167_29 (sequence is synthesized)
cttactgtagcctcagatgatttcccccctccgcctccaggaagaaagaatgttactgccttaataaaaaatgaaaagagaatgatgctcaaaatctttccaaataaaatgttccctata

SEQ ID NO: 326672 - DNA, 120 bp, Artificial Sequence
  ENSG00000136167_30 (sequence is synthesized)
ggtgttgatgaacctgtgtgtgcagtcatagatacatcgtgtgtgtttgcaaaaatggcgaatgaggaaagatccagctctgacagaataatgagttgtgcaaagtgaaggccaaatgac

SEQ ID NO: 326673 - DNA, 120 bp, Artificial Sequence
  ENSG00000136167_31 (sequence is synthesized)
atcaccggagatagcagtagttcaaagaaagcaaagcagaggaattgaactgctgcaaaatgcacgattcctccggcctcagatgaccaggcaccactagatacagaacactgtgctttc

SEQ ID NO: 326674 - DNA, 120 bp, Artificial Sequence
  ENSG00000136167_32 (sequence is synthesized)
gaggggcaggcccagcccacggtgcagcgcgcgcggagccctcgccttcctccgacgcactgtggggctgcaggggaagctgcgggccgtgggggccggaggagaagccggctccacgcg

SEQ ID NO: 326675 - DNA, 120 bp, Artificial Sequence
  ENSG00000136167_33 (sequence is synthesized)
cagaggaattgaactgctgcaaaatgcacgagtctcaaacattgtctcagcagcagcatcatatcttacaaaagttgaggaaatactgtatttccagcttaggaaactgaagattcctcc

SEQ ID NO: 326676 - DNA, 120 bp, Artificial Sequence
  ENSG00000136167_34 (sequence is synthesized)
gatgttttgtgtgtcagcttcatcacagagcaagatggaaaaatataggcctcatcagtctcatgccaaccagaatgggccttcaacttatggtgctggtttgattgaatggaccactgc

SEQ ID NO: 326677 - DNA, 120 bp, Artificial Sequence
  ENSG00000136167_35 (sequence is synthesized)
gtagattcaatgaaatgggaacatgagcaaaatttcagagatgacaagaaaccagtagtatttgtttagaggagctgggagaacttatttttgaaaaatatgcttcaataaaatgacttt

SEQ ID NO: 326678 - DNA, 120 bp, Artificial Sequence
  ENSG00000136167_36 (sequence is synthesized)
tcctggaaatggtttgtaagtctcatcttttatatcttgtcttctgttttgctgtttccttgattttaataccatcacatactttctcttactctttatcactaaacctgtggtttcctt

SEQ ID NO: 326679 - DNA, 120 bp, Artificial Sequence
  ENSG00000136167_37 (sequence is synthesized)
aagagtttctataagagttctttgtggaaacagaggtaccttatagaaattatgactcttttactgtggatgttgaaagtaatgctggtgcccctattcagtagcaacagtcatcttgtg

SEQ ID NO: 326680 - DNA, 120 bp, Artificial Sequence
  ENSG00000136167_38 (sequence is synthesized)
agattctgactcttccctgggatcatgccttaatgtctgaatgatagcctctctcgtcccttcaccttccatctagtcttccctcacctctctaaaagctgttgcctgaatcgtcctgaa

SEQ ID NO: 326681 - DNA, 120 bp, Artificial Sequence
  ENSG00000136167_39 (sequence is synthesized)
actgacttctacagcaatataaaggactcaaaagcttattaccacctgcttgagcaggtggctccaaaaggagatgaagaaggtgttcctgctgttgttattgacatgtcaggactgcgg

SEQ ID NO: 326682 - DNA, 120 bp, Artificial Sequence
  ENSG00000136169_0 (sequence is synthesized)
cctgcgctcgggaggtttgggcggcttggcgtcggaggagagccccacccgcggaggaacccagccttgccaacggagctggcggagctcactcctcaggtcaggcgggcggcgtagaaa

SEQ ID NO: 326683 - DNA, 120 bp, Artificial Sequence
  ENSG00000136169_1 (sequence is synthesized)
acgcagcggagccaggtgaaaccaaggcaccgccgtggctggcccccgacagttcctctagccgggaggttggaggagctgaaaacgccgcggagccctcggccgcccgagcaggggctg

SEQ ID NO: 326684 - DNA, 120 bp, Artificial Sequence
  ENSG00000136169_2 (sequence is synthesized)
gaccccagcccttgcagcctcccttctcctggcacccaagtgcagtcctggctgcagaaggggccgcgggcgcactgagtttccaacctccatttcagcctgtctgtctcagggtgcagc

SEQ ID NO: 326685 - DNA, 120 bp, Artificial Sequence
  ENSG00000136169_3 (sequence is synthesized)
cttaatgagaggtgattcctaagctgctgggaacctgaggttgtcaaaggggcggcaggaaatggacagcagtataaaacccagaagcagaacttgaaggttaaaccactagcccatttc

SEQ ID NO: 326686 - DNA, 120 bp, Artificial Sequence
  ENSG00000136169_4 (sequence is synthesized)
acagaatgtttcatccatttgtggaccaaaagatggagttggtttttatttttaaaaagataatgttaatgatctgataccactacaaatatttacgtgagaagattcatggacttgtct

SEQ ID NO: 326687 - DNA, 120 bp, Artificial Sequence
  ENSG00000136169_5 (sequence is synthesized)
tttggttggactgtcactcatttctgaaagtttcttcagccacaatttctatttgaaaattcaagtatcaaaggataccaggtttagaatggtataatgatgtattttgtctgaggactg

SEQ ID NO: 326688 - DNA, 120 bp, Artificial Sequence
  ENSG00000136169_6 (sequence is synthesized)
caaattttatagagaccacagttggattccagtgatattctgcaatcaaagtgatttgataaacctaattttgaagcattttatatttataagcgacatcaaaagatgggagaaaaaaat

SEQ ID NO: 326689 - DNA, 120 bp, Artificial Sequence
  ENSG00000136169_7 (sequence is synthesized)
ggcgatgcaaaaactttctggatggagctagaagatgatggaaaagtggacttcatttttgaacaagtacaaaatgtgctgcagtcactgaaacaaaagatcaaagatgggtctgccacc

SEQ ID NO: 326690 - DNA, 120 bp, Artificial Sequence
  ENSG00000136169_8 (sequence is synthesized)
aataaagaatacatccaagcaatgattctagtgaatgaagcaactataattaacagttcaacatcaataaagggagcatcacagaaagaagtgaatgcccaaagcagtgatcctatgcct

SEQ ID NO: 326691 - DNA, 120 bp, Artificial Sequence
  ENSG00000136169_9 (sequence is synthesized)
gtgactcagaaggaacaggaaaacaaatccaatgcatttccctctacatcatgtgaaaactcctttccagaagactgtacatttctaacaacagaaaataaggaaattctctctcttgaa

SEQ ID NO: 326692 - DNA, 120 bp, Artificial Sequence
  ENSG00000136169_10 (sequence is synthesized)
gataaagttgtagactttagagaaaaagactcatcttcgaatttatcttaccaaagtcatgactgctctggtgcttgtctgatgaaaatgccactgaacttgaagggagaaaaccctctg

SEQ ID NO: 326693 - DNA, 120 bp, Artificial Sequence
  ENSG00000136169_11 (sequence is synthesized)
cagctgccaatcaaatgtcacttccaaagacgacatgcaaagacaaactctcattcttcagcactccacgtgagttataaaaccccttgtggaaggagtctacgaaacgtggaggaagtt

SEQ ID NO: 326694 - DNA, 120 bp, Artificial Sequence
  ENSG00000136169_12 (sequence is synthesized)
tttcgttacctgcttgagacagagtgtaactttttatttacagataacttttctttcaatacctatgttcagttggctcggaattacccaaagcaaaaagaagttgtttctgatgtggat

SEQ ID NO: 326695 - DNA, 120 bp, Artificial Sequence
  ENSG00000136169_13 (sequence is synthesized)
attagcaatggagtggaatcagtgcccatttctttctgtaatgaaattgacagtagaaagctcccacagtttaagtacagaaagactgtgtggcctcgagcatataatctaaccaacttt

SEQ ID NO: 326696 - DNA, 120 bp, Artificial Sequence
  ENSG00000136169_14 (sequence is synthesized)
tccagcatgtttactgattcctgtgactgctctgagggctgcatagacataacaaaatgtgcatgtcttcaactgacagcaaggaatgccaaaacttcccccttgtcaagtgacaaaata

SEQ ID NO: 326697 - DNA, 120 bp, Artificial Sequence
  ENSG00000136169_15 (sequence is synthesized)
accactggatataaatataaaagactacagagacagattcctactggcatttatgaatgcagccttttgtgcaaatgtaatcgacaattgtgtcaaaaccgagttgtccaacatggtcct

SEQ ID NO: 326698 - DNA, 120 bp, Artificial Sequence
  ENSG00000136169_16 (sequence is synthesized)
caagtgaggttacaggtgttcaaaactgagcagaagggatggggtgtacgctgtctagatgacattgacagagggacatttgtttgcatttattcaggaagattactaagcagagctaac

SEQ ID NO: 326699 - DNA, 120 bp, Artificial Sequence
  ENSG00000136169_17 (sequence is synthesized)
actgaaaaatcttatggtattgatgaaaacgggagagatgagaatactatgaaaaatatattttcaaaaaagaggaaattagaagttgcatgttcagattgtgaagttgaagttctccca

SEQ ID NO: 326700 - DNA, 120 bp, Artificial Sequence
  ENSG00000136169_18 (sequence is synthesized)
ttaggattggaaacacatcctagaactgctaaaactgagaaatgtccaccaaagttcagtaataatcccaaggagcttactgtggaaacgaaatatgataatatttcaagaattcaatat

SEQ ID NO: 326701 - DNA, 120 bp, Artificial Sequence
  ENSG00000136169_19 (sequence is synthesized)
cattcagttattagagatcctgaatccaagacagccatttttcaacacaatgggaaaaaaatggaatttgtttcctcggagtctgtcactccagaagataatgatggatttaaaccaccc

SEQ ID NO: 326702 - DNA, 120 bp, Artificial Sequence
  ENSG00000136169_20 (sequence is synthesized)
cgagagcatctgaactctaaaaccaagggagcacaaaaggactcaagttcaaaccatgttgatgagtttgaagataatctgctgattgaatcagatgtgatagatataactaaatataga

SEQ ID NO: 326703 - DNA, 120 bp, Artificial Sequence
  ENSG00000136169_21 (sequence is synthesized)
gaagaaactccaccaaggagcagatgtaaccaggcgaccacattggataatcagaatattaaaaaggcaattgaggttcaaattcagaaaccccaagagggacgatctacagcatgtcaa

SEQ ID NO: 326704 - DNA, 120 bp, Artificial Sequence
  ENSG00000136169_22 (sequence is synthesized)
agacagcaggtattttgtgatgaagagttgctaagtgaaaccaagaatacttcatctgattctctaacaaagttcaataaagggaatgtgtttttattggatgccacaaaagaaggaaat

SEQ ID NO: 326705 - DNA, 120 bp, Artificial Sequence
  ENSG00000136169_23 (sequence is synthesized)
gtcggccgcttccttaatcatagttgttgcccaaatctcttggtacagaatgtttttgtagaaacacacaacaggaattttccattggtggcattcttcaccaacaggtatgtgaaagca

SEQ ID NO: 326706 - DNA, 120 bp, Artificial Sequence
  ENSG00000136169_24 (sequence is synthesized)
agaacagagctaacatgggattatggctatgaagctgggactgtgcctgagaaggaaatcttctgccaatgtggggttaataaatgtagaaaaaaaatattataaatatgtaactaacgc

SEQ ID NO: 326707 - DNA, 120 bp, Artificial Sequence
  ENSG00000136169_25 (sequence is synthesized)
atcaggctgaaattaaagccatgcaaaagaaggtctaggtccatcaaggaaattcccctccgttttcctttgtcatggggtttatgttttatttcagattttatttgtgtgacttagaaa

SEQ ID NO: 326708 - DNA, 120 bp, Artificial Sequence
  ENSG00000136169_26 (sequence is synthesized)
ttccaggaacacaattaggatattttcatacacatagggtatcttgttcactgctgtgctactttacatgagtaggatggaagtgtatattttatatgaaataccactgtacaatttata

SEQ ID NO: 326709 - DNA, 120 bp, Artificial Sequence
  ENSG00000136169_27 (sequence is synthesized)
atttatttacaaattatatattaagagaaacaaatgtcataacagaactcagctgtttctaattgcttttgtgactgttaccttttagttcatgcccccccaaagagctaaatttcacat

SEQ ID NO: 326710 - DNA, 120 bp, Artificial Sequence
  ENSG00000136169_28 (sequence is synthesized)
ttttacctacaaaattgatttttaattcctggcaaataatttaccattatgagctacaaggtgggcaacagcgcctgaggatctaattttatgcatattactcccaagtattttaacact

SEQ ID NO: 326711 - DNA, 120 bp, Artificial Sequence
  ENSG00000136169_29 (sequence is synthesized)
tgttggagaagcaatatctggatcgataaaacactgtcccatcaaccatttgagtggggagagggagaagctcttctgtaagtaagattctggcaagctctttgaaatgagtcttctttc

SEQ ID NO: 326712 - DNA, 120 bp, Artificial Sequence
  ENSG00000136169_30 (sequence is synthesized)
ccacagattttctctactctttctatacaaacagataggagaagagggaatagaaacctggaggaacttgaatatttttgttctagatagagatacagttactgaaaaggaaacctagaa

SEQ ID NO: 326713 - DNA, 120 bp, Artificial Sequence
  ENSG00000136169_31 (sequence is synthesized)
acctagaaagtagtcacacgttgcttatttaggccagaagtaattgtactgggcaaaaatttcacttaaaaaacacaagaagtccaggtatggtggctcagacctgtaatcccagcactt

SEQ ID NO: 326714 - DNA, 76 bp, Artificial Sequence
  ENSG00000136169_32 (sequence is synthesized)
actttgagaggccgaggcaggtggattacttgagcctaggggttcaagaccagcttgggcaacatgtatggcatgt

SEQ ID NO: 326715 - DNA, 120 bp, Artificial Sequence
  ENSG00000136169_33 (sequence is synthesized)
agctactcaggagtgaggtgggaggatcatttgagctcagaaggtcaaggctgcaatgagacataatttcaccatagtacttccagcctgggcaatagagcaagactctctctcaaaaaa

SEQ ID NO: 326716 - DNA, 120 bp, Artificial Sequence
  ENSG00000136169_34 (sequence is synthesized)
aacagcacacacacacacacacgaaaacaattctgaactatgaaatctgaaacagccccttggtatctcctgggcatgatttgcaaatcttttttttttacagaaaaaaggcaaagagta

SEQ ID NO: 326717 - DNA, 120 bp, Artificial Sequence
  ENSG00000136169_35 (sequence is synthesized)
agcactttgccataggttacttggccgtgatcatctatctagtggaaaaggggactgggaagcccaagcagactgggaaaccagacagctaggaaaaggagcaaaacatagcccagcaac

SEQ ID NO: 326718 - DNA, 120 bp, Artificial Sequence
  ENSG00000136169_36 (sequence is synthesized)
ctacagatgaagaaagttgagaaatccatttattcaccatagagacgcaggaatttcaggcaatgcactaaaatgaaatgggggaaaaaagcttgatcagtatgggaaccatttttgtgc

SEQ ID NO: 326719 - DNA, 120 bp, Artificial Sequence
  ENSG00000136169_37 (sequence is synthesized)
aaaagggaatattatggatcagccagtatttctttgagctctgcctgtggagtccatttgacctttagaaatatgaggtattctgtcagttttatcttcttggagaaatttctcctaaaa

SEQ ID NO: 326720 - DNA, 120 bp, Artificial Sequence
  ENSG00000136169_38 (sequence is synthesized)
tcttgatttgctttagtctggactggttcatagccatcatcttccatcagtaccccagagattcactttgtctcttatgtgggatctgtttccagttagatgccattattttccttttcc

SEQ ID NO: 326721 - DNA, 120 bp, Artificial Sequence
  ENSG00000136169_39 (sequence is synthesized)
ttggtttactcttccacatattggtaaagctcttccaatagcttttggaaaggaaaaatgaaaagtaaatgttttgaatctctgtgtgtttgacaatgtctttattttacccttatacct

SEQ ID NO: 326722 - DNA, 120 bp, Artificial Sequence
  ENSG00000136169_40 (sequence is synthesized)
gattgctgttttggttggcaaggtataggattctttagtggtctccatgcccagttttgaagacatctgctagctttcagtgctgttgctgtggagtctgaaaatctgtcttctggcttc

SEQ ID NO: 326723 - DNA, 120 bp, Artificial Sequence
  ENSG00000136169_41 (sequence is synthesized)
cagggtgactactggaaattgaatgccattctgttccttctcttttgcatatataatccatttttatctctcttgaagcttataggtttatctttgtctcaatgttctgtccctgttaag

SEQ ID NO: 326724 - DNA, 120 bp, Artificial Sequence
  ENSG00000136169_42 (sequence is synthesized)
agtccattttcatcctttgtactaggtgcctggtgggatcattccgtctgaaactaatgatttcccatctcttcactgtttctggaattcctgttttccagatgttagacctccagaatt

SEQ ID NO: 326725 - DNA, 120 bp, Artificial Sequence
  ENSG00000136169_43 (sequence is synthesized)
tgatctctaattttcctatcttttctcttaactttcagctctgtcttcttgctaggaccttttcctaggagcatttctcaatttaatcttccagttcatctgttgcattttatttttcta

SEQ ID NO: 326726 - DNA, 120 bp, Artificial Sequence
  ENSG00000136169_44 (sequence is synthesized)
gtctcatattgtctcatatttttaatttctaagagctccccttctccgaatattctttttttttaatagcatcctattttggctcatggttgcagtattttatctccttgaagatgtttg

SEQ ID NO: 326727 - DNA, 120 bp, Artificial Sequence
  ENSG00000136169_45 (sequence is synthesized)
tgtgtttatgtatgtatatgcacacacgtatacatacacatacaggcatgcatctctgtattctttcggcataatctgtgtcctccagggtttgtttctttgtttcccctgtatgtttgt

SEQ ID NO: 326728 - DNA, 120 bp, Artificial Sequence
  ENSG00000136169_46 (sequence is synthesized)
tttggtcgttcacattataggctttcctcagagttaatggtcttggtagtctactcatatttaagtgtggaacaccaaaaagcttactataagctgagagtgtggtaaagggctctttgt

SEQ ID NO: 326729 - DNA, 120 bp, Artificial Sequence
  ENSG00000136169_47 (sequence is synthesized)
tttactatgacctacctgagctatcttgctggggaacaccctaatgtcagtctctttataaagggcctttcattttggcctggcaagaaatactctttcatcctcctgcatggagggcaa

SEQ ID NO: 326730 - DNA, 120 bp, Artificial Sequence
  ENSG00000136169_48 (sequence is synthesized)
aaaaaaatttaaaaattggctgctagggtctgtctgctcacttccctgttttgcagaccccacactcttctgcaattcatttcatagttgtcaagactatacaaattgtcctttttaatg

SEQ ID NO: 326731 - DNA, 120 bp, Artificial Sequence
  ENSG00000136169_49 (sequence is synthesized)
ttctctcttctgctatccctagttggcagtcttcctctttacaacctgctgaaagtggaagacctccagttttcctttaattcctcagcaaaccaccaactattatatgtcttttttcca

SEQ ID NO: 326732 - DNA, 120 bp, Artificial Sequence
  ENSG00000136169_50 (sequence is synthesized)
gaacaacttattttttaactataattatatgcatttatgttagattcactgaaaacctcatcttgtatggtgctctgtaccctatgggtgctaaataaaggcttgctactggcaactgga

SEQ ID NO: 326733 - DNA, 120 bp, Artificial Sequence
  ENSG00000136169_51 (sequence is synthesized)
aggctttgtttcttctgtgaatgcctacctcttctgcctgtttctctgtctcttgctcaatacctgtagctcattttcttagattccataataaacatgctgcatttgtcagaaaggtta

SEQ ID NO: 326734 - DNA, 120 bp, Artificial Sequence
  ENSG00000136193_0 (sequence is synthesized)
gagtctgggtagggggaagcgcccggcggccgcctccgccactgcagctgcagcccccgaggtcgccgcagtaatccggacccggcagcacccgcaccctcggcggccgcagcctcagca

SEQ ID NO: 326735 - DNA, 120 bp, Artificial Sequence
  ENSG00000136193_1 (sequence is synthesized)
ccgcagagcggagagcggagcccggagcccgccgccccaggatggctgcagctcctccaagttactgttttgttgccttccctccacgtgctaaggatggtctggtggtatttgggaaaa

SEQ ID NO: 326736 - DNA, 120 bp, Artificial Sequence
  ENSG00000136193_2 (sequence is synthesized)
attcagcccggcccagagatgaagtgcaagaggttgtgtatttctcggctgctgatcacgaaccggagagcaaggttgagtgcacttacatttcaatcgaccaagttccaaggacctatg

SEQ ID NO: 326737 - DNA, 120 bp, Artificial Sequence
  ENSG00000136193_3 (sequence is synthesized)
ccataatgataagcagacccgcctggctctggggagcagaaatgggagccaatgaacatggagtgtgcatagccaatgaagccatcaacaccagagagccagctgccgagatagaagcct

SEQ ID NO: 326738 - DNA, 120 bp, Artificial Sequence
  ENSG00000136193_4 (sequence is synthesized)
tgctggggatggatctggtcaggcttggtttagaaagaggggaaacagctaaagaagccttagatgtcattgtctccttgttggaagaacatggacaaggtgggaattactttgaagatg

SEQ ID NO: 326739 - DNA, 120 bp, Artificial Sequence
  ENSG00000136193_5 (sequence is synthesized)
caaactcctgccacagcttccaaagtgcatatctgattgtggatcgtgatgaagcctgggtgctcgagaccatagggaagtactgggctgccgagaaagtcacagagggagtgaggtgca

SEQ ID NO: 326740 - DNA, 120 bp, Artificial Sequence
  ENSG00000136193_6 (sequence is synthesized)
tttgcagtcagctttcgctcaccactaagatggatgcagagcatccggaactcaggagttacgctcagagccaaggttggtggacgggagagggcgagttcaatttttccgaagtctttt

SEQ ID NO: 326741 - DNA, 120 bp, Artificial Sequence
  ENSG00000136193_7 (sequence is synthesized)
ctccagttgaggatcatctagactgcggtgctggcaaagacagcttagaaaaacaagaagaaagcatcacagtgcagactatgatgaacaccttacgggacaaagccagcggagtgtgca

SEQ ID NO: 326742 - DNA, 120 bp, Artificial Sequence
  ENSG00000136193_8 (sequence is synthesized)
tagactctgagtttttcctcaccacagccagtggagtgtctgtcctgccgcagaatagaagctctccgtgcattcactacttcactggaacccctgatccttccaggtccatattcaagc

SEQ ID NO: 326743 - DNA, 120 bp, Artificial Sequence
  ENSG00000136193_9 (sequence is synthesized)
ctttcatctttgttgatgacgtaaaacttgtccccaaaacacagtctccctgttttggggatgacgaccctgccaaaaaggagcctcggttccaggagaaaccagaccgccggcatgagc

SEQ ID NO: 326744 - DNA, 120 bp, Artificial Sequence
  ENSG00000136193_10 (sequence is synthesized)
tgtacaaagcccacgagtgggcacgtgccatcatcgaaagtgaccaggagcaaggtcgcaagctgaggagcaccatgctggagctggagaagcaaggcctggaagccatggaagaaatcc

SEQ ID NO: 326745 - DNA, 120 bp, Artificial Sequence
  ENSG00000136193_11 (sequence is synthesized)
tgaccagctccgagccactggaccctgcggaagtgggggaccttttctatgactgtgttgacacggagattaagttctttaagtgaagtaagcgttccctttccccttcttatttaagac

SEQ ID NO: 326746 - DNA, 120 bp, Artificial Sequence
  ENSG00000136193_12 (sequence is synthesized)
ttcccaccttactaaattaccagcaaaacaaaccactctcctgtttgagtaaaatgagaaagttaatatgtggcctccttttctgaagccagatcaaactgttaccttgtgttccacctt

SEQ ID NO: 326747 - DNA, 120 bp, Artificial Sequence
  ENSG00000136193_13 (sequence is synthesized)
gaatctcacagcgtccccttctgcaatgtaggtctccttcctgtgcagtgtaacatgtatcccgttgcctgttgttcggttgtgtgactaattgtggattttaagctgctattattgtat

SEQ ID NO: 326748 - DNA, 120 bp, Artificial Sequence
  ENSG00000136193_14 (sequence is synthesized)
ttcagtggcaatggacacattagccttttacaagaggactagagttcatcaagccttgaaaggcaggcttcacagtgccgagttggcgggaaaagcaaattcttttgaagtcttagtctt

SEQ ID NO: 326749 - DNA, 120 bp, Artificial Sequence
  ENSG00000136193_15 (sequence is synthesized)
tccctcagtagcggtttctttcaggttaacaagaggcatttgtgcacacacacagggctcttgtgtgtgttgtcaaggggaccctccgtggcctcccgtgagtgcatgcctgtagtgcac

SEQ ID NO: 326750 - DNA, 120 bp, Artificial Sequence
  ENSG00000136193_16 (sequence is synthesized)
agtgtctctacaggtgtcttctggggggcagaaccaattggaaggaagaaagggacccctctccagtcctggctccttcctacatcctgggctcctgaagaagctgtcttcccattttcc

SEQ ID NO: 326751 - DNA, 120 bp, Artificial Sequence
  ENSG00000136193_17 (sequence is synthesized)
atgcgctgtgcttatgtgtggtggactgcagagctgcttccacttacaggagagctgataatttgttagctggaacctattcacttccgagattcagacatagccatgctggtggccttc

SEQ ID NO: 326752 - DNA, 120 bp, Artificial Sequence
  ENSG00000136193_18 (sequence is synthesized)
tgaatcactgcatggatgtcccaggaggcagctctccccacacagcagcacagccatcacaggattccttgtgtagaaatgattcccagtctagttaccaacagctagtctaggagtaat

SEQ ID NO: 326753 - DNA, 120 bp, Artificial Sequence
  ENSG00000136193_19 (sequence is synthesized)
tgaatggccctatggcacagttccacccacagagtagtgaatctctcagccaaggagggaaagaaaaggaagaactcttgactatttagattctagttaaatatctggaatcctagcagt

SEQ ID NO: 326754 - DNA, 120 bp, Artificial Sequence
  ENSG00000136193_20 (sequence is synthesized)
cactacattatctcagcagagagactttaattaaactgatttgtttccaatgtcgggttcacttaaaggatttgacttaccaccagagcatagaaaagcatgcaaggaagaccagatggg

SEQ ID NO: 326755 - DNA, 120 bp, Artificial Sequence
  ENSG00000136193_21 (sequence is synthesized)
aggccattacatcccacaaacccaaatacaaagcagctgacttccctggatcttccccccactcctcacacctcacatgtcccaggagctgccttcattcaggcgggtagctgcactggg

SEQ ID NO: 326756 - DNA, 120 bp, Artificial Sequence
  ENSG00000136193_22 (sequence is synthesized)
catggggtggtggtgggagcttaccgccacctattcaagctctcagctactcctgaaacgggcagagatgatgaacagaagtgtatgtaaatacagcagctagtgggagagcaccagttg

SEQ ID NO: 326757 - DNA, 120 bp, Artificial Sequence
  ENSG00000136193_23 (sequence is synthesized)
ggcctaatcctgcctcatcattcttggcaggaatctgcaaatggaaacattgtgagtatcagcaatctgggaagtgacagggttaataactccttcccagaagctgtatcatgagatttt

SEQ ID NO: 326758 - DNA, 120 bp, Artificial Sequence
  ENSG00000136193_24 (sequence is synthesized)
gaggggaccgagccctgttacatggatgtgaacagtgaggatcagaggttttatcagaacacattctttttttctaccaactctccagagcgtgagtataggagtgccatgagcttttta

SEQ ID NO: 326759 - DNA, 120 bp, Artificial Sequence
  ENSG00000136193_25 (sequence is synthesized)
gtcagcagttttgtaaactctgtatataaaatcattaaccacacattgtgggtgatgggaagacgatttcagctgacagagttaatggcaaccaataatggtggcctgtagctgctaaga

SEQ ID NO: 326760 - DNA, 120 bp, Artificial Sequence
  ENSG00000136193_26 (sequence is synthesized)
gcttcacgcaggtttggcctgggctttcactgttggtgaatttagagtgtccttttaggtggggcggctattctaaaagtgtctttctatcactgttaagggggggggaaagtgaggttc

SEQ ID NO: 326761 - DNA, 120 bp, Artificial Sequence
  ENSG00000136193_27 (sequence is synthesized)
gaggatgacgtaggtaactctcccctcccaagtccatgttccaagtggctatgtaaagcaagatgatacagaaagctgctctaaaatctcactgagtgatttcaccttcgcctactatga

SEQ ID NO: 326762 - DNA, 120 bp, Artificial Sequence
  ENSG00000136193_28 (sequence is synthesized)
aatgtctcatcagacctgacatgtctgagataaccaaggtgattcaggatttgatcaaaagaagtctagtaagaattaattacacagaagcctcctttcatttctatgggccaaacaaag

SEQ ID NO: 326763 - DNA, 120 bp, Artificial Sequence
  ENSG00000136193_29 (sequence is synthesized)
gccatggataaccctacccgctttatgtcattacccattgggaaacacaatggctacttctgttagggtacattgaccttggtcaagcatcttaaagaaggcaaccctaattgagagctg

SEQ ID NO: 326764 - DNA, 120 bp, Artificial Sequence
  ENSG00000136193_30 (sequence is synthesized)
tcttggctaatactctgcaccacaattgtgatgtcctagtcctaccactagagggcatggtacagcctggcaaaagttaaaaggggtgtggcagctcccatcaggtctggaggtggtcta

SEQ ID NO: 326765 - DNA, 120 bp, Artificial Sequence
  ENSG00000136193_31 (sequence is synthesized)
taagcacagttgacagttgtgcattgggatgggtggagaaagacgacaagagagcagagaatctgctgatgtggctgcgcttacttttagtgactttatgtacttatattaacagctgga

SEQ ID NO: 326766 - DNA, 120 bp, Artificial Sequence
  ENSG00000136193_32 (sequence is synthesized)
aataggttgttgggttttgagcaggctgttatagtgaggaatgttcatttttaaatgttcctaacagattttgcttttgaaaaatgcttgttacatgaataatttgtggaccagggattg

SEQ ID NO: 326767 - DNA, 120 bp, Artificial Sequence
  ENSG00000136193_33 (sequence is synthesized)
cttttctgaaggcagtatagggaacatgaatattcaagatgaaatacaaaaattatgtttaagggtcatagtgtataagtagcttcctaggaaaccctttgtgtatcttttcagactggg

SEQ ID NO: 326768 - DNA, 120 bp, Artificial Sequence
  ENSG00000136193_34 (sequence is synthesized)
gtgggggctgagcatgcttgtgcagaaagaagccatagccagaaaggacagaatctctcccccactcccttgccccataaccaaacataagctagctagtcttgtctaatagatgggatt

SEQ ID NO: 326769 - DNA, 120 bp, Artificial Sequence
  ENSG00000136193_35 (sequence is synthesized)
tactataggtgaagatagccctcatattcaaggacagaagctctggcaggagtaaattagcaaagcagaaatagtaccctttcattcttggaggtgctttgaaattttaggtagaatata

SEQ ID NO: 326770 - DNA, 120 bp, Artificial Sequence
  ENSG00000136193_36 (sequence is synthesized)
atcgaaattatggaggttccttagtgctcaataatataagacctggtgttattagaacgagtctttcttataaactaacagagcaggtatatgcctgttagaccttagctgtggggttcc

SEQ ID NO: 326771 - DNA, 120 bp, Artificial Sequence
  ENSG00000136193_37 (sequence is synthesized)
tttactattgggtgaatcattaggtataaaaaataatcatcaaccaggcaaattactttgcttcctagctgatgtcatcccacattggtacaggtgttattcagtactgggtggttcagc

SEQ ID NO: 326772 - DNA, 120 bp, Artificial Sequence
  ENSG00000136193_38 (sequence is synthesized)
agggaagccgggtgggaccagtgtgtctgtcatgaaaccactaactgcattcctgactgaagagccatctgtcatttattggggaaggtcttcagttgagctctcagccttaggaaggaa

SEQ ID NO: 326773 - DNA, 120 bp, Artificial Sequence
  ENSG00000136193_39 (sequence is synthesized)
gcacgtggaggagggacggaggaggttcccttgctgggcatgcttcgtagagggccaggagcagcaggtcatgtgcacatgccgttgcagcacaagcttatgcttcccgtagccgtggct

SEQ ID NO: 326774 - DNA, 120 bp, Artificial Sequence
  ENSG00000136193_40 (sequence is synthesized)
tttcattctgcacagtcccaggtcccagctcccctcttatggtttctgtcataatgtgctttatctgattgactccaaacatcccgaaatgtcacctgcagatttctcgtgggaaccaat

SEQ ID NO: 326775 - DNA, 120 bp, Artificial Sequence
  ENSG00000136193_41 (sequence is synthesized)
atgtacatgtttgcaattatgctgtgagaatttaaatgtgttagatggaaaatgctattggcagggaataataataaaaaaaaaagaaaatcattctgtttcctgcagtgggaactggcc

SEQ ID NO: 326776 - DNA, 120 bp, Artificial Sequence
  ENSG00000136193_42 (sequence is synthesized)
atgtagtcttaacagtcttttgtacaaatatctacaaagcagataatatccctatccagtgcttgcccttggaattgtctctaaatgcatcaagcatacaataaaaaaaactgaaattaa

SEQ ID NO: 326777 - DNA, 120 bp, Artificial Sequence
  ENSG00000136193_43 (sequence is synthesized)
attaaacaatatctggtctcggtggctctgtcattccactgcaggcgtcccaccttcatttgccagctgggatctcttaatgagctagctgtgcacagttcaatagtaaaacccttttag

SEQ ID NO: 326778 - DNA, 120 bp, Artificial Sequence
  ENSG00000136193_44 (sequence is synthesized)
aaacgtcgggaagaggcgccaaaaggatgctgggcctggctccttgaagcccgggttttcccttttgagagccacaaccaagaaataaaaatctagcaaagagggggccactttctgcgg

SEQ ID NO: 326779 - DNA, 120 bp, Artificial Sequence
  ENSG00000136193_45 (sequence is synthesized)
ggatggatctggtcaggaacgggcagggtgagcttgacatacctgtgagaaggtcatgggctcccagggaaagattttcctataaaactaggaattgaattcaggagcatctaattccca

SEQ ID NO: 326780 - DNA, 120 bp, Artificial Sequence
  ENSG00000136193_46 (sequence is synthesized)
atattagataatggagaagcaaatggcaaggatggttaccttggctaccaagataaagaaccttgaaaagggaagaagatgaaatcagcttcggatatcaggcaggcagctgggtctgtg

SEQ ID NO: 326781 - DNA, 120 bp, Artificial Sequence
  ENSG00000136193_47 (sequence is synthesized)
ctctaggccacaatgtccaagtacctgggacagggtctggcttaccaacatggtacaggacggcacttttaaaaccagggactcgacttggacgtgcgagtcaacaaggatggctgcagc

SEQ ID NO: 326782 - DNA, 120 bp, Artificial Sequence
  ENSG00000136197_0 (sequence is synthesized)
cctcaataaacatggccgccacgccagcgtcaacccggctcgggaggccgcgctgccgcttgggaatcgcaggtttggcgtcacccggcccggaaccacgtgatgcaggaggtgcccgag

SEQ ID NO: 326783 - DNA, 120 bp, Artificial Sequence
  ENSG00000136197_1 (sequence is synthesized)
cggggctcgcgcgggtggagccgcctcggcgttcgagcggggtgggggctgcccggttgagatttcccggcgggtcccggcctctgcgtgcacgcgcctgcgtgctcgcgctcgcggttc

SEQ ID NO: 326784 - DNA, 120 bp, Artificial Sequence
  ENSG00000136197_2 (sequence is synthesized)
gttctggcgctgccggaaaggaataatgctgacagcatgtctgcacattccatgctctgtgaacgaatcgccatagccaaggaactgatcaagagagcagaatcactttctagatcaaga

SEQ ID NO: 326785 - DNA, 120 bp, Artificial Sequence
  ENSG00000136197_3 (sequence is synthesized)
aaaggtggcatagaaggtggtgcaaagctgtgcagcaaattgaaggcagaattaaaattcttgcagaaagtagaagctgggaaagtagctattaaagagtctcatttacagagcactaac

SEQ ID NO: 326786 - DNA, 120 bp, Artificial Sequence
  ENSG00000136197_4 (sequence is synthesized)
ctaacacacctgagagccattgtggaatcagcagaaaacctggaagaagttgttagtgttcttcatgtctttggttatacagataccttaggagaaaagcaaacccttgtggtagatgta

SEQ ID NO: 326787 - DNA, 120 bp, Artificial Sequence
  ENSG00000136197_5 (sequence is synthesized)
gttgcaaatggtggtcatacttgggtgaaagccattggccggaaggctgaagctcttcataacatctggctgggcaggggccaatatggtgacaaaagcatcattgagcaggctgaagac

SEQ ID NO: 326788 - DNA, 120 bp, Artificial Sequence
  ENSG00000136197_6 (sequence is synthesized)
ttcctccaggccagtcaccagcagccagtgcagtatagcaaccctcacatcatctttgcattttacaacagtgtctccagccccatggcagagaagctgaaagaaatgggcatatctgtg

SEQ ID NO: 326789 - DNA, 120 bp, Artificial Sequence
  ENSG00000136197_7 (sequence is synthesized)
agaggagacatagtagcagtcaacgctctgttagatcaccctgaagagcttcaaccaagtgagagtgaatcagatgatgagggccctgaacttttgcaggtgaccagagttgaccgagaa

SEQ ID NO: 326790 - DNA, 120 bp, Artificial Sequence
  ENSG00000136197_8 (sequence is synthesized)
aatatactagcaagtgttgcgtttccaacagaaattaaggtcgatgtgtgcaaaagagtaaatctggacattactactttaatcacatatgtatctgccctcagctatggaggctgccac

SEQ ID NO: 326791 - DNA, 120 bp, Artificial Sequence
  ENSG00000136197_9 (sequence is synthesized)
tttattttcaaagagaaagtgctcacagaacaagcagagcaagagaggaaagagcaggttctacctcagctggaggcctttatgaaggacaaggagttgtttgcttgtgaatctgctgtc

SEQ ID NO: 326792 - DNA, 120 bp, Artificial Sequence
  ENSG00000136197_10 (sequence is synthesized)
agggccactgtgttaattaagcgaattaatgtggtaccagaccagccttctgagcgtgccttgagactagtggccagttcaaaaattaatagccgctcattaacaatttttgggacggga

SEQ ID NO: 326793 - DNA, 120 bp, Artificial Sequence
  ENSG00000136197_11 (sequence is synthesized)
gacaccctaaaagccatcacaatgactgctaatagtggttttgtcagagctgcaaacaaccagggtgttaaatttagtgtgtttatccatcagcccagagcacttactgagagtaaagag

SEQ ID NO: 326794 - DNA, 120 bp, Artificial Sequence
  ENSG00000136197_12 (sequence is synthesized)
gctctagccacccccttaccaaaagactacacaactgacagtgaacactaaagataccctttaaatatttttgtggaagtaagttatttataccaaaggctgggtcttcccatctaaact

SEQ ID NO: 326795 - DNA, 120 bp, Artificial Sequence
  ENSG00000136197_13 (sequence is synthesized)
ggtgggaaaaaaggtctatagtaaaagtaaaactgagaactcttaaaccagtagagtttctttgtctctcatctaaagtatataacctcccaaagtagaaaaagcacaagagagaagctt

SEQ ID NO: 326796 - DNA, 120 bp, Artificial Sequence
  ENSG00000136197_14 (sequence is synthesized)
atctatcaaactgtctgcattagtgcaattaagaaccgaaatacgtctatataaagctttcagctgtattgtaatactttgattcgatagggctacaactcccctactgctaaccacatt

SEQ ID NO: 326797 - DNA, 120 bp, Artificial Sequence
  ENSG00000136197_15 (sequence is synthesized)
tcatggaatatggctacattgcatcttgcattaaatatctggagaaaattcaagcctgtttttcattgtattgctttatatggtttaggctgggaggtagtcgttggtaatcaattttag

SEQ ID NO: 326798 - DNA, 120 bp, Artificial Sequence
  ENSG00000136197_16 (sequence is synthesized)
attctaaggttaaccattaatgaaaaacttatttgctgtatgtcaggtgcagtctgataggtgtttttacaaaaagtacataatacagaagaaatgagaaagtgaattatggttatttga

SEQ ID NO: 326799 - DNA, 120 bp, Artificial Sequence
  ENSG00000136197_17 (sequence is synthesized)
gtgccatgaacccattggtagacctttgtgaaaagaaagccaacaatcttactactataagataaaaccaggacacttaaggtaaaatactaatttgaatgaattgaaaaaggattatgt

SEQ ID NO: 326800 - DNA, 120 bp, Artificial Sequence
  ENSG00000136197_18 (sequence is synthesized)
aaaagattttaaaaattcaatacagaaagcccccatattataagtatttgaacaataaatactattttcatgtttcatttgcaagtggcaagtgacaactgcattaccttactttcatga

SEQ ID NO: 326801 - DNA, 120 bp, Artificial Sequence
  ENSG00000136197_19 (sequence is synthesized)
gatggtgacagaatattccatgccaattccatgacacaagttgtagttaaaaatacacttctatggctacattgcgctagatactttatcagttttcaataaagcaaaactagcaaagtc

SEQ ID NO: 326802 - DNA, 80 bp, Artificial Sequence
  ENSG00000136197_20 (sequence is synthesized)
ggagccggggagcgaggcggggaggctgggagcggggcgcctcttctgaggccagagggggctgggcagggccggcccgg

SEQ ID NO: 326803 - DNA, 80 bp, Artificial Sequence
  ENSG00000136197_21 (sequence is synthesized)
ctggtccctgagccgcggcgctggcggtgggggcttttcggccccggcccctcctggcagggcccggctgtgcaggtggc

SEQ ID NO: 326804 - DNA, 120 bp, Artificial Sequence
  ENSG00000136197_22 (sequence is synthesized)
tctggcccgcccacccggcgacctgcgctggggccgcttgcacggccgccgcgggttgcagccttggagtttagtttcatcttcggattttccttcagagtcggagtgggagtgggacgc

SEQ ID NO: 326805 - DNA, 120 bp, Artificial Sequence
  ENSG00000136197_23 (sequence is synthesized)
gtgctcgcgctcgcggttctggcgctgccggaccatgctgtgtccccatggctttcaagctgaagaaatgaaggtctaaagtgtgtcagacgtacctaaagaagagttcaaaagtgtagc

SEQ ID NO: 326806 - DNA, 120 bp, Artificial Sequence
  ENSG00000136197_24 (sequence is synthesized)
tgccatcctttccttagctatcagaggaagcagtcactccagaatgagacatacacaagcccgggttcatagactcaccctccataagctgtgttgctagattgaagtttttaatcacca

SEQ ID NO: 326807 - DNA, 120 bp, Artificial Sequence
  ENSG00000136205_0 (sequence is synthesized)
actcggagcccagcctcgttgcggccatcgccctgccggaccgcgcctcaggctcccccagccggaagaattaacctcgagtctgcacgcttttaagaacaaggcctttaaaaaatccaa

SEQ ID NO: 326808 - DNA, 120 bp, Artificial Sequence
  ENSG00000136205_1 (sequence is synthesized)
agtgtgtggagtttgcaaacaaattattgacggtcaaggtatttcatgccgagcctgcaagtattcctgccacaagaaatgtgaagccaaggtggtgattccctgcggtgtgcaagtccg

SEQ ID NO: 326809 - DNA, 120 bp, Artificial Sequence
  ENSG00000136205_2 (sequence is synthesized)
actggaacaggctccagggagttccacgctgtccagttctctctgccgtgataaacctctgcggcccgtcatcctgagtcccaccatggaggagggccatgggctggacctcacttacat

SEQ ID NO: 326810 - DNA, 120 bp, Artificial Sequence
  ENSG00000136205_3 (sequence is synthesized)
cacggagcgcatcatcgctgtgtccttccctgccggctgctctgaggagtcctacctgcacaacctacaggaggtcacgcgcatgctcaagtccaagcacggggacaactacctggtatt

SEQ ID NO: 326811 - DNA, 120 bp, Artificial Sequence
  ENSG00000136205_4 (sequence is synthesized)
aaacctttcagaaaagagatatgaccttacgaagcttaacccaaagatcatggatgtgggctggccagagctccacgcaccgcccctggataagatgtgtaccatatgcaaggcgcagga

SEQ ID NO: 326812 - DNA, 120 bp, Artificial Sequence
  ENSG00000136205_5 (sequence is synthesized)
gtcctggctgaacagcaacctccagcatgtggtcgtcattcactgcaggggcgggaaaggacgcataggagtggtcatatcatcctacatgcatttcaccaacgtctcagccagcgccga

SEQ ID NO: 326813 - DNA, 120 bp, Artificial Sequence
  ENSG00000136205_6 (sequence is synthesized)
ccaggcccttgacaggtttgcaatgaagaagttttatgatgacaaagtttcagctttaatgcagccttcccaaaaacggtatgttcagttcctcagtgggctcctgtccggatcggtgaa

SEQ ID NO: 326814 - DNA, 120 bp, Artificial Sequence
  ENSG00000136205_7 (sequence is synthesized)
aatgaatgcctctcccctgttcctgcattttgtcatcctccacggcacccccaacttcgacacaggtggagtgtgccggccctttctgaagctctaccaagccatgcagcctgtgtacac

SEQ ID NO: 326815 - DNA, 120 bp, Artificial Sequence
  ENSG00000136205_8 (sequence is synthesized)
ctccgggatctacaacgttggcccagaaaaccccagcaggatctgcatcgtcatcgagccggcccagcttctgaagggagatgtcatggtgaaatgctaccacaagaaataccgctcggc

SEQ ID NO: 326816 - DNA, 120 bp, Artificial Sequence
  ENSG00000136205_9 (sequence is synthesized)
cacccgtgacgtcattttccgcctgcagtttcacactggggctgtgcagggctacgggctggtgtttgggaaggaggatctggacaatgccagcaaagatgaccgttttcctgactatgg

SEQ ID NO: 326817 - DNA, 120 bp, Artificial Sequence
  ENSG00000136205_10 (sequence is synthesized)
gaaggttgaattagtcttctctgccacgcctgagaagattcaagggtccgaacacttgtacaacgaccacggtgtgattgtggactacaacacaacagacccactgatacgctgggactc

SEQ ID NO: 326818 - DNA, 120 bp, Artificial Sequence
  ENSG00000136205_11 (sequence is synthesized)
gtacgagaacctcagtgcagatggagaagtgctacacacgcagggccctgtcgatggcagcctttacgcgaaggtgaggaagaaaagctcctcggatcctggcatcccaggtggccccca

SEQ ID NO: 326819 - DNA, 120 bp, Artificial Sequence
  ENSG00000136205_12 (sequence is synthesized)
ggcaatcccggccaccaacagcccagaccacagtgaccacaccttgtctgtcagcagtgactccggccactctacagcctctgccaggacggataagacggaagagcgcctggccccagg

SEQ ID NO: 326820 - DNA, 120 bp, Artificial Sequence
  ENSG00000136205_13 (sequence is synthesized)
aaccaggaggggcctgagtgcccaggagaaggcagagttggaccagctgctcagtggctttggcctggaagatcctggaagctccctcaaggaaatgactgatgctcgaagcaagtacag

SEQ ID NO: 326821 - DNA, 120 bp, Artificial Sequence
  ENSG00000136205_14 (sequence is synthesized)
tgggacccgccacgtggtgccagcccaggttcacgtgaatggagacgctgctctgaaggatcgggagacagacattctggatgacgagatgccccaccacgacctgcacagtgtggacag

SEQ ID NO: 326822 - DNA, 120 bp, Artificial Sequence
  ENSG00000136205_15 (sequence is synthesized)
ccttgggaccctgtcctcctcggaagggcctcagtcggcccacctgggtcccttcacctgccacaagagcagccagaactcactcctatctgacggttttggcagcaacgttggtgaaga

SEQ ID NO: 326823 - DNA, 120 bp, Artificial Sequence
  ENSG00000136205_16 (sequence is synthesized)
tccgcagggcaccctcgttccggacctgggccttggcatggacggcccctatgagcgggagcggacttttgggagtcgagagcccaagcagccccagcccctgctgagaaagccctcagt

SEQ ID NO: 326824 - DNA, 120 bp, Artificial Sequence
  ENSG00000136205_17 (sequence is synthesized)
gtccgcccagatgcaggcctatgggcagagcagctactccacacagacctgggtgcgccagcagcagatggttgtagctcaccagtatagcttcgccccagatggggaggcccggctggt

SEQ ID NO: 326825 - DNA, 120 bp, Artificial Sequence
  ENSG00000136205_18 (sequence is synthesized)
gagccgctgccctgcagacaatcctggcctcgtccaggcccagcccagagtgccactcacccccacccgagggaccagcagtagggtggctgtccagaggggtgtaggcagtgggccaca

SEQ ID NO: 326826 - DNA, 120 bp, Artificial Sequence
  ENSG00000136205_19 (sequence is synthesized)
tccccctgacacacagcagccctctcccagcaaagcgttcaaacccaggtttccaggagaccaggttgtgaatggagccggcccagagctgagcacaggcccctccccaggctcgcccac

SEQ ID NO: 326827 - DNA, 120 bp, Artificial Sequence
  ENSG00000136205_20 (sequence is synthesized)
cctggacatcgaccagtccatcgagcagctcaacaggctgatcctggagctggatcccaccttcgagcccatccctacccacatgaacgccctcggtagccaggccaatggctctgtgtc

SEQ ID NO: 326828 - DNA, 120 bp, Artificial Sequence
  ENSG00000136205_21 (sequence is synthesized)
tccagacagcgtgggaggtgggctccgggcaagcagcaggctgcctgacacaggagagggccccagcagggccaccgggcggcaaggctcctctgctgaacagcccctgggcgggagact

SEQ ID NO: 326829 - DNA, 120 bp, Artificial Sequence
  ENSG00000136205_22 (sequence is synthesized)
caggaagctgagcctggggcagtacgacaacgatgctggggggcagctgcccttctccaaatgtgcatggggaaaggctggtgtggactatgccccaaacctgccgccattcccctcacc

SEQ ID NO: 326830 - DNA, 120 bp, Artificial Sequence
  ENSG00000136205_23 (sequence is synthesized)
agcggacgtcaaagagacgatgacccctggctatccccaggacctcgatattatcgatggcagaattttaagtagcaaggagtccatgtgttcaactccagcatttcctgtgtctccaga

SEQ ID NO: 326831 - DNA, 120 bp, Artificial Sequence
  ENSG00000136205_24 (sequence is synthesized)
gacaccgtatgtgaaaacagcgctgcgccatcctccgttcagcccacctgagcccccgctgagcagcccagccagtcagcacaaaggaggacgtgaaccacgaagctgccctgagacgct

SEQ ID NO: 326832 - DNA, 120 bp, Artificial Sequence
  ENSG00000136205_25 (sequence is synthesized)
cactcacgctgtggggatgtcagagagccccatcggacccaaatccacgatgctccgggctgatgcgtcctcgacgccctcctttcagcaggcttttgcttcttcctgcaccatttccag

SEQ ID NO: 326833 - DNA, 120 bp, Artificial Sequence
  ENSG00000136205_26 (sequence is synthesized)
caacggccctgggcagaggagagagagctcctcttctgcagaacgccagtgggtggagagcagccccaagcccatggtttccctgctggggagcggccggcccaccggaagtcccctcag

SEQ ID NO: 326834 - DNA, 120 bp, Artificial Sequence
  ENSG00000136205_27 (sequence is synthesized)
cgctgagttctccggtaccaggaaggactccccagtgctgtcctgcttcccgccgtcagagctccaggctcctttccacagccatgagctgtccctagcagagccaccggactccctggc

SEQ ID NO: 326835 - DNA, 120 bp, Artificial Sequence
  ENSG00000136205_28 (sequence is synthesized)
gcctcccagcagccaggccttcctgggcttcggcaccgccccagtgggaagtggccttccgcccgaggaggacctgggggccttgctggccaattctcatggagcgtcaccgacccccag

SEQ ID NO: 326836 - DNA, 120 bp, Artificial Sequence
  ENSG00000136205_29 (sequence is synthesized)
catcccgctgacagcgacaggggctgccgacaatggcttcctgtcccacaactttctcacggtggcgcctggacacagcagccaccacagtccaggcctgcagggccagggtgtgaccct

SEQ ID NO: 326837 - DNA, 120 bp, Artificial Sequence
  ENSG00000136205_30 (sequence is synthesized)
gcccgggcagccacccctccctgagaagaagcgggcctcggagggggatcgttctttgggctcagtctctccctcctccagtggcttctccagcccgcacagcgggagcaccatcagtat

SEQ ID NO: 326838 - DNA, 120 bp, Artificial Sequence
  ENSG00000136205_31 (sequence is synthesized)
ttttccaaggcttcagaagcggcctcacctctgccagatagtccaggtgataaacttgtgatcgtgaaatttgttcaagacacttccaagttctggtacaaggcggatatttcaagagaa

SEQ ID NO: 326839 - DNA, 120 bp, Artificial Sequence
  ENSG00000136205_32 (sequence is synthesized)
caagccatcgccatgttgaaggacaaggagccgggctcattcattgttcgagacagccattccttccgaggggcctatggcctggccatgaaggtggccacgcccccaccttcagtcctg

SEQ ID NO: 326840 - DNA, 120 bp, Artificial Sequence
  ENSG00000136205_33 (sequence is synthesized)
cagctgaacaagaaagctggagatttggccaatgaactcgtccggcactttttgatcgagtgtaccccgaagggagtgcggttgaaagggtgctcgaatgaaccatatttcgggagcctg

SEQ ID NO: 326841 - DNA, 120 bp, Artificial Sequence
  ENSG00000136205_34 (sequence is synthesized)
acggccttggtgtgccagcattccatcacgcccttggccttgccgtgcaagctgcttatcccagagagagatccattggaggaaatagcagaaagttctccccagacggcagccaattca

SEQ ID NO: 326842 - DNA, 120 bp, Artificial Sequence
  ENSG00000136205_35 (sequence is synthesized)
gcagctgagctgttgaagcagggggcagcctgcaatgtgtggtacttgaactctgtggagatggagtccctcaccggccaccaggcgatccagaaggccctgagcatcaccctggtccag

SEQ ID NO: 326843 - DNA, 120 bp, Artificial Sequence
  ENSG00000136205_36 (sequence is synthesized)
gagcctccacctgtgtccacagttgtgcacttcaaggtgtcagcccagggcatcaccctgacagacaatcagaggaagctcttcttccggaggcattaccccgtgaacagtgtgattttc

SEQ ID NO: 326844 - DNA, 120 bp, Artificial Sequence
  ENSG00000136205_37 (sequence is synthesized)
tgtgccttggacccacaagacaggaagtggatcaaagatggcccttcctcaaaagtctttggatttgtggcccggaagcagggcagtgccacggataatgtgtgccacctgtttgcagag

SEQ ID NO: 326845 - DNA, 120 bp, Artificial Sequence
  ENSG00000136205_38 (sequence is synthesized)
catgaccctgagcagcctgccagtgccattgtcaacttcgtatcaaaggtcatgattggttccccaaagaaggtctgagaactcccctccctccctggacccaccgatgcctctcgaagc

SEQ ID NO: 326846 - DNA, 120 bp, Artificial Sequence
  ENSG00000136205_39 (sequence is synthesized)
cctggagacagccgttgggtgagggtggggcccccactttttaccaaactagtaaacctgacattccaggcccatgaggggaaagaggatcttccagctctgcaaaaacaagaacaaaca

SEQ ID NO: 326847 - DNA, 120 bp, Artificial Sequence
  ENSG00000136205_40 (sequence is synthesized)
acatcaccgtgaattggcctttcctgaaagtgacttatctgacacatctctgtagccacatgctttttgggtagaagaagctgggcatgggtgcaccccaccccctagggtccccatggg

SEQ ID NO: 326848 - DNA, 120 bp, Artificial Sequence
  ENSG00000136205_41 (sequence is synthesized)
aaagggacatgcaaggaaacagcacagaacacgaggtggtccccatgtccctggcacactagcattccgggggatgaggaatccccagcccttgaggcagaggtgccgagtgactgccat

SEQ ID NO: 326849 - DNA, 120 bp, Artificial Sequence
  ENSG00000136205_42 (sequence is synthesized)
gcttcgcccgtccgcatgggcgcttctgtccagctgcacccgaggccgggggtttccctcacctcggtcttcccaagatggagatgctaacgaaactgagaagggggcgtatgtttgacg

SEQ ID NO: 326850 - DNA, 120 bp, Artificial Sequence
  ENSG00000136205_43 (sequence is synthesized)
aaggtttgtgcaagtcaggcccttctggaacacagcagggcctacaacgaggggcctttgcgatgggctgtgaggatgggggtggtgggaagaattggccacgttggagaccccatgcca

SEQ ID NO: 326851 - DNA, 120 bp, Artificial Sequence
  ENSG00000136205_44 (sequence is synthesized)
ccccaccatggtgagtgctctgtgcctcctgctcacctgtggtgagctgggcgagctgggcgagctgggcgagctgggctggggagagcctgtgaggaccgagaggagaaatgagaagaa

SEQ ID NO: 326852 - DNA, 120 bp, Artificial Sequence
  ENSG00000136205_45 (sequence is synthesized)
ggaacaaaaatattatttctatgtaatttatattttacttatgccaaattatttatgataatttgccattgctatactgtaccagtgtcaaatgctgcagcctgccaagctgtgattttg

SEQ ID NO: 326853 - DNA, 120 bp, Artificial Sequence
  ENSG00000136205_46 (sequence is synthesized)
tgaggcttgtccctatgtaggatgcaccgcaggcccctggccactgaaagagtgtgcagtggactgtgggtctcccatatgcggtgccgcccaaaggtggctttgcctcaagcaacctac

SEQ ID NO: 326854 - DNA, 120 bp, Artificial Sequence
  ENSG00000136205_47 (sequence is synthesized)
cctgatgttttactcattggaatgtttttccccgattgtggatgacttcttttctgatggagagagtccaggagggatggaaaactcctggatttaagctcagcatcccccacatgggct

SEQ ID NO: 326855 - DNA, 120 bp, Artificial Sequence
  ENSG00000136205_48 (sequence is synthesized)
tttcgatcatcttcaggcctgaagctgcacgacctgaagttcgcctgcatttatcagccctctttgtgctgctccttgccaccttggggttcctgctggggaccatgtgtggttgtggca

SEQ ID NO: 326856 - DNA, 120 bp, Artificial Sequence
  ENSG00000136205_49 (sequence is synthesized)
tgtgtgagcagaagggaggatgaggaaaaagagaagaaaccccggtactgacaagctgtttttgagtgccactgtttgccatcatctaagccactgaatcaagtgtatttcaggcttatt

SEQ ID NO: 326857 - DNA, 120 bp, Artificial Sequence
  ENSG00000136205_50 (sequence is synthesized)
tcaacattccaatgccctggttttcctgcttgaatctgttcgtggtcaaaggtttgggggaatttgtgaccctggaacatccccagagtgaaagatggagctgggccacatcagaataag

SEQ ID NO: 326858 - DNA, 120 bp, Artificial Sequence
  ENSG00000136205_51 (sequence is synthesized)
gccttggccccatcctctcacagcctaggtgctctgcaggcatgctgactgtcctgattgcgatccagcccgaaattccctcctctgctttcaaaagtcaaatcccccattcttaggcca

SEQ ID NO: 326859 - DNA, 120 bp, Artificial Sequence
  ENSG00000136205_52 (sequence is synthesized)
cactggtgtcacaagctcctgtcagggagctggggtttgggaatgtgctttgtgaactctgctttaaagtgaggggccgaggaaaacttagaaacaggcagagttggaagcagccaaatc

SEQ ID NO: 326860 - DNA, 120 bp, Artificial Sequence
  ENSG00000136205_53 (sequence is synthesized)
acagtgggtgttgtgtgtgtgtgcgtgtgtgcatgcgtgcgtgtatgcgtgtgtgaaagcaggtggaccattccactttttagctcctattgatgcaccaaaccaagtgcctcatttctg

SEQ ID NO: 326861 - DNA, 120 bp, Artificial Sequence
  ENSG00000136205_54 (sequence is synthesized)
tgccaaatgtttgccttggtcgttgtggacctccttctctaacttgcggtggcatgactgtcaggaggtgctggcattttcagcagatcctcatgtgttgaccctgatgtctttagcaga

SEQ ID NO: 326862 - DNA, 120 bp, Artificial Sequence
  ENSG00000136205_55 (sequence is synthesized)
ggcctctagcatctcggtttttcatccactgcaggaatgtggccacagggagcagaggtttgtactttccccaagaggtcctcatcctgagacggtctctacccatgtttaacccaaaga

SEQ ID NO: 326863 - DNA, 120 bp, Artificial Sequence
  ENSG00000136205_56 (sequence is synthesized)
gtgcaggccaggttccttatccttctgatgaaggatgagagagctcatttagaagtcagagcaaactagggtctcagtattgagaaacgcagcctgccagggaatcacagagacatcggg

SEQ ID NO: 326864 - DNA, 120 bp, Artificial Sequence
  ENSG00000136205_57 (sequence is synthesized)
gtgcccgcgatggccctcatgaagccatgcctcgacggcattcaggaagccctgcaaacgtgctttttgaactcattggccaggtgtgatttttacacaaggtaaacgtggtcaagggca

SEQ ID NO: 326865 - DNA, 120 bp, Artificial Sequence
  ENSG00000136205_58 (sequence is synthesized)
tcggggaatttgctccaagcagatagctccctctgaggaaccaaaggaagcaagtttccacgatttctgaagagctggtataggaagtttctttcttccttttgtgttacatgtgcatta

SEQ ID NO: 326866 - DNA, 120 bp, Artificial Sequence
  ENSG00000136205_59 (sequence is synthesized)
aacagaacaagctgtgtgtcatcacagattgtactgtgggctcagaaaccgtgagagagcccccaccgtggacaccggctctagggccacaggaaaaggaacgtttccaggcattttgtc

SEQ ID NO: 326867 - DNA, 120 bp, Artificial Sequence
  ENSG00000136205_60 (sequence is synthesized)
tccagggctcccgctggacaggcacgtactgccctggggagtaaatgcggagagttcacgaactgtgcccaacgcatgttatagccagggtcctactaactactcagtaaaagaacgtat

SEQ ID NO: 326868 - DNA, 120 bp, Artificial Sequence
  ENSG00000136205_61 (sequence is synthesized)
tgttgtattcctccagtgttaagctatagccatgttaaaagtcactgtgcatttattctcagcatcaaataccttgtaacgtcttctctgccttgttagtgcatatttttacttttctga

SEQ ID NO: 326869 - DNA, 120 bp, Artificial Sequence
  ENSG00000136205_62 (sequence is synthesized)
tactgtaaagaatatatccagtatgtaaatgaatgttctataaatcttttgtatagtcattttctctgctccttaaatatcatctctattcagagtataataaaattatgaacttggtaa

SEQ ID NO: 326870 - DNA, 120 bp, Artificial Sequence
  ENSG00000136205_63 (sequence is synthesized)
aggctggccctcagccccgggcggacattgtcctgtgagctccatgcctgcgtgctcaccgtggggccgggcacacctgccagctgctcctggctgtggttctggggactcccacactca

SEQ ID NO: 326871 - DNA, 120 bp, Artificial Sequence
  ENSG00000136205_64 (sequence is synthesized)
ccaggctctcccacctggtgggctattccagctgcctcctttatgcccagagctgccgagacattaacacgaagaggggtgtgcttgactaaagcaggggaaggagcgaaacgtaggagg

SEQ ID NO: 326872 - DNA, 120 bp, Artificial Sequence
  ENSG00000136205_65 (sequence is synthesized)
cgcgactcccactaggctatgagctacaggagggagggtaggtcttgctcccggagagcaccttaatcacaggcgctgaatgaaagaatgaactggttgtgcaggaaccaggatccgaac

SEQ ID NO: 326873 - DNA, 120 bp, Artificial Sequence
  ENSG00000136205_66 (sequence is synthesized)
gcctcgttgcggccatcgccctgccggaccgcgcctcaggctcccccaggaggtgttgctgaaggggatagcagagacctgaggaggaggcagtatggcaagaacagtgagtggaagggc

SEQ ID NO: 326874 - DNA, 120 bp, Artificial Sequence
  ENSG00000136205_67 (sequence is synthesized)
tgacctaccatttggcagtcgcagcttatatctgcttaggactctacacaaggacccattttacagatgagtaaaataccaagtaaattcttaaagtctgggaacagttagggatctgaa

SEQ ID NO: 326875 - DNA, 120 bp, Artificial Sequence
  ENSG00000136205_68 (sequence is synthesized)
tgagcccagttctctgactctatgtgccccattcctttcttaagatcagcctgttgtaaaccacccctgttcaggggaagcctcttgttccctccctgtgtccctgtgtatgaacttgag

SEQ ID NO: 326876 - DNA, 120 bp, Artificial Sequence
  ENSG00000136205_69 (sequence is synthesized)
cacttactaggaagccagagacatttgctgagtgcctcagcagcacgcttagaattgaggcttcgaggcttcctcacagcggcccccatagatttcccagggaggggcctcctgtcttgc

SEQ ID NO: 326877 - DNA, 120 bp, Artificial Sequence
  ENSG00000136205_70 (sequence is synthesized)
gggttgatctggtgggtttgccccatgcagcaggagctatcatgggaagggtgggtctgggcgtctgaagctctccaggaggtcagctgaccctgggaccccgggtccttcctgtaggac

SEQ ID NO: 326878 - DNA, 120 bp, Artificial Sequence
  ENSG00000136205_71 (sequence is synthesized)
cccagaaatcactggggaatcagctaacccctgcaagctgtgcctggaatgacctagagccagtcctgtctacctagaatcctctgctgctatccttgttgatctagaatgagggatgct

SEQ ID NO: 326879 - DNA, 120 bp, Artificial Sequence
  ENSG00000136205_72 (sequence is synthesized)
caataaaaagccaccttcaaccatttgccttccactctggcttgcataggcagtgggctggcctgtgctcctggccgttgttcctgggtggaccccagagagtatgaatcctggtactca

SEQ ID NO: 326880 - DNA, 120 bp, Artificial Sequence
  ENSG00000136205_73 (sequence is synthesized)
ggttggaggagttttatcctgctgggggctatctgttcattgctgaattcagatttctttggccggttcctgtgggcaccatgccggaagaattaacctcgagtctgcacgcttttaaga

SEQ ID NO: 326881 - DNA, 120 bp, Artificial Sequence
  ENSG00000136205_74 (sequence is synthesized)
agaatgggaaactgccttgggagaagccccaagtgagcccaagggcgcagagcagaaggaccctggagtgtaagagcctagattgcaagcctggcaggaggagccggaagaattaacctc

SEQ ID NO: 326882 - DNA, 120 bp, Artificial Sequence
  ENSG00000136205_75 (sequence is synthesized)
tgctaagaagaaaaaatttcccctgttttctcagaggtccagaatcacaccttcgtgtgacacagttgtgagttttgagggtcttcgtgagaataaggcatggtgagtttgggtcagggc

SEQ ID NO: 326883 - DNA, 120 bp, Artificial Sequence
  ENSG00000136205_76 (sequence is synthesized)
gattttctgtgccttggacccacaagacaggaagtggatcaaagatggcccttcctcaaagtaagttgctgagatttctttacattctctccttgtctgcagttgtactccaaagttgaa

SEQ ID NO: 326884 - DNA, 120 bp, Artificial Sequence
  ENSG00000136205_77 (sequence is synthesized)
ttctcttccagatttgcacagggggtgccttataagaaaatgactacaccatgccaatttcttttaaaaaagaaaaaagtaaaagtgttctcattatggacaaggatctggatgctgtta

SEQ ID NO: 326885 - DNA, 120 bp, Artificial Sequence
  ENSG00000136205_78 (sequence is synthesized)
acttttctgccggctgttggctggatgtgcaatatttacatgtgtcatataacactgtggcatagatacagggagatggatggcacagcctttttggccatttgggaatgcatgggctca

SEQ ID NO: 326886 - DNA, 120 bp, Artificial Sequence
  ENSG00000136205_79 (sequence is synthesized)
gcagtgctgaggtctgcacagctagaaggaattgctccctttgtgcaggtgtgtggatgaagcgggtgttccaaatttaccaaatgcaacggaggagggccttcatcacaccgttgctcc

SEQ ID NO: 326887 - DNA, 65 bp, Artificial Sequence
  ENSG00000136205_80 (sequence is synthesized)
caaatgcaacggaggagggccttcatcacaccgttgctccacagccagtccaggcagctgttaga

SEQ ID NO: 326888 - DNA, 120 bp, Artificial Sequence
  ENSG00000136205_81 (sequence is synthesized)
ctcagcctcccaaagtgccgggattaaaggtgtgagccaccgtgcccggcttagagttccccttttataagcacacctttccctggctccctgagtaccgtggccttgcttggcctgggc

SEQ ID NO: 326889 - DNA, 120 bp, Artificial Sequence
  ENSG00000136205_82 (sequence is synthesized)
ccctgagtaccgtggccttgcttggcctgggctcattcctggcccagtgttcctgtcagggccagctgagggacctcatcctaacctcccacttggaggcacaatgggctgtatcccccc

SEQ ID NO: 326890 - DNA, 120 bp, Artificial Sequence
  ENSG00000136205_83 (sequence is synthesized)
agcctggtttcctcggcataacccggatttaatgaccacagtgcctgatcacaggcatccttccctggaatcctgttttcaaatggcttgtctgtccaggaagttgctcagtgcatgcgt

SEQ ID NO: 326891 - DNA, 120 bp, Artificial Sequence
  ENSG00000136205_84 (sequence is synthesized)
tagcagaagcggggagaaggagaagagaccctggtactgacgagctgggcttccccggtggggactgtgttctgggcacactcccactctggctggtagcagaaacacgggctttcatgt

SEQ ID NO: 326892 - DNA, 120 bp, Artificial Sequence
  ENSG00000136205_85 (sequence is synthesized)
gcttggaatttgtgactgtattggggttacctgagtgtcattgactggtcccttcatgatgcggaaactgctaaatttaaacaaaaaaaatccttcatttttctaagaaagagaagaaag

SEQ ID NO: 326893 - DNA, 120 bp, Artificial Sequence
  ENSG00000136205_86 (sequence is synthesized)
tcctttgcccaggacctggatagggatatggtcattattgtgtgaagtgcaggactcataaaagcctattaagataatggctctaattcttctaagaaaaataattcgatgggctgttct

SEQ ID NO: 326894 - DNA, 120 bp, Artificial Sequence
  ENSG00000136205_87 (sequence is synthesized)
ttttaaacagctccctgaagtctatgtagtttgtaatgcaggcttccaaggcctgagaggagcgcctagtgtatttccccttcggtcccagtgggtgggagtgtcgaagtccagacagga

SEQ ID NO: 326895 - DNA, 120 bp, Artificial Sequence
  ENSG00000136205_88 (sequence is synthesized)
cttgcattctggcatcatctcaggagcccctgagtcccttgccactcgccttgcagactgtggtccagtatgtcaggactggggctcaggaatctgcagggacaggtgcccaggagattc

SEQ ID NO: 326896 - DNA, 120 bp, Artificial Sequence
  ENSG00000136205_89 (sequence is synthesized)
tggccctggcgtggggaagcatctatagaggaagttgagcctcagctttgattcaggtcctaacctggggctgtggacagggcactcacctctcagcctcagggtcctcactgcagagct

SEQ ID NO: 326897 - DNA, 120 bp, Artificial Sequence
  ENSG00000136205_90 (sequence is synthesized)
agagtcagacatcccatctgtaggtctgtgaaggctggaggtaaagtgcatgaacaggtggccagcagggtgctgggcacgtggttgatttttgataggtgccacttaaaattcctcctg

SEQ ID NO: 326898 - DNA, 120 bp, Artificial Sequence
  ENSG00000136205_91 (sequence is synthesized)
acagtgccgctggcagctggaggaagtagaagcttggtactttgtgggacactgaccactctgactggactttcctttggcagagtctttggatttgtggcccggaagcagggcagtgcc

SEQ ID NO: 326899 - DNA, 120 bp, Artificial Sequence
  ENSG00000136205_92 (sequence is synthesized)
agccttaggagtatttgaaagcttgtgctgtgaaaaataggaatcttacaggagaatcatatggggcctggagaggaacctgtttgggacaggccgattcccatctcctgccactctgta

SEQ ID NO: 326900 - DNA, 120 bp, Artificial Sequence
  ENSG00000136205_93 (sequence is synthesized)
ccactcgagtgggacccgtggcgcccgggcgccctggactgagggcagagaccggagcagctatgtcgcagtcgctgtcgggaccgagcggactttgctccctaggactccgtctcgaga

SEQ ID NO: 326901 - DNA, 120 bp, Artificial Sequence
  ENSG00000136205_94 (sequence is synthesized)
ctccaggtggagagcgcagctaggggcttcaatgggcaggctcaagacccttctcctactttttctaggacttgtccaaggtggatctgagcctcctcatgtgctccaggcagagatcag

SEQ ID NO: 326902 - DNA, 82 bp, Artificial Sequence
  ENSG00000136206_0 (sequence is synthesized)
tggggaggggaaggagcggcacatggggttgagcagaggagaaaatcagaaagatggcttagagaagtcagcagtctgcgag

SEQ ID NO: 326903 - DNA, 66 bp, Artificial Sequence
  ENSG00000136206_1 (sequence is synthesized)
tggctggaaaaggaagagggagtggtcagatgaatctgaggaggagccggagaaggagctcgcccc

SEQ ID NO: 326904 - DNA, 120 bp, Artificial Sequence
  ENSG00000136206_2 (sequence is synthesized)
ctcgcccctgagcctgaggagacctgggtagtggagacgctgtgtgggctcaagatgaagctgaagcaacagcgagtgtcacccatcctccttgagcaccacaaggacttcaacagtcag

SEQ ID NO: 326905 - DNA, 120 bp, Artificial Sequence
  ENSG00000136206_3 (sequence is synthesized)
tccttgagcaccacaaggacttcaacagtcagcttgcccctggggtagatcccagccccccgcataggtccttttgctggaaaaggaagatggagtggtgggacaaatctgaggagtcgg

SEQ ID NO: 326906 - DNA, 120 bp, Artificial Sequence
  ENSG00000136206_4 (sequence is synthesized)
ctgaggagtcggaggaggagccacggaaggtgctcgcccctgagcctgaggagatctgggtggcggagatgctgtgtggcctcaagatgaagctgaagcgacggcgagtgtcgctcgtgc

SEQ ID NO: 326907 - DNA, 73 bp, Artificial Sequence
  ENSG00000136206_5 (sequence is synthesized)
aagatgctatggtcatagcgtatttcagccgagccggcttcccctcctggcaataccaacgccttcatttctt

SEQ ID NO: 326908 - DNA, 120 bp, Artificial Sequence
  ENSG00000136206_6 (sequence is synthesized)
ccggcttcccctcctggcaataccaacgccttcatttcttcctggctctctacctggccaatgacatggaggaggacgacgaggactccaaacaaaacatcttccacttcctgtatggga

SEQ ID NO: 326909 - DNA, 120 bp, Artificial Sequence
  ENSG00000136206_7 (sequence is synthesized)
agaaccgctctcgcatacccttgctccgtaagcgtcggttccagttataccgttccatgaacccgagggccaggaagaaccgctctcacatacccttggtccgtaagcgtcggttccagt

SEQ ID NO: 326910 - DNA, 120 bp, Artificial Sequence
  ENSG00000136206_8 (sequence is synthesized)
tacgccgttgcatgaacccgagggccaggaagaaccgctctcagatagtcctgttccagaaacgtcggttccacttcttctgttccatgagctgcagggcttgggtttccccagaggagt

SEQ ID NO: 326911 - DNA, 68 bp, Artificial Sequence
  ENSG00000136206_9 (sequence is synthesized)
tgttccatgagctgcagggcttgggtttccccagaggagttggacgcctttcctagagctccagggac

SEQ ID NO: 326912 - DNA, 90 bp, Artificial Sequence
  ENSG00000136206_10 (sequence is synthesized)
tctagaagaacctggaccattcttgatggagctgaatacagtgatcacgttgtcctcctaggagcaggggtggggggagggggatggggt

SEQ ID NO: 326913 - DNA, 78 bp, Artificial Sequence
  ENSG00000136206_11 (sequence is synthesized)
gtgtttccagttccaccctttcctggggcaccaccaccctttttatattgctgaatggacttggttgccacagtccag

SEQ ID NO: 326914 - DNA, 120 bp, Artificial Sequence
  ENSG00000136206_12 (sequence is synthesized)
atttgaaggcacaatgcaggggctcagattggcacagaattcttttgtgaaatatcagtgccacagattgtaacagatagcttcatgcacactctgcattttattggtttgtttggaaaa

SEQ ID NO: 326915 - DNA, 77 bp, Artificial Sequence
  ENSG00000136206_13 (sequence is synthesized)
ttttgaaaacatgctgttcctgtaattttcttttcatttttgagacaattctttttatcctaaatattttatcatct

SEQ ID NO: 326916 - DNA, 72 bp, Artificial Sequence
  ENSG00000136206_14 (sequence is synthesized)
tatctatgtttgaaatgtgagaattcagatgtaattttttaccttgatttggcatgtttgtatgttacttta

SEQ ID NO: 326917 - DNA, 120 bp, Artificial Sequence
  ENSG00000136206_15 (sequence is synthesized)
accctcagcagagacagaccccagatctgggcccaggactttgtgcagggaggggaaatgcagcagtgtccagaagaaggccatggacagaacggagactaggttccgtaagaggggaca

SEQ ID NO: 326918 - DNA, 120 bp, Artificial Sequence
  ENSG00000136206_16 (sequence is synthesized)
aggttccgtaagaggggacagattacgggaaagatcacgaccagccgtcaaccgcaccgccagaatgagcagagtccccagcggagcacctcggggtaccccctccaggaggtggtggat

SEQ ID NO: 326919 - DNA, 120 bp, Artificial Sequence
  ENSG00000136213_0 (sequence is synthesized)
gggctgcctctggggggtccgctagtcgcggggcggcggcggcggctgcgggcgcgaggttcccagcaggatgccccggctctgcaggaagctgaagtgagaggcccggagagggcccag

SEQ ID NO: 326920 - DNA, 120 bp, Artificial Sequence
  ENSG00000136213_1 (sequence is synthesized)
cccgcccggggcaggatgaccaaggcccggctgttccggctgtggctggtgctggggtcggtgttcatgatcctgctgatcatcgtgtactgggacagcgcaggcgccgcgcacttctac

SEQ ID NO: 326921 - DNA, 120 bp, Artificial Sequence
  ENSG00000136213_2 (sequence is synthesized)
ttgcacacgtccttctctaggccgcacacggggccgccgctgcccacgcccgggccggacagggacagggagctcacggccgactccgatgtcgacgagtttctggacaagtttctcagt

SEQ ID NO: 326922 - DNA, 120 bp, Artificial Sequence
  ENSG00000136213_3 (sequence is synthesized)
gctggcgtgaagcagagcgaccttcccagaaaggagacggagcagccgcctgcgccggggagcatggaggagagcgtgagaggctacgactggtccccgcgcgacgcccggcgcagccca

SEQ ID NO: 326923 - DNA, 120 bp, Artificial Sequence
  ENSG00000136213_4 (sequence is synthesized)
gaccagggccggcagcaggcggagcggaggagcgtgctgcggggcttctgcgccaactccagcctggccttccccaccaaggagcgcgcattcgacgacatccccaactcggagctgagc

SEQ ID NO: 326924 - DNA, 120 bp, Artificial Sequence
  ENSG00000136213_5 (sequence is synthesized)
cacctgatcgtggacgaccggcacggggccatctactgctacgtgcccaaggtggcctgcaccaactggaagcgcgtgatgatcgtgctgagcggaagcctgctgcaccgcggtgcgccc

SEQ ID NO: 326925 - DNA, 120 bp, Artificial Sequence
  ENSG00000136213_6 (sequence is synthesized)
taccgcgacccgctgcgcatcccgcgcgagcacgtgcacaacgccagcgcgcacctgaccttcaacaagttctggcgccgctacgggaagctctcccgccacctcatgaaggtcaagctc

SEQ ID NO: 326926 - DNA, 120 bp, Artificial Sequence
  ENSG00000136213_7 (sequence is synthesized)
aagaagtacaccaagttcctcttcgtgcgcgaccccttcgtgcgcctgatctccgccttccgcagcaagttcgagctggagaacgaggagttctaccgcaagttcgccgtgcccatgctg

SEQ ID NO: 326927 - DNA, 120 bp, Artificial Sequence
  ENSG00000136213_8 (sequence is synthesized)
cggctgtacgccaaccacaccagcctgcccgcctcggcgcgcgaggccttccgcgctggcctcaaggtgtccttcgccaacttcatccagtacctgctggacccgcacacggagaagctg

SEQ ID NO: 326928 - DNA, 120 bp, Artificial Sequence
  ENSG00000136213_9 (sequence is synthesized)
gcgcccttcaacgagcactggcggcaggtgtaccgcctctgccacccgtgccagatcgactacgacttcgtggggaagctggagactctggacgaggacgccgcgcagctgctgcagcta

SEQ ID NO: 326929 - DNA, 120 bp, Artificial Sequence
  ENSG00000136213_10 (sequence is synthesized)
ctccaggtggaccggcagctccgcttccccccgagctaccggaacaggaccgccagcagctgggaggaggactggttcgccaagatccccctggcctggaggcagcagctgtataaactc

SEQ ID NO: 326930 - DNA, 120 bp, Artificial Sequence
  ENSG00000136213_11 (sequence is synthesized)
tacgaggccgactttgttctcttcggctaccccaagcccgaaaacctcctccgagactgaaagctttcgcgttgctttttctcgcgtgcctggaacctgacgcacgcgcactccagtttt

SEQ ID NO: 326931 - DNA, 120 bp, Artificial Sequence
  ENSG00000136213_12 (sequence is synthesized)
tttatgacctacgattttgcaatctgggcttcttgttcactccactgcctctatccattgagtactgtatcgatattgttttttaagattaatatatttcaggtatttaatacgaaatgt

SEQ ID NO: 326932 - DNA, 120 bp, Artificial Sequence
  ENSG00000136213_13 (sequence is synthesized)
ggaagggaatgctggagtaaaatatcccctctcccctccgcccgcccacccgcccgcccgctcgcccgctcgcccgctcctgtggtttttctgagcgtgcgggcgccgggaggggatgct

SEQ ID NO: 326933 - DNA, 120 bp, Artificial Sequence
  ENSG00000136213_14 (sequence is synthesized)
gaggctgatggagctgcctccagggctagggccactcaccggaggagggcggggcctgcacttgaagtcaggccgcacctgtctgtttttggaagggtagccgacaaatccttccagagg

SEQ ID NO: 326934 - DNA, 120 bp, Artificial Sequence
  ENSG00000136213_15 (sequence is synthesized)
gaaagttctttgtttaagtgttgtacttgaaaaggtcaatcttcagggcttcctgtttgaagtcaagtcagaggtaaaccggtcagttacagaagcaggatttctaggatttctaactcc

SEQ ID NO: 326935 - DNA, 120 bp, Artificial Sequence
  ENSG00000136213_16 (sequence is synthesized)
agctgttcccatactgtctagtttaaattatggctgttaaggccgggcgggtgactcaggcaggtaatcccagaactttgggaggcccagacagaaggatcgcttgaggtcaggaatttg

SEQ ID NO: 326936 - DNA, 75 bp, Artificial Sequence
  ENSG00000136213_17 (sequence is synthesized)
tgcagtgagctgagatcgcgataaataaataaatattaatacattatggctattaaggctgggcacggtggctca

SEQ ID NO: 326937 - DNA, 89 bp, Artificial Sequence
  ENSG00000136213_18 (sequence is synthesized)
tgacagagtgagattccatctcaaaataaataaataaatattaatacattatggctattaatggcactttgggaggctgaggggggaag

SEQ ID NO: 326938 - DNA, 73 bp, Artificial Sequence
  ENSG00000136213_19 (sequence is synthesized)
gacctcatctctacaaaaaataaaaaggacgtggtggtgcacatctgtaaacccagctactcaggaggctgag

SEQ ID NO: 326939 - DNA, 84 bp, Artificial Sequence
  ENSG00000136213_20 (sequence is synthesized)
atcacttgagcccaggagttcaagatcagtttggaccacatagcgagaccctgtgtctacaaaaaataagaaaatcagccggac

SEQ ID NO: 326940 - DNA, 120 bp, Artificial Sequence
  ENSG00000136213_21 (sequence is synthesized)
gccactgcactccagcctgggcagcaaagtgagactctgtttctaaatagacagatagaagataggtagatagatagattaaatagaaagtaaactatggctgttgaggtttacagttgg

SEQ ID NO: 326941 - DNA, 120 bp, Artificial Sequence
  ENSG00000136213_22 (sequence is synthesized)
aactatggctgttgaggtttacagttggcaggagtggagtggtttggcgtttatctctagaccgtgctggatgacagtacccagtgtcaccaagaagaggctccgtgtgactgtctctgt

SEQ ID NO: 326942 - DNA, 120 bp, Artificial Sequence
  ENSG00000136213_23 (sequence is synthesized)
ggctttctggttggtttagctccagtgccttcaccctcaaggacacgactgaccttgaaccctcaggtttgatgggccctgtcttgataaaagtgtcagaggaggctctggaaacatctg

SEQ ID NO: 326943 - DNA, 120 bp, Artificial Sequence
  ENSG00000136213_24 (sequence is synthesized)
gctgaaactcctttgctatttctgcttctaagctgtagttggagagatggttgcaatcatttcgtggtgtcgggcaccctgcttgacctgtcttcctcgtgtgtggtatttgtcaccact

SEQ ID NO: 326944 - DNA, 120 bp, Artificial Sequence
  ENSG00000136213_25 (sequence is synthesized)
gcccagtccctggttgctggccacgctcagttgggacataccctggtgtcctctgtgtgtggtgtccctgtgtttcccaggctcaggtgggcttgtgtgggtcttggcccccagtgcctg

SEQ ID NO: 326945 - DNA, 120 bp, Artificial Sequence
  ENSG00000136213_26 (sequence is synthesized)
aggtgggcttgtgtgggtcttggcccccagtgcctgctagcctcaggtgtcccctgtgttagacacctcctgccttcctttctgaagcttcgctttcttttatttttgttttgttttgtt

SEQ ID NO: 326946 - DNA, 120 bp, Artificial Sequence
  ENSG00000136213_27 (sequence is synthesized)
acctcctgggctcaagtgatcttcccatctcagactcccaagtagctggggttacaggtgagcgccagcctgcccagctagttttttattttcagcagagatgaggtctcactgtgttgc

SEQ ID NO: 326947 - DNA, 120 bp, Artificial Sequence
  ENSG00000136213_28 (sequence is synthesized)
cacctggcccctccaagttttttattatgataaaaatgtttaattttaaacgtaccatcttaaccattgttaagtgcactgttgtgtggcattaagcacattcgtattgtcgtgccacca

SEQ ID NO: 326948 - DNA, 120 bp, Artificial Sequence
  ENSG00000136213_29 (sequence is synthesized)
ccaccatcatctccagagctttctcatcttcccaaactgaaactctgtccccattcagcactcgctccccattggtagaaggcagcagcttccactctctgatttctactacccgagctc

SEQ ID NO: 326949 - DNA, 120 bp, Artificial Sequence
  ENSG00000136213_30 (sequence is synthesized)
cctcagaaatggagtcacacagtattggtccttttgggactgaagtacttcacctcatgcaatgtcctctaggttcatcggtgtcgtggcaggtgtcagaactaacttcctttctgaggc

SEQ ID NO: 326950 - DNA, 120 bp, Artificial Sequence
  ENSG00000136213_31 (sequence is synthesized)
ggaataatgtcccattgtgtggaagaggcatggtttgtttatctgttcatcagttggtggacactgagttgcttctgccttcctgcgaatgtgaattgaatgctgctgtgaacagggtgt

SEQ ID NO: 326951 - DNA, 120 bp, Artificial Sequence
  ENSG00000136213_32 (sequence is synthesized)
cagtgaatctgctgagggcttgttttccgtattctgggcatggccctttgtgtctgcctttgctggagcacctccccgggatgcgtttgtttataggatgttcagacgaatgtcagaacc

SEQ ID NO: 326952 - DNA, 120 bp, Artificial Sequence
  ENSG00000136213_33 (sequence is synthesized)
cactgggcggttcactcactgaggggggcccgcgtcccctccatttctgcattcccagttcttggtatggttcctctgaggttcggttttcctgagcacctggggtgtttgcagggatgt

SEQ ID NO: 326953 - DNA, 120 bp, Artificial Sequence
  ENSG00000136213_34 (sequence is synthesized)
ggaggggttcctgcagaagacaccacccacatccacgcacctgctcagattcccgggccatggtcggggccaccgcccgtggggatgactccggatgggagtggcagaaaagggcctgct

SEQ ID NO: 326954 - DNA, 120 bp, Artificial Sequence
  ENSG00000136213_35 (sequence is synthesized)
gggccgaggggaggcgtctccgggaagagagggaggtgtgagcggggagaacccactttgattcttcgctgtttgcctgatgcgcagcaccacactgcgtagagacctttggctctggtt

SEQ ID NO: 326955 - DNA, 120 bp, Artificial Sequence
  ENSG00000136213_36 (sequence is synthesized)
ttttctttttccactgaaacacagcaaattatacattttatgaaaattggcatcgtacaactggaaaatttaaccataaacttaaaactcttttaccctgttggcccccatcctccagct

SEQ ID NO: 326956 - DNA, 120 bp, Artificial Sequence
  ENSG00000136213_37 (sequence is synthesized)
gtgtccacactttgagcacagtcatgagaatgacttggttgggtgcggggtggtgtcacaaagccctgtctcttgtgtgatggctgcgcctcgaatcagtgggagggcacctcgcccgtt

SEQ ID NO: 326957 - DNA, 120 bp, Artificial Sequence
  ENSG00000136213_38 (sequence is synthesized)
tacagttgggcaatgcttgggctgggcggcctggctgctcctggactcgcctcccagcgtctgatgctgtgtattttccatctgccccaggaatttgacacaggtgtgacttgcaggttg

SEQ ID NO: 326958 - DNA, 120 bp, Artificial Sequence
  ENSG00000136213_39 (sequence is synthesized)
tgtgggtgatgcctccctccctctttcctcttaaagcatctcatgcttcttcattcgctgatacttacaacccccagtggatatttagtggagtttgctgtagtgcttttgccatttatt

SEQ ID NO: 326959 - DNA, 120 bp, Artificial Sequence
  ENSG00000136213_40 (sequence is synthesized)
tggactattggaaaaatttcaggtttggttttggccctatgtcttgatggagggcaagggttaggatttcagtttatcttcccggtgaggtctgagcacgtctgtgccctgaggtgggtg

SEQ ID NO: 326960 - DNA, 88 bp, Artificial Sequence
  ENSG00000136213_41 (sequence is synthesized)
cccggtgaggtctgagcacgtctgtgccctgaggtgggtggtttggtgaaggtggggctttaacctagctctgccacttaggaatcag

SEQ ID NO: 326961 - DNA, 120 bp, Artificial Sequence
  ENSG00000136213_42 (sequence is synthesized)
tcttgtttccttcttccagagggtgtaggagttgtgttccaagtttgttcctgcaaaccctccgatgaggccagctgcattcatcggggcctggatggccgcacctctctctccccgccc

SEQ ID NO: 326962 - DNA, 120 bp, Artificial Sequence
  ENSG00000136213_43 (sequence is synthesized)
tgtctcctgcactcaggtgagaggctggcagggctgccgtaggggtggagagtgaacgcagggtggctaagccctcgtccctgtgagggacagtgacacggatgggagcagccatctgag

SEQ ID NO: 326963 - DNA, 120 bp, Artificial Sequence
  ENSG00000136213_44 (sequence is synthesized)
ctggaagctgtggacatggtccttgtgtgggtccaagcaaagtgggtggcgtgtgcattttgtgaacacgtggtctgcttcctggtgcagaccaggtctccccagagggaccctcctgag

SEQ ID NO: 326964 - DNA, 120 bp, Artificial Sequence
  ENSG00000136213_45 (sequence is synthesized)
ctgagctgcccggggcacctgtccctggatgtgaactgccttggttgtaccttggtggggggacctttcctgaatgtgttggttcggcatggtgacaggtgtttccctgcggcagaatgt

SEQ ID NO: 326965 - DNA, 120 bp, Artificial Sequence
  ENSG00000136213_46 (sequence is synthesized)
tggggccacaccaacgtccccagagtcttctccctagagtctctgaaaggaagcctgggttcctggtggtgctcccctccatgtgtgctcacccgcctgtatggaggcagcccaggggag

SEQ ID NO: 326966 - DNA, 120 bp, Artificial Sequence
  ENSG00000136213_47 (sequence is synthesized)
cggctgagactcttggcagagagctggggacgctctgttctcattggcagccccaccctgaagaataacagactcccaaatatcacacaggctgcagataccacccagcccccaaggatg

SEQ ID NO: 326967 - DNA, 120 bp, Artificial Sequence
  ENSG00000136213_48 (sequence is synthesized)
ccatcaccaggctggggcgctcccatgcccattatccaggggtaatttttgctcacttatttataagccacacatcctcttctatcctaccaaacctaagaatatcaaaagggaaagctt

SEQ ID NO: 326968 - DNA, 120 bp, Artificial Sequence
  ENSG00000136213_49 (sequence is synthesized)
ggcttgcatggacgtaattaacctaaaagtctttaaacgtttctcccgagtgttggagtgactgtttgcacacatctgttgtgttttgcctgtgtgcattcctcctcctggtcagagagc

SEQ ID NO: 326969 - DNA, 120 bp, Artificial Sequence
  ENSG00000136213_50 (sequence is synthesized)
ccgtctcttccgccctctcccttaccctaggagggctgagtcaggcctccctacccaggcccaagggcagatgcacctgagccattgtgtcccatggttgatacgggacggggctgattt

SEQ ID NO: 326970 - DNA, 120 bp, Artificial Sequence
  ENSG00000136213_51 (sequence is synthesized)
cctgacctggacccctgagacccagtgctcttagctgtgagcctctgggaagaggttctggcaggtggaggggatggacgttacagtgctgtggccacctagaaaagccgtcccggaact

SEQ ID NO: 326971 - DNA, 120 bp, Artificial Sequence
  ENSG00000136213_52 (sequence is synthesized)
gagaccaactgctgagggaggaagggccaccagatcgggggccgggccggggtgagcacctgaagccggctccacctgctcttctcagctgtgcgcctccaggaatttgcactcgcttca

SEQ ID NO: 326972 - DNA, 120 bp, Artificial Sequence
  ENSG00000136213_53 (sequence is synthesized)
gctgatttgggttggatttctagcgtttcacatacaggatctagactcgcacacaactgcattaatatgttggtgtttgataaactagggttgaaggagttccatcagtgaagagagaag

SEQ ID NO: 326973 - DNA, 120 bp, Artificial Sequence
  ENSG00000136213_54 (sequence is synthesized)
ccacgtgacctgaggatgcagggcactgttcacgtggacatgagccgtttcttagcatcatgagattttagaaacatgttcttactctgccaggacccagggataggtgaggctctccta

SEQ ID NO: 326974 - DNA, 120 bp, Artificial Sequence
  ENSG00000136213_55 (sequence is synthesized)
ttgggataccatttcaccagcagagagattaattggagaatgtgtaattttttcccctttggaaataatttgttcttttttttttttgacagagtttctttctgtcatccaggctggagt

SEQ ID NO: 326975 - DNA, 120 bp, Artificial Sequence
  ENSG00000136213_56 (sequence is synthesized)
cagagcgagactccgtctcaaaaaaaaatttttttttttggtagatacggggtcttgctttgtcacccaggctggtctcaaactcctgagctcgagtgctccttctgcctcagcctccca

SEQ ID NO: 326976 - DNA, 120 bp, Artificial Sequence
  ENSG00000136213_57 (sequence is synthesized)
cccaaagtgctgggattacaggcgtgggctgctgtgcccagcaggaataatttctcagtgcatctctgatggggaggctaatgaagaaaggacacctggtttgaaggcttctctgtgtct

SEQ ID NO: 326977 - DNA, 120 bp, Artificial Sequence
  ENSG00000136213_58 (sequence is synthesized)
aggacacctggtttgaaggcttctctgtgtctgtccgtgggcgctactgatctgagccaagcaccattccgcaggcatgcctgaaatgactcccatggctgtcatggtgccatctggaga

SEQ ID NO: 326978 - DNA, 120 bp, Artificial Sequence
  ENSG00000136213_59 (sequence is synthesized)
gcatttgctcactgtaatggtcccgtcacacttgtctgatgaggatctgttggttgactttgacagtgataaacgaacacagcctatctgggtgttttttgcacttatagtttgggggtt

SEQ ID NO: 326979 - DNA, 120 bp, Artificial Sequence
  ENSG00000136213_60 (sequence is synthesized)
tgaagtactggctagaagctggcggggtgtgtgtgtgcaggtgtgcgagtgcatgtgcaagtgtgcgtgcaagtgtgagtctgcacttgtgtgcaagagaatgtgtgtgtgtgtgtgttt

SEQ ID NO: 326980 - DNA, 120 bp, Artificial Sequence
  ENSG00000136213_61 (sequence is synthesized)
ttctagctcaggtctttggggtagtgtttgacctgaactctgaaaggcagagggtcccagactttcctgggatgatgggaactgggcaccccagatgaggctcggttgtgagtaggagcg

SEQ ID NO: 326981 - DNA, 120 bp, Artificial Sequence
  ENSG00000136213_62 (sequence is synthesized)
gggtgggccaccgaagagaagacagagtgggcctgtagggccagcccgaggtacccacagtggagggtctacaggctgatttgggaggtggtggtttatacctgtagtcaccttctatct

SEQ ID NO: 326982 - DNA, 120 bp, Artificial Sequence
  ENSG00000136213_63 (sequence is synthesized)
tagttaggaattcaccttcacacttccagaaactgccaagaagaatgccgccgctcaggtttatctggtagaataagctgtttgaacaaagatctggaggttgcacaatcctgtgtcatt

SEQ ID NO: 326983 - DNA, 120 bp, Artificial Sequence
  ENSG00000136213_64 (sequence is synthesized)
ctggatttatcttggggtcgggagtcaacgatacttcttgtgctgtcgtttctccggccgtgtgaagttaccacctcgtgagtggtcataagttagcgtgtctaaatgcactttgaaatc

SEQ ID NO: 326984 - DNA, 120 bp, Artificial Sequence
  ENSG00000136213_65 (sequence is synthesized)
ctaggatgaaaaagccaggccctgtcttttttccttgtctaagcaccatccttgcttaggagagacacggctgtggctctcaggctgtggggcaatgttctgcttataatgtttcaagag

SEQ ID NO: 326985 - DNA, 120 bp, Artificial Sequence
  ENSG00000136213_66 (sequence is synthesized)
gttcaaagcgtgcaggccccatgctccgtgagagccttgacctgggtcagcaggggcggctgggcttgactcgagaattcccacagggcccgagggaagagcagagcaagagggaggagc

SEQ ID NO: 326986 - DNA, 120 bp, Artificial Sequence
  ENSG00000136213_67 (sequence is synthesized)
gcgtggagccctatgtggcctgcgatattggggtggcgtccaggcccgcctagatgggggagggagacaacagagctgccacctgctcaccgcagacccaggggcccaggaggagcggac

SEQ ID NO: 326987 - DNA, 120 bp, Artificial Sequence
  ENSG00000136213_68 (sequence is synthesized)
taggaccggcagtgccttccagcctaggtctcctgcccctgggctggagttcatcttttaggcaaatttggaataggaaccttaaaaatgctttcttcactcgtttaaatagtaatgata

SEQ ID NO: 326988 - DNA, 120 bp, Artificial Sequence
  ENSG00000136213_69 (sequence is synthesized)
ttcttcactcgtttaaatagtaatgataagaatatggctgcagggggcagcttatgcctgtaatcccaccattttgggagctcaaggcaggagtattgcttgagcccagaagtttgagac

SEQ ID NO: 326989 - DNA, 67 bp, Artificial Sequence
  ENSG00000136213_70 (sequence is synthesized)
gaagtttgagaccagtctgggcaacatagtggaaacttgtctctccaaaagctaaaagaaaaagccg

SEQ ID NO: 326990 - DNA, 120 bp, Artificial Sequence
  ENSG00000136213_71 (sequence is synthesized)
gcctgggtgacagagcaagatcttgtcttaaaaaaaaaaaaaaaaaaaaaggtgttgtattttatcattagaaggccatcctgtttagaagagtgggtttctcataagaaaaaaaagaaa

SEQ ID NO: 326991 - DNA, 120 bp, Artificial Sequence
  ENSG00000136213_72 (sequence is synthesized)
ctcataagaaaaaaaagaaaaaggttgaccttgtaagtatattttcttgggtgaattgtggtggtggtaatggttttaactggtgttaatttcagttcttttaaaagttgtggtaagata

SEQ ID NO: 326992 - DNA, 120 bp, Artificial Sequence
  ENSG00000136213_73 (sequence is synthesized)
catgcaacataaaatgtgccctcttccccatttttaagtgaacagttcagtggcattaagcacattcagtttgcctgccaccgttaccaccatccatctccaaaattctctccatttaca

SEQ ID NO: 326993 - DNA, 120 bp, Artificial Sequence
  ENSG00000136213_74 (sequence is synthesized)
aaactgaaactctgtccctattaaacactagctccccattccccactgtgccgcccccccaaagcccctggcaccaaccattctacttcctgtctctgagtttgactagggacctcctgt

SEQ ID NO: 326994 - DNA, 120 bp, Artificial Sequence
  ENSG00000136213_75 (sequence is synthesized)
aagtggatttgtacaatatttgtccttttgtgtctggcttcttcatgtagtataatgtcttcaaggttcattcatgttgtagtcaggatcaccttccttttaaaggttgaacgatatccc

SEQ ID NO: 326995 - DNA, 120 bp, Artificial Sequence
  ENSG00000136213_76 (sequence is synthesized)
gttgtatggacagaccacattttatccattcacccagggatggacacctgggttgcttccatctctcggctcttgtgaataatgctgctgtgaacacgggtgtgcagatacctgttcaag

SEQ ID NO: 326996 - DNA, 120 bp, Artificial Sequence
  ENSG00000136213_77 (sequence is synthesized)
ggattacaggcatgagacaccacgccccgccgagtccctgcttttaattctttggggcagggatccccaaccccctggtgatggaccaatactggcctgcggccccttaggaactggact

SEQ ID NO: 326997 - DNA, 120 bp, Artificial Sequence
  ENSG00000136213_78 (sequence is synthesized)
tggcctgcggccccttaggaactggactgcacagcaggaggtgagcggcaggtgagcgtgcattcccgccggagccccgcctcccgtcagatcagcggcggcattagattctcataggag

SEQ ID NO: 326998 - DNA, 120 bp, Artificial Sequence
  ENSG00000136213_79 (sequence is synthesized)
cgggaaccctcctgtgaaccctgcataccagggttctccatgcaacaatctaatgcctgatgatctgaagtggaacaggtttttgttttttttttccagacagagtcttgctctttcgcc

SEQ ID NO: 326999 - DNA, 76 bp, Artificial Sequence
  ENSG00000136213_80 (sequence is synthesized)
gctgggattacaggtgcccgccaccatggccagctaatttttttgtttatttgtttatttattattttttgaggtg

SEQ ID NO: 327000 - DNA, 61 bp, Artificial Sequence
  ENSG00000136213_81 (sequence is synthesized)
actgcaacctctgccttctgggttcaagccattcttgtgcctcagcttcccgagtaggtgg

SEQ ID NO: 327001 - DNA, 88 bp, Artificial Sequence
  ENSG00000136213_82 (sequence is synthesized)
agcctgaagtgaaacagtttcatcccaaaagcatatacctctgccccatccatggaaaaattgcctctcatgaaaccagtccctggtg

SEQ ID NO: 327002 - DNA, 120 bp, Artificial Sequence
  ENSG00000136213_83 (sequence is synthesized)
cagtccctggtgccaaaaaggttggggaccgcggctctggagtatatgcctaggagtaggagtgtggggtcatatggtaatttatctttaatttttggaggaattgaatttcaattctta

SEQ ID NO: 327003 - DNA, 120 bp, Artificial Sequence
  ENSG00000136213_84 (sequence is synthesized)
ttttggaggaattgaatttcaattcttattattaccaaaaatacttaaaattcttacagatggcatgggaaagtagcacacagtcgggactctgcagccgagtttgcctccttgaatgca

SEQ ID NO: 327004 - DNA, 120 bp, Artificial Sequence
  ENSG00000136213_85 (sequence is synthesized)
cacataacacaggaacaaagacagagctgcttccctcctgttgggtctctggcggacagtcaggtatgctgagggagacactgttctcaaactccaggccagggtggtttccggagggtc

SEQ ID NO: 327005 - DNA, 120 bp, Artificial Sequence
  ENSG00000136213_86 (sequence is synthesized)
tccaggccagggtggtttccggagggtccaccggtggtctcatctcttctctctcaaaccatggatggtgccttttaaagaaaatgacaccggccaggtgcggtggctcatggctgtaat

SEQ ID NO: 327006 - DNA, 84 bp, Artificial Sequence
  ENSG00000136213_87 (sequence is synthesized)
aatcaaagtgccaacctctgggctgtcccctcctggcctgccttgttcctgagctcaccagggtccttcactctgtggcactgg

SEQ ID NO: 327007 - DNA, 120 bp, Artificial Sequence
  ENSG00000136213_88 (sequence is synthesized)
gttcctgagctcaccagggtccttcactctgtggcactggcctcagccagcaccaaggctgaaagagcccattcagaggccagaaagaaactgttaggctctgaagccgtgggccaggcc

SEQ ID NO: 327008 - DNA, 120 bp, Artificial Sequence
  ENSG00000136213_89 (sequence is synthesized)
aagacagagattctgaggcatggttctggaatgggtttttccgcccacaggcactcaaggaggacagcattgggagatggctgggtggagagtctgcgggaggctacaaggcaaaaatcc

SEQ ID NO: 327009 - DNA, 120 bp, Artificial Sequence
  ENSG00000136213_90 (sequence is synthesized)
cctactccccctgggctccttcacagtttgtgtgtcctcacagagcaaggaagttctgtgagcctcattcaatcatctgaggttcttcccaggaaaattatagtgggaactctggctttg

SEQ ID NO: 327010 - DNA, 120 bp, Artificial Sequence
  ENSG00000136213_91 (sequence is synthesized)
atgaaactgcttttttttcaaagcagtttgcaaaataaccggggccttaaaaaacaatctggatgaaatggtttttgccatttcaattggttctcttccaacgtgtcttccttccagtag

SEQ ID NO: 327011 - DNA, 120 bp, Artificial Sequence
  ENSG00000136213_92 (sequence is synthesized)
gtttccagaatattttggtttcaaaatttgggggcacagatttgcaaagtggatttcaacatgtcgggtttcaaagggggctggctttgaaagtggtctgggcttctaaaaggtttgatt

SEQ ID NO: 327012 - DNA, 120 bp, Artificial Sequence
  ENSG00000136213_93 (sequence is synthesized)
gaaaactggtttggttctcagacattccagaagcttctcccggagtccagagcctcccagtggtgctttgggaagggggccaggcagggcgtcctggtgagtggacgtagggtgggcagg

SEQ ID NO: 327013 - DNA, 120 bp, Artificial Sequence
  ENSG00000136213_94 (sequence is synthesized)
gccacccttgtcctgggatgttgtggaggacttggcacgccctgtctcaggcctggctctggctctgggtggatgttttgcatcttcagaaaaaagctcctgtgggatatttctcctcca

SEQ ID NO: 327014 - DNA, 120 bp, Artificial Sequence
  ENSG00000136213_95 (sequence is synthesized)
gccgaccccgccccccagggcattcgagaaaagggtgcttgtctcttggtgagagggccacggttccttcagtttctccgttcctacgggcctctttctttttcctttttgagacggaat

SEQ ID NO: 327015 - DNA, 120 bp, Artificial Sequence
  ENSG00000136213_96 (sequence is synthesized)
ttcctacgggcctctttctttttcctttttgagacggaatctcactgtgtcgcccaggctcactgcaacctatgcctcccgggttcaagtggttctcatgcttcagcctcctgagtagct

SEQ ID NO: 327016 - DNA, 86 bp, Artificial Sequence
  ENSG00000136213_97 (sequence is synthesized)
cgttggcctccaaagtgctaggattataagtgtgagccaccacaccaggcccgtttcatccctgcctcagcctgcatgccaagctc

SEQ ID NO: 327017 - DNA, 120 bp, Artificial Sequence
  ENSG00000136213_98 (sequence is synthesized)
aggcccgtttcatccctgcctcagcctgcatgccaagctccctgggtgcccgcccacaggtgtcaccctttaaggagaaagtggcctggggctggaaacaggactttgtagggaaggaca

SEQ ID NO: 327018 - DNA, 120 bp, Artificial Sequence
  ENSG00000136213_99 (sequence is synthesized)
gcgcgtgtgagaaaaggcctgttgatgggcacgccagggtttaatggacggctctttgaagtcatgggctgagccagaaggaattgtcatgatgtcagtctcatttccagatggggaaag

SEQ ID NO: 327019 - DNA, 120 bp, Artificial Sequence
  ENSG00000136213_100 (sequence is synthesized)
ggagacccaggctgcggtgacccactgaggcacaggatcagtgagaacccagccctggctttgcccagacctctcaagggcacttcgtgggaccattgccggccgttgtggcatctgtcc

SEQ ID NO: 327020 - DNA, 120 bp, Artificial Sequence
  ENSG00000136213_101 (sequence is synthesized)
ctggccttgcccccatccgtctctgcacagcccaggtgggtccgagccagccccaggtctccagggtcccagcccagcctctagaagagccagcagcagggctggaagggagagcacatg

SEQ ID NO: 327021 - DNA, 120 bp, Artificial Sequence
  ENSG00000136213_102 (sequence is synthesized)
ctgggccttggggctgccttggacctcaggccgttgacaaggaaaagcggagagttgggaaaaaaggacaaatagctgagcgccagccgcagtctgggggacgggagcctcgtgcgactc

SEQ ID NO: 327022 - DNA, 120 bp, Artificial Sequence
  ENSG00000136213_103 (sequence is synthesized)
tcggagtgctggccagattggcagaggggaggagagaggaaaaacccaggctctgaggaaaaacctctccagcccagcgcgtggcctggcattaacccactgcagccccaggaagtggtt

SEQ ID NO: 327023 - DNA, 120 bp, Artificial Sequence
  ENSG00000136213_104 (sequence is synthesized)
ccaccccaggcagccaacaaggcggtgcctgaactatgtctgtggatgacggagccacgacctgtccctcagggctcagcgctgcggctatgtccagggacccctggctgtgcccacgtc

SEQ ID NO: 327024 - DNA, 120 bp, Artificial Sequence
  ENSG00000136213_105 (sequence is synthesized)
ggggcttcccgttccttacctgccatgagaatgagatgtccagggacctccctgctccagctgggacctgtggggctttgtctgttgtcccgagcaccttggagatgtcatttctaacat

SEQ ID NO: 327025 - DNA, 120 bp, Artificial Sequence
  ENSG00000136213_106 (sequence is synthesized)
tttaacccaggaatccccccaccaagggacagagtgcaaggacatgatcgaacagaaaaagttctggtacaagatcaaccccgtggggtggtgagtgctgcagccccgggcctcacatcc

SEQ ID NO: 327026 - DNA, 120 bp, Artificial Sequence
  ENSG00000136213_107 (sequence is synthesized)
tgccgtccctgtgggagattggagcggtcccagtgcccaccgctgattctctggctccagcaacccctccaggtggatccgtcccacgcagcctggcctgaaacactgcccagccactgg

SEQ ID NO: 327027 - DNA, 120 bp, Artificial Sequence
  ENSG00000136213_108 (sequence is synthesized)
gtccagtaagacagagcctcgagtcattctgccaagaggatccagaaacacagactttttctggggtcctggaggcttctggcccatggggagcccctgggtcccagcgatccagccctg

SEQ ID NO: 327028 - DNA, 120 bp, Artificial Sequence
  ENSG00000136213_109 (sequence is synthesized)
atgtgctgagggtgcagggcccagctgcagagcagaggagagtggcccccagggaccagcagcacgaaaggcacactgaggcacactggcaggcctgggctgcagagagcctgaaggtca

SEQ ID NO: 327029 - DNA, 120 bp, Artificial Sequence
  ENSG00000136213_110 (sequence is synthesized)
tggggtagctggtggaagcaggaagaccccatacagcagcgaccactgaggctggtgctgcactttctcagggaattgagtgtgggctcccaccatcccggccactggcttcctccaaag

SEQ ID NO: 327030 - DNA, 120 bp, Artificial Sequence
  ENSG00000136213_111 (sequence is synthesized)
cctcctcctcttacatcagcaaaccttctgttcggtgaccccctcagtgaccctctgtgcttgccttcgtggtcttcctcatggaggatttcgggtcagcgtgggggtcagaggtcattt

SEQ ID NO: 327031 - DNA, 120 bp, Artificial Sequence
  ENSG00000136213_112 (sequence is synthesized)
gtgggggtcagaggtcatttcccataccccctcaaaggtacttcttgctgtggtccccacactctgacaccctcttctgaaatgaacacttttttgttgttgttgttgagacagagtctt

SEQ ID NO: 327032 - DNA, 120 bp, Artificial Sequence
  ENSG00000136213_113 (sequence is synthesized)
cgcccggccacaaacacttttttttttttaaacaagtgaaaacaagtttattaacaaagttaagaaataaagaatggctattccatagggagagcagcctgaataaacactttttttgtt

SEQ ID NO: 327033 - DNA, 120 bp, Artificial Sequence
  ENSG00000136213_114 (sequence is synthesized)
gttgttgaggcagagcctcactctgtcgcccaggcaggagtgcagtggtgcgacctcagctctcagctccctgcaccgtccacctcctgggttcaagcgcttcttccccaagtagctggg

SEQ ID NO: 327034 - DNA, 86 bp, Artificial Sequence
  ENSG00000136213_115 (sequence is synthesized)
cacacaccaccatgcccggctaatttttctctttttagtagagacaggatttcgccatgtgggtcgccctcctcggccttccaaaa

SEQ ID NO: 327035 - DNA, 120 bp, Artificial Sequence
  ENSG00000136213_116 (sequence is synthesized)
ttacaggcatgagccgccgtgcctggccacaaacatattttaaatttgaacaataaaggaactggaccaggaagtgtggagttggggagaccctgctctcgccaggtgccttcccggcag

SEQ ID NO: 327036 - DNA, 120 bp, Artificial Sequence
  ENSG00000136213_117 (sequence is synthesized)
ggtgccttcccggcaggttgtctctgcctccccttgcaccccttgaatggcgggctccctctcccatagcccctgccaggctggataaccaacttcattcttatacccgtccgaatctgc

SEQ ID NO: 327037 - DNA, 120 bp, Artificial Sequence
  ENSG00000136213_118 (sequence is synthesized)
cccctgttaatggcacccaccagtccttgtccaaacctcgaagctcaggacctcacagagcaccacgtcctcttctgtgtcatatgcagctggatctcagtaaatggcaatgtcttctct

SEQ ID NO: 327038 - DNA, 120 bp, Artificial Sequence
  ENSG00000136213_119 (sequence is synthesized)
ggatccccagctcccgagggcccccgtgtgcctgctgtcacctgaacggggctccccggccccgccgaccgcagccctggagcctgcagacgccagcagcaccggcaggttcccagcagg

SEQ ID NO: 327039 - DNA, 120 bp, Artificial Sequence
  ENSG00000136231_0 (sequence is synthesized)
agtgtgatattttcacagtccgctggccgaagccaaaggggttgggaaggaagagacaaaaagtagttttttcccctcctcctcctcctttctcttgctaatcccgcctcctcctaagac

SEQ ID NO: 327040 - DNA, 120 bp, Artificial Sequence
  ENSG00000136231_1 (sequence is synthesized)
ttaggaagactggtggatgcgtttgggttgtagctaggctttttcttttctttctcttttaaaacacatctagacaaggaaaaaacaagcctcggatctgatttttcactcctcgttctt

SEQ ID NO: 327041 - DNA, 120 bp, Artificial Sequence
  ENSG00000136231_2 (sequence is synthesized)
gtgcttggttcttactgtgtttgtgtattttaaaggcgagaagacgaggggaacaaaaccagctggatccatccatcaccgtgggtggttttaatttttcgttttttctcgttatttttt

SEQ ID NO: 327042 - DNA, 120 bp, Artificial Sequence
  ENSG00000136231_3 (sequence is synthesized)
tttaaacaaccactcttcacaatgaacaaactgtatatcggaaacctcagcgagaacgccgccccctcggacctagaaagtatcttcaaggacgccaagatcccggtgtcgggacccttc

SEQ ID NO: 327043 - DNA, 120 bp, Artificial Sequence
  ENSG00000136231_4 (sequence is synthesized)
ctggtgaagactggctacgcgttcgtggactgcccggacgagagctgggccctcaaggccatcgaggcgctttcaggtaaaatagaactgcacgggaaacccatagaagttgagcactcg

SEQ ID NO: 327044 - DNA, 120 bp, Artificial Sequence
  ENSG00000136231_5 (sequence is synthesized)
gtcccaaaaaggcaaaggattcggaaacttcagatacgaaatatcccgcctcatttacagtgggaggtgctggatagtttactagtccagtatggagtggtggagagctgtgagcaagtg

SEQ ID NO: 327045 - DNA, 120 bp, Artificial Sequence
  ENSG00000136231_6 (sequence is synthesized)
aacactgactcggaaactgcagttgtaaatgtaacctattccagtaaggaccaagctagacaagcactagacaaactgaatggatttcagttagagaatttcaccttgaaagtagcctat

SEQ ID NO: 327046 - DNA, 120 bp, Artificial Sequence
  ENSG00000136231_7 (sequence is synthesized)
atccctgatgaaatggccgcccagcaaaaccccttgcagcagccccgaggtcgccgggggcttgggcagaggggctcctcaaggcaggggtctccaggatccgtatccaagcagaaacca

SEQ ID NO: 327047 - DNA, 120 bp, Artificial Sequence
  ENSG00000136231_8 (sequence is synthesized)
tgtgatttgcctctgcgcctgctggttcccacccaatttgttggagccatcataggaaaagaaggtgccaccattcggaacatcaccaaacagacccagtctaaaatcgatgtccaccgt

SEQ ID NO: 327048 - DNA, 120 bp, Artificial Sequence
  ENSG00000136231_9 (sequence is synthesized)
aaagaaaatgcgggggctgctgagaagtcgattactatcctctctactcctgaaggcacctctgcggcttgtaagtctattctggagattatgcataaggaagctcaagatataaaattc

SEQ ID NO: 327049 - DNA, 120 bp, Artificial Sequence
  ENSG00000136231_10 (sequence is synthesized)
acagaagagatccccttgaagattttagctcataataactttgttggacgtcttattggtaaagaaggaagaaatcttaaaaaaattgagcaagacacagacactaaaatcacgatatct

SEQ ID NO: 327050 - DNA, 120 bp, Artificial Sequence
  ENSG00000136231_11 (sequence is synthesized)
ccattgcaggaattgacgctgtataatccagaacgcactattacagttaaaggcaatgttgagacatgtgccaaagctgaggaggagatcatgaagaaaatcagggagtcttatgaaaat

SEQ ID NO: 327051 - DNA, 120 bp, Artificial Sequence
  ENSG00000136231_12 (sequence is synthesized)
gatattgcttctatgaatcttcaagcacatttaattcctggattaaatctgaacgccttgggtctgttcccacccacttcagggatgccacctcccacctcagggcccccttcagccatg

SEQ ID NO: 327052 - DNA, 120 bp, Artificial Sequence
  ENSG00000136231_13 (sequence is synthesized)
actcctccctacccgcagtttgagcaatcagaaacggagactgttcatctgtttatcccagctctatcagtcggtgccatcatcggcaagcagggccagcacatcaagcagctttctcgc

SEQ ID NO: 327053 - DNA, 120 bp, Artificial Sequence
  ENSG00000136231_14 (sequence is synthesized)
tttgctggagcttcaattaagattgctccagcggaagcaccagatgctaaagtgaggatggtgattatcactggaccaccagaggctcagttcaaggctcagggaagaatttatggaaaa

SEQ ID NO: 327054 - DNA, 120 bp, Artificial Sequence
  ENSG00000136231_15 (sequence is synthesized)
attaaagaagaaaactttgttagtcctaaagaagaggtgaaacttgaagctcatatcagagtgccatcctttgctgctggcagagttattggaaaaggaggcaaaacggtgaatgaactt

SEQ ID NO: 327055 - DNA, 120 bp, Artificial Sequence
  ENSG00000136231_16 (sequence is synthesized)
cagaatttgtcaagtgcagaagttgttgtccctcgtgaccagacacctgatgagaatgaccaagtggttgtcaaaataactggtcacttctatgcttgccaggttgcccagagaaaaatt

SEQ ID NO: 327056 - DNA, 120 bp, Artificial Sequence
  ENSG00000136231_17 (sequence is synthesized)
gaagtaaaggctcaggaaacagcccaccacagaggcagatgccaaaccaaagacagattgcttaaccaacagatgggcgctgaccccctatccagaatcacatgcacaagtttttaccta

SEQ ID NO: 327057 - DNA, 120 bp, Artificial Sequence
  ENSG00000136231_18 (sequence is synthesized)
gccagttgtttctgaggaccaggcaacttttgaactcctgtctctgtgagaatgtatactttatgctctctgaaatgtatgacacccagctttaaaacaaacaaacaaacaaacaaaaaa

SEQ ID NO: 327058 - DNA, 120 bp, Artificial Sequence
  ENSG00000136231_19 (sequence is synthesized)
agggtgggggagggagggaaagagaagagctctgcacttccctttgttgtagtctcacagtataacagatattctaattcttcttaatattcccccataatgccagaaattggcttaatg

SEQ ID NO: 327059 - DNA, 120 bp, Artificial Sequence
  ENSG00000136231_20 (sequence is synthesized)
atgctttcactaaattcatcaaatagattgctcctaaatccaattgttaaaattggatcagaataattatcacaggaacttaaatgttaagccattagcatagaaaaactgttctcagtt

SEQ ID NO: 327060 - DNA, 120 bp, Artificial Sequence
  ENSG00000136231_21 (sequence is synthesized)
ttatttttacctaacactaacatgagtaacctaagggaagtgctgaatggtgttggcaggggtattaaacgtgcatttttactcaactacctcaggtattcagtaatacaatgaaaagca

SEQ ID NO: 327061 - DNA, 120 bp, Artificial Sequence
  ENSG00000136231_22 (sequence is synthesized)
aaattgttccttttttttgaaaattttatatactttataatgatagaagtccaaccgttttttaaaaaataaatttaaaatttaacagcaatcagctaacaggcaaattaagatttttac

SEQ ID NO: 327062 - DNA, 120 bp, Artificial Sequence
  ENSG00000136231_23 (sequence is synthesized)
ttctggctggtgacagtaaagctggaaaattaatttcagggttttttgaggcttttgacacagttattagttaaatcaaatgttcaaaaatacggagcagtgcctagtatctggagagca

SEQ ID NO: 327063 - DNA, 120 bp, Artificial Sequence
  ENSG00000136231_24 (sequence is synthesized)
gcactaccatttattctttcatttatagttgggaaagtttttgacggtactaacaaagtggtcgcaggagattttggaacggctggtttaaatggcttcaggagacttcagttttttgtt

SEQ ID NO: 327064 - DNA, 120 bp, Artificial Sequence
  ENSG00000136231_25 (sequence is synthesized)
tagctacatgattgaatgcataataaatgctttgtgcttctgactatcaatacctaaagaaagtgcatcagtgaagagatgcaagactttcaactgactggcaaaaagcaagctttagct

SEQ ID NO: 327065 - DNA, 120 bp, Artificial Sequence
  ENSG00000136231_26 (sequence is synthesized)
tgtcttataggatgcttagtttgccactacacttcagaccaatgggacagtcatagatggtgtgacagtgtttaaacgcaacaaaaggctacatttccatggggccagcactgtcatgag

SEQ ID NO: 327066 - DNA, 120 bp, Artificial Sequence
  ENSG00000136231_27 (sequence is synthesized)
cctcactaagctattttgaagatttttaagcactgataaattaaaaaaaaaaaattagactccaccttaagtagtaaagtataacaggatttctgtatactgtgcaatcagttctttgaa

SEQ ID NO: 327067 - DNA, 120 bp, Artificial Sequence
  ENSG00000136231_28 (sequence is synthesized)
aaaaaagtcaaaagatagagaatacaagaaaagtttttgggatataatttgaatgactgtgaaaacatatgacctttgataacgaactcatttgctcactccttgacagcaaagcccagt

SEQ ID NO: 327068 - DNA, 120 bp, Artificial Sequence
  ENSG00000136231_29 (sequence is synthesized)
acgtacaattgtgttgggtgtgggtggtctccaaggccacgctgctctctgaattgattttttgagttttgtttgtaagatgatcacagtcatgttacactgatctaaaggacatatata

SEQ ID NO: 327069 - DNA, 120 bp, Artificial Sequence
  ENSG00000136231_30 (sequence is synthesized)
taaccctttaaaaaaaaaatcactgcctcattcttatttcaagatgaatttctatacagactagatgtttttctgaagatcaattagacattttgaaaatgatttaaagtgttttcctta

SEQ ID NO: 327070 - DNA, 120 bp, Artificial Sequence
  ENSG00000136231_31 (sequence is synthesized)
atgttctctgaaaacaagtttcttttgtagttttaaccaaaaaagtgccctttttgtcactggattctcctagcattcatgatttttttttcatacaatgaattaaaattgctaaaatca

SEQ ID NO: 327071 - DNA, 120 bp, Artificial Sequence
  ENSG00000136231_32 (sequence is synthesized)
tggactggctttctggttggatttcaggtaagatgtgtttaaggccagagcttttctcagtatttgatttttttccccaatatttgattttttaaaaatatacacataggtgctgcattt

SEQ ID NO: 327072 - DNA, 120 bp, Artificial Sequence
  ENSG00000136231_33 (sequence is synthesized)
atatctgctggtttaaattctgtcatatttcacttctagccttttagtatggcaaatcatattttacttttacttaagcatttgtaatttggagtatctggtactagctaagaaataatt

SEQ ID NO: 327073 - DNA, 120 bp, Artificial Sequence
  ENSG00000136231_34 (sequence is synthesized)
ctataattgagttttgtactcaccatatatggatcattcctcatgtataatgtgccccaaatgcagcttcattttccagataccttgacgcagaataaattttttcatcatttaggtgca

SEQ ID NO: 327074 - DNA, 120 bp, Artificial Sequence
  ENSG00000136231_35 (sequence is synthesized)
tattatgctgctggctagaaacaatagcttatttttccctcaacaactagtaaagttcattttataaaacacaaaagctagaagaaatggaaaactgcagatgattctaccagccagtgc

SEQ ID NO: 327075 - DNA, 120 bp, Artificial Sequence
  ENSG00000136231_36 (sequence is synthesized)
gatctagttatgggatctctgaacagacagggacctgcggatgcggtgatgccgactgacggacgggacctgcggatgcagtgatgccgactgacggagggggacctgcggatgcggtga

SEQ ID NO: 327076 - DNA, 120 bp, Artificial Sequence
  ENSG00000136231_37 (sequence is synthesized)
tgccgactgacggagggggacctgcggatgcggtgatgccggctgacggagggggacctgcggatgcggtgatgccgactgatggagggggacctggcgatgcggtgatgccgactgatg

SEQ ID NO: 327077 - DNA, 120 bp, Artificial Sequence
  ENSG00000136231_38 (sequence is synthesized)
gacgggacctgcggatgcggtgaagccgatgaacggggacctgcggatgtggtgatgctgactgacgtacagggacttggtgatgcggtgatgccgactgatgggtagggacctggtgat

SEQ ID NO: 327078 - DNA, 120 bp, Artificial Sequence
  ENSG00000136231_39 (sequence is synthesized)
gcgttgatgccgactgacggacgggacctggtgttgcagtgaagccgactgacggacgggacctgctgatgtggtgaagctgactgacagacaggacctggtaatgcagtgaagccgact

SEQ ID NO: 327079 - DNA, 120 bp, Artificial Sequence
  ENSG00000136231_40 (sequence is synthesized)
gacggacgggacctgctaatgtggtaaagccgactgacagatggggacctgcgggtggggtgatgctgactgacggatgggacctggtgatgcggtgataccaactgaaggacgggacct

SEQ ID NO: 327080 - DNA, 120 bp, Artificial Sequence
  ENSG00000136231_41 (sequence is synthesized)
gcagatgcagtgatgctgactgacggatggggacctatggatgcagtgatgctgactgacggagagggacttgcagatgtggtgatgccgactgatggacagggacctgcggatgtgggg

SEQ ID NO: 327081 - DNA, 120 bp, Artificial Sequence
  ENSG00000136231_42 (sequence is synthesized)
atgccgactgacggacagggcctgctgatgtcgactgatggacgggacctgtgggtgtggggatgccgactgacagacgggcaagagcatgtcatctctatcccgactcctgctttctag

SEQ ID NO: 327082 - DNA, 120 bp, Artificial Sequence
  ENSG00000136231_43 (sequence is synthesized)
atagtcctagacctggcatcacaaagctgagaagtacatttggaactgagagcttatttttctttgtttgccctaatgcctcatataccctgtcagtctgatggaactgagagcttaata

SEQ ID NO: 327083 - DNA, 120 bp, Artificial Sequence
  ENSG00000136231_44 (sequence is synthesized)
tcaaggcaaacctctaaccttgaagtaagacaatctcctgccccaattctaggagtcatcttgtaagccagattctgtgaagtcactgaagaggtaacagaatctgggaccacagcagaa

SEQ ID NO: 327084 - DNA, 120 bp, Artificial Sequence
  ENSG00000136231_45 (sequence is synthesized)
acgcttgtgacgtttggtgttttgtaagatctgtacctggagtgttacctttctgttactgttagatctttattatttatgttatctgtattccaccatatactactaaatgatcagaag

SEQ ID NO: 327085 - DNA, 120 bp, Artificial Sequence
  ENSG00000136231_46 (sequence is synthesized)
gggattcctcaagttctctggaccgcatatcttacatgctgtgtcaagcagctttaaacagtttctaaccacttagttttagatgatgataaagcacttatgggtgggcactggattctg

SEQ ID NO: 327086 - DNA, 78 bp, Artificial Sequence
  ENSG00000136231_47 (sequence is synthesized)
agatgatgataaagcacttatgggtgggcactggattctgctaaatgtttatggcagatgaagatactgggagactaa

SEQ ID NO: 327087 - DNA, 89 bp, Artificial Sequence
  ENSG00000136231_48 (sequence is synthesized)
actaactttctgaaggactcactgctagagaattaggtaggtttgttttctcccaaatatatggaatatagcaaagaaataagggaaaa

SEQ ID NO: 327088 - DNA, 120 bp, Artificial Sequence
  ENSG00000136231_49 (sequence is synthesized)
ctcccaaatatatggaatatagcaaagaaataagggaaaatggtggtttctcatccatcctgttttgcctgaggtacctgaagagtagactcagtgtgaccagactggaaggattcctcc

SEQ ID NO: 327089 - DNA, 120 bp, Artificial Sequence
  ENSG00000136231_50 (sequence is synthesized)
acagaaacagtcccagcagacaacgatgtggatgttcagatgccacaggggaagtgtacattagaaggaggatttgagagcccttccttaaatggataagggtagggctttgggagaaag

SEQ ID NO: 327090 - DNA, 120 bp, Artificial Sequence
  ENSG00000136231_51 (sequence is synthesized)
ccttagtggagtacttgacattaaacacctttagatattttttcttttgcctactcaatttctcaagtgggctccattttctaaatttaaggaatgtctttttgttgttgttttgttttt

SEQ ID NO: 327091 - DNA, 120 bp, Artificial Sequence
  ENSG00000136231_52 (sequence is synthesized)
gattcaacagacataaaattcttgtcagtctgctataaaaatttgtaaatgcttaatctccacttataagtttgtcttgtcatgatatggtctctatcttcatctcactctttttcttcc

SEQ ID NO: 327092 - DNA, 120 bp, Artificial Sequence
  ENSG00000136231_53 (sequence is synthesized)
cacagtcacccaaaatgacggtatgttcctaaaatactttcccgtggaaggtgtaagttcccctcttcctggccaaatgctcaaatgttttactcccatcacctcctttgttttgcataa

SEQ ID NO: 327093 - DNA, 120 bp, Artificial Sequence
  ENSG00000136231_54 (sequence is synthesized)
gcagtctctttttatccatgataaaatttgcagagtagtttaacaggcataactcaagctgtttatttcttcttagctttatatacttacggataggaagtcatgcagtacaagtgtgca

SEQ ID NO: 327094 - DNA, 120 bp, Artificial Sequence
  ENSG00000136231_55 (sequence is synthesized)
actgcagttgtaaatgtaacctattccagtaaggaccaagctagacagtaagcagcttgaagcttttaatctatatataataactaagttaagtacagtaacatattttgcggatttctc

SEQ ID NO: 327095 - DNA, 120 bp, Artificial Sequence
  ENSG00000136231_56 (sequence is synthesized)
aactgagaagggctggtaggtggcagagagaaactttattttacaaaatttgaccctgtaatcgtgcctttctttttaagtttgaatgtctagtaaaaatctacattggttaaagttgta

SEQ ID NO: 327096 - DNA, 120 bp, Artificial Sequence
  ENSG00000136231_57 (sequence is synthesized)
gtagcgcatgatggagcctgcataatttctcactgactgtgtttgccttggtgttgtctgctacggagtttaagggtcacctctactatatattgtgctggatagtttactagtccagta

SEQ ID NO: 327097 - DNA, 120 bp, Artificial Sequence
  ENSG00000136231_58 (sequence is synthesized)
aacccccggccgtggagaacggaaagtggcctcgaccgtgctgccgagtgagaccgcgaggctggtgcctcgcacaggcggccccgcgcttcctccccaccctgtgggaggagagagtgt

SEQ ID NO: 327098 - DNA, 120 bp, Artificial Sequence
  ENSG00000136231_59 (sequence is synthesized)
gtgcccggtttccccgttccacctcccctggtccgacgagcgataggggcaggtgggcgggggcggctggtcgcctggaagggagtcgccgccacgcaccggccgcccgccgctctccgg

SEQ ID NO: 327099 - DNA, 120 bp, Artificial Sequence
  ENSG00000136231_60 (sequence is synthesized)
gccctggcgcggggctgcggcctccgggtaaaatagaactgcacgggaaacccatagaagttgagcactcggtcccaaaaaggcaaaggattcggaaacttcagatacgaaatatcccgc

SEQ ID NO: 327100 - DNA, 120 bp, Artificial Sequence
  ENSG00000136231_61 (sequence is synthesized)
cttcacgaaggctttaattctgcatttcagccagtcacatgcaaatgttaggctggttggcccaagatgcctatcagtgatacctgaaagtatcataacttgttgttgggtctgttacag

SEQ ID NO: 327101 - DNA, 120 bp, Artificial Sequence
  ENSG00000136231_62 (sequence is synthesized)
actccgaagttctacaggttcctgcagtcagcacctttgtctccccgctttccaccccactcctcctgggtacatttttgcttacaaccaccaaaagatgaagacaggaagattcgtact

SEQ ID NO: 327102 - DNA, 120 bp, Artificial Sequence
  ENSG00000136235_0 (sequence is synthesized)
aaaatagagagggaggcaccacagatgccagaagaacactgttgctcttggtggacgggcccagaggaattcagagttaaaccttgagtgcctgcgtccgtgagaattcagcatggaatg

SEQ ID NO: 327103 - DNA, 120 bp, Artificial Sequence
  ENSG00000136235_1 (sequence is synthesized)
tctctactatttcctgggatttctgctcctggctgcaagattgccacttgatgccgccaaacgatttcatgatgtgctgggcaatgaaagaccttctgcttacatgagggagcacaatca

SEQ ID NO: 327104 - DNA, 120 bp, Artificial Sequence
  ENSG00000136235_2 (sequence is synthesized)
attaaatggctggtcttctgatgaaaatgactggaatgaaaaactctacccagtgtggaagcggggagacatgaggtggaaaaactcctggaagggaggccgtgtgcaggcggtcctgac

SEQ ID NO: 327105 - DNA, 120 bp, Artificial Sequence
  ENSG00000136235_3 (sequence is synthesized)
cagtgactcaccagccctcgtgggctcaaatataacatttgcggtgaacctgatattccctagatgccaaaaggaagatgccaatggcaacatagtctatgagaagaactgcagaaatga

SEQ ID NO: 327106 - DNA, 120 bp, Artificial Sequence
  ENSG00000136235_4 (sequence is synthesized)
ggctggtttatctgctgatccgtatgtttacaactggacagcatggtcagaggacagtgacggggaaaatggcaccggccaaagccatcataacgtcttccctgatgggaaaccttttcc

SEQ ID NO: 327107 - DNA, 120 bp, Artificial Sequence
  ENSG00000136235_5 (sequence is synthesized)
tcaccaccccggatggagaagatggaatttcatctacgtcttccacacacttggtcagtatttccagaaattgggacgatgttcagtgagagtttctgtgaacacagccaatgtgacact

SEQ ID NO: 327108 - DNA, 120 bp, Artificial Sequence
  ENSG00000136235_6 (sequence is synthesized)
tgggcctcaactcatggaagtgactgtctacagaagacatggacgggcatatgttcccatcgcacaagtgaaagatgtgtacgtggtaacagatcagattcctgtgtttgtgactatgtt

SEQ ID NO: 327109 - DNA, 120 bp, Artificial Sequence
  ENSG00000136235_7 (sequence is synthesized)
ccagaagaacgatcgaaattcatccgacgaaaccttcctcaaagatctccccattatgtttgatgtcctgattcatgatcctagccacttcctcaattattctaccattaactacaagtg

SEQ ID NO: 327110 - DNA, 120 bp, Artificial Sequence
  ENSG00000136235_8 (sequence is synthesized)
gagcttcggggataatactggcctgtttgtttccaccaatcatactgtgaatcacacgtatgtgctcaatggaaccttcagccttaacctcactgtgaaagctgcagcaccaggaccttg

SEQ ID NO: 327111 - DNA, 87 bp, Artificial Sequence
  ENSG00000136235_9 (sequence is synthesized)
gccttaacctcactgtgaaagctgcagcaccaggaccttgtccgccaccgccaccaccacccagaccttcaaaacccaccccttctt

SEQ ID NO: 327112 - DNA, 120 bp, Artificial Sequence
  ENSG00000136235_10 (sequence is synthesized)
gttctcattcacaggacctgctggtgacaaccccctggagctgagtaggattcctgatgaaaactgccagattaacagatatggccactttcaagccaccatcacaattgtagagggaat

SEQ ID NO: 327113 - DNA, 120 bp, Artificial Sequence
  ENSG00000136235_11 (sequence is synthesized)
ctgtaccatcatttctgaccccacctgcgagatcacccagaacacagtctgcagccctgtggatgtggatgagatgtgtctgctgactgtgagacgaaccttcaatgggtctgggacgta

SEQ ID NO: 327114 - DNA, 120 bp, Artificial Sequence
  ENSG00000136235_12 (sequence is synthesized)
ctgtgtgaacctcaccctgggggatgacacaagcctggctctcacgagcaccctgatttctgttcctgacagagacccagcctcgcctttaaggatggcaaacagtgccctgatctccgt

SEQ ID NO: 327115 - DNA, 120 bp, Artificial Sequence
  ENSG00000136235_13 (sequence is synthesized)
tggctgcttggccatatttgtcactgtgatctccctcttggtgtacaaaaaacacaaggaatacaacccaatagaaaatagtcctgggaatgtggtcagaagcaaaggcctgagtgtctt

SEQ ID NO: 327116 - DNA, 120 bp, Artificial Sequence
  ENSG00000136235_14 (sequence is synthesized)
tctcaaccgtgcaaaagccgtgttcttcccgggaaaccaggaaaaggatccgctactcaaaaaccaagaatttaaaggagtttcttaaatttcgaccttgtttctgaagctcacttttca

SEQ ID NO: 327117 - DNA, 120 bp, Artificial Sequence
  ENSG00000136235_15 (sequence is synthesized)
gtgccattgatgtgagatgtgctggagtggctattaacctttttttcctaaagattattgttaaatagatattgtggtttggggaagttgaattttttataggttaaatgtcattttaga

SEQ ID NO: 327118 - DNA, 120 bp, Artificial Sequence
  ENSG00000136235_16 (sequence is synthesized)
gatggggagagggattatactgcaggcagcttcagccatgttgtgaaactgataaaagcaacttagcaaggcttcttttcattattttttatgtttcacttataaagtcttaggtaacta

SEQ ID NO: 327119 - DNA, 120 bp, Artificial Sequence
  ENSG00000136235_17 (sequence is synthesized)
gtaggatagaaacactgtgtcccgagagtaaggagagaagctactattgattagagcctaacccaggttaactgcaagaagaggcgggatactttcagctttccatgtaactgtatgcat

SEQ ID NO: 327120 - DNA, 120 bp, Artificial Sequence
  ENSG00000136235_18 (sequence is synthesized)
aaagccaatgtagtccagtttctaagatcatgttccaagctaactgaatcccacttcaatacacactcatgaactcctgatggaacaataacaggcccaagcctgtggtatgatgtgcac

SEQ ID NO: 327121 - DNA, 120 bp, Artificial Sequence
  ENSG00000136235_19 (sequence is synthesized)
acttgctagactcagaaaaaatactactctcataaatgggtgggagtattttggtgacaacctactttgcttggctgagtgaaggaatgatattcatatattcatttattccatggacat

SEQ ID NO: 327122 - DNA, 120 bp, Artificial Sequence
  ENSG00000136235_20 (sequence is synthesized)
ttagttagtgctttttatataccaggcatgatgctgagtgacactcttgtgtatatttccaaatttttgtacagtcgctgcacatatttgaaatcatatattaagactttccaaagatga

SEQ ID NO: 327123 - DNA, 120 bp, Artificial Sequence
  ENSG00000136235_21 (sequence is synthesized)
ggtccctggtttttcatggcaacttgatcagtaaggatttcacctctgtttgtaactaaaaccatctactatatgttagacatgacattctttttctctccttcctgaaaaataaagtgt

SEQ ID NO: 327124 - DNA, 120 bp, Artificial Sequence
  ENSG00000136235_22 (sequence is synthesized)
ttctgctcctggctgcaagattgccacttgatgccgccaaacgagaccccgcggccgcgccctaaccctcagtctcccgactgcgactgcgacccgggaaaacgcctacgtttttggaaa

SEQ ID NO: 327125 - DNA, 120 bp, Artificial Sequence
  ENSG00000136235_23 (sequence is synthesized)
cactgtgatggtcccgcttcccacacgaggccacgggccacagagtgggcaaggaactcgccccaagccacacagcggatctgaggaagaggaagactctctggaacagtggaaagaact

SEQ ID NO: 327126 - DNA, 120 bp, Artificial Sequence
  ENSG00000136235_24 (sequence is synthesized)
agagtgatctcttggcaatagttaagcaatcaaacggagctatagtaatggcttataaccaaagtacacaatcagtgtcaaaaagaaagacagggatgtgaacacacaggttcccaggag

SEQ ID NO: 327127 - DNA, 120 bp, Artificial Sequence
  ENSG00000136235_25 (sequence is synthesized)
acgcggagccagaacttagcatgggatcccagccctgcatttctcaactttttttcagtctgtgactttggtgggatctgtctccccactctttgcctgtcctgctctgaccatcccatc

SEQ ID NO: 327128 - DNA, 120 bp, Artificial Sequence
  ENSG00000136235_26 (sequence is synthesized)
cttatttgcttcttgtgttcacacaaaatgtgggattatgcttccttacataatttagcaattataataccttatagctctcacatctgtgtaaattatgacacatttagttcaaatttc

SEQ ID NO: 327129 - DNA, 120 bp, Artificial Sequence
  ENSG00000136235_27 (sequence is synthesized)
tatagcaatttcatagtatagtgttcctgatatttttctaaaaagcaaatggcaaatgtttagattttttattatatcacatgtatcttttatgttcgtagcaactactctaaaatctta

SEQ ID NO: 327130 - DNA, 120 bp, Artificial Sequence
  ENSG00000136235_28 (sequence is synthesized)
ctggctgcaagattgccacttgatgccgccaaacaggttggactgaagttcttcaggaagctttcatctctggctcactcatctcttcttctgcaaactgttgggaaggctgaaactaca

SEQ ID NO: 327131 - DNA, 120 bp, Artificial Sequence
  ENSG00000136235_29 (sequence is synthesized)
gctcatggaaagtaaaaactatgctgcccttctcttgtgaagcttcttttccattgcaattgcaacccattcttgccagacagtggttgggggagggttggacagcctccggccacagaa

SEQ ID NO: 327132 - DNA, 120 bp, Artificial Sequence
  ENSG00000136235_30 (sequence is synthesized)
caaagcaactccaccaactaaactatgtccagcttccatccaaaagggtggagacctcacatgaaatggggtctccaatctggaggcaaatttacgaatctccccagccctgaagctatt

SEQ ID NO: 327133 - DNA, 120 bp, Artificial Sequence
  ENSG00000136235_31 (sequence is synthesized)
aggtgtctccaggacgtgacatctctcccccgcgcccttaccacagtgttccagacatgctgactcattctctaaatagaagataagctgacccaaagactatacccagcctcgccttta

SEQ ID NO: 327134 - DNA, 120 bp, Artificial Sequence
  ENSG00000136235_32 (sequence is synthesized)
ttgaatctagtaaatgtggaatcacaaaattgaaataatgtgcatctgaaaagtgaataaatagatgccaagaaggagtgagtcataagcacatgagttgtaagaggttgaacttgagag

SEQ ID NO: 327135 - DNA, 120 bp, Artificial Sequence
  ENSG00000136235_33 (sequence is synthesized)
atgagccggggaagggcactcctgtaagggggcacggaggtctgaaagagcacggggagtatggccaactttcaggatttttagcacagctagaagacccagcctcgcctttaaggatgg

SEQ ID NO: 327136 - DNA, 120 bp, Artificial Sequence
  ENSG00000136235_34 (sequence is synthesized)
ctcccccgcgcccttaccacagtgttccagacatgctgactcattctctaaatagaagataagctgacccaaagactatgtattatttaatagaaaagattactgaaagcccagagggag

SEQ ID NO: 327137 - DNA, 120 bp, Artificial Sequence
  ENSG00000136235_35 (sequence is synthesized)
ccatatatcttctgtgacggctcccttcctcatttatttaatggcattataagcggcatgtcctctaggtggaagacataactaacatgctcttgcttctgttttaagacccagcctcgc

SEQ ID NO: 327138 - DNA, 120 bp, Artificial Sequence
  ENSG00000136235_36 (sequence is synthesized)
aggcatttttcccttttttgcttttaaacattttgtgtaggggaggaaaatattacattgaatggtgaataccaaactggcctgttaatcttgttgtggtttgtttttaatcctaaaaga

SEQ ID NO: 327139 - DNA, 120 bp, Artificial Sequence
  ENSG00000136235_37 (sequence is synthesized)
tgctaccagatctcagtaactttacaaaattatgtcaacttaattttaacatgatagtctcaaattatagtaagcaggcacatttcttgcatgaacaagagtaaataaatgtactttcat

SEQ ID NO: 327140 - DNA, 120 bp, Artificial Sequence
  ENSG00000136235_38 (sequence is synthesized)
gaaatctgcgttttgattatgttcctggaaacaataactttctttcaagatctgaggaagaggaagactctctggaacagtggaaagaacttgtccttgtcctgggaatcaaaagatgtg

SEQ ID NO: 327141 - DNA, 120 bp, Artificial Sequence
  ENSG00000136235_39 (sequence is synthesized)
tgagagataaaaatgaaatcttggttaaccttgccaaatctccaggacaccgaagagttaaaaagagagaaaaacaaaaagattaagctctttttcaaaaaaacaaaaccacttaatttt

SEQ ID NO: 327142 - DNA, 120 bp, Artificial Sequence
  ENSG00000136235_40 (sequence is synthesized)
tttctacctaaaaccataacaagaaaaaatgctaacacttatttatttgaatggcacatggagaccgggcatgtggctcacacttgtaatcccagcaccttggaaggcggaggcgggtgg

SEQ ID NO: 327143 - DNA, 63 bp, Artificial Sequence
  ENSG00000136235_41 (sequence is synthesized)
ttgcagtgagagcaaacaaacaaacaaaaaacagaatggcacattgatgagcattcattgatt

SEQ ID NO: 327144 - DNA, 120 bp, Artificial Sequence
  ENSG00000136235_42 (sequence is synthesized)
acaaaaaacagaatggcacattgatgagcattcattgattgattctttagtttttttatgttctctaaagaatttttaagatttaaagaagcatgtgctatttatttgtaggaaatcctc

SEQ ID NO: 327145 - DNA, 120 bp, Artificial Sequence
  ENSG00000136235_43 (sequence is synthesized)
tttgtaggaaatcctcagaaaaggtacaaataaaaaataaaaattatccataattaataccagagattataattgttaattattatggtgttttctttgctagtatttaagatcattatt

SEQ ID NO: 327146 - DNA, 120 bp, Artificial Sequence
  ENSG00000136235_44 (sequence is synthesized)
ttttgcttactatcattagcatttgatgatatgatttttttaatttttatacattgttttaatggctgcacgatatttcattgtgtacaaataaaataactactgttccgctttgaccta

SEQ ID NO: 327147 - DNA, 120 bp, Artificial Sequence
  ENSG00000136237_0 (sequence is synthesized)
gctgcggccgcggctgagggacctgcccgcgctgctgcggagcgggctcacgctgcggaggaagcggagcgccgctgggggccggactctatcaagaagaatatctaatccgtaccttga

SEQ ID NO: 327148 - DNA, 120 bp, Artificial Sequence
  ENSG00000136237_1 (sequence is synthesized)
acatacgccttcccagatttatggagagaattcttcttgtgcaggaagagcattgaggaatattattatcgttcaagcagctgacctgataaaggacagagtgaacctcaaggggtttta

SEQ ID NO: 327149 - DNA, 120 bp, Artificial Sequence
  ENSG00000136237_2 (sequence is synthesized)
caggaggagctgcgttgggtcagagctggtagactggcttctagaacactgtcctttcgtccagtgcagatctatggccataggagtctggcaactcctactggacatgggaattatgtt

SEQ ID NO: 327150 - DNA, 120 bp, Artificial Sequence
  ENSG00000136237_3 (sequence is synthesized)
atcagtggaccagcatctatactttcaagatacttatgttttctaccagttttcctctgatgaatgtagctacttgtactgtgaatttgaaagagaagaagaatggcaaaatggtgtcaa

SEQ ID NO: 327151 - DNA, 120 bp, Artificial Sequence
  ENSG00000136237_4 (sequence is synthesized)
gcttttactgcaacttgtgcctctcattcctgccagaggtggcatctgtgaactgtctcatcagaaaattgaagactccgaagaaagcagtgatgaaattcttgtgcgtctaacatctgc

SEQ ID NO: 327152 - DNA, 120 bp, Artificial Sequence
  ENSG00000136237_5 (sequence is synthesized)
ggtgcagagagagctagcagctgttattgctttgaaagcaaggaagtctgcaattgaacaagatgaagaaaacaacgacaaacatgtagctgtaacagaagccgaaagtgttccagattc

SEQ ID NO: 327153 - DNA, 120 bp, Artificial Sequence
  ENSG00000136237_6 (sequence is synthesized)
tcaggcaggggtgatgtgcaagctccaggaaagagatgaaatcggacgaattgaactagtccagaagctggcaaaagaaaactatcagtttttgcagacggacaaaaaagaacaggagaa

SEQ ID NO: 327154 - DNA, 120 bp, Artificial Sequence
  ENSG00000136237_7 (sequence is synthesized)
gtctgaacaccaagatgatgaagtgacgactgttcaggttaaagagcaagaccagagcgtcctggtgctgaagaaagtgcagtgctgtggcccagcccccacagctgggagtgcggagag

SEQ ID NO: 327155 - DNA, 120 bp, Artificial Sequence
  ENSG00000136237_8 (sequence is synthesized)
ccattggagatatgtggtggtgtccgggaccccggagaagattttggagcaccttttgaatgacttgcacctggaagaagtccaggacaaagaaacagagaccctcctggatgacttcct

SEQ ID NO: 327156 - DNA, 120 bp, Artificial Sequence
  ENSG00000136237_9 (sequence is synthesized)
tctcacgtacactgtcttcatgacaactgatgacttgtgccaggctctgttaaggcactattctgctaagaagtatcaaggcaaagaggaaaactcagacgttccgcgtaggaaacgtaa

SEQ ID NO: 327157 - DNA, 120 bp, Artificial Sequence
  ENSG00000136237_10 (sequence is synthesized)
agtcttgcatcttgtttcccagtggattgctctgtacaaagactggttacctgaagatgaacattcaaaaatgtttttaaagaccatatataggaatgtactggatgatgtttatgaata

SEQ ID NO: 327158 - DNA, 120 bp, Artificial Sequence
  ENSG00000136237_11 (sequence is synthesized)
tccaatacttgaaaaagaattgaaagaatttcaaaagatacttggaatgcaccgtcgtcacactgtagatgaatattcaccacaaaaaaagaataaagcccttttccaccaattcagtct

SEQ ID NO: 327159 - DNA, 120 bp, Artificial Sequence
  ENSG00000136237_12 (sequence is synthesized)
taaggagaactggctccagcatagaggaactgtgactgaaacggaggaaattttctgccacgtgtatataacagagcactcctatgtcagtgtgaaggcaaaagtttccagtatagccca

SEQ ID NO: 327160 - DNA, 120 bp, Artificial Sequence
  ENSG00000136237_13 (sequence is synthesized)
agagatcctaaaagtcgtggcagaaaagatccagtatgcagaagaggatctggctctggtggccatcacattctctggggaaaagcatgaacttcagccaaatgacttagtcatctccaa

SEQ ID NO: 327161 - DNA, 120 bp, Artificial Sequence
  ENSG00000136237_14 (sequence is synthesized)
atccctcgaggcatctggtcgaatatatgtctaccggaaagacctggcggacactttgaacccatttgcagaaaatgaggaatcacagcaaaggtcgatgaggattttgggaatgaacac

SEQ ID NO: 327162 - DNA, 120 bp, Artificial Sequence
  ENSG00000136237_15 (sequence is synthesized)
ttgggatcttgctctggaattaatgaattttgattggagtctattcaattcaattcacgagcaagagctgatctacttcacgttcagcagacagggaagtggggaacacactgcaaatct

SEQ ID NO: 327163 - DNA, 120 bp, Artificial Sequence
  ENSG00000136237_16 (sequence is synthesized)
cagccttctgctccagagatgcaatgaggtccagctttgggtggccacggagattctgctctgcagccagctgggcaagcgagtgcagctggtgaaaaaattcatcaaaattgcggctca

SEQ ID NO: 327164 - DNA, 120 bp, Artificial Sequence
  ENSG00000136237_17 (sequence is synthesized)
ctgcaaagcccagagaaacctgaattctttctttgccattgtgatgggtctcaacactgcttctgtcagtcgactgtcgcagacctgggagaaaatccctgggaagtttaagaaactttt

SEQ ID NO: 327165 - DNA, 120 bp, Artificial Sequence
  ENSG00000136237_18 (sequence is synthesized)
ctctgaacttgaaagtttaacagatccttccctaaatcacaaagcctacagagatgcattcaaaaagatgaagccaccaaaaatccctttcatgcccttattgcttaaagatgtaacatt

SEQ ID NO: 327166 - DNA, 120 bp, Artificial Sequence
  ENSG00000136237_19 (sequence is synthesized)
tattcatgaaggaaataaaacttttttggataatcttgtcaattttgaaaagctgcatatgatcgcagacactgtccgaaccctgagacactgcaggactaaccagtttggtgacctgtc

SEQ ID NO: 327167 - DNA, 120 bp, Artificial Sequence
  ENSG00000136237_20 (sequence is synthesized)
tccaaaagagcatcaagagttaaagtcctatgttaatcacctgtatgtcattgacagccagcaggctctgtttgagctctcacacaggatcgagcctcgggtgtgagccccactgcctca

SEQ ID NO: 327168 - DNA, 120 bp, Artificial Sequence
  ENSG00000136237_21 (sequence is synthesized)
cctcccctgtatctgcagcactttgagctacgggaatgtctatgccaagcacgttgctttcctgtgagaaaagaagttgctgagttttatcagtataacccaagacattcacaggaaagc

SEQ ID NO: 327169 - DNA, 120 bp, Artificial Sequence
  ENSG00000136237_22 (sequence is synthesized)
cagccaaagcgtgttcaggaagtgatgtcagccaccagagagggggagaggtttctccatgctactctcgggacaagaaggcagaaggagagtcagaagcattcttgagatggagaaggc

SEQ ID NO: 327170 - DNA, 120 bp, Artificial Sequence
  ENSG00000136237_23 (sequence is synthesized)
tggtttcttatgatcacattgttgatccagtccagttttcaatatgagatgtgccagcatcaagacaagacaacgtcttgacatgcaatgaccaaatatttcattaagagcgtgcatgaa

SEQ ID NO: 327171 - DNA, 120 bp, Artificial Sequence
  ENSG00000136237_24 (sequence is synthesized)
acaggaaggagtttttactttgcctagttttagattactgtccataagctgtcaaagaagtcattcttttgaacacctgatgacagagacagcatctctagatctccagggaggagaggt

SEQ ID NO: 327172 - DNA, 120 bp, Artificial Sequence
  ENSG00000136237_25 (sequence is synthesized)
ttctgttgatacaacctgtgacatcaccaaaagccacttgtgtctagggagttagtgaggactgcagctagcatccatgctctgatgggcagatgaacaatgtcaaggtgtgcatcactt

SEQ ID NO: 327173 - DNA, 120 bp, Artificial Sequence
  ENSG00000136237_26 (sequence is synthesized)
tgcaccacaatcaactattgacacatgcttgcaggtgaaattagtttctgtacaactgatttgcagctataggcaaggtagatgaagttgctttgccagtaaggaaaaatagtaatcttt

SEQ ID NO: 327174 - DNA, 120 bp, Artificial Sequence
  ENSG00000136237_27 (sequence is synthesized)
atttctggggattttctttatacttctaagcaggctcttatcttttattggacataatatgattttgaaaaagcacagtgcctgacacattgcaaacactcaccaactgcttgctgaggt

SEQ ID NO: 327175 - DNA, 120 bp, Artificial Sequence
  ENSG00000136237_28 (sequence is synthesized)
gacagagtcacaaaagtctgcattcttgtgcctgatgatgcattttgcgtacctcatacaggctccttgcccacactatggaatgacagcagccagtgcagggaggttaagtgacattta

SEQ ID NO: 327176 - DNA, 120 bp, Artificial Sequence
  ENSG00000136237_29 (sequence is synthesized)
atgagtgaagcacttagcactctctaggtaataagatagtggtaattactagtgttttggcaaatgaaaaatgccctgaaatagccaaatgtctgattaatgttggcaacttagaagtcc

SEQ ID NO: 327177 - DNA, 120 bp, Artificial Sequence
  ENSG00000136237_30 (sequence is synthesized)
tataatccaactaccagccaaagcagggagcctttctataatttgcctttttttttttttttttcaaaatctgagtcttctaaaatcttattattcccatttttaccaattgaggctcct

SEQ ID NO: 327178 - DNA, 120 bp, Artificial Sequence
  ENSG00000136237_31 (sequence is synthesized)
gtagcaaataagacctcttgatattttcaaggactggttagaggatttctttcaaccttcacatgaacaaaacagcctatgggtcaaaataatgaaatccacccctgcctgctagatact

SEQ ID NO: 327179 - DNA, 120 bp, Artificial Sequence
  ENSG00000136237_32 (sequence is synthesized)
tgtcaccttgctaaaatgcaagggcctggtccattcattttccaaatgcaggagtcttggtgcacttctcactcttcctgcctgttcatctctttcatgcccacacagacctgtttcctt

SEQ ID NO: 327180 - DNA, 120 bp, Artificial Sequence
  ENSG00000136237_33 (sequence is synthesized)
tttgtctcatcaacgcctcattcatcctcattactgaggcgtgtccaatgctttttgacatctttatagcagtgctgtttcctgggctcaggaaccacactgagcttgagatactgctgg

SEQ ID NO: 327181 - DNA, 120 bp, Artificial Sequence
  ENSG00000136237_34 (sequence is synthesized)
aaggaaccatgtggagagaaggtttgggagaactttgagagagacttagtttggcccagcatgtaaaacttcagtcctgaacatttatagggttttatagaagggcatcctccagggctg

SEQ ID NO: 327182 - DNA, 120 bp, Artificial Sequence
  ENSG00000136237_35 (sequence is synthesized)
gtccattcagagaaatgctgcatgctgccgtcatggaatgtggcccacaggacaccagagccgtgagaaccggagagcagacttccctcacggctgggctgagcaaaccctccaaagccc

SEQ ID NO: 327183 - DNA, 120 bp, Artificial Sequence
  ENSG00000136237_36 (sequence is synthesized)
tcctcacgcagttactaacaatagcatgggcttacagcacaagcacgtgttctcacctttttcctatgccctggactaaggtttggccagtgtaatcatataaggccatcctgacattgt

SEQ ID NO: 327184 - DNA, 120 bp, Artificial Sequence
  ENSG00000136237_37 (sequence is synthesized)
ttctgtgtttcaaaatttggatttttatttacattagaactacattgctcctagtagaacattacctttaggggactaattttccatggagaactatttcagcatattgcatgctgctca

SEQ ID NO: 327185 - DNA, 120 bp, Artificial Sequence
  ENSG00000136237_38 (sequence is synthesized)
gaccccaagtcagatatgcccaccaagccagatgaagctacacaaatgtggtatttaaatgcattttgtacagtgacttcagagtatctcacatgacatgggtgtaaactggctggggag

SEQ ID NO: 327186 - DNA, 120 bp, Artificial Sequence
  ENSG00000136237_39 (sequence is synthesized)
aaaatgatgcttgttcacctcttcctccagccgtggttaggtggtcctaggggtagcagagggaagggaggattttgtgcagtcaagatttgcttttccatccttgtcttctgaatgtct

SEQ ID NO: 327187 - DNA, 120 bp, Artificial Sequence
  ENSG00000136237_40 (sequence is synthesized)
aaaatctctgcatctttctgaagtttaacaactgtctccagaggtttgccaggcagcagctctcagaagtttccaaagctttgcagaatcttagatctggaattaaagaattcaagcccg

SEQ ID NO: 327188 - DNA, 120 bp, Artificial Sequence
  ENSG00000136237_41 (sequence is synthesized)
aattgtgagaaccagatattactcaacagaaagctctttctaaggaatctgagctgttcactggtggacagtggtggggcttgagtgctccttgttaataggatgggccatgcaccctct

SEQ ID NO: 327189 - DNA, 120 bp, Artificial Sequence
  ENSG00000136237_42 (sequence is synthesized)
ctggatattcaccaaggcctcttcagaatagggtttgttctggctagaagcgtggtctagaagatggctaagctctttgccagctctcatttggagttttattattgcataaaatcttcg

SEQ ID NO: 327190 - DNA, 120 bp, Artificial Sequence
  ENSG00000136237_43 (sequence is synthesized)
ctcactctgcaaatcttacgtaatctggcaccttcggcaccaggtggtgcaggggcacttctaagtgggctctttttgttacagcacaactctcagacagtcctgtgggtctttggattc

SEQ ID NO: 327191 - DNA, 120 bp, Artificial Sequence
  ENSG00000136237_44 (sequence is synthesized)
gtcagcattccagcaaactagccctgcttagaagttagcacaagacagcagaatgcaggaccccgtaggcaaaatcacaaccttgctattaaaaaaaattttgttttacatacacatttg

SEQ ID NO: 327192 - DNA, 120 bp, Artificial Sequence
  ENSG00000136237_45 (sequence is synthesized)
caggtgttccctagagtgtggtgttttgaatttgctctttgtcatctgtataattgccaaatgattatagtgatacacatgacctgcattcacttttttctagtttccttaattatgttt

SEQ ID NO: 327193 - DNA, 120 bp, Artificial Sequence
  ENSG00000136237_46 (sequence is synthesized)
agaataaattcatttccctagaccgagaaccacaaacaggtagtgtggagcatacaccgaatttagaagcatgtggataaggtcagtgctcacactgcctagtccacagggagaggatgc

SEQ ID NO: 327194 - DNA, 120 bp, Artificial Sequence
  ENSG00000136237_47 (sequence is synthesized)
tgcatgaatatatacttgcctctgagtggaggagaaatcgtggcatgaaagagagagtaccagtgatgacttcttatccctggagctgggctttcactgctacccatatcccagccctgc

SEQ ID NO: 327195 - DNA, 120 bp, Artificial Sequence
  ENSG00000136237_48 (sequence is synthesized)
gagtctgttctagccagcacagacaccgcagatccggaactgaatgttcctaaatggcgcagccaatccaggcttttcagaaactgggcaaaaacattaaaatggggacgatcgggtctt

SEQ ID NO: 327196 - DNA, 120 bp, Artificial Sequence
  ENSG00000136237_49 (sequence is synthesized)
ccgcagtggtccaacacaggatttcttttaaatgtttcaaaaacatgtccttaaaatttcagcctgcttcttagcgagtgggccagttttgcttaaaactggtgggggggcgggggggaa

SEQ ID NO: 327197 - DNA, 120 bp, Artificial Sequence
  ENSG00000136237_50 (sequence is synthesized)
gtttttaaaaattgccaaaaagttagatgcaaatgtattactgtataaagcaaagctgtatatactaaacattttttagcagagtaatatttatttgcatagtctatttattgtattcgt

SEQ ID NO: 327198 - DNA, 120 bp, Artificial Sequence
  ENSG00000136237_51 (sequence is synthesized)
atcacactgttattaaatactgggatgaaatcagtgacctgaagcaagaaatcttgccttttaatgtatcattaattagggctgctgtgatattgtcagcttgcattaacaattagaaga

SEQ ID NO: 327199 - DNA, 120 bp, Artificial Sequence
  ENSG00000136237_52 (sequence is synthesized)
tagagaacccgccatcagggtgtctacctaacttctcagggactacacttggtagttttccaccatttaaagaactggtaaatatgaaacatttgttgagttaccagaattgccattaac

SEQ ID NO: 327200 - DNA, 120 bp, Artificial Sequence
  ENSG00000136237_53 (sequence is synthesized)
agtgttttctttcccatattccatgctttctgcctctgtgtatatatataatatatatgtatatgactgtgctgtgtatttatcgaagctagtaagcaataatttatatgtaaaaatggc

SEQ ID NO: 327201 - DNA, 120 bp, Artificial Sequence
  ENSG00000136237_54 (sequence is synthesized)
caagcaatataaggttaaaacttatataagtaacccttaccttatcttgtattttcaatttttttttaaaactgcttttccaaatatgagactatgttaaagacactattcatgcctctt

SEQ ID NO: 327202 - DNA, 120 bp, Artificial Sequence
  ENSG00000136237_55 (sequence is synthesized)
cctagcaccaacctaagtggggaagaaggggttggttggggtcacctcacctaattcctgctcatttccttagagtttgggggagggacacaaatgaaactttagagttttgcagagaca

SEQ ID NO: 327203 - DNA, 120 bp, Artificial Sequence
  ENSG00000136237_56 (sequence is synthesized)
acactcagaaacctcctccccgcaactcccgctgactcctgtccccacagtgtcttgctttgcttgtccattggctcaaaatcactggtgagtttagcaggggtgaccttgcccctaacc

SEQ ID NO: 327204 - DNA, 120 bp, Artificial Sequence
  ENSG00000136237_57 (sequence is synthesized)
gtgttcagccatctctcctttttaaaaagggactgaggtgaagaaagtctgtgcagtcatccatggcatccgaatttcagcctagatgagattctaactagagatccatttttgcttata

SEQ ID NO: 327205 - DNA, 120 bp, Artificial Sequence
  ENSG00000136237_58 (sequence is synthesized)
cggccgcggctgagggacctgcccgcgctgctgcggagcgggctcacgctgcggaggaagcggagcgccgctgggggccgggctgcacctgacttaaccccagggcccccagattcaggc

SEQ ID NO: 327206 - DNA, 120 bp, Artificial Sequence
  ENSG00000136237_59 (sequence is synthesized)
gacgagctgtttgcctcttctcggaggggaagctgcaggtgtccagcgtccaacagccagccagccctgtcccaaccgcaagcttcaggccccacgagcggcatccctgtttgcaggacg

SEQ ID NO: 327207 - DNA, 120 bp, Artificial Sequence
  ENSG00000136237_60 (sequence is synthesized)
catgcgacgtgtgtgcttgttttggaggtgctgttgcaagctctgggcatcgagactggttttggtggtctccaccgccgaggggcagacccaggagtcggaagctcttgggtgagcttc

SEQ ID NO: 327208 - DNA, 120 bp, Artificial Sequence
  ENSG00000136237_61 (sequence is synthesized)
agtttccctgcagccacagaggcacgcgctcccgtttccttttccctgcctgccttcccttcccttgctccatctcactcgctctctgcctcctctaccctccctccctctcttttctct

SEQ ID NO: 327209 - DNA, 120 bp, Artificial Sequence
  ENSG00000136237_62 (sequence is synthesized)
ccgcctctccagcgttctagctgactgcagagctcttagcagccagatggactcagttcccagtgaaaggacagggatggcaagatcttttagcatttaggggatgcctttgttagtaac

SEQ ID NO: 327210 - DNA, 120 bp, Artificial Sequence
  ENSG00000136237_63 (sequence is synthesized)
cgttcacaatgggcagctcccggctgagggtctttgaccctcatttggagaggaaagattccgccgcggcgctctcagaccgagagctgcccttgcctaccttcgatgtgccttatttca

SEQ ID NO: 327211 - DNA, 120 bp, Artificial Sequence
  ENSG00000136237_64 (sequence is synthesized)
cacataaaatggaaataaagtaatttacatggattaaatgagataagtactactaaactaaaaatgtttgaaagtcatatgtcaaggtggtagggatctttttgatcaaatggtctttaa

SEQ ID NO: 327212 - DNA, 120 bp, Artificial Sequence
  ENSG00000136237_65 (sequence is synthesized)
acggttgtataatgtgtctgaactagataaaaatggtaacgtgctccccagctagaattagtcttcccctctgtcctgcctgatagtgcagtgctcgttccaggctggtccccacagtct

SEQ ID NO: 327213 - DNA, 120 bp, Artificial Sequence
  ENSG00000136237_66 (sequence is synthesized)
agtcgcgccctctcgcttcctggcgaaggcgcggacggcgcgcggaggcgagcgcggtggagaggagcccccggcgccgcagcgccgtcagggcatgaggatggccgtgggctccgtcaa

SEQ ID NO: 327214 - DNA, 80 bp, Artificial Sequence
  ENSG00000136237_67 (sequence is synthesized)
tccgtcaagatgcagccgccgtgcgagagcccggccctggccgccgcggcggcggtggtggcggcagacggccccctgcg

SEQ ID NO: 327215 - DNA, 120 bp, Artificial Sequence
  ENSG00000136237_68 (sequence is synthesized)
aaagaaacaggtaaggctctgagtagctcatgcttccagactgatagcagctgatgcccttgtcagtaccctcaggggcaaggttcccactgttagctgaaaccggggtggggagaaata

SEQ ID NO: 327216 - DNA, 120 bp, Artificial Sequence
  ENSG00000136237_69 (sequence is synthesized)
gcatatgctttgtgcgactcgtcccttgccttgtgctgatttgtttaaatccaataaatggacacatgtagatcccaagcagctccctgggaagtagctgtacaaagaaaatgatatgaa

SEQ ID NO: 327217 - DNA, 120 bp, Artificial Sequence
  ENSG00000136237_70 (sequence is synthesized)
ggcagctgttcttgtttctttggcaatttttcccaaatctcacctaaaggcagttggcaagagaccaacattcaatagcccatgttcaatggaaagaaatacaaggaggaggagggttag

SEQ ID NO: 327218 - DNA, 120 bp, Artificial Sequence
  ENSG00000136237_71 (sequence is synthesized)
caggcgttcacctggcatgtaggcagtgctgagctgggggcagcagcctccgtgctgaaatgtcaacaattaatgcaactactcagcagctacatgcttagtggcaacttctgccttttt

SEQ ID NO: 327219 - DNA, 120 bp, Artificial Sequence
  ENSG00000136237_72 (sequence is synthesized)
ccaagtggtttacaaactgcctggtcagaacaagccccgaggtgcagactatgatactcacagcttttcagagcagaaactgtaatgcactaaagccttatcgatcagacttcttgtatt

SEQ ID NO: 327220 - DNA, 120 bp, Artificial Sequence
  ENSG00000136237_73 (sequence is synthesized)
ttaaatttaatctgagagtaaaacactcattttgctttttcacccatacacttttggaaacactactgttccacttacaaaatgacttacctgtaacttcctttatctcagaagggagag

SEQ ID NO: 327221 - DNA, 120 bp, Artificial Sequence
  ENSG00000136237_74 (sequence is synthesized)
tacttgcttctcttaaccagaatttgtaatttgttccatgctggagcagttattccaatgaataggcctctgactgtagcctgcattttgcaacttgatcccttaactaaaatgcactgt

SEQ ID NO: 327222 - DNA, 120 bp, Artificial Sequence
  ENSG00000136237_75 (sequence is synthesized)
ttgctcctaccatagcacctgtgagacccacagtttccttaggtttttaccatgcaagaaggattgtgaaatgacagcttaggtgggaacaagaatttccttgtgtccctggagttttgt

SEQ ID NO: 327223 - DNA, 120 bp, Artificial Sequence
  ENSG00000136237_76 (sequence is synthesized)
ctgaacataggtgatgtctgggtctattttgcattctaaaggacaataagagaaacaagtatgtgtgaaatacataagtgggcaaaaaaacagtatcaaaatgacctaatcatgtatcct

SEQ ID NO: 327224 - DNA, 120 bp, Artificial Sequence
  ENSG00000136237_77 (sequence is synthesized)
acagtaaagttattgtgtaattttaaaattcagatagataccttattttgcatatgtttgaagacaaaatcagtagttgtcatttatatgcactaaataaacagctaaaagaaaaacata

SEQ ID NO: 327225 - DNA, 120 bp, Artificial Sequence
  ENSG00000136237_78 (sequence is synthesized)
agtttgctctgtccttcaccctcttaaagtagggtgatacgcagactcaactttaagtcttttggcatggtgctcttaggttataataatgtaacttcaatttttgaaaggcaaaatatt

SEQ ID NO: 327226 - DNA, 120 bp, Artificial Sequence
  ENSG00000136237_79 (sequence is synthesized)
ttaccaagaccatgatttaatccaggcagtggaaaagatgagcttattataaggtgaactttgcggtggtgtcatgtcctgggactgtggttttaagtatatcttcgctttttctccaac

SEQ ID NO: 327227 - DNA, 120 bp, Artificial Sequence
  ENSG00000136237_80 (sequence is synthesized)
aatattgacttcctgatggtgtgttcagatacgatttcctggtgaaggagtgtccctcattgagttctaagtgcatctaatgacctgagcaggtcaggcatgttttgtatttttaagaga

SEQ ID NO: 327228 - DNA, 120 bp, Artificial Sequence
  ENSG00000136237_81 (sequence is synthesized)
agcaggaaggtctgctgattgtctcctgggatctttaagaagccacctaggaggccccgccagggcctcaggacacagagctgacttactcagatttccctgctcaccagggtttggcgg

SEQ ID NO: 327229 - DNA, 80 bp, Artificial Sequence
  ENSG00000136238_0 (sequence is synthesized)
agttttcctcagctttgggtggtggccgctgccgggcatcggcttccagtccgcggagggcgaggcggcgtggacagcgg

SEQ ID NO: 327230 - DNA, 120 bp, Artificial Sequence
  ENSG00000136238_1 (sequence is synthesized)
cgtccgccgcgccccgagcccgccgcttcctatctcagcgccctgccgccgccgccgcggcccagcgagcggccctgatgcaggccatcaagtgtgtggtggtgggagacggagctgtag

SEQ ID NO: 327231 - DNA, 120 bp, Artificial Sequence
  ENSG00000136238_2 (sequence is synthesized)
gtaaaacttgcctactgatcagttacacaaccaatgcatttcctggagaatatatccctactgtctttgacaattattctgccaatgttatggtagatggaaaaccggtgaatctgggct

SEQ ID NO: 327232 - DNA, 120 bp, Artificial Sequence
  ENSG00000136238_3 (sequence is synthesized)
agaaacgtacggtaaggatataacctcccggggcaaagacaagccgattgccgatgtgttcttaatttgcttttcccttgtgagtcctgcatcatttgaaaatgtccgtgcaaagtggta

SEQ ID NO: 327233 - DNA, 120 bp, Artificial Sequence
  ENSG00000136238_4 (sequence is synthesized)
tcctgaggtgcggcaccactgtcccaacactcccatcatcctagtgggaactaaacttgatcttagggatgataaagacacgatcgagaaactgaaggagaagaagctgactcccatcac

SEQ ID NO: 327234 - DNA, 120 bp, Artificial Sequence
  ENSG00000136238_5 (sequence is synthesized)
ctatccgcagggtctagccatggctaaggagattggtgctgtaaaatacctggagtgctcggcgctcacacagcgaggcctcaagacagtgtttgacgaagcgatccgagcagtcctctg

SEQ ID NO: 327235 - DNA, 120 bp, Artificial Sequence
  ENSG00000136238_6 (sequence is synthesized)
cccgcctcccgtgaagaagaggaagagaaaatgcctgctgttgtaaatgtctcagcccctcgttcttggtcctgtcccttggaacctttgtacgctttgctcaaaaaaaaacaaaaaaaa

SEQ ID NO: 327236 - DNA, 120 bp, Artificial Sequence
  ENSG00000136238_7 (sequence is synthesized)
taattttaaggttttgtttgttctaaatgtaagagttcagactcacattctattaaaatttagccctaaaatgacaagccttcttaaagccttatttttcaaaagcgccccccccattct

SEQ ID NO: 327237 - DNA, 120 bp, Artificial Sequence
  ENSG00000136238_8 (sequence is synthesized)
tctgaactacactgcattgttgtgccgagaacaccgagcactgaactttgcaaagaccttcgtctttgagaagacggtagcttctgcagttaggaggtgcagacacttgctctcctatgt

SEQ ID NO: 327238 - DNA, 120 bp, Artificial Sequence
  ENSG00000136238_9 (sequence is synthesized)
agttctcagatgcgtaaagcagaacagcctcccgaatgaagcgttgccattgaactcaccagtgagttagcagcacgtgttcccgacataacattgtactgtaatggagtgagcgtagca

SEQ ID NO: 327239 - DNA, 120 bp, Artificial Sequence
  ENSG00000136238_10 (sequence is synthesized)
gctcagctctttggatcagtctttgtgatttcatagcgagttttctgaccagcttttgcggagattttgaacagaactgctatttcctctaatgaagaattctgtttagctgtgggtgtg

SEQ ID NO: 327240 - DNA, 120 bp, Artificial Sequence
  ENSG00000136238_11 (sequence is synthesized)
ccgggtggggtgtgtgtgatcaaaggacaaagacagtattttgacaaaatacgaagtggagatttacactacattgtacaaggaatgaaagtgtcacgggtaaaaactctaaaaggttaa

SEQ ID NO: 327241 - DNA, 120 bp, Artificial Sequence
  ENSG00000136238_12 (sequence is synthesized)
tttctgtcaaatgcagtagatgatgaaagaaaggttggtattatcaggaaatgttttcttaagcttttcctttctcttacacctgccatgcctccccaaattgggcatttaattcatctt

SEQ ID NO: 327242 - DNA, 120 bp, Artificial Sequence
  ENSG00000136238_13 (sequence is synthesized)
taaactggttgttctgttagtcgctaacttagtaagtgcttttcttatagaaccccttctgactgagcaatatgcctccttgtattataaaatctttctgataatgcattagaaggtttt

SEQ ID NO: 327243 - DNA, 120 bp, Artificial Sequence
  ENSG00000136238_14 (sequence is synthesized)
tttgtcgattagtaaaagtgctttccatgttactttattcagagctaataagtgctttccttagttttctagtaactaggtgtaaaaatcatgtgttgcagctttatagtttttaaaata

SEQ ID NO: 327244 - DNA, 120 bp, Artificial Sequence
  ENSG00000136238_15 (sequence is synthesized)
ttttagataattcttaaactatgaaccttcttaacatcactgtcttgccagattaccgacactgtcacttgaccaatactgaccctctttacctcgcccacgcggacacacgcctcctgt

SEQ ID NO: 327245 - DNA, 120 bp, Artificial Sequence
  ENSG00000136238_16 (sequence is synthesized)
agtcgctttgcctattgatgttcctttgggtctgtgaggttctgtaaactgtgctagtgctgacgatgttctgtacaacttaactcactggcgagaatacagcgtgggacccttcagcca

SEQ ID NO: 327246 - DNA, 120 bp, Artificial Sequence
  ENSG00000136238_17 (sequence is synthesized)
ctacaacagaattttttaaattgacagttgcagaattgtggagtgtttttacattgatcttttgctaatgcaattagcattatgttttgcatgtatgacttaataaatccttgaatcata

SEQ ID NO: 327247 - DNA, 120 bp, Artificial Sequence
  ENSG00000136238_18 (sequence is synthesized)
gatagttaggcgtaaaggaagcctcctgagggtctggtctgatcctcctgatccttgaagagcttccagcatcattctcccttcatgctccccattttcataagtaactggtggcttgac

SEQ ID NO: 327248 - DNA, 120 bp, Artificial Sequence
  ENSG00000136238_19 (sequence is synthesized)
atgctgggtttggtttgggagccctctgacaaactgaaagggtggatcaggaagcgtctgaccacaccactggtagacacgctctgcgtccaacaagtccttcccagcaacatgtagaaa

SEQ ID NO: 327249 - DNA, 120 bp, Artificial Sequence
  ENSG00000136238_20 (sequence is synthesized)
aggtgtattttgtgtgactgctctacactcaggccttctggaaaccctgcagagggtagctctagtggccagctagctctcttgctgaaaatgagcaacataagtacatgaaaaacccaa

SEQ ID NO: 327250 - DNA, 120 bp, Artificial Sequence
  ENSG00000136238_21 (sequence is synthesized)
gtagagcccgttctgtccggtcgtggttctgtccagccatgatccgggagtcctagcttgctaatggaacacctgagatgttccttatggctcaaggcttgaattgaaggtgggaaccac

SEQ ID NO: 327251 - DNA, 120 bp, Artificial Sequence
  ENSG00000136238_22 (sequence is synthesized)
ctgaagcctccgtggggaggccttgcctgaggttaggtgtctggcatgagtgccgccggctgggtgtgatttaggtgaaggacatctgtaaaggagcgtgtcacaacctctgttccttct

SEQ ID NO: 327252 - DNA, 120 bp, Artificial Sequence
  ENSG00000136240_0 (sequence is synthesized)
gccatcttcgccgcttcctctcaggggccgccgcctcctgagccgcccagccccggggccgccgcgctgcgccgaccgccaccgccgccgccgccatgaacattttccggctgactgggg

SEQ ID NO: 327253 - DNA, 120 bp, Artificial Sequence
  ENSG00000136240_1 (sequence is synthesized)
acctgtcccacctggcggccatcgtcatcctgctgctgaagatctggaagacgcgctcctgcgccggtatttctgggaaaagccagcttctgtttgcactggtcttcacaactcgttacc

SEQ ID NO: 327254 - DNA, 120 bp, Artificial Sequence
  ENSG00000136240_2 (sequence is synthesized)
tggatctttttacttcatttatttcattgtataacacatctatgaaggttatctaccttgcctgctcctatgccacagtgtacctgatctacctgaaatttaaggcaacctacgatggaa

SEQ ID NO: 327255 - DNA, 120 bp, Artificial Sequence
  ENSG00000136240_3 (sequence is synthesized)
atcatgataccttccgagtggagtttctggtggtccctgtgggaggcctctcatttttagttaatcacgatttctctcctcttgagatcctctggaccttctccatctacctggagtccg

SEQ ID NO: 327256 - DNA, 120 bp, Artificial Sequence
  ENSG00000136240_4 (sequence is synthesized)
tggctatccttccgcagctatttatgatcagcaagactggggaggccgagaccatcaccacccactacctgttcttcctgggcctctatcgtgctttgtatcttgtcaactggatctggc

SEQ ID NO: 327257 - DNA, 120 bp, Artificial Sequence
  ENSG00000136240_5 (sequence is synthesized)
gcttctactttgagggcttctttgacctcattgctgtggtggccggcgtagtccagaccatcctatactgtgacttcttctacttgtacattacaaaagtactcaagggaaagaagctca

SEQ ID NO: 327258 - DNA, 120 bp, Artificial Sequence
  ENSG00000136240_6 (sequence is synthesized)
gtttgccagcataagtgccaaagaccatcaccagcatctgtccttcagggtgctcggacagaattcttaccacagcaaaggcataagatgcttgatacggaaaatcagaaacttaactct

SEQ ID NO: 327259 - DNA, 120 bp, Artificial Sequence
  ENSG00000136240_7 (sequence is synthesized)
tttgttgcagatagtcatcagtggctctgtaaaaacgcagaggaaaagagccagaaggtttctgtttaatgcatcttgccttatctttttttattactgtgtacaaagatttttttacac

SEQ ID NO: 327260 - DNA, 120 bp, Artificial Sequence
  ENSG00000136240_8 (sequence is synthesized)
aaagaaacttaatgctgtattaataaattcagtgtgtagcttcaattgggatagttccaaaagtgaagattttgtgaggaataagtgcaaattttttttttattttaaaaaattctttga

SEQ ID NO: 327261 - DNA, 120 bp, Artificial Sequence
  ENSG00000136240_9 (sequence is synthesized)
aactcttaagtctttgtgtctgcaatgaaattgtactccttgacagttgatagattatatattcttccatccctcaaacttgcattccactatatttattttttggcaaaagatgagctg

SEQ ID NO: 327262 - DNA, 120 bp, Artificial Sequence
  ENSG00000136240_10 (sequence is synthesized)
tatttgtttgaaatctgagacactatgttcaattggatgtatctgttcaaatttattcccacgtgacgtggaagtccttcgttggatgtcacaacactacatttaaggttggtaaggatg

SEQ ID NO: 327263 - DNA, 120 bp, Artificial Sequence
  ENSG00000136240_11 (sequence is synthesized)
caacattttaagattctgaatgtcgatggagtctcactgaagagtcaccaaaggtgcctgccctcctcccctgctgggaagtgtcagttggagactgtcccaagggtgctgaagaatcca

SEQ ID NO: 327264 - DNA, 120 bp, Artificial Sequence
  ENSG00000136240_12 (sequence is synthesized)
gtggcaggggttctggctgctttccatctgagtgtgggatgggaggggtgttcatgatcatttggatatagcaatctactctgagaaatggaacacaaggagttacctatcactttcact

SEQ ID NO: 327265 - DNA, 120 bp, Artificial Sequence
  ENSG00000136240_13 (sequence is synthesized)
tataattccaaaagatgactacaaccatgtccatgctcagattcaaacagttttccatatcacttttgggtggtaagatgatttaattacagttttttttttaattggcagcaccactaa

SEQ ID NO: 327266 - DNA, 120 bp, Artificial Sequence
  ENSG00000136240_14 (sequence is synthesized)
ccattccttacattcttttttgtatgtgtggttttctttttatttaacccgcagccgacatcgtagtttcttgttttgttttgttttacagagctgttgcatgacttatgttaccatcct

SEQ ID NO: 327267 - DNA, 120 bp, Artificial Sequence
  ENSG00000136240_15 (sequence is synthesized)
aaaaaacactatattaaacatggaataaattgtctttttatgaattaggctttttgaacatcctgtgttgggatttttttgtttttcaattggcaacaaaagctctgtagggctgcagac

SEQ ID NO: 327268 - DNA, 120 bp, Artificial Sequence
  ENSG00000136240_16 (sequence is synthesized)
atttaaagttcacataatcatctgtaagacattatgtattttgtggaaatactagaatttttttcctgattttgccattatatggatttgctattttttgattaatgcaaaagtatatga

SEQ ID NO: 327269 - DNA, 120 bp, Artificial Sequence
  ENSG00000136240_17 (sequence is synthesized)
ctttgttttttatgtgatacaccataaatattaaagtgttgaatactaacagtgctgactacaagaaggatgtagtattttggctttctgcattacaacgtcttctggaggaagggagca

SEQ ID NO: 327270 - DNA, 120 bp, Artificial Sequence
  ENSG00000136240_18 (sequence is synthesized)
ggatgggtttcatttgtatctagtgtgtgtcttaacatctttctaaatcggcagtgtaactgcatagtttaacttcctgtctgtctccctcattttactcttccctccttgtcttatgtt

SEQ ID NO: 327271 - DNA, 120 bp, Artificial Sequence
  ENSG00000136240_19 (sequence is synthesized)
ttggcttttgtgtatcagagcatctttctttgcagcatcctagtcttgcttcagtttctgtggtctcttttcatcctgcttgaagattcggagtgtggaaggaggctaggaagtctggtg

SEQ ID NO: 327272 - DNA, 120 bp, Artificial Sequence
  ENSG00000136240_20 (sequence is synthesized)
cagtaggtgagcagacctcttgctgcccagcccagggtgggtggggcgcacacctgtctttgtgcatgcaaatctgatacacctggcgcatcctctggagagcacaacgcatggaaaggt

SEQ ID NO: 327273 - DNA, 120 bp, Artificial Sequence
  ENSG00000136240_21 (sequence is synthesized)
ctggaagctctgtgtagccattccttctgcagtcatcctacccaagtaaaagtaaccttggctatgttaccaccgttttggtcacccaggaggacatcttagcaagggtgcctgcgaggg

SEQ ID NO: 327274 - DNA, 120 bp, Artificial Sequence
  ENSG00000136240_22 (sequence is synthesized)
agtgtgggactgggcctcatcctcgccggcgttggaaaccaaggccttgtatgccacgccttatgaagcactgtttcacagttactttcacttcccgaataaaggttaccaggtaattaa

SEQ ID NO: 327275 - DNA, 120 bp, Artificial Sequence
  ENSG00000136240_23 (sequence is synthesized)
taacacatctatgaaggtatggtatgccatccacaggaatgtatttcatctacagtgcacaggtctatggacacttaatttatgtcagctgtgtatttttaattaaaatgctccaaaaat

SEQ ID NO: 327276 - DNA, 120 bp, Artificial Sequence
  ENSG00000136240_24 (sequence is synthesized)
acagaggaaagctggactgtgctggtggagccttgctcagcagttacttgatcgtcctcatgattctcctggcagttgtcatatgtactgtgtcagccatcatgtgtgtcagcatgagag

SEQ ID NO: 327277 - DNA, 120 bp, Artificial Sequence
  ENSG00000136240_25 (sequence is synthesized)
cacactaggacagttcacacatgccagttcacctaactggcatcgttgagatgtaagaggaaaccagagtatctctggtgggagattctccaagagtatctcttggagaagacccacgtg

SEQ ID NO: 327278 - DNA, 120 bp, Artificial Sequence
  ENSG00000136240_26 (sequence is synthesized)
gactcggggagagcatgcaaacgccatggatggcggccccagccgggaaccagtttcttttctcatcagtgttacaaccaaaggatgttattggcagacctgctatacacacaataagtt

SEQ ID NO: 327279 - DNA, 120 bp, Artificial Sequence
  ENSG00000136240_27 (sequence is synthesized)
tggttgcctctcagatgcattaggctaactgaaattggacccagaaggcaacatactatgtgactccatttatgtggctttctagaaaaggcaaaactatggacagagaacataagtgtg

SEQ ID NO: 327280 - DNA, 120 bp, Artificial Sequence
  ENSG00000136240_28 (sequence is synthesized)
attgcactgcaggaggtgaaggaagcctgggggagtttgactgcgaagcggcagcatggcagaattttggggatgatggaactattctgtgtcctaattttggtggtggttatgcctcag

SEQ ID NO: 327281 - DNA, 120 bp, Artificial Sequence
  ENSG00000136240_29 (sequence is synthesized)
aactgaacacctccaaaaaagagaattttactatatttaagttttaaaattccaaaaacaaagctaaggaaaaaaatcttgcctttccaaatacatgggtgattaaaaaagctggggggt

SEQ ID NO: 327282 - DNA, 120 bp, Artificial Sequence
  ENSG00000136243_0 (sequence is synthesized)
gcagactgaagacgccctccgtcagcgacgccgtcgcaatggccatttgtcaattcttccttcaaggccggtgccgctttggagatcggtgctggaacgaacatcccggtgctaggggtg

SEQ ID NO: 327283 - DNA, 120 bp, Artificial Sequence
  ENSG00000136243_1 (sequence is synthesized)
caggaggaggacggcagcaaccgcagcagcagccttcaggtaataatagacgtggatggaatacaactagccagagatattccaatgtcatccagccatccagtttctccaaatccacac

SEQ ID NO: 327284 - DNA, 120 bp, Artificial Sequence
  ENSG00000136243_2 (sequence is synthesized)
catgggggggcagcagagatcaagaaaagccatatttcagttcttttgattctggagcttcaactaacaggaaggaaggctttggattgtctgagaacccatttgcttcacttagtcctg

SEQ ID NO: 327285 - DNA, 120 bp, Artificial Sequence
  ENSG00000136243_3 (sequence is synthesized)
atgagcagaaagatgaaaagaaacttctggaaggaattgtaaaagatatggaggtttgggaatcatcagggcagtggatgttttctgtttattcaccagtgaaaaagaaacctaatattt

SEQ ID NO: 327286 - DNA, 120 bp, Artificial Sequence
  ENSG00000136243_4 (sequence is synthesized)
caggttttacagacatttcaccagaggaattgaggcttgaataccataacttcttaaccagcaataacttacagagttatctaaattctgtccaacgtttaataaatcaatggaggaaca

SEQ ID NO: 327287 - DNA, 120 bp, Artificial Sequence
  ENSG00000136243_5 (sequence is synthesized)
gggtaaatgaactgaaaagtctaaatatatcaactaaagtagctttgctctctgatgtaaaggatggagtaaatcaagcagcacctgcatttggatttggcagcagtcaagcagcaacat

SEQ ID NO: 327288 - DNA, 120 bp, Artificial Sequence
  ENSG00000136243_6 (sequence is synthesized)
ggctttccagtcaataacagcagcagtgataatgctcagaactttagttttaaaacaaactctggatttgctgctgcctcttctggaagccctgctggttttgggagttccccagcattt

SEQ ID NO: 327289 - DNA, 120 bp, Artificial Sequence
  ENSG00000136243_7 (sequence is synthesized)
ggagctgcagcctctaccagttcaggtatctctacttctgctccagcttttggatttgggaagcctgaagtcacatcggctgcatcattttcattcaaaagccctgcagcttccagtttt

SEQ ID NO: 327290 - DNA, 120 bp, Artificial Sequence
  ENSG00000136243_8 (sequence is synthesized)
ggatcacctggattttcaggacttccagcttccttggcaacaggtcctgtcagagctccagtggccccagcctttggaggtggcagttctgtggctggttttggtagtccgggctcacat

SEQ ID NO: 327291 - DNA, 120 bp, Artificial Sequence
  ENSG00000136243_9 (sequence is synthesized)
tctcacactgctttttctaagccatccagtgacacttttggaaatagcagcatatccacttctctgtcagcctcaagcagcatcattgcaacagataatgtgttattcacacccagagat

SEQ ID NO: 327292 - DNA, 120 bp, Artificial Sequence
  ENSG00000136243_10 (sequence is synthesized)
aaactaacagtagaagaactggaacaatttcaatccaagaaatttactctgggaaaaattccattaaagcctccacctctggaacttctaaatgtttaaaagggcaattttaaatacaaa

SEQ ID NO: 327293 - DNA, 120 bp, Artificial Sequence
  ENSG00000136243_11 (sequence is synthesized)
aaagaatgatgtttaaaattgctttgagtgattcatacagagatgtatatatgcatacatgtatatattcataaggaatataagcttccatcaatagtgattttaaatttgatttttttc

SEQ ID NO: 327294 - DNA, 120 bp, Artificial Sequence
  ENSG00000136243_12 (sequence is synthesized)
ttaactctaaatatttaagtaaaaagtaacaaaaactctgcaagcaagggaatttttttgtactgtaattttgaatggaactgaaaaattatgcacgaataaagtacttttctcatgcca

SEQ ID NO: 327295 - DNA, 120 bp, Artificial Sequence
  ENSG00000136243_13 (sequence is synthesized)
gggcctccgtccttttgaggaaacagtgggtaccttgcaaatgggagctcttgcaatcaatatcgcagaaccttgggatctttcctctgtctcagttctagttgctcattttctgtgagc

SEQ ID NO: 327296 - DNA, 120 bp, Artificial Sequence
  ENSG00000136243_14 (sequence is synthesized)
agtgcagtggcgccatctcagctcactacagcctcggctggccttccgggttcaagcgattctccagtctcagtctcccgagtagctcggattataggcatatgccaccacgccgagcta

SEQ ID NO: 327297 - DNA, 120 bp, Artificial Sequence
  ENSG00000136243_15 (sequence is synthesized)
gctaattttggtatttttagtagaaacagggtttcgccgtgttggcccggctggtcttgaacttctggcctcaggtgatccaccggccttggtctcccaaagtgctgggactacaggcgt

SEQ ID NO: 327298 - DNA, 120 bp, Artificial Sequence
  ENSG00000136243_16 (sequence is synthesized)
aatttttgctttcagtttgtctctggtactaaaaatattagaatgaacacccttatacatagcaacctttgtttacatatataactatttcccaaggttaaatcctataaattgtattat

SEQ ID NO: 327299 - DNA, 120 bp, Artificial Sequence
  ENSG00000136243_17 (sequence is synthesized)
aagtcacaggatatgaatgtttttcaggcttgtgatgcttattaacaattatccctcccagaaaacttgtaccattttaattcccttaacggtaatttaggaaatgatacatttcaccac

SEQ ID NO: 327300 - DNA, 120 bp, Artificial Sequence
  ENSG00000136243_18 (sequence is synthesized)
atttggaacaacagtaaataccagcttttaaaatttctgccagtctgataagtaaagcattttatctctattttaagttgcatttaactttatttcatttatttactatttgattttttt

SEQ ID NO: 327301 - DNA, 120 bp, Artificial Sequence
  ENSG00000136243_19 (sequence is synthesized)
tgtgtgtgaattgcctgttcattatctttgcccaaattcatttacttttctcatttatttgtaagagctatttgtacattagggcattagttcttctcttgtcatatatgttaaaattgc

SEQ ID NO: 327302 - DNA, 120 bp, Artificial Sequence
  ENSG00000136243_20 (sequence is synthesized)
aattttcctagtgtaccatttgccttgtaattttgcttagtatagtttctggcagaatttttaaaataaaagtttgaatataaatgtagtcaaatctttctcctgtgtttgttgttcatt

SEQ ID NO: 327303 - DNA, 120 bp, Artificial Sequence
  ENSG00000136243_21 (sequence is synthesized)
ttatctttagaaaatcttccccatttaaagatcagaataaccaactatattttactgtaattttacactttattaaacattaagtagagtgtaggctttaagtttcttcctcatggttat

SEQ ID NO: 327304 - DNA, 120 bp, Artificial Sequence
  ENSG00000136243_22 (sequence is synthesized)
gaaaaattgtgcatttttaaagtatgttctaaaactattattttctaaaaccaaaagaatgccaaataaagaaatcaactaccaacttagctacaactaggagagtttgggcattgttta

SEQ ID NO: 327305 - DNA, 120 bp, Artificial Sequence
  ENSG00000136243_23 (sequence is synthesized)
aagtattcgagtattctagccaaacttcataatttagagattaaggttggagaatatagtcttttaagacatatagttcttgggagaaaacatttaaataaagcccaggaagagactcta

SEQ ID NO: 327306 - DNA, 120 bp, Artificial Sequence
  ENSG00000136243_24 (sequence is synthesized)
gcatccctccttcccaggacacactcaaagcgtcagagcggtccgctcttctcaagtcctattggctcaagtccatgcgtctcatggcactgccgggtgagaggcggaaaaaggccttcc

SEQ ID NO: 327307 - DNA, 120 bp, Artificial Sequence
  ENSG00000136243_25 (sequence is synthesized)
cttcaggtgactctcctctgaatcctccgcggtaaccgagccgggaagggtccgccggcggggaccgggcgtcccgcgtgtttcccgctgctggtgaccccaacgtgcccgcgtcgcggc

SEQ ID NO: 327308 - DNA, 120 bp, Artificial Sequence
  ENSG00000136243_26 (sequence is synthesized)
cttgccggccctactgggccctgcacaacgtttttaaaccgagggttttatctacatattattcatgtggtccgtttttattgagcttctgaggacctgggtttgggcctggatgcttgt

SEQ ID NO: 327309 - DNA, 120 bp, Artificial Sequence
  ENSG00000136243_27 (sequence is synthesized)
tagctttgaaatgcctttggaagatatatacccacctgtctccaaagatctatggtcccgactgtggcaagttcattatctttgtaaataaagttatgatgtttctacacccattaaaaa

SEQ ID NO: 327310 - DNA, 64 bp, Artificial Sequence
  ENSG00000136243_28 (sequence is synthesized)
tccatccgcctcagcctcccaaagtgctgcaactacagaaattacccaacagtcaatcccagaa

SEQ ID NO: 327311 - DNA, 120 bp, Artificial Sequence
  ENSG00000136244_0 (sequence is synthesized)
attctgccctcgagcccaccgggaacgaaagagaagctctatctcccctccaggagcccagctatgaactccttctccacaagcgccttcggtccagttgccttctccctggggctgctc

SEQ ID NO: 327312 - DNA, 120 bp, Artificial Sequence
  ENSG00000136244_1 (sequence is synthesized)
ctggtgttgcctgctgccttccctgccccagtacccccaggagaagattccaaagatgtagccgccccacacagacagccactcacctcttcagaacgaattgacaaacaaattcggtac

SEQ ID NO: 327313 - DNA, 120 bp, Artificial Sequence
  ENSG00000136244_2 (sequence is synthesized)
atcctcgacggcatctcagccctgagaaaggagacatgtaacaagagtaacatgtgtgaaagcagcaaagaggcactggcagaaaacaacctgaaccttccaaagatggctgaaaaagat

SEQ ID NO: 327314 - DNA, 120 bp, Artificial Sequence
  ENSG00000136244_3 (sequence is synthesized)
ggatgcttccaatctggattcaatgaggagacttgcctggtgaaaatcatcactggtcttttggagtttgaggtatacctagagtacctccagaacagatttgagagtagtgaggaacaa

SEQ ID NO: 327315 - DNA, 120 bp, Artificial Sequence
  ENSG00000136244_4 (sequence is synthesized)
gaaaaaggcaaagaatctagatgcaataaccacccctgacccaaccacaaatgccagcctgctgacgaagctgcaggcacagaaccagtggctgcaggacatgacaactcatctcattct

SEQ ID NO: 327316 - DNA, 120 bp, Artificial Sequence
  ENSG00000136244_5 (sequence is synthesized)
gcgcagctttaaggagttcctgcagtccagcctgagggctcttcggcaaatgtagcatgggcacctcagattgttgttgttaatgggcattccttcttctggtcagaaacctgtccactg

SEQ ID NO: 327317 - DNA, 120 bp, Artificial Sequence
  ENSG00000136244_6 (sequence is synthesized)
ggcacagaacttatgttgttctctatggagaactaaaagtatgagcgttaggacactattttaattatttttaatttattaatatttaaatatgtgaagctgagttaatttatgtaagtc

SEQ ID NO: 327318 - DNA, 120 bp, Artificial Sequence
  ENSG00000136244_7 (sequence is synthesized)
atatttatatttttaagaagtaccacttgaaacattttatgtattagttttgaaataataatggaaagtggctatgcagtttgaatatcctttgtttcagagccagatcatttcttggaa

SEQ ID NO: 327319 - DNA, 120 bp, Artificial Sequence
  ENSG00000136244_8 (sequence is synthesized)
tcttggaaagtgtaggcttacctcaaataaatggctaacttatacatatttttaaagaaatatttatattgtatttatataatgtataaatggtttttataccaataaatggcattttaa

SEQ ID NO: 327320 - DNA, 120 bp, Artificial Sequence
  ENSG00000136244_9 (sequence is synthesized)
aggtaacaccatgtttggtaaataagtgttttggtgttgtgcaagggtctggtttcagcctgaagccatctcagagctgtctgggtctctggagactggagggacaacctagtctagagc

SEQ ID NO: 327321 - DNA, 120 bp, Artificial Sequence
  ENSG00000136244_10 (sequence is synthesized)
ccatttgcatgagaccaaggatcctcctgcaagagacaccatcctgagggaagagggcttctgaaccagcttgacccaataagaaattcttgggtgccgacgcggaagcagattcagagc

SEQ ID NO: 327322 - DNA, 120 bp, Artificial Sequence
  ENSG00000136244_11 (sequence is synthesized)
ctagagccgtgcctgcgtccgtagtttccttctagcttcttttgatttcaaatcaagacttacagggagagggagcgataaacacaaactctgcaagatgccacaaggtcctcctttgac

SEQ ID NO: 327323 - DNA, 120 bp, Artificial Sequence
  ENSG00000136244_12 (sequence is synthesized)
acttggtgtgggggaagacaggctcaaagacagtgtcctggacaactcagggatgcaatgccacttccaaaagagaaggctacacgtaaacaaaagagtctgagaaatagtttctgattg

SEQ ID NO: 327324 - DNA, 120 bp, Artificial Sequence
  ENSG00000136244_13 (sequence is synthesized)
attctgccctcgagcccaccgggaacgaaagagaagctctatctcccctccaggagcccagctatgaactccttctccacaagtaagtgcaggaaatccttagccctggaactgccagcg

SEQ ID NO: 327325 - DNA, 120 bp, Artificial Sequence
  ENSG00000136244_14 (sequence is synthesized)
gcggtcgagccctgtgtgagggaggggtgtgtggcccagggagggctggcgggcggccagcagcagaggcaggctcccagctgtgctgtcagctcacccctgcgctcgctcccctccggc

SEQ ID NO: 327326 - DNA, 120 bp, Artificial Sequence
  ENSG00000136244_15 (sequence is synthesized)
agtcacaggtgagcttggaactgaacccaagtgtgcccccactccactggaatttgcttgccaggatgccaatgagttgtagcttcatttttcttagagactttcctggctgtggttgaa

SEQ ID NO: 327327 - DNA, 120 bp, Artificial Sequence
  ENSG00000136247_0 (sequence is synthesized)
aagtctcgtatcgcgcccgggaggcgccggagcccagcggctggcgccagatccaggctcctggaagaaccatgtccggcagctactggtcatgccaggcacacactgctgcccaagagg

SEQ ID NO: 327328 - DNA, 120 bp, Artificial Sequence
  ENSG00000136247_1 (sequence is synthesized)
agctgctgtttgaattatctgtgaatgttgggaagaggaatgccagagctgccggctgaaaattacccaaccaagagaaatctgcaggatggactttctggtcctcttcttgttctacct

SEQ ID NO: 327329 - DNA, 120 bp, Artificial Sequence
  ENSG00000136247_2 (sequence is synthesized)
ggcttcggtgctgatgggtcttgttcttatctgcgtctgctcgaaaacccatagcttgaaaggcctggccaggggaggagcacagatattttcctgtataattccagaatgtcttcagag

SEQ ID NO: 327330 - DNA, 120 bp, Artificial Sequence
  ENSG00000136247_3 (sequence is synthesized)
agccgtgcatggattgcttcattaccttttccatacgagaaaccacaccttcattgtcctgcacctggtcttgcaagggatggtttatactgagtacacctgggaagtatttggctactg

SEQ ID NO: 327331 - DNA, 120 bp, Artificial Sequence
  ENSG00000136247_4 (sequence is synthesized)
tcaggagctggagttgtccttgcattaccttcttctgccctatctgctgctaggtgtaaacctgttttttttcaccctgacttgtggaaccaatcctggcattataacaaaagcaaatga

SEQ ID NO: 327332 - DNA, 120 bp, Artificial Sequence
  ENSG00000136247_5 (sequence is synthesized)
gctctacttgtgatttaaggaaaccagctcgatccaagcactgcagtgtgtgtaactggtgtgtgcaccgtttcgaccatcactgtgtttgggtgaacaactgcatcggggcctggaaca

SEQ ID NO: 327333 - DNA, 120 bp, Artificial Sequence
  ENSG00000136247_6 (sequence is synthesized)
tcaggtacttcctcatctacgtcttgaccttgacggcctcggctgccaccgtcgccattgtgagcaccacttttctggtccacttggtggtgatgtcagatttataccaggagacttaca

SEQ ID NO: 327334 - DNA, 120 bp, Artificial Sequence
  ENSG00000136247_7 (sequence is synthesized)
tcgatgaccttggacacctccatgttatggacacggtctttcttattcagtacctgttcctgacttttccacggattgtcttcatgctgggctttgtcgtggttctgagcttcctcctgg

SEQ ID NO: 327335 - DNA, 120 bp, Artificial Sequence
  ENSG00000136247_8 (sequence is synthesized)
gtggctacctgttgtttgtcctgtatctggcggccaccaaccagactactaacgagtggtacagaggtgactgggcctggtgccagcgttgtccccttgtggcctggcctccgtcagcag

SEQ ID NO: 327336 - DNA, 120 bp, Artificial Sequence
  ENSG00000136247_9 (sequence is synthesized)
agccccaagtccaccggaacattcactcccatgggcttcggagcaaccttcaagagatctttctacctgcctttccatgtcatgagaggaagaaacaagaatgacaagtgtatgactgcc

SEQ ID NO: 327337 - DNA, 120 bp, Artificial Sequence
  ENSG00000136247_10 (sequence is synthesized)
ccgcctccgcggggctgtgggaagcttgggctgtcccaggaccgtcagtctcctcctctgaccctccctttccccttgtgtgtagggccgccgtcccacccccacctcgcccgagtccgg

SEQ ID NO: 327338 - DNA, 120 bp, Artificial Sequence
  ENSG00000136247_11 (sequence is synthesized)
ggcggccccggtgtcccctccgagcctgctgcactccacgtccccctaccagggctccagcccccagggaaatctccgaccaggcccgcccaggaggtattctgcctttgactgcaactc

SEQ ID NO: 327339 - DNA, 120 bp, Artificial Sequence
  ENSG00000136247_12 (sequence is synthesized)
atcactttcggtgggcaagggagagaggggaaaatgggtgttgactgaggaatcccccttgcttgtcttcttttgaaaccgggcatctctgaagtcctggtgtcaaggggatcaagagat

SEQ ID NO: 327340 - DNA, 120 bp, Artificial Sequence
  ENSG00000136247_13 (sequence is synthesized)
gacttctcagaggttctaggtgatgctgagaccttggtgtctctaaactctgggcatgtggacaggaggggcttgcggccgtgtctctgacctgtgtgatgtgcaggagggtctcattga

SEQ ID NO: 327341 - DNA, 120 bp, Artificial Sequence
  ENSG00000136247_14 (sequence is synthesized)
ctcagcgcctgcgcgttgtgcctggctgtgctctcttttatgccccctctattctcctctctcccccaggggattttcatctcaacaacagagtgtcctcacccaggcctgccttccggc

SEQ ID NO: 327342 - DNA, 120 bp, Artificial Sequence
  ENSG00000136247_15 (sequence is synthesized)
gatgtcacgagcccgcaggaagtctcgtatcgcgcccgggaggcgccggagcccagcggctggcggtattctgcctttgactgcaactcttgtcgtcttatgtgggtgttgaattgatct

SEQ ID NO: 327343 - DNA, 120 bp, Artificial Sequence
  ENSG00000136247_16 (sequence is synthesized)
gggcttcgtctgtgagggaatgtttcctgaatccgaaagcagagccagttcacccccagatatggtgtggccactacttgtagagttgagataatggtttctttcagatgagtgagggtc

SEQ ID NO: 327344 - DNA, 120 bp, Artificial Sequence
  ENSG00000136247_17 (sequence is synthesized)
aggtcttgtgttcctgtgtagtagacagtcctcatctctgggcataacagcccttccctcgccacgtggcaggacatgctccccacaagttgtttctgcggatgttgtgtttgcagattt

SEQ ID NO: 327345 - DNA, 120 bp, Artificial Sequence
  ENSG00000136247_18 (sequence is synthesized)
cagtcctacaaagcctagtcttctggggagggcccaagattctagacccgtgctgtctaacaaaaatagaatgtggctgggcgcagcggttcatgccaggaattccagtactttgggagg

SEQ ID NO: 327346 - DNA, 120 bp, Artificial Sequence
  ENSG00000136247_19 (sequence is synthesized)
caggcagatctcttgagcctaggagttcaagaccagcttgggcaccatggggaaaccccacctctacaaaaaatacaaaagatgtagtcctggctactcaggaggctgaggcgggaggat

SEQ ID NO: 327347 - DNA, 120 bp, Artificial Sequence
  ENSG00000136247_20 (sequence is synthesized)
tgagcccaggagatcgaggctgcagtaagctatgattaaaccactgcactccagcctcagcaacagagcaagaccctgtctcagaaaaaaaaaaaaaggccatgaatagaaagtttttaa

SEQ ID NO: 327348 - DNA, 120 bp, Artificial Sequence
  ENSG00000136247_21 (sequence is synthesized)
ttaaaaatgtttttcaaaatgtggctgtgcttggagacagttttaatcaggatgttatttaacctacatatgtaaaatatcattttaacatgtaatcaatgtaaaaaattcttcatgaga

SEQ ID NO: 327349 - DNA, 120 bp, Artificial Sequence
  ENSG00000136247_22 (sequence is synthesized)
tagtttatattctttttttcatactaagcctttgaaatctggtgtgtatcttacatttatagcacatcttgatttggacactaaattttcatgtggaaatgcttgtgtatttagatttaa

SEQ ID NO: 327350 - DNA, 120 bp, Artificial Sequence
  ENSG00000136247_23 (sequence is synthesized)
cattttcctctgatgacacatccagtggacagattatgaaaatctcagcaggtgtgcggtgtccttgtctcgtcaagcaccatcccagcacgtgcccccttgtttctgtgcaggtgtgtg

SEQ ID NO: 327351 - DNA, 120 bp, Artificial Sequence
  ENSG00000136247_24 (sequence is synthesized)
gagcacaggtaaggatgatccttggatggcactggaatttgaatactgtgttagtctaagagactcacaggttttgctacaggacaaaaaagagatgccaggccgggtgcagtgcctcac

SEQ ID NO: 327352 - DNA, 120 bp, Artificial Sequence
  ENSG00000136247_25 (sequence is synthesized)
gccaggccgggtgcagtgcctcacacctgtaatcccgctactcaggaagctgaggcaggaggatcccttgagccaggagtctgaagttgccatgagctatgatcacgccactgcactcca

SEQ ID NO: 327353 - DNA, 120 bp, Artificial Sequence
  ENSG00000136247_26 (sequence is synthesized)
cagcctggactacagagtgagaccctgtctcaacaacaacaaaaaagatgccacttaacatcattgatggatttagttcgttgatggcagttgtgggatattccacagcctctgtctgtg

SEQ ID NO: 327354 - DNA, 120 bp, Artificial Sequence
  ENSG00000136247_27 (sequence is synthesized)
tgggttttgtgttcctgctgaaagtcctcttgcggtggtgctttgagagaagaggttgctgttttcctctggattagatgcctgtgattgggcatggatgtgagcagggtccgcctgggg

SEQ ID NO: 327355 - DNA, 120 bp, Artificial Sequence
  ENSG00000136250_0 (sequence is synthesized)
actgagccagggagcacggaagttgtgccactgtgcaacttgggttttctttatcctgcagtctttacctcagcagaaccgcacaccacagactccctccagctctttgtgtgtggctct

SEQ ID NO: 327356 - DNA, 120 bp, Artificial Sequence
  ENSG00000136250_1 (sequence is synthesized)
ctcagggtccaacaagagcaagctgtgggtctgtgagtgtttatgtgtgcttttattcacttcacacttattgaaaagtgtgtatgtgagagggtggggtgtgtgtgtcaaagagagtga

SEQ ID NO: 327357 - DNA, 120 bp, Artificial Sequence
  ENSG00000136250_2 (sequence is synthesized)
ggaagagaaggagagagagatcaattgattctgcagcctcagctccagcatccctcagttgggagcttccaaagccgggtgatcacttggggtgcatagctcggagatgcagtccccctg

SEQ ID NO: 327358 - DNA, 120 bp, Artificial Sequence
  ENSG00000136250_3 (sequence is synthesized)
gaaaatccttacggtggcgcctctattcttgctcctgtctcttcagtcctcggcctctccagccaacgatgaccagtccaggcccagcctctcgaatgggcacacctgtgtagggtgtgt

SEQ ID NO: 327359 - DNA, 120 bp, Artificial Sequence
  ENSG00000136250_4 (sequence is synthesized)
gctggtggtgtctgtaatagaacagcttgctcaagttcacaactcgacggtccaggcctcgatggagagactgtgcagctacctgcctgaaaaactgttcttgaaaaccacctgctattt

SEQ ID NO: 327360 - DNA, 120 bp, Artificial Sequence
  ENSG00000136250_5 (sequence is synthesized)
agtcattgacaagtttggatcagacatcataaaactgcttagcgcagatatgaatgctgatgtggtatgtcacactctggagttttgtaaacagaacactggccaaccattgtgtcatct

SEQ ID NO: 327361 - DNA, 120 bp, Artificial Sequence
  ENSG00000136250_6 (sequence is synthesized)
ctaccctcttcccaaggagacatggaaatttacactacagaaggcaagacaaattgtcaagaagtccccgattctgaaatattctagaagtggttctgacatttgttcactcccggtttt

SEQ ID NO: 327362 - DNA, 120 bp, Artificial Sequence
  ENSG00000136250_7 (sequence is synthesized)
ggccaagatctgccagaaaattaaattagctatggaacagtctgtgccattcaaagatgtggattcagacaaatacagcgttttcccaacactgcggggctatcactggcgggggagaga

SEQ ID NO: 327363 - DNA, 120 bp, Artificial Sequence
  ENSG00000136250_8 (sequence is synthesized)
ctgtaatgacagcgacgagtcagtgtacccaggtagaaggccgaacaactgggatgtccatcaggattcaaactgtaatggcatttggggtgtcgatccaaaagatggagttccatatga

SEQ ID NO: 327364 - DNA, 120 bp, Artificial Sequence
  ENSG00000136250_9 (sequence is synthesized)
gtctttgaactctttcatcaatctaccaacagcccttaccaacgagcttgactggccccaactctctggtgctacaggatttctggactccactgttggaattaaagaaaaatctattta

SEQ ID NO: 327365 - DNA, 120 bp, Artificial Sequence
  ENSG00000136250_10 (sequence is synthesized)
ccttcgcttatggaaaagaaaccactgtaatcacagggactaccagaatatttcaagaaatggtgcatcttcccgaaacctgaagaaatttatagaaagcttgtctagaaacaaggtgtt

SEQ ID NO: 327366 - DNA, 120 bp, Artificial Sequence
  ENSG00000136250_11 (sequence is synthesized)
ggactatcccgccatcgttatatatgccatgattggaaatgatgtctgcagtgggaagagtgacccagtcccagccatgaccactcctgagaaactctactccaacgtcatgcagactct

SEQ ID NO: 327367 - DNA, 120 bp, Artificial Sequence
  ENSG00000136250_12 (sequence is synthesized)
gaagcatctaaattcccacctgcccaatggcagccatgttattttgtatggcttaccagatggaacctttctctgggataatttgcacaacagatatcatcctctcggccagctaaataa

SEQ ID NO: 327368 - DNA, 120 bp, Artificial Sequence
  ENSG00000136250_13 (sequence is synthesized)
agacatgacctatgcgcagttgtactccttcctgaactgcctccaggtcagcccctgccacggctggatgtcttccaacaagacgttgcggactctcacttcagagagagcagagcaact

SEQ ID NO: 327369 - DNA, 120 bp, Artificial Sequence
  ENSG00000136250_14 (sequence is synthesized)
ctccaacacactgaaaaaaattgcagccagtgagaaatttacaaacttcaatcttttctacatggattttgccttccatgaaatcatacaggagtggcagaagagaggcggacagccctg

SEQ ID NO: 327370 - DNA, 120 bp, Artificial Sequence
  ENSG00000136250_15 (sequence is synthesized)
gcagctcatcgagcccgtggatggattccaccccaacgaggtggctttgctgttgttggcggatcatttctggaaaaaggtgcagctccagtggccccaaatcctgggaaaggagaatcc

SEQ ID NO: 327371 - DNA, 120 bp, Artificial Sequence
  ENSG00000136250_16 (sequence is synthesized)
gttcaacccccagattaaacaggtgtttggagaccaaggcgggcactgagcctctcaggagcatgcacccctggggagcacagggaggcagaggcttgggtaaactcattccacaaaccc

SEQ ID NO: 327372 - DNA, 120 bp, Artificial Sequence
  ENSG00000136250_17 (sequence is synthesized)
tatgggggctgccacgtcacaggcccaaaggactcttcttcagcagcatctttgcaaaatgtctttctctcaatgaagagcatatctggacgactgtgcaatgctgtgtgctcccgggat

SEQ ID NO: 327373 - DNA, 120 bp, Artificial Sequence
  ENSG00000136250_18 (sequence is synthesized)
cagtaacccttccgctgttcctgaaataacctttcataaagtgctttgggtgccattccaaacaagagagtatctgtgccctttacagctaattgttctaaaaggagtttctaaaaacac

SEQ ID NO: 327374 - DNA, 120 bp, Artificial Sequence
  ENSG00000136250_19 (sequence is synthesized)
aaaggcatattaatgacaagccagacactggacaaccaagaatggacccagctaacatcatggataaagggaaacctgacatgcgacagcagaaccagagagtggctttgctgttgttgg

SEQ ID NO: 327375 - DNA, 120 bp, Artificial Sequence
  ENSG00000136250_20 (sequence is synthesized)
aaagcgagagattgagagtgggaaacagacacacagagagcaacactcaggccatgaattttcttactacctttagaaaataaatgaccattttgataattgctactttattgttttcct

SEQ ID NO: 327376 - DNA, 120 bp, Artificial Sequence
  ENSG00000136250_21 (sequence is synthesized)
ccatttgtacgtgactagaatttaatgtgcagagctgctgtctgctgatggcttggagaaatgaaagtagagtaggatggggaagatcgatttctttgttctgcctgaattgtctcacta

SEQ ID NO: 327377 - DNA, 120 bp, Artificial Sequence
  ENSG00000136250_22 (sequence is synthesized)
attctgagagtagcccagggtgaagccgaacatttttaacaccaattccaaatgtttgaaagaatcagattggtccttcttgaaacagtagtttaatgagatctaatcaactggctggga

SEQ ID NO: 327378 - DNA, 120 bp, Artificial Sequence
  ENSG00000136250_23 (sequence is synthesized)
gctacggcatataaacacagttaccagaagcctgcgccaacgggcaaaggaaaacagtgaagtggtcatgtgagctgggaagaaacccaaagaaagtctcttctagactccatcactgtc

SEQ ID NO: 327379 - DNA, 120 bp, Artificial Sequence
  ENSG00000136261_0 (sequence is synthesized)
actcctccattgtctgccgccactgctgctgctgctgctgctgccgctgctgctgcacgaatcgccgcagcccccagccttgcgcgtcgtcgctacctcctcggacagaaattttatgaa

SEQ ID NO: 327380 - DNA, 120 bp, Artificial Sequence
  ENSG00000136261_1 (sequence is synthesized)
taagcatcagaagccagtgctaacaggccagcggttcaaaactcggaaaagggatgaaaaagagaaattcgaacccacagtcttcagggatacacttgtccaggggcttaatgaggctgg

SEQ ID NO: 327381 - DNA, 120 bp, Artificial Sequence
  ENSG00000136261_2 (sequence is synthesized)
tgatgaccttgaagctgtagccaaatttctggactctacaggctcaagattagattatcgtcgctatgcagacacactcttcgatatcctggtggctggcagtatgcttgcccctggagg

SEQ ID NO: 327382 - DNA, 120 bp, Artificial Sequence
  ENSG00000136261_3 (sequence is synthesized)
aacgcgcatagatgatggtgacaagaccaagatgaccaaccactgtgtgttttcagcaaatgaagatcatgaaaccatccgaaactatgctcaggtcttcaataaactcatcaggagata

SEQ ID NO: 327383 - DNA, 120 bp, Artificial Sequence
  ENSG00000136261_4 (sequence is synthesized)
taagtatttggagaaggcatttgaagatgaaatgaaaaagcttctcctcttccttaaagccttttccgaaacagagcagacaaagttggcgatgctgtcggggattctgctgggcaatgg

SEQ ID NO: 327384 - DNA, 120 bp, Artificial Sequence
  ENSG00000136261_5 (sequence is synthesized)
caccctgcccgccaccatcctcaccagtctcttcaccgacagcttagtcaaagaaggcattgcggcctcatttgctgtcaagcttttcaaagcatggatggcagaaaaagatgccaactc

SEQ ID NO: 327385 - DNA, 120 bp, Artificial Sequence
  ENSG00000136261_6 (sequence is synthesized)
tgttacctcgtctttgagaaaagccaacttagacaagaggctgcttgaactctttccagttaacagacagagtgtggatcattttgctaaatacttcactgacgcaggtcttaaggagct

SEQ ID NO: 327386 - DNA, 120 bp, Artificial Sequence
  ENSG00000136261_7 (sequence is synthesized)
gacttcctccgagtccagcagtccctgggcaccaggaaggaactgcagaaggagctccaggagcgtctttctcaggaatgcccgatcaaggaggtggtgctttatgtcaaagaagaaatg

SEQ ID NO: 327387 - DNA, 120 bp, Artificial Sequence
  ENSG00000136261_8 (sequence is synthesized)
aagaggaatgatcttccagaaacagcagtgattggtcttctgtggacatgtataatgaacgctgttgagtggaacaagaaggaagaacttgttgcagagcaggctctgaagcacctgaag

SEQ ID NO: 327388 - DNA, 120 bp, Artificial Sequence
  ENSG00000136261_9 (sequence is synthesized)
caatatgctcccctgctggccgtgttcagctcccaaggccagtcagagctgatcctcctccagaaggttcaggaatactgctacgacaacatccatttcatgaaagcctttcagaagatt

SEQ ID NO: 327389 - DNA, 120 bp, Artificial Sequence
  ENSG00000136261_10 (sequence is synthesized)
gtggttctcttttataaagctgatgttctgagcgaagaagcaatactgaaatggtataaggaagcacatgttgctaaaggcaaaagtgtttttcttgaccagatgaagaaatttgttgag

SEQ ID NO: 327390 - DNA, 120 bp, Artificial Sequence
  ENSG00000136261_11 (sequence is synthesized)
tggttacaaaatgcagaagaagaatccgaatcggaaggtgaggaaaattaaatggctcaacaagcacaatacctaggttaccacacaccactttttgattgggaatgctgaaccatttga

SEQ ID NO: 327391 - DNA, 120 bp, Artificial Sequence
  ENSG00000136261_12 (sequence is synthesized)
gaagagaaacttggcttctgttttcgcaaaggaaaaaaaaaataggataggcttcccttgtgcagagggagaaatggttttgtttttgttttgtttttaaatggagccctgaggcatcag

SEQ ID NO: 327392 - DNA, 120 bp, Artificial Sequence
  ENSG00000136261_13 (sequence is synthesized)
ctattatacttgggactctacctctcactcactatatgctaacttaaagccattcaacaaggagtcaagtagatctgaaattaaatactcaacagactcctccttttttagctgtatttt

SEQ ID NO: 327393 - DNA, 120 bp, Artificial Sequence
  ENSG00000136261_14 (sequence is synthesized)
tcaggtactgtgtggtgaccgccccactggtgtctattacaggccactttggtagttgtgtatctgctcatgtatgtgatttgacaaaccagttttttaaaataaatggctttttaaaaa

SEQ ID NO: 327394 - DNA, 120 bp, Artificial Sequence
  ENSG00000136261_15 (sequence is synthesized)
tgccgccactgctgctgctgctgctgctgccgctgctgctgcacgaatcgccgcagcccccagccttgcgcgtcgtcgctacctcctcggacagatgaaaaagagaaattcgaacccaca

SEQ ID NO: 327395 - DNA, 120 bp, Artificial Sequence
  ENSG00000136261_16 (sequence is synthesized)
tgttttctcgcctgtcagacaacaaaagaaaaataaagtcacagatagttagaaaaatgccagtggctctttttggtgtcctctattactcattcttcatttaagagaatatctttgtat

SEQ ID NO: 327396 - DNA, 120 bp, Artificial Sequence
  ENSG00000136261_17 (sequence is synthesized)
gggtgtatattgcctttcaaataataaaaggagtggacttgttaattgtaggaagtttgaaggaaaaaatatgcacacctgtacaaagacatattaagaaagactaatagcaaattaaaa

SEQ ID NO: 327397 - DNA, 120 bp, Artificial Sequence
  ENSG00000136261_18 (sequence is synthesized)
tctcatggaagacttgatgcctaggtcaaataccccgaaatcgatctggtaatctttttgcccttcgacacaaaatggcagcctttaactttcacccctattataagaacaaaaactgtt

SEQ ID NO: 327398 - DNA, 120 bp, Artificial Sequence
  ENSG00000136261_19 (sequence is synthesized)
tactcattgtctcagttttagaaaacaattttaagtctgctgcattagaaggagtcttgttttaattttaaggcattaagggttggataggcatgcataccatggtttggttatagaata

SEQ ID NO: 327399 - DNA, 120 bp, Artificial Sequence
  ENSG00000136261_20 (sequence is synthesized)
aaataaaagtcggctgtttacttgtaggaggataatgatagtcaaattacaatgcaacacaaaacagttatttttccttaaaaataaattaaaagagcttttgtgagaacatctgtttct

SEQ ID NO: 327400 - DNA, 120 bp, Artificial Sequence
  ENSG00000136261_21 (sequence is synthesized)
tctgagaacttaaagttttcctcctacatatatgaagtcctagcttcattcatgcctatagtgaaagaaaggagtcatagttttcttgtagctaaggaaagaatagtaaattgagagtca

SEQ ID NO: 327401 - DNA, 120 bp, Artificial Sequence
  ENSG00000136261_22 (sequence is synthesized)
attggtcttattcagagactcttcctagtttttagcttaaaatcactcagatttatgacaattcagactctgtaattgttagatgttattagtattatgacattttaaagtatttccctg

SEQ ID NO: 327402 - DNA, 120 bp, Artificial Sequence
  ENSG00000136261_23 (sequence is synthesized)
aagaaaattcacaatacaacacacatcttatttttgctattagccattttgcacacagaaagtcaacatagaatataaatgttaatcattaattattttaaattatcctagccaacataa

SEQ ID NO: 327403 - DNA, 120 bp, Artificial Sequence
  ENSG00000136261_24 (sequence is synthesized)
cagaaaataattgcctttctagtttttttaaaaacctaagtgatgtctgtaacttcctttgtaatatatccaaaaattacgttattaggtggatagatatctgataaagcaaatacggca

SEQ ID NO: 327404 - DNA, 120 bp, Artificial Sequence
  ENSG00000136261_25 (sequence is synthesized)
aaatattagttatagaaactagatggtgggcatgtgaatgttcattgttcaatttgttcaacttttctgtatgtctggaaattattgtagtaaaatgtttggggggtggtgaggagaaaa

SEQ ID NO: 327405 - DNA, 120 bp, Artificial Sequence
  ENSG00000136261_26 (sequence is synthesized)
ataactttgctatggaagtaacatagtacctctgttatatggcttttccttaaactctgccatcttttacaaactagaggtttaaacccttgcttcctaattggaaaaggattaagaaaa

SEQ ID NO: 327406 - DNA, 120 bp, Artificial Sequence
  ENSG00000136261_27 (sequence is synthesized)
aacccttgcttcctaattggaaaaggattaagaaaatgctgggtatggtaactcatgcctgtaatcctaacactttgggaagctgaggtaaaaaaattgcttgaggccaggagtttgaga

SEQ ID NO: 327407 - DNA, 120 bp, Artificial Sequence
  ENSG00000136261_28 (sequence is synthesized)
atagtgtagcatgaagagctaaatttagagggaagtggggcctctgctccaaatagtaacagctaaaggatagacactcttggagagcagaatatctttatttagtctgtcaccaccagt

SEQ ID NO: 327408 - DNA, 120 bp, Artificial Sequence
  ENSG00000136261_29 (sequence is synthesized)
gtggtaccaggacttagactaatcagtagtcacctggactggataaaaggggacctcttttaggaaggaggcattgcggcctcatttgctgtcaagcttttcaaagcatggatggcagaa

SEQ ID NO: 327409 - DNA, 120 bp, Artificial Sequence
  ENSG00000136267_0 (sequence is synthesized)
ttctttaacacattattgaaattacaagcatccaaagcagtttcatgtggacagattgcatattttgaaagcctgaggtattttatcatgaaacatgccatgtggaatctttgaagcata

SEQ ID NO: 327410 - DNA, 120 bp, Artificial Sequence
  ENSG00000136267_1 (sequence is synthesized)
gacctctgcgcaacacctgaataaagaatcttttacctggtatgtgacagagcttctcaccaccaccatgacaaaccaggaaaaatgggcccacctcagcccttcggaattttcccaact

SEQ ID NO: 327411 - DNA, 120 bp, Artificial Sequence
  ENSG00000136267_2 (sequence is synthesized)
tcagaaatatgctgagtattctacaaagaaattaaaggatgttcttgaagaattccatggtaatggtgtgcttgcaaagtataatcctgaagggaaacaagacattcttaaccaaacaat

SEQ ID NO: 327412 - DNA, 120 bp, Artificial Sequence
  ENSG00000136267_3 (sequence is synthesized)
agattttgaaggtttcaaactattcatgaagacattcctggaagccgagcttcctgatgatttcactgcacaccttttcatgtcatttagcaacaagtttcctcattctagtccaatggt

SEQ ID NO: 327413 - DNA, 120 bp, Artificial Sequence
  ENSG00000136267_4 (sequence is synthesized)
aaaaagtaagcctgctctcctatcaggcggtctgagaatgaataaaggtgccatcacccctccccggactacttctcctgcaaatacgtgttccccagaagtaatccatctgaaggacat

SEQ ID NO: 327414 - DNA, 120 bp, Artificial Sequence
  ENSG00000136267_5 (sequence is synthesized)
tgtctgttacctgtctctgcttgaaagaggaagacctgaggataagcttgagtttatgtttcgcctttatgacacggatgggaatggcttcctggacagctcggagctagaaaatatcat

SEQ ID NO: 327415 - DNA, 120 bp, Artificial Sequence
  ENSG00000136267_6 (sequence is synthesized)
cagtcagatgatgcatgttgcagaataccttgagtgggatgtcactgaacttaatccaatcctccatgaaatgatggaagaaattgactatgatcatgatggaaccgtgtctctggagga

SEQ ID NO: 327416 - DNA, 120 bp, Artificial Sequence
  ENSG00000136267_7 (sequence is synthesized)
atggattcaaggaggaatgacaacgattccacttcttgtgctcctgggcttagaaaataacgtgaaggatgatggacagcacgtgtggcgactgaagcactttaacaaacctgcctattg

SEQ ID NO: 327417 - DNA, 120 bp, Artificial Sequence
  ENSG00000136267_8 (sequence is synthesized)
caacctttgcctgaacatgctgattggcgtggggaagcagggcctctgctgttccttctgcaagtacacagtccatgagcgctgtgtggctcgagcacctccctcttgcatcaagaccta

SEQ ID NO: 327418 - DNA, 120 bp, Artificial Sequence
  ENSG00000136267_9 (sequence is synthesized)
tgtgaagtccaaaaggaacactgatgtcatgcaccattactgggttgaaggtaactgcccaaccaagtgtgataagtgccacaaaactgttaaatgttaccagggcctgacaggactgca

SEQ ID NO: 327419 - DNA, 120 bp, Artificial Sequence
  ENSG00000136267_10 (sequence is synthesized)
ttgtgtttggtgtcagatcacactgcataataaatgtgcttctcatctaaaacctgaatgtgactgtggacctttgaaggaccatattttaccacccacaacaatctgtccagtggtact

SEQ ID NO: 327420 - DNA, 120 bp, Artificial Sequence
  ENSG00000136267_11 (sequence is synthesized)
gcagactctgcccacttcaggagtttcagttcctgaggaaagacaatcaacagtgaaaaaggaaaagagtggttcccagcagccaaacaaagtgattgacaagaataaaatgcaaagagc

SEQ ID NO: 327421 - DNA, 120 bp, Artificial Sequence
  ENSG00000136267_12 (sequence is synthesized)
caactctgttactgtagatggacaaggcctgcaggtcactcctgtgcctggtactcacccacttttagtttttgtgaaccccaaaagtggtggaaaacaaggagaacgaatttacagaaa

SEQ ID NO: 327422 - DNA, 120 bp, Artificial Sequence
  ENSG00000136267_13 (sequence is synthesized)
attccagtatctattaaatcctcgtcaggtttacagtctttctggaaatggaccaatgccagggttaaactttttccgtgatgttcctgacttcagagtgttagcctgtggtggagatgg

SEQ ID NO: 327423 - DNA, 120 bp, Artificial Sequence
  ENSG00000136267_14 (sequence is synthesized)
aaccgtgggctgggttttggattgcatagaaaaggccaatgtaggcaagcatcctccagttgcgattctgcctcttgggactggcaatgatctagcaagatgcctgcgatggggaggagg

SEQ ID NO: 327424 - DNA, 120 bp, Artificial Sequence
  ENSG00000136267_15 (sequence is synthesized)
ttacgaaggtgagaatctgatgaaaattctaaaagacattgaaaacagcacagaaatcatgttggacaggtggaagtttgaagtcatacctaatgacaaagatgagaaaggagacccagt

SEQ ID NO: 327425 - DNA, 120 bp, Artificial Sequence
  ENSG00000136267_16 (sequence is synthesized)
gccttacagtatcatcaataattacttttccattggcgtggatgcctccattgcacacagattccacatcatgagagaaaaacacccagagaaattcaacagtagaatgaagaacaaatt

SEQ ID NO: 327426 - DNA, 120 bp, Artificial Sequence
  ENSG00000136267_17 (sequence is synthesized)
ttggtattttgagtttggcacatctgaaactttctcagccacctgcaagaagctacatgaatctgtagaaatagaatgtgatggagtacagatagatttaataaacatctctctggaagg

SEQ ID NO: 327427 - DNA, 120 bp, Artificial Sequence
  ENSG00000136267_18 (sequence is synthesized)
aattgctattttgaatataccaagcatgcatggaggatccaatctttggggagagtctaagaaaagacgaagccatcgacgaatagagaaaaaagggtctgacaaaaggaccaccgtcac

SEQ ID NO: 327428 - DNA, 120 bp, Artificial Sequence
  ENSG00000136267_19 (sequence is synthesized)
agatgccaaagagttgaagtttgcaagtcaagatctcagtgaccagctgctggaggtggtcggcttggaaggagccatggagatggggcaaatatacacaggcctgaaaagtgctggccg

SEQ ID NO: 327429 - DNA, 120 bp, Artificial Sequence
  ENSG00000136267_20 (sequence is synthesized)
gcggctggctcagtgctcctgcgtggtcatcaggacgagcaagtctctgccaatgcaaattgatggggagccatggatgcagaccccatgcacaataaaaattacacacaagaaccaagc

SEQ ID NO: 327430 - DNA, 120 bp, Artificial Sequence
  ENSG00000136267_21 (sequence is synthesized)
cccaatgctgatgggcccgcctccaaaaaccggtttattctgctccctcgtcaaaaggacaagaaaccgaagcaaggaataatcctgtgttgtttcactcttagaaattgaattagcata

SEQ ID NO: 327431 - DNA, 120 bp, Artificial Sequence
  ENSG00000136267_22 (sequence is synthesized)
attgggccatggaacacatatgctggaaatctttgaaccatttcaagtctcctgctcatgcaaaatcatggaagtggtttaacagtttttgttactaagctaatgtaaaattcagctatt

SEQ ID NO: 327432 - DNA, 120 bp, Artificial Sequence
  ENSG00000136267_23 (sequence is synthesized)
agaaaatttattgtctcagtttttataggcatctttgcatgaagaaagcagaagtttacctgaagtgatactgcatatttttggtgcatgcattcccatagatttttacatctcccaccc

SEQ ID NO: 327433 - DNA, 120 bp, Artificial Sequence
  ENSG00000136267_24 (sequence is synthesized)
aactcttccccaatttccttttactaacctgtgagaaaaacccgtgaaacatgaaaaaggaaataccatgggaaacgtgattctcagtgtgattccaattattacgaagcactaatcagt

SEQ ID NO: 327434 - DNA, 120 bp, Artificial Sequence
  ENSG00000136267_25 (sequence is synthesized)
aacgctacaatgatcataattgcagattgctatacgtttcccttttagaatcagtgtatcagtgacctatgacttgaggagaaacttttaattcgaagattttattaaatagttgactac

SEQ ID NO: 327435 - DNA, 120 bp, Artificial Sequence
  ENSG00000136267_26 (sequence is synthesized)
aataccttgctatatatacatagtttttcttcaacatcttaactcttctgagtggaaataaaaatatcaggcataaggttttctcatgctgaaaaatagaacgcggtttttattttgctt

SEQ ID NO: 327436 - DNA, 120 bp, Artificial Sequence
  ENSG00000136267_27 (sequence is synthesized)
gcatgagaatctaggagagaattcataaccacaccaataacgaaatagaagttttaaactatgtgcctaatcaatgtgtttcccaccaaagattcagaaaacaatgcttgagagaaatgg

SEQ ID NO: 327437 - DNA, 120 bp, Artificial Sequence
  ENSG00000136267_28 (sequence is synthesized)
gttaatgcataattaattaagcattgtggagcaaatttagggttcctgtgattaattttgtgatgactaaaatgctggaaagcgagtgagttgcccattaattatgattaaaattctcac

SEQ ID NO: 327438 - DNA, 120 bp, Artificial Sequence
  ENSG00000136267_29 (sequence is synthesized)
ctttcacagacagacaataagccagacaacacaatcaaagctcaatagatgatttcttgcttttttcagtcatttataaatataggtgtaatttttcatggatcagttaagtacacttga

SEQ ID NO: 327439 - DNA, 120 bp, Artificial Sequence
  ENSG00000136267_30 (sequence is synthesized)
aggaagtaaatgattgtatcagtttatttctagtataaatgggtacctgtaataatactgagctcttggaagcgaatcatgcatgcaattagctccctcctcctcacctactccactccc

SEQ ID NO: 327440 - DNA, 120 bp, Artificial Sequence
  ENSG00000136267_31 (sequence is synthesized)
atctttatgacatttcaaatgtttatttggaaacaacagcctagatcactgttgaaggtgttcatggcatagttggagtctctgactgtttaaagaaatcacagaacagtacttttcttt

SEQ ID NO: 327441 - DNA, 120 bp, Artificial Sequence
  ENSG00000136267_32 (sequence is synthesized)
tagtgtttcattaagcctatgatgtaaaatgaaatgcttctgagcagtcttgtaatattgttcattcatattgacctgcatctcatcattgcatgttttatgttttcaaacatgccataa

SEQ ID NO: 327442 - DNA, 120 bp, Artificial Sequence
  ENSG00000136267_33 (sequence is synthesized)
ggaaaacgagtgcctgaactgcatgatttattagtttctctccactctgcattaaagtgctaatgatttatcggttctattttgttattgattcattcatctttctttgaataacaaata

SEQ ID NO: 327443 - DNA, 120 bp, Artificial Sequence
  ENSG00000136267_34 (sequence is synthesized)
gcatttagtgattctgttgaacacaatcctgtgcatggatttatggatttcaagtgaaattgctataattttagttctttggtttgaaaactcaactgaatgctgttatatcaaatagct

SEQ ID NO: 327444 - DNA, 120 bp, Artificial Sequence
  ENSG00000136267_35 (sequence is synthesized)
gctctcaagcaatgtgctataatggaagattacgtacaaagtgtattcttttagtgttcctggaacattggacggtaaatatcaatcaacaataagcttaattactttaaaaataaaagc

SEQ ID NO: 327445 - DNA, 120 bp, Artificial Sequence
  ENSG00000136267_36 (sequence is synthesized)
ttttgaataaaattaagacataatttagcattcccaggaaaattatgattacaattgcaaatttagtacagcaatcacttgcgctggtataaaataaaaaagttgtttggcagaagagta

SEQ ID NO: 327446 - DNA, 120 bp, Artificial Sequence
  ENSG00000136267_37 (sequence is synthesized)
atccagaccaaaagaaagaaagaaatctcaaaacagtaacaagtacattactgacataatgttacgtaacacacacattgattttttgtatctatggttgcaggtaataaatattttcac

SEQ ID NO: 327447 - DNA, 120 bp, Artificial Sequence
  ENSG00000136267_38 (sequence is synthesized)
atgaattgacaaaattttctacaatgggcaggcaggctttgtgtcaaaaacatattttgaagccacaaattattttatgttcgctacaacatacaattatgtcttggctaccttttatag

SEQ ID NO: 327448 - DNA, 120 bp, Artificial Sequence
  ENSG00000136267_39 (sequence is synthesized)
tatatagtttgaaggcagcaacagtttgtgaatcattcttaacaatctgtacagtagaaagctgttggatagacagtgggatgagacaaattaaacaacctgcttataagatttcaatga

SEQ ID NO: 327449 - DNA, 120 bp, Artificial Sequence
  ENSG00000136267_40 (sequence is synthesized)
ttgaaataatgggatgcagcttcacttcagtgtagctgtataactacaattagtgctaatagtggttacattttcagtcagatggattctttggtacccataataaatgttcaaatagga

SEQ ID NO: 327450 - DNA, 120 bp, Artificial Sequence
  ENSG00000136267_41 (sequence is synthesized)
atccaatttgacttttctcaactcattttctaaatacactgatgtacttgccccttcaagtatactgcccctggggtttggaaagtagtttttaaaaacgtaacttgatgggtttgaaat

SEQ ID NO: 327451 - DNA, 120 bp, Artificial Sequence
  ENSG00000136267_42 (sequence is synthesized)
cagagaagatattctcatcagttttatgacagcttcatatgaaaaatatatagtttaaggaaaattctatagtatattaaaatattgaatgatgaatgttgttagctttacaagatggaa

SEQ ID NO: 327452 - DNA, 120 bp, Artificial Sequence
  ENSG00000136267_43 (sequence is synthesized)
acttctcttctatgtgtgcagataaattttcagctattgagtcgccctcttttaatataggagacataaagttttaagtggctgaaactcttaaatgtaaattaatgctggacttaacag

SEQ ID NO: 327453 - DNA, 120 bp, Artificial Sequence
  ENSG00000136267_44 (sequence is synthesized)
cagtcagaaacaaagagggaaaagagacatgcactctgctaaacattgctaggcactgagttgatgagattccagagagacatttcagagtaaaccttgatatccacgcttctaagagat

SEQ ID NO: 327454 - DNA, 120 bp, Artificial Sequence
  ENSG00000136267_45 (sequence is synthesized)
aggaagggaggtatctacatagaaccagaaagtttaaaagacgtaaatttattttttccacttccttgtgtacaccatgtatttcatgtgaaaatgctgatcaatttattgtggtggaag

SEQ ID NO: 327455 - DNA, 120 bp, Artificial Sequence
  ENSG00000136267_46 (sequence is synthesized)
gagatatcttgcaggaagtttaaaaattaacattttaaaacagtttttattttatttaaaacaggttcatgtgatcatagccagaataaaacaaaaggctcagatgtttagcctagtcta

SEQ ID NO: 327456 - DNA, 120 bp, Artificial Sequence
  ENSG00000136267_47 (sequence is synthesized)
ctgcagacagaaatttaaatccagtgagggctaatgaatcacatacgtgtttccacattttattttgttttcgttttttaggcatatgggaagtagttgcaatttttcagggaagaatat

SEQ ID NO: 327457 - DNA, 120 bp, Artificial Sequence
  ENSG00000136267_48 (sequence is synthesized)
gttttgaatctcacactgtattctccttgaatctcacactgtattcttgaatgagacaagattttgagatcattcttttcctttttgtgtcaacgttagtttgttgttcattggttataa

SEQ ID NO: 327458 - DNA, 77 bp, Artificial Sequence
  ENSG00000136267_49 (sequence is synthesized)
ctttttgtgtcaacgttagtttgttgttcattggttataaaaaggaaaatgtggccaggcgcaggcagatcacaagg

SEQ ID NO: 327459 - DNA, 120 bp, Artificial Sequence
  ENSG00000136267_50 (sequence is synthesized)
agccagactctgtctcaaaaaaaaaaaggaaaatgtacttttcatggcacgtataacccccaaaggattattcaatactgaacaattaaataataattgaataatattgaatcatgttct

SEQ ID NO: 327460 - DNA, 120 bp, Artificial Sequence
  ENSG00000136267_51 (sequence is synthesized)
tattgaatcatgttctccgttatttttcaaataactgaataatatctctattaaaagattaaacccttgtaacatatattaaagctgtaaactttaagaaaataaataaataaaaccctg

SEQ ID NO: 327461 - DNA, 120 bp, Artificial Sequence
  ENSG00000136267_52 (sequence is synthesized)
aataaataaataaaaccctgtaaaagagcttttattttgtgagaggcagaaatcaccacttaaaactcccaattaaattctgctatatttaaataaagtttgagtaaactcacatttgag

SEQ ID NO: 327462 - DNA, 120 bp, Artificial Sequence
  ENSG00000136267_53 (sequence is synthesized)
agattctgtataaccttattgtgtttaaaaacatggaacttaattatagtaccttaattattttctcagaaatgatatatacaatatcctgttttttgaaataaaaacgttaaccactca

SEQ ID NO: 327463 - DNA, 120 bp, Artificial Sequence
  ENSG00000136267_54 (sequence is synthesized)
attttcccctgagctccatcagcaagagtagcaatagcagctggagaagcggcagccagagataggcagggctggtgcttgcagccgcgcaaatcgcctcctcctcaacacacacacaca

SEQ ID NO: 327464 - DNA, 120 bp, Artificial Sequence
  ENSG00000136267_55 (sequence is synthesized)
atctttcagacactagttccaatgggccgggtgttctggaagggggtggcagtggggaggaggatgctgtgagcagagttcttgaagctccactcctctggggaagccgagctgtgtggg

SEQ ID NO: 327465 - DNA, 120 bp, Artificial Sequence
  ENSG00000136267_56 (sequence is synthesized)
agccttcttactgtgccgggagcgtgtgaattggaaaggatcctgagaactggctagtcccagttcctctccggaaaagcagtggctctcgcttcagagatgcgctcagctttcgcctgc

SEQ ID NO: 327466 - DNA, 120 bp, Artificial Sequence
  ENSG00000136267_57 (sequence is synthesized)
gcactctgggtaaagccagctgccatgtcataaggagatcaagcagctccacagaaaagtcagcatggcaaggagctaaggctttctgccgatagcctctgagggactgaggcctccagc

SEQ ID NO: 327467 - DNA, 120 bp, Artificial Sequence
  ENSG00000136267_58 (sequence is synthesized)
caacagccacgcaaatgagccatcatggaatcagatcagcccaagttaaaccttcagcttcttggtgatggcttacctgaatcatcatgacagactcagtcagagtcacctggccctgaa

SEQ ID NO: 327468 - DNA, 120 bp, Artificial Sequence
  ENSG00000136267_59 (sequence is synthesized)
tgtcaatctcagttttgctttcctctttgactaaataaccacaataactgatttttttctttatttcttttcaacctatcagcaaatagtctttttgttgttgttgttatgtgtgtgtca

SEQ ID NO: 327469 - DNA, 120 bp, Artificial Sequence
  ENSG00000136267_60 (sequence is synthesized)
gagccactacatttaggttgtagacattatatacccttggcaatgatttagctcttgaatgtttgtgttagcctaagtataaatagatcttttaaatagatcaattataaaccatagatc

SEQ ID NO: 327470 - DNA, 120 bp, Artificial Sequence
  ENSG00000136267_61 (sequence is synthesized)
aattataaactatggagctaaacaaaatattaataaaagtttatctgaaacttttttgtttatttcagagcacattattagaatattatttgcaagaaatgcagacctaagcttatatgt

SEQ ID NO: 327471 - DNA, 120 bp, Artificial Sequence
  ENSG00000136267_62 (sequence is synthesized)
gaacttatttctcagcttttctatgcctccatttggggatttgagggctttcttctccataagaaaaaaatttctctccagtttctaccataattaattgtgttttccagaatgaggtat

SEQ ID NO: 327472 - DNA, 120 bp, Artificial Sequence
  ENSG00000136267_63 (sequence is synthesized)
tatttaaggcagacactgcccctctcaaaaaaaaatcagttttcatttgcatagtgaatattttattgcatttcaaaaacatgctaggaactgcttttggcactgggagtagacacatga

SEQ ID NO: 327473 - DNA, 120 bp, Artificial Sequence
  ENSG00000136267_64 (sequence is synthesized)
acaagaccaacagtgtaatttccttcaagttacttacattcctataatagaggaccgaataaataaacaactacatgataaatataacttcagactgtgagagttattaaaaaataaggt

SEQ ID NO: 327474 - DNA, 120 bp, Artificial Sequence
  ENSG00000136267_65 (sequence is synthesized)
gaaatgatgataagaagctggattaggtgtggagaataaatactacttgagataagggagacctctttgaaaggacatagccaaaagcttagtataaaattaaaaaaaataaaaaaaaaa

SEQ ID NO: 327475 - DNA, 120 bp, Artificial Sequence
  ENSG00000136267_66 (sequence is synthesized)
gaagtgggaggagtgagaggtggggaagggggacgccaaagatgactttcaggctccggaaacctacgtctttcagcctccgctgttttttagttgcaaatgatcagagacgggtgaact

SEQ ID NO: 327476 - DNA, 120 bp, Artificial Sequence
  ENSG00000136267_67 (sequence is synthesized)
aggagtggagctctgtgcagctgaagactgcatatgacctcctgaatataggataaaaaaacctttggaaggagacaagatcattactccagagaatagccttgtgtagttgctgtccta

SEQ ID NO: 327477 - DNA, 120 bp, Artificial Sequence
  ENSG00000136267_68 (sequence is synthesized)
ctgaagtggagaaagggcatccaaatgttttgatcttgtttttatagttgcaagcagtgtctgtatctttccaaatacccaatcttgtcgtatatatctctctatgaaaaggaatttcaa

SEQ ID NO: 327478 - DNA, 120 bp, Artificial Sequence
  ENSG00000136267_69 (sequence is synthesized)
tgctacttaattttggtttagggggagatgggactgactttaattattcatttgaagcaaataaatgtttaaacatgagatacaatttaaaaattgatgaatggtgatggttttttaaat

SEQ ID NO: 327479 - DNA, 120 bp, Artificial Sequence
  ENSG00000136267_70 (sequence is synthesized)
ttggcgttttttttttttctatcagtagtaatagttactcaggcttatactcatgtcctcaatatataaggactgcttgtttcccactcagcatctagctataattatattctgtttgag

SEQ ID NO: 327480 - DNA, 120 bp, Artificial Sequence
  ENSG00000136267_71 (sequence is synthesized)
aaagaactctccttcatctacaacagtcgtaggctatgtctagctgctgtaccgatcttacagagaatttggttattctatgcctaaaaaatataaatttctatgtagcctgtgtgttct

SEQ ID NO: 327481 - DNA, 120 bp, Artificial Sequence
  ENSG00000136267_72 (sequence is synthesized)
caggtatgattttttaaatcaaaattttagtaggtttcatatttgatacttctaggctctaaaggggcatatgttcagctatcaacacatttgtttaatctgcatattagcttagtagac

SEQ ID NO: 327482 - DNA, 120 bp, Artificial Sequence
  ENSG00000136267_73 (sequence is synthesized)
tctttcagaaagatctttattaatttatcaagatgtcagtcttacggttgattgacagagtaacattctggttaaattaatcatttatgattttatctccatttaaactcaaattggcaa

SEQ ID NO: 327483 - DNA, 120 bp, Artificial Sequence
  ENSG00000136270_0 (sequence is synthesized)
atggttccggggacagttagggcggcggatggaggtcagcggtggtgctcgctgcggtttggaatcacttgctaggagtcttgtctctctgccacccaggacatcatggcagctcacctg

SEQ ID NO: 327484 - DNA, 120 bp, Artificial Sequence
  ENSG00000136270_1 (sequence is synthesized)
gtaaagcgatgcacgtgcctcctgagagaagctgctcgtcaggcccctgccatggctccagttggccgactgagacttgcctgggtagcccataagactctgacttcctcagccacctca

SEQ ID NO: 327485 - DNA, 120 bp, Artificial Sequence
  ENSG00000136270_2 (sequence is synthesized)
cccatttcccacctcccaggttccttgatggagccggtggagaaggaacgagcatctactccctacatagagaagcaggtggaccacctcatcaagaaggccacaaggccagaggagctc

SEQ ID NO: 327486 - DNA, 120 bp, Artificial Sequence
  ENSG00000136270_3 (sequence is synthesized)
ctggagctacttggtggcagtcacgacttggacagcaatcaagcagcaatggtacttatccggctctctcacttgctgtctgagaagccagaagataaaggcttgctcatacaggatgcc

SEQ ID NO: 327487 - DNA, 120 bp, Artificial Sequence
  ENSG00000136270_4 (sequence is synthesized)
cactttcatcaacttctctgtctgctcaacagtcagattgcctcggtctggcatggtaccctctcgaagctgctgggaagcctgtatgctctgggcatccccaaggcctccaaggagctg

SEQ ID NO: 327488 - DNA, 120 bp, Artificial Sequence
  ENSG00000136270_5 (sequence is synthesized)
cagtcggtggagcaggaggtccgctggcgcatgcggaagctcaagtacaagcacctggccttcctggcagagtcctgtgccaccctctcacaggagcagcactcgcaggagctgctggct

SEQ ID NO: 327489 - DNA, 120 bp, Artificial Sequence
  ENSG00000136270_6 (sequence is synthesized)
gagctgctcacacacctggaaaggcgttggacagaaattgaagattcccacacattagtgaccgtcatgatgaaggtgggacacctctcggagccactaatgaaccgcctggaagacaag

SEQ ID NO: 327490 - DNA, 120 bp, Artificial Sequence
  ENSG00000136270_7 (sequence is synthesized)
tgcctggagttggtggagcactttggccccaatgagctgcggaaggtgctggtgatgctggcagctcagagccggcggtccgtgcccttgctgcgggccatctcctaccacctggtgcag

SEQ ID NO: 327491 - DNA, 120 bp, Artificial Sequence
  ENSG00000136270_8 (sequence is synthesized)
aagcccttctctctgacgaaagatgtgctcttggacgtggcctatgcctatggcaaactcagctttcaccagacccaggtgtcccagcgcctggccaccgacctgctatccctcatgccc

SEQ ID NO: 327492 - DNA, 120 bp, Artificial Sequence
  ENSG00000136270_9 (sequence is synthesized)
cccctgtttgaggcctttgcccagcacgtcctgaacagagcgcaggacatcaccctgccccacctgtgcagcgtacttctggcttttgcgcgtctgaacttccatccagaccaagaggat

SEQ ID NO: 327493 - DNA, 120 bp, Artificial Sequence
  ENSG00000136270_10 (sequence is synthesized)
cagttcttcagcctggtacatgagaagctggggtcagagctgccaggcctggagccagccctgcaggtggacctggtgtgggccctgtgtgtgctgcagcaggcacgggaagcagagctg

SEQ ID NO: 327494 - DNA, 120 bp, Artificial Sequence
  ENSG00000136270_11 (sequence is synthesized)
caagccgtcctccaccctgaatttcacatccaatttctagggggcaagtctcagaaggatcagaacaccttccagaagctgctccacatcaacgccactgccctgctggagtaccccgag

SEQ ID NO: 327495 - DNA, 120 bp, Artificial Sequence
  ENSG00000136270_12 (sequence is synthesized)
tactcgggtccccttctgcctgcctcggctgtggcccctgggccctcagcccttgacaggaaggtgacccccctgcaaaaggagctgcaggagacgctgaaggggctgctggggagcgcc

SEQ ID NO: 327496 - DNA, 120 bp, Artificial Sequence
  ENSG00000136270_13 (sequence is synthesized)
gacaagggcagcctcgaggtggccacgcagtatggctgggtgctggatgctgaggtgctgctggacagtgacggcgagtttctgcccgtaagggactttgtggcacctcaccttgcccag

SEQ ID NO: 327497 - DNA, 120 bp, Artificial Sequence
  ENSG00000136270_14 (sequence is synthesized)
ccaactgggagccagtcaccacctccagggtctaagaggctagcgttcttgcggtgggagttccccaacttcaacagccgaagcaaggacttgctgggtcgctttgttctggcccggcga

SEQ ID NO: 327498 - DNA, 120 bp, Artificial Sequence
  ENSG00000136270_15 (sequence is synthesized)
cacatagtggctgcaggcttcctgatagtggacgtcccattctatgagtggctggaactcaagtctgaatggcagaaaggcgcctacctcaaggacaagatgcgcaaagcggtggctgag

SEQ ID NO: 327499 - DNA, 120 bp, Artificial Sequence
  ENSG00000136270_16 (sequence is synthesized)
gagctggccaagtgacttgtgccagcagcatggactgcgtgcctctccgccggaggtctagctgtgggcggccaagaagggtcacccttgaggacaaacctctgtgcaggaccttggcca

SEQ ID NO: 327500 - DNA, 120 bp, Artificial Sequence
  ENSG00000136270_17 (sequence is synthesized)
gagtggggagggtggccagccactctgagggacagaacgtcctcttgtgtataataaacctttaattttggtgttggacccctggggccttcccaggcttggtcaccctctgcactgtca

SEQ ID NO: 327501 - DNA, 120 bp, Artificial Sequence
  ENSG00000136270_18 (sequence is synthesized)
acgtcgcctatcccactccaccagcccagtcttccaccgccctaggaactctcctacgcctacgcaagcagggagggatagggtgacagcaccgacaacaaagggtcgtctcccgcactc

SEQ ID NO: 327502 - DNA, 120 bp, Artificial Sequence
  ENSG00000136270_19 (sequence is synthesized)
cgtatgaggatggcgtactggtcggggggcaaccgaagcctttcttcctaggttctttatcttttctaagtttcccatgacctatcgctccgcttgagccctcagcaaagatgtcacccg

SEQ ID NO: 327503 - DNA, 120 bp, Artificial Sequence
  ENSG00000136270_20 (sequence is synthesized)
ccgaaaggtgtggccggaagctggaggcgtggcttccggacgtgcggggcgaggctcgtctcgtttccgccggcgctccgagtgacgtagggaagcgcgccgcgcacctcatggttccgg

SEQ ID NO: 327504 - DNA, 120 bp, Artificial Sequence
  ENSG00000136270_21 (sequence is synthesized)
ctcccctgggctttgggcttgttctttgggtgacagttgtctgcagaggggtgcgttgtgtgcactgggatcagagccctgggagcttctgtctggagcctcaggcatcacatggggcag

SEQ ID NO: 327505 - DNA, 120 bp, Artificial Sequence
  ENSG00000136270_22 (sequence is synthesized)
ccgtcctcccaagatcagctcgggctaggtggaggcgggaggggccactatgtgtggcatgggagggcagggggaactgattggagccaggcatcctagggattactgagaacacatgaa

SEQ ID NO: 327506 - DNA, 120 bp, Artificial Sequence
  ENSG00000136270_23 (sequence is synthesized)
atcctgctgtctggttgactgccctgccaggcagcgctggggggtcctgcctctggtgctccttttaatgccctgttgatgctcagaagctccagtgggccttcgtgctatgtgcaccag

SEQ ID NO: 327507 - DNA, 120 bp, Artificial Sequence
  ENSG00000136270_24 (sequence is synthesized)
ttaccatctgctctcttctgcaaggctggattcagggccaaagggctctagagccacccatgttgacactgtgggccctgtggacacagtacctgaatagcagttaccctcttcagaaac

SEQ ID NO: 327508 - DNA, 120 bp, Artificial Sequence
  ENSG00000136270_25 (sequence is synthesized)
aaagcaggcaccagcagagaggacgggctgtggtgcaggttccggacccagaactatgtagaaataagttcaccttcgtttacctgtatagtgggactgatggttctcataggatgttgg

SEQ ID NO: 327509 - DNA, 120 bp, Artificial Sequence
  ENSG00000136270_26 (sequence is synthesized)
tgtctcatgggggtacgcacacagaaggatgcctggcatttagtaagagcctgttcagaggtgctgctggtagcagcagcagcttggtcatccctaggaggcctctgcatttgggagtgg

SEQ ID NO: 327510 - DNA, 120 bp, Artificial Sequence
  ENSG00000136270_27 (sequence is synthesized)
gcagggcttagtgataccgggggtctttttacccatatgtcaaaagcgttcctgcaaacctttgtgcctggggtgctcctccctttgcaggcagttgagggtctggcatgcttgggtgcc

SEQ ID NO: 327511 - DNA, 120 bp, Artificial Sequence
  ENSG00000136270_28 (sequence is synthesized)
gcgtccctggagggtaaaggtggtggttcactgcctaacgcactgcagggactcctgcttattgcagcagttgcattcctaagaaactttcacgttgccagaaactgcgagattggtttg

SEQ ID NO: 327512 - DNA, 120 bp, Artificial Sequence
  ENSG00000136270_29 (sequence is synthesized)
gagattggtttgttagagaacagtttaggggttggagcttctctgactcaaaaacaaattattttcctggagaaaagccagtgtgttttgttttgttgtttgagacagagtctcactctg

SEQ ID NO: 327513 - DNA, 81 bp, Artificial Sequence
  ENSG00000136270_30 (sequence is synthesized)
gcccaagtttttaatacctaaaacttttaatgtcgttgcaagtaaaagtcacgaatgataacaaaactgatcttagcaagc

SEQ ID NO: 327514 - DNA, 120 bp, Artificial Sequence
  ENSG00000136270_31 (sequence is synthesized)
gtaaaagtcacgaatgataacaaaactgatcttagcaagcgtaagtgccaccttctctgccatcaggtgacatccatcaggctcaactttttctctgacctcttgtattgatttgacagc

SEQ ID NO: 327515 - DNA, 120 bp, Artificial Sequence
  ENSG00000136270_32 (sequence is synthesized)
tttacttgcagctgaagtctacgtgcccactacccagagctgtagccaggaccatgtaaaagagtgtggtctctctttaatcaactacattaggtcaaaacttcattggggaaacttgga

SEQ ID NO: 327516 - DNA, 120 bp, Artificial Sequence
  ENSG00000136270_33 (sequence is synthesized)
gaatttcccttgccactctagagttcttgcttgcaagcaattgcaaatgacctcagccaccttgagcagaaatgtgctatttattgtagcctagaggatcaggctcagaggtgtaccctt

SEQ ID NO: 327517 - DNA, 120 bp, Artificial Sequence
  ENSG00000136270_34 (sequence is synthesized)
ggatctggcctgtgcctgaggggtgctctggctctgcaggtgcttggcagccatgtcaaattcagtgcctgccctgtctatggtaggcactggcccagaagactgccacagaaacagtga

SEQ ID NO: 327518 - DNA, 120 bp, Artificial Sequence
  ENSG00000136270_35 (sequence is synthesized)
ctcacaggccctgttactgtgtcccaggctcagggataaatttggttacagacaccaagcgtctaggcctcgaggctgagcaaggctgtgaggagcagccaggcactggggccctgttac

SEQ ID NO: 327519 - DNA, 120 bp, Artificial Sequence
  ENSG00000136270_36 (sequence is synthesized)
aatggagtggggaactgatactgtcttctctgaagagttgtagtaaatgctcatgaaacaaggttcagagaggtagcctccagctcacacacaggactgacagtgccacatcatttctcc

SEQ ID NO: 327520 - DNA, 120 bp, Artificial Sequence
  ENSG00000136270_37 (sequence is synthesized)
atggttccggggacagttagggcggcggatggaggtcagcggtggtgctcgctgctggagttagactaagctttttacagctgctttaatcccctcatataaaaagaaaatgtgctggcc

SEQ ID NO: 327521 - DNA, 120 bp, Artificial Sequence
  ENSG00000136270_38 (sequence is synthesized)
atataccaagttccaggaagtggagaaagatcaaacgtacattctgctttggcagaaatgaggcctagggtttggaatcacttgctaggagtcttgtctctctgccacccaggacatcat

SEQ ID NO: 327522 - DNA, 120 bp, Artificial Sequence
  ENSG00000136270_39 (sequence is synthesized)
tagggcggcggatggaggtcagcggtggtgctcgctgcggtttggaatcacttgctaggagtcttgtctctctgccacccaggacatcatggcagctcacctggttccttgatggagccg

SEQ ID NO: 327523 - DNA, 120 bp, Artificial Sequence
  ENSG00000136270_40 (sequence is synthesized)
ggaagattcctggtaccttcaagcccaggattgctccaggcctcaccaagggccagggttctgcctcttgttacctagtagcctcctctggcctcatcccaaccaggccaagaccacatc

SEQ ID NO: 327524 - DNA, 120 bp, Artificial Sequence
  ENSG00000136270_41 (sequence is synthesized)
gggggcaaatacatatttcttgcattttggcttattttgaaagggctgctattcagttctcaaaaaagtgtttgagaactgtttcctctgttctttcactgaccattataagtgcttcca

SEQ ID NO: 327525 - DNA, 120 bp, Artificial Sequence
  ENSG00000136270_42 (sequence is synthesized)
tccattttggggtagctgtagcaggtagcagcatggctgatgagactgagaatccactgagaactgtctactgaatcactgatccccctcgcaaagtggaactgtacagaaagatgacac

SEQ ID NO: 327526 - DNA, 120 bp, Artificial Sequence
  ENSG00000136270_43 (sequence is synthesized)
ctgcagttacgtttatgtgtgaccagtctaaactaagtttactggttggagaatatttctaaatcccttatcagaaagaagcagcttctaggtgtccccagcctctgtgggtagttgctg

SEQ ID NO: 327527 - DNA, 120 bp, Artificial Sequence
  ENSG00000136270_44 (sequence is synthesized)
tgctcgttccgtgctggcttgccagtgcgcacgcttcctctctagcccgcgcggccaggcctggaagacgccgcccctgttgaccgtccatgaccccagcgagccagttttcgtgactta

SEQ ID NO: 327528 - DNA, 120 bp, Artificial Sequence
  ENSG00000136271_0 (sequence is synthesized)
ccgggaagtgacttcgtctccgaagccgattggttgttgctttgctcccgctcgcgtcggtggcgtttttcctgcagcgcgtgcgtgctgcgctactgagcagcgccatggaggactctg

SEQ ID NO: 327529 - DNA, 120 bp, Artificial Sequence
  ENSG00000136271_1 (sequence is synthesized)
aagcactgggcttcgaacacatgggcctcgatccccggctccttcaggctgtcaccgatctgggctggtcgcgacctacgctgatccaggagaaggccatcccactggccctagaaggga

SEQ ID NO: 327530 - DNA, 120 bp, Artificial Sequence
  ENSG00000136271_2 (sequence is synthesized)
aggacctcctggctcgggcccgcacgggctccgggaagacggccgcttatgctattccgatgctgcagctgttgctccataggaaggcgacaggtccggtggtagaacaggcagtgagag

SEQ ID NO: 327531 - DNA, 120 bp, Artificial Sequence
  ENSG00000136271_3 (sequence is synthesized)
gccttgttcttgttcctaccaaggagctggcacggcaagcacagtccatgattcagcagctggctacctactgtgctcgggatgtccgagtggccaatgtctcagctgctgaagactcag

SEQ ID NO: 327532 - DNA, 120 bp, Artificial Sequence
  ENSG00000136271_4 (sequence is synthesized)
tctctcagagagctgtgctgatggagaagccagatgtggtagtagggaccccatctcgcatattaagccacttgcagcaagacagcctgaaacttcgtgactccctggagcttttggtgg

SEQ ID NO: 327533 - DNA, 120 bp, Artificial Sequence
  ENSG00000136271_5 (sequence is synthesized)
tggacgaagctgaccttcttttttcctttggctttgaagaagagctcaagagtctcctctgtcacttgccccggatttaccaggcttttctcatgtcagctacttttaacgaggacgtac

SEQ ID NO: 327534 - DNA, 120 bp, Artificial Sequence
  ENSG00000136271_6 (sequence is synthesized)
aagcactcaaggagctgatattacataacccggttacccttaagttacaggagtcccagctgcctgggccagaccagttacagcagtttcaggtggtctgtgagactgaggaagacaaat

SEQ ID NO: 327535 - DNA, 120 bp, Artificial Sequence
  ENSG00000136271_7 (sequence is synthesized)
tcctcctgctgtatgccctgctcaagctgtcattgattcggggcaagtctctgctctttgtcaacactctagaacggagttaccggctacgcctgttcttggaacagttcagcatcccca

SEQ ID NO: 327536 - DNA, 120 bp, Artificial Sequence
  ENSG00000136271_8 (sequence is synthesized)
cctgtgtgctcaatggagagcttccactgcgctccaggtgccacatcatctcacagttcaaccaaggcttctacgactgtgtcatagcaactgatgctgaagtcctgggggccccagtca

SEQ ID NO: 327537 - DNA, 120 bp, Artificial Sequence
  ENSG00000136271_9 (sequence is synthesized)
ggtgtggcccggggcatagacttccaccatgtgtctgctgtgctcaactttgatcttcccccaacccctgaggcctacatccatcgagctggcaggacagcacgcgctaacaacccaggc

SEQ ID NO: 327538 - DNA, 120 bp, Artificial Sequence
  ENSG00000136271_10 (sequence is synthesized)
atagtcttaacctttgtgcttcccacggagcagttccacttaggcaagattgaggagcttctcagtggagagaacaggggccccattctgctcccctaccagttccggatggaggagatc

SEQ ID NO: 327539 - DNA, 120 bp, Artificial Sequence
  ENSG00000136271_11 (sequence is synthesized)
gagggcttccgctatcgctgcagggatgccatgcgctcagtgactaagcaggccattcgggaggcaagattgaaggagatcaaggaagagcttctgcattctgagaagcttaagacatac

SEQ ID NO: 327540 - DNA, 120 bp, Artificial Sequence
  ENSG00000136271_12 (sequence is synthesized)
tttgaagacaaccctagggacctccagctgctgcggcatgacctacctttgcaccccgcagtggtgaagccccacctgggccatgttcctgactacctggttcctcctgctctccgtggc

SEQ ID NO: 327541 - DNA, 120 bp, Artificial Sequence
  ENSG00000136271_13 (sequence is synthesized)
ctggtgcgccctcacaagaagcggaagaagctgtcttcctcttgtaggaaggccaagagagcaaagtcccagaacccactgcgcagcttcaagcacaaaggaaagaaattcagacccaca

SEQ ID NO: 327542 - DNA, 120 bp, Artificial Sequence
  ENSG00000136271_14 (sequence is synthesized)
gccaagccctcctgaggttgttgggcctctctggagctgagcacattgtggagcacaggcttacacccttcgtggacaggcgaggctctggtgcttactgcacagcctgaacagacagtt

SEQ ID NO: 327543 - DNA, 120 bp, Artificial Sequence
  ENSG00000136271_15 (sequence is synthesized)
ctggggccggcagtgctgggccctttagctccttggcacttccaagctggcatcttgccccttgacaacagaataaaaattttagctgccccagtttgtgcctccagcatatgaaaagga

SEQ ID NO: 327544 - DNA, 120 bp, Artificial Sequence
  ENSG00000136271_16 (sequence is synthesized)
ctatttgaatccccaaaacatcaggagtcgggaaacttcggaagacagctgtgcctggctctgtggctgcatgcagtgcttcacttggccagcagaggtcagctgtgccgagctgcccca

SEQ ID NO: 327545 - DNA, 120 bp, Artificial Sequence
  ENSG00000136271_17 (sequence is synthesized)
gccatgagaagagaagcctgcccttgctggcaggtggctatggccggcccagagccttcctgcccagctcctgcagccctgctgcctgggatcaggctgggagatgggccttcctgaccg

SEQ ID NO: 327546 - DNA, 120 bp, Artificial Sequence
  ENSG00000136271_18 (sequence is synthesized)
ccagccttcctctccccgagcacacgcacatgtagattcggggggaagctgcctgctcttccttagaggagccggggcagctatctgctggtccctttctgaacaactgttgatgtgtga

SEQ ID NO: 327547 - DNA, 120 bp, Artificial Sequence
  ENSG00000136271_19 (sequence is synthesized)
cgcgtgcgtgctgcgctactgagcagcgccatggaggactctgaagcactgggcttcgaacacatgggcctcgatccccggctccttcaggtacacgcgagggctggggagccggcttac

SEQ ID NO: 327548 - DNA, 120 bp, Artificial Sequence
  ENSG00000136271_20 (sequence is synthesized)
ttgccttttccagcttggctctggctcccttcctccagcaagggtgggttgagctctcacatggcaccactttgacctcttctgcttccctcttctacactgaaagacttatgggccagg

SEQ ID NO: 327549 - DNA, 120 bp, Artificial Sequence
  ENSG00000136271_21 (sequence is synthesized)
actttgggaggccgaggaaggcagatcgcttggccccaggagttcaaaaccgtcctgggcaacgtggcgaaaccccatctagaaagaaaagaagagaaggggaggggggaggggaggagg

SEQ ID NO: 327550 - DNA, 120 bp, Artificial Sequence
  ENSG00000136271_22 (sequence is synthesized)
agagaaggggaggggggaggggaggaggagttacatatatacacatacacacacacacacacgtacgtacatacatacatacacgctaactggacgtggtggtgcgtgcctgtagtctta

SEQ ID NO: 327551 - DNA, 120 bp, Artificial Sequence
  ENSG00000136271_23 (sequence is synthesized)
gctttccaggagactgaggtgggaggaccacttgagcctgagatcgcgccagcctgggtgacagtcagaccatgtctcaaaaaaaaaaaaagatttgtgattaggattcttagtcctcac

SEQ ID NO: 327552 - DNA, 120 bp, Artificial Sequence
  ENSG00000136271_24 (sequence is synthesized)
ctgtattattttcctattgctactgtaacaaattaccacaaatttactggcttaaaacgacgcaagtctgtaggtcagaagtctgacacgggtcttaactggtgacccgagtcagatttg

SEQ ID NO: 327553 - DNA, 120 bp, Artificial Sequence
  ENSG00000136271_25 (sequence is synthesized)
ggacacaaagaacagaaaccaagctgtgcaggtttctgacaggcagtccggttagggagccctacagcaacccgccggtcctctctctcaggcagttgctgccatggctcattattccaa

SEQ ID NO: 327554 - DNA, 120 bp, Artificial Sequence
  ENSG00000136271_26 (sequence is synthesized)
ccggttctcctcagcccagtctatctcagtggctccattcatagggtgatgtgcccggcgggacactaaccctaaccaagcagagagacggtcatgcccgtcacgacctcggccctcgcc

SEQ ID NO: 327555 - DNA, 120 bp, Artificial Sequence
  ENSG00000136271_27 (sequence is synthesized)
ccggccgaggcttctcctgcaggtcgcgagaatcaggtgcgtcagcggcgtccgggaacgccggaagagccagtggagcggctctgtagtccaaagtaccccgtcgaccccagcacggcc

SEQ ID NO: 327556 - DNA, 120 bp, Artificial Sequence
  ENSG00000136271_28 (sequence is synthesized)
tctgcatggtaggcacactgagggacttggggtgtgctggacagagcctgcgggttggagatgcaagctgcactgtcttcccttgcaggacagcacgcgctaacaacccaggcatagtct

SEQ ID NO: 327557 - DNA, 120 bp, Artificial Sequence
  ENSG00000136271_29 (sequence is synthesized)
taacctttgtgcttcccacggagcagttccacttaggcaagattgaggagcttctcagtggaggtaagagcctggctcttgtggtcctgggccagggtcaggcttcttccacaatgcttt

SEQ ID NO: 327558 - DNA, 120 bp, Artificial Sequence
  ENSG00000136271_30 (sequence is synthesized)
gccctcacaagaagcggaagaagctgtcttcctcttgtaggaaggccaaggtacggctcctggggactgcggacagccccaggactcctcccaacctgctcttttgtcatcaccagaatg

SEQ ID NO: 327559 - DNA, 120 bp, Artificial Sequence
  ENSG00000136271_31 (sequence is synthesized)
tggaggcgccttgccctagggaggggaagagagggtgccctagggaggggaagagggggcaccctagaaccgggccccaaaaatctggtgtgggataggggtacttttgcagccgcctgc

SEQ ID NO: 327560 - DNA, 120 bp, Artificial Sequence
  ENSG00000136271_32 (sequence is synthesized)
aggccctgcttttctttccccagctgcctttccccatttccttatctgcagcaccttctggtcgtgttggccagttgccggcacggctccctttgtgtctttctcagttgggtgggtggg

SEQ ID NO: 327561 - DNA, 120 bp, Artificial Sequence
  ENSG00000136273_0 (sequence is synthesized)
actgttcgcgctgccgtgtttccgggcggggacactcagggcgcgacgcttttctgttacccacagaggcccgccgcggctgcgccatccgcggccatgaagtttcgggccaagatcgtg

SEQ ID NO: 327562 - DNA, 120 bp, Artificial Sequence
  ENSG00000136273_1 (sequence is synthesized)
gacggggcctgtctgaaccacttcacacgaatcagtaacatgatagccaagcttgccaaaacctgcaccctccgcatcagccctgataagcttaacttcatcctttgtgacaagctggct

SEQ ID NO: 327563 - DNA, 120 bp, Artificial Sequence
  ENSG00000136273_2 (sequence is synthesized)
aatggaggagtgagcatgtggtgtgagctggaacaggagaacttcttcaacgaatttcaaatggagggtgtctctgcagaaaacaatgagatttatttagagctaacatcggaaaactta

SEQ ID NO: 327564 - DNA, 120 bp, Artificial Sequence
  ENSG00000136273_3 (sequence is synthesized)
tctcgagccttgaagactgcccagaatgccagggctttgaaaatcaaactgactaataaacactttccctgcctcacggtctccgtggagctgttatctatgtcaagcagtagccgcatt

SEQ ID NO: 327565 - DNA, 120 bp, Artificial Sequence
  ENSG00000136273_4 (sequence is synthesized)
gtgacccatgacatccccataaaggtgattcctaggaaattgtggaaggacttacaagaaccggtggtcccagatcctgatgttagtatttatttaccagtcttgaagactatgaagagt

SEQ ID NO: 327566 - DNA, 120 bp, Artificial Sequence
  ENSG00000136273_5 (sequence is synthesized)
gttgtggaaaaaatgaaaaacatcagcaatcaccttgttattgaagcaaacctagatggagaattgaatttgaaaatagaaactgaattagtatgtgttacaactcattttaaagatctt

SEQ ID NO: 327567 - DNA, 120 bp, Artificial Sequence
  ENSG00000136273_6 (sequence is synthesized)
ggaaatcctccattagcctctgaaagcacccatgaggacagaaacgtggaacacatggctgaagtgcacatagatattaggaagctcctacagtttcttgctggacaacaagtaaatccc

SEQ ID NO: 327568 - DNA, 120 bp, Artificial Sequence
  ENSG00000136273_7 (sequence is synthesized)
acaaaggccttatgcaatattgtgaataacaagatggtgcattttgatctgcttcatgaagacgtgtcccttcagtatttcatccctgcgctgtcctagcaccctgtcgctggagttggc

SEQ ID NO: 327569 - DNA, 120 bp, Artificial Sequence
  ENSG00000136273_8 (sequence is synthesized)
atgcagagactttgtcaggatgggagaggccgcaggtgttgtgttctgatcactggtctgtgccctcacagcaccgcacatcgacacactgtacttatttgtccctctctaacattttaa

SEQ ID NO: 327570 - DNA, 120 bp, Artificial Sequence
  ENSG00000136273_9 (sequence is synthesized)
ctaaaagttgattcaacaacacacagttggataaacatatcacttcatgttgctcatgtctgttttgctttgtttttaagacactgaaaagaaaagctagaatttatttattcagacttt

SEQ ID NO: 327571 - DNA, 120 bp, Artificial Sequence
  ENSG00000136273_10 (sequence is synthesized)
aaagaacaatttctcattgatgttgtgaaaatcgtcatgtatttagacttggtgtagtagccagaattcgtaaagctgttgcctgggagcttggtactttccctccaggcagaggctcta

SEQ ID NO: 327572 - DNA, 120 bp, Artificial Sequence
  ENSG00000136273_11 (sequence is synthesized)
gctcagcacggcctgtagcgcacagtcagtcttgcatttcagtgtgttcaccccgctgctcctgccccttggagcccagtgacagaaagaacagcctctgtcaccccgccgccactgcct

SEQ ID NO: 327573 - DNA, 120 bp, Artificial Sequence
  ENSG00000136273_12 (sequence is synthesized)
tcagagcactgtggggtgtcacagctgcagcatttggagtctctctcttgctgaggactcaagcccacctgagtccactcccctcttgatgcctagagagctggcccagccaacacagct

SEQ ID NO: 327574 - DNA, 120 bp, Artificial Sequence
  ENSG00000136273_13 (sequence is synthesized)
cttagctgggagctccttctgccattccaactagtttcttcctggggccagttttgggtttaggttgtaattccttatatttctttcttccacagtgtatcggatctgtcgttctggaaa

SEQ ID NO: 327575 - DNA, 120 bp, Artificial Sequence
  ENSG00000136273_14 (sequence is synthesized)
gaagacccttctatttagagtagaaacaaacgaaacttctaaggtatcatctgtgttaagtgatgagaccatatttctttgatgtttctgaacatcaaagctgattcagtactggtagat

SEQ ID NO: 327576 - DNA, 120 bp, Artificial Sequence
  ENSG00000136273_15 (sequence is synthesized)
gtgctcattctccctgaaacatacccatcatatttcctattataattacatctcattgtcctgtggaggtggacatgataaacattatcttttgttttcttgttttgttttgtttgagac

SEQ ID NO: 327577 - DNA, 120 bp, Artificial Sequence
  ENSG00000136273_16 (sequence is synthesized)
ggtctcattctgtcacccagactggagtgcagtgccacaatcatggctcaccgcattgacctccttggctcaaggcatcctcccacctcagcttcctgactagctgggactactggtgtg

SEQ ID NO: 327578 - DNA, 80 bp, Artificial Sequence
  ENSG00000136273_17 (sequence is synthesized)
tcccacctcagcttcctgactagctgggactactggtgtgcaccaccacacccagctaattttcaatttttcatagagac

SEQ ID NO: 327579 - DNA, 120 bp, Artificial Sequence
  ENSG00000136273_18 (sequence is synthesized)
ggattacaggcatcagccatcacacccatccataaacattatattaatgtcacattacaaaactgagacctaagttgcttaggataaaatgaaattggaagactagctaacatgaaaatt

SEQ ID NO: 327580 - DNA, 120 bp, Artificial Sequence
  ENSG00000136273_19 (sequence is synthesized)
gactagctaacatgaaaatttatattttggctttttcatgttttttgataaaaccagtgtatttgaatgattcttttgatgtttagtaatggttttttgtttgttttttggttttttttt

SEQ ID NO: 327581 - DNA, 83 bp, Artificial Sequence
  ENSG00000136273_20 (sequence is synthesized)
ttgttttttggtctggagtgctagtggcgcgatcttggcttactgcagcctccacttcccaagttcaagcgattctcctgcct

SEQ ID NO: 327582 - DNA, 120 bp, Artificial Sequence
  ENSG00000136273_21 (sequence is synthesized)
tgagccaccacgcctggcctatgtttaataatgttgaaataggatggaatattttgttaaattaacattttaaaattagaagacaccgttttaatttttaaacccttcctcctctcattg

SEQ ID NO: 327583 - DNA, 120 bp, Artificial Sequence
  ENSG00000136273_22 (sequence is synthesized)
taacgaaattaattccagctgcagtgagaaaacttaaaaatcatgatacaaaatgaaacaatatctgaaagtagttttataaaactgaaattgctgttaaagagaatgtgttagtgactt

SEQ ID NO: 327584 - DNA, 120 bp, Artificial Sequence
  ENSG00000136273_23 (sequence is synthesized)
aaccatttgctctatgtgatgtttattatcaaatacatataattttgaagattttaatgaatggcttaagattttatctttgtgtagaatgtggctaaagaaaccttagttgagattcaa

SEQ ID NO: 327585 - DNA, 120 bp, Artificial Sequence
  ENSG00000136273_24 (sequence is synthesized)
acagaggcccgccgcggctgcgccatccgcggccatgaagtttcgggccaagatcgtggacggggcctgtctgaaccacttcacacgtgagcagggaggccggagaggagcgagggagga

SEQ ID NO: 327586 - DNA, 120 bp, Artificial Sequence
  ENSG00000136273_25 (sequence is synthesized)
tggcctcgaaggaatagacatagttagcctagcctttttaacaataaatactgttgaaagctgtttggtttatttaaatttaaagatctggtccataactatattttgcattagagtcag

SEQ ID NO: 327587 - DNA, 120 bp, Artificial Sequence
  ENSG00000136273_26 (sequence is synthesized)
aaggagtcccttgtgacctgtggagacagtccccgggcagcaagagcaggagtagaagaggggtgcccgatggtatatgaggggatggcagaagtctggtagcctgggcgtgtggagttt

SEQ ID NO: 327588 - DNA, 120 bp, Artificial Sequence
  ENSG00000136273_27 (sequence is synthesized)
tggagaattgaatttgaaaatagaaactgaattagtatgtgttacaactcattttaaagatcttggaaatcctccattaggtaagttttctagtgggttatattttgctttggataagtt

SEQ ID NO: 327589 - DNA, 120 bp, Artificial Sequence
  ENSG00000136273_28 (sequence is synthesized)
aattgtttcagataacctacctgttgaggtctcttcatgtaaaaaggttgaaattcagttgactttgtttcatgcttgggtgaagaacaaaggaattgagactggactatgtatccctgt

SEQ ID NO: 327590 - DNA, 120 bp, Artificial Sequence
  ENSG00000136273_29 (sequence is synthesized)
ggtgtagtggggcagttagccaccagggggagaagctgtgccaccaagtagctgacagatctgtgcagggtctccatcctctgtagaattcggatcaagttacataacctccaagatccc

SEQ ID NO: 327591 - DNA, 120 bp, Artificial Sequence
  ENSG00000136273_30 (sequence is synthesized)
ttccagctattcaattcctgtcctactcctaaagatttctatttctcacctggcatggattcagaaaggtagatacatttgttcttatattctcctccttcagttacttccatatgtatg

SEQ ID NO: 327592 - DNA, 120 bp, Artificial Sequence
  ENSG00000136273_31 (sequence is synthesized)
gtgcacgaaagccaagaagagaagaatttcatggcttagggctaacatggggtaacggtcatgccgatggttaaccctagagctcctgaaagtaaagatgatgccaaagggcccatttcc

SEQ ID NO: 327593 - DNA, 120 bp, Artificial Sequence
  ENSG00000136273_32 (sequence is synthesized)
tcttgctcacaatttgtttaagaagaaagtacagaaatatgctgggttagtatttatttaccagtcttgaagactatgaagagtgttgtggaaaaaatgaaaaacatcagcaatcacctt

SEQ ID NO: 327594 - DNA, 120 bp, Artificial Sequence
  ENSG00000136274_0 (sequence is synthesized)
cggggcggcggcacggactgacggagggtcggaaggactgagggacgggcgggcgcacggccaggccatgcctggggaggctgcccgcgccgagctgctgctgcccgaggcggaccgacc

SEQ ID NO: 327595 - DNA, 120 bp, Artificial Sequence
  ENSG00000136274_1 (sequence is synthesized)
gaccgacccgggccccgcacagatctgtcctgcgatgcggccgctgccaccaccatcctgggaggggaccggcgggagccctgtgctctgaccccagggcccagccacctggccctcacg

SEQ ID NO: 327596 - DNA, 120 bp, Artificial Sequence
  ENSG00000136274_2 (sequence is synthesized)
ccagccacctggccctcacgttcctgcccagcaagccgggtgcccggccccagcccgagggagccagctgggatgcagggcctggtggggcaccctcggcctgggcggacccaggggagg

SEQ ID NO: 327597 - DNA, 120 bp, Artificial Sequence
  ENSG00000136274_3 (sequence is synthesized)
ctccctgagggcctgtcttcccaggctctgtccacggaggctcctctcccggccaccctggagccccggattgtgatgggagaggagacgtgccaggccctcctgtcacccagagctgcc

SEQ ID NO: 327598 - DNA, 120 bp, Artificial Sequence
  ENSG00000136274_4 (sequence is synthesized)
cggacagcgctcagggaccaggagggtgggcacgcaagcccagacccaccccccgagctgtgttctcagggtgatctttctgtgccttcccctcccccagaccctgattccttcttcacg

SEQ ID NO: 327599 - DNA, 120 bp, Artificial Sequence
  ENSG00000136274_5 (sequence is synthesized)
cctccctccacccccaccaagaccacctatgccctgcttcctgcctgtgggccccacggggacgccagggactcagaggctgagctgcgggatgagctgctggactcgccccccgcctca

SEQ ID NO: 327600 - DNA, 120 bp, Artificial Sequence
  ENSG00000136274_6 (sequence is synthesized)
ccctcgggctcctacattacggccgatggggacagctgggcctcttcaccctcctgttccctcagcctgctggctccggctgaagggctggacttcccctcaggctggggcctgtccccg

SEQ ID NO: 327601 - DNA, 120 bp, Artificial Sequence
  ENSG00000136274_7 (sequence is synthesized)
caggggtccatggtggatgaacgagagctgcacccagcagggaccccagagcccccgtcctctgagtccagcctctctgcagacagcagctcctcctggggccaggagggccacttcttc

SEQ ID NO: 327602 - DNA, 120 bp, Artificial Sequence
  ENSG00000136274_8 (sequence is synthesized)
gacctggacttcctggccaatgacccaatgatccccgcagccctcctacccttccagggcagcctcatctttcaggtggaggcagtggaggtgacaccgctatccccagaggaagaagaa

SEQ ID NO: 327603 - DNA, 120 bp, Artificial Sequence
  ENSG00000136274_9 (sequence is synthesized)
gaggaggctgtggcggatcccgacccaggtggggacctggctggggagggtgaggaggacagcacgtctgcctccttcctgcagtcactgtctgacctgtccatcacggagggcatggac

SEQ ID NO: 327604 - DNA, 120 bp, Artificial Sequence
  ENSG00000136274_10 (sequence is synthesized)
gaggcttttgccttccgggacgacacctctgcagcctcctctgattcagactcagcctcctacgcagaggcagatgatgagaggctgtacagcggggagccccatgcccaggccactttg

SEQ ID NO: 327605 - DNA, 120 bp, Artificial Sequence
  ENSG00000136274_11 (sequence is synthesized)
ctccaggacagtgtccagaagacagaggaggagagcggaggtggggccaaggggctgcaggctcaggatgggactgtgtcctgggccgtggaggctgctcctcagacctcagacagaggg

SEQ ID NO: 327606 - DNA, 120 bp, Artificial Sequence
  ENSG00000136274_12 (sequence is synthesized)
gcctatctgtcccagagacaggaattgatctcagaagtaacagaagagggccttgctttaggccaggagtccactgccactgtgacccctcacactctgcaggtagccccaggcctccag

SEQ ID NO: 327607 - DNA, 120 bp, Artificial Sequence
  ENSG00000136274_13 (sequence is synthesized)
gtggaggtggctaccagagtgaccccacaggctggggaggaagaaacagactccaccgctggacaagaatctgctgccatggcaatgcctcagccctcccaggagggcatcagcgagatc

SEQ ID NO: 327608 - DNA, 120 bp, Artificial Sequence
  ENSG00000136274_14 (sequence is synthesized)
ttaggccaagagtctgtcactgcagaaaaacttccaactccacaggaagaaacaagcctcacattgtgtccagactctcctcagaacttgaaggaagaaggagggctggacctcccctct

SEQ ID NO: 327609 - DNA, 120 bp, Artificial Sequence
  ENSG00000136274_15 (sequence is synthesized)
ggcagaaagcctgtagctgcagccacgattgtccccaggcaggctaaagaggacctcaccttaccccaggactccgctatgacaccgcctctgcccctacaagacacagatctctcatca

SEQ ID NO: 327610 - DNA, 120 bp, Artificial Sequence
  ENSG00000136274_16 (sequence is synthesized)
gccccaaagcctgtggctgcagccacgattgtgtcccagcaggctgaagagggcctcaccttaccccaggactccgttatgacaccgcctctgcccctacaagacacagaactctcgtca

SEQ ID NO: 327611 - DNA, 120 bp, Artificial Sequence
  ENSG00000136274_17 (sequence is synthesized)
gccccaaagcctgtggctgcagccacgcttgtgtcccagcaggctgaagagggcctcaccttaccccaggactccgctatgacaccgcctctgcccctacaagacacagatctctcgtca

SEQ ID NO: 327612 - DNA, 120 bp, Artificial Sequence; identical to SEQ ID NO: 327611
  ENSG00000136274_18 (sequence is synthesized)

SEQ ID NO: 327613 - DNA, 120 bp, Artificial Sequence; identical to SEQ ID NO: 327611
  ENSG00000136274_19 (sequence is synthesized)

SEQ ID NO: 327614 - DNA, 120 bp, Artificial Sequence
  ENSG00000136274_20 (sequence is synthesized)
cagcaggctgaagagggcctcaccttaccccaggactccgctatgacaccgcctctgcccctacaagacacagatctctcgtcagccccaaagcctgtggctgcagccacgattgtgtcc

SEQ ID NO: 327615 - DNA, 120 bp, Artificial Sequence
  ENSG00000136274_21 (sequence is synthesized)
cagcaggctgaagagggcctcaccttaccccaggactccgctatgacaccgcctctgcccctacaagacacagatctctcgtcagccccaaagcctgtggctgcagccacgcctgtgtcc

SEQ ID NO: 327616 - DNA, 120 bp, Artificial Sequence; identical to SEQ ID NO: 327615
  ENSG00000136274_22 (sequence is synthesized)

SEQ ID NO: 327617 - DNA, 120 bp, Artificial Sequence
  ENSG00000136274_23 (sequence is synthesized)
cagcaggctgaagagggcctcaccttaccccaggactccgctatgacagcacctctgcctctgcaagacacaggccccacctcaggtccagagcctctggctgtggccacccctcaaacc

SEQ ID NO: 327618 - DNA, 120 bp, Artificial Sequence
  ENSG00000136274_24 (sequence is synthesized)
ttgcaggcagaagcaggctgtgccccagggacagagcctgtggccaccatggctcagcaggaagtaggtgaggccttaggccccaggccagcacctgaggagaagaatgcagccctccct

SEQ ID NO: 327619 - DNA, 120 bp, Artificial Sequence
  ENSG00000136274_25 (sequence is synthesized)
acagtcccggagcctgcagccttggaccaggtccaacaggatgacccacagccagctgcagaagctgggacaccttgggccgcacaggaagatgcggattccactttgggcatggaggcc

SEQ ID NO: 327620 - DNA, 120 bp, Artificial Sequence
  ENSG00000136274_26 (sequence is synthesized)
ctcagtctccctgagccggcctctggtgctggggaggaaatagcagaagccctttctaggcctggacgggaagcatgtctggaagcgcgagcgcacacaggtgatggggctaagcctgac

SEQ ID NO: 327621 - DNA, 120 bp, Artificial Sequence
  ENSG00000136274_27 (sequence is synthesized)
tcaccccaaaaggagaccctggaggttgagaaccagcaggaaggaggcctgaagccactggcacaggaacatggacccaggtcagcacttggaggtgcaagggaggtccccgatgcgcct

SEQ ID NO: 327622 - DNA, 120 bp, Artificial Sequence
  ENSG00000136274_28 (sequence is synthesized)
cctgctgcctgccctgaggtcagccaggcccggctcctgagcccagccagggaggaaagaggcctgagtggcaagtccaccccggagcccacgcttccctcagctgtggccacagaggcc

SEQ ID NO: 327623 - DNA, 120 bp, Artificial Sequence
  ENSG00000136274_29 (sequence is synthesized)
agtctggactcctgcccagagtcttcagtaggggctgtgtccagtctggacagaggctgccctgacgcgcctgcccccacgtctgcaccaacctcccagcagccggagcctgtactgggt

SEQ ID NO: 327624 - DNA, 120 bp, Artificial Sequence
  ENSG00000136274_30 (sequence is synthesized)
ctgggcagtgttgagcaaccccacgaagtacccagtgtccttggcacccccttgctgcagcccccagaaaaccttgccaagggtcagcccagcacgcccgtggacaggcccctgggccct

SEQ ID NO: 327625 - DNA, 120 bp, Artificial Sequence
  ENSG00000136274_31 (sequence is synthesized)
gacccttctgctcctggtacccttgctggggcagccctacccccactggagcccccagccccctgcctgtgccaggacccccaggaagactctgtggaagacgaggagcccccaggctct

SEQ ID NO: 327626 - DNA, 120 bp, Artificial Sequence
  ENSG00000136274_32 (sequence is synthesized)
ctgggcctcccaccgccccaggcaggagtccagcctgccgctgctgctgtctcaggaaccacacagcctctggggactgggccgcgagtcagcctctcgcctcactccccactcctcagc

SEQ ID NO: 327627 - DNA, 120 bp, Artificial Sequence
  ENSG00000136274_33 (sequence is synthesized)
cccaaggtggcctccatggatgccaaagacctggccttgcagatcttgccgccttgccaagtgcctcctccctctgggccccagagcccagctggccctcaagggctctcagcccccgag

SEQ ID NO: 327628 - DNA, 120 bp, Artificial Sequence
  ENSG00000136274_34 (sequence is synthesized)
cagcaagaggatgaggacagcctggaggaagactcgcctcgggccctgggctcgggccagcattcggatagccacggggagtcatcagccgagctggacgagcaggacatcttggctcct

SEQ ID NO: 327629 - DNA, 120 bp, Artificial Sequence
  ENSG00000136274_35 (sequence is synthesized)
cagaccgtgcagtgtccagcccaggccccagcaggcggcagtgaggagaccatcgccaaagccaagcagagtcgcagtgagaagaaggcccgaaaggcaatgtcaaagctgggcttgcgg

SEQ ID NO: 327630 - DNA, 120 bp, Artificial Sequence
  ENSG00000136274_36 (sequence is synthesized)
cagattcagggagtcaccaggatcaccatccagaagtccaagaacatcctctttgtcatcgccaagcctgatgtcttcaagagcccagcctcagacacttatgtggtctttggcgaggcc

SEQ ID NO: 327631 - DNA, 120 bp, Artificial Sequence
  ENSG00000136274_37 (sequence is synthesized)
aagattgaggacctgtcccagcaagtgcacaaagccgcagctgagaagtttaaggtgccctcagagccctcagccttggtccctgagtcagcacccaggccccgggtgaggctggagtgc

SEQ ID NO: 327632 - DNA, 120 bp, Artificial Sequence
  ENSG00000136274_38 (sequence is synthesized)
aaggaagaggaagaggaggaggaggaagaggtggacgaggcggggctggaactgcgtgacattgagctggtgatggcgcaggccaatgtgtccagggccaaggccgtgcgggctctgaga

SEQ ID NO: 327633 - DNA, 120 bp, Artificial Sequence
  ENSG00000136274_39 (sequence is synthesized)
gacaaccacagtgacatcgtcaacgccatcatggaactgaccatgtagccactgaccggaagctggagccatcctacgccttccctcagctctgctactcaataaatcggtgtcccttca

SEQ ID NO: 327634 - DNA, 120 bp, Artificial Sequence
  ENSG00000136274_40 (sequence is synthesized)
ggggaaggaccaaccaccagcccaaggtcttggggaagttggcggtggagactttgccttcctgggcactgtgctgctctcctcccccgacgtgggtcaacaccaggtctgagcccccct

SEQ ID NO: 327635 - DNA, 120 bp, Artificial Sequence
  ENSG00000136279_0 (sequence is synthesized)
gcggagactgcggggcgggccatggcggcgaacctgagccggaacgggccagcgctgcaagaggcctacgtgcgggtggtcaccgagaagtccccgaccgactgggctctctttacctat

SEQ ID NO: 327636 - DNA, 120 bp, Artificial Sequence
  ENSG00000136279_1 (sequence is synthesized)
gaaggcaacagcaatgacatccgcgtggctggcacaggggagggtggcctggaggagatggtggaggagctcaacagcgggaaggtgatgtacgccttctgcagagtgaaggaccccaac

SEQ ID NO: 327637 - DNA, 120 bp, Artificial Sequence
  ENSG00000136279_2 (sequence is synthesized)
tctggactgcccaaatttgtcctcatcaactggacaggcgagggcgtgaacgatgtgcggaagggagcctgtgccagccacgtcagcaccatggccagcttcctgaagggggcccatgtg

SEQ ID NO: 327638 - DNA, 120 bp, Artificial Sequence
  ENSG00000136279_3 (sequence is synthesized)
accatcaacgcacgggccgaggaggatgtggagcctgagtgcatcatggagaaggtggccaaggcttcaggtgccaactacagctttcacaaggagagtggccgcttccaggacgtggga

SEQ ID NO: 327639 - DNA, 120 bp, Artificial Sequence
  ENSG00000136279_4 (sequence is synthesized)
ccccaggccccagtgggctctgtgtaccagaagaccaatgccgtgtctgagattaaaagggttggtaaagacagcttctgggccaaagcagagaaggaggaggagaaccgtcggctggag

SEQ ID NO: 327640 - DNA, 120 bp, Artificial Sequence
  ENSG00000136279_5 (sequence is synthesized)
gaaaagcggcgggccgaggaggcacagcggcagctggagcaggagcgccgggagcgtgagctgcgtgaggctgcacgccgggagcagcgctatcaggagcagggtggcgaggccagcccc

SEQ ID NO: 327641 - DNA, 120 bp, Artificial Sequence
  ENSG00000136279_6 (sequence is synthesized)
cagagcaggacgtgggagcagcagcaagaagtggtttcaaggaaccgaaatgagcaggagtctgccgtgcacccgagggagattttcaagcagaaggagagggccatgtccaccacctcc

SEQ ID NO: 327642 - DNA, 120 bp, Artificial Sequence
  ENSG00000136279_7 (sequence is synthesized)
atctccagtcctcagcctggcaagctgaggagccccttcctgcagaagcagctcacccaaccagagacccactttggcagagagccagctgctgccatctcaaggcccagggcagatctc

SEQ ID NO: 327643 - DNA, 120 bp, Artificial Sequence
  ENSG00000136279_8 (sequence is synthesized)
agagcaggagaccttctacgagcagcccccactggtgcagcagcaaggtgctggctctgagcacattgaccaccacattcagggccaggggctcagtgggcaagggctctgtgcccgtgc

SEQ ID NO: 327644 - DNA, 120 bp, Artificial Sequence
  ENSG00000136279_9 (sequence is synthesized)
cctgtacgactaccaggcagccgacgacacagagatctcctttgaccccgagaacctcatcacgggcatcgaggtgatcgacgaaggctggtggcgtggctatgggccggatggccattt

SEQ ID NO: 327645 - DNA, 120 bp, Artificial Sequence
  ENSG00000136279_10 (sequence is synthesized)
tggcatgttccctgccaactacgtggagctcattgagtgaggctgagggcacatcttgcccttcccctctcagacatggcttccttattgctggaagaggaggcctgggagttgacattc

SEQ ID NO: 327646 - DNA, 120 bp, Artificial Sequence
  ENSG00000136279_11 (sequence is synthesized)
agcactcttccaggaataggacccccagtgaggatgaggcctcagggctccctccggcttggcagactcagcctgtcaccccaaatgcagcaatggcctggtgattcccacacatccttc

SEQ ID NO: 327647 - DNA, 120 bp, Artificial Sequence
  ENSG00000136279_12 (sequence is synthesized)
ctgcatcccccgaccctcccagacagcttggctcttgcccctgacaggatactgagccaagccctgcctgtggccaagccctgagtggccactgccaagctgcggggaagggtcctgagc

SEQ ID NO: 327648 - DNA, 120 bp, Artificial Sequence
  ENSG00000136279_13 (sequence is synthesized)
aggggcatctgggaggctctggctgccttctgcatttatttgccttttttctttttctcttgcttctaaggggtggtggccaccactgtttagaatgacccttgggaacagtgaacgtag

SEQ ID NO: 327649 - DNA, 120 bp, Artificial Sequence
  ENSG00000136279_14 (sequence is synthesized)
agaattgtttttagcagagtttgtgaccaaagtcagagtggatcatggtggtttggcagcagggaatttgtcttgttggagcctgctctgtgctccccactccatttctctgtccctctg

SEQ ID NO: 327650 - DNA, 120 bp, Artificial Sequence
  ENSG00000136279_15 (sequence is synthesized)
cctgggctatgggaagtggggatgcagatggccaagctcccaccctgggtattcaaaaacggcagacacaacatgttcctccacgcggctcactcgatgcctgcaggccccagtgtgtgc

SEQ ID NO: 327651 - DNA, 120 bp, Artificial Sequence
  ENSG00000136279_16 (sequence is synthesized)
ctcaactgattctgacttcaggaaaagtaacacagagtggccttggcctgttgtcttcccctattttctgtcccagctcatccgtgtctctgaagaacaaatatgcttttggaccacgaa

SEQ ID NO: 327652 - DNA, 120 bp, Artificial Sequence
  ENSG00000136279_17 (sequence is synthesized)
gaggggtcagcgcactcagctgtcttggtccactgagccacatggggcttccagtgctcactggccacttctggcaggccttaggtttcagatatgtgtaagtgaaaacattcctccttg

SEQ ID NO: 327653 - DNA, 120 bp, Artificial Sequence
  ENSG00000136279_18 (sequence is synthesized)
gttctccttccctctgggtgcaggggagtgctttctctttgtctacttggggagagctgagagggaaacaggcctctccagcttgtgggcagcctgcgttgggagctgcggtgggaagct

SEQ ID NO: 327654 - DNA, 120 bp, Artificial Sequence
  ENSG00000136279_19 (sequence is synthesized)
caccagtcccagaactggtgctggtggaaagaaagtccacagacatatcttcttctccctttgtcctgccctggtcttgtgccgagtgcttgcaggggccccatcctcactgggagaggc

SEQ ID NO: 327655 - DNA, 120 bp, Artificial Sequence
  ENSG00000136279_20 (sequence is synthesized)
ggacgtgggagcagcagcaagaagtggtttcaaggaaccgaaatgagcaggtaagatgggggtgctctacttgtttggacctgtcctggccacacgcagaagtccctgatctcggattga

SEQ ID NO: 327656 - DNA, 120 bp, Artificial Sequence
  ENSG00000136279_21 (sequence is synthesized)
gggcccagcccagacctgggcagaggctgccctgcagtcagctggggcaggttggaatctgggcacctcaagaggtggcagtagagaggaaagccaaaggcggaagcgtcgggcttggac

SEQ ID NO: 327657 - DNA, 120 bp, Artificial Sequence
  ENSG00000136279_22 (sequence is synthesized)
cacacctggtcctgggggaggccctgggagccccttggcttctgtgttttacttccttttttaacgttactttttatttttaaatgacttctctcctgagaacatgttttgcctcctggc

SEQ ID NO: 327658 - DNA, 120 bp, Artificial Sequence
  ENSG00000136279_23 (sequence is synthesized)
cccacactcacctttgaggggctactgggccgacagctggaggggctgtgatctggggagaggtggtgaaggttttgcccactgcaggggtcaacatgtgcttccctccaggagtctgcc

SEQ ID NO: 327659 - DNA, 120 bp, Artificial Sequence
  ENSG00000136279_24 (sequence is synthesized)
tctgggccaaagcagagatggtcacactgaggctcgggtaagttaagccacaaggctaatgatcgactggctctggtgcccgtctttggccatgtgcctaaaactcagtcctgggcaggg

SEQ ID NO: 327660 - DNA, 120 bp, Artificial Sequence
  ENSG00000136279_25 (sequence is synthesized)
tgctgtagcctgaatgctcccatgtgggaatagcaccccaccacctgcccagtgtctgcctctgctccgtgtctggggtgagcaccctcaccctgagactgtggctgatgatgatcagcc

SEQ ID NO: 327661 - DNA, 120 bp, Artificial Sequence
  ENSG00000136279_26 (sequence is synthesized)
accaggaagaggctaaatgttaagatgggactgaagttggagccttcctgcgttccagttcctctaggagaggccaagggctgccctgctcccagcttcagggagcctctgcctacatgg

SEQ ID NO: 327662 - DNA, 120 bp, Artificial Sequence
  ENSG00000136279_27 (sequence is synthesized)
gatggcccactgtgtggcgtcaggtacctggcacccactgagcatccggggaattaggtccctcctgtgccccagagctgctaggcagactgctaggcggttgactcaaggtgttacctg

SEQ ID NO: 327663 - DNA, 120 bp, Artificial Sequence
  ENSG00000136279_28 (sequence is synthesized)
ctagtgcctggggtgaaggctgcatggagcccaaccttgctcctggccttcctgtgctcaggcctctccccttttcgccagggcttcctggtgcctctcccatgaagagggaacttcccc

SEQ ID NO: 327664 - DNA, 120 bp, Artificial Sequence
  ENSG00000136279_29 (sequence is synthesized)
tccactcccatggaagacccaggtttgggctgttgccagctttgaggccccctgtgggcttgcctgtcccaacccaagaggcagggctcaaagtgccacccgggggttgcaaggacagca

SEQ ID NO: 327665 - DNA, 120 bp, Artificial Sequence
  ENSG00000136279_30 (sequence is synthesized)
gaggaccacctgccctctgcaggaagctgtccaggaagccgtgtcctgggctgtggtccttgctccccatggggagagctgggtcacttggcctcttctaactggccccaagcacgccaa

SEQ ID NO: 327666 - DNA, 120 bp, Artificial Sequence
  ENSG00000136279_31 (sequence is synthesized)
ttctggagcatggttactaagtggctctgaagcttcagggtcaccacaggcttgtcctgactgcaaactcatggagtggttgcagccctggctcagtgtcctgatgactaggtgtgggta

SEQ ID NO: 327667 - DNA, 120 bp, Artificial Sequence
  ENSG00000136279_32 (sequence is synthesized)
ctaggctcctgcccctggtgacacacgtatggagtgggggagggtgggtggctgcacccctggttctggagtccccacagctgatggcggtgtgagcctggcatgcacggctgcgctgga

SEQ ID NO: 327668 - DNA, 120 bp, Artificial Sequence
  ENSG00000136279_33 (sequence is synthesized)
ctccaggctgttgggggaggtgcctttattgcccaagcccacccctcacttggccttgccctgggcagccacagcctccatggccttccgcaccgtttcctcatcacccaggaactgcat

SEQ ID NO: 327669 - DNA, 120 bp, Artificial Sequence
  ENSG00000136279_34 (sequence is synthesized)
gggcttggtgggcttcagctccttgttcagctcatacacaatggggatccccgtgggcaggttcagctccatgatcgcctggtctgacatccctatgccggaaggaataggtgtccttag

SEQ ID NO: 327670 - DNA, 120 bp, Artificial Sequence
  ENSG00000136279_35 (sequence is synthesized)
cccctctgtccccagcctgtttacacagcagacactatgtgacctttatggtccacagagccagttcccctggcaccaattccttcccagccctgagaacgaggccacagaaatgttgcc

SEQ ID NO: 327671 - DNA, 120 bp, Artificial Sequence
  ENSG00000136279_36 (sequence is synthesized)
aaaggtcaaggagtaactgagttagaccaagcagcctacagaaatagcccagtggtgaaaaaaatggggacttcagccccacccaagtggctgtgatctgtggtggtgctgtccatagtt

SEQ ID NO: 327672 - DNA, 120 bp, Artificial Sequence
  ENSG00000136279_37 (sequence is synthesized)
ggctgtgatctgtggtggtgctgtccatagttccctcagcccagtgtgactccagccagactgaagttgagggtcaggaagggacactcaccctttgttttttttttttcttttcttttt

SEQ ID NO: 327673 - DNA, 120 bp, Artificial Sequence
  ENSG00000136279_38 (sequence is synthesized)
agtgagccaccgtgcccagcaccctttggtttctaaagtgctctaaattctagacatcctgaacagaggagcaagtgcggaatggagctggaggagggacagggaggccgagcctggtcg

SEQ ID NO: 327674 - DNA, 120 bp, Artificial Sequence
  ENSG00000136279_39 (sequence is synthesized)
aaacctgaccctgcctgcctcctgcagcccctgagctgggaatagcagctcgacctttgatgttcgcgccactccacccctgctccgtgcaggagggtttaagaaaatgttctctgggga

SEQ ID NO: 327675 - DNA, 120 bp, Artificial Sequence
  ENSG00000136279_40 (sequence is synthesized)
gtcagagtgaaatccctcatattcaccaccaaaagtgcgtcccctttccccaaaccaggctgtgggagggtcatggggctgcatgaagtctccggaagggagaggaggcaggtggtcctt

SEQ ID NO: 327676 - DNA, 120 bp, Artificial Sequence
  ENSG00000136279_41 (sequence is synthesized)
ccctctgcctggccccagtgccaggtgccaggtgtccgtgtttggagcgggcaggcttggggctggctgggtctccggggcctgccggtctgggtgctctggccaactgcccaacggccc

SEQ ID NO: 327677 - DNA, 120 bp, Artificial Sequence
  ENSG00000136279_42 (sequence is synthesized)
taggagcaggaggtctggggcacacccttctagcctttccaggactcaacaagctttaaggtcattcagatgctaatttagactgcccttgtgtcagaatactaaggtgggaggcggagc

SEQ ID NO: 327678 - DNA, 120 bp, Artificial Sequence
  ENSG00000136279_43 (sequence is synthesized)
ggaggtgccagtcactctgggcgaggccttactgcgcccatgcatcccgggcccatttgtcagcccttgctcttcagtgggagcccagctgcaagcccagagtctggccactccatagtc

SEQ ID NO: 327679 - DNA, 120 bp, Artificial Sequence
  ENSG00000136279_44 (sequence is synthesized)
ctgcacccctcttttgattggtctttcctttgcccagagaggggctccagagggagataggtggtgaagctcatgcagggattctgaggacctgatgggggagggccctgcgaggggtcc

SEQ ID NO: 327680 - DNA, 120 bp, Artificial Sequence
  ENSG00000136279_45 (sequence is synthesized)
aagcctacatcaagaggaattcagtaccagggggagctccccaccaccccggaaaagggagaggcccagagatggaggtggcttgtccagggccccacagtaagttgggatttggagcca

SEQ ID NO: 327681 - DNA, 120 bp, Artificial Sequence
  ENSG00000136279_46 (sequence is synthesized)
gatgctctaagcccagcccttccgtttcctagctgggtgtcccttggcagatgccacctttggagcctgccccacctcgggacacagcgagcttcgagtgcagtcagcccctgtggagtg

SEQ ID NO: 327682 - DNA, 120 bp, Artificial Sequence
  ENSG00000136279_47 (sequence is synthesized)
atggggaaaatttcacaaaactaaaaaatggcttctcagccctcctttttcagtgaatgatgtggagccccacgcctagaaagcctggtccatgggcgagagactttgctgagatgagaa

SEQ ID NO: 327683 - DNA, 120 bp, Artificial Sequence
  ENSG00000136279_48 (sequence is synthesized)
gccagctggggctgctgcccacccaccctgcccaggctcctgaaggtggcctcaccttccaggtgcttgacaatgccccgcaggctgttcccgtgggctgcaatgagcactcgcttgccg

SEQ ID NO: 327684 - DNA, 120 bp, Artificial Sequence
  ENSG00000136279_49 (sequence is synthesized)
gccttgatctggggaacaatctcctcgttccagaagggcagggcccgggcaatggtgtccttgaggctctcgcaggtggggagttccccgggcttcaggcctgcgtaccgacgctcctgg

SEQ ID NO: 327685 - DNA, 120 bp, Artificial Sequence
  ENSG00000136279_50 (sequence is synthesized)
gggacacaggcacgctgctttccctcccaagccagtgggcccccacccgactccccactctgcagcttcccagaggccttcccagcaaaggcagcccaccttgctaatggagttgtagta

SEQ ID NO: 327686 - DNA, 120 bp, Artificial Sequence
  ENSG00000136279_51 (sequence is synthesized)
ggggtgcttctcgtccatcgggggcggcgggatgtcgaaggagcgcctccagatcttcacctgctcctccccgtgcttggcggccgtttctgccttgttgaggcctgtgaggcccccgta

SEQ ID NO: 327687 - DNA, 120 bp, Artificial Sequence
  ENSG00000136279_52 (sequence is synthesized)
atgccgctcattgaggcgccaagtgcgcaccacaggcagccacatctggtccgtgccgtccaggatggcccagagggtgcggatggcccgcttcagcactgacgtgtagcagatgtcaaa

SEQ ID NO: 327688 - DNA, 120 bp, Artificial Sequence
  ENSG00000136279_53 (sequence is synthesized)
ctccatcttggcatccttgatggccttggctccccgcttggcctcctcggtccccttttcactcagctctgcatcgaaccagccacagaaacggttctcctggttccatgtgctctcgcc

SEQ ID NO: 327689 - DNA, 120 bp, Artificial Sequence
  ENSG00000136279_54 (sequence is synthesized)
gtgccggaccatcacgaggcggtgagtggccatggtggcagcagggaccacagaggactctggacggggacggctgcttcccaacactcccagctttataatagtgtcttcccagccccc

SEQ ID NO: 327690 - DNA, 120 bp, Artificial Sequence
  ENSG00000136279_55 (sequence is synthesized)
acccaccccagccaactgccaatcagcattccaggcggtggcaggtgaccagtagctgagctgctgggggctgggggccaggggagtgtgcaggccaagaggctgtgcttaaaatagccc

SEQ ID NO: 327691 - DNA, 120 bp, Artificial Sequence
  ENSG00000136279_56 (sequence is synthesized)
cacgcatccaccagctcctggcctgggttcaggtggcatgtctataaccagctggcacccagagcccagactgagtggggctgctggtcagggatgggcgtgaagggcagaagtctgggc

SEQ ID NO: 327692 - DNA, 120 bp, Artificial Sequence
  ENSG00000136279_57 (sequence is synthesized)
caggggagatggggatagcagggacagaggggctctccagggcaacgctcagtggcctatcagccattctctgctcagacagaggcacaaacaaaatcccaacccctttctcctgtgatt

SEQ ID NO: 327693 - DNA, 120 bp, Artificial Sequence
  ENSG00000136279_58 (sequence is synthesized)
ggcagccaggctaggaggcggccctcagcaggcagaggaggagagccagaggagctggtgcagaccacagctttgtggagaggagtctggccttgtggaaggtaccaggcagcagcagca

SEQ ID NO: 327694 - DNA, 120 bp, Artificial Sequence
  ENSG00000136279_59 (sequence is synthesized)
gaatgggcaagggctggggctgagccgggtttccaggacaaagggggaaagggcccctgtctttcctccggggtccctttgtcaaggtctcatccatacatgccccatgctcccacccta

SEQ ID NO: 327695 - DNA, 120 bp, Artificial Sequence
  ENSG00000136279_60 (sequence is synthesized)
tctgccctcacccaagccacgctcactctcctagccgaaaccaccttgaaaaagagaaatccaagggggtttgggggcaggactgaggactgtcagaagtcttgattgttaggtaaatgc

SEQ ID NO: 327696 - DNA, 120 bp, Artificial Sequence
  ENSG00000136279_61 (sequence is synthesized)
tcagcttagcaggaacccacaacgtaggctgaagggtggcacggagttgagtctaggaccaagacttctgcattcaggtttgggggatgagagccaccaaggcagggaagagactatgag

SEQ ID NO: 327697 - DNA, 120 bp, Artificial Sequence
  ENSG00000136279_62 (sequence is synthesized)
caataaagtcacaattggggccctaatgaaggggccatggccagacccttgggcatgggccccatccagggcctcccatttcctcccaccccagtgaccacactgtcacctgcgacactt

SEQ ID NO: 327698 - DNA, 120 bp, Artificial Sequence
  ENSG00000136279_63 (sequence is synthesized)
ctgataacaggagcgggtaggtgagaggccagcagagggaccaccactctgagacttggatctgagtgtgcaagaaaccctcgacaggcctccctccatccctgctggcctacctgggga

SEQ ID NO: 327699 - DNA, 120 bp, Artificial Sequence
  ENSG00000136279_64 (sequence is synthesized)
ggggctcctggcttggggcctgtgaagctaaggctctgtacccaaaggttggcagacaagtcccagtgggcaaagtcctgtcggctgccaggacccccaaggctggcaggtggaacccat

SEQ ID NO: 327700 - DNA, 120 bp, Artificial Sequence
  ENSG00000136279_65 (sequence is synthesized)
ccctcctagcagtgccatgcgcaggtctcactgttccacactgatcctgattgaagccacatctcctcatctgcttttgtccctttgaccaagagttgattcactagcccaactaaacat

SEQ ID NO: 327701 - DNA, 120 bp, Artificial Sequence
  ENSG00000136279_66 (sequence is synthesized)
gactgaggaccaggctctggcagtcccacaggggccagacatgaagcccatatttcagtggaggagggatcgtaccagcagctaaacatgcctaccgtagatagcaccagatgctaggaa

SEQ ID NO: 327702 - DNA, 120 bp, Artificial Sequence
  ENSG00000136279_67 (sequence is synthesized)
ggaaggaccataatgtactgggagagatgggaaaggagaggccggggacagccctgaggtgacatgtgagtggaaagagcggagtgcaaaggcctcagctatgatgagtcctacagggag

SEQ ID NO: 327703 - DNA, 120 bp, Artificial Sequence
  ENSG00000136279_68 (sequence is synthesized)
agcaattcaggtagaggggttggcaaagacccaagccctacagaaagcaaacaagctggggcagcgaccatcaggggcacatggcagagaggtgggctttgtgtcccaacacagtgggaa

SEQ ID NO: 327704 - DNA, 120 bp, Artificial Sequence
  ENSG00000136279_69 (sequence is synthesized)
tcactggagactttgaagcatggtcatattttcaagtcacttgcagctgtgtaggagtggaagtagaagctgagtaccctgcaggtctcggcagctttgatgagaacaaggccgcttagc

SEQ ID NO: 327705 - DNA, 120 bp, Artificial Sequence
  ENSG00000136279_70 (sequence is synthesized)
cagggctgggtgcagaagcagtggcaaggatcccccagacctgggagacctcactgccaaccaagcaggaggtgtcaaaaaggaaaggggagcccaaagaagggctggacttcggggaag

SEQ ID NO: 327706 - DNA, 120 bp, Artificial Sequence
  ENSG00000136279_71 (sequence is synthesized)
caagcccctgcttctgacccttggctccggcttgactttcctttgattcatttgacaagtagttgctggcctctgcagtgtgccagagctttcttggaggggtacaggggtaggaaaacc

SEQ ID NO: 327707 - DNA, 120 bp, Artificial Sequence
  ENSG00000136279_72 (sequence is synthesized)
aaaagccaccctcagggcctccatccaggaaggcatagcatggtgggcggcgaggaaggctgctgagtcaacaaggtggtcccaggaaggtggagggagcatcttcccatgtctctccca

SEQ ID NO: 327708 - DNA, 120 bp, Artificial Sequence
  ENSG00000136279_73 (sequence is synthesized)
ctgacagccaccaatcctggacagatgcaggagcagctgtcagtagacagataagaaaaggagatcagattcaaagttccgcagagaagtggtgaggtaacaagtattgcctagcctgga

SEQ ID NO: 327709 - DNA, 120 bp, Artificial Sequence
  ENSG00000136279_74 (sequence is synthesized)
cacacaggcggcttgaaacctcaagtgcaccaacagaaagagctccaggaagaatcagaggagtgggatgtgaagcccctcgaagtcagtgagttgggggaatccctccaatttttcttt

SEQ ID NO: 327710 - DNA, 120 bp, Artificial Sequence
  ENSG00000136279_75 (sequence is synthesized)
tcttctctaccccagctcctgggcagtaacatggaggtggcagtggtggcacagtgacggtagtgtgagctgggtacgcacttgaaacctgagagggtaacgctaccctctgtctagagg

SEQ ID NO: 327711 - DNA, 120 bp, Artificial Sequence
  ENSG00000136279_76 (sequence is synthesized)
agccatggccccaaaagcatggggcaaccaccttctgcagctcctttctgcccccctgcgctgggccctggatgcagtttcagggagtatgcagcagggtaggtagggaaagagccccag

SEQ ID NO: 327712 - DNA, 120 bp, Artificial Sequence
  ENSG00000136279_77 (sequence is synthesized)
atttgtggctggaggtcttggtagggatgttgcagggagctgttgtgtttcagggagagtacagagaagggagagatgaagtgagtgatccgataaagtgatatgtgaagtcattggctt

SEQ ID NO: 327713 - DNA, 120 bp, Artificial Sequence
  ENSG00000136279_78 (sequence is synthesized)
gctgccaagctgcgcacagggctgaccctagatgcacattgcaggtcccagactgaccggtgtagatacaggactaatatgactagtagtgcaaacactttaaacagtcaacattctgct

SEQ ID NO: 327714 - DNA, 120 bp, Artificial Sequence
  ENSG00000136279_79 (sequence is synthesized)
taggatttaaacaaggtccagagtctcaacataatatttaaaatatccaggttatccaaaataacccagtgtatgaaaaccaggaaaatcttaacatgggagaaaagaagatgatcaata

SEQ ID NO: 327715 - DNA, 120 bp, Artificial Sequence
  ENSG00000136279_80 (sequence is synthesized)
catgcccatcctgagatgattcaactattggaatgatcagatacagacttcaaagcagctatttataaccagccttcagaaagtattggtgaatattcttaaacagaatggaaatgacaa

SEQ ID NO: 327716 - DNA, 120 bp, Artificial Sequence
  ENSG00000136279_81 (sequence is synthesized)
agcatggagtccataaattagatgatagtttggaaaaagatataaacttacaaaccaagaagctcagtgaaccacacaactggataaattaacaacaaaagtccaagcttagacacatca

SEQ ID NO: 327717 - DNA, 120 bp, Artificial Sequence
  ENSG00000136279_82 (sequence is synthesized)
taaagaaacttctgaaaactaaagaccaagaaaaataagatcagccagagaaaaacgatacatttcattcaggtgaacaattctttgaaagactggatcttcaccagaaactatagaggc

SEQ ID NO: 327718 - DNA, 120 bp, Artificial Sequence
  ENSG00000136279_83 (sequence is synthesized)
cagaaagaagtggaacatttttagttttgaaataactgtcacccaagaattctatatccagtaaaaatttctattttactggaataaaagaatgaaataaagacattctcaaatgaaggc

SEQ ID NO: 327719 - DNA, 120 bp, Artificial Sequence
  ENSG00000136279_84 (sequence is synthesized)
aagctgaggaaattcataaccaaagaatctgctttaaaaaaatgttaaaccaagttcttcagacagaagagattactgggggcaattcaaaactttgggaatgcaggaagaacatcataa

SEQ ID NO: 327720 - DNA, 120 bp, Artificial Sequence
  ENSG00000136279_85 (sequence is synthesized)
atggcaaaagtccacataaatatgaaactattctttacttctttaagagttatgtgatggttgaattaagtcatgatactgtctgatggaggcttcagtgtatacagatgtaagacaact

SEQ ID NO: 327721 - DNA, 120 bp, Artificial Sequence
  ENSG00000136279_86 (sequence is synthesized)
agaacatgaggggagaagggtgaagggacctagatggtagtgaggtttctacatgctacttgaaatggcaaaacattaatctaaattgactgtaagagtatgtgtatttggccgggcagg

SEQ ID NO: 327722 - DNA, 120 bp, Artificial Sequence
  ENSG00000136279_87 (sequence is synthesized)
atttgacacatgaatgtatagcagtcattgggaaactccacagctcatgttttcctcatagtagatgtgtgctcccatctccatggctttgtccctcacaacccccaccccatggtaagt

SEQ ID NO: 327723 - DNA, 120 bp, Artificial Sequence
  ENSG00000136279_88 (sequence is synthesized)
caggccagtgtcctcccagctgcagagctgagaaggctgcacagttgcctactgagaacctgcctagtgggtcagagcaaagtgagaacgggcctgtgcccacccacagtgttactgtca

SEQ ID NO: 327724 - DNA, 120 bp, Artificial Sequence
  ENSG00000136279_89 (sequence is synthesized)
gcccaagctctttgggatgtagtggaaagtcatggtggatacggtgaggagagatggaacccaaggtgctggctacagagctcacttgtgtttcgtttcagggctctctttacctatgaa

SEQ ID NO: 327725 - DNA, 120 bp, Artificial Sequence
  ENSG00000136279_90 (sequence is synthesized)
ctctggaggtctctacaggaaggacaggctcttggccagcacagagcagaggttgtcagggtaggcttcgtcagagtgtgacctgtgggcccctcagctgacacccgtgactgctcctcc

SEQ ID NO: 327726 - DNA, 120 bp, Artificial Sequence
  ENSG00000136279_91 (sequence is synthesized)
tccagaagttgcctgacccctccctctgtcctgagctggacatggcttcattgttcaatgaacactcggagtggttctccacggtttgatgtctgttgttggtagaaagccccttccttt

SEQ ID NO: 327727 - DNA, 120 bp, Artificial Sequence
  ENSG00000136279_92 (sequence is synthesized)
cacaatctttctgggaggtgtcccctttctagaaggattgccattgaacagtagacatgtggtgtggcaggtgactgggagttgcagagatcaacaacttgagagtttcctgtcatcccc

SEQ ID NO: 327728 - DNA, 120 bp, Artificial Sequence
  ENSG00000136279_93 (sequence is synthesized)
agtggcacaggacagggctctgccacaaatgcaacaatttgctgtccccagagtggggctcatgactgcctccactcatacggagccctgtagatgaaatacctgatcagctcttcctcc

SEQ ID NO: 327729 - DNA, 120 bp, Artificial Sequence
  ENSG00000136279_94 (sequence is synthesized)
ttataacctggaaaagtttgtgagggctaagcctcagtgtcagggagaattgtttagagctgcccactcctgtgctccccctgtccccatcaccctctcttctggagtctgaggactgag

SEQ ID NO: 327730 - DNA, 120 bp, Artificial Sequence
  ENSG00000136279_95 (sequence is synthesized)
ccagttacgccactgcaggatgttcaatctggtctggccgtctgggtggccctggaacttgagcagacacaggtgcaggcagtggtgactctacaggccctgctattccgggcccttttg

SEQ ID NO: 327731 - DNA, 120 bp, Artificial Sequence
  ENSG00000136279_96 (sequence is synthesized)
caacgttgtggcaacaataaaattttgacgtagccatcctccatttggaagtctggtggctggtttgccgtggaaatgaccctgtttttatttccagaattacctctgggtttagagaag

SEQ ID NO: 327732 - DNA, 120 bp, Artificial Sequence
  ENSG00000136279_97 (sequence is synthesized)
tggtttttaaacgagtgtgggtaaaaaaaattacctgaggtacttgtcagaatcgcagacttctaggtcccacccagctctcatcaatcagtttagtgagggtggtgcccaggactctga

SEQ ID NO: 327733 - DNA, 120 bp, Artificial Sequence
  ENSG00000136279_98 (sequence is synthesized)
ttttaaacatacccctagaaagattctgatacaggtagaggtgagaagccctggtttagaagcagctcggcctcccttcatggtgggaccagggccagcagggaatgtcagggccacccc

SEQ ID NO: 327734 - DNA, 120 bp, Artificial Sequence
  ENSG00000136279_99 (sequence is synthesized)
tggctcatctttcctcacaagtgagctcatgcagcatccactctccttggtgcccattacagatggtcacactgaggctcgggtaagttaagccacaaggctaatgatcgactggctctg

SEQ ID NO: 327735 - DNA, 120 bp, Artificial Sequence
  ENSG00000136279_100 (sequence is synthesized)
gtgcccgtctttggccatgtgcctaaaactcagtcctgggcaggggattaggctgaagtggcagcatagggctgagcgggcagtggctctccctgcagaaggaggaggagaaccgtcggc

SEQ ID NO: 327736 - DNA, 120 bp, Artificial Sequence
  ENSG00000136279_101 (sequence is synthesized)
tcaagcagaaggagagggccatgtccaccacctccatctccagtcctcagcctgatctccctgctgaggagccggcgcccagcactcctccatgtctggtgcaggcagaagaggaggctg

SEQ ID NO: 327737 - DNA, 80 bp, Artificial Sequence
  ENSG00000136280_0 (sequence is synthesized)
ggtcgagcatgtagcggctgctggcggcggggctcccggggcgggccgggcgggccgcgggagccgcacgcggcgatatg

SEQ ID NO: 327738 - DNA, 120 bp, Artificial Sequence
  ENSG00000136280_1 (sequence is synthesized)
ggcgggccgcgggagccgcacgcggcgatatggaagaggagggcaagaagggcaagaagcctggaattgtctcgccatttaaacgagtattcctaaaaggtgaaaagagtagagataaga

SEQ ID NO: 327739 - DNA, 120 bp, Artificial Sequence
  ENSG00000136280_2 (sequence is synthesized)
aagcccatgagaaggtgacagagaggcgccctctgcacactgtggtgttgtcattgcctgagcgcgtcgagccagacagactgctgagcgactatattgagaaggaggtaaagtatttag

SEQ ID NO: 327740 - DNA, 120 bp, Artificial Sequence
  ENSG00000136280_3 (sequence is synthesized)
gtcagttaacgtccataccaggatacctgaatccctccagtaggactgaaatcctgcatttcatagacaatgcaaagagagcccaccagcttccgggacacttgactcaggagcacgatg

SEQ ID NO: 327741 - DNA, 120 bp, Artificial Sequence
  ENSG00000136280_4 (sequence is synthesized)
ctgtgctcagcctgtctgcgtacaacgtcaagctggcctggagggacggggaggatatcatcctcagggtgcccatccatgacatcgccgccgtctcctatgttcgggatgacgctgcac

SEQ ID NO: 327742 - DNA, 120 bp, Artificial Sequence
  ENSG00000136280_5 (sequence is synthesized)
acctggtggtcctgaagacagcccaggacccagggatctcccccagccagagtctgtgtgcggaaagttccagaggcctcagtgcaggctccctgtcggagagtgcagttgggcccgtgg

SEQ ID NO: 327743 - DNA, 120 bp, Artificial Sequence
  ENSG00000136280_6 (sequence is synthesized)
aggcatgctgcctggtcatcctggctgcagagagcaaggtcgctgcggaggagctttgctgtctgctaggccaggtcttccaggttgtttacacggagtccaccatcgactttctggaca

SEQ ID NO: 327744 - DNA, 120 bp, Artificial Sequence
  ENSG00000136280_7 (sequence is synthesized)
ggtggaagccagcactttctgcttccctgaatctgtggatgtgggtggtgcatcaccccacagcaagaccatcagtgagagcgagctgagcgccagcgccactgagctgctgcaggacta

SEQ ID NO: 327745 - DNA, 120 bp, Artificial Sequence
  ENSG00000136280_8 (sequence is synthesized)
catgctgacgctgcgcaccaagctgtcatcacaggagatccagcagtttgcagcactgctgcacgagtaccgcaatggggcctctatccacgagttctgcatcaacctgcggcagctcta

SEQ ID NO: 327746 - DNA, 120 bp, Artificial Sequence
  ENSG00000136280_9 (sequence is synthesized)
cggggacagccgcaagttcctgctgcttggtctgaggcccttcatccctgagaaggacagccagcacttcgagaacttcctggagaccattggcgtgaaggatggccgcggcatcatcac

SEQ ID NO: 327747 - DNA, 120 bp, Artificial Sequence
  ENSG00000136280_10 (sequence is synthesized)
tgacagctttggcaggcaccggcgggccctgagcaccacatccagttccaccaccaatgggaacagggccacgggcagctctgatgaccggtcggcaccctcagagggggatgagtggga

SEQ ID NO: 327748 - DNA, 120 bp, Artificial Sequence
  ENSG00000136280_11 (sequence is synthesized)
ccgcatgatctcggacatcagcagcgacattgaggcgctgggctgcagcatggaccaggactcagcatgatggacagtggatgggggggcacccacaccttccgcgcagtcgtcataggc

SEQ ID NO: 327749 - DNA, 120 bp, Artificial Sequence
  ENSG00000136280_12 (sequence is synthesized)
cttcccagaaggagctgcccagacctgcgtgtcagcccttggtggtggccagggagaggcgcccggtgcagatggccccgggcggcccaggtcctctactgtgaaggagcagggagctgc

SEQ ID NO: 327750 - DNA, 120 bp, Artificial Sequence
  ENSG00000136280_13 (sequence is synthesized)
cgagggacacgagcctcagtgcggggtggaaggctctttgccttgtccaccagggctcagccaagccctgcagtgtgtccccgctcggggagggcccggccgagcgggcagggagagcca

SEQ ID NO: 327751 - DNA, 120 bp, Artificial Sequence
  ENSG00000136280_14 (sequence is synthesized)
gtcctgtcggctgggcccttggacggctgtcagttttgcacatgatgttcctattgtaactctcagagaccttaaaaagaagtttactgcaatgtgaataatttaatctctggttgccaa

SEQ ID NO: 327752 - DNA, 120 bp, Artificial Sequence
  ENSG00000136280_15 (sequence is synthesized)
agtcatgtttttttcagagggagggctaacatctggccatatttttcaacaaattcagaagtgagtagagaatgcatagtagctgtcggcagaggaggaaccagaatctctccaaagaaa

SEQ ID NO: 327753 - DNA, 120 bp, Artificial Sequence
  ENSG00000136280_16 (sequence is synthesized)
gaagaagtgagcttggccagaggcacgctgtttaatttcaaagtgctgctgactcaaactcatgagtcctggaggcaggtagaggcacttgtaggctgaggacccgtagagcccggtgtg

SEQ ID NO: 327754 - DNA, 120 bp, Artificial Sequence
  ENSG00000136280_17 (sequence is synthesized)
ccctgcccaagccccacctgggaatggagttatctctgtaaagatcttgctgcctttgagcaagcactgcaaatggggtaactggaacagccttgtcgcgtgtttccacccttcgtatga

SEQ ID NO: 327755 - DNA, 120 bp, Artificial Sequence
  ENSG00000136280_18 (sequence is synthesized)
ggcaggtaccatgggtcttcaccaacagcacggcctgttgtctccaggaaatggtagcccctcacagtgctttctgtctgcttgtttagctttggcatttgaatgtgcagaatggtggac

SEQ ID NO: 327756 - DNA, 120 bp, Artificial Sequence
  ENSG00000136280_19 (sequence is synthesized)
tttgaaattaatgtccttctgttgactgcagaatttctgctggaaatgcagggaggctgcttgtggggttcgcgtgctgtgggaagtagggaaaatgagctggtttactttgtgtctttt

SEQ ID NO: 327757 - DNA, 120 bp, Artificial Sequence
  ENSG00000136280_20 (sequence is synthesized)
tgtgcatgcagactgtttggattttgccaacagtttctgggtgctgcctgctttttaaacttttaaaaaattgtaaacagcttcagtggctttgcagaaggaagctgtggtttctggtct

SEQ ID NO: 327758 - DNA, 120 bp, Artificial Sequence
  ENSG00000136280_21 (sequence is synthesized)
tgtttgtctaaggcaggcagactttataacagagaagtactagaaaacggattccctgtggctcagggaataaagtgggacacaagaaaaaagaaaaccgcaccgcacccagactctcgg

SEQ ID NO: 327759 - DNA, 120 bp, Artificial Sequence
  ENSG00000136280_22 (sequence is synthesized)
cccgcccctcaacagtggccgcctcctcgcgcccctccttcgccatctgccggccgcgtcccctcccgccggcccccgtcccccgtcccccgccccccgtccccttttcagagacctgag

SEQ ID NO: 327760 - DNA, 120 bp, Artificial Sequence
  ENSG00000136280_23 (sequence is synthesized)
gacctgagctccgcctccctggacgcgaggcaggctgggaagtcggccgccgtaaagatggcggcaaattgaaaaagttggagctgctcccgcgcgcgctcccgcgcgcgctgagtgggc

SEQ ID NO: 327761 - DNA, 120 bp, Artificial Sequence
  ENSG00000136280_24 (sequence is synthesized)
ggccgcgggagccgcacgcggcgatatggaagaggagggcaagaagggcaagaagactttttagcactttctccagagtaatactgagctcaatgttttgcatggagaatgcagctagaa

SEQ ID NO: 327762 - DNA, 120 bp, Artificial Sequence
  ENSG00000136280_25 (sequence is synthesized)
atactcagtagtcctgtggccagtggctgccatagggacagagcagccccaggagtctcactgtggggtttgaggtacagtttcttatggagcccttgtctctgtgcatgcgctaacttt

SEQ ID NO: 327763 - DNA, 120 bp, Artificial Sequence
  ENSG00000136280_26 (sequence is synthesized)
gcatgtggcctgggacggccttcttctccctcctgaggctggcctgccctctgacaccctggcactagtggcacttctaggttttgttttcagtcttgaagtcctcccagggtggtccga

SEQ ID NO: 327764 - DNA, 120 bp, Artificial Sequence
  ENSG00000136280_27 (sequence is synthesized)
actgatggtgagagccctgcttcctggggattggcctcacttctgccatcaggaaaaccactgagttactccatgtatttcaggagaacctcatttgtctagggaggcaatgggtaggat

SEQ ID NO: 327765 - DNA, 120 bp, Artificial Sequence
  ENSG00000136280_28 (sequence is synthesized)
gttagaaacaagggcactggggtctgaccgtctagattgccatgtggacagtgcaactcacacgccctcaggccaggcctttcactttcccatgcctcagtttacccatctgtaagaagg

SEQ ID NO: 327766 - DNA, 120 bp, Artificial Sequence
  ENSG00000136280_29 (sequence is synthesized)
gaactccccagaacacatggaaacctcctggaggtgactgttctcagggttgtatatgtggtctgttgtatatgaacttgaagcgtgtgaaactgcaggatgacatgcagctctggtgcc

SEQ ID NO: 327767 - DNA, 120 bp, Artificial Sequence
  ENSG00000136280_30 (sequence is synthesized)
cttggagctcaggggtcgcgtgttcccacccttatttagagaagcgaagtgtgtctggtgcaggcccttcacctgagtcgttctgtgggtgcctgagccaggtaaaggtcctctcagcct

SEQ ID NO: 327768 - DNA, 120 bp, Artificial Sequence
  ENSG00000136280_31 (sequence is synthesized)
cttcctaatctacaagtgaagacaggggtgatatatgcctgggttaaaggagacaaagccccagtaaccctgcctggcacatgagtgatacctcaaagacagcttttgctggctctggcc

SEQ ID NO: 327769 - DNA, 120 bp, Artificial Sequence
  ENSG00000136280_32 (sequence is synthesized)
atgggtgaatgtgtacttcagcccagcgtgcagcaggatttgcatttgccaggatccccaggaggggtgtatgtgggctcaagtctgggaagccctgccctgaggcacacagcacattcc

SEQ ID NO: 327770 - DNA, 120 bp, Artificial Sequence
  ENSG00000136280_33 (sequence is synthesized)
agatggggaagaatggaaggtaccccagagctgtctcttcctgcatggcccacacagcattttcaggagtctgttagtccattgaaaacacttcatcagcaagctcacttgagttaagtc

SEQ ID NO: 327771 - DNA, 120 bp, Artificial Sequence
  ENSG00000136280_34 (sequence is synthesized)
ttgagttaagtcttcaaaaacatcatctgtttttcagatgtattacttattgaggattaatgggttatataaattgaggtgcataaaaagctgttggaggctgggtgtggtggctcatgc

SEQ ID NO: 327772 - DNA, 65 bp, Artificial Sequence
  ENSG00000136280_35 (sequence is synthesized)
caagaaaaaaaaaaaggctgttggaaacagtgcggcttgttgagtacaatttcttctttttacgg

SEQ ID NO: 327773 - DNA, 120 bp, Artificial Sequence
  ENSG00000136280_36 (sequence is synthesized)
aacagtgcggcttgttgagtacaatttcttctttttacggagataagtcccagccctctgccctttccccagtaactcgcacatctcagtgaagagagtaaatggtggagaagcctgtgc

SEQ ID NO: 327774 - DNA, 120 bp, Artificial Sequence
  ENSG00000136280_37 (sequence is synthesized)
tggtgtgagggctgctcctcagtgcctccttcttccctttcttgctgctggtgccagagccctttgtgggcactacacgccttgtgttggcccagcagctgcagagagacagctgctgag

SEQ ID NO: 327775 - DNA, 120 bp, Artificial Sequence
  ENSG00000136280_38 (sequence is synthesized)
ctctcaggcatcctctctatctcatttagtcctcggtggcccagcgagataggtgcaatcttcatccccattttagagatggggaagtggaggcttagaagtcaacagcttatccagagg

SEQ ID NO: 327776 - DNA, 120 bp, Artificial Sequence
  ENSG00000136280_39 (sequence is synthesized)
gcctctaccccgacccaccacctgtccctgcacagcgatgactcttctacaaaagtggacattaaggagacctacgaggtggaagccagcactttgtgagtgcacatgccaccaagccct

SEQ ID NO: 327777 - DNA, 120 bp, Artificial Sequence
  ENSG00000136280_40 (sequence is synthesized)
gcggtgggacacgcaccaaatgcgttgtctggtgttgtccaggctgcagccagtcagctcccccatctcagctcaccctcgctaagccatccccagacccactgtacccagcttagtgaa

SEQ ID NO: 327778 - DNA, 120 bp, Artificial Sequence
  ENSG00000136280_41 (sequence is synthesized)
tggctgaggcctggctcgccgccctctcctcgtagacttctagagcccttgctgtccctcttgtctctccctgcctaccttcccatggcctcccaagagtgagcttgtaataggcatgtt

SEQ ID NO: 327779 - DNA, 120 bp, Artificial Sequence
  ENSG00000136280_42 (sequence is synthesized)
ggatggagctgttcccctgcccgagcctgccgaggcgctggccttccagcccatctctgccaccacctggggctctgtagtagttcacccactcgcgctctccattcctgccacctcccc

SEQ ID NO: 327780 - DNA, 120 bp, Artificial Sequence
  ENSG00000136280_43 (sequence is synthesized)
aaccctggctccttcccctgcccaacaatgctgcccactgccttgacctgtgtactccctctcttcactcagagcccaactcagagccatgcccccggggagccccaggaccaggccaag

SEQ ID NO: 327781 - DNA, 120 bp, Artificial Sequence
  ENSG00000136280_44 (sequence is synthesized)
ccttgtgctttaaaattcccaaagggcctttttttctttaataattttttttttactgagaagtacacaagtcatacatgtacagttgaatgaattttcataaagtaaacacatcatgta

SEQ ID NO: 327782 - DNA, 120 bp, Artificial Sequence
  ENSG00000136280_45 (sequence is synthesized)
acaccactactgggggttgctgaagtgggcttcttcccctgccagcctttcccaagacctccccgtgggatccacacacagatgtgcacacgttacgcacatgcatgcattctctgctta

SEQ ID NO: 327783 - DNA, 120 bp, Artificial Sequence
  ENSG00000136280_46 (sequence is synthesized)
tttctgccttggagttttgcttgctgtgttctctctactacagctatgccaaaacatagcagcataaacagcagaaatatattctcttataattctatacgttaagagtccattgtgggt

SEQ ID NO: 327784 - DNA, 120 bp, Artificial Sequence
  ENSG00000136280_47 (sequence is synthesized)
cccactgggctaaagttgaggtgtccacagggctggttccttctggaggctccagagaagaagccatttccttgtctttccagctcctaaaggcggctgcatgccttggctcatggccct

SEQ ID NO: 327785 - DNA, 120 bp, Artificial Sequence
  ENSG00000136280_48 (sequence is synthesized)
tcctctgtcttcacagccagccacgtgacctcttccacagtcacatcttcctttgactgtcagcttcctctgcatttcaggactcttgcaatcacattgagcccacccaaattctccagg

SEQ ID NO: 327786 - DNA, 120 bp, Artificial Sequence
  ENSG00000136280_49 (sequence is synthesized)
cccccagctccccatgagttactcctggaatagcgcagttactgccgtgacatggtggccttttgtttccagactttgctgttcacattagcccatagggtttcatgaaggcagaagtgt

SEQ ID NO: 327787 - DNA, 120 bp, Artificial Sequence
  ENSG00000136280_50 (sequence is synthesized)
cacctgtccttgagagagttgcaccaggtcagcgctatggcttcctggaataaatttggggtctgtgaacacttttttggaaccacttgtggctaaagtcacttcacttaactcggaaca

SEQ ID NO: 327788 - DNA, 120 bp, Artificial Sequence
  ENSG00000136280_51 (sequence is synthesized)
aagagcttggagaaggctcctagcactggggcctgtgatggaattggggaggctgagagtgggtctggggagcctccttttcagtatgcccagactatggctgctcttaatgtgaaactc

SEQ ID NO: 327789 - DNA, 120 bp, Artificial Sequence
  ENSG00000136280_52 (sequence is synthesized)
tgtggacgtctttggggggtcattattctgccctccatacttaccttgttcctagtgccagaaatgtcccttttatctctcagcctctccctctgcttcatttaaaatcttaccctctct

SEQ ID NO: 327790 - DNA, 120 bp, Artificial Sequence
  ENSG00000136280_53 (sequence is synthesized)
gcaacactcacctgcctcgctcacaaagctttcactcactgtctgtgctggtgtgaaatgtgccttcctcaggtttgaaatagcaaattacagtctgtgtcacacggacctaatgtcatt

SEQ ID NO: 327791 - DNA, 120 bp, Artificial Sequence
  ENSG00000136280_54 (sequence is synthesized)
tgttgaatgtagctgctcagtgccagaccctttgctggtctgagggtcttgggaatcctgtggcttcactgggttcagatggggagtcagactgcccggctctgactgtggtttctgctg

SEQ ID NO: 327792 - DNA, 120 bp, Artificial Sequence
  ENSG00000136280_55 (sequence is synthesized)
tgtgggatggagggtcggggaagccacccgctcacataccacattctttcgcagctgcttccctgaatctgtggatgtgggtggtgcatcaccccacagcaagaccatcagtgagagcga

SEQ ID NO: 327793 - DNA, 120 bp, Artificial Sequence
  ENSG00000136280_56 (sequence is synthesized)
gctgagcgccagcgccactgagctgctgcaggactacatgctgacggtaggcctccgctgcagggacgctgggctgcatgagggagggggtgccccagggaggatggggggaaggggagg

SEQ ID NO: 327794 - DNA, 120 bp, Artificial Sequence
  ENSG00000136280_57 (sequence is synthesized)
aggaggaggagcagtgcagggcaggctgcagtgagtgaggtcacctagagcactcttggtcaattttgctgacatcactgccttttcctggggatagtctaggagagcatcagtcagtgg

SEQ ID NO: 327795 - DNA, 120 bp, Artificial Sequence
  ENSG00000136280_58 (sequence is synthesized)
ggctgagttgggagtgctgtggccgtcagggctggactgtgggcctgtgcttgggtcctgggggaggggagggaacggtggcccctgcaaggccacatggccagacatttttatcctccc

SEQ ID NO: 327796 - DNA, 120 bp, Artificial Sequence
  ENSG00000136280_59 (sequence is synthesized)
catcttatatagttctgtcattgcaaactcaagtcttcctgatttgcctgtgtgcctgtgtgtagcctaagggcacaggcattggccccgggccaggttgccaacttccaccctgccctg

SEQ ID NO: 327797 - DNA, 120 bp, Artificial Sequence
  ENSG00000136280_60 (sequence is synthesized)
ctggctcctgtccctcccatgcactctgtgttccagctcaggagagtggagctgcccgggtgccttggtctcctctgggtggccccgtgccaggtctggtaggatggggacacattgtgg

SEQ ID NO: 327798 - DNA, 120 bp, Artificial Sequence
  ENSG00000136280_61 (sequence is synthesized)
tcattctgatgccccagcctgtgcagaggtgaagccagagacagctggtgctctggctggggttagtggctgtggcaaggtgggcccgactgccgactcttgcctactgtgcccagcccc

SEQ ID NO: 327799 - DNA, 120 bp, Artificial Sequence
  ENSG00000136286_0 (sequence is synthesized)
actgtccttccagcaggcacaggaaggtgaggcaaggtgtttccagccggcaggatggaggacgaggaaggccctgagtatggcaaacctgactttgtgcttttggaccaagtgaccatg

SEQ ID NO: 327800 - DNA, 120 bp, Artificial Sequence
  ENSG00000136286_1 (sequence is synthesized)
gaggacttcatgaggaacctgcagctcaggttcgagaagggccgcatctacacctacatcggtgaggtgctggtgtccgtgaacccctaccaggagctgcccctgtatgggcctgaggcc

SEQ ID NO: 327801 - DNA, 120 bp, Artificial Sequence
  ENSG00000136286_2 (sequence is synthesized)
atcgccaggtaccagggccgtgagctctatgagcggccaccccatctctatgctgtggccaacgccgcctacaaggcaatgaagcaccggtccagggacacctgcatcgtcatctcaggg

SEQ ID NO: 327802 - DNA, 120 bp, Artificial Sequence
  ENSG00000136286_3 (sequence is synthesized)
gagagtggggcagggaagacagaagccagtaagcacatcatgcagtacatcgctgctgtcaccaatccaagccagagggctgaggtggagagggtcaaggacgtgctgctcaagtccacc

SEQ ID NO: 327803 - DNA, 120 bp, Artificial Sequence
  ENSG00000136286_4 (sequence is synthesized)
tgtgtgctggaggcctttggcaatgcccgcaccaaccgcaatcacaactccagccgctttggcaagtacatggacatcaactttgacttcaagggggacccgatcggaggacacatccac

SEQ ID NO: 327804 - DNA, 120 bp, Artificial Sequence
  ENSG00000136286_5 (sequence is synthesized)
agctacctactggagaagtctcgggtcctcaagcagcacgtgggtgaaagaaacttccacgccttctaccaattgctgagaggcagtgaggacaagcagctgcatgaactgcacttggag

SEQ ID NO: 327805 - DNA, 120 bp, Artificial Sequence
  ENSG00000136286_6 (sequence is synthesized)
agaaaccctgctgtatacaatttcacacaccagggagcaggactcaacatgactgtgcacagtgccttggacagtgatgagcagagccaccaggcagtgaccgaggccatgagggtcatc

SEQ ID NO: 327806 - DNA, 120 bp, Artificial Sequence
  ENSG00000136286_7 (sequence is synthesized)
ggcttcagtcctgaagaggtggagtctgtgcatcgcatcctggctgccatattgcacctgggaaacatcgagtttgtggagacggaggagggtgggctgcagaaggagggcctggcagtg

SEQ ID NO: 327807 - DNA, 120 bp, Artificial Sequence
  ENSG00000136286_8 (sequence is synthesized)
gccgaggaggcactggtggaccatgtggctgagctgacggccacaccccgggacctcgtgctccgctccctgctggctcgcacagttgcctcgggaggcagggaactcatagagaagggc

SEQ ID NO: 327808 - DNA, 120 bp, Artificial Sequence
  ENSG00000136286_9 (sequence is synthesized)
cacactgcagctgaggccagctatgcccgggatgcctgtgccaaggcagtgtaccagcggctgtttgagtgggtggtgaacaggatcaacagtgtcatggaaccccggggccgggatcct

SEQ ID NO: 327809 - DNA, 120 bp, Artificial Sequence
  ENSG00000136286_10 (sequence is synthesized)
cggcgtgatggcaaggacacagtcattggcgtgctggacatctatggcttcgaggtgtttcccgtcaacagtttcgagcagttctgcatcaactactgcaacgagaagctgcagcagcta

SEQ ID NO: 327810 - DNA, 120 bp, Artificial Sequence
  ENSG00000136286_11 (sequence is synthesized)
ttcatccagctcatcctgaagcaggaacaggaagagtacgagcgcgagggcatcacctggcagagcgttgagtatttcaacaacgccaccattgtggatctggtggagcggccccaccgt

SEQ ID NO: 327811 - DNA, 120 bp, Artificial Sequence
  ENSG00000136286_12 (sequence is synthesized)
ggcatcctggccgtgctggacgaggcctgcagctctgctggcaccatcactgaccgaatcttcctgcagaccctggacatgcaccaccgccatcacctacactacaccagccgccagctc

SEQ ID NO: 327812 - DNA, 120 bp, Artificial Sequence
  ENSG00000136286_13 (sequence is synthesized)
gtactccgtggaaggcttcatcgacaagaacagagatttcctcttccaggacttcaagcggctgctgtacaacagcacggaccccactctacgggccatgtggccggacgggcagcagga

SEQ ID NO: 327813 - DNA, 120 bp, Artificial Sequence
  ENSG00000136286_14 (sequence is synthesized)
catcacagaggtgaccaagcgccccctgacggctggcacactcttcaagaactccatggtggccctggtggagaaccttgcctccaaggagcccttctacgtccgctgcatcaagcccaa

SEQ ID NO: 327814 - DNA, 120 bp, Artificial Sequence
  ENSG00000136286_15 (sequence is synthesized)
tgaggacaaggtagctgggaagctggatgagaaccactgtcgccaccaggtcgcatacctggggctgctggagaatgtgagggtccgcagggctggcttcgcttcccgccagccctactc

SEQ ID NO: 327815 - DNA, 120 bp, Artificial Sequence
  ENSG00000136286_16 (sequence is synthesized)
tcgattcctgctcaggtacaagatgacctgtgaatacacatggcccaaccacctgctgggctccgacaaggcagccgtgagcgctctcctggagcagcacgggctgcagggggacgtggc

SEQ ID NO: 327816 - DNA, 120 bp, Artificial Sequence
  ENSG00000136286_17 (sequence is synthesized)
ctttggccacagcaagctgttcatccgctcaccccggacactggtcacactggagcagagccgagcccgcctcatccccatcattgtgctgctattgcagaaggcatggcggggcacctt

SEQ ID NO: 327817 - DNA, 120 bp, Artificial Sequence
  ENSG00000136286_18 (sequence is synthesized)
ggcgaggtggcgctgccggaggctgagggctatctacaccatcatgcgctggttccggagacacaaggtgcgggctcacctggctgagctgcagcggcgattccaggctgcaaggcagcc

SEQ ID NO: 327818 - DNA, 120 bp, Artificial Sequence
  ENSG00000136286_19 (sequence is synthesized)
gccactctacgggcgtgaccttgtgtggccgctgccccctgctgtgctgcagcccttccaggacacctgccacgcactcttctgcaggtggcgggcccggcagctggtgaagaacatccc

SEQ ID NO: 327819 - DNA, 120 bp, Artificial Sequence
  ENSG00000136286_20 (sequence is synthesized)
cccttcagacatgccccagatcaaggccaaggtggccgccatgggggccctgcaagggcttcgtcaggactggggctgccgacgggcctgggcccgagactacctgtcctctgccactga

SEQ ID NO: 327820 - DNA, 120 bp, Artificial Sequence
  ENSG00000136286_21 (sequence is synthesized)
caatcccacagcatcaagcctgtttgctcagcgactaaagacacttcaggacaaagatggcttcggggctgtgctcttttcaagccatgtccgcaaggtgaaccgcttccacaagatccg

SEQ ID NO: 327821 - DNA, 120 bp, Artificial Sequence
  ENSG00000136286_22 (sequence is synthesized)
gaaccgggccctcctgctcacagaccagcacctctacaagctggaccctgaccggcagtaccgggtgatgcgggccgtgccccttgaggcggtgacggggctgagcgtgaccagcggagg

SEQ ID NO: 327822 - DNA, 120 bp, Artificial Sequence
  ENSG00000136286_23 (sequence is synthesized)
agaccagctggtggtgctgcacgcccgcggccaggacgacctcgtggtgtgcctgcaccgctcccggccgccattggacaaccgcgttggggagctggtgggcgtgctggccgcacactg

SEQ ID NO: 327823 - DNA, 120 bp, Artificial Sequence
  ENSG00000136286_24 (sequence is synthesized)
ccagggggagggccgcaccctggaggttcgcgtctccgactgcatcccactaagccatcgcggggtccggcgcctcatctccgtggagcccaggccggagcagccagagcccgatttccg

SEQ ID NO: 327824 - DNA, 120 bp, Artificial Sequence
  ENSG00000136286_25 (sequence is synthesized)
ctgcgctcgcggctccttcaccctgctctggcccagccgctgagcgcccgcacccgccgcaccccgaggccgccaattgtccgccccgccagcgctgcaaataaaccttctgagtcagcc

SEQ ID NO: 327825 - DNA, 120 bp, Artificial Sequence
  ENSG00000136286_26 (sequence is synthesized)
ccaggggtgagtgcaggctgggcggtagcgggcacgaagccccggccgcgtggccgccctgacccctcctcctgccgcagggagggccgcaccctggaggttcgcgtctccgactgcatc

SEQ ID NO: 327826 - DNA, 120 bp, Artificial Sequence
  ENSG00000136286_27 (sequence is synthesized)
cccatcactccatgggccatagtccctgtgtggagtccaaggggtaggagcagagggtccccaaacagcacgtcgcaaacatcgatacaagcaggaaccagcacgctgctggcctcaaga

SEQ ID NO: 327827 - DNA, 120 bp, Artificial Sequence
  ENSG00000136286_28 (sequence is synthesized)
caccaaaatatctgggaagacatgtgtgtgagcacatgcatgtggggacatacaggtgggaacatgggtatgagggctgtgtgaggacatgtatgtgaggacatgtgtatgggaagacat

SEQ ID NO: 327828 - DNA, 120 bp, Artificial Sequence
  ENSG00000136286_29 (sequence is synthesized)
atgtgcacaggtgtcataagtgctccaggaacacactctgtatccctgccatctccccaggtgtggggtgggcagggtgggctccatcatctctcccccaggcctgggccacactgccct

SEQ ID NO: 327829 - DNA, 120 bp, Artificial Sequence
  ENSG00000136286_30 (sequence is synthesized)
catgtgtcatggggcaggagcgcttcaggggagtggctcggagacaggtgttatggccacttctgccacccccacccctttaagacactgaaacatgccggacagcagattcacaagtga

SEQ ID NO: 327830 - DNA, 120 bp, Artificial Sequence
  ENSG00000136286_31 (sequence is synthesized)
agagcaggaaacagggtttgaggatagtggttaaccatggctgcattcttctgggagcctttaaaaaatacccacgtctcatgtctgggcccaaccctataccagcatctgtggggtggg

SEQ ID NO: 327831 - DNA, 120 bp, Artificial Sequence
  ENSG00000136286_32 (sequence is synthesized)
gggcttcaggctggtgatgtgggggtggggagggagtggaaggtgcaggggggccaagattctgcatttctaacaagctcccaggtgaggcctcgctaccatacttggaccacgctccca

SEQ ID NO: 327832 - DNA, 120 bp, Artificial Sequence
  ENSG00000136286_33 (sequence is synthesized)
gtgccaaagcccaggtgtcttcaggggttgtcatgatggctattaacttatgtgttgcttgccgcatcccaaaacgatttaaggtgactcacatcaaggtataagtgtttcatgagaact

SEQ ID NO: 327833 - DNA, 120 bp, Artificial Sequence
  ENSG00000136286_34 (sequence is synthesized)
tctcaaggagagggaatagaatagatgatgacaacaaagcagcccaatatcatctacctttatctgttcgcaaaatctacacccatgaggtcgctcatgcctgtaaccccagcactttgg

SEQ ID NO: 327834 - DNA, 83 bp, Artificial Sequence
  ENSG00000136286_35 (sequence is synthesized)
gtactaaaaatataaaaattatccgggcacgatgacgcgtgcctgtaatgccagttgctcgggaggctgaggcacaagaactg

SEQ ID NO: 327835 - DNA, 89 bp, Artificial Sequence
  ENSG00000136286_36 (sequence is synthesized)
tatccgggcacgatgacgcgtgcctgtaatgccagttgacctgggaggtagaggttgtggcgaactgagatcgcaccactgcactccag

SEQ ID NO: 327836 - DNA, 120 bp, Artificial Sequence
  ENSG00000136286_37 (sequence is synthesized)
accagcttgtgacccttccatcactaccccaattccccctctctgcccactcaaccccacctagcccatcgtcctcactccccaccacactcaccccaaccagtaccccacaccccacaa

SEQ ID NO: 327837 - DNA, 120 bp, Artificial Sequence
  ENSG00000136286_38 (sequence is synthesized)
acaagagggtgtgacttgcagggaacaaaagcaggatgtcccctttatctgagacacctccagatgagggctctctgggacccataagtgtctctgtgaacaataagctccccacgaggt

SEQ ID NO: 327838 - DNA, 120 bp, Artificial Sequence
  ENSG00000136286_39 (sequence is synthesized)
gggcttcccctgggattacaggcagtgtctctagtggtatcagagctcaacactgaagtggtgctcctggggacacgggcattgactctgagcacctctgtgagataggcgcgcccaggg

SEQ ID NO: 327839 - DNA, 120 bp, Artificial Sequence
  ENSG00000136286_40 (sequence is synthesized)
actgtctccacaagctttgacaccccactgaggtgggagctccctggaaacaaacagtgtctctgcagtctcagagcttgacactgaagtggagctccctggcacgccagcggtgtgttt

SEQ ID NO: 327840 - DNA, 120 bp, Artificial Sequence
  ENSG00000136286_41 (sequence is synthesized)
gcaaactgtggcctgcccactgtgtcctctggttcacagacagtgtttccacagactccgaactcccccactgaactgggagcaccctatgactggagcagtgtctctagggacttggag

SEQ ID NO: 327841 - DNA, 120 bp, Artificial Sequence
  ENSG00000136286_42 (sequence is synthesized)
ctccccactgagttaggagttccctgcagcacagacatggtccccaccaactctcagctccccagtgcagtgggagctccctggaacacagcagtttctccctggtacacaggcggtgtt

SEQ ID NO: 327842 - DNA, 120 bp, Artificial Sequence
  ENSG00000136286_43 (sequence is synthesized)
tccatggattctgagctctttactgaggtgggagctccctgagacaagcacagtgtctcacagactctgtgctccccatgagacaggagctccctgggtagcgggcagggtctccagggt

SEQ ID NO: 327843 - DNA, 120 bp, Artificial Sequence
  ENSG00000136286_44 (sequence is synthesized)
ctatgaaccgcccgctgaggtgggagcctcctgggatgcaaggagtgcctttaaggactctgagcttccatggtgtggtgctccctgggacacggcagtgtcttcacgactctgacttcc

SEQ ID NO: 327844 - DNA, 120 bp, Artificial Sequence
  ENSG00000136286_45 (sequence is synthesized)
cactgaagtcacactctctgggacacagcagtgtctgtaaggactctgaactccactgaggtgggagccccctgggctgtctttccagtgagtctgcactgaggtgggagctcactggga

SEQ ID NO: 327845 - DNA, 120 bp, Artificial Sequence
  ENSG00000136286_46 (sequence is synthesized)
aaccagtagtgtctctgtggactctgacctttatttgaggtaaaagctccctgagacactggcagtgtctccacagactctgagcctccccctggtgggagcccctgggaacacagaggg

SEQ ID NO: 327846 - DNA, 120 bp, Artificial Sequence
  ENSG00000136286_47 (sequence is synthesized)
cgtctccacagactctgagctctcactgaaatgaagctccctgggactccggcaggatctccacagactcttacctccccactgaaatgggagattttgggacatgggcagggtctccat

SEQ ID NO: 327847 - DNA, 120 bp, Artificial Sequence
  ENSG00000136286_48 (sequence is synthesized)
ggactcagagttcccccattgaagggggagttcggtggcacatgggcattgtctctaatgactctgagctcctggctgaggggattgctccctgggacgttgccagggtctccacagact

SEQ ID NO: 327848 - DNA, 120 bp, Artificial Sequence
  ENSG00000136286_49 (sequence is synthesized)
ctgagctccccatgaggtgggagctccacaggatttgggcagggtctccatgaactataaactctccactgaggtgggagctccctgggacacagagagtttttttcagactctgaactc

SEQ ID NO: 327849 - DNA, 120 bp, Artificial Sequence
  ENSG00000136286_50 (sequence is synthesized)
ccatgaaatggagctctttggagcatggacagtgtctttaaggactctgagctacccaccgaggtgggagctcagtgggacatgtgaagcagtgtctccacggactctgggctgcccact

SEQ ID NO: 327850 - DNA, 120 bp, Artificial Sequence
  ENSG00000136286_51 (sequence is synthesized)
caggtgggctgtgtcttggacacaggcagtgtctctatcaactttgggctctgctctgaggtaagagccccctgggacaggggcactatctccttggactttgaactcccaccaaagtgg

SEQ ID NO: 327851 - DNA, 120 bp, Artificial Sequence
  ENSG00000136286_52 (sequence is synthesized)
agctcactgggacagtggcaacgtctccacggattctgagctcccgctgaagtggagctccctgggaatcagtcagtgtccaagaactctgagcttccctgaggtgggagccctctggaa

SEQ ID NO: 327852 - DNA, 120 bp, Artificial Sequence
  ENSG00000136286_53 (sequence is synthesized)
cacaaggagtgtccacgcagactctgagtttccatgaagtagggctgtctgggacactggcggtgtctctatggtctctgagctcctcacggagctgggagctccctcggacatgggcga

SEQ ID NO: 327853 - DNA, 120 bp, Artificial Sequence
  ENSG00000136286_54 (sequence is synthesized)
tggaagctctctgcgacatgaccattgtctctgtggaatctgagcttcccactagtgggagccccttgggacacagggcagggtctccacagactctaagctcccactgaagtggagctc

SEQ ID NO: 327854 - DNA, 120 bp, Artificial Sequence
  ENSG00000136286_55 (sequence is synthesized)
tctggaataacagcaggatctccacagactcttaccacctccagtgaagtgggaacttttgggacacaggcagtgtctccatggactctgagctccctgctgaggtgggagttcatgtgg

SEQ ID NO: 327855 - DNA, 120 bp, Artificial Sequence
  ENSG00000136286_56 (sequence is synthesized)
caccagttgtgtctccacagacgctgagctccctaggacatgggctctccctgggtggagagcaatgtctccacggaacctgtgctccctactgaggtgggagcttcctgggacaggggc

SEQ ID NO: 327856 - DNA, 120 bp, Artificial Sequence
  ENSG00000136286_57 (sequence is synthesized)
agggtctccagtaactctgagctcccactgaagtggagctccctaggattctgcagtttgtccacaaactcttacctcctcactcagtgggaggttttgggacccgggtagtgtctccac

SEQ ID NO: 327857 - DNA, 120 bp, Artificial Sequence
  ENSG00000136286_58 (sequence is synthesized)
atactctgagctacccactgaggtgggatccccctgggtcgagggcaatgtctccacagggactgagctccctaccaagatgaggtctggcacaagaacagtgacttcatggtggagtca

SEQ ID NO: 327858 - DNA, 120 bp, Artificial Sequence
  ENSG00000136286_59 (sequence is synthesized)
tagctcccactgaagtggagctccctgacccactgaacagctgaatggggagcttgctggcacacagaaactgttcacactgtctgaccttcccccacgtttgttcgttcaatactggaa

SEQ ID NO: 327859 - DNA, 120 bp, Artificial Sequence
  ENSG00000136286_60 (sequence is synthesized)
ggaagcgcaagtctgtttgttctcctgcctgtgtgtgtgtacagggggacatcctgggagcttatttgtctaaaggatgcctgtgtcctctagttgctgagaggcagtgaggacaagcag

SEQ ID NO: 327860 - DNA, 120 bp, Artificial Sequence
  ENSG00000136286_61 (sequence is synthesized)
tggtgccattgtcgtcactgtggcaaccttctctgccctggaggtggggaggcagggctatcccttcatacagaccctccacataccttttgtgccttgacctcagcctgtccccatagc

SEQ ID NO: 327861 - DNA, 120 bp, Artificial Sequence
  ENSG00000136286_62 (sequence is synthesized)
cccttgaggcggtgagcaatgtgggtggggagtagggtgcagcatctgtgaggggcactgctgggctgctcagagtcctgcctcagtcttctctcccctgtttacctgagatggcccaga

SEQ ID NO: 327862 - DNA, 120 bp, Artificial Sequence
  ENSG00000136286_63 (sequence is synthesized)
ccatcctaaaactcagcgatggtggcacccgtgctgaaaatcctgcagtggcttcccacgcccacagagtgaaaggtcccatcctgtgatccccaccagcccagtcaccccccaccccca

SEQ ID NO: 327863 - DNA, 120 bp, Artificial Sequence
  ENSG00000136286_64 (sequence is synthesized)
ctctcacactctagccaagccaaatggtcccctcttccaacttgtgcccaactggggttctcccacctgggcattctgggacctgagtacccaccacaatgttctgggcctcctgtggga

SEQ ID NO: 327864 - DNA, 120 bp, Artificial Sequence
  ENSG00000136286_65 (sequence is synthesized)
taccgtcccggccactccggaaccttctgccgagctctgtggcctacttgctcccttcattagcagctgctgttcccataaattctctttcccacaagacgggggtagggatcaaggcca

SEQ ID NO: 327865 - DNA, 120 bp, Artificial Sequence
  ENSG00000136286_66 (sequence is synthesized)
ggctacctctgggtctcccacagtttcaggggtcccatgactgtcccaatagaaagggcggtgagtgccttgctgtgtaatgccacagcccaaagccggcgtggttgtttaaatgcagtg

SEQ ID NO: 327866 - DNA, 120 bp, Artificial Sequence
  ENSG00000136286_67 (sequence is synthesized)
aaagtgacctagaactaaaaacggctcctccaggcagtagcacatgcaagggcttagcatccacaggtgagcagtggcggccctgttggacagcaaggatctagaaccatcagtcctgga

SEQ ID NO: 327867 - DNA, 120 bp, Artificial Sequence
  ENSG00000136286_68 (sequence is synthesized)
gaaaatcgtattgtgcagcgtcccgcccaagcttccccctgtcagcagggccccgagagggaggagggggcggtggggggctggtggccctggcgagggcggcgctccccgggtgcggtt

SEQ ID NO: 327868 - DNA, 120 bp, Artificial Sequence
  ENSG00000136286_69 (sequence is synthesized)
gggggttcggcagaggcttcctggggagggggtgagtccggctaggctggggtgcgggttgaggcggctgcactctgaccccgcgctccgctcaggtgacggggctgagcgtgaccagcg

SEQ ID NO: 327869 - DNA, 80 bp, Artificial Sequence
  ENSG00000136295_0 (sequence is synthesized)
ggcccaggagcgcgcggatgatgcgggcggccaggcgggggtcgacgggtccctgaagcccgcgccccgggccagcaagg

SEQ ID NO: 327870 - DNA, 120 bp, Artificial Sequence
  ENSG00000136295_1 (sequence is synthesized)
ggccgcgcgcatccggaggcggccgggccccgccatggccggggtcagctacgcggcgccctggtgggtgagcctcctgcaccggctgccccacttcgacctgagctgggaggccactag

SEQ ID NO: 327871 - DNA, 120 bp, Artificial Sequence
  ENSG00000136295_2 (sequence is synthesized)
gctgggaggccactagcagccagttccggcccgaggacaccgactaccagcaggccctgctgctcctgggggccgccgccctggcctgcctcgccctggacctcctcttcctgctcttct

SEQ ID NO: 327872 - DNA, 120 bp, Artificial Sequence
  ENSG00000136295_3 (sequence is synthesized)
actccttctggctgtgctgccggcggcgcaagagcgaggagcacctggacgccgactgctgctgcacggcctggtgtgtcatcatcgccacgctggtgtgcagcgccggcatcgcagtgg

SEQ ID NO: 327873 - DNA, 120 bp, Artificial Sequence
  ENSG00000136295_4 (sequence is synthesized)
gattctacggcaacggggagaccagtgatggcatccatagggccacctactcgctccgccacgccaaccgcacggtggccggggtccaggaccgcgtgtgggacacggcggtggggctga

SEQ ID NO: 327874 - DNA, 120 bp, Artificial Sequence
  ENSG00000136295_5 (sequence is synthesized)
accacacggcggagcccagcctgcagaccctggagcggcagctggccgggcggcccgagcccctgcgagccgtacagaggctgcagggcctgctggagacgctgctgggctacacggccg

SEQ ID NO: 327875 - DNA, 120 bp, Artificial Sequence
  ENSG00000136295_6 (sequence is synthesized)
ccatccccttttggaggaacacggcggtgtcgctggaggtgctggcggagcaggtggatctctacgactggtacaggtggctgggctacctgggcctgctgctgctggacgtcatcatct

SEQ ID NO: 327876 - DNA, 120 bp, Artificial Sequence
  ENSG00000136295_7 (sequence is synthesized)
gcctcctggtgctggttggcctcatccgcagctccaagggcatcctggtgggggtctgcctgctgggagtcctggccctggtcatcagctggggcgcgctgggcttggagctggctgtgt

SEQ ID NO: 327877 - DNA, 120 bp, Artificial Sequence
  ENSG00000136295_8 (sequence is synthesized)
ccgtgggctccagcgacttctgtgtggaccctgacgcctacgtgaccaaaatggtggaggagtactcggtgctgagtggggacatcctgcagtactacctggcctgctcgccccgcgccg

SEQ ID NO: 327878 - DNA, 120 bp, Artificial Sequence
  ENSG00000136295_9 (sequence is synthesized)
ccaaccccttccagcagaagctgtcgggcagccacaaggcactggtggagatgcaggatgtcgtggctgagcttctgaggaccgtcccctgggagcagccggccactaaggaccccctcc

SEQ ID NO: 327879 - DNA, 120 bp, Artificial Sequence
  ENSG00000136295_10 (sequence is synthesized)
tccgcgtccaggaggtgctgaatggcacggaggtgaacctgcagcacctcaccgccctggtggactgccgcagcctgcatctggactacgtgcaagcgctgaccggcttctgctatgacg

SEQ ID NO: 327880 - DNA, 120 bp, Artificial Sequence
  ENSG00000136295_11 (sequence is synthesized)
gcgtggagggcctcatctacctggccctcttctccttcgtcacagccctcatgttcagctccatcgtctgcagcgtcccgcacacctggcagcaaaagagaggccctgatgaggacgggg

SEQ ID NO: 327881 - DNA, 120 bp, Artificial Sequence
  ENSG00000136295_12 (sequence is synthesized)
aggaggaggccgctccagggccgcggcaggcgcacgacagcctctaccgcgtccacatgcccagcctgtacagctgtggcagcagctacggcagtgagaccagcatcccggccgcggccc

SEQ ID NO: 327882 - DNA, 120 bp, Artificial Sequence
  ENSG00000136295_13 (sequence is synthesized)
acaccgtcagcaacgccccggtcactgagtacatgagccagaacgctaatttccagaacccccgctgtgagaacaccccactcattgggcgcgagtccccgccgccctcatacacctcca

SEQ ID NO: 327883 - DNA, 120 bp, Artificial Sequence
  ENSG00000136295_14 (sequence is synthesized)
gcatgagagccaaatacctcgccacgagccagcctcgccctgactccagcggcagccactagaccgcgcccggcagccacccaccccacgtgccaacttcccctccccgtgccagcactg

SEQ ID NO: 327884 - DNA, 120 bp, Artificial Sequence
  ENSG00000136295_15 (sequence is synthesized)
ccgcttccacctgggccacccaccggaccctcgcacgccgtgccaggcctgccccagacgcgtctgcaggccgcttgccctcctgtcccctccccgcaggggcacagtggagacgcaggg

SEQ ID NO: 327885 - DNA, 120 bp, Artificial Sequence
  ENSG00000136295_16 (sequence is synthesized)
gctctgggcccgtaccgccaactcgggtcacacctgaacgctgctgccagccgatgccccagccctgcacgccacccactatcccggcacgctccctctgcagatggtcgccgcacctac

SEQ ID NO: 327886 - DNA, 120 bp, Artificial Sequence
  ENSG00000136295_17 (sequence is synthesized)
aagccctggccgcacccaacctgtgttgttgccgcccggcccttccctccacagctctccttcctcccgcccggcacttctgtggaccccttcttagttcacaggcacggctggggccgc

SEQ ID NO: 327887 - DNA, 120 bp, Artificial Sequence
  ENSG00000136295_18 (sequence is synthesized)
tctgtgctggcgcctgctggccactgagggacagggacacgtgccacctgctcatctctgccctgaggtcaccccgtggtccctccacgtgcccatctctctgcagtgccctcctcgcct

SEQ ID NO: 327888 - DNA, 120 bp, Artificial Sequence
  ENSG00000136295_19 (sequence is synthesized)
gtgcagcccgcccacccacaggctcacccctcctgccggctgccagaggccccctccagcagggcctctctccgttgccccagcttcactctctccctcagcacctgccctgctggaggc

SEQ ID NO: 327889 - DNA, 120 bp, Artificial Sequence
  ENSG00000136295_20 (sequence is synthesized)
ccctccgtggacagcaggggccacgtggagcccgggccgctcacccgccacccagtgctggccgccttcttggtgccaaacccccttcccccacccagagactgggcagctgtgtctggt

SEQ ID NO: 327890 - DNA, 120 bp, Artificial Sequence
  ENSG00000136295_21 (sequence is synthesized)
tcgttctttgcactaaccacatttgtcatctctagggcaggctggggctgcgggctgagggggaccgctggcaccccccttccctcccttcttggttccatttccatccatgacaggtac

SEQ ID NO: 327891 - DNA, 120 bp, Artificial Sequence
  ENSG00000136295_22 (sequence is synthesized)
agcatcccaggagcccggcctgaggggctggacccgagccggctgtgaacatccctcagcccctgctgtccccccttgggactaaccactaacctcacccccaaactccacgggtgcccc

SEQ ID NO: 327892 - DNA, 120 bp, Artificial Sequence
  ENSG00000136295_23 (sequence is synthesized)
tagctggcccagagccggcagtgtgagcccaagtccgggctggagccgaggccggagcagctgtctgggagtcaaggctgcagtagcgtttcttcatggggtgctccagggggtgccaca

SEQ ID NO: 327893 - DNA, 120 bp, Artificial Sequence
  ENSG00000136295_24 (sequence is synthesized)
gaccgacaggcagcccaagggcctggacacccctccccaggcaggtgctgccccaggaggactgtcctcgggaatgaacctcccgcgggctttggactgaggtccctgtggcctcggtct

SEQ ID NO: 327894 - DNA, 120 bp, Artificial Sequence
  ENSG00000136295_25 (sequence is synthesized)
cctccccatgaagtgggagcgaggctccccaatggtgcttttggctttagtgtacgatgtttgctgtgcttcccgccgtggagggcagagccaccccacatcaggatcggacgtgctacc

SEQ ID NO: 327895 - DNA, 120 bp, Artificial Sequence
  ENSG00000136295_26 (sequence is synthesized)
cctcccggtcccggccctggcccagccagcccagccctcgaggctcgatgcctgtgccaaggccaggggcagccagagggcagctggatggccacgtgcaggggtcaaggctgggccctg

SEQ ID NO: 327896 - DNA, 120 bp, Artificial Sequence
  ENSG00000136295_27 (sequence is synthesized)
cagtggggcgggccgccagccccagcagtttacagacgcatggctcttcctcccagagcagccggcagctacctggaccggaaatgtcctcatcccctccctggggccaggctctgccct

SEQ ID NO: 327897 - DNA, 120 bp, Artificial Sequence
  ENSG00000136295_28 (sequence is synthesized)
ggccttcctctgtgaacccctcctttctttgtgctggtgtctgggaccaaaaagggggaatatgggagggcagagtggggaggggagtccatgggcctggggccccaagccggggcgtct

SEQ ID NO: 327898 - DNA, 120 bp, Artificial Sequence
  ENSG00000136295_29 (sequence is synthesized)
gagctccccaggcatgaccaaacctcagtggaggggcctctgcttcaggccccgcctggctgacattctgagcccccctcggaggccccgccacagccaacctgcccagtctttcctctg

SEQ ID NO: 327899 - DNA, 120 bp, Artificial Sequence
  ENSG00000136295_30 (sequence is synthesized)
ggcttgacccgccaggggagttctccaggcctagggccaggagagaggccctggcaccctggcgtgggtgcccgccaaacgccctgcgaccgctcagaagcacaaatgctgtccatggcc

SEQ ID NO: 327900 - DNA, 120 bp, Artificial Sequence
  ENSG00000136295_31 (sequence is synthesized)
gtgaggctgcctgccaggtgaatggacatagcgtgagaggcggtgaggccagggcttccagcctcgtgctgtctcgggactcctgaccgtggtgtgcgtgtgtgcccgtctgtgactttc

SEQ ID NO: 327901 - DNA, 120 bp, Artificial Sequence
  ENSG00000136295_32 (sequence is synthesized)
tactcaccaaggttgaagaaaggaaacggggaaaatcaaaaggggttcaaaccccacctcagtaggtggaggggagcgcctgccattggttgtatttttgttctgagttttcggtgccgt

SEQ ID NO: 327902 - DNA, 120 bp, Artificial Sequence
  ENSG00000136295_33 (sequence is synthesized)
gttcctaactactccatcccatgacctcgccacacctactggggcatctggctggtgcctgctgccatggccagcccccactctcaccctgcacagggggtcttgcagcccccaggccca

SEQ ID NO: 327903 - DNA, 120 bp, Artificial Sequence
  ENSG00000136295_34 (sequence is synthesized)
cagcctcgttgggaggacagggtggccctggggacaagagggaggagcccaggggcttacctcactgagagtgctccccagcaggcatccactaccccagggccccccacatgtcatggc

SEQ ID NO: 327904 - DNA, 120 bp, Artificial Sequence
  ENSG00000136295_35 (sequence is synthesized)
aaggttggtagtgaatgggcctggttgggagcagcccctggcccattgcccacccacccatctcactatgcaattcgagttccaagcaacatttgctcctgccctggggccagctctgcc

SEQ ID NO: 327905 - DNA, 120 bp, Artificial Sequence
  ENSG00000136295_36 (sequence is synthesized)
ccagccctgagaggggtggtgaggcagccccctggaccccagaaccccagacaagggggcaggcgggggaccagggcctctcctgtgggatctttgttttgtgtttaaccataatggttg

SEQ ID NO: 327906 - DNA, 120 bp, Artificial Sequence
  ENSG00000136295_37 (sequence is synthesized)
tgtactgaaccacttcatatttgttatatataatatatatatatataatctccttaagactcagcctcctggtttacccccccggcctgggcatctgacctcccccaccccagtgtgatt

SEQ ID NO: 327907 - DNA, 120 bp, Artificial Sequence
  ENSG00000136295_38 (sequence is synthesized)
taacatccaggaactgaggcctgaaccattttgcatttccccctcctccagcctctgtagggccatggctgtatgtactgtcgctgtgtttttttgtttttttagaactgggtttggggg

SEQ ID NO: 327908 - DNA, 120 bp, Artificial Sequence
  ENSG00000136295_39 (sequence is synthesized)
ctgatttttatttctttgggggctttttttcttggcaaatactaaaaatctcgtcaatgtaatttctgtggtttctattcagcttgggtttcatgttttaaaataaattttaaaaagcaa

SEQ ID NO: 327909 - DNA, 120 bp, Artificial Sequence
  ENSG00000136295_40 (sequence is synthesized)
caggtggctgggctacctgggcctgctgctgctggacgtcatcatctgcctcctggtgctggttggcctcatccgcagctccaagggcatcctggtggggtgagtctgggggtgtcggcc

SEQ ID NO: 327910 - DNA, 120 bp, Artificial Sequence
  ENSG00000136295_41 (sequence is synthesized)
ccccgtgggcccaaagcggaggggcagggcaaggcaccatgttaccccttcccccacctcatctgcagatcctagccacaagctctgcggtgggggctgagcgggacccccctgcactgg

SEQ ID NO: 327911 - DNA, 120 bp, Artificial Sequence
  ENSG00000136295_42 (sequence is synthesized)
gcctgctctgagatgccccttctgtgcctgtggcctgtgcccctgtggccagcatcccagcacacttgcccccagcccttgatttcctgcaagagtctgcacgtggggcacttgtagccc

SEQ ID NO: 327912 - DNA, 120 bp, Artificial Sequence
  ENSG00000136295_43 (sequence is synthesized)
caacctgcccaggtctccgagtgcctggggccacccagagaccaggctggggctccttcctccaccccttccatccttggccctggggcagcctgggttccagccccagctccggctcac

SEQ ID NO: 327913 - DNA, 120 bp, Artificial Sequence
  ENSG00000136295_44 (sequence is synthesized)
taggagggtgaccttgggcaggtggcttattgttgctgggccttggtctcctcgtttggaaggcagagagagcggcagctcctctgtgggagggtctgcctgctgggagtcctggccctg

SEQ ID NO: 327914 - DNA, 120 bp, Artificial Sequence
  ENSG00000136295_45 (sequence is synthesized)
tttgctctcagcacctagtacatgaggcctgatgggcagggtgtggcccagggccactggaggtcacaggcagtggctggagttcccctaatgggagcctttctcaagaactgacaccag

SEQ ID NO: 327915 - DNA, 120 bp, Artificial Sequence
  ENSG00000136295_46 (sequence is synthesized)
tccccatgacccagacgctctgaatgccctctggggtgccaggctgctggcctcagctccccctcaagggcccctggcgccccactcccaggccccgggtccctgtgccctggcgcactc

SEQ ID NO: 327916 - DNA, 120 bp, Artificial Sequence
  ENSG00000136295_47 (sequence is synthesized)
cttttgtgttcagagacctggggagagccacactggaaggccgtgcttggagccagacagggctgtgtgtccgatggggcgcctgtatgcagcctgtagcagtgtggggccagccccacc

SEQ ID NO: 327917 - DNA, 120 bp, Artificial Sequence
  ENSG00000136295_48 (sequence is synthesized)
atctcatccagcgtgggggcacgccatggacggtgcccacccctgagtgcagcttctcggtgcacagaccccagacaggatcagactcctgatggggcctcttccatgttcacccctcag

SEQ ID NO: 327918 - DNA, 80 bp, Artificial Sequence
  ENSG00000136297_0 (sequence is synthesized)
ctcgggatttggcgtcggcggctccgggcgcctccagctccggctcgggctccggctccggctccgggcgccgaccaggt

SEQ ID NO: 327919 - DNA, 120 bp, Artificial Sequence
  ENSG00000136297_1 (sequence is synthesized)
cgccgccgcgccccccaggctctgccagctacccgcgctctgagcccggggccagattcccatggaagcgccgcgatgttcgccccccggctgctggatttccagaagacgaaatacgcg

SEQ ID NO: 327920 - DNA, 120 bp, Artificial Sequence
  ENSG00000136297_2 (sequence is synthesized)
aggttcatgaaccaccgagtccctgcccacaagaggtaccagcccacagagtatgaacatgcggccaactgtgccacccatgctttctggatcatccccagcatcctgggcagctccaac

SEQ ID NO: 327921 - DNA, 120 bp, Artificial Sequence
  ENSG00000136297_3 (sequence is synthesized)
ctctacttcctgtcggacgatgactgggagaccatctctgcctggatctacggcctcggcctctgcggcctcttcgtggtgtccactgtgtttcacaccatctcctggaagaagagccac

SEQ ID NO: 327922 - DNA, 120 bp, Artificial Sequence
  ENSG00000136297_4 (sequence is synthesized)
ctcaggatggtggaacactgtctacacatgttcgaccggatggtcatctatttcttcatagcggcttcctacgcaccctggctgaaccttcgggagctgggcccctgggcctcccacatg

SEQ ID NO: 327923 - DNA, 120 bp, Artificial Sequence
  ENSG00000136297_5 (sequence is synthesized)
cgctggctggtctggattatggcttccgtgggcaccatctatgtcttcttcttccatgagcgaacagggagctgtgtgcagtttcttcgtggggaggcatgtcctaaggccggcacggct

SEQ ID NO: 327924 - DNA, 120 bp, Artificial Sequence
  ENSG00000136297_6 (sequence is synthesized)
tgtcttcctgccaggtacaagcttgtggagcttctctgctacgtcgtaatgggcttcttccccgccctggtcatcctctccatgcccaacaccgagggcatctgggagctggtgaccgga

SEQ ID NO: 327925 - DNA, 120 bp, Artificial Sequence
  ENSG00000136297_7 (sequence is synthesized)
ggggtcttctactgcctgggcatggtcttcttcaagagtgacgggaggatcccctttgcccacgccatctggcatctctttgtagcatttggtgctggtacccactactatgccatctgg

SEQ ID NO: 327926 - DNA, 120 bp, Artificial Sequence
  ENSG00000136297_8 (sequence is synthesized)
aggtacctctatctgcccagcaccctgcagaccaaggtgtccaaatgaggtgacccagacttgagaggtcgtttgggctttaggagtggagcacgtttctgtgaacgttaacccagagca

SEQ ID NO: 327927 - DNA, 120 bp, Artificial Sequence
  ENSG00000136297_9 (sequence is synthesized)
cagcgccaaggcctgtcttccctttattgggtagagttcttgatggctccaaggtgacttctggtgacagccagatcatccctcgagtccccagcgagaaagaaagcatttagccattct

SEQ ID NO: 327928 - DNA, 120 bp, Artificial Sequence
  ENSG00000136297_10 (sequence is synthesized)
aaccctgtaatgtgtttctattttagatgagtgtttcctaatacaagcaacattaacatcttcagaaaaggaagcaggcatggtcctggaaaattggggaatgacgggccaatctgtgtt

SEQ ID NO: 327929 - DNA, 120 bp, Artificial Sequence
  ENSG00000136297_11 (sequence is synthesized)
tcctaaggtcctgaagaatctggcaaagagtcctgtgggttgtttatacctgggtggccagggcctccctctctgttaccaaagtccaggctggcgaattgtctctggttcagggaaagg

SEQ ID NO: 327930 - DNA, 120 bp, Artificial Sequence
  ENSG00000136297_12 (sequence is synthesized)
ggacagcccagcttgaagatgagggatggtgaatggctgtgaccatggcagacatcaccaatcaagtgcagcacatgggtgatgtcagaattcttcccagcacagtgttctgggcagcca

SEQ ID NO: 327931 - DNA, 120 bp, Artificial Sequence
  ENSG00000136297_13 (sequence is synthesized)
gtaccaatcaatttggcactcatgatgggacctctttgcccttcctgtctggtgtgctctgaaatgggataatggccagagtagctgaaaatctccaaatgggcatttgcatgcctatct

SEQ ID NO: 327932 - DNA, 120 bp, Artificial Sequence
  ENSG00000136297_14 (sequence is synthesized)
cctcatctccccctcccttttgggaaactcctggagtaggcagtttgggggcggtagagggaaactgaggcgcacacccatgcagcccctgatgttctgttccaccgtagttgattctca

SEQ ID NO: 327933 - DNA, 120 bp, Artificial Sequence
  ENSG00000136297_15 (sequence is synthesized)
gtagagttgggaatgaggatgctgttacttggccatttcttcccatctccaaaaatccagagacattacgagagctattcattcataagatggggcaaacagcccccaggcacttgctcc

SEQ ID NO: 327934 - DNA, 120 bp, Artificial Sequence
  ENSG00000136297_16 (sequence is synthesized)
ctgctccatacttaaggtttgtgatgccaacatttggattctctcttggtgccaatcagtggctgttagaggctactcaggtgtaccccaaacagaaggcacatggatctggggcgactg

SEQ ID NO: 327935 - DNA, 120 bp, Artificial Sequence
  ENSG00000136297_17 (sequence is synthesized)
ttccaggtcctcccaacctctgaagtgctcagtagcccaacaacaaggctgctgggggcctgttcttcagcccccgtcagggcggggccagcctctctgtccaatgctgcctggacattt

SEQ ID NO: 327936 - DNA, 120 bp, Artificial Sequence
  ENSG00000136297_18 (sequence is synthesized)
actggggaggtgagtagcaggcccagctccaggatctgaattggaatctcagattctctggataaagaatctgtctcaagtcaggaggtcctcattctgcgactcccaaccagggtggag

SEQ ID NO: 327937 - DNA, 120 bp, Artificial Sequence
  ENSG00000136297_19 (sequence is synthesized)
tgggcacagacaggatgccttatgcttatctctagcacattccagggggttccagggttcctgcacctggaatccagtgtgtccaagccagtattaaattatctcaacacattccacaga

SEQ ID NO: 327938 - DNA, 120 bp, Artificial Sequence
  ENSG00000136305_0 (sequence is synthesized)
gccagcgctgcgaccgcctgcagaaggttgactgcgtggtagggggcccagagcaagccgaaggcaagcacgatggcgctcaccagccggcccacccgcgccccgtgccgcccggagccc

SEQ ID NO: 327939 - DNA, 120 bp, Artificial Sequence
  ENSG00000136305_1 (sequence is synthesized)
cagcgggcgccccgcagccgtgccagcgtcacgctgtagcagccgagcatcagcccgaaaggaagcacgaaagcggtcagagtctccaggctcaggtgggcggcggcgtggaccggcgac

SEQ ID NO: 327940 - DNA, 120 bp, Artificial Sequence
  ENSG00000136305_2 (sequence is synthesized)
gggtggcacagctggcatacgcggtccctccacaggtggcggtagacggcggccgggacggcgagcaacagggcggccagccagaccgccagcagcaggcggcgggccagggccgggctg

SEQ ID NO: 327941 - DNA, 120 bp, Artificial Sequence
  ENSG00000136305_3 (sequence is synthesized)
cgcagccgaggcgccaggaaggggcgggtgactgcgaggcagcgctgcaggctgagcaggccggtgagcagcacgctggcgtacatgctgagcgcgcacacgtagtacaccgccttgcag

SEQ ID NO: 327942 - DNA, 120 bp, Artificial Sequence
  ENSG00000136305_4 (sequence is synthesized)
cccgcctggcccagcggccaggcctgccgggtcaggaaggccacaaagagcggcgtgagcagcagcaccgcgccgtcggccagcgccaggtgcagcacaagcgtggccgccagcggtcgc

SEQ ID NO: 327943 - DNA, 120 bp, Artificial Sequence
  ENSG00000136305_5 (sequence is synthesized)
ccccgtgcaggccgccagcccgccaagctccacaccacgaagccgttgccaggcagccccagcagcgccgccagcagcaggaaggctgtgcctgtggcccgcgaagtcttccagctcagc

SEQ ID NO: 327944 - DNA, 120 bp, Artificial Sequence
  ENSG00000136305_6 (sequence is synthesized)
agtgtctcgttccctgggggacggtagcagaccgacatccttctgggcctacaggacacagaaaaaaagtggggaagctgggggaccctacaaggatccttggcaggaaagcagggattg

SEQ ID NO: 327945 - DNA, 120 bp, Artificial Sequence
  ENSG00000136305_7 (sequence is synthesized)
tgttcatttgagggtttcactgtcagtgagagtctcagcttccatgcaactgtccatcacggctgcaactgaaatcagagctgggacacagcgcaccagaagctaaagtcttgatgccat

SEQ ID NO: 327946 - DNA, 120 bp, Artificial Sequence
  ENSG00000136305_8 (sequence is synthesized)
caaaggacatccctgccccattcacatctctgtcacgtccactaatcggcaaaaggagaaaagtgagagaagatgacctaagtgtgactgcagcaggcagctctggaaaatgaagccaga

SEQ ID NO: 327947 - DNA, 120 bp, Artificial Sequence
  ENSG00000136305_9 (sequence is synthesized)
cctcctccgaccaaggaggaaggaaagagcagccccagcacaggagagaaccacccagcccagaagttccagggaaggaactctccggtccaccatggagtacctctcagctctgaaccc

SEQ ID NO: 327948 - DNA, 120 bp, Artificial Sequence
  ENSG00000136305_10 (sequence is synthesized)
cagtgacttactcaggtcagtatctaatataagctcggagtttggacggagggtctggacctcagctccaccaccccagcgacctttccgtgtctgtgatcacaagcggaccatccggaa

SEQ ID NO: 327949 - DNA, 120 bp, Artificial Sequence
  ENSG00000136305_11 (sequence is synthesized)
aggcctgacagctgccacccgccaggagctgctagccaaagcattggagaccctactgctgaatggagtgctaaccctggtgctagaggaggatggaactgcagtggacagtgaggactt

SEQ ID NO: 327950 - DNA, 120 bp, Artificial Sequence
  ENSG00000136305_12 (sequence is synthesized)
cttccagctgctggaggatgacacgtgcctgatggtgttgcagtctggtcagagctggagccctacaaggagtggagtgctgtcatatggcctgggacgggagaggcccaagcacagcaa

SEQ ID NO: 327951 - DNA, 120 bp, Artificial Sequence
  ENSG00000136305_13 (sequence is synthesized)
ggacatcgcccgattcacctttgacgtgtacaagcaaaaccctcgagacctctttggcagcctgaatgtcaaagccacattctacgggctctactctatgagttgtgactttcaaggact

SEQ ID NO: 327952 - DNA, 120 bp, Artificial Sequence
  ENSG00000136305_14 (sequence is synthesized)
tggcccaaagaaagtactcagggagctccttcgttggacctccacactgctgcaaggcctgggccatatgttgctgggaatttcctccacccttcgtcatgcagtggagggggctgagca

SEQ ID NO: 327953 - DNA, 120 bp, Artificial Sequence
  ENSG00000136305_15 (sequence is synthesized)
gtggcagcagaagggccgcctccattcctactaaggggctctgagcttctgcccccagaatcattccaaccgacccactgcaaagactatgacagcatcaaatttcaggacctgcagaca

SEQ ID NO: 327954 - DNA, 120 bp, Artificial Sequence
  ENSG00000136305_16 (sequence is synthesized)
gtacaggctagataacccacccaatttccccactgtcctctgatcccctcgtgacagaacctttcagcataacgcctcacatcccaagtctatacccttacctgaagaatgctgttcttt

SEQ ID NO: 327955 - DNA, 120 bp, Artificial Sequence
  ENSG00000136305_17 (sequence is synthesized)
cctagccacctttctggcctcccacttgccctgaaaggccaagatcaagatgtcccccaggcatcttgatcccagcctgactgctgctacatctaatcccctaccaatgcctcctgtccc

SEQ ID NO: 327956 - DNA, 120 bp, Artificial Sequence
  ENSG00000136305_18 (sequence is synthesized)
taaactccccagcatactgatgacagccctctctgactttaccttgagatctgtcttcatacccttcccctcaaactaacaaaaacatttccaataaaaatatcaaatatttaccactaa

SEQ ID NO: 327957 - DNA, 120 bp, Artificial Sequence
  ENSG00000136305_19 (sequence is synthesized)
cagaccgacatccttctgggcctacagcctgcctcttttctgcctgggagtcctgacttccacgaggacccagaccccacctcaaacacaactccttcttggaacccagatcccctgctc

SEQ ID NO: 327958 - DNA, 120 bp, Artificial Sequence
  ENSG00000136305_20 (sequence is synthesized)
gagccactcataaactgcagcttctcagagcctgagagccagaaaccgtccccagaaattccctccatagaaataaaaaaacaccagaagtcacatttcatccttttacatggttcccat

SEQ ID NO: 327959 - DNA, 120 bp, Artificial Sequence
  ENSG00000136305_21 (sequence is synthesized)
ctaccctcacaacacatgtcatcaccaaagacacacatacaagctccaatggcttttgccaggcaattcttcctccaggaccccatctggcccctccctcatccctccccttggactttg

SEQ ID NO: 327960 - DNA, 120 bp, Artificial Sequence
  ENSG00000136305_22 (sequence is synthesized)
cccttcttactggccaggcaggggggccagagtccaggcttgactcattcccaccttgtcctgggctgagatcccaggtttgtaacagaaaacaccactaaagccccagcacaggagaga

SEQ ID NO: 327961 - DNA, 120 bp, Artificial Sequence
  ENSG00000136305_23 (sequence is synthesized)
cagccccattctagcacatctgggcaaaactggatggtggggtgtaaagggacgtgcacagatctacttaccaagctgggagcaagcaggattgggggcctggagaagctgaaaggttaa

SEQ ID NO: 327962 - DNA, 120 bp, Artificial Sequence
  ENSG00000136305_24 (sequence is synthesized)
gcagcagtaggcgaggtgcctactcctgtcctgtgcctatcacatttgcagagggtaagacaagaatggggagggacaagatgaggctcatcctgggcctctcctggggcccctccctca

SEQ ID NO: 327963 - DNA, 120 bp, Artificial Sequence
  ENSG00000136319_0 (sequence is synthesized)
ggagtggccgggagatgatggctgatgaagaggaagaagtcaagccgatcttgcagaaattgcaggaactcgtggatcagctctactcatttcgagactgctatttcgagacacatagtg

SEQ ID NO: 327964 - DNA, 120 bp, Artificial Sequence
  ENSG00000136319_1 (sequence is synthesized)
ttgaggatgctgggaggaagcaacaggatgtgcagaaggagatggagaaaaccctacagcagatggaagaagtagtgggttctgtccagggcaaggcacaagttctaatgctaactggga

SEQ ID NO: 327965 - DNA, 120 bp, Artificial Sequence
  ENSG00000136319_2 (sequence is synthesized)
aagcactaaatgtgactcctgactatagccctaaggctgaggagcttctgtcaaaggctgtgaagctggagcccgagctggtggaagcctggaaccagctgggtgaggtgtactggaaaa

SEQ ID NO: 327966 - DNA, 120 bp, Artificial Sequence
  ENSG00000136319_3 (sequence is synthesized)
aaggggatgttgcagctgcccacacctgcttctcaggagccctcacccattgcaggaacaaagtctccttgcaaaacctgtcaatggtgcttcgtcagctgcggactgacactgaagatg

SEQ ID NO: 327967 - DNA, 120 bp, Artificial Sequence
  ENSG00000136319_4 (sequence is synthesized)
aacattctcaccatgtcatggacagtgtccgacaggctaagttggctgttcagatggatgtccatgatggccgctcctggtatattcttgggaattcatatctttccctttacttctcta

SEQ ID NO: 327968 - DNA, 120 bp, Artificial Sequence
  ENSG00000136319_5 (sequence is synthesized)
ctggccagaaccctaagatctcccagcaagccctcagtgcctatgcccaagcagagaaagttgacagaaaagcttctagcaatcctgaccttcatctgaacagggcgacgttgcataaat

SEQ ID NO: 327969 - DNA, 120 bp, Artificial Sequence
  ENSG00000136319_6 (sequence is synthesized)
atgaagagagttatggggaggccctggagggcttctctcgggctgcagccctggaccctgcctggccagagccccggcaacgagagcaacaacttctggaattcctggatagattaacca

SEQ ID NO: 327970 - DNA, 120 bp, Artificial Sequence
  ENSG00000136319_7 (sequence is synthesized)
gcctccttgagagtaagggaaaggtgaagaccaaaaagctgcagagcatgctgggaagcttgcgcccagcccatctaggcccttgcagtgatgggcactatcagtcagcctctgggcaga

SEQ ID NO: 327971 - DNA, 120 bp, Artificial Sequence
  ENSG00000136319_8 (sequence is synthesized)
aagtgaccctggagctcaagccactgagtacgcttcagcctggggtgaacagcggtgccgtcatcctgggaaaggtggtatttagcctcaccacagaggagaaagtcccctttacatttg

SEQ ID NO: 327972 - DNA, 120 bp, Artificial Sequence
  ENSG00000136319_9 (sequence is synthesized)
gcctggtagattcagatggaccttgctatgcagtgatggtgtacaatatagtgcagagctggggagtgctcattggagactctgtagccattcctgagcccaacctgcggcttcaccgaa

SEQ ID NO: 327973 - DNA, 120 bp, Artificial Sequence
  ENSG00000136319_10 (sequence is synthesized)
ttcagcacaaaggaaaggactattccttttccagtgttcgagtggagacgcccctcctgctagtggtgaatgggaagcctcagggatccagcagccaggctgttgccacagtggcatcgc

SEQ ID NO: 327974 - DNA, 120 bp, Artificial Sequence
  ENSG00000136319_11 (sequence is synthesized)
gaccacagtgtgaatgacctttgacttgcatgctcaacagggagtggaggagaggagacaaggctctggacagccggtccagccacatccagtgattcagcagggatgggaggaatgttt

SEQ ID NO: 327975 - DNA, 120 bp, Artificial Sequence
  ENSG00000136319_12 (sequence is synthesized)
taaatgaagactttctctttccctgcctgtattacacttcgtatctcttctctctcctctgtcctcatcatgttccagctctctacagggccacatactcttctggcatatctctcctgt

SEQ ID NO: 327976 - DNA, 120 bp, Artificial Sequence
  ENSG00000136319_13 (sequence is synthesized)
ctcttccactgctctctatgttttaagcaaagagcatggaattggtagaagtcttgggatcttgccatgggacagagtccccaaggttcctgttgttgcctccttcctaagcctcatatg

SEQ ID NO: 327977 - DNA, 120 bp, Artificial Sequence
  ENSG00000136319_14 (sequence is synthesized)
tatatatcagttcagtatttattgctaaaggagggggcttaattttgtaatggcttttatttttagcaatttttatttttatttttgaactttaggtccttcctcttctttggggctgga

SEQ ID NO: 327978 - DNA, 120 bp, Artificial Sequence
  ENSG00000136319_15 (sequence is synthesized)
acagaattaaatttgtttggaaaaaaaaaaaaacaccacgtagtttggcctgctttattctccctaggcctgtattctttgttttaggatcacttcaatttattggagtaatacccccat

SEQ ID NO: 327979 - DNA, 120 bp, Artificial Sequence
  ENSG00000136319_16 (sequence is synthesized)
ttttttctttatacaaagcagtttatttctctcccagttaaaagaattccgacaatagacagccccaggcaggaatggcaactccacaaagttgctagagaccagctttcttccattttc

SEQ ID NO: 327980 - DNA, 120 bp, Artificial Sequence
  ENSG00000136319_17 (sequence is synthesized)
ccattctgtcattccctaggggtggtcttcactatggtccaagatgacagagcaatactgttctaatagtgttactaggctgaaggaccagagagagttagataaatcctcagtttcttt

SEQ ID NO: 327981 - DNA, 120 bp, Artificial Sequence
  ENSG00000136319_18 (sequence is synthesized)
agagtctagtgacatgttttataacagtttatcttaatatccttgtggtaaaatggagaaatgtgagtgaggattaataaccaattgaattggcctggcacggtggctcagcctgtaatc

SEQ ID NO: 327982 - DNA, 83 bp, Artificial Sequence
  ENSG00000136319_19 (sequence is synthesized)
gcaacaacaactgaatggctgtaatacattaatgtatacagatgaattgagaagtcttctagtgaaatggctcagatctttgt

SEQ ID NO: 327983 - DNA, 120 bp, Artificial Sequence
  ENSG00000136319_20 (sequence is synthesized)
gaattgagaagtcttctagtgaaatggctcagatctttgttcttggtccagtcctgttcagtttttgatcagtgccttgaatatcattgatgactcattaaatttataaagagtgcagag

SEQ ID NO: 327984 - DNA, 87 bp, Artificial Sequence
  ENSG00000136319_21 (sequence is synthesized)
atatcattgatgactcattaaatttataaagagtgcagaggcctcctcagagaatggatggtagaaatgcattgatgagagaagttt

SEQ ID NO: 327985 - DNA, 120 bp, Artificial Sequence
  ENSG00000136319_22 (sequence is synthesized)
aagataaaattttcagtccattcttttggtccaaaaaggcttacattctcaggtatagcttcaacatcatatatgaatattactaagaatcttagtagataagctaaagtcagtatgagt

SEQ ID NO: 327986 - DNA, 120 bp, Artificial Sequence
  ENSG00000136319_23 (sequence is synthesized)
aaccagtctgatatagtttgcaagaacactcttcatggactgcaccaaaaaaacctatggtagcaagagacagtttttattagaagtactgtctgttataccacatatggagtcttaaat

SEQ ID NO: 327987 - DNA, 120 bp, Artificial Sequence
  ENSG00000136319_24 (sequence is synthesized)
tagttttgggtgtcattttgaggcctagagtcatagaagagtgattaggagcttgtggggtataaaaataacttgagaattggctgaaagcaactagggaagatgggggtagtagtatgt

SEQ ID NO: 327988 - DNA, 120 bp, Artificial Sequence
  ENSG00000136319_25 (sequence is synthesized)
gtaaacatttgaggcagtagagatgtgggacccaaatactgttccccttttactcaaattctgagatgagttgacatgttctgtgtagggctagagagtagaaaaatggccagtaggtgg

SEQ ID NO: 327989 - DNA, 120 bp, Artificial Sequence
  ENSG00000136319_26 (sequence is synthesized)
tagccacagagaagcagtgcgtacaaacaagtaagtatgcaaaatttgtacatacggtttcaggaataactagaatacccataaaatatccacctgccttaaaaactagaacatcattga

SEQ ID NO: 327990 - DNA, 120 bp, Artificial Sequence
  ENSG00000136319_27 (sequence is synthesized)
taacttggaagcccttgcatacctctccatgatctcatttgtcttcacagctatataaatctcattgtatgattataccataatttattcatcctgttgttaaaggatatttgggtttcc

SEQ ID NO: 327991 - DNA, 120 bp, Artificial Sequence
  ENSG00000136319_28 (sequence is synthesized)
agtttttctttttttactaccaaagcactacattattaatattcttgtatatgtcctgatatgtaagtgcaaaagtttcttttacagcaatggctcttgaagagtggttcccagaccagc

SEQ ID NO: 327992 - DNA, 120 bp, Artificial Sequence
  ENSG00000136319_29 (sequence is synthesized)
agcatcagcatcccttggaacttctttgaaatgcaaattctcaagccccctacccagacttactgaattcaaaactatgtgggaggagcccagcaatctgtgtttcgcaaaccctccagg

SEQ ID NO: 327993 - DNA, 120 bp, Artificial Sequence
  ENSG00000136319_30 (sequence is synthesized)
tgactctgatgcacagtaaaatttgagaaccactgtttaagagtattgacatagaatggaattgctggatcatagagtatatacatgttcaacttttttgagaagcactaaacatttcca

SEQ ID NO: 327994 - DNA, 120 bp, Artificial Sequence
  ENSG00000136319_31 (sequence is synthesized)
aagtgcttatattagtttatgtctctactatcaatagatgagtcaccccaatgctccccatcctcttctgtgcttggtattatcttttaggtattgcaaatacaggagatttgagtatta

SEQ ID NO: 327995 - DNA, 120 bp, Artificial Sequence
  ENSG00000136319_32 (sequence is synthesized)
tttccttgtggccttaatttgcatttctgattattaatgagcttgagcatcttttcatatatttagaagccactaatattttctctcggtaaaatgcctattcgagtctttgcacactgc

SEQ ID NO: 327996 - DNA, 120 bp, Artificial Sequence
  ENSG00000136319_33 (sequence is synthesized)
tgtattggatgtcaaattgatttatatattccctgtactaatcgtttgtctacatacagttttatcctgtttttttttttattctattgggtcttttgctgaacagaagttcttaatttc

SEQ ID NO: 327997 - DNA, 120 bp, Artificial Sequence
  ENSG00000136319_34 (sequence is synthesized)
aatgtcattgaatttatccatcttttatgataatgctttttgtgttttaagaggttcttagctctcctaaagtcataaggacattttccctctactgctttatgaagttattttgtcctt

SEQ ID NO: 327998 - DNA, 120 bp, Artificial Sequence
  ENSG00000136319_35 (sequence is synthesized)
ttcttacagtatgactttattttatgttatgtacggatataatttttttcataatgagtaaatagcccagcaccttttattaaagaatcaatcctttccctactgatctttaaagcccag

SEQ ID NO: 327999 - DNA, 120 bp, Artificial Sequence
  ENSG00000136319_36 (sequence is synthesized)
tctgtctttttctttttttgaaattgtctagctttttaatttttaccaaccagatgattataaaatatcacatagtaggcataaattacatttctttgtccattcctgtttctttttcta

SEQ ID NO: 328000 - DNA, 120 bp, Artificial Sequence
  ENSG00000136319_37 (sequence is synthesized)
tgaaatctctgttttcttttgtccaatttttattgggttgtcttcttattgattccttacatgttctggatactaatccattataaattatgtttttcaaatatatttatccaaatcgca

SEQ ID NO: 328001 - DNA, 120 bp, Artificial Sequence
  ENSG00000136319_38 (sequence is synthesized)
gggtaagtgtatctatggcatacccaagcatatttgtgtaacctcttttttgggggttgggggaacagggtctcgctctgttattcaggttagagttcagtggaatgatcatagctcact

SEQ ID NO: 328002 - DNA, 120 bp, Artificial Sequence
  ENSG00000136319_39 (sequence is synthesized)
gcacccataaactcgtggtcttaagcaatcctcctacctcagtctcccacatagctgggacattagccaccaagcctggctaatttaaaaaaaattcttagtagagccactgtgcctggc

SEQ ID NO: 328003 - DNA, 120 bp, Artificial Sequence
  ENSG00000136319_40 (sequence is synthesized)
atggatagtattaaaggaaattttcttgatacgcagtttagtctgttcttggacaagcaatgcagtaggtttgactttgagtgctttattactaacactttctggccaggccacagttaa

SEQ ID NO: 328004 - DNA, 120 bp, Artificial Sequence
  ENSG00000136319_41 (sequence is synthesized)
ggtccggttggaaaacacttgttgaggtttgaattgtaacctttttactggatgatagggtattttttagcccatagataaacttgcttaaaaaaccaagaaagacactgaaatctcagt

SEQ ID NO: 328005 - DNA, 120 bp, Artificial Sequence
  ENSG00000136319_42 (sequence is synthesized)
ctatacatagtttcatcagtgtttattgggaactgtgttctggataaagcaatcgtatgtatacatttttattatgtaatgtataagtgatttgtaaattataaagatctcctacgatac

SEQ ID NO: 328006 - DNA, 120 bp, Artificial Sequence
  ENSG00000136319_43 (sequence is synthesized)
gttgggggtggagtggccgggagatgatggctgatgaagaggaagaagtcaagccgatcttgcagaaattgcaggtggggccgtagattaaattctgtatgtgtttttgttactccgaat

SEQ ID NO: 328007 - DNA, 120 bp, Artificial Sequence
  ENSG00000136319_44 (sequence is synthesized)
gaagcagggagtccagtttatgtactgcccgtgaattcctcggcacacacgcgaagctgcgtgcgtctgtgtggttactataacaaccctcgagggtgcagccgcagccagccagggagc

SEQ ID NO: 328008 - DNA, 120 bp, Artificial Sequence
  ENSG00000136319_45 (sequence is synthesized)
ctcgttggaacctcctgctgccgacctgactgcggttaatttcagtcctgtatggaagaagatttgttgctcctaactgttcatgtacatttttagagaggacgttgttttctcgattca

SEQ ID NO: 328009 - DNA, 120 bp, Artificial Sequence
  ENSG00000136319_46 (sequence is synthesized)
tggcagatctgcatgaactactgtcacatgttgttttgatccctacaaaagccatttaacacctttctgctttgaatttggcaacaatcacgctaatgacctgcactgcaagtgtcctgg

SEQ ID NO: 328010 - DNA, 120 bp, Artificial Sequence
  ENSG00000136319_47 (sequence is synthesized)
ttactccccttaggatttcagttttgatttctttcaacctgtgtaattccactttggggtctgatgcagaggggtccagactccacatagtccacaggaactcgtggatcagctctactc

SEQ ID NO: 328011 - DNA, 120 bp, Artificial Sequence
  ENSG00000136319_48 (sequence is synthesized)
gagatgggaaggatgaatttctttggttctatgagtttccctaggacatgaataccagagtagaactgaaattgaactaggacagaatcaggagggaggaaaggtcagagagcagacctg

SEQ ID NO: 328012 - DNA, 120 bp, Artificial Sequence
  ENSG00000136319_49 (sequence is synthesized)
aatgaggaaaatagaggcaggggcctgggaaaggaagatgatgatgggatcaggttcagggggagaaaggaagtgaagaaaagctagcagctaagctgatccctgtggatgggggttgaa

SEQ ID NO: 328013 - DNA, 120 bp, Artificial Sequence
  ENSG00000136319_50 (sequence is synthesized)
aaaaataattttagaatgatactaaagctacaatagaggcttgtttatatatatataatcaccagtgatgagaagttttctttgcaatgtacatggtagcaagtggtagaaggatctgat

SEQ ID NO: 328014 - DNA, 120 bp, Artificial Sequence
  ENSG00000136319_51 (sequence is synthesized)
ccagtgtacaacatttcatttagatgtcatgtctctccatccgagtctgtgaaagtttctgtcttttcttgttttttttatgaccttgacagtccagaggagtattgtgtagaatgatcc

SEQ ID NO: 328015 - DNA, 120 bp, Artificial Sequence
  ENSG00000136319_52 (sequence is synthesized)
ttggatttcccccattttacccttttgaactaattgctctcacttcctgttctttccctggcagttgaggagattgtcagtggtcacagatttgtgacttctgatttccttctgtgacta

SEQ ID NO: 328016 - DNA, 120 bp, Artificial Sequence
  ENSG00000136319_53 (sequence is synthesized)
tcccgtgggcagatattgtctgggtgatgtttaaccatcttttgatcagaggcttttgtagattctgtcactgcccattttgtatccctgagtttggtgctatgtggattcctatatcca

SEQ ID NO: 328017 - DNA, 120 bp, Artificial Sequence
  ENSG00000136319_54 (sequence is synthesized)
tagttgaaatttggcaggacatatttttttataagacagaaacctcaaaattcttctgtccctttgcattttcatgatcatagaagttgaaggaggacaaatttcttagtcctgtttgta

SEQ ID NO: 328018 - DNA, 120 bp, Artificial Sequence
  ENSG00000136319_55 (sequence is synthesized)
cttaggtatacttagttctgaaaagtgagctttgagttataatttaaagtctggttgggagattgtcttagatgtcattcaacaaatatttattgagtgtgtaatatatgtgtcataggg

SEQ ID NO: 328019 - DNA, 120 bp, Artificial Sequence
  ENSG00000136319_56 (sequence is synthesized)
agtgagaaaaaagaaatgtaaaggacccaggtgcaggtgcttctagcagcagaggaaatgaattaagaatatttgtttagaaaatttttggatcttgaaaagttacggtttagtgaatgc

SEQ ID NO: 328020 - DNA, 120 bp, Artificial Sequence
  ENSG00000136319_57 (sequence is synthesized)
caccactccttggtccttcactcacttcctaatccctggttgaccggtttcccctttctcttttctactgaaattgttattttcctaggatcaccattgtctttctaggcactggatcca

SEQ ID NO: 328021 - DNA, 120 bp, Artificial Sequence
  ENSG00000136319_58 (sequence is synthesized)
gcaacttctattgcatggttccaaaacattctgacttatctctcactattgcttttcacatcctttctgttcatctaaacagaaatattcacaattcccattatatgcccaagctttctc

SEQ ID NO: 328022 - DNA, 120 bp, Artificial Sequence
  ENSG00000136319_59 (sequence is synthesized)
catggcattttctaggggtttgtatatttgacgagttgaagggcaaaaagatagttgagaacagtttagtttactagagcaaatcctagagctgagaagaattagaaagggatatagaca

SEQ ID NO: 328023 - DNA, 120 bp, Artificial Sequence
  ENSG00000136319_60 (sequence is synthesized)
aaggtaggttttggaggaccttgagaacaaatagatattttgccactccttggtttctctttttctgcctaacttttaaatcttaggttcccaggactctatttttgtttttttcctttt

SEQ ID NO: 328024 - DNA, 120 bp, Artificial Sequence
  ENSG00000136319_61 (sequence is synthesized)
ttctctttatatcaggatggcctatagttgccaactttgatcacttgtcagtggttgcctgacatactgtgtagaaggattctgaggctttgactggattcatcaggagagtgctttgct

SEQ ID NO: 328025 - DNA, 120 bp, Artificial Sequence
  ENSG00000136319_62 (sequence is synthesized)
tgattgcaatatttcctgtgaattcaggcatgtcacgtgatggcatgagtgtgattcttctccatcctgtctatagatcatcttgccctgtgatgtcatataaacccaaggctttggcag

SEQ ID NO: 328026 - DNA, 120 bp, Artificial Sequence
  ENSG00000136319_63 (sequence is synthesized)
ctctaactcagtatttcagtattactcacctaaatctttctctgtaaacctgcttctcctccctggattccttgtgaatgaatggtatcacctctcagtcacttgattaagacttttgga

SEQ ID NO: 328027 - DNA, 120 bp, Artificial Sequence
  ENSG00000136319_64 (sequence is synthesized)
agaataggcttctccattctccaaaaagatttgccttttttgtcctatagacttgacttctctgtgtttaccaccttaattcacccccttatcacttctccagataggtctccctgattc

SEQ ID NO: 328028 - DNA, 120 bp, Artificial Sequence
  ENSG00000136319_65 (sequence is synthesized)
tctggtttcctccagtgttccacagtgctgccagagaaatgtttcttagatggaaatctgaccattgctacttcttatttaagatcccttactggtactatatgtagcttttgggataaa

SEQ ID NO: 328029 - DNA, 120 bp, Artificial Sequence
  ENSG00000136319_66 (sequence is synthesized)
gtgtgaactacttaggttagcatacaaagtccttcatgatttgctccctgcttctctttctattatcttttgtctctttcccaccagtgccttttgtttcaaccatggaacaattttgtt

SEQ ID NO: 328030 - DNA, 120 bp, Artificial Sequence
  ENSG00000136319_67 (sequence is synthesized)
ggttttagaacagctgttttcatgcctctgtgtcttacatacagttactctgcctggataatctctagcttcttcttgacatagctaacatcctcttctgcccccaacattttgtataaa

SEQ ID NO: 328031 - DNA, 120 bp, Artificial Sequence
  ENSG00000136319_68 (sequence is synthesized)
aattttcaaacatatagctaagttgaaagagttttacattgaacatttgtgttctcatccacttatattctaccattaatattttattttacttagcttattacatatcagtctgtttat

SEQ ID NO: 328032 - DNA, 120 bp, Artificial Sequence
  ENSG00000136319_69 (sequence is synthesized)
cctgctatcagagtaaattgcagagatcaatatactttacatactttagcatgcagtcattaactgagttcagtatttgtttcaattttttctttttatgtaaaatttacatacaatgaa

SEQ ID NO: 328033 - DNA, 120 bp, Artificial Sequence
  ENSG00000136319_70 (sequence is synthesized)
atgtacaattttaagcgtacatttcatagcttttaacaaatggaaaatatctgtataacccaaatagagatcattaccaccattctgggaagttccctgatgttgcctccaagtcaaaat

SEQ ID NO: 328034 - DNA, 120 bp, Artificial Sequence
  ENSG00000136319_71 (sequence is synthesized)
ctctgttcctatcccctcagaggtttttaacatttttaccgaggattaatttttctcttttaacccagctggttttttaccctttaagattcactttgagcgtcacctcttccaggaaat

SEQ ID NO: 328035 - DNA, 120 bp, Artificial Sequence
  ENSG00000136319_72 (sequence is synthesized)
cttccctgctttccaattttgatttagatatttgtcctctgggctcccacagcccaatctgtggcttcattgaattcagcacaagggaaaagctattctagcacccatcacactgtgctg

SEQ ID NO: 328036 - DNA, 120 bp, Artificial Sequence
  ENSG00000136319_73 (sequence is synthesized)
taagtgatgacttcattgtctgactcctgctagactataggtcattcatagctggattggtatcttattgctaaacacaatgcttggcacatatgtaatattcagtgaaagtttgtggag

SEQ ID NO: 328037 - DNA, 120 bp, Artificial Sequence
  ENSG00000136319_74 (sequence is synthesized)
ttaaactacacagacagtgatggttagaggctttggttaagagtatgatagttaaattgatagaccaggaataatgttacaactgtaacatgttggtctagttcatcattaatatttgtt

SEQ ID NO: 328038 - DNA, 120 bp, Artificial Sequence
  ENSG00000136319_75 (sequence is synthesized)
gaatggcttcagtgtgctttgtcctaagttcttagcaaagtgactgatgagtttcagaaaaatgaagactcagatatataaagtggaagatggtacctctcataggttttctgagtaact

SEQ ID NO: 328039 - DNA, 120 bp, Artificial Sequence
  ENSG00000136319_76 (sequence is synthesized)
ggttttctgagtaactgagaaaaagcatttgtttattttgttagtattttatttttaaagtttaattaagttaaattttatattttattttaattacctgtcactgactttaagtccagt

SEQ ID NO: 328040 - DNA, 120 bp, Artificial Sequence
  ENSG00000136327_0 (sequence is synthesized)
agtgctcattcaggtacttaacaccctggagacccggacctcggctttcaaagcggcctgggtgggaagagctgtttatataaacagagattccgctgtaaatgcgctaatatcccggct

SEQ ID NO: 328041 - DNA, 120 bp, Artificial Sequence
  ENSG00000136327_1 (sequence is synthesized)
gccagcgcatggcgagcgcctcccacgcccatccgtaggagcggcgtcccggccgcccctccgttcccagcctgccctgcccccgcctccttcccctcctcggccatggccacctctgga

SEQ ID NO: 328042 - DNA, 120 bp, Artificial Sequence
  ENSG00000136327_2 (sequence is synthesized)
cgcctgagcttcaccgtgcgcagccttctagatttacccgagcaggacgcgcaacacctgccgaggcgggagccagaaccacgcgccccccagcccgacccctgcgccgcctggctggat

SEQ ID NO: 328043 - DNA, 120 bp, Artificial Sequence
  ENSG00000136327_3 (sequence is synthesized)
tcggagcgcggccactacccttcctcggacgagagcagcctggagaccagcccgccagactcgtcgcagcggccgtccgctaggcccgcgtctccgggctcggacgccgagaaaaggaag

SEQ ID NO: 328044 - DNA, 120 bp, Artificial Sequence
  ENSG00000136327_4 (sequence is synthesized)
aagcggcgggtgctattctccaaggcgcagacgctggagttggagcggcgcttccggcagcagcggtacctgtctgcgcccgagcgcgagcagctggcgagcctgcttcgcctcacgccc

SEQ ID NO: 328045 - DNA, 120 bp, Artificial Sequence
  ENSG00000136327_5 (sequence is synthesized)
acgcaggtcaagatctggttccagaatcatcgctacaagctgaagcgcgctcgcgctccaggggcggcggagtcgcctgacctggcagcatccgccgagctgcacgccgcgcccggcctg

SEQ ID NO: 328046 - DNA, 80 bp, Artificial Sequence
  ENSG00000136327_6 (sequence is synthesized)
ctgcgtcgcgtggtggtgccggtgcttgttcgcgacgggcagccgtgcggcggcggcggcggtggcgaggtgggaaccgc

SEQ ID NO: 328047 - DNA, 120 bp, Artificial Sequence
  ENSG00000136327_7 (sequence is synthesized)
ttggcctcttccccgcctaccagcacttagcatcccccgccctggtctcctggaactggtgaggccgcagggcggcacctggggctaccctcgactttggagcgcgctctgcgattggag

SEQ ID NO: 328048 - DNA, 120 bp, Artificial Sequence
  ENSG00000136327_8 (sequence is synthesized)
cagggccggagccgaacgcctggaacgctctccgtccgcctccctgcagccccatctccttgggcgccagggtccctggcgcgccctcatcagccgtcgcgcaagcacacacgagggacg

SEQ ID NO: 328049 - DNA, 120 bp, Artificial Sequence
  ENSG00000136327_9 (sequence is synthesized)
tgtgccagagccccctccctcaccttccctccaccgccagccccagagttagattttatgcttgggccttatttgtatatttttaaatagcgatttgtataggaagcaagttattttttt

SEQ ID NO: 328050 - DNA, 120 bp, Artificial Sequence
  ENSG00000136327_10 (sequence is synthesized)
aaaaaatagagtatttttcctcgtagttcgagaataaaatgtgtggggttgggtcccctgcgcgcctgcggggaacgtaggcgggagtcgtgccccccagaccggtgttcgcatcgctgg

SEQ ID NO: 328051 - DNA, 120 bp, Artificial Sequence
  ENSG00000136327_11 (sequence is synthesized)
ctcgccccttgactggctaagtggggcccggccccagctggatcgaagggcgggttgcagtcccgacacggctttaggaagatacctgggggatggaggggtggtgatgtcagggttggg

SEQ ID NO: 328052 - DNA, 120 bp, Artificial Sequence
  ENSG00000136327_12 (sequence is synthesized)
cgcgggaagaaaaggagaggaggaagctgaggcaactttgggattcttgtcagcgggaggcgtcactggccccagagtgactccgactctccgctgggctcccagagctgctggcgtttc

SEQ ID NO: 328053 - DNA, 120 bp, Artificial Sequence
  ENSG00000136327_13 (sequence is synthesized)
gaataccgaaaagtcaaccctgtggaccacgacagggcagaaggagtttctccggagatgagccggcgaggccaggtgcggggcgcgctgcaccggagcagcccaggccgggccgcaagc

SEQ ID NO: 328054 - DNA, 120 bp, Artificial Sequence
  ENSG00000136327_14 (sequence is synthesized)
tgtttccagagtgcaggagccaagtgctcggggaccctttgaaaagtgcctggggacctgaagagcaccggggaatttgtaacccctatttaagcctgcaagtgcctaagttagctgtga

SEQ ID NO: 328055 - DNA, 120 bp, Artificial Sequence
  ENSG00000136352_0 (sequence is synthesized)
ttaaaggtgtttaccttgtcatcagcatgtaagctaattatctcgggcaagatgtaggcttctattgtcttgttgctttagcgcttacgccccgcctctggtggctgcctaaaacctggc

SEQ ID NO: 328056 - DNA, 120 bp, Artificial Sequence
  ENSG00000136352_1 (sequence is synthesized)
gccgggctaaaacaaacgcgaggcagcccccgagcctccactcaagccaattaaggaggactcggtccactccgttacgtgtacatccaacaagatcggcgttaaggtaacaccagaata

SEQ ID NO: 328057 - DNA, 120 bp, Artificial Sequence
  ENSG00000136352_2 (sequence is synthesized)
tttggcaaagggagaaaaaaaaagcagcgaggcttcgccttccccctctcccttttttttcctcctcttccttcctcctccagccgccgccgaatcatgtcgatgagtccaaagcacacg

SEQ ID NO: 328058 - DNA, 120 bp, Artificial Sequence
  ENSG00000136352_3 (sequence is synthesized)
actccgttctcagtgtctgacatcttgagtcccctggaggaaagctacaagaaagtgggcatggagggcggcggcctcggggctccgctggcggcgtacaggcagggccaggcggcaccg

SEQ ID NO: 328059 - DNA, 120 bp, Artificial Sequence
  ENSG00000136352_4 (sequence is synthesized)
ccaacagcggccatgcagcagcacgccgtggggcaccacggcgccgtcaccgccgcctaccacatgacggcggcgggggtgccccagctctcgcactccgccgtggggggctactgcaac

SEQ ID NO: 328060 - DNA, 120 bp, Artificial Sequence
  ENSG00000136352_5 (sequence is synthesized)
ggcaacctgggcaacatgagcgagctgccgccgtaccaggacaccatgaggaacagcgcctctggccccggatggtacggcgccaacccagacccgcgcttccccgccatctcccgcttc

SEQ ID NO: 328061 - DNA, 120 bp, Artificial Sequence
  ENSG00000136352_6 (sequence is synthesized)
atgggcccggcgagcggcatgaacatgagcggcatgggcggcctgggctcgctgggggacgtgagcaagaacatggccccgctgccaagcgcgccgcgcaggaagcgccgggtgctcttc

SEQ ID NO: 328062 - DNA, 120 bp, Artificial Sequence
  ENSG00000136352_7 (sequence is synthesized)
tcgcaggcgcaggtgtacgagctggagcgacgcttcaagcaacagaagtacctgtcggcgccggagcgcgagcacctggccagcatgatccacctgacgcccacgcaggtcaagatctgg

SEQ ID NO: 328063 - DNA, 120 bp, Artificial Sequence
  ENSG00000136352_8 (sequence is synthesized)
ttccagaaccaccgctacaaaatgaagcgccaggccaaggacaaggcggcgcagcagcaactgcagcaggacagcggcggcggcgggggcggcgggggcaccgggtgcccgcagcagcaa

SEQ ID NO: 328064 - DNA, 120 bp, Artificial Sequence
  ENSG00000136352_9 (sequence is synthesized)
gcggtgccggtcctggtgaaagacggcaaaccgtgccaggcgggtgcccccgcgccgggcgccgccagcctacaaggccacgcgcagcagcaggcgcagcaccaggcgcaggccgcgcag

SEQ ID NO: 328065 - DNA, 120 bp, Artificial Sequence
  ENSG00000136352_10 (sequence is synthesized)
gccggccttggcgcacacccgggccaccagccaggcagcgcaggccagtctccggacctggcgcaccacgccgccagccccgcggcgctgcagggccaggtatccagcctgtcccacctg

SEQ ID NO: 328066 - DNA, 120 bp, Artificial Sequence
  ENSG00000136352_11 (sequence is synthesized)
cccacctgaactcctcgggctcggactacggcaccatgtcctgctccaccttgctatacggtcggacctggtgagaggacgccgggccggccctagcccagcgctctgcctcaccgcttc

SEQ ID NO: 328067 - DNA, 120 bp, Artificial Sequence
  ENSG00000136352_12 (sequence is synthesized)
cctcctgcccgccacacagaccaccatccaccgctgctccacgcgcttcgacttttcttaacaacctggccgcgtttagaccaaggaacaaaaaaaccacaaaggccaaactgctggacg

SEQ ID NO: 328068 - DNA, 120 bp, Artificial Sequence
  ENSG00000136352_13 (sequence is synthesized)
tctttctttttttccccccctaaaatttgtgggtttttttttttaaaaaaagaaaatgaaaaacaaccaagcgcatccaatctcaaggaatctttaagcagagaagggcataaaacagct

SEQ ID NO: 328069 - DNA, 120 bp, Artificial Sequence
  ENSG00000136352_14 (sequence is synthesized)
ttggggtgtctttttttggtgattcaaatgggttttccacgctagggcggggcacagattggagagggctctgtgctgacatggctctggactctaaagaccaaacttcactctgggcac

SEQ ID NO: 328070 - DNA, 120 bp, Artificial Sequence
  ENSG00000136352_15 (sequence is synthesized)
actctgccagcaaagaggactcgcttgtaaataccaggatttttttttttttttgaagggaggacgggagctggggagaggaaagagtcttcaacataacccacttgtcactgacacaaa

SEQ ID NO: 328071 - DNA, 120 bp, Artificial Sequence
  ENSG00000136352_16 (sequence is synthesized)
ggaagtgccccctccccggcaccctctggccgcctaggctcagcggcgaccgccctccgcgaaaatagtttgtttaatgtgaacttgtagctgtaaaacgctgtcaaaagttggactaaa

SEQ ID NO: 328072 - DNA, 120 bp, Artificial Sequence
  ENSG00000136352_17 (sequence is synthesized)
tgcctagtttttagtaatctgtacattttgttgtaaaaagaaaaaccactcccagtccccagcccttcacattttttatgggcattgacaaatctgtgtatattatttggcagtttggta

SEQ ID NO: 328073 - DNA, 120 bp, Artificial Sequence
  ENSG00000136352_18 (sequence is synthesized)
tttgcggcgtcagtctttttctgttgtaacttatgtagatatttggcttaaatatagttcctaagaagcttctaataaattatacaaattaaaaagattctttttctgattaaaaccctc

SEQ ID NO: 328074 - DNA, 120 bp, Artificial Sequence
  ENSG00000136352_19 (sequence is synthesized)
agcaacgcgggggacacccccgattccgctggggagcgcagcccacagctccccctcgccaggcgcccaaggaccctcaaggcgcggggcccacacttgaagcctgggaacgcgcagaca

SEQ ID NO: 328075 - DNA, 120 bp, Artificial Sequence
  ENSG00000136352_20 (sequence is synthesized)
ggaaaccctcttcctcctaagcagtttcttgctcgtcggatgagaggcgcccaattgaagcagaatgatcctcatctactaatatccagcgtggccacaaagcgactggccatttacgcc

SEQ ID NO: 328076 - DNA, 120 bp, Artificial Sequence
  ENSG00000136352_21 (sequence is synthesized)
accactttaaacaaagatatttggttattcccgggaagcaagagcacttttgcatggctgagctgcgggcggaggcgagcctcggcccagcctcccgcccgctgagctgcccgcacctcg

SEQ ID NO: 328077 - DNA, 120 bp, Artificial Sequence
  ENSG00000136352_22 (sequence is synthesized)
gcattcgccccctcctggccagcgctccagccgccggggttcaggctcagttccgcccggcaacagacagacgggcactcacgccgctccctgctcgcgcgctccctgaagcatcagagg

SEQ ID NO: 328078 - DNA, 120 bp, Artificial Sequence
  ENSG00000136352_23 (sequence is synthesized)
ggaaaacagcgtggctctgggctcgggtgctggggctgtgatgtcctcggaaagtcagctccagccccagatccccgcgtgtctgggagatgggcgagggtcagggacaccagccgccgc

SEQ ID NO: 328079 - DNA, 120 bp, Artificial Sequence
  ENSG00000136352_24 (sequence is synthesized)
gcccgatgtggtccggaggcagtgggaaggcgcggggctgggaggccgcggcgggagggaggagcagccccggcaggctcagcgcttacgccccgcctctggtggctgcctaaaacctgg

SEQ ID NO: 328080 - DNA, 120 bp, Artificial Sequence
  ENSG00000136352_25 (sequence is synthesized)
agactgacagacacgtagaccaacagtgcggccccagggttcgtccccagactcgctcgctcatttgttggcgactggggctcagcgcagcgaagcccgatgtggtccggaggcagtggg

SEQ ID NO: 328081 - DNA, 120 bp, Artificial Sequence
  ENSG00000136367_0 (sequence is synthesized)
attccattgtgtgggacgcctagactccagccagtgaatgaggcggaggagtgagggcgaggaggaggaggaggaggagggcgaggaggagaaggaggaggaggaggaggaggcagggag

SEQ ID NO: 328082 - DNA, 120 bp, Artificial Sequence
  ENSG00000136367_1 (sequence is synthesized)
cgagcgagtgcccagggtgaatcaatggaaaccccctcacgaagccggggaaacacttcagccgcagccaaatagcattgattattttccttcacttccctcaccgccgtgaatttattt

SEQ ID NO: 328083 - DNA, 120 bp, Artificial Sequence
  ENSG00000136367_2 (sequence is synthesized)
atttatttttttccgtctccgtccctgacgccccggagcgagcgctggagggagggaggaggaggggaaaaaagaggaatcaacacatcggagaagtcccttccaagagccgccccctcc

SEQ ID NO: 328084 - DNA, 120 bp, Artificial Sequence
  ENSG00000136367_3 (sequence is synthesized)
cctccccgcctcgcgctgctcggtggccgcggttcgactcccgtccctgcttccagctgaggtggtactggctgtcacgctgacatgagcccccagcactcctccgtctaccatggccac

SEQ ID NO: 328085 - DNA, 120 bp, Artificial Sequence
  ENSG00000136367_4 (sequence is synthesized)
ccttaactcagcctctaccactggtaccaccccctcccctgggcacaatgccccgtccctgccttcggacaccttctcctccagcaccccctctgatcctgtcaccaaagatccccctgc

SEQ ID NO: 328086 - DNA, 120 bp, Artificial Sequence
  ENSG00000136367_5 (sequence is synthesized)
tgcctcctccacctctgagaacatgaggtcctcagagccagggggacagctcctggagtcgggctgtggcctcgtcccaccaaaggagattggggagccccaggaagggcctgactgtgg

SEQ ID NO: 328087 - DNA, 120 bp, Artificial Sequence
  ENSG00000136367_6 (sequence is synthesized)
tcacttcccaccaaatgacccaggggtggaaaaggacaaggagcaggaggaggaagaagaagggctccctcccatggacctaagcaaccacttattcttcacagctggaggtgaggccta

SEQ ID NO: 328088 - DNA, 120 bp, Artificial Sequence
  ENSG00000136367_7 (sequence is synthesized)
cctagtggccaagctgtccctgccaggtggcagtgaactcctgttaccaaagggcttcccctggggtgaggcgggcatcaaggaagagcccagtctgcccttccttgcctacccaccccc

SEQ ID NO: 328089 - DNA, 120 bp, Artificial Sequence
  ENSG00000136367_8 (sequence is synthesized)
ctcacacctcactgcccttcacatccaacatggctttgacccaatccaaggctttagctcttctgaccaaattctgtcccatgatacctcagcaccatctccggctgcctgtgaggaaag

SEQ ID NO: 328090 - DNA, 120 bp, Artificial Sequence
  ENSG00000136367_9 (sequence is synthesized)
gcatggagctttctggagctaccagctggctccaaatccacccggagatcccaaagatggccccatggggaacagcgggggcaaccacgtggcggtcttctggctctgccttctgtgccg

SEQ ID NO: 328091 - DNA, 120 bp, Artificial Sequence
  ENSG00000136367_10 (sequence is synthesized)
cctgggtttcagcaagccccaggcctttatggatcacacacagtctcatggggtgaagctaacccctgcccaatatcagggcctgtcaggtagcccagctgtactccaggagggagatga

SEQ ID NO: 328092 - DNA, 120 bp, Artificial Sequence
  ENSG00000136367_11 (sequence is synthesized)
aggctgcaaggccctcataagctttctggagccaaaactccctgctcgcccctcttctgacataccccttgacaacagcagcacagtgaacatggaggcgaatgtggcccagacagagga

SEQ ID NO: 328093 - DNA, 120 bp, Artificial Sequence
  ENSG00000136367_12 (sequence is synthesized)
tggcccccctgaggcagaagtccaggcccttatcctcctggatgaagaagttatggccctcagcccaccctctccacccacagccacctgggaccccagcccaacccaagccaaagaatc

SEQ ID NO: 328094 - DNA, 120 bp, Artificial Sequence
  ENSG00000136367_13 (sequence is synthesized)
gccagtagcagcaggcgaggcagggccagattggttccctgaggggcaagaagaggatggagggctctgccccccactcaaccaaagctcacccacctccaaggaggggggcactctccc

SEQ ID NO: 328095 - DNA, 120 bp, Artificial Sequence
  ENSG00000136367_14 (sequence is synthesized)
tgccccagtgggctcccccgaagaccccagtgacccaccccagccctatcgcctagctgatgactacaccccagcccctgcagccttccagggcctcagcctgtccagccacatgtccct

SEQ ID NO: 328096 - DNA, 120 bp, Artificial Sequence
  ENSG00000136367_15 (sequence is synthesized)
gctccactcacgcaactcctgcaagacactcaagtgtcccaagtgcaactggcactacaagtaccagcagaccctggatgtgcacatgcgagagaagcaccctgagagcaacagtcactg

SEQ ID NO: 328097 - DNA, 120 bp, Artificial Sequence
  ENSG00000136367_16 (sequence is synthesized)
cagctactgcagtgctgggggcgcccacccccgccttgctcgtggagagagctacaactgtggctacaaaccctaccgctgtgacgtctgcaactactctacaaccaccaaaggcaacct

SEQ ID NO: 328098 - DNA, 120 bp, Artificial Sequence
  ENSG00000136367_17 (sequence is synthesized)
cagcatccatatgcagtctgacaagcacctggccaacctacagggcttccaggcgggccctggtgggcagggaagtccaccagaggcatcactcccaccctccgcgggagacaaagagcc

SEQ ID NO: 328099 - DNA, 120 bp, Artificial Sequence
  ENSG00000136367_18 (sequence is synthesized)
taagaccaaatcatcctggcagtgcaaggtgtgcagctacgagacaaacatctcccgtaacctgcgcatccatatgacctctgagaagcacatgcagaatgtcctaatgctgcaccaggg

SEQ ID NO: 328100 - DNA, 120 bp, Artificial Sequence
  ENSG00000136367_19 (sequence is synthesized)
gctgccgctgggcctgccacctggattgatggggccaggccctcctcccccaccaggggctacccccactagcccccctgaactcttccagtactttgggccccaggccctagggcagcc

SEQ ID NO: 328101 - DNA, 120 bp, Artificial Sequence
  ENSG00000136367_20 (sequence is synthesized)
tcagactcccttggctggcccggggctgaggccagacaagcccctggaagcccagctacttctcaatggtttccaccacgtaggagcacctgcccgcaagttccccacatccgcccctgg

SEQ ID NO: 328102 - DNA, 120 bp, Artificial Sequence
  ENSG00000136367_21 (sequence is synthesized)
aagcctatcccctgatgcccacctgcctccaagtcagctcctgggttcctcatctgacagcctgcccacctcaccacccccagacgacagcctgtccctgaaggtgttccgctgcctagt

SEQ ID NO: 328103 - DNA, 120 bp, Artificial Sequence
  ENSG00000136367_22 (sequence is synthesized)
gtgccaggccttcagcacagacagcctggagctgctgctctaccactgcagcataggccggagcctcccggaagctgaatggaaggaggtggctggtgacacccaccgctgcaagctttg

SEQ ID NO: 328104 - DNA, 120 bp, Artificial Sequence
  ENSG00000136367_23 (sequence is synthesized)
ctgctatggcacccagctcaaggccaacttccaactccacctcaagactgacaaacatgctcagaagtaccagctggcagcccacctgcgggaggggggtggagccatgggcaccccttc

SEQ ID NO: 328105 - DNA, 120 bp, Artificial Sequence
  ENSG00000136367_24 (sequence is synthesized)
cccagcatccctgggagatggggctccttatgggtctgtctccccactacacctgcgctgcaacatctgtgactttgagtccaacagcaaggagaagatgcagctgcatgccaggggtgc

SEQ ID NO: 328106 - DNA, 120 bp, Artificial Sequence
  ENSG00000136367_25 (sequence is synthesized)
agcccacgaagaaaacagccaaatctataagtttctgctggacatggagggagcggaggcaggggcagagctggggctataccactgcctgttgtgtgcgtgggagacaccctcccgctt

SEQ ID NO: 328107 - DNA, 120 bp, Artificial Sequence
  ENSG00000136367_26 (sequence is synthesized)
ggctgtgctgcaacacctgcgcacacctgcccaccgcgatgcccaggcccagaggcgtctgcagctgctacagaatggcccaaccactgaggaaggactcgcagctcttcagagcatcct

SEQ ID NO: 328108 - DNA, 120 bp, Artificial Sequence
  ENSG00000136367_27 (sequence is synthesized)
gagcttcagccacgggcagctccggactcccgggaaggctcctgtcacccccttagctgagccacccacccctgagaaagatgcccagaacaagacagaacaattggcttcagaagagac

SEQ ID NO: 328109 - DNA, 120 bp, Artificial Sequence
  ENSG00000136367_28 (sequence is synthesized)
agaaaacaagactggcccttccagagacagtgccaaccagaccacggtatactgctgtccatactgcagcttcctgagcccagagtccagccaggtgagggctcatacactctcccagca

SEQ ID NO: 328110 - DNA, 120 bp, Artificial Sequence
  ENSG00000136367_29 (sequence is synthesized)
tgcagtgcagcccaagtacagatgcccactgtgccaggaacagctggtgggccggcctgccctgcacttccaccttagccaccttcacaacgtggtgcccgagtgcgttgagaagctgct

SEQ ID NO: 328111 - DNA, 120 bp, Artificial Sequence
  ENSG00000136367_30 (sequence is synthesized)
gcttgtagctacaactgtagaaatgacatttacaaccaaagtgctgtctgcacccacattaagccctctggacaatggccaagaaccccccactcatgggccagagcctacaccgagcag

SEQ ID NO: 328112 - DNA, 120 bp, Artificial Sequence
  ENSG00000136367_31 (sequence is synthesized)
agaccaggcagcagaaggccctaacctgaccccagaagccagtccagatcctcttcctgagcctcccctggcctcagttgaggtcccagacaaaccctcaggaagccctggccaaccccc

SEQ ID NO: 328113 - DNA, 120 bp, Artificial Sequence
  ENSG00000136367_32 (sequence is synthesized)
ttctccagccccatctccagtccctgaacctgatgcccaagctgaagacgtagctcctccgcccaccatggctgaggaggaagaggggaccactggggagctccgctctgcagagccagc

SEQ ID NO: 328114 - DNA, 120 bp, Artificial Sequence
  ENSG00000136367_33 (sequence is synthesized)
tccagctgactctcgccaccctctgacctatcggaaaaccaccaactttgccctggacaagtttctcgaccctgcccggccctataagtgcactgtgtgtaaggagtccttcacccagaa

SEQ ID NO: 328115 - DNA, 120 bp, Artificial Sequence
  ENSG00000136367_34 (sequence is synthesized)
gaatattctgttggttcattataattctgtctcccaccttcacaagatgaagaaggctgccattgacccctctgcccctgcacggggagaggccggtgccccacccaccaccactgctgc

SEQ ID NO: 328116 - DNA, 120 bp, Artificial Sequence
  ENSG00000136367_35 (sequence is synthesized)
cacagacaagccctttaagtgcacagtctgcagagtctcctacaaccagagctccaccctggagatccacatgcggtcagttctgcatcagactcgctctcggggaaccaagactgattc

SEQ ID NO: 328117 - DNA, 120 bp, Artificial Sequence
  ENSG00000136367_36 (sequence is synthesized)
caagattgaagggccagaacgcagccaagaagagcccaaggaaggcgagacagagggggaggtgggcactgagaagaagggccctgacaccagtggcttcatatctggattgcctttcct

SEQ ID NO: 328118 - DNA, 120 bp, Artificial Sequence
  ENSG00000136367_37 (sequence is synthesized)
gtcccctcccccacctcccttggacctgcaccgattcccagcccctctcttcaccccaccagtcctgccccccttccctctggtgcccgaatcactgcttaagctccagcagcagcagct

SEQ ID NO: 328119 - DNA, 120 bp, Artificial Sequence
  ENSG00000136367_38 (sequence is synthesized)
ggcctgcacctgtgctgtccctgccagctgccacccctcctcctccaccccaacctcccaaggctgagctggctgagcgggagtgggagcggccccccatggccaaagagggtaatgagg

SEQ ID NO: 328120 - DNA, 120 bp, Artificial Sequence
  ENSG00000136367_39 (sequence is synthesized)
cagggccttcctcaccccccgacccattgcccaacgaggctgcccgcactgcagccaaagcccttctagaaaactttggctttgagctggtgatccagtacaatgaagggaagcaagctg

SEQ ID NO: 328121 - DNA, 120 bp, Artificial Sequence
  ENSG00000136367_40 (sequence is synthesized)
tgccccctccccctaccccacccccacctgaggccctcgggggtggggacaagctggcctgtggggcctgtgggaaactcttctccaatatgcttatcctcaagacacacgaggaacatg

SEQ ID NO: 328122 - DNA, 120 bp, Artificial Sequence
  ENSG00000136367_41 (sequence is synthesized)
tccaccgccgctttctgccctttgaagccctgagccgttatgctgctcagtttcgaaagagctatgacagcctatacccgccccttgcagagcctcccaaacctcctgatgggtctctgg

SEQ ID NO: 328123 - DNA, 120 bp, Artificial Sequence
  ENSG00000136367_42 (sequence is synthesized)
attcacctgttccccatctgggcccacccttcctggtcccagagcctgaggcaggggggacccgtgcccctgaagagcgaagtcgagcagggggacactggcccatagaagaggaagaaa

SEQ ID NO: 328124 - DNA, 120 bp, Artificial Sequence
  ENSG00000136367_43 (sequence is synthesized)
gctccagagggaatcttcctcccctggtgcctgccggccgccggttctccagaaccaagttcacagagttccagacccaagccctgcagtctttctttgagactagcgcctaccccaaag

SEQ ID NO: 328125 - DNA, 120 bp, Artificial Sequence
  ENSG00000136367_44 (sequence is synthesized)
acggagaggtggagcgactcgcaagtctgttgggtctggctagccgtgtggtggtggtgtggttccagaatgcccgccagaaagcacgcaaaaatgcctgtgagggtgggtccatgccaa

SEQ ID NO: 328126 - DNA, 120 bp, Artificial Sequence
  ENSG00000136367_45 (sequence is synthesized)
ccggaggaggcactgggggagcctccggctgcaggcgttgccacgccactttctcctgtgtttttgagttggtgcgccacctcaagaagtgctatgatgaccagacccttgaagaggagg

SEQ ID NO: 328127 - DNA, 120 bp, Artificial Sequence
  ENSG00000136367_46 (sequence is synthesized)
aggaagaggcagagagaggggaagaggaggaagaggtggaagaagaagaagtagaggaggaacagggccttgaacctccagcagggcctgagggcccattaccagagcctccagatgggg

SEQ ID NO: 328128 - DNA, 120 bp, Artificial Sequence
  ENSG00000136367_47 (sequence is synthesized)
aggagctgagccaagcagaggcaacaaaggcaggaggcaaagagcctgaagagaaggctactccatcaccttccccagcccatacctgtgaccagtgtgccatttctttctccagccagg

SEQ ID NO: 328129 - DNA, 120 bp, Artificial Sequence
  ENSG00000136367_48 (sequence is synthesized)
acctcctgaccagtcaccgccgactacatttcctgccatctctgcagcccagtgctcccccccaactcctagatctgcccttgctggtgtttggggagagaaaccccctggtggcagcca

SEQ ID NO: 328130 - DNA, 120 bp, Artificial Sequence
  ENSG00000136367_49 (sequence is synthesized)
cctcaccaatgccaggtccacctctcaaacggaagcatgaggacggcagcttgtctcccacaggcagtgaagcagggggaggaggggagggcgagccccccagggacaagcgcctgcgca

SEQ ID NO: 328131 - DNA, 120 bp, Artificial Sequence
  ENSG00000136367_50 (sequence is synthesized)
ccaccatcttgcctgagcagctagagatcctgtaccgttggtacatgcaggattccaacccaacacgcaagatgctcgactgcatctccgaggaggtggggctcaaaaagcgagtggtac

SEQ ID NO: 328132 - DNA, 120 bp, Artificial Sequence
  ENSG00000136367_51 (sequence is synthesized)
aggtctggttccagaataccagggcccgggagaggaaaggccagtttcgaagcacccctgggggggtgcctagtccagcagtgaaaccgcctgccacagccacccctgcatccttgccca

SEQ ID NO: 328133 - DNA, 120 bp, Artificial Sequence
  ENSG00000136367_52 (sequence is synthesized)
agttcaacctcttattaggcaaggtagatgatggcactgggagggaagccccaaagagggaagcacctgcttttccctaccccactgccacgcttgcttctgggccccagcctttcctac

SEQ ID NO: 328134 - DNA, 120 bp, Artificial Sequence
  ENSG00000136367_53 (sequence is synthesized)
cacctgggaaagaggccaccaccccaacaccagagccacctctacctctcctacctccccctccacccagtgaggaagagggcccagaggaaccacctaaagcttctccagagagtgagg

SEQ ID NO: 328135 - DNA, 120 bp, Artificial Sequence
  ENSG00000136367_54 (sequence is synthesized)
cttgcagtctctctgcaggagatctgagtgattcatctgcttccagcctagctgaaccagaatcccctggggctggagggaccagtgggggacctggaggtgggactggggttccagatg

SEQ ID NO: 328136 - DNA, 120 bp, Artificial Sequence
  ENSG00000136367_55 (sequence is synthesized)
gaatggggcagcggcgctacaggacccagatgagcagcctgcagctgaagatcatgaaagcctgctatgaagcttaccgcacccccaccatgcaggagtgtgaggtgctgggagaggaga

SEQ ID NO: 328137 - DNA, 120 bp, Artificial Sequence
  ENSG00000136367_56 (sequence is synthesized)
ttgggctgcccaagagagtcatccaggtctggttccagaatgctcgtgccaaggaaaagaaggccaaactacaggggacagccgctgggagcactgggggcagcagtgagggcctcttag

SEQ ID NO: 328138 - DNA, 120 bp, Artificial Sequence
  ENSG00000136367_57 (sequence is synthesized)
cagcccagcgcactgactgcccctattgtgatgtcaagtatgatttctatgtctcctgccgaggccatctcttttcccgtcagcacctggccaagctcaaggaggcggttcgagcccagc

SEQ ID NO: 328139 - DNA, 120 bp, Artificial Sequence
  ENSG00000136367_58 (sequence is synthesized)
tgaagagtgaaagcaagtgctacgacttggccccagcacctgaggctcccccagctctcaaggccccacctgccaccacacctgcctccatgcccctcggggctgccccaaccttgcctc

SEQ ID NO: 328140 - DNA, 120 bp, Artificial Sequence
  ENSG00000136367_59 (sequence is synthesized)
gcctggcgccggtcctcttatctggcccagctctggctcagcccccgctgggcaacttagctcctttcaattcaggcccggcagcctcctcaggcctcctcggcctcgccacttcggtcc

SEQ ID NO: 328141 - DNA, 120 bp, Artificial Sequence
  ENSG00000136367_60 (sequence is synthesized)
tgcctaccaccacagtggtccagactgctggcccaggccgccccttacctcagagacccatgcccgaccaaaccaacacctccacagcaggcaccactgaccctgtcccaggccctccta

SEQ ID NO: 328142 - DNA, 120 bp, Artificial Sequence
  ENSG00000136367_61 (sequence is synthesized)
ctgagcccttgggggacaaggtctccagtgagcgaaagccagttgcaggccccaccagctcctccaatgatgccctcaagaacctcaaagcattgaagaccactgtcccagccctgttgg

SEQ ID NO: 328143 - DNA, 120 bp, Artificial Sequence
  ENSG00000136367_62 (sequence is synthesized)
ggggccagttcctgccctttccattgccccctgctgggggaacagcaccgccagctgtctttggcccccagctacagggggcctacttccaacagctctatggcatgaagaaggggctat

SEQ ID NO: 328144 - DNA, 120 bp, Artificial Sequence
  ENSG00000136367_63 (sequence is synthesized)
ttcccatgaaccccatgatacctcagaccctcattgggctgctccccaatgccctcctccagccgccaccccagccccctgagcccacagccacagcacctccaaagcctcctgaactgc

SEQ ID NO: 328145 - DNA, 120 bp, Artificial Sequence
  ENSG00000136367_64 (sequence is synthesized)
ctgctccaggggagggggaagctggtgaggttgatgagctgctgacaggcagcactggcatctccaccgtggatgtaacccatcgctacctgtgccgccagtgcaagatggcatttgacg

SEQ ID NO: 328146 - DNA, 120 bp, Artificial Sequence
  ENSG00000136367_65 (sequence is synthesized)
gggaggccccggctactgcccaccagagatccttctgcttctttgggcggggctctgggggctccatgccacccccattgcgggtgcccatctgcacctaccactgcctggcatgtgagg

SEQ ID NO: 328147 - DNA, 120 bp, Artificial Sequence
  ENSG00000136367_66 (sequence is synthesized)
tgctgctgagtgggcgtgaagccctagcctcccacctgcgctcctcggcccacaggcgcaaggcagccccacctcaagggggcccacccatctccatcaccaacgccgccactgctgcct

SEQ ID NO: 328148 - DNA, 120 bp, Artificial Sequence
  ENSG00000136367_67 (sequence is synthesized)
cggctgctgtggcttttgccaaagaggaagcaagattacctcacacggactccaacccaaaaactacgactacctctacacttctagctttataaacagattaaccaagatggggagagg

SEQ ID NO: 328149 - DNA, 120 bp, Artificial Sequence
  ENSG00000136367_68 (sequence is synthesized)
ggagggcctcagggctccctcttttaccccaaggggtgttcggtgggagctcaaatccctcaccccaccccctggccccgcccacctcacaggaactgttcagttcccaccctcagtggg

SEQ ID NO: 328150 - DNA, 120 bp, Artificial Sequence
  ENSG00000136367_69 (sequence is synthesized)
caccacacaccccacttccagcagagtcctgcctcctcccaatccccacagacacacacattgatcctcctcctcagctccttgcagatgtagcccttgcccatcttcacagacacatac

SEQ ID NO: 328151 - DNA, 120 bp, Artificial Sequence
  ENSG00000136367_70 (sequence is synthesized)
acccatcttggcaccctgattattcatacatgtctgcctaccacacacaaaatatatccttggttctatcttccttttcctcactgaattcccagctccccatccccataaatgcataca

SEQ ID NO: 328152 - DNA, 120 bp, Artificial Sequence
  ENSG00000136367_71 (sequence is synthesized)
catacatgcacacacacacgttatcccatgatgttccactgagaaaacaccaaaaaattttgaaaaagaagataaaaagaagaaacgaaaaagaaagcccaaggcaaagaagggggaagg

SEQ ID NO: 328153 - DNA, 120 bp, Artificial Sequence
  ENSG00000136367_72 (sequence is synthesized)
aaaacaaacttcgccactctctcttctccttcctaaccctttgtctagagcaccacaccgctcacaaactctttccaaatgctcagttggctcccaaagttggagcctggcatgggcagg

SEQ ID NO: 328154 - DNA, 120 bp, Artificial Sequence
  ENSG00000136367_73 (sequence is synthesized)
gagcccacaaaactctaaccaaactggaggctggcatgggagaagtgcttctggttcactcttcctaccctctccctcctaaccctctccttgcctgacaggggagcccctgtggcctgg

SEQ ID NO: 328155 - DNA, 120 bp, Artificial Sequence
  ENSG00000136367_74 (sequence is synthesized)
actctaggggatgccgccaccagaaacccctctgccaatccctaccttgcaccctgggaactgcagtaacttattctcaaaggctttaaacacagagatcctctcagcggccgtgggcct

SEQ ID NO: 328156 - DNA, 120 bp, Artificial Sequence
  ENSG00000136367_75 (sequence is synthesized)
gccccttgtcctagccctgccacgtgagggtccagcctccagggacaggcactgcccaccaacggcaaatccaaagttctttcaaaaaaaaaaactgaaacacaaccaaaaaagcaagag

SEQ ID NO: 328157 - DNA, 120 bp, Artificial Sequence
  ENSG00000136367_76 (sequence is synthesized)
cgagagagagtacgtgcacacgcgcacaaaagagagaaacggacaccagaggaatgaactaaagaaaaacgtaaacttggaaaatacagaaaaaaaaaaaaaggaagaaaactcccatca

SEQ ID NO: 328158 - DNA, 120 bp, Artificial Sequence
  ENSG00000136367_77 (sequence is synthesized)
atacaggaatcacttgctgctttgccggggtgctgtatcacctacgggccagggcctgggtcgaattggaaatagatgtttttgagagaggatctgggagttactgtaggatttggggct

SEQ ID NO: 328159 - DNA, 120 bp, Artificial Sequence
  ENSG00000136367_78 (sequence is synthesized)
acgcccgttgtggcggtgccgagagcaggccagggctcgagacacgcgctatgtaatgggaggccgcgacccccgcggtggccaggggagcgaggccgccccttgcattctgctcctcat

SEQ ID NO: 328160 - DNA, 120 bp, Artificial Sequence
  ENSG00000136367_79 (sequence is synthesized)
tgttggccccgcacggctcccgggggctggtacaggtctcatgcctgaggctgagccaggcaccccgaggcgcggatgcatgatgggagatgtagttccaaagggagactttgccatctc

SEQ ID NO: 328161 - DNA, 120 bp, Artificial Sequence
  ENSG00000136367_80 (sequence is synthesized)
gccccgcccgtcgctatggcgacaggaaagctgcacttggtgcctgcggtactctacctaaagctgaactggggctacaaggcggcggggagagtcgggtgcaaggagctcaagccccag

SEQ ID NO: 328162 - DNA, 120 bp, Artificial Sequence
  ENSG00000136367_81 (sequence is synthesized)
tcccgtctccaacaccccccgccgcacccccaacgcaggcagatgggcctggaatacaagccattcacaccgtccaacagatatctgctatagcagccagctaagcgcagggtactggct

SEQ ID NO: 328163 - DNA, 120 bp, Artificial Sequence
  ENSG00000136367_82 (sequence is synthesized)
aaaacaagactggcccttccagagacagtgccaaccagaccacggtcagaattggggtaactgggaagagctgaagtgggggcctggctttactgagatctgctcatattctaaaggcag

SEQ ID NO: 328164 - DNA, 120 bp, Artificial Sequence
  ENSG00000136367_83 (sequence is synthesized)
acgtaattttgtcatgctttgacttatttcactcagaatagcacagttaagaaattccacccagatccagttccacatgttcagcactttcgggggcagagctggcccagcagggtcaag

SEQ ID NO: 328165 - DNA, 120 bp, Artificial Sequence
  ENSG00000136367_84 (sequence is synthesized)
cacagagggagatgataggagggagacagcaggaacttgagggaaagatgaataaaggaattgtgctgagagtaggaaagagtgggggtacatgctggaaggaggggaggagaaaggcaa

SEQ ID NO: 328166 - DNA, 120 bp, Artificial Sequence
  ENSG00000136371_0 (sequence is synthesized)
agaccgaacccgagggcgcccagggcgccgagggcgggactggactcggcttgggcgtgagatggcggcggcagcggtgagcagcgccaagcggagcctgcggggagagctgaagcagcg

SEQ ID NO: 328167 - DNA, 120 bp, Artificial Sequence
  ENSG00000136371_1 (sequence is synthesized)
tctgcgggcgatgagtgccgaggagcggctacgccagtcccgcgtactgagccagaaggtgattgcccacagtgagtatcaaaagtccaaaagaatttccatctttctgagcatgcaaga

SEQ ID NO: 328168 - DNA, 120 bp, Artificial Sequence
  ENSG00000136371_2 (sequence is synthesized)
tgaaattgagacagaagagatcatcaaggacattttccaacgaggcaaaatctgcttcatccctcggtaccggttccagagcaatcacatggatatggtgagaatagaatcaccagagga

SEQ ID NO: 328169 - DNA, 120 bp, Artificial Sequence
  ENSG00000136371_3 (sequence is synthesized)
gccttgtccacagggggacttgatctcatcttcatgccaggccttgggtttgacaaacatggcaaccgactggggaggggcaagggctactatgatgcctatctgaagcgctgtttgcag

SEQ ID NO: 328170 - DNA, 120 bp, Artificial Sequence
  ENSG00000136371_4 (sequence is synthesized)
catcaggaagtgaagccctacaccctggcgttggctttcaaagaacagatttgcctccaggtcccagtgaatgaaaacgacatgaaggtagatgaagtcctttacgaagactcgtcaaca

SEQ ID NO: 328171 - DNA, 120 bp, Artificial Sequence
  ENSG00000136371_5 (sequence is synthesized)
gcttaaatctggattactacagccaaataatcagtgttttatatgagagtaaagcaaagtatgtgtatttttcccttgtcaaaaattagttgaaattgttcattaatgtgaatacagact

SEQ ID NO: 328172 - DNA, 120 bp, Artificial Sequence
  ENSG00000136371_6 (sequence is synthesized)
gcattttaaaattgtaattatgaaataccttatataaaaccatctttaaaaaccaatagaagtgtgaatagtagaatattaattaaaatggaggctatcagcctgtgattttcagcttaa

SEQ ID NO: 328173 - DNA, 120 bp, Artificial Sequence
  ENSG00000136371_7 (sequence is synthesized)
tgaacagtacaagagatgccaggcaccgtgggtactgccggccatctttaccatccccgccagtggcgctgccgcctccgcggtcccggtgagggcccaggctcagggaggtcaggcggc

SEQ ID NO: 328174 - DNA, 120 bp, Artificial Sequence
  ENSG00000136371_8 (sequence is synthesized)
agggcagcgacggcgcctcgccaccgctcccctaaccggggagggcgagccggaccacggggaccgcacgagggctgggtcccaagggccagaggcgaggtgattgcccacagtgagtat

SEQ ID NO: 328175 - DNA, 120 bp, Artificial Sequence
  ENSG00000136371_9 (sequence is synthesized)
ctggattactacagccaaataatcagtgttttatatgagagtaaagcaaataggggctggagttcgaggttacagtgagctatgattgcggcactgaagtccagcctgggtgacagagca

SEQ ID NO: 328176 - DNA, 120 bp, Artificial Sequence
  ENSG00000136371_10 (sequence is synthesized)
tgaaaaatttcttcctgtacttatttcttcagattgtcagcagtgttttctacttgtcatccaatagtacttcctgacaaaaagatgcgtcagggtctttttccccctaaattgtttcac

SEQ ID NO: 328177 - DNA, 120 bp, Artificial Sequence
  ENSG00000136371_11 (sequence is synthesized)
cagtatttcatccacatttccatggtatgaagaagaagtaatttttaaatgaccaaaggagaagtcccatctaacatccttctgtacatcattactggaaatgaagagctgacagtcata

SEQ ID NO: 328178 - DNA, 120 bp, Artificial Sequence
  ENSG00000136378_0 (sequence is synthesized)
ctttctttctttctctccttctagctctcttgtcttttctttgcctctgcagcggccaagggggcgggccctgcagcctttgttgcccgcggaccgagcgcagccgaacggagtcggggc

SEQ ID NO: 328179 - DNA, 120 bp, Artificial Sequence
  ENSG00000136378_1 (sequence is synthesized)
cgggagctgcacgccggccgggcatgtcctgagccggacctgggaccaggcagcgaccggacgggacggacgagagcgtgcgcgcggggtcacccggcggccgcccggttcctgccatgc

SEQ ID NO: 328180 - DNA, 120 bp, Artificial Sequence
  ENSG00000136378_2 (sequence is synthesized)
cccagtccccgcagccccgcgcctttgctgcgccccctcctcctgctcctctgcgctctggctcccggcgcccccggacccgcaccaggacgtgcaaccgagggccgggcggcactggac

SEQ ID NO: 328181 - DNA, 120 bp, Artificial Sequence
  ENSG00000136378_3 (sequence is synthesized)
ccgggcggcactggacatcgtgcacccggttcgagtcgacgcggggggctccttcctgtcctacgagctgtggccccgcgcactgcgcaagcgggatgtatctgtgcgccgagacgcgcc

SEQ ID NO: 328182 - DNA, 120 bp, Artificial Sequence
  ENSG00000136378_4 (sequence is synthesized)
cgccttctacgagctacaataccgcgggcgcgagctgcgcttcaacctgaccgccaatcagcacctgctggcgcccggctttgtgagcgagacgcggcggcgcggcggcctgggccgcgc

SEQ ID NO: 328183 - DNA, 120 bp, Artificial Sequence
  ENSG00000136378_5 (sequence is synthesized)
gcacatccgggcccacaccccggcctgccacctgcttggcgaggtgcaggaccctgagctcgagggtggcctggcggccatcagcgcctgcgacggcctgaaaggtgtgttccagctctc

SEQ ID NO: 328184 - DNA, 120 bp, Artificial Sequence
  ENSG00000136378_6 (sequence is synthesized)
caacgaggactacttcattgagcccctggacagtgccccggcccggcctggccacgcccagccccatgtggtgtacaagcgtcaggccccggagaggctggcacagcggggtgattccag

SEQ ID NO: 328185 - DNA, 120 bp, Artificial Sequence
  ENSG00000136378_7 (sequence is synthesized)
tgctccaagcacctgtggagtgcaagtgtacccagagctggagtctcgacgggagcgttgggagcagcggcagcagtggcggcggccacggctgaggcgtctacaccagcggtcggtcag

SEQ ID NO: 328186 - DNA, 120 bp, Artificial Sequence
  ENSG00000136378_8 (sequence is synthesized)
caaagagaagtgggtggagaccctggtagtagctgatgccaaaatggtggagtaccacggacagccgcaggttgagagctatgtgctgaccatcatgaacatggtggctggcctgtttca

SEQ ID NO: 328187 - DNA, 120 bp, Artificial Sequence
  ENSG00000136378_9 (sequence is synthesized)
tgaccccagcattgggaaccccatccacatcaccattgtgcgcctggtcctgctggaagatgaggaggaggacctaaagatcacgcaccatgcagacaacaccctgaagagcttctgcaa

SEQ ID NO: 328188 - DNA, 120 bp, Artificial Sequence
  ENSG00000136378_10 (sequence is synthesized)
gtggcagaaaagcatcaacatgaagggggatgcccatcccctgcaccatgacactgccatcctgctcaccagaaaggacctgtgtgcagccatgaaccggccctgtgagaccctgggact

SEQ ID NO: 328189 - DNA, 120 bp, Artificial Sequence
  ENSG00000136378_11 (sequence is synthesized)
gtcccatgtggcgggcatgtgccagccgcaccgcagctgcagcatcaacgaggacacgggcctgccgctggccttcactgtagcccacgagctcgggcacagttttggcattcagcatga

SEQ ID NO: 328190 - DNA, 120 bp, Artificial Sequence
  ENSG00000136378_12 (sequence is synthesized)
cggaagcggcaatgactgtgagcccgttgggaaacgacctttcatcatgtctccacagctcctgtacgacgccgctcccctcacctggtcccgctgcagccgccagtatatcaccaggtt

SEQ ID NO: 328191 - DNA, 120 bp, Artificial Sequence
  ENSG00000136378_13 (sequence is synthesized)
ccttgaccgtgggtggggcctgtgcctggacgaccctcctgccaaggacattatcgacttcccctcggtgccacctggcgtcctctatgatgtaagccaccagtgccgcctccagtacgg

SEQ ID NO: 328192 - DNA, 120 bp, Artificial Sequence
  ENSG00000136378_14 (sequence is synthesized)
ggcctactctgccttctgcgaggacatggataatgtctgccacacactctggtgctctgtggggaccacctgtcactccaagctggatgcagctgtggacggcacccggtgtggggagaa

SEQ ID NO: 328193 - DNA, 120 bp, Artificial Sequence
  ENSG00000136378_15 (sequence is synthesized)
taagtggtgtctcagtggggagtgcgtacccgtgggcttccggcccgaggccgtggatggtggctggtctggctggagcgcctggtccatctgctcacggagctgtggcatgggcgtaca

SEQ ID NO: 328194 - DNA, 120 bp, Artificial Sequence
  ENSG00000136378_16 (sequence is synthesized)
gagcgccgagcggcagtgcacgcagcctacgcccaaatacaaaggcagatactgtgtgggtgagcgcaagcgcttccgcctctgcaacctgcaggcctgccctgctggccgcccctcctt

SEQ ID NO: 328195 - DNA, 120 bp, Artificial Sequence
  ENSG00000136378_17 (sequence is synthesized)
ccgccacgtccagtgcagccactttgacgctatgctctacaagggccagctgcacacatgggtgcccgtggtcaatgacgtgaacccctgcgagctgcactgccggcccgcgaatgagta

SEQ ID NO: 328196 - DNA, 120 bp, Artificial Sequence
  ENSG00000136378_18 (sequence is synthesized)
ctttgccgagaagctgcgggacgccgtggtcgatggcaccccctgctaccaggtccgagccagccgggacctctgcatcaacggcatctgtaagaacgtgggctgtgacttcgagattga

SEQ ID NO: 328197 - DNA, 120 bp, Artificial Sequence
  ENSG00000136378_19 (sequence is synthesized)
ctccggtgctatggaggaccgctgtggtgtgtgccacggcaacggctccacctgccacaccgtgagcgggaccttcgaggaggccgagggcctggggtatgtggatgtggggctgatccc

SEQ ID NO: 328198 - DNA, 120 bp, Artificial Sequence
  ENSG00000136378_20 (sequence is synthesized)
agcgggcgcacgcgagatccgcatccaagaggttgccgaggctgccaacttcctggcactgcggagcgaggacccggagaagtacttcctcaatggtggctggaccatccagtggaacgg

SEQ ID NO: 328199 - DNA, 120 bp, Artificial Sequence
  ENSG00000136378_21 (sequence is synthesized)
ggactaccaggtggcagggaccaccttcacatacgcacgcaggggcaactgggagaacctcacgtccccgggtcccaccaaggagcctgtctggatccagctgctgttccaggagagcaa

SEQ ID NO: 328200 - DNA, 120 bp, Artificial Sequence
  ENSG00000136378_22 (sequence is synthesized)
ccctggggtgcactacgagtacaccatccacagggaggcaggtggccacgacgaggtcccgccgcccgtgttctcctggcattatgggccctggaccaagtgcacagtcacctgcggcag

SEQ ID NO: 328201 - DNA, 120 bp, Artificial Sequence
  ENSG00000136378_23 (sequence is synthesized)
aggtgtgcagaggcagaatgtgtactgcttggagcggcaggcagggcccgtggacgaggagcactgtgaccccctgggccggcctgatgaccaacagaggaagtgcagcgagcagccctg

SEQ ID NO: 328202 - DNA, 120 bp, Artificial Sequence
  ENSG00000136378_24 (sequence is synthesized)
ccctgccaggtggtgggcaggtgagtggcagctgtgctccagctcctgcgggcctgggggcctctcccgccgggccgtgctctgcatccgcagcgtggggctggatgagcagagcgccct

SEQ ID NO: 328203 - DNA, 120 bp, Artificial Sequence
  ENSG00000136378_25 (sequence is synthesized)
ggagccacccgcctgtgaacaccttccccggccccctactgaaaccccttgcaaccgccatgtaccctgtccggccacctgggctgtggggaactggtctcagtgctcagtgacatgtgg

SEQ ID NO: 328204 - DNA, 120 bp, Artificial Sequence
  ENSG00000136378_26 (sequence is synthesized)
ggagggcactcagcgccgaaatgtcctctgcaccaatgacaccggtgtcccctgtgacgaggcccagcagccagccagcgaagtcacctgctctctgccactctgtcggtggcccctggg

SEQ ID NO: 328205 - DNA, 120 bp, Artificial Sequence
  ENSG00000136378_27 (sequence is synthesized)
cacactgggccctgaaggctcaggcagcggctcctccagccacgagctcttcaacgaggctgacttcatcccgcaccacctggccccacgcccttcacccgcctcatcacccaagccagg

SEQ ID NO: 328206 - DNA, 120 bp, Artificial Sequence
  ENSG00000136378_28 (sequence is synthesized)
caccatgggcaacgccattgaggaggaggctccagagctggacctgccggggcccgtgtttgtggacgacttctactacgactacaatttcatcaatttccacgaggatctgtcctacgg

SEQ ID NO: 328207 - DNA, 120 bp, Artificial Sequence
  ENSG00000136378_29 (sequence is synthesized)
gccctctgaggagcccgatctagacctggcggggacaggggaccggacacccccaccacacagccatcctgctgcgccctccacgggtagccccgtgcctgccacagagcctcctgcagc

SEQ ID NO: 328208 - DNA, 120 bp, Artificial Sequence
  ENSG00000136378_30 (sequence is synthesized)
caaggaggagggggtactgggaccttggtccccgagcccttggcctagccaggccggccgctccccacccccaccctcagagcagacccctgggaaccctttgatcaatttcctgcctga

SEQ ID NO: 328209 - DNA, 120 bp, Artificial Sequence
  ENSG00000136378_31 (sequence is synthesized)
ggaagacacccccataggggccccagatcttgggctccccagcctgtcctggcccagggtttccactgatggcctgcagacacctgccacccctgagagccaaaatgatttcccagttgg

SEQ ID NO: 328210 - DNA, 120 bp, Artificial Sequence
  ENSG00000136378_32 (sequence is synthesized)
caaggacagccagagccagctgccccctccatggcgggacaggaccaatgaggttttcaaggatgatgaggaacccaagggccgaggagcaccccacctgcccccgagacccagctccac

SEQ ID NO: 328211 - DNA, 120 bp, Artificial Sequence
  ENSG00000136378_33 (sequence is synthesized)
gctgccccctttgtcccctgttggcagcacccactcctctcctagtcctgacgtggcggagctgtggacaggaggcacagtggcctgggagccagctctggagggtggcctggggcctgt

SEQ ID NO: 328212 - DNA, 120 bp, Artificial Sequence
  ENSG00000136378_34 (sequence is synthesized)
ggacagtgaactgtggcccactgttggggtggcttctctccttcctcctcccatagcccctctgccagagatgaaggtcagggacagttccctggagccggggactccctccttcccaac

SEQ ID NO: 328213 - DNA, 120 bp, Artificial Sequence
  ENSG00000136378_35 (sequence is synthesized)
cccaggaccaggctcatgggacctgcagactgtggcagtgtgggggaccttcctccccacaaccctgactggcctcgggcacatgcctgagcctgccctgaacccaggacccaagggtca

SEQ ID NO: 328214 - DNA, 120 bp, Artificial Sequence
  ENSG00000136378_36 (sequence is synthesized)
gcctgagtccctcagccctgaggtgcccctgagctctaggctgctgtccacaccagcttgggacagccccgccaacagccacagagtccctgagacccagccgctggctcccagcctggc

SEQ ID NO: 328215 - DNA, 120 bp, Artificial Sequence
  ENSG00000136378_37 (sequence is synthesized)
tgaagcggggccccccgcggacccgttggttgtcaggaacgccggctggcaagcgggaaactggagcgagtgctctaccacctgtggcctgggtgcggtctggaggccggtgcgctgtag

SEQ ID NO: 328216 - DNA, 120 bp, Artificial Sequence
  ENSG00000136378_38 (sequence is synthesized)
ctccggccgggatgaggactgcgcccccgctggccggccccagcctgcccgccgctgccacctgcggccctgtgccacctggcactcaggcaactggagtaagtgctcccgcagctgcgg

SEQ ID NO: 328217 - DNA, 120 bp, Artificial Sequence
  ENSG00000136378_39 (sequence is synthesized)
cggaggttcctcagtgcgggacgtgcagtgtgtggacacacgggacctccggccactgcggcccttccattgtcagcccgggcctgccaagccgcctgcgcaccggccctgcggggccca

SEQ ID NO: 328218 - DNA, 120 bp, Artificial Sequence
  ENSG00000136378_40 (sequence is synthesized)
gccctgcctcagctggtacacatcttcctggagggagtgctccgaggcctgtggcggtggtgagcagcagcgtctagtgacctgcccggagccaggcctctgcgaggaggcgctgagacc

SEQ ID NO: 328219 - DNA, 120 bp, Artificial Sequence
  ENSG00000136378_41 (sequence is synthesized)
caacaccacccggccctgcaacacccacccctgcacgcagtgggtggtggggccctggggccagtgctcaggcccctgtggtggtggtgtccagcggcgcctggtcaagtgtgtcaacac

SEQ ID NO: 328220 - DNA, 120 bp, Artificial Sequence
  ENSG00000136378_42 (sequence is synthesized)
ccagacagggctgcccgaggaagacagtgaccagtgtggccacgaggcctggcctgagagctcccggccgtgtggcaccgaggattgtgagcccgtcgagcctccccgctgtgagcggga

SEQ ID NO: 328221 - DNA, 120 bp, Artificial Sequence
  ENSG00000136378_43 (sequence is synthesized)
ccgcctgtccttcgggttctgcgagacgctgcgcctactgggccgctgccagctgcccaccatccgcacccagtgctgccgctcgtgctctccgcccagccacggcgccccctcccgagg

SEQ ID NO: 328222 - DNA, 120 bp, Artificial Sequence
  ENSG00000136378_44 (sequence is synthesized)
ccatcagcgggttgcccgccgctgactgcgccaggatgcacagaccgaccgacagacctcagtgcccaccacgggctgtggcggagctcccgccccctgcgccctaatggtgctaacccc

SEQ ID NO: 328223 - DNA, 120 bp, Artificial Sequence
  ENSG00000136378_45 (sequence is synthesized)
ctctcactacccagcagcaggctggggacctcctccccctcaaaaaaggtatttttttattctaacagtttgtgtaacatttattatgattttacataaatgagcatctaccattccaaa

SEQ ID NO: 328224 - DNA, 120 bp, Artificial Sequence
  ENSG00000136378_46 (sequence is synthesized)
ggtctcgtcctggaggagtgagccctggttcagtcacagagcctggctctgagccaggccctcctgctgcggcctctacctcagtttccccatctttaaaatggcccaatcttgtagctg

SEQ ID NO: 328225 - DNA, 120 bp, Artificial Sequence
  ENSG00000136378_47 (sequence is synthesized)
gtggggcaggcacagccccacctgcaggggcttagtgtctggacagggacactggcttcagctcccagctcactgctgggccaccacgggtttggaagtttgcttctctgagcctcagtt

SEQ ID NO: 328226 - DNA, 120 bp, Artificial Sequence
  ENSG00000136378_48 (sequence is synthesized)
ctccatctgtgagatgaggctagcgattgccctgtgtcccaggcccgctgggagggtacatggatgaggcaggtgggtgctggctcgcggcgcatgttcagtgtgctccagctcttggcg

SEQ ID NO: 328227 - DNA, 120 bp, Artificial Sequence
  ENSG00000136378_49 (sequence is synthesized)
ttctccctccaggggacacagctccccctcgatagaccagtccagtggcccctcaccacactgacttatttccctaaactatttataaaaagtagggcaatttcattaactctgactctt

SEQ ID NO: 328228 - DNA, 120 bp, Artificial Sequence
  ENSG00000136378_50 (sequence is synthesized)
ggatgccagcctgggagcaacctctcctggcctgggctgcgcccctgagtgacactgtgagacgtcaagtggcctgtgggagaggccagggatgggcggccacagacccagctctgaatt

SEQ ID NO: 328229 - DNA, 120 bp, Artificial Sequence
  ENSG00000136378_51 (sequence is synthesized)
ctgggtcaaccatggaccaactgtgacccttcggacaagtcccttcgcctctctggagctggcttataagagggaaaaggaacccctgtggagagggtctgtttatcctggcgaagatcg

SEQ ID NO: 328230 - DNA, 120 bp, Artificial Sequence
  ENSG00000136378_52 (sequence is synthesized)
cctgaagtgatcttctaacaggagtgtttccagaggaggggctgggccgggagaggtgtggacagctggggaccgctctgagcagcgcagccccgggcgccccacaccaccacatggtcc

SEQ ID NO: 328231 - DNA, 120 bp, Artificial Sequence
  ENSG00000136378_53 (sequence is synthesized)
ggggaggaaggtgggagcaggcacacaagaaggaacctctgggggtctgtgggcccctgccatgtggaggggtgcccaggggacccttggggacagggaggggggcagggtgggtggcgg

SEQ ID NO: 328232 - DNA, 120 bp, Artificial Sequence
  ENSG00000136378_54 (sequence is synthesized)
cactggggagggtgtgagggtatggcccatgccctcctcctcgcagaatgtctgccacacactctggtgctctgtggggaccacctgtcactccaagctggatgcagctgtggacggcac

SEQ ID NO: 328233 - DNA, 120 bp, Artificial Sequence
  ENSG00000136378_55 (sequence is synthesized)
tgtgtgagaggccagacttcctgctgtgaccaggccctggggtcagccccggctcacagtcttgcttgtgctcctagcagagccccacgctctctgcagcccaagcccccatctgcaaag

SEQ ID NO: 328234 - DNA, 120 bp, Artificial Sequence
  ENSG00000136378_56 (sequence is synthesized)
tggaggcattggggccagggcttgattccatgattccccagggtgtcttcagctgagtcagcatgtgggctgttttactccccgctcagctcctccatgtggcctgggtcacagatgatt

SEQ ID NO: 328235 - DNA, 120 bp, Artificial Sequence
  ENSG00000136378_57 (sequence is synthesized)
gtgatgattgtgagggtgcctctctcaccttccatccttcccctctgtgcctttcgcagccttcccacccaccttgttctcactagggtgaggatgactgatagacttgggggtggggtg

SEQ ID NO: 328236 - DNA, 120 bp, Artificial Sequence
  ENSG00000136378_58 (sequence is synthesized)
tgtctcctccccactgctcctcagtctcccctctggccctctgtctcctcccatactcctcagtctccccgcatgcctctcagtctcccccatacccctcggtctccccccatacccctc

SEQ ID NO: 328237 - DNA, 120 bp, Artificial Sequence
  ENSG00000136378_59 (sequence is synthesized)
gcccacagggcttgttttgcgcagggatacccagcgatttggctgctggtaccaggacccagccttccttccctggtgcctctgggaagcgacgaggctggtcaagatagctggtcgggg

SEQ ID NO: 328238 - DNA, 120 bp, Artificial Sequence
  ENSG00000136378_60 (sequence is synthesized)
tgcccacagggtcccctccccccacctctgcaccaatgacactggaacacaggccctttgtcccatgtgagcagggacggctggttgctgaggggatttgacttttcattctcacggtct

SEQ ID NO: 328239 - DNA, 80 bp, Artificial Sequence
  ENSG00000136379_0 (sequence is synthesized)
gggctgcagccgccctccgcgctcgcctgccagctccctcgccgcgcgtccgtcctccgtcctcccgggccagccagcca

SEQ ID NO: 328240 - DNA, 120 bp, Artificial Sequence
  ENSG00000136379_1 (sequence is synthesized)
atgcccgagccaggccccaggatgaacggcttctcgctgggtgagctgtgctggctcttctgctgcccgccctgcccgagccgcatcgccgccaagctggccttcctgccgcccgagccc

SEQ ID NO: 328241 - DNA, 80 bp, Artificial Sequence
  ENSG00000136379_2 (sequence is synthesized)
caagctggccttcctgccgcccgagcccacctacacggtgctggcgccggagcagcgcggcgccggcgcgtccgccccgg

SEQ ID NO: 328242 - DNA, 120 bp, Artificial Sequence
  ENSG00000136379_3 (sequence is synthesized)
ggcgcggggcccggtgcgtgcagcctgcacctcagcgagcgcgccgactggcagtactcgcagcgcgagctggacgccgtcgaggtcttcttctcgcgcacggcccgggacaaccggctc

SEQ ID NO: 328243 - DNA, 120 bp, Artificial Sequence
  ENSG00000136379_4 (sequence is synthesized)
ggctgcatgttcgtgcgctgcgcgccctccagccgctacacgctgctcttctcgcacggcaacgccgtggacctgggccagatgtgcagcttctacattggcctcggctcccgcatcaac

SEQ ID NO: 328244 - DNA, 120 bp, Artificial Sequence
  ENSG00000136379_5 (sequence is synthesized)
tgcaacatcttctcctacgactactcgggatacggcgtcagctcgggcaagccctccgagaagaacctctacgccgacatcgacgccgcgtggcaggcgctgcgcacccggtatggcgtg

SEQ ID NO: 328245 - DNA, 120 bp, Artificial Sequence
  ENSG00000136379_6 (sequence is synthesized)
agtcccgagaacattatcctctatggtcagagcattgggactgtccccacggtagacttggcctcgaggtatgaatgcgcagcggtaattctccattcccctctgatgtctggtttgcgt

SEQ ID NO: 328246 - DNA, 120 bp, Artificial Sequence
  ENSG00000136379_7 (sequence is synthesized)
gtggcttttccggataccaggaaaacatactgctttgatgctttccccagcattgacaagatatctaaagtcacctctcctgtgttggtcattcatggtacagaggatgaggtcatcgat

SEQ ID NO: 328247 - DNA, 120 bp, Artificial Sequence
  ENSG00000136379_8 (sequence is synthesized)
ttctcccatggcctagcgatgtacgagcgctgtccccgagccgtggagcccctttgggttgaaggggctgggcataatgacatagagctttatgcacaatacctagaaagactaaaacag

SEQ ID NO: 328248 - DNA, 120 bp, Artificial Sequence
  ENSG00000136379_9 (sequence is synthesized)
tttgcacatgctttaactgggtagctgtaaaggcttgataaccatgaagaagtgcccaacctttagggtgttctaatcaaagagctgatgaaatctcagtcttttgtatctagaggtggt

SEQ ID NO: 328249 - DNA, 120 bp, Artificial Sequence
  ENSG00000136379_10 (sequence is synthesized)
tctgctaattcacacaacacgttaaactgaacagtcgtgattcccagcttcattaccttgcaggaatgggaatgagagctgaatgtagggacaattttctagtgctgtataaagtagcct

SEQ ID NO: 328250 - DNA, 120 bp, Artificial Sequence
  ENSG00000136379_11 (sequence is synthesized)
cgcatctgtttctcaaccttatccatcatttctgacattcatgcaggacttgccctgttgccaccaatgttctcggtatttcacatgcagctctctttctgccactggatacatgggttc

SEQ ID NO: 328251 - DNA, 120 bp, Artificial Sequence
  ENSG00000136379_12 (sequence is synthesized)
aatccatttgtgaagctgtgatagtgtaactggaaagctagtgtggtgaaaattcctttattattttttgttaacatgctgatctttcccggacaaatgaactgaagggtaatttactgg

SEQ ID NO: 328252 - DNA, 120 bp, Artificial Sequence
  ENSG00000136379_13 (sequence is synthesized)
aactctcgtgtacagcttcatcaactgtaaccatataaatataactggaatattcttaaacaaaaagaaactaggggtttttttaagtgtaaatttattactagccaacagagttttact

SEQ ID NO: 328253 - DNA, 120 bp, Artificial Sequence
  ENSG00000136379_14 (sequence is synthesized)
attttgattgtctggttggtttaacaaagagcctagctgactttccttctgtaaagtcctccttgtaggcttttttaaagtactgtacatatttgcaatcacattgtgcatagattctta

SEQ ID NO: 328254 - DNA, 120 bp, Artificial Sequence
  ENSG00000136379_15 (sequence is synthesized)
atggtagatatgatttcttttgtcaggctacaacaatgaactgcagattccttgtttgtaatgtaaatgattgaatacattttgttaatatgtttttattcctatgttttgctattaaaa

SEQ ID NO: 328255 - DNA, 120 bp, Artificial Sequence
  ENSG00000136379_16 (sequence is synthesized)
attttataacatttccaagacaaaaattccaagtttatgctttgaagaatttatgtaattaaaatttcactaaactaatctttttagtttaggaattatttgggttttgacactggaagt

SEQ ID NO: 328256 - DNA, 120 bp, Artificial Sequence
  ENSG00000136379_17 (sequence is synthesized)
tgcgccaaataagcatcagaaataggagatgcttaacattgctatactacttgtgttggttaggggtttggatttgggggttctttggttttaatttttttttccacatttaaaagcctt

SEQ ID NO: 328257 - DNA, 120 bp, Artificial Sequence
  ENSG00000136379_18 (sequence is synthesized)
aaatgtactgtaagcctcagatcgttgtacaactggactgcggttgattgccagtttgtgtactgttgcttggatgcggcacagtggttggtaatggaataaaggatgcatggatcagaa

SEQ ID NO: 328258 - DNA, 120 bp, Artificial Sequence
  ENSG00000136379_19 (sequence is synthesized)
gaaatgcagccacctccttggagcctgcaggagggcgcagtcctgagagaaggggcctgtggctgggtgagcatgtggacaccccaggatgctgtcacttctgtgcctcctgagtcaggc

SEQ ID NO: 328259 - DNA, 120 bp, Artificial Sequence
  ENSG00000136379_20 (sequence is synthesized)
ttctgcccctcctctagttgtggatggagggttgcatggaatcgtcactgctctccactgagctccctgtgtgacacagagctcagtctgacaagagagcatcgaccttgaagaatagac

SEQ ID NO: 328260 - DNA, 120 bp, Artificial Sequence
  ENSG00000136379_21 (sequence is synthesized)
ctgacacaccatccaccgttgggctatgggactgctgatgagaagtgatctgtggtgtggacataattctgaacagcctgtggggcagtggaggtcagcccaggcatcaggtgaagaagg

SEQ ID NO: 328261 - DNA, 120 bp, Artificial Sequence
  ENSG00000136379_22 (sequence is synthesized)
attttgatagcagctttaccctctgtactggattttgcttaggctcgtgttgaaactataaatctgctctactttaagaagcctgtgtacaggaatccagagtctcaacatatacagtta

SEQ ID NO: 328262 - DNA, 120 bp, Artificial Sequence
  ENSG00000136379_23 (sequence is synthesized)
ggagattattatttggataacagagtgctttttttttgttagggctgctttaaataataggctttctaatttcatctaaaagatgtgattcaaaaaagacaaacaaaaccttttagagta

SEQ ID NO: 328263 - DNA, 120 bp, Artificial Sequence
  ENSG00000136379_24 (sequence is synthesized)
gaaaaatcagttctgactctagcactcccactaattcactatgtcagttttgtgcagctgtaacagaagatctgcgactggatagtttataaagaaagaggtttctttcccaatttctgg

SEQ ID NO: 328264 - DNA, 120 bp, Artificial Sequence
  ENSG00000136379_25 (sequence is synthesized)
aggctgggaaatgcaagatcgaggcacttgcatgtttggtgtccgatgatgactgctctgcttcctggctggcttcttgaaccaaaggcgggaggaaggctcttgctcaaagctttcctc

SEQ ID NO: 328265 - DNA, 120 bp, Artificial Sequence
  ENSG00000136379_26 (sequence is synthesized)
cagaaaagccaaagggcaagcgaaggaggggagagaggcgcagactccctctttgataaagaagcttctctgagataaggcataagaatggagcccacatggcctgatcacccgttaagg

SEQ ID NO: 328266 - DNA, 120 bp, Artificial Sequence
  ENSG00000136379_27 (sequence is synthesized)
gtcccacttcttaatccagttaccatggcaattacatttcaacatcagtttgagagggcacaggcattcaaaccatagcagcccccttaaacaagacacttcacacttctgggcttcaca

SEQ ID NO: 328267 - DNA, 120 bp, Artificial Sequence
  ENSG00000136381_0 (sequence is synthesized)
gagcctgcttccttctttcctcccttgccagtccgcctgtcttcctccccgtcttccctgcccggcctcccccttcttcccccgctggccccctccccggagggataatatggtctccgg

SEQ ID NO: 328268 - DNA, 120 bp, Artificial Sequence
  ENSG00000136381_1 (sequence is synthesized)
cgatggacgccccaaaagcaggatacgcctttgagtaccttattgaaacattaaatgacagttcacataagaagttcttcgatgtatctaaacttggcaccaagtatgatgttctgcctt

SEQ ID NO: 328269 - DNA, 120 bp, Artificial Sequence
  ENSG00000136381_2 (sequence is synthesized)
actcaatacgggtcttgttggaagctgctgtacgaaattgtgatggctttttaatgaagaaggaagatgttatgaacattttagactggaaaaccaaacaaagcaatgttgaagtgccct

SEQ ID NO: 328270 - DNA, 120 bp, Artificial Sequence
  ENSG00000136381_3 (sequence is synthesized)
ttttccctgcccgtgttcttcttcaagattttactggaataccagcaatggtggattttgctgctatgagggaggcagtgaaaactcttggaggtgatcctgagaaagtccatcctgctt

SEQ ID NO: 328271 - DNA, 120 bp, Artificial Sequence
  ENSG00000136381_4 (sequence is synthesized)
gtccgacagatcttacagttgaccattctttacaaattgacttcagtaaatgtgcaatacagaatgcaccaaatcctggaggtggtgacctgcagaaagcaggaaagctctctccactta

SEQ ID NO: 328272 - DNA, 120 bp, Artificial Sequence
  ENSG00000136381_5 (sequence is synthesized)
aagtgcagcctaagaagcttccctgcagaggccagactacctgccgaggatcttgtgattctggagaactaggccgaaactcaggaacattttcttcgcagattgagaatacacccatcc

SEQ ID NO: 328273 - DNA, 120 bp, Artificial Sequence
  ENSG00000136381_6 (sequence is synthesized)
tgtgtccttttcatttgcaaccagtgcctgaacctgaaacagtgttaaaaaatcaagaagtagaattcggcagaaatcgagagaggcttcagttttttaagtggagttcaagagttttta

SEQ ID NO: 328274 - DNA, 120 bp, Artificial Sequence
  ENSG00000136381_7 (sequence is synthesized)
agaatgtggcagtgatccctcctggaactggaatggctcatcaaataaacttagaatatttgtcaagagtggtttttgaagaaaaagacctcctcttcccagacagtgtagtcggcacag

SEQ ID NO: 328275 - DNA, 120 bp, Artificial Sequence
  ENSG00000136381_8 (sequence is synthesized)
attcacacataacgatggtgaatggtttagggattctggggtggggggttggaggcattgaaacagaagcagttatgcttggtctgccagtttctcttactttaccagaggtggttggat

SEQ ID NO: 328276 - DNA, 120 bp, Artificial Sequence
  ENSG00000136381_9 (sequence is synthesized)
gtgagttaactgggtcatcaaacccttttgttacatccatagatgttgttcttggtattacaaagcacctcaggcaagtaggagtggctggaaagtttgttgagttttttggaagtggag

SEQ ID NO: 328277 - DNA, 120 bp, Artificial Sequence
  ENSG00000136381_10 (sequence is synthesized)
tttcacaattatctatagttgatcgaactacaatagcaaacatgtgtccggaatatggtgctatcctcagctttttccctgttgacaatgtgacattaaaacatttagaacatacaggtt

SEQ ID NO: 328278 - DNA, 120 bp, Artificial Sequence
  ENSG00000136381_11 (sequence is synthesized)
ttagcaaagccaaactcgaatcaatggaaacataccttaaagctgtgaaattgtttcgaaatgaccagaattcttcaggagaacctgaatactcccaggtgatccagattaatctgaatt

SEQ ID NO: 328279 - DNA, 120 bp, Artificial Sequence
  ENSG00000136381_12 (sequence is synthesized)
caatagttccatctgttagtggtccaaaaagacctcaggatagagttgctgtgacagatatgaaaagcgatttccaggcttgcttaaatgaaaaggttggatttaaaggcttccaaattg

SEQ ID NO: 328280 - DNA, 120 bp, Artificial Sequence
  ENSG00000136381_13 (sequence is synthesized)
cagctgaaaaacaaaaggatattgtctccattcattatgaaggaagtgaatataagctgtctcatggatcagtggtcattgctgcagttatcagttgtaccaataattgcaatccatctg

SEQ ID NO: 328281 - DNA, 120 bp, Artificial Sequence
  ENSG00000136381_14 (sequence is synthesized)
tcatgcttgctgcaggtcttttggctaaaaaggctgttgaagctggtctgcgtgttaaaccttatataagaacaagtttatctccaggcagtgggatggttacacattacctcagttcaa

SEQ ID NO: 328282 - DNA, 120 bp, Artificial Sequence
  ENSG00000136381_15 (sequence is synthesized)
gtggagtattaccatatctaagtaagcttggatttgaaatcgttggctatggatgttcaatttgtgtgggaaatacagcacccttatcagacgcagttttaaatgcagtaaaacagggtg

SEQ ID NO: 328283 - DNA, 120 bp, Artificial Sequence
  ENSG00000136381_16 (sequence is synthesized)
atttggttacctgtggaattttatctggaaacaaaaattttgaaggtcgtctttgtgattgtgttcgtgccaattatcttgcctctccacccttagtggtagcttatgccatagcaggca

SEQ ID NO: 328284 - DNA, 120 bp, Artificial Sequence
  ENSG00000136381_17 (sequence is synthesized)
cagtgaatatagatttccagacagaacctttaggtactgaccccaccggcaagaacatttacctgcatgatatttggcctagtcgagaagaagttcatcgagtagaggaagaacatgtta

SEQ ID NO: 328285 - DNA, 120 bp, Artificial Sequence
  ENSG00000136381_18 (sequence is synthesized)
tactatccatgtttaaagcattaaaagataaaatagaaatggggaataaacggtggaattccttagaagcaccggattcagttttgtttccatgggacttaaagtctacttatatcagat

SEQ ID NO: 328286 - DNA, 120 bp, Artificial Sequence
  ENSG00000136381_19 (sequence is synthesized)
gcccttcattttttgataaacttaccaaagagccaattgcactccaggctattgaaaatgcccatgtcttattatatttgggagactctgtcacaacagatcatatatcacctgcaggaa

SEQ ID NO: 328287 - DNA, 120 bp, Artificial Sequence
  ENSG00000136381_20 (sequence is synthesized)
gtatcgctaggaatagtgctgccgctaagtatttgacaaacagaggccttacccctcgtgaattcaactcttacggagctcgaagaggtaatgatgctgtaatgacaagaggcacttttg

SEQ ID NO: 328288 - DNA, 120 bp, Artificial Sequence
  ENSG00000136381_21 (sequence is synthesized)
caaatatcaagctttttaataagtttattggaaaaccagctcctaaaacaattcattttccatcaggacagacgctagatgtatttgaggctgcagagctgtaccagaaagaaggtatcc

SEQ ID NO: 328289 - DNA, 120 bp, Artificial Sequence
  ENSG00000136381_22 (sequence is synthesized)
cactgattattttagcaggaaagaaatatggttcaggaaactccagagactgggctgccaaaggaccgtatttactgggtgtgaaagctgttttggccgaaagttatgaaaaaatacaca

SEQ ID NO: 328290 - DNA, 120 bp, Artificial Sequence
  ENSG00000136381_23 (sequence is synthesized)
aagatcatttgattggaattggcatagctccacttcagttccttccaggagaaaatgcagattccttgggcctctccggtagagaaacattttctttaacatttcctgaagaactgtctc

SEQ ID NO: 328291 - DNA, 120 bp, Artificial Sequence
  ENSG00000136381_24 (sequence is synthesized)
ctggaattacattgaatatacagacaagcactggaaaagtattcagcgtgattgcttcgtttgaagatgatgtggaaataacattatacaaacatggaggattattaaactttgtggcac

SEQ ID NO: 328292 - DNA, 120 bp, Artificial Sequence
  ENSG00000136381_25 (sequence is synthesized)
gaaaattctcatagtatctacttaccatagatacctttcataactggtaactgcaaagccttttgtgctggacccaggaatccttaccatggagcagcagatagtcccagtatactcact

SEQ ID NO: 328293 - DNA, 120 bp, Artificial Sequence
  ENSG00000136381_26 (sequence is synthesized)
tgctattaatattgctaaaatcaacgtgtgaagtgtgttgtggaagagacctgtaagtatggggggggggcgatattttatcagaccattttgtaaataaaggcagaatttgtgttgaag

SEQ ID NO: 328294 - DNA, 120 bp, Artificial Sequence
  ENSG00000136381_27 (sequence is synthesized)
attcttatatgaataaccttcctggatttgtttagttttgcaccaataaaactgtgtactactgtttgttggtttaagagtagcagattgaaatataagaagccagattagactctaaaa

SEQ ID NO: 328295 - DNA, 120 bp, Artificial Sequence
  ENSG00000136381_28 (sequence is synthesized)
ttgtggccattggaatctcatttataaatggaccttttaagtatattaattcctcttcagaattgagctggacacatttggcattcttagtttgtcatataaccaggtttatccttagtc

SEQ ID NO: 328296 - DNA, 120 bp, Artificial Sequence
  ENSG00000136381_29 (sequence is synthesized)
taactgcaagggatggaacctgccccaggtcacaatcattctgtccaatccagccaaggttccctccacatatgaagatggaccatggcaggatacaactgattgtgtggcaccatgtat

SEQ ID NO: 328297 - DNA, 120 bp, Artificial Sequence
  ENSG00000136381_30 (sequence is synthesized)
tagcagtgggaatatgtatcacatatgatgcagcctttcatatttcagcagtttgccactgtgactgtctggcaagcccccagatggcgttatattaattggattagattattttgctca

SEQ ID NO: 328298 - DNA, 120 bp, Artificial Sequence
  ENSG00000136381_31 (sequence is synthesized)
ccttatgtaatactgtaacttcctataacctaatattttcggtatcattaaccaaaatttcacactcatagttgctaaagagaatgttattcaatcattaaactctgaactgatttcttc

SEQ ID NO: 328299 - DNA, 120 bp, Artificial Sequence
  ENSG00000136381_32 (sequence is synthesized)
tatacatttaaattatccaccctcaataatacgggtgctcaaccctatgcattttttaagtgttgctatttcttaattaaattgatttcctgtcattttgaatcatttatcacctgcgat

SEQ ID NO: 328300 - DNA, 120 bp, Artificial Sequence
  ENSG00000136381_33 (sequence is synthesized)
gcatgattctattaattttgttatgttactgttttaaccaaagctgaccgtaaggataaaacacttaagttgttgctgagtactatatatcctcaatatgcatgtctgcccatcacatca

SEQ ID NO: 328301 - DNA, 120 bp, Artificial Sequence
  ENSG00000136381_34 (sequence is synthesized)
aatgttctgtcaacaagatgtttggtaattttttttaaaaaggttggaaaattaattatagaaggttctatactgtttttttaattaagaaactaagtctagcaggctaaaggttaattg

SEQ ID NO: 328302 - DNA, 120 bp, Artificial Sequence
  ENSG00000136381_35 (sequence is synthesized)
tagtgattttttttcacatagatatctttctatgacctagttagttactgcaattcagaattagttcacattgcataaagaattacttgttgtaagcaaaatgctgaaactaccaaacca

SEQ ID NO: 328303 - DNA, 120 bp, Artificial Sequence
  ENSG00000136381_36 (sequence is synthesized)
gtggatgaagaccactaagaactttgcacataatcatacaatcttttgaaaatattttgcaaatatgtgtttagacaataagatggactagagttcgacaaaatgatttctttatttaaa

SEQ ID NO: 328304 - DNA, 120 bp, Artificial Sequence
  ENSG00000136381_37 (sequence is synthesized)
ttttgtataagtattttcttcgacactttcaaattatattgtgttcttgatatatgctgtatatttatttgttagtgcatgtgtttttaatttacatgaaaacatgagttaggagaaatt

SEQ ID NO: 328305 - DNA, 120 bp, Artificial Sequence
  ENSG00000136381_38 (sequence is synthesized)
tgagttaggagaaattacaggttgaaagatgaaatgcctgtatgtgctctgaagaaatggtaattccagattgtgcagggggaaacaaatctattttgttttgttttgttttttgagacg

SEQ ID NO: 328306 - DNA, 120 bp, Artificial Sequence
  ENSG00000136381_39 (sequence is synthesized)
gccaccacacccggcctatattgttttgaaagcatactctatatatagttatgggcagaggcacaggcatcctcagcagctgattcaggagatgatggtaaagctagctaactatgaatt

SEQ ID NO: 328307 - DNA, 120 bp, Artificial Sequence
  ENSG00000136381_40 (sequence is synthesized)
aaacattcacatatccagtctacctggtccagtaataatacaagcaaatcttgtatttcaggaacaaatcaaggttctcttaattttttggcttatatacaatgaagtaaaaacttgata

SEQ ID NO: 328308 - DNA, 120 bp, Artificial Sequence
  ENSG00000136381_41 (sequence is synthesized)
aacatggtttcaaattgaggaggagagtcttggatgtatgttttaatatgtataccttataattctgcctctagccaaatgctatgtttgcaaaatgtggcatctgttagtttttattgt

SEQ ID NO: 328309 - DNA, 120 bp, Artificial Sequence
  ENSG00000136381_42 (sequence is synthesized)
ctgtgtcttctttgtttactataccttgggtaattttgtgttaccaaaaaaaaaaaaaaaaaaaggaagtgtaatgtcagacacacaagaaaagcaaatcagtgttgtaagcttaaagta

SEQ ID NO: 328310 - DNA, 120 bp, Artificial Sequence
  ENSG00000136381_43 (sequence is synthesized)
caatttcaaaggtcactaccaacagcagggttttttttatactttgaaaacattatgctacatatcattgccattttcatattttggggttttgctactcttatacaatggaatcaatgg

SEQ ID NO: 328311 - DNA, 120 bp, Artificial Sequence
  ENSG00000136381_44 (sequence is synthesized)
aaatgtcatccagccactgaattgccattattatatctaaaaagtttctaagatgacagttatcactattttgttttatctccatgctgacatttgaaagaaggtactagtatccctcta

SEQ ID NO: 328312 - DNA, 120 bp, Artificial Sequence
  ENSG00000136381_45 (sequence is synthesized)
gccagattgcttagtttttcgttggtaatcaaacaacagttgtactaaaggaaagtaaagctaggacctaaatcagaatcatagttgcctgcatatatggtaacaaggtcgtgtgcattt

SEQ ID NO: 328313 - DNA, 120 bp, Artificial Sequence
  ENSG00000136381_46 (sequence is synthesized)
gctttcacagtgatgagtgagaggatgagaagaaattatttgacatttttctgtggttgaatagaagacacctttcttttgtctttaggtttaggaggagatactaagatactggatgtt

SEQ ID NO: 328314 - DNA, 120 bp, Artificial Sequence
  ENSG00000136381_47 (sequence is synthesized)
tatcctatcttagtttggttggagtaataagagagaagaagagggtggactttggcttttcagtgttttttcccctaaagagtgatattgctgacgtttctatcaattttacacataata

SEQ ID NO: 328315 - DNA, 120 bp, Artificial Sequence
  ENSG00000136381_48 (sequence is synthesized)
tgtggctatgaaaccatatatctcacttaagtaacaaagtaatcactttgtctatcactaagtaatagacaaaaatcattgtctattatttaaagccaacaaaacagtgtaacagtttta

SEQ ID NO: 328316 - DNA, 120 bp, Artificial Sequence
  ENSG00000136381_49 (sequence is synthesized)
agttcaataatgttaagtattgtatagaaatatattggaggcaaagttcagttgatgacaattgtgtatatgttactgatgctgtaaattatttttaataaagaaaattgtattatcaca

SEQ ID NO: 328317 - DNA, 120 bp, Artificial Sequence
  ENSG00000136381_50 (sequence is synthesized)
cttgcttttctcgcctggagtcgctcggcaggcgcccaggccctcggggctcgggttgtgctcccctcggggcctgcctgctgggccgccctttgagcctaggccgcggaagctggggct

SEQ ID NO: 328318 - DNA, 120 bp, Artificial Sequence
  ENSG00000136381_51 (sequence is synthesized)
cccgatccccaccctcctgcgcgacacccgcagggcgggccaccccaccgctggccttgacccgcacccctctctctccggtggccgctgcctgctgccagcggcttcctggcccccgtc

SEQ ID NO: 328319 - DNA, 120 bp, Artificial Sequence
  ENSG00000136381_52 (sequence is synthesized)
aaggcgggggcctgcgtctccgtgttcgggtctcacgcagctagatgttgattccacggtccagcctaaggcccctcagtctctctgtgcctctggaagccgaatgaggggcagtcaagg

SEQ ID NO: 328320 - DNA, 120 bp, Artificial Sequence
  ENSG00000136381_53 (sequence is synthesized)
ttgaacattggatacgcctttgagtaccttattgaaacattaaatgacagttcacataagaagttcttcgatgtatctaaacttggcaccaagtatgatgttctgccttactcaatacgg

SEQ ID NO: 328321 - DNA, 120 bp, Artificial Sequence
  ENSG00000136381_54 (sequence is synthesized)
agttaaagttgtggtagctctatgacttactgaacattatttttataaaaattgaagagctctatgagagcagggatttgggttcattactgcatcctcaggtctcttgacgttagccac

SEQ ID NO: 328322 - DNA, 120 bp, Artificial Sequence
  ENSG00000136381_55 (sequence is synthesized)
atcatcatagttatcatagtaataacaacaaacagagcatttagtttgtactaataaatacaaagaaatttgttgtgttcacttatgttagctcatttagtccttataacaagcctgtga

SEQ ID NO: 328323 - DNA, 120 bp, Artificial Sequence
  ENSG00000136381_56 (sequence is synthesized)
gatggatactattactattctcattgtaactctgagaaaactaaggtacagtagggtttagtgacttaccaaagggtcgaaggcctgagtagtaaggggtagagcaaagattccaggcag

SEQ ID NO: 328324 - DNA, 120 bp, Artificial Sequence
  ENSG00000136381_57 (sequence is synthesized)
tcagattcttgagtccattgtcttaaccattatgccttattagtgccttgttgccttaataaacacttgctgactacattattttttttctcttttttacttgaatttaaaaaaaatgtt

SEQ ID NO: 328325 - DNA, 120 bp, Artificial Sequence
  ENSG00000136381_58 (sequence is synthesized)
tagcaaaagttgattgtgtcgtctttaattaaattatttgcccattagaaactgttgctctactaagtaatgctttcaaaaacatggactgtagaaatgtgatatatcatttttctgttg

SEQ ID NO: 328326 - DNA, 120 bp, Artificial Sequence
  ENSG00000136381_59 (sequence is synthesized)
ccgttttaacatttctctggattattatgtaaaaatcttctctctgaatttttaaaatactggcttcagaacttcaatacatacactgagcttgttaagcatattaatacacaggctcac

SEQ ID NO: 328327 - DNA, 120 bp, Artificial Sequence
  ENSG00000136381_60 (sequence is synthesized)
ggatttcctagtgaacaataatttgtaactcttcttcctaaatgtctggcctttgctaactttattttaatgattaaatcctattttgttaaatgaatgtacctggaaaatgttccacat

SEQ ID NO: 328328 - DNA, 120 bp, Artificial Sequence
  ENSG00000136381_61 (sequence is synthesized)
ataattccaatttgagtcccaatctcagcatttttggttagattattggtacgaaggctttccggatactccagtgtaaggaaatgataatgcctccctctcagcatttggtattgatcc

SEQ ID NO: 328329 - DNA, 120 bp, Artificial Sequence
  ENSG00000136381_62 (sequence is synthesized)
ttcttccctaattagaaaagaatttggcatcttagagaaattattgattcaacgtatgataccaaaagatcaagtagtaaattgggaattgcaggattattcctagaggaaaaggagtat

SEQ ID NO: 328330 - DNA, 120 bp, Artificial Sequence
  ENSG00000136381_63 (sequence is synthesized)
tagccttctctagctgttttttcctgacaatattactgtgtgttttttgacattttagtttaatgttaaaaaattaatctattatatatgtttacatttattgaatatattattacttct

SEQ ID NO: 328331 - DNA, 120 bp, Artificial Sequence
  ENSG00000136381_64 (sequence is synthesized)
tgttccatttgtgatccttataggaataatcctgtattgtttttttgatgagagcagcatttggtttgtaatatctaatctgtgtttctttcatcctaaaaaataaaaccataggccggg

SEQ ID NO: 328332 - DNA, 84 bp, Artificial Sequence
  ENSG00000136381_65 (sequence is synthesized)
ggaaacatctttacacttagggtttgagtttctgtatctataaaaaagggtttggattaagtgatccctggcacttataaaatg

SEQ ID NO: 328333 - DNA, 120 bp, Artificial Sequence
  ENSG00000136381_66 (sequence is synthesized)
aaagggtttggattaagtgatccctggcacttataaaatgttagggcttaatattattcatagatcgaggatagtttcattcttagtcgcctccttagtcactcttcctataccaatctg

SEQ ID NO: 328334 - DNA, 120 bp, Artificial Sequence
  ENSG00000136381_67 (sequence is synthesized)
agaccattttacaatttagaaaagacaaataactggttgggttacttgatagtataataaccaagaaaaataattttagaaggaattaagtttgaaaccacatgttaacaaattctacca

SEQ ID NO: 328335 - DNA, 120 bp, Artificial Sequence
  ENSG00000136381_68 (sequence is synthesized)
aagtgggatttgcctgtgattaaagatgctgtaaacatttgggccagtagttataatttgaaaaatgtttatagccaatatataattttttatttaaatatacagtttcatcagtctatt

SEQ ID NO: 328336 - DNA, 120 bp, Artificial Sequence
  ENSG00000136381_69 (sequence is synthesized)
agtatttcattaagtctaagatgccatcagtggttagcaaacaccactgttttatgcactgctaagaaagaataaagggctgtgtgcagtggctcacacctgtgggacgccaaggcagga

SEQ ID NO: 328337 - DNA, 120 bp, Artificial Sequence
  ENSG00000136381_70 (sequence is synthesized)
ggacgccaaggcaggagcatcacttgaggccagaagttcaagaccaacctggtcaacattgtaagaccctgtctctacaaaaaaaaaaaagttaaaaattagctgggtgcggtggcacat

SEQ ID NO: 328338 - DNA, 120 bp, Artificial Sequence
  ENSG00000136381_71 (sequence is synthesized)
tggcacatgcctgtagttccagctactctggaggctaaggtgggaggattgctagagccacggtgttggaagctgcagtgagctgtgaccacaccactgcgctccagcctgggcaacaga

SEQ ID NO: 328339 - DNA, 120 bp, Artificial Sequence
  ENSG00000136381_72 (sequence is synthesized)
gaaagaaaaagggctgccacctaaacagacacactattgagttgaggtaccctgatttcaaagacatgaaaatgttaattatagccaccttgagctttcaggcccctttctaccctgatt

SEQ ID NO: 328340 - DNA, 120 bp, Artificial Sequence
  ENSG00000136381_73 (sequence is synthesized)
aacagtgacattggaccagtcttctctttacttcttatcttaaaatacccccaaaaccagaatgagttgattcataaggacaatgaaggatctcattccttcaccatcactagtattggt

SEQ ID NO: 328341 - DNA, 120 bp, Artificial Sequence
  ENSG00000136381_74 (sequence is synthesized)
taaaaattttattttatagttttcagacaatcgttgctaatcttatctttgcaattttgtatgtgtttctgtgtattccttatatagcacctcaggcaagtaggagtggctggaaagttt

SEQ ID NO: 328342 - DNA, 120 bp, Artificial Sequence
  ENSG00000136381_75 (sequence is synthesized)
aaattacattatgttgaaacaacaactttcaagcaaacatcagatgtctttaaagagtgttgtgtcctcaaaccctagttccctgtgacacattgaaagcaatttaaaggaattattcaa

SEQ ID NO: 328343 - DNA, 120 bp, Artificial Sequence
  ENSG00000136381_76 (sequence is synthesized)
accattgatcctgacttgactgtttccccataatgatggatacctccacctctacttaggggtcataggttgcaatttaatggaagtcagccttaaacatattcacagcagtccccttct

SEQ ID NO: 328344 - DNA, 120 bp, Artificial Sequence
  ENSG00000136381_77 (sequence is synthesized)
aagaagtagaattcggcagaaatcgagagaggcttcagttttttaagaatctcgccctgttacccaggctggagtccagtggcgtgatctcagcttactgcagcctccacctcctgggtt

SEQ ID NO: 328345 - DNA, 120 bp, Artificial Sequence
  ENSG00000136381_78 (sequence is synthesized)
aatgggagagaaccagtcaagattgagatatgtgagattagaaagtggagttatagctggccttggctaaaggcatttctgggagtggaagccagactggaagaggataagaagtgggtg

SEQ ID NO: 328346 - DNA, 120 bp, Artificial Sequence
  ENSG00000136381_79 (sequence is synthesized)
ggggagagccgagtatgagcgactctttctggtaagttgctgcgacaggagataatgctgggtaggtggagaacacagggaccggaggagctgaggcggaaggatggagaggcttaagca

SEQ ID NO: 328347 - DNA, 120 bp, Artificial Sequence
  ENSG00000136381_80 (sequence is synthesized)
atttttgaaatgtttcttagaccatctattctttgaattatttcaggaagacgtatgataatgtatagttattaatttctgtgtttatgtgaagaaaataaaatgtacaggtaattagtt

SEQ ID NO: 328348 - DNA, 120 bp, Artificial Sequence
  ENSG00000136381_81 (sequence is synthesized)
cttccagccgcttaagcctgaagcaccctgttgaatcatttacttgatttccatgatatgtctttgaaaaggtatgaacattttcagagttatttttttactgagtatcatgttcaaaaa

SEQ ID NO: 328349 - DNA, 120 bp, Artificial Sequence
  ENSG00000136381_82 (sequence is synthesized)
ttttaaccaggtactgaccccaccggcaagaacatttacctgcatgatatttggcctagtcgagaagaagttcatcgagtagaggaagaacatgttatactatccatgtttaaagcatta

SEQ ID NO: 328350 - DNA, 120 bp, Artificial Sequence
  ENSG00000136383_0 (sequence is synthesized)
gtatcaggactcagcccatttccccctctggtgctgagaaatggaggccgaaggagtgatctagaagtgttaattgagcccctaatctatgctagttactgggggtgttgggggagacag

SEQ ID NO: 328351 - DNA, 120 bp, Artificial Sequence
  ENSG00000136383_1 (sequence is synthesized)
gagagagatcccacggggttccggcctcccagggactcaggtcactaatggaggtggcttggcttgtctatgtgctgggccaacagccactggcgaggcaaggcgagggtcagtcacggc

SEQ ID NO: 328352 - DNA, 120 bp, Artificial Sequence
  ENSG00000136383_2 (sequence is synthesized)
tggtgccaggaagagggctggttctttggctccctggtctcccgcggtctagcccaagctggccagcggttgacctggctcccctggccccggccaggcctcgtggacccctcatatgcc

SEQ ID NO: 328353 - DNA, 120 bp, Artificial Sequence
  ENSG00000136383_3 (sequence is synthesized)
acacgggacatgagcaggccggccgggagccgggtcccgggagctccacgaaggggcctgtcctccatgaccaggacacccgctgcgccttcctcccgaggcctcccgggcctctccaga

SEQ ID NO: 328354 - DNA, 120 bp, Artificial Sequence
  ENSG00000136383_4 (sequence is synthesized)
cgctgcgccttcctcccgaggcctcccgggcctctccagacgcggcgctactgcagacaccagggccgccaagggagcggactcggagccggccctggggcgggcacatgggccccggcg

SEQ ID NO: 328355 - DNA, 120 bp, Artificial Sequence
  ENSG00000136383_5 (sequence is synthesized)
cgtctccaagccgcgctgcccgggtcgggccaggccaggggagggacagcagcaggtgacgacggcccggccaccggctataaataggggcgcgcgtcagccgcgggcgggagcggcggc

SEQ ID NO: 328356 - DNA, 80 bp, Artificial Sequence
  ENSG00000136383_6 (sequence is synthesized)
tggaggacaggcgaggcagcggcgagtgcggggccggcggtcggggagggcggtgccatggggtcgcggagggcccccag

SEQ ID NO: 328357 - DNA, 120 bp, Artificial Sequence
  ENSG00000136383_7 (sequence is synthesized)
gtgaggacgacggccccgtgtggatccccagcccagccagccggagctacctgctcagcgtgcggcccgagaccagcttatcaagcaaccggttgtctcaccccagctctggaaggagca

SEQ ID NO: 328358 - DNA, 120 bp, Artificial Sequence
  ENSG00000136383_8 (sequence is synthesized)
ccttctgctccatcattgctcagctcacagaggagacccagccgctatttgagaccacgctcaagtcccggtctgtgtccgaggacagcgacgtcaggttcacctgcatcgtcacaggat

SEQ ID NO: 328359 - DNA, 120 bp, Artificial Sequence
  ENSG00000136383_9 (sequence is synthesized)
acccagagccagaggtgacctggtacaaggatgatacggagctggaccgctactgtggcttgccaaaatatgagatcactcatcagggcaaccgccacacactgcagctgtacaggtgtc

SEQ ID NO: 328360 - DNA, 120 bp, Artificial Sequence
  ENSG00000136383_10 (sequence is synthesized)
gagaagaagatgccgccatctaccaggcctctgcccagaacagcaagggcattgtgtcctgctcaggggtcctggaggtgggcaccatgactgagtacaagatccaccagcgctggttcg

SEQ ID NO: 328361 - DNA, 120 bp, Artificial Sequence
  ENSG00000136383_11 (sequence is synthesized)
ccaagttgaagcgcaaggctgcggcaaagctgcgcgagatcgagcagagctggaagcacgagaaggcggtgcctggggaggtcgacactctgcgcaagctcagccccgaccgcttccagc

SEQ ID NO: 328362 - DNA, 120 bp, Artificial Sequence
  ENSG00000136383_12 (sequence is synthesized)
gaaagcggcgattgagcggggctcaagcgccgggcccctcggtccctaccagggagcctgagggtgggaccctggcggcttggcaggagggagagactgagactgctcagcactcaggtt

SEQ ID NO: 328363 - DNA, 120 bp, Artificial Sequence
  ENSG00000136383_13 (sequence is synthesized)
tgggcctgatcaacagttttgcttctggagaagtgaccaccaacggggaggctgcccccgagaatggagaggacggagagcatggcttgctgacatacatctgtgacgccatggagctgg

SEQ ID NO: 328364 - DNA, 120 bp, Artificial Sequence
  ENSG00000136383_14 (sequence is synthesized)
ggcctcagagagccctcaaagaggagagtggggccaagaagaaaaagaaagatgaggaatccaagcaaggcctgcggaagccagagttagagaaggcagcccaaagccgccgttcttcag

SEQ ID NO: 328365 - DNA, 120 bp, Artificial Sequence
  ENSG00000136383_15 (sequence is synthesized)
aaaactgcatccccagctcagacgagcctgactcctgtgggactcaggggcccgtgggcgtggagcaggttcagacccagcccagaggcagggctgcacgggggcctgggtcctctggca

SEQ ID NO: 328366 - DNA, 120 bp, Artificial Sequence
  ENSG00000136383_16 (sequence is synthesized)
cagatagtaccaggaagccagcctctgctgtgggcactccagacaaggcccagaaggcccctggcccaggcccaggccaggaagtgtatttctccttgaaggacatgtacctggagaaca

SEQ ID NO: 328367 - DNA, 120 bp, Artificial Sequence
  ENSG00000136383_17 (sequence is synthesized)
cccaggcagtcaggcctcttggggaagagggaccccagaccctgagtgtccgggcgcctggggagagtcccaaggggaaggcacccctcagggctagaagcgagggggtgcctggcgctc

SEQ ID NO: 328368 - DNA, 120 bp, Artificial Sequence
  ENSG00000136383_18 (sequence is synthesized)
ctggccagcccacacactccttgaccccccagccgactaggcctttcaacagaaagagatttgcccctccaaagcccaaaggagaggccaccactgacagcaagcccatttcttctctga

SEQ ID NO: 328369 - DNA, 120 bp, Artificial Sequence
  ENSG00000136383_19 (sequence is synthesized)
gtcaagctccagaatgcggggcccagagcttaggaaaggccccacctcaggcctctgtgcaggtgccgacgccccctgcccggcggagacatggcacccgggacagcacgttgcaggggc

SEQ ID NO: 328370 - DNA, 120 bp, Artificial Sequence
  ENSG00000136383_20 (sequence is synthesized)
aagcaggccacaggactccaggagaggtcctggaatgccagacaaccacggctcctaccatgtcggccagcagcagctctgatgtagcctccattggggttagcacttccggaagtcaag

SEQ ID NO: 328371 - DNA, 120 bp, Artificial Sequence
  ENSG00000136383_21 (sequence is synthesized)
gtatcattgaacccatggatatggaaacccaggaggatgggagaacatctgctaaccagagaactggaagcaagaagaatgtgcaggcagatgggaagatacaagtggatggaaggacca

SEQ ID NO: 328372 - DNA, 120 bp, Artificial Sequence
  ENSG00000136383_22 (sequence is synthesized)
ggggagatggaacacagacagcccagaggacacgtgcagataggaagacgcaggtggatgctgggacacaagaaagcaagaggccacagtcagacaggagtgcacagaagggcatgatga

SEQ ID NO: 328373 - DNA, 120 bp, Artificial Sequence
  ENSG00000136383_23 (sequence is synthesized)
cacagggaagggcagagacacagctagaaacaacacaggcaggtgagaagatacaggaagacaggaaggcccaggcagataagggcacacaggaagacagaaggatgcagggagagaagg

SEQ ID NO: 328374 - DNA, 120 bp, Artificial Sequence
  ENSG00000136383_24 (sequence is synthesized)
ggatgcagggagagaaggggacgcagtcagaggggagcgcgcccacagccatggaaggtcagtctgagcaagaggtggcaaccagcctcggcccaccatccagaacccccaaactcccac

SEQ ID NO: 328375 - DNA, 120 bp, Artificial Sequence
  ENSG00000136383_25 (sequence is synthesized)
ctacagcgggtcctagagctcctctgaatattgaatgttttgtacagaccccagaagggtcttgtttcccaaaaaaacctggttgcctgcccagatctgaggaggcagtagtaacagcct

SEQ ID NO: 328376 - DNA, 120 bp, Artificial Sequence
  ENSG00000136383_26 (sequence is synthesized)
ccaggaaccatgagcaaactgtgctgggtcccctgtcagggaacctcatgctcccagcacagccgccccatgaggggagtgtggagcaggtgggaggagagagatgccgagggccacagt

SEQ ID NO: 328377 - DNA, 120 bp, Artificial Sequence
  ENSG00000136383_27 (sequence is synthesized)
catcaggcccagtcgaggccaagcaggaggacagcccgttccagtgccccaaggaggagcggccagggggagtgccgtgtatggatcagggtggctgtcctctagctggcctgagccagg

SEQ ID NO: 328378 - DNA, 120 bp, Artificial Sequence
  ENSG00000136383_28 (sequence is synthesized)
aggtacccacgatgccttctcttcctggaactgggctgacagctagcccaaaggcggggccgtgtagcaccccgacttctcagcacgggagcacagccaccttcctgccctctgaggatc

SEQ ID NO: 328379 - DNA, 120 bp, Artificial Sequence
  ENSG00000136383_29 (sequence is synthesized)
aggtcctgatgagttctgccccaacactgcacctggggctggggacccccactcagagtcacccaccagaaaccatggccaccagcagtgagggggcctgcgcccaggtaccagatgtgg

SEQ ID NO: 328380 - DNA, 120 bp, Artificial Sequence
  ENSG00000136383_30 (sequence is synthesized)
aggggcggaccccaggtccccggagctgtgaccctggcctcatagattccctgaagaactacctgcttctgctgctgaagctgtccagcacagagacaagtggagcagggggagagtccc

SEQ ID NO: 328381 - DNA, 120 bp, Artificial Sequence
  ENSG00000136383_31 (sequence is synthesized)
aggtgggggcagccaccggaggtctggtgccctcagccactctgacacccactgtggaagtggctgggcttagtccccggacatcgaggcgcatcctggagcgtgtggagaacaaccacc

SEQ ID NO: 328382 - DNA, 120 bp, Artificial Sequence
  ENSG00000136383_32 (sequence is synthesized)
tggtgcagagtgcacagaccctgctgctgagcccctgtacctcccgccgcctcaccggcctcctggaccgtgaggtgcaggctggccgccaggcccttgctgctgcccgaggctcctggg

SEQ ID NO: 328383 - DNA, 120 bp, Artificial Sequence
  ENSG00000136383_33 (sequence is synthesized)
gtcctggtcccagctccctcactgtccctgccattgtggtagacgaggaggaccctgggctggcctcagaaggagccagtgagggtgaaggagaggtttcccctgaggggcctggcctcc

SEQ ID NO: 328384 - DNA, 120 bp, Artificial Sequence
  ENSG00000136383_34 (sequence is synthesized)
tgggggcctctcaggagagcagcatggctggtcgactgggggaggcgggtgggcaggcagcccctggacaggggccctcagcagagagcatagcccaggagccctcccaagaggagaagt

SEQ ID NO: 328385 - DNA, 120 bp, Artificial Sequence
  ENSG00000136383_35 (sequence is synthesized)
tcccaggggaggctctgacaggtctcccggcagctacacctgaggaactggctctaggggcccggaggaagagatttctccctaaggtcagagcagcaggagacggggaggcaaccacac

SEQ ID NO: 328386 - DNA, 120 bp, Artificial Sequence
  ENSG00000136383_36 (sequence is synthesized)
ctgaagaaagggagagccccacggtttccccccgggggcccaggaaaagcctggtgcctgggtccccagggactccagggcgggagagacgctcccctacgcagggcagaaaggcgagca

SEQ ID NO: 328387 - DNA, 120 bp, Artificial Sequence
  ENSG00000136383_37 (sequence is synthesized)
tgctggaggtgcctcgggcagaggaggagctggcggcaggagacctgggccccagccccaaggccggcggtctggacacagaggtggccctggatgaaggcaagcaggagacactggcca

SEQ ID NO: 328388 - DNA, 120 bp, Artificial Sequence
  ENSG00000136383_38 (sequence is synthesized)
agcccaggaaagccaaagacctgctgaaagccccacaggtgatccggaagattcgggtggagcagtttcctgatgcctccggtagcctgaagctgtggtgccagtttttcaacattctta

SEQ ID NO: 328389 - DNA, 120 bp, Artificial Sequence
  ENSG00000136383_39 (sequence is synthesized)
gtgactcagtcttgacatgggccaaggatcagcgcccagtgggcgaggtgggcaggagcgcaggggatgaggggccggcggccttggccatcgtgcaggcctcccccgtagactgcggtg

SEQ ID NO: 328390 - DNA, 120 bp, Artificial Sequence
  ENSG00000136383_40 (sequence is synthesized)
tgtatcggtgcaccatccacaatgagcacggctcggcctccaccgacttctgcctcagccctgaggtgttgtcaggattcatctccagagaagaaggtgaagttggagaagagattgaga

SEQ ID NO: 328391 - DNA, 120 bp, Artificial Sequence
  ENSG00000136383_41 (sequence is synthesized)
tgacccctatggtgtttgctaagggtctggctgactctggctgctggggggacaagctctttgggcgactggtaagcgaggagctccgagggggtggatatgggtgtggccttcggaagg

SEQ ID NO: 328392 - DNA, 120 bp, Artificial Sequence
  ENSG00000136383_42 (sequence is synthesized)
cctcccaggccaaggtcatctacgggctggaacccatcttcgagtcgggccgcacgtgcatcatcaaggtgtccagcctgcttgtgtttgggcccagcagtgagacttctcttgtgggca

SEQ ID NO: 328393 - DNA, 120 bp, Artificial Sequence
  ENSG00000136383_43 (sequence is synthesized)
gaaactacgacgtcaccatccaggggtgcaagatccagaacatgagtcgggagtactgcaaaatcttcgcagcagaagcccgggccgcgcctggctttggggaggtgcctgagatcatcc

SEQ ID NO: 328394 - DNA, 120 bp, Artificial Sequence
  ENSG00000136383_44 (sequence is synthesized)
cactgtatctgatctaccggcctgcaaacaatatcccatatgctaccctggaggaagacctgggcaagcccctggagtcttactgttctcgggaatggggctgtgctgaggctccgacag

SEQ ID NO: 328395 - DNA, 120 bp, Artificial Sequence
  ENSG00000136383_45 (sequence is synthesized)
atgtgcagattgctaccaaactccgaggataccagggcctcaaggaaagctgcttccctgccctgctggaccggttcgcctcctcccaccagtgcaatgcctactgtgagctgctggggc

SEQ ID NO: 328396 - DNA, 120 bp, Artificial Sequence
  ENSG00000136383_46 (sequence is synthesized)
tgacacctctcaagggcccggaggcggcccacccccaagccaaagccaaaggctctaagagtccatctgctggcaggaaaggctcccagctgagtcctcagccccagaagaaaggcctcc

SEQ ID NO: 328397 - DNA, 120 bp, Artificial Sequence
  ENSG00000136383_47 (sequence is synthesized)
ctagtcctcagggcacccggaagagtgctccaagttccaaggccacccctcaggcctcagagccagtcaccactcagttgttgggacagcctcccacccaagaggagggctccaaggccc

SEQ ID NO: 328398 - DNA, 120 bp, Artificial Sequence
  ENSG00000136383_48 (sequence is synthesized)
agggcatgcggtagcctccgcagaggctgggggcctccacccagcagcagaccaaccaggaagcagcttgaactggatggagactttccaaatatggaactaactggagaaggtgcacga

SEQ ID NO: 328399 - DNA, 120 bp, Artificial Sequence
  ENSG00000136383_49 (sequence is synthesized)
aggagacaccacttggggacctctctgagcaggctctcgtgaatcagctcgtcatcagatggctttggtgcatggcacatagcccactggcctcttctggtgccactgtcacccagggct

SEQ ID NO: 328400 - DNA, 120 bp, Artificial Sequence
  ENSG00000136383_50 (sequence is synthesized)
cccgggcctcaagcagtccccacctccaagtgcctggcaacctaggccctccttgaagtttacactttgccactgctggaggctcccctgagtcctctgcatgagttctgcaccccaagc

SEQ ID NO: 328401 - DNA, 120 bp, Artificial Sequence
  ENSG00000136383_51 (sequence is synthesized)
ccttgccccagcccagtccagcagcagatgttacaatctgagtgaggacatgcaggccaacttttaccctcctgcatttgcctggccctgatctcgcctgtcctcagggatccagacttc

SEQ ID NO: 328402 - DNA, 120 bp, Artificial Sequence
  ENSG00000136383_52 (sequence is synthesized)
ctctgctggtctggcctggtgactctcagggtatcttctccttccagctactttcgctcactgatctcagcttatcctgcaactaaccatccttgagcccagatggggctcagggccctt

SEQ ID NO: 328403 - DNA, 120 bp, Artificial Sequence
  ENSG00000136383_53 (sequence is synthesized)
ccagagcctgtcatgtccttgtgcagtggcctttgatgtgtgttcacgctcttcccccttcactcactcgcctgcttcccatgctcccttgtaccccctcgccacatccctgtcttgggg

SEQ ID NO: 328404 - DNA, 120 bp, Artificial Sequence
  ENSG00000136383_54 (sequence is synthesized)
cccagctgcagcctgctgcctgcccttcatggctctgcacatggccctttgcttgagggctccccactccctgcccaccaatacccaggtgaggaacagaccctctggcctctcacccca

SEQ ID NO: 328405 - DNA, 120 bp, Artificial Sequence
  ENSG00000136383_55 (sequence is synthesized)
cttcagtgctctcttccccaacttctctcgggctctttgctcatgaggtgagagctggtgtgagggttgtgtcagcagctgtagccagagagaggtgttgactctgagagaccttgcact

SEQ ID NO: 328406 - DNA, 120 bp, Artificial Sequence
  ENSG00000136383_56 (sequence is synthesized)
ccatactgaaaggaggtggggtcacagtgaatttcacatcccctctcaaccaggagtggagggctaggtcccttccccatggggagtacacttgggtgttctaggagggatgcagtctat

SEQ ID NO: 328407 - DNA, 120 bp, Artificial Sequence
  ENSG00000136383_57 (sequence is synthesized)
ccatgcacttgggtggaggggagtctctgtgcctgggaattaggacccctgctccaaccatcgctcttgatcctggggccccagctctgggtcctcatgtatgggctcccaaggacccag

SEQ ID NO: 328408 - DNA, 120 bp, Artificial Sequence
  ENSG00000136383_58 (sequence is synthesized)
cagcctggatccttccagagcatccctcctggaggcctgggatggggtaggtctgcagctagcctactccctttggaatgcaataaaggcagcattgtgtgccctgcttgccctcatctg

SEQ ID NO: 328409 - DNA, 120 bp, Artificial Sequence
  ENSG00000136383_59 (sequence is synthesized)
gtgtggttggaggtctgtggagtcaaggtccccctctcccaggcaggctctctgagggcattctgtagtcccaggcccactggaaaaatgaatctatattttggttcctggaccgaagtt

SEQ ID NO: 328410 - DNA, 120 bp, Artificial Sequence
  ENSG00000136383_60 (sequence is synthesized)
cagtcgcagccttctgtggccacagaaagacagcttgtgctgcttgcacaactgagctgctggtgtgtaccccttagcagggtgtctggggacttacgcctttggaattgctcttcattc

SEQ ID NO: 328411 - DNA, 120 bp, Artificial Sequence
  ENSG00000136383_61 (sequence is synthesized)
agaagaggaacacaaaggaagccacccaggaaggaagcacagagctgggggctctggaaacgccctgtgtctctggctacagcaagaccagcccaggagcccaccagcacctgcctctca

SEQ ID NO: 328412 - DNA, 120 bp, Artificial Sequence
  ENSG00000136383_62 (sequence is synthesized)
gctacttgctgaccatttcctgcttctcaagctgcagagaagcttttcattcccacccccacccggaacctccccttgcctaacatttcccctctatggtaacatctctgacttctctac

SEQ ID NO: 328413 - DNA, 120 bp, Artificial Sequence
  ENSG00000136383_63 (sequence is synthesized)
ctcctctgtgctcaggtgactccacatcttctgccccagtgtgtccccacctctcccagcctgtatacccagattactttggtgaactgagagctggagtactgttcattcatttattca

SEQ ID NO: 328414 - DNA, 120 bp, Artificial Sequence
  ENSG00000136383_64 (sequence is synthesized)
ttcacccactcattcagcagacatatactgagtgctactttatgccagaccctgggctggcagctgtttggaggcaaagatgtatgaggccatctcaggagagactacttgttaggattc

SEQ ID NO: 328415 - DNA, 120 bp, Artificial Sequence
  ENSG00000136383_65 (sequence is synthesized)
ttgagttttgaccaacagaaatgaacttggaccaacttaagcaaggaaaaagcgttcatgggaaggatgctgggatagctcacaaaaccaaaagaatagctgaacaattaattggccctg

SEQ ID NO: 328416 - DNA, 120 bp, Artificial Sequence
  ENSG00000136383_66 (sequence is synthesized)
ggaagggtgggagctggggcaactacgaggcttgcctcccaggagctgctgcggttggcagatcaacaccaacttgccattggttctagtgggtccccttccactcaagattcaaattcc

SEQ ID NO: 328417 - DNA, 120 bp, Artificial Sequence
  ENSG00000136383_67 (sequence is synthesized)
aagtgaaagaacctggcctggagctcagggcttcatagagtgggaggggggcagtcttccaaaagatgcggactcttgccacatggaatggtggagtacggaagggtggaaagggtttgg

SEQ ID NO: 328418 - DNA, 120 bp, Artificial Sequence
  ENSG00000136383_68 (sequence is synthesized)
taggtaaaccctgaagatgcttctaacacacgtgctgttctcccatctcacgtatgacgactctcccacaggtaaccaaaaccacatttctctctgcttagggaattcaagatcatatct

SEQ ID NO: 328419 - DNA, 120 bp, Artificial Sequence
  ENSG00000136383_69 (sequence is synthesized)
aacttcgaattccaggggtaatgacacggcttctattctccaaagtccagtgtcattagggataatctccctctttcagttttatcacaattccattttgaaattctacaacctgtagat

SEQ ID NO: 328420 - DNA, 120 bp, Artificial Sequence
  ENSG00000136383_70 (sequence is synthesized)
taactggtaaaattaaccatattcaaccaaaattgtataacccagcaagaatggaagaatgggtaaagtctacagtccatttctagaactggtcatgagaactcatgtttatgatgatgg

SEQ ID NO: 328421 - DNA, 120 bp, Artificial Sequence
  ENSG00000136383_71 (sequence is synthesized)
acttttgatctggtggagggacccaaaccttcagttctgaagctcattagtggtcctacctgtgtgacaggcatttactattggactggcagtcccaggacaaactccaggaatcccccc

SEQ ID NO: 328422 - DNA, 120 bp, Artificial Sequence
  ENSG00000136383_72 (sequence is synthesized)
atgtccatctctactcctgccctcttttacgtagcagcaatcatattttcccttgatagggttcatcattctagatactccgatgacttctttataatgagcctgaagtggcctggtggc

SEQ ID NO: 328423 - DNA, 120 bp, Artificial Sequence
  ENSG00000136383_73 (sequence is synthesized)
tgcctcagcttccagttcagttgaatagctactacgtctttgaggatgtgctccttgctgggggactaaactctccacgccagcccagtcccaaacctaaacctcgggtatgagaaaagc

SEQ ID NO: 328424 - DNA, 120 bp, Artificial Sequence
  ENSG00000136383_74 (sequence is synthesized)
attgagatctagcaatagcagggccatgtccacactgcgtcctatccctgaaggagaaacagcgccaggtatggttgccggctccaagcgcatgctgcctcctgcaggcctgacccagcc

SEQ ID NO: 328425 - DNA, 120 bp, Artificial Sequence
  ENSG00000136383_75 (sequence is synthesized)
tctcggggtgttgtttctggtgccatagttgaattttcaacaaaccatttcaccaccctctcaagacagctgctgctggtttgtgggttcctgacaagatgagtgaatgcctgcccatca

SEQ ID NO: 328426 - DNA, 120 bp, Artificial Sequence
  ENSG00000136383_76 (sequence is synthesized)
acccgttactattcttttagctgtaaagtgaattctctggttgggtgcagtatgtgaggaggtcacatgatgtttatggcatttgagaattccatggatattgatggcaggagaggcatg

SEQ ID NO: 328427 - DNA, 120 bp, Artificial Sequence
  ENSG00000136383_77 (sequence is synthesized)
atgggttagaaaagcaaatccaaatccagaacaagggcccaaaagggccaagacaaattactgcccctctcagagccacaggtgtagacaggtgaaaacactggacagtgagtgagctac

SEQ ID NO: 328428 - DNA, 120 bp, Artificial Sequence
  ENSG00000136383_78 (sequence is synthesized)
ccacacacgacccactggtgccttcagagccttagcctggagcgacagtgtaccgttgataatggaacgcactggccatgccagactttatggctaggcggtcagataacactacgaggg

SEQ ID NO: 328429 - DNA, 120 bp, Artificial Sequence
  ENSG00000136383_79 (sequence is synthesized)
gcagcatggccaccaagtgtgccagggccaagtgttcaggctctcccagagcccagtggtgagccagaagggcattttgtacaaggataatggttactttttggccagagcatcacttgg

SEQ ID NO: 328430 - DNA, 120 bp, Artificial Sequence
  ENSG00000136383_80 (sequence is synthesized)
ctccaaatcctgggttcccgtatcatattttcttgtcaggacttaccgcaagctatgtatggctccgcggtatgccacccatggaaagacacctcatgcaccattgacctgccaggtcac

SEQ ID NO: 328431 - DNA, 120 bp, Artificial Sequence
  ENSG00000136383_81 (sequence is synthesized)
gtggcctgatggcagcgtcggctgcacaaaagactttcccagctgcaatgccttcgcctgctctaggcccaccccaaagctggcagtcttctaggtcagttggtaaatgggttagaacaa

SEQ ID NO: 328432 - DNA, 120 bp, Artificial Sequence
  ENSG00000136383_82 (sequence is synthesized)
gatgccccaaagtggcataaattgcatggaattaggccttagtggcgagggattcgacatacagtcatttgtcctacattgtgaaggaaacattctgacctcaaacagatccctcaaccc

SEQ ID NO: 328433 - DNA, 120 bp, Artificial Sequence
  ENSG00000136383_83 (sequence is synthesized)
cagaactttatagaaggggcagaccttggcattttcacatgatttatctcccactctgattcacatatgtttgaccaaggcactgggcagctgccaatttcccgtcccttctgtagtccc

SEQ ID NO: 328434 - DNA, 120 bp, Artificial Sequence
  ENSG00000136383_84 (sequence is synthesized)
agatgaatggatacagacctctttggggaaggctgcaaggaaggttcacaacatgcatctaagtgttaaaataagtttttccttcaaaaatacatttgacttcctctccatttaaggtct

SEQ ID NO: 328435 - DNA, 120 bp, Artificial Sequence
  ENSG00000136383_85 (sequence is synthesized)
ggaaatcaagtgggagatcttgactttaccttggcacttgagacagaactgttggcccagaagtctttagttaaggtcattactaggccatatcttaggggcgtctggcctttttcattc

SEQ ID NO: 328436 - DNA, 120 bp, Artificial Sequence
  ENSG00000136383_86 (sequence is synthesized)
ctgggacccacagctcgaggtctggtttccatgccctatcccttacgatgagcgccctattttgttccttctgtctatctctgttgctgagatcagggagcccacgttcacagcagctct

SEQ ID NO: 328437 - DNA, 120 bp, Artificial Sequence
  ENSG00000136383_87 (sequence is synthesized)
ttcaagcagcctcccaggcctagagaggaaaatcagcagagcctcgtgaatgtatttctcgtggcaagaagggagctcatcttctgggtcctgccagagggcagtgagggggttgatggg

SEQ ID NO: 328438 - DNA, 120 bp, Artificial Sequence
  ENSG00000136383_88 (sequence is synthesized)
ctgggtgcatgccagggacccaatcaagcatttttatcttctgaaatctttgaattcctgcctttcttggatgtttggtcttttgatataatttagcatgggccaacatttggtccagat

SEQ ID NO: 328439 - DNA, 120 bp, Artificial Sequence
  ENSG00000136383_89 (sequence is synthesized)
ttgtattagccaagccctcctaaaatagtaataacagtatctggcgatttgagcttttacgtagaatgtagaatctctggtgagtgaacatatcaataaagacaacctgaaccaaaatta

SEQ ID NO: 328440 - DNA, 120 bp, Artificial Sequence
  ENSG00000136404_0 (sequence is synthesized)
gggatgcggtgaagggcgagcggcgcggcggctgcgatgagtgcctctgcggccaccggggtcttcgtgctgtccctctcggccatcccggtcacctatgtcttcaaccacctggcggcc

SEQ ID NO: 328441 - DNA, 120 bp, Artificial Sequence
  ENSG00000136404_1 (sequence is synthesized)
cagcatgattcctggactattgtaggggttgctgccctcatcctgttcctggtagcactgctggctcgtgtcctcgtcaaaagaaaaccaccccgggacccactgttctatgtgtatgca

SEQ ID NO: 328442 - DNA, 120 bp, Artificial Sequence
  ENSG00000136404_2 (sequence is synthesized)
gtttttggatttaccagcgtggtgaacctcatcataggactggagcaagatggaatcattgacgggttcatgacacactacttgagagagggtgaaccgtatctgaacaccgcatatggg

SEQ ID NO: 328443 - DNA, 120 bp, Artificial Sequence
  ENSG00000136404_3 (sequence is synthesized)
cacatgatctgctactgggatggctctgctcattatctgatgtacctggtgatggtggcagccatagcatgggaggaaacttatagaaccattggcctatattgggttggatctattatt

SEQ ID NO: 328444 - DNA, 120 bp, Artificial Sequence
  ENSG00000136404_4 (sequence is synthesized)
atgagtgttgttgtttttgtgccaggaaacattgtagggaagtatggaacacgaatttgccctgcttttttcttaagcataccatatacttgtcttcctgtctgggctggtttcagaatc

SEQ ID NO: 328445 - DNA, 120 bp, Artificial Sequence
  ENSG00000136404_5 (sequence is synthesized)
tataatcagccatcagaaaattataattacccctcaaaggttattcaagaagcccaagcgaaagacctgctgagaagaccatttgatttaatgttggttgtgtgtctcctcctggcaact

SEQ ID NO: 328446 - DNA, 120 bp, Artificial Sequence
  ENSG00000136404_6 (sequence is synthesized)
ggattttgcctgttcagaggtttgattgctttggattgcccatctgagctctgccgattatatacgcaatttcaagagccctatctaaaggatcctgctgcttatcctaaaattcagatg

SEQ ID NO: 328447 - DNA, 120 bp, Artificial Sequence
  ENSG00000136404_7 (sequence is synthesized)
tcacattgatacatgctggaggtctggctcaggctcagttttctcacattggtgcatctcttcatgctagaactgcttatgtctacagagtccctgaagaagcaaaaatcctttttttag

SEQ ID NO: 328448 - DNA, 120 bp, Artificial Sequence
  ENSG00000136404_8 (sequence is synthesized)
cattaaacatagcatatggagttcttcctcagctcttggcctatcgttgtatctacaaaccagagttcttcataaaaacaaaggcagaagaaaaagtggaataaaaatattacttcatgt

SEQ ID NO: 328449 - DNA, 120 bp, Artificial Sequence
  ENSG00000136404_9 (sequence is synthesized)
tcctcctttctaaattactaacttttgttatactggtactgatattttgtcccatttcactctcttctcatacgtgagtacttaagaatatgtacattcttgctctgcactgtatgtgtg

SEQ ID NO: 328450 - DNA, 120 bp, Artificial Sequence
  ENSG00000136404_10 (sequence is synthesized)
agctatatggtattgtgtaaattttttttgaaggaaaatggaaattcttgagaaacagtttgtttaaagaaatatattcaaaatcatttgtgaataaacttgatcatccatctcaatatt

SEQ ID NO: 328451 - DNA, 120 bp, Artificial Sequence
  ENSG00000136404_11 (sequence is synthesized)
gtttgacatataaaataattataagtgtaaaaaattacaatttagtgccaacagtagtgagcatgaaatgaaactattcaaaagagaatatggcctgtgcatattaaaaaattcaaaaca

SEQ ID NO: 328452 - DNA, 120 bp, Artificial Sequence
  ENSG00000136404_12 (sequence is synthesized)
gtgaatgcagactggaggagtaacttttgcaaataagatgaatatgcttcattattaaactcaatataaaaggcaaatcatcagaatatttttaaatgttgtttgaaaaatgttttccca

SEQ ID NO: 328453 - DNA, 120 bp, Artificial Sequence
  ENSG00000136404_13 (sequence is synthesized)
aggaaagtttattatttgctgctgtttcaagaaaattacttttactaaatttttttgtgtgaatttaaacagctaaatagggatcagtaactttatctctatccttaatgaacatttgtt

SEQ ID NO: 328454 - DNA, 120 bp, Artificial Sequence
  ENSG00000136404_14 (sequence is synthesized)
ttattggtggctggaaatatttctattgtatttctgtgtatatttttaataaaattatttttggcctcttataaagacaaatcttattaaatttgaaacatttcatatatacacataaaa

SEQ ID NO: 328455 - DNA, 120 bp, Artificial Sequence
  ENSG00000136404_15 (sequence is synthesized)
tgtatggcttagtggttcctggatgttcctggatgcctgacatcacattgatacatgctggaggtctggctcagccagctgccatgctgtgagctgcctcatggtgagatccatggggca

SEQ ID NO: 328456 - DNA, 120 bp, Artificial Sequence
  ENSG00000136404_16 (sequence is synthesized)
ctccagtccaacaaccgtgaggagctgaatcctgccaggaacaatttgagtgatcttagaagaggatccatccccagttgagccttaagatgatctgagttcctgctgacacctggactg

SEQ ID NO: 328457 - DNA, 120 bp, Artificial Sequence
  ENSG00000136404_17 (sequence is synthesized)
cattttggtatctcagttccttttgcaagagacccagagccagaggatttagcaagttgcacctgaatggactgttgatgagtcttgaaaagatgagataataaatgctgctttaagtca

SEQ ID NO: 328458 - DNA, 120 bp, Artificial Sequence
  ENSG00000136404_18 (sequence is synthesized)
gagtgcctctgcggccaccggggtcttcgtgctgtccctctcggccatcccggtcacctatgtcttcaaccacctggcggcccagcatgagtgagtgagccggcgcggcgggggtcgcgc

SEQ ID NO: 328459 - DNA, 80 bp, Artificial Sequence
  ENSG00000136425_0 (sequence is synthesized)
ctcttcccgccggcggcggagtcgctgccgctccgggttcccgtccccgcctccgagacccccgcgcgcctcctccaggc

SEQ ID NO: 328460 - DNA, 120 bp, Artificial Sequence
  ENSG00000136425_1 (sequence is synthesized)
ccgagggccgcgggcacggggcgctggctccgggtctggcggccgctgatgggagtcggagcccgggcgggcgagcggcggcgcggcggccaccatggggaacaagcagaccatcttcac

SEQ ID NO: 328461 - DNA, 120 bp, Artificial Sequence
  ENSG00000136425_2 (sequence is synthesized)
agcagaccatcttcaccgaagagcagctagacaactaccaggactgcaccttcttcaataagaaggacatcctcaagctgcattcgcgattctatgagctggcccccaacctcgtcccaa

SEQ ID NO: 328462 - DNA, 120 bp, Artificial Sequence
  ENSG00000136425_3 (sequence is synthesized)
tggactacaggaagagccccatcgtccacgtgcccatgagcctcatcatccagatgccagagctccgggagaatcccttcaaagaaaggatcgtggcggcgttttccgaggatggtgagg

SEQ ID NO: 328463 - DNA, 120 bp, Artificial Sequence
  ENSG00000136425_4 (sequence is synthesized)
ggaacctcactttcaacgactttgtggacatgttttccgtgctctgcgagtcggctccccgagagctcaaggcaaactatgccttcaagatctatgacttcaacactgacaacttcatct

SEQ ID NO: 328464 - DNA, 120 bp, Artificial Sequence
  ENSG00000136425_5 (sequence is synthesized)
gcaaggaggacctggagctgacgctggcccggctcactaagtcagagctggatgaggaggaggtggtgcttgtgtgcgacaaggtcattgaggaggctgacttggacggtgacggcaagc

SEQ ID NO: 328465 - DNA, 120 bp, Artificial Sequence
  ENSG00000136425_6 (sequence is synthesized)
cacatccggatctgaggacactgccgaggctgtaggggcctagaagtccaccatcctgccctgcagtcacatgggtgtggcctccaagctccccaggaaagcagtggcagcctctggggt

SEQ ID NO: 328466 - DNA, 120 bp, Artificial Sequence
  ENSG00000136425_7 (sequence is synthesized)
ttacaccacaaatatatcctgtggccctttcagcaaaaaaaaaaccttaaccaggaagggggcctgtgaaggttaggacccttcccacagccccgctgtggtccagccccgggacccatg

SEQ ID NO: 328467 - DNA, 120 bp, Artificial Sequence
  ENSG00000136425_8 (sequence is synthesized)
gcctctctccaggccctccgcaccccgccccatgccccagtcctttcctactccagaaatgctccccacccccccaaagagggaaaagcagataacccaacaggaggtggtggggtctga

SEQ ID NO: 328468 - DNA, 120 bp, Artificial Sequence
  ENSG00000136425_9 (sequence is synthesized)
cgtgtccaagtgctggcagacaccctggtcacccaggacagagcggaaaaaaaaaaaagaggtcagggttttaacgagctatgcaatctttttccaaaacccaaggttgggctgcttccc

SEQ ID NO: 328469 - DNA, 120 bp, Artificial Sequence
  ENSG00000136425_10 (sequence is synthesized)
acccctgcctgttccccttctcccggcctccttcacaatgtgaagctgtgggtgcagtgggcccaagggctcttgctcctgtctctgcctctgggtcatgagtaccaccctgcctgcctc

SEQ ID NO: 328470 - DNA, 120 bp, Artificial Sequence
  ENSG00000136425_11 (sequence is synthesized)
cccaacaccgtggaatcctcactggtgtgctgtccacagatttgtgaactcctggtagtaaaacacttttgcatccctttgctctccatgtatgctaatgttaggaaatgtttgagggta

SEQ ID NO: 328471 - DNA, 120 bp, Artificial Sequence
  ENSG00000136425_12 (sequence is synthesized)
ctacaggggccgggcttgggcagggcagagcagggcaggccgggatgttggggctgaggcccctatcactcgctatttgtgagcagtggtgtgcggccaggaagcaggaggtcacgttca

SEQ ID NO: 328472 - DNA, 120 bp, Artificial Sequence
  ENSG00000136425_13 (sequence is synthesized)
agccacccttgccctagacgtgtgactggcctttgtcccctgcagggggaaggttgaagacctgggggccccttcagtgataagtgggggcagaactccctgggcaccgctgttcctccg

SEQ ID NO: 328473 - DNA, 120 bp, Artificial Sequence
  ENSG00000136425_14 (sequence is synthesized)
gcccccaacctcgtcccaatggactacaggaagagccccatcgtccacgtgcccatgagcctcatcatccagatgccagagctccggatggggaaaccgaggctcagagggatttggtca

SEQ ID NO: 328474 - DNA, 120 bp, Artificial Sequence
  ENSG00000136425_15 (sequence is synthesized)
ctcctccagggtcacacaggctgtccacagtctggctccggggccctcctgcttatcctgcacccacagtgattgctgtgtgtgttttcttcaggagaatcccttcaaagaaaggatcgt

SEQ ID NO: 328475 - DNA, 120 bp, Artificial Sequence
  ENSG00000136425_16 (sequence is synthesized)
gcggcggcgcggcggccaccatggggaacaagcagaccatcttcaccgaagagcagctagacaactaccaggactgcaccttcttcaataagaaggacatcctcaaatggggaaaccgag

SEQ ID NO: 328476 - DNA, 120 bp, Artificial Sequence
  ENSG00000136425_17 (sequence is synthesized)
cgattctatgagctggcccccaacctcgtcccaatggactacaggaagagccccatcgtccacgtgcccatgagcctcatcatccagatgccagagctccggggatcttgtccaaatgcc

SEQ ID NO: 328477 - DNA, 120 bp, Artificial Sequence
  ENSG00000136436_0 (sequence is synthesized)
caggcgggacgggctctcccttgggtgcttagccccgcccccgtcccactctgccctgttgctgtcgcgccgctgctggttgctgtccctggacccctaccatggaggagaccatcaaag

SEQ ID NO: 328478 - DNA, 120 bp, Artificial Sequence
  ENSG00000136436_1 (sequence is synthesized)
atccccccacatcagctgtcttgctggatcactgtcatttctctcaggtcatctttaacagtgtggagaagttctacatccctggaggggacgtcacatgtcattataccttcacccagc

SEQ ID NO: 328479 - DNA, 120 bp, Artificial Sequence
  ENSG00000136436_2 (sequence is synthesized)
atttcatccctcgtcgaaaggattggattggcatctttagagtggggtggaagacaacccgtgagtattacaccttcatgtgggttactttgcccattgacctaaacaacaaatcagcta

SEQ ID NO: 328480 - DNA, 120 bp, Artificial Sequence
  ENSG00000136436_3 (sequence is synthesized)
aacagcaggaagtccaattcaaagcttactacctgcccaaggatgatgagtattaccagttctgctatgtggatgaggatggtgtggtccggggagcaagtattcctttccaattccgtc

SEQ ID NO: 328481 - DNA, 120 bp, Artificial Sequence
  ENSG00000136436_4 (sequence is synthesized)
cagaaaatgaggaagacatcctggttgttaccactcagggagaggtggaagagattgagcagcacaacaaggagctttgcaaagaaaaccaggagctgaaggacagctgtatcagcctcc

SEQ ID NO: 328482 - DNA, 120 bp, Artificial Sequence
  ENSG00000136436_5 (sequence is synthesized)
agaagcagaactcagacatgcaggctgagctccaaaagaagcaggaggagctagaaaccctacagagcatcaataagaagttggaactgaaagtgaaagaacagaaggactattgggaga

SEQ ID NO: 328483 - DNA, 120 bp, Artificial Sequence
  ENSG00000136436_6 (sequence is synthesized)
cagagctgcttcaactgaaagaacaaaaccagaagatgtcctcagaaaatgagaagatgggaatcagagtggatcagcttcaggcccagctgtcaactcaagagaaagaaatggagaagc

SEQ ID NO: 328484 - DNA, 120 bp, Artificial Sequence
  ENSG00000136436_7 (sequence is synthesized)
ttgttcagggagatcaagataagacagagcagttagagcagctgaaaaaggaaaatgaccacctctttctcagtttaactgaacagaggaaggaccagaagaagctcgagcagacagtgg

SEQ ID NO: 328485 - DNA, 120 bp, Artificial Sequence
  ENSG00000136436_8 (sequence is synthesized)
agcaaatgaagcagaatgaaactactgcaatgaagaaacaacaggaattaatggatgaaaactttgacctgtcaaaaagactgagtgagaacgaaattatatgtaatgctctgcagagac

SEQ ID NO: 328486 - DNA, 120 bp, Artificial Sequence
  ENSG00000136436_9 (sequence is synthesized)
agaaagagagattggaaggagaaaatgatcttttgaagagggagaacagcagattgctcagttacatgggtctggattttaattctttgccgtatcaagtacctacttcagatgaaggag

SEQ ID NO: 328487 - DNA, 120 bp, Artificial Sequence
  ENSG00000136436_10 (sequence is synthesized)
gcgcaagacaaaatccaggacttgcctatggaaacccatattctggtatccaagaaagttcttcccccagcccgctctccatcaagaaatgccctatctgcaaagcagatgatatttgtg

SEQ ID NO: 328488 - DNA, 120 bp, Artificial Sequence
  ENSG00000136436_11 (sequence is synthesized)
atcacaccttggagcaacagcagatgcagcccctttgtttcaattgtccaatttgtgacaagatcttcccagctacagagaagcagatctttgaagaccacgtgttctgccactctctct

SEQ ID NO: 328489 - DNA, 120 bp, Artificial Sequence
  ENSG00000136436_12 (sequence is synthesized)
gagtatcccaacctcttggatgtatacagagattttatagaatagaacctatagcttctaccatgagttatatgagtcaagatcctgcctaacctgaaattattagggatttactcagcc

SEQ ID NO: 328490 - DNA, 120 bp, Artificial Sequence
  ENSG00000136436_13 (sequence is synthesized)
ctgctgccgctaacagtggagttatgtcactgatctgaaggtcactgttaagggcttctgctgccatccttgtgggttgctacctttaagtcgcataactctagctgtatcatcctctca

SEQ ID NO: 328491 - DNA, 120 bp, Artificial Sequence
  ENSG00000136436_14 (sequence is synthesized)
cctgtcattcttctgagggtctcagtacaagggccctgggatggagccaacctgggtattcacaacaggcctgacttgatactaagtgattagttttccaagttgtcccactgccattca

SEQ ID NO: 328492 - DNA, 120 bp, Artificial Sequence
  ENSG00000136436_15 (sequence is synthesized)
atccttggtgttgctttctccaaatgattgttttagactagccaaaaatgccgtggcaaagagctcagaaatccaatttggataccaaaggtttctcatgttaatttctcagcccccaaa

SEQ ID NO: 328493 - DNA, 120 bp, Artificial Sequence
  ENSG00000136436_16 (sequence is synthesized)
gaagcatcttactcctgaaccttagacaggaagtattgtttcagtcacagaaagcttttctgggtacctctggttagcactttctactctctgatatttcctatgtacatagcttttatt

SEQ ID NO: 328494 - DNA, 120 bp, Artificial Sequence
  ENSG00000136436_17 (sequence is synthesized)
gttgtaaatcctttcttaatggttaaataggattgttagcaactatgggtttgcagttttctgagtaggtgagttttgaatatgggtaaatcagaataatgagacaacttgttaatctct

SEQ ID NO: 328495 - DNA, 120 bp, Artificial Sequence
  ENSG00000136436_18 (sequence is synthesized)
ttaatactaaaaataaattactcttctatttcagggacttaggtaatttaaaataaaccttcaatttatggtcttctgttttgaagctcatgggaaaattgtgatcaaaagggctatggg

SEQ ID NO: 328496 - DNA, 120 bp, Artificial Sequence
  ENSG00000136436_19 (sequence is synthesized)
aagggcagaccccgccaatgatttctcttcacctgtcttaagattaaataaaaaagagtgtcctggcagttatcttgaggtggggaaggaggtgatgaaacattagtttgtgaaatccaa

SEQ ID NO: 328497 - DNA, 85 bp, Artificial Sequence
  ENSG00000136436_20 (sequence is synthesized)
ctggacagtctctctctgtcacccaggctggcgtgcaatggcgcagttgactcactacagcctctgcctcccaggttcaagcgat

SEQ ID NO: 328498 - DNA, 88 bp, Artificial Sequence
  ENSG00000136436_21 (sequence is synthesized)
tgggcccgaggccctgacttcttgctgtaactttccatgcattttttttaaaaggagcagtgtggattttcgcaccctttgtgaacta

SEQ ID NO: 328499 - DNA, 120 bp, Artificial Sequence
  ENSG00000136436_22 (sequence is synthesized)
taaaaggagcagtgtggattttcgcaccctttgtgaactaagttcaatgcgctctatccaaatttgcctaattgaactataagaaagtaataattccattttctatcccctcagggactg

SEQ ID NO: 328500 - DNA, 120 bp, Artificial Sequence
  ENSG00000136436_23 (sequence is synthesized)
aacaaatggaaataactcccaggcagtatcaggtggtcactacagagacttccacaaaaacttttgaatgatgtgaaacacgatgtcatgaataagggttgagccaactatagctctgtg

SEQ ID NO: 328501 - DNA, 120 bp, Artificial Sequence
  ENSG00000136436_24 (sequence is synthesized)
ttcctactgggctttccctaatgtggttgggagttatgccctagactaactgtattgtcctagtcacagctccttgctttgatttcatccttgataaaatgaagatgaaacttacactac

SEQ ID NO: 328502 - DNA, 120 bp, Artificial Sequence
  ENSG00000136436_25 (sequence is synthesized)
ttctccaagccttttgctgtcttaagaataagacctgagattaacactaaccctagaatagaaatgtaatagggagatggtaataaaggagtttttctggcacataccctccctacagaa

SEQ ID NO: 328503 - DNA, 120 bp, Artificial Sequence
  ENSG00000136436_26 (sequence is synthesized)
tttctgttgctccccagatccagtgaagaattgcagtttcatttattttgtaccagtcagctcttaattaagtacatgaatggagaggaacagtggtgcacataatccaaatcagtgaat

SEQ ID NO: 328504 - DNA, 120 bp, Artificial Sequence
  ENSG00000136436_27 (sequence is synthesized)
accattttctggtgaattacccacccctttgcccctgctaccccgagggttaccatgattgtcaacagcagcaggagcccttccacagggcttggtaaaaaaaccagttgaggtgttaat

SEQ ID NO: 328505 - DNA, 120 bp, Artificial Sequence
  ENSG00000136436_28 (sequence is synthesized)
gaccctttttgctgggtgtaaaacaaagcatctttaaccactgttcattatccccagctgctcttaccaaggctttgaagggggaaattatgctctaggcagccactagtagtaaacaat

SEQ ID NO: 328506 - DNA, 120 bp, Artificial Sequence
  ENSG00000136436_29 (sequence is synthesized)
aactgaacaggtagagtcatgagagaaaacaacacttttaggcatttgcaagaaaatatacgttgttctttgtataaagaacattttaatgttctttaatatacctggatgtcactggct

SEQ ID NO: 328507 - DNA, 120 bp, Artificial Sequence
  ENSG00000136436_30 (sequence is synthesized)
ttaggaaagggctcagaggaagctatctgaaatgagatagctcatggctttcttcagaaactgacgagagaagacttgcctctccctatgcatcctgcttgctcattagcttagcaggcc

SEQ ID NO: 328508 - DNA, 120 bp, Artificial Sequence
  ENSG00000136436_31 (sequence is synthesized)
aagagctgctgtaccatcagtacccttaagtacagtcagattagatttctggaatttgtgagaaaacactgttatgacattgatgatgtgattctccaccctttgaatcatgaattagaa

SEQ ID NO: 328509 - DNA, 120 bp, Artificial Sequence
  ENSG00000136436_32 (sequence is synthesized)
aattggtatcagaatagtcaggaaaaatgatctgatttcaaatattaactttagggattgaatacttgcagttttttggagtcaggaagccaaaacaggactgcaatggagactagtaga

SEQ ID NO: 328510 - DNA, 120 bp, Artificial Sequence
  ENSG00000136436_33 (sequence is synthesized)
agactaattaattcccttcagcttgagctttctggggcagataaaaagatttccagaattttacttttctgaatagatcttattttggatgaaaaattatgttgtgttttcagcttacta

SEQ ID NO: 328511 - DNA, 120 bp, Artificial Sequence
  ENSG00000136436_34 (sequence is synthesized)
tgttaccactcaggtttgtaaaacttctcacctcaatcccttactgccattacgggtagcaatataggataggatggaatttgagttaataaggctttattgaatatctaacgggtatca

SEQ ID NO: 328512 - DNA, 120 bp, Artificial Sequence
  ENSG00000136436_35 (sequence is synthesized)
tttgacctgtcaaaaagactgagtgagaacgaaattatatgtaatgctctgcagagacagaaagagagattggaaggagaaaatgatgagcagaagtggtggtctgtaccagtgctggac

SEQ ID NO: 328513 - DNA, 120 bp, Artificial Sequence
  ENSG00000136436_36 (sequence is synthesized)
atgcctgacatatagtaagtgctcaataaatatttgttgcctgcctaagatactcattcaaaagtcatagaactagtctgtccctttgatgttgtttcaatctataggaggagctagaaa

SEQ ID NO: 328514 - DNA, 120 bp, Artificial Sequence
  ENSG00000136436_37 (sequence is synthesized)
aaagtgctggaattacaggcgtgacccaccacgcctgtccttattatgctgtcaaaaaccaaatataaatacttgcttcttgttgttgagatagagtcttgctctgtctctcagagtgga

SEQ ID NO: 328515 - DNA, 120 bp, Artificial Sequence
  ENSG00000136436_38 (sequence is synthesized)
ttataccttcacccagcatttcatccctcgtcgaaaggattggattggcatctttagagctggagtgcaatggcacgatttgtctcactgctacctccacctcccgggttcaagcagttc

SEQ ID NO: 328516 - DNA, 120 bp, Artificial Sequence
  ENSG00000136436_39 (sequence is synthesized)
cttgagattttccccaaggttgctttttccctccttggtcacttataccctcagctaaaccaaaaaaaaaaaaaaaaaaattggcatcttgatgccagctcaggccttcaggtgtctttt

SEQ ID NO: 328517 - DNA, 120 bp, Artificial Sequence
  ENSG00000136436_40 (sequence is synthesized)
tttctcaccttgtacccagactgcaatatgtgatcctaatcctaattttttttattgttgacaggatgaaaactttgacctgtcaaaaagactgagtgagaacgaaattatatgtaatgc

SEQ ID NO: 328518 - DNA, 120 bp, Artificial Sequence
  ENSG00000136436_41 (sequence is synthesized)
tctgcagagacagaaagagagattggaaggagaaaatgatgtaagtgtgtgaaagagggtataaaaccccaaggttttaaggggaaggatcagggtggcccagagatgtagtgaaaaaaa

SEQ ID NO: 328519 - DNA, 120 bp, Artificial Sequence
  ENSG00000136436_42 (sequence is synthesized)
aaacctaggccttaacacctatagcttcagctcttttccctggtcttgctaaaaattgggatgaaatgtgactgccttgatgttcaaatatcattctcctgtgatttgattttctacggt

SEQ ID NO: 328520 - DNA, 120 bp, Artificial Sequence
  ENSG00000136436_43 (sequence is synthesized)
ggcagtggcttacactgaggtaagcatactctaacctggtctcctaggaacaaatgtggatgaaatgtggatgcagtccattacctgggaaaaaagcaaaatggactctacatagagaca

SEQ ID NO: 328521 - DNA, 120 bp, Artificial Sequence
  ENSG00000136436_44 (sequence is synthesized)
agatccaaagagatattcatctgattgccctgagttaaccaacaataggccataagctcagtgaagttacactggccccagtgctttccttagctgctctcatataaatattcaaaagtc

SEQ ID NO: 328522 - DNA, 120 bp, Artificial Sequence
  ENSG00000136436_45 (sequence is synthesized)
tctgaaggccctggagcccctcccgcggcccgggagggttgcggggcagttttgtcttgcggagggcagcgctgcagtgctgtgtggcagggtgggaggctcctcgggaagaagtgacac

SEQ ID NO: 328523 - DNA, 120 bp, Artificial Sequence
  ENSG00000136436_46 (sequence is synthesized)
ccctggcggcggcgagggtcttgaggcggcggctgccgccccacgggtcgtggcgtcccgtcccctcccgcgggcccaggctgtggtggttccgtaatccctcgcctggatgtcatcgcc

SEQ ID NO: 328524 - DNA, 120 bp, Artificial Sequence
  ENSG00000136436_47 (sequence is synthesized)
gttggcttcgaggcggaggtggagccttgttgcgtcaccctgagcaagttactttctttttgggcctcagtgtccccctttacgagtaggtttgatccctgaagcgccttgccttttgca

SEQ ID NO: 328525 - DNA, 120 bp, Artificial Sequence
  ENSG00000136436_48 (sequence is synthesized)
tcgtgacctgcctctacagttaatccattgcccctccaccactgacccagcttagtttgggagctaatgttcccactcgtatattatttcaaccccactggacgtgttaactcttttcta

SEQ ID NO: 328526 - DNA, 120 bp, Artificial Sequence
  ENSG00000136436_49 (sequence is synthesized)
tcacttggattcttgcttcacatgcaagccaacaagtgaccatggttggagctgagtaaaatatggataatataacttattctattattggaaacaccattgcaagtaaaggactttatg

SEQ ID NO: 328527 - DNA, 61 bp, Artificial Sequence
  ENSG00000136436_50 (sequence is synthesized)
gtgccaacttattttttgtattttaatggagacgggttttcaccatgttgcccaggctggt

SEQ ID NO: 328528 - DNA, 120 bp, Artificial Sequence
  ENSG00000136436_51 (sequence is synthesized)
aacaacaggaattaatggcatgtctgtctttggatggttatgtgggagggagcctatagggatgtagaagaaaaggatatgggcctattttccggttgatggacaggataaataagagag

SEQ ID NO: 328529 - DNA, 120 bp, Artificial Sequence
  ENSG00000136436_52 (sequence is synthesized)
tgttcacctctagatgttttgctttctagccaaaaggacagagaatctgccatttataaaatgtttagaagtgggcatttctaatatgtgataagtaataaaggaatattgcaagttaaa

SEQ ID NO: 328530 - DNA, 120 bp, Artificial Sequence
  ENSG00000136436_53 (sequence is synthesized)
atgccttaaagaggtgctttaaagagtgatttgtctaattttactcagttggcagttgggagttgctagggaaacacatctctttgttattgtacgttaaaaagcattgttcctgttttg

SEQ ID NO: 328531 - DNA, 120 bp, Artificial Sequence
  ENSG00000136436_54 (sequence is synthesized)
taatctcagtatttgtcaggattttgcttttcctgacttgctttgcacagaatgttccctggatgaaagcccagaaatcaccaacatttcagacaatgctttctgagccttactctgttc

SEQ ID NO: 328532 - DNA, 120 bp, Artificial Sequence
  ENSG00000136436_55 (sequence is synthesized)
taaatgtttccaagacaaattggaacaagaactactcaaatggaggagccaaggacagaaattgcaggtggggtggaagacaacccgtgagtattacaccttcatgtgggttactttgcc

SEQ ID NO: 328533 - DNA, 120 bp, Artificial Sequence
  ENSG00000136436_56 (sequence is synthesized)
agatgtagtcttaatcagactattcaactcctcatcaccccagacactggtagtatctggcaccaggtggggtggaagacaacccgtgagtattacaccttcatgtgggttactttgccc

SEQ ID NO: 328534 - DNA, 120 bp, Artificial Sequence
  ENSG00000136436_57 (sequence is synthesized)
ggttaattcagtaccaagtgatcaggaactagaggtgattcttagttacctaactgtgtgactctctgtgtattataagcattttgtataatatgtgttggcagtttttaaattctagcc

SEQ ID NO: 328535 - DNA, 120 bp, Artificial Sequence
  ENSG00000136436_58 (sequence is synthesized)
aagctccacagcacttctctcttcacacattaatgtgtgctgtgggactcaaattttcatttcagtgtcaagctaaaataagatggcaaatcatataatcctcaaattttgttatgcttt

SEQ ID NO: 328536 - DNA, 120 bp, Artificial Sequence
  ENSG00000136436_59 (sequence is synthesized)
cactgcagcctcaacctcctcccaggctcagtgatcctcccacctcagccttttcagtagctgggactacaggtatgcagaacaatgcctaactgatttctttctttttttttttttctt

SEQ ID NO: 328537 - DNA, 120 bp, Artificial Sequence
  ENSG00000136444_0 (sequence is synthesized)
gcccgggctcgcggctgggcggcagcagccagagcggcccagaggcgccgccgcgtggagaacgcaggagggtccccgagtcctgagcctgcgggccggcgcgcggcgctttacgtacac

SEQ ID NO: 328538 - DNA, 120 bp, Artificial Sequence
  ENSG00000136444_1 (sequence is synthesized)
tcctgagcctgcgggccggcgcgcggcgctttacgtacactggccttactgcgagaagcgctgcagttactgcaacttcaacaagtacatccctcgccgcctggaggaggctgccatgca

SEQ ID NO: 328539 - DNA, 120 bp, Artificial Sequence
  ENSG00000136444_2 (sequence is synthesized)
gaagtgtctggtgaccgaagctcagacgctgctgcggctcagcggggtgcaacgggtggagtctgtgttctttggtggggggacccccagtctagccagtccccacacggtggctgctgt

SEQ ID NO: 328540 - DNA, 120 bp, Artificial Sequence
  ENSG00000136444_3 (sequence is synthesized)
cctggaggctgtggcacaggcagcccacctgcctgcagacttggaagtcacattggaggctaatcctacttcagctccgggctccagactggcagagttcggggcagcaggggttaacag

SEQ ID NO: 328541 - DNA, 120 bp, Artificial Sequence
  ENSG00000136444_4 (sequence is synthesized)
gttgtctataggcctccagtccctagatgacactgagctccggctgttgggacggacgcactcggcctgcgatgctctgcggacgctggcagaggcccggcgcctctttcccgggcgcgt

SEQ ID NO: 328542 - DNA, 120 bp, Artificial Sequence
  ENSG00000136444_5 (sequence is synthesized)
gtctgtagacttgatgctggggctgccggcacagcaggtggggccgtggcttgggcagctgcaggaactgctgcaccactgtgatgaccacctctccctctaccagctgtccctggagcg

SEQ ID NO: 328543 - DNA, 120 bp, Artificial Sequence
  ENSG00000136444_6 (sequence is synthesized)
gggcaccgcactcttcgcccaggtgcagcggggtgcccttccagcccctgacccggagctcgcagctgagatgtaccagaggggccgggctgtccttcgggaggctggcttccaccagta

SEQ ID NO: 328544 - DNA, 120 bp, Artificial Sequence
  ENSG00000136444_7 (sequence is synthesized)
tgaggtctccaactttgcccggaatggggcgctcagtacccacaattggacttactggcagtgtggtcagtaccttggcgttgggcctggggcccatggacgatttatgccccagggggc

SEQ ID NO: 328545 - DNA, 120 bp, Artificial Sequence
  ENSG00000136444_8 (sequence is synthesized)
tggaggccacacccgggaggctcggatccagacactggagcctgacaactggatgaaggaggtgatgctgtttggccatggcacccggaagcgtgtccccctgggcaggctggagctgct

SEQ ID NO: 328546 - DNA, 120 bp, Artificial Sequence
  ENSG00000136444_9 (sequence is synthesized)
ggaggaagttttggccctggggctacgcaccgatgtggggatcactcaccagcactggcagcagtttgagccccagctgaccctgtgggatgtgtttggagcgaacaaggaggtgcagga

SEQ ID NO: 328547 - DNA, 120 bp, Artificial Sequence
  ENSG00000136444_10 (sequence is synthesized)
gtgctggactctctcttgctgaccctcctgcctcagctccaagaagcctggcagcagagaaccccctcccctgtgccaggaggatgacaaaaatgttcctgtgttccagggtaatgccag

SEQ ID NO: 328548 - DNA, 120 bp, Artificial Sequence
  ENSG00000136444_11 (sequence is synthesized)
gtgggttttgagagctgggtcggtactgcagacatctcttctccgttgtcgggtgccgtctctgctccttgtggttattgctcagccctggcatccccaggggaatggcagcagtgaggt

SEQ ID NO: 328549 - DNA, 120 bp, Artificial Sequence
  ENSG00000136444_12 (sequence is synthesized)
agatgggaggacatttctggtcagggaactggcatcccattcagcatctcaggactcacaggccaacatgtgttccatggctgggaattgcctaccacccacatcagcttctgtttacct

SEQ ID NO: 328550 - DNA, 120 bp, Artificial Sequence
  ENSG00000136444_13 (sequence is synthesized)
ttttggcatcaaataatgaacagtgtttggaaatctttctacaggcaattacctccccaagagaagccttccttattttggagtaaggtcctaagatagctggatgaatcaggaaaacca

SEQ ID NO: 328551 - DNA, 120 bp, Artificial Sequence
  ENSG00000136444_14 (sequence is synthesized)
tgtcccctctaggtattattaatataagcaggaagggatctactataggaatgaagtatttataaaccactgaaagggatagagaagtgaacattggagaaagccagtagcaactgtgag

SEQ ID NO: 328552 - DNA, 120 bp, Artificial Sequence
  ENSG00000136444_15 (sequence is synthesized)
aaatcagcaacttgcaggaggcacagaaaactcctgctgatggtctcagcttccagcagcacaaaagcagatgatgtactggaaaatgctcagaagatgctacaaaacctcatgcctact

SEQ ID NO: 328553 - DNA, 120 bp, Artificial Sequence
  ENSG00000136444_16 (sequence is synthesized)
gtctgccactgctggagaaggaatcatggtttctagaagtgcctctcattagtggactttaaagcaaatcctggctggcaggaaattctgaggaatatagctcttaggcttccagcctct

SEQ ID NO: 328554 - DNA, 120 bp, Artificial Sequence
  ENSG00000136444_17 (sequence is synthesized)
accatgcaggagagaacacagaaggactgatgtatgttggtggatccatgtatgtgtccagcacagcggcctgctggactctgagaactgggaaagatcagagcaagccttgcctcttat

SEQ ID NO: 328555 - DNA, 120 bp, Artificial Sequence
  ENSG00000136444_18 (sequence is synthesized)
cttcgggaaaccagaatatgtttggggtggtaggagccacacagactcttctgagccccctcactcacttccttccccctgtgcctttcctttgagagtgaaggtgggtggagttgacca

SEQ ID NO: 328556 - DNA, 120 bp, Artificial Sequence
  ENSG00000136444_19 (sequence is synthesized)
gagaaaggggagagaattcgggaaagacccaaagtgtttgtaattcttctttgtccttttacctacagaaatggtcacatggttctatttaaatagcctaataaacacatctggagcctg

SEQ ID NO: 328557 - DNA, 120 bp, Artificial Sequence
  ENSG00000136444_20 (sequence is synthesized)
ctcaattttctgagctctgtgaagcaatagatagataaagggtttccacttgtttttagggagcactgaaacctctcataggaagcacagtagataattatcaagcaaatccagagctgc

SEQ ID NO: 328558 - DNA, 120 bp, Artificial Sequence
  ENSG00000136444_21 (sequence is synthesized)
tctggataaagcagagccataaagccctggctagagctggctgagaggggagggaagagaggaggcatagaggaaggcctggcttggctggaagctgggttccagtctcagtggaatagg

SEQ ID NO: 328559 - DNA, 120 bp, Artificial Sequence
  ENSG00000136444_22 (sequence is synthesized)
ggttctgctttcatgcatgtcagctgctgagatctccatgctgaactggaccctcccccacctctcaccataccccaactatgtggcccagagtagccaggccagctccccacctctgac

SEQ ID NO: 328560 - DNA, 120 bp, Artificial Sequence
  ENSG00000136444_23 (sequence is synthesized)
ccggagctcgcagctgagatgtaccagaggggccgggctgtccttcgggaggctggcttccaccagtatgaggtctccaactttgcccggaatgtaagttctggggctgatggctggagg

SEQ ID NO: 328561 - DNA, 120 bp, Artificial Sequence
  ENSG00000136444_24 (sequence is synthesized)
tggaggatgggcagactgcagtgtgaccagggcgttgtgaccttctgaagagaaggatcctggccgagatggtgggacattctaacctggggccccttacctgagtctaaaaatgaggcc

SEQ ID NO: 328562 - DNA, 120 bp, Artificial Sequence
  ENSG00000136444_25 (sequence is synthesized)
cattcattcattgggcaaacattgattgagcaccttctgggtgccagggacacagtagggcctagtgcgacacttttataactccttaattgtctgctgctgtcatagaccacagacttt

SEQ ID NO: 328563 - DNA, 120 bp, Artificial Sequence
  ENSG00000136444_26 (sequence is synthesized)
atgagaaagggatcaggtgtggcttttctatttcaaacacttaccatagtgcctggcacatagtaggtggtcaaaaaagatttgctacatgacacgggagacgcagacatgtagccagat

SEQ ID NO: 328564 - DNA, 120 bp, Artificial Sequence
  ENSG00000136444_27 (sequence is synthesized)
tattgcagcatggtaaatgtcacctgtaaagggggtctctataaaaggcttctagagtacagcctgaagggaggtcactctgatgaaatcactgaaacttctctggaggagatgtttgaa

SEQ ID NO: 328565 - DNA, 120 bp, Artificial Sequence
  ENSG00000136444_28 (sequence is synthesized)
tgaagaggaagagttcaccaggtgagggggtgtgggggaaacgacacaggccatggaagagcctggcatgttttgggggagttgtgagtcattccttgtgattggagaggctggaaacaa

SEQ ID NO: 328566 - DNA, 120 bp, Artificial Sequence
  ENSG00000136444_29 (sequence is synthesized)
gtgtgtggccgcagccctggccgtgaccgtggccgtccaaaacccaggtggcggtttgtcactctatgaacccgcctgccgtgtttccgtgcccccgtacgaggtctgggatgggaccct

SEQ ID NO: 328567 - DNA, 120 bp, Artificial Sequence
  ENSG00000136444_30 (sequence is synthesized)
gtgctttggcagggaaatgacttggtccagaaacctgaagtctctgctactcaccggctcggtgactctgaccaaatggttcaaatttcataacaattttcctcttagcaagacaaaatt

SEQ ID NO: 328568 - DNA, 120 bp, Artificial Sequence
  ENSG00000136448_0 (sequence is synthesized)
ctcgcaactcaagatggcggacgagagtgagacagcagtgaagccgccggcacctccgctgccgcagatgatggaagggaacgggaacggccatgagcactgcagcgattgcgagaatga

SEQ ID NO: 328569 - DNA, 120 bp, Artificial Sequence
  ENSG00000136448_1 (sequence is synthesized)
atgagcactgcagcgattgcgagaatgaggaggacaacagctacaaccggggtggtttgagtccagccaatgacactggagccaaaaagaagaaaaagaaacaaaaaaagaagaaagaaa

SEQ ID NO: 328570 - DNA, 120 bp, Artificial Sequence
  ENSG00000136448_2 (sequence is synthesized)
tcagcctgtgaagatgaactctttgccagcagagaggatccaggaaatacagaaggccattgagctgttctcagtgggtcagggacctgccaaaaccatggaggaggctagcaagcgaag

SEQ ID NO: 328571 - DNA, 120 bp, Artificial Sequence
  ENSG00000136448_3 (sequence is synthesized)
ctaccagttctgggatacgcagcccgtccccaagctgggcgaagtggtgaacacccatggccccgtggagcctgacaaggacaatatccgccaggagccctacaccctgccccagggctt

SEQ ID NO: 328572 - DNA, 120 bp, Artificial Sequence
  ENSG00000136448_4 (sequence is synthesized)
cacctgggatgctttggacctgggcgatcgtggtgtgctaaaagaactgtacaccctcctgaatgagaactatgtggaagatgatgacaacatgttccgatttgattattccccggagtt

SEQ ID NO: 328573 - DNA, 120 bp, Artificial Sequence
  ENSG00000136448_5 (sequence is synthesized)
tcttttgtgggctctccggccacccggctggctcccccagtggcactgtggggttcgagtggtctcaagtcggaaattggttgggttcattagcgccatcccagcaaacatccatatcta

SEQ ID NO: 328574 - DNA, 120 bp, Artificial Sequence
  ENSG00000136448_6 (sequence is synthesized)
tgacacagagaagaagatggtagagatcaacttcctgtgtgtccacaagaagctgcgttccaagagggttgctccagttctgatccgagagatcaccaggcgggttcacctggagggcat

SEQ ID NO: 328575 - DNA, 120 bp, Artificial Sequence
  ENSG00000136448_7 (sequence is synthesized)
cttccaagcagtttacactgccggggtggtactaccaaagcccgttggcacctgcaggtattggcatcggtccctaaacccacggaagctgattgaagtgaagttctcccacctgagcag

SEQ ID NO: 328576 - DNA, 120 bp, Artificial Sequence
  ENSG00000136448_8 (sequence is synthesized)
aaatatgaccatgcagcgcaccatgaagctctaccgactgccagagactcccaagacagctgggctgcgaccaatggaaacaaaggacattccagtagtgcaccagctcctcaccaggta

SEQ ID NO: 328577 - DNA, 120 bp, Artificial Sequence
  ENSG00000136448_9 (sequence is synthesized)
cttgaagcaatttcaccttacgcccgtcatgagccaggaggaggtggagcactggttctacccccaggagaatatcatcgacactttcgtggtggagaacgcaaacggagaggtgacaga

SEQ ID NO: 328578 - DNA, 120 bp, Artificial Sequence
  ENSG00000136448_10 (sequence is synthesized)
tttcctgagcttttatacgctgccctccaccatcatgaaccatccaacccacaagagtctcaaagctgcttattctttctacaacgttcacacccagacccctcttctagacctcatgag

SEQ ID NO: 328579 - DNA, 120 bp, Artificial Sequence
  ENSG00000136448_11 (sequence is synthesized)
cgacgcccttgtcctcgccaaaatgaaagggtttgatgtgttcaatgcactggatctcatggagaacaaaaccttcctggagaagctcaagtttggcataggggacggcaacctgcagta

SEQ ID NO: 328580 - DNA, 120 bp, Artificial Sequence
  ENSG00000136448_12 (sequence is synthesized)
ttacctttacaattggaaatgccccagcatgggggcagagaaggttggactggtgctacaataaccagtcaccagtgcgattctggataaagccactgaaaattcgaaccaggaaatgga

SEQ ID NO: 328581 - DNA, 120 bp, Artificial Sequence
  ENSG00000136448_13 (sequence is synthesized)
accccaccactgttggtccaattttcacacacgtgagaatccctggcaaagggagcagaactgaaccggctttaccaaaccgccagcgaacttgacaattgtattgcgatggcgtgggct

SEQ ID NO: 328582 - DNA, 120 bp, Artificial Sequence
  ENSG00000136448_14 (sequence is synthesized)
gcgtgacgtcacctccggtcgtgtctctggtctccgtgttttccagttaattacatcctcatgcagccgtgatcaagggaatgtaactgctgaaaactagctcgtgattggcatataatg

SEQ ID NO: 328583 - DNA, 120 bp, Artificial Sequence
  ENSG00000136448_15 (sequence is synthesized)
gagttaacgggtgaataataaaagtatatatatatattatatatatataaatattttaaatatctttcatgttccaaatgtacaaggatgtttggtctttaatgaaaagctgaatccaga

SEQ ID NO: 328584 - DNA, 120 bp, Artificial Sequence
  ENSG00000136448_16 (sequence is synthesized)
tcattcctcagaatgaggacccgaggacagtggcagacagacgcgttggcacagttcatggtttcctccagaggagacattggcttatcatggggaaaaagaggatctggagaacctcat

SEQ ID NO: 328585 - DNA, 120 bp, Artificial Sequence
  ENSG00000136448_17 (sequence is synthesized)
ccagctccccttctgaatcagctgggatgactggctttgagaaggaagggaagatggaacaggctcagatctcatgggatagcacgtggagctcttggctggggctgaccctgggcaggg

SEQ ID NO: 328586 - DNA, 120 bp, Artificial Sequence
  ENSG00000136448_18 (sequence is synthesized)
actttcctgcagggccagacctgcctgcattctgagacaaagcaatggacggtccgcagaagcagacctcattgattgagtcctttcttccatccccttggcctgctccctgtaggaagt

SEQ ID NO: 328587 - DNA, 120 bp, Artificial Sequence
  ENSG00000136448_19 (sequence is synthesized)
catcctgccaactgatttaaaagggctctttagccagttgttgccaaccttatagggatgagtcccctgtgagattttgcttttccactgcctgggatgatgcagtttgaagaggccctt

SEQ ID NO: 328588 - DNA, 120 bp, Artificial Sequence
  ENSG00000136448_20 (sequence is synthesized)
gcaccctgatgtccctggggtggctaggcaggagtggcgtggggccaatacccagaccccttcagccaccagcccctggcctgtgccttccaacccattagccatttcttgttgtgcccc

SEQ ID NO: 328589 - DNA, 120 bp, Artificial Sequence
  ENSG00000136448_21 (sequence is synthesized)
tttccaagatacagcctgcaagtggtagcaagaagtgattagaggcagatctggacttggcaacagaagtggtttcccatctccattgtctgagtctgattttcgctgatgctgttttgt

SEQ ID NO: 328590 - DNA, 120 bp, Artificial Sequence
  ENSG00000136448_22 (sequence is synthesized)
ggatttttgtggtagtgatggttgtcagtgctgccagtttcccaaaacgtaatcaagcctctggtcacatggctgtcgatgtaggcattctggagtggtgttcagccaagtgaccgggca

SEQ ID NO: 328591 - DNA, 120 bp, Artificial Sequence
  ENSG00000136448_23 (sequence is synthesized)
aaattgggctgtgaaattgtacttccaggcttggatgtaatttttgctctagagagaagcaagtggtgggaaggaggtagcatgacgtgtggtgtgcgggtttccttgctgccgtcacct

SEQ ID NO: 328592 - DNA, 120 bp, Artificial Sequence
  ENSG00000136448_24 (sequence is synthesized)
ctccgctcatacaggaatgaagccttagccaggaggccaggctcagccctgtgccactcaccgaagccactttctacaggccagcaggggcttgttgcaggctgtgggttttggtgtggt

SEQ ID NO: 328593 - DNA, 120 bp, Artificial Sequence
  ENSG00000136448_25 (sequence is synthesized)
ttgtcagaggctaattctgcagagtttccaaaaccagaagacatcgtatgcttgggatgggggccgtgccacccgtgggaatgctgcccgctctgcagactgctgctagagccagcaact

SEQ ID NO: 328594 - DNA, 120 bp, Artificial Sequence
  ENSG00000136448_26 (sequence is synthesized)
ccactaaggtggattttcatcaggggcctgcagggccctcccttttcccattgttcctgcgctgcaaattgcaggccccagcaatcgtgactgacgtttgctccttgactccaagaaact

SEQ ID NO: 328595 - DNA, 120 bp, Artificial Sequence
  ENSG00000136448_27 (sequence is synthesized)
gagaccaaagaagctgctgttcttagcaagatgcgcactgcattccacaggtgggaggagtcggagaggcaggggcttgctttgcagccccacagacaacagttgcacagtgcctcaagc

SEQ ID NO: 328596 - DNA, 120 bp, Artificial Sequence
  ENSG00000136448_28 (sequence is synthesized)
cccagagtggctcaccctgtccagacctttgaggatatcaaaggacaaagtgcccaagtctttcctaccttgggggaacctggaacttggaaaggctccctgtcctagtcttgatctgtt

SEQ ID NO: 328597 - DNA, 120 bp, Artificial Sequence
  ENSG00000136448_29 (sequence is synthesized)
ctgggccaggtcccagcttgagctgcctctgagatttgggctgtgcggatctctggagtgagctctgtttcggttgacccaggtcatggaatggaaacggtgaggccccagtggctgttc

SEQ ID NO: 328598 - DNA, 120 bp, Artificial Sequence
  ENSG00000136448_30 (sequence is synthesized)
tggaagaaacagatctcctggcaaaggccccagcatctccctcactgaaaccaggtggccggctcctcggactctgctttatgttgcggtgagaactctgcccaggtgtgcagggtttgg

SEQ ID NO: 328599 - DNA, 120 bp, Artificial Sequence
  ENSG00000136448_31 (sequence is synthesized)
cttgtgggctgcttgctgctcatctgatttttgtcccagtagtccctgcgttcttcattcaaccccttctgggacttcagctcagagagcaccatcccgggggtcagggcctccccacag

SEQ ID NO: 328600 - DNA, 120 bp, Artificial Sequence
  ENSG00000136448_32 (sequence is synthesized)
gagccctgcagtgtggtagcgccatggctgtctcaaaccaagcaaaggaaggaccctgaggccttcacgctaaccgtcctcgagcaactgctgttggaaggcctccctgggcctggcccc

SEQ ID NO: 328601 - DNA, 120 bp, Artificial Sequence
  ENSG00000136448_33 (sequence is synthesized)
caccctctgccacccagtcctcccagctgccatgtttcaaagacgacctttacctcctgcctttggattgactctgcatttgaccacggactccagtctgtgtgtagggagagagctgag

SEQ ID NO: 328602 - DNA, 120 bp, Artificial Sequence
  ENSG00000136448_34 (sequence is synthesized)
taggaggcctccactccggatcgaggcctgtatagggctcgtttccccacacatgcctatttctgaagaggcttctgtcttatttgaaggccagcccacacccagctactttaacaccag

SEQ ID NO: 328603 - DNA, 120 bp, Artificial Sequence
  ENSG00000136448_35 (sequence is synthesized)
gtttatggaaaatgtcaggccttccccacaactcctgtctaactgctgtcgcccccctacttgctggctctcagaagcctaggggagtccctgtggtcctgaattctttccccaaagacg

SEQ ID NO: 328604 - DNA, 120 bp, Artificial Sequence
  ENSG00000136448_36 (sequence is synthesized)
accagcatttaaccaacctaagggcccaaaggccttggacaactgcatggagctgcactctaggagaaggaggggaaccagatgttagatcaggggagggagcaggagtgtccctcccgt

SEQ ID NO: 328605 - DNA, 120 bp, Artificial Sequence
  ENSG00000136448_37 (sequence is synthesized)
cagtgcctacccacctgtgaggcagccttctgatggcctggcccaccttccccagaaccaggggaggcctgaggcttcagttttactctgctgcaaaatgaaggcgggcctgcaagccga

SEQ ID NO: 328606 - DNA, 120 bp, Artificial Sequence
  ENSG00000136448_38 (sequence is synthesized)
ctacacctacggaggctgttgaggacaatttcattccattaaattaaaaaatactgactggctggcaggcaggtgccatgtctgggaacagggacgggggagcttcacctttttgtcttg

SEQ ID NO: 328607 - DNA, 120 bp, Artificial Sequence
  ENSG00000136448_39 (sequence is synthesized)
gcttttctttgggctgtgggggggcatccatttccagggtcggggaggaaataccaaatgcattgttgttctgctcaatacatctcacttgtttctaataaagaaagcagctgaacaaaa

SEQ ID NO: 328608 - DNA, 120 bp, Artificial Sequence
  ENSG00000136448_40 (sequence is synthesized)
agagaagggctctgggtggagagggagctttctcctactggaaaagcgaaccagcccatagtcttcagatttcctggactttctatttctgttatctgaagcaggattttattttagttt

SEQ ID NO: 328609 - DNA, 120 bp, Artificial Sequence
  ENSG00000136448_41 (sequence is synthesized)
aactttctcagttcctctgagtctgtgcctggactagcttctctgccatctgttgaaaggctcagagaacacctattctctgtaattttagcctaagtaaagcataaatagaatgatgaa

SEQ ID NO: 328610 - DNA, 120 bp, Artificial Sequence
  ENSG00000136448_42 (sequence is synthesized)
taaaagttctatgcagtgttccactcgtgtgcttcaggccattcctgggaaaagagcatgttggacgatggttttcgatggtacaacacaggacagtctagtaacagtacagttcaaagg

SEQ ID NO: 328611 - DNA, 120 bp, Artificial Sequence
  ENSG00000136448_43 (sequence is synthesized)
gaacgttacttatagacgtgttgtttgaacaacgtgactagcaataaacgaatcataaaacatttcgcagcagttcaccctcagtgaggaaactcatcagactatacaaacttggtttga

SEQ ID NO: 328612 - DNA, 120 bp, Artificial Sequence
  ENSG00000136448_44 (sequence is synthesized)
acactgagtacatatgtgtacactctgagggacactgggcagaggccaggctggagggggcgctcagagtgtcctgagaaccacccggagagcggggattaacgtggaagcagcggagct

SEQ ID NO: 328613 - DNA, 120 bp, Artificial Sequence
  ENSG00000136448_45 (sequence is synthesized)
tctgagggaaccttgttcttgtggctgcccacaggacagctttgaaatggcagcaaaggggtaggaaggaggctgtccccacctgtcctcacctgttcttgtttgtccctgctgctttgc

SEQ ID NO: 328614 - DNA, 120 bp, Artificial Sequence
  ENSG00000136448_46 (sequence is synthesized)
ttgaggagcatgtgccactgtgagtcacagctccgcccttagcatcccacctctggcgtatctggtaaggcgggcacttggtgcctgcaggagccagatggggagcatggagagggcggg

SEQ ID NO: 328615 - DNA, 120 bp, Artificial Sequence
  ENSG00000136448_47 (sequence is synthesized)
agggttgtagggatggcagattggcaagtccctgccttgtctggagggctcttggtgtctgctggctgctgccatttggagatggtggggggcggtactggtggtttgtttttgttttta

SEQ ID NO: 328616 - DNA, 120 bp, Artificial Sequence
  ENSG00000136448_48 (sequence is synthesized)
ccatgggctggaggctctgagccctcctcatctgttctgcttaggcagggttcccgcagtttttaggcagaaactcaaaacttggagggaacaaggagcatccgaagtgaaggcattgaa

SEQ ID NO: 328617 - DNA, 120 bp, Artificial Sequence
  ENSG00000136448_49 (sequence is synthesized)
ctcctcctgattcatttcagtgagtttcgttctcacaggaggcgccaccaaggagcctgaatagccaggccttccctgggaggacagggcttctcctcacagctttcccagcgtgggaaa

SEQ ID NO: 328618 - DNA, 120 bp, Artificial Sequence
  ENSG00000136448_50 (sequence is synthesized)
ggggtgattgctgtctgtcgtggtgagtcattggagcatccaactgccagtagcggatggcgagcccgtctgtcagtgctttgctgtgggttctggtaacctgtgcccagcccagcccag

SEQ ID NO: 328619 - DNA, 120 bp, Artificial Sequence
  ENSG00000136449_0 (sequence is synthesized)
tggtgacgtcacggcgctcgtcggcgccgcctgtggcgtcacaggccgggcccgcagggctttctaggggtccgtcgctcttgaagccgccggcggcgggcgcgtgcgcggcccgatgaa

SEQ ID NO: 328620 - DNA, 120 bp, Artificial Sequence
  ENSG00000136449_1 (sequence is synthesized)
gaaggaggtttccaagccgtctccgcccaagttgatcggtggatgcgcgcccccgcgcggggcaccggttgctgtggacgcagtggcggccgttggctggcgggtgcggcgcagcctcgg

SEQ ID NO: 328621 - DNA, 120 bp, Artificial Sequence
  ENSG00000136449_2 (sequence is synthesized)
tgtctctgggccggcggtgcagggcaacgtttcatggtgccgggcggcaccatgaagtctctaaagaaggattcccgcctcagaataactccgaccagattattagaggcctcagagaat

SEQ ID NO: 328622 - DNA, 120 bp, Artificial Sequence
  ENSG00000136449_3 (sequence is synthesized)
gtcaaagaaaagaagcgggcaaagggacctgaacaacccacacccacaattcaggaagagcctgaacctgttagcaatgtcctacaaggagatgacattcttgccttggccattaagaag

SEQ ID NO: 328623 - DNA, 120 bp, Artificial Sequence
  ENSG00000136449_4 (sequence is synthesized)
gaagacttgaaggagcaacacattcctcgccttactgaaaaggaagataaacgtgtcatcacccagaaatttatcatccgtaaactcaaacccatggatcctaggaggaaggtctgccac

SEQ ID NO: 328624 - DNA, 120 bp, Artificial Sequence
  ENSG00000136449_5 (sequence is synthesized)
cttgtagcacgtcctgcgaatcctgatgaagccacaaagcctctggactactccggtcccggtgacagcttcgatggcagtgaccagatcctgccccaccacatcttggggagtctccag

SEQ ID NO: 328625 - DNA, 120 bp, Artificial Sequence
  ENSG00000136449_6 (sequence is synthesized)
gattttaagagaattgcacttgctcgagggaacacccagctggctgagcggatacctacctcaccctgtctgatgaccctcatctctgctgaaggagagtcaaagcaaaaagccccaaaa

SEQ ID NO: 328626 - DNA, 120 bp, Artificial Sequence
  ENSG00000136449_7 (sequence is synthesized)
gaagagaagagacctccctgggccccacctcctcagcacaactttctgaaaaactggcagcgtaacacagccctgcggaagaagcagcaggaagccctcagcgaacacctaaagaagcca

SEQ ID NO: 328627 - DNA, 120 bp, Artificial Sequence
  ENSG00000136449_8 (sequence is synthesized)
gtgagtgagctgctcatgcacaccggggagacctacagacggatccaggaggagcgggagctcattgactgcacacttccaacccggcgtgataggaaaagctgggagaacagtgggttc

SEQ ID NO: 328628 - DNA, 120 bp, Artificial Sequence
  ENSG00000136449_9 (sequence is synthesized)
tggagtcgactggaatacttgggagatgagatgacaggtctggtcatgaccaagacaaaaactcagcgtggcctcatggagcccatcactcacatcaggaagccccactccatccgggtg

SEQ ID NO: 328629 - DNA, 120 bp, Artificial Sequence
  ENSG00000136449_10 (sequence is synthesized)
gagacaggattaccagcccagagggacgcttcataccgctacacctgggatcggagtctgtttctgatctaccgacgcaaggagctgcagagaatcatggaagagctggatttcagccag

SEQ ID NO: 328630 - DNA, 120 bp, Artificial Sequence
  ENSG00000136449_11 (sequence is synthesized)
caggatattgatggcctggaggtggtgggcaaagggtggcccttctcggctgttactgtggaagactacacagtgtttgaaagaagtcagggaagctcctctgaagacacagcatactta

SEQ ID NO: 328631 - DNA, 120 bp, Artificial Sequence
  ENSG00000136449_12 (sequence is synthesized)
ggcacattggccagttcctctgatgtctccatgcctattctcggcccttctctgctgttctgtgggaagccagcttgctggatcagaggcagtaatccacaggacaagaggcaggttggg

SEQ ID NO: 328632 - DNA, 120 bp, Artificial Sequence
  ENSG00000136449_13 (sequence is synthesized)
aatggcaccgtggccatttggtatgactggcgacggcagcaccagccggacactttccaagaccttaagaaaaacaggatgcagcgattttactttgacaaccgggaaggtgtgattctg

SEQ ID NO: 328633 - DNA, 120 bp, Artificial Sequence
  ENSG00000136449_14 (sequence is synthesized)
cctggagaaattaaaacatttaccttcttcttcaagtctttgactgctggggtcttcagggaattttgggagtttcgaacccatcctactctattaggaggtgctatactgcaggtcaat

SEQ ID NO: 328634 - DNA, 120 bp, Artificial Sequence
  ENSG00000136449_15 (sequence is synthesized)
ctccacgcggtctccctgacccaggacgtttttgaggatgagaggaaagtactggagagcaagctgactgcccatgaggcagtcaccgtcgttcgcgaagtgctgcaggagctgctgatg

SEQ ID NO: 328635 - DNA, 120 bp, Artificial Sequence
  ENSG00000136449_16 (sequence is synthesized)
ggggtcttgaccccggagcgcacaccatcacctgtggatgcctatctcaccgaggaagacttgttccggcacagaaatcctccgctgcattatgagcaccaagtggtgcaaagcctgcac

SEQ ID NO: 328636 - DNA, 120 bp, Artificial Sequence
  ENSG00000136449_17 (sequence is synthesized)
caactgtggcgccagtacatgaccctgcccgccaaggctgaggaggccaggccaggggacaaggagcacgtcagccccatagccacagagaaggcctctgtgaatgctgagctgttacca

SEQ ID NO: 328637 - DNA, 120 bp, Artificial Sequence
  ENSG00000136449_18 (sequence is synthesized)
cgctttaggagccccatctccgaaactcaagtgccccggcctgagaacgaggccctcagggaatccgggtcccagaaggccagagtggggaccaagagtcctcagcggaagagcatcatg

SEQ ID NO: 328638 - DNA, 120 bp, Artificial Sequence
  ENSG00000136449_19 (sequence is synthesized)
gaggagatcctggtggaggaaagcccagatgtggacagcaccaagagcccctgggagccggatggccttcccctgctggagtggaacctctgcttggaggacttcagaaaggcagtgatg

SEQ ID NO: 328639 - DNA, 120 bp, Artificial Sequence
  ENSG00000136449_20 (sequence is synthesized)
gtgctccctgatgagaaccacagagaggatgcgttgatgaggctcaacaaagcagccctggagctgtgccagaagccaaggccattgcagtccaacctcctgcaccagatgtgtttgcag

SEQ ID NO: 328640 - DNA, 120 bp, Artificial Sequence
  ENSG00000136449_21 (sequence is synthesized)
ctgtggcgagatgtgattgacagcctggtgggccattccatgtggctgaggtctgtgctgggcctgcctgagaaggagaccatctatttgaatgtgcctgaagagcaagatcaaaaatca

SEQ ID NO: 328641 - DNA, 120 bp, Artificial Sequence
  ENSG00000136449_22 (sequence is synthesized)
cctcctatcatggaagtgaaggtacctgtggggaaagctgggaaggaggagcggaaaggagcagcccaggaaaagaagcaactggggatcaaagacaaagaagacaagaaaggagccaag

SEQ ID NO: 328642 - DNA, 120 bp, Artificial Sequence
  ENSG00000136449_23 (sequence is synthesized)
ctgctcgggaaagaggaccgtcccaacagcaagaagcacaaggcaaaggatgacaagaaagtcataaaatctgcaagtcaggacaggttttctttggaagaccctacccctgacatcatc

SEQ ID NO: 328643 - DNA, 120 bp, Artificial Sequence
  ENSG00000136449_24 (sequence is synthesized)
ctctcttctcaagaacccatagaccccctggtcatggggaaatacacccagagcctgcacagtgaggtccgtgggctgctggacaccctggtgactgacctgatggtcctggctgatgag

SEQ ID NO: 328644 - DNA, 120 bp, Artificial Sequence
  ENSG00000136449_25 (sequence is synthesized)
ctcagccccataaagaatgtcgaggaggctttgcgcctctgcaggtgactctcgggcccaagcaaccttctggaaaacgggttaataaataaatcaataaagaaccttcaagtttctact

SEQ ID NO: 328645 - DNA, 120 bp, Artificial Sequence
  ENSG00000136449_26 (sequence is synthesized)
atggggaaatacacccagagcctgcacagtgaggtgcatcctggcagatgcgttccttgggagaacaccatgcagggtgcattcccatcaactaccaggtgcggtggctcgtgcctgtaa

SEQ ID NO: 328646 - DNA, 120 bp, Artificial Sequence
  ENSG00000136449_27 (sequence is synthesized)
gagagctaggaaactggagtgcagccatagagctgccgtccagtgtggagccttgagccacatgccgctggtgagcgcctggatcgtggctgccctgccttgagaagtgctgtcactgtc

SEQ ID NO: 328647 - DNA, 120 bp, Artificial Sequence
  ENSG00000136449_28 (sequence is synthesized)
tgtcaactggacactggctttagtgtgaaaacaatatattttattaatcatttttatattgattacatgtcaaaatgacaatatttttgatatactgaattaaataaactatattactaa

SEQ ID NO: 328648 - DNA, 120 bp, Artificial Sequence
  ENSG00000136449_29 (sequence is synthesized)
tgcacagtgaggtgaagggaagcgcccagcagccattcccctgcctcccacctgccttattcattccgttcagtctgcagacaataagtgcccactccatcatggtggaagcagagctgc

SEQ ID NO: 328649 - DNA, 120 bp, Artificial Sequence
  ENSG00000136449_30 (sequence is synthesized)
gatgagtacgacgggagagaagatagaccaggcagggaatggaggcacagaggcctcagtgaggaggtccgtgggctgctggacaccctggtgactgacctgatggtcctggctgatgag

SEQ ID NO: 328650 - DNA, 120 bp, Artificial Sequence
  ENSG00000136449_31 (sequence is synthesized)
gaggaaagaatgaagtgttgaaaccagccaccttgatgggattatttggtagaggagggtcggggagcggggcaggcgtcacttaggattcctgctggaaaaacccagaagaaaggcctt

SEQ ID NO: 328651 - DNA, 120 bp, Artificial Sequence
  ENSG00000136449_32 (sequence is synthesized)
gcttggctagttctctttttgactgccttttcctaccacgtgcactttccagctggatgacacttatccagctcctttagcctggaaagaatcgctagatatgactgcttcctaccctct

SEQ ID NO: 328652 - DNA, 120 bp, Artificial Sequence
  ENSG00000136449_33 (sequence is synthesized)
acagctttcttctggttgcacctgggagagccacagggcgtctgatagcggactgacttccatggacatgttctcacttgcaacccacccccttttgatcttttttggctgtttccattt

SEQ ID NO: 328653 - DNA, 120 bp, Artificial Sequence
  ENSG00000136449_34 (sequence is synthesized)
aacagggctctcgctgtgttgccccagctagtgtcaaattcttggcctcaagcgatcctcctgcctcggcctcacagactgctaggattccaggcatggaccactgcgcccagcctattt

SEQ ID NO: 328654 - DNA, 120 bp, Artificial Sequence
  ENSG00000136449_35 (sequence is synthesized)
ttgtttactgagagctgattttgtgtggtactgtggctcaccagaagggtatcggtattaactgtgtgaccctggtcctcaagaaactcagtctaatgaacacctggaggagtaacctga

SEQ ID NO: 328655 - DNA, 120 bp, Artificial Sequence
  ENSG00000136449_36 (sequence is synthesized)
caaaggtagaaatacaaatgctgtgatgtaggtgcccatcgggcttaagggggctcagagcacctgagccagaccagggatggttgtaggggtacgtcttctgaagaaggtgacatctat

SEQ ID NO: 328656 - DNA, 120 bp, Artificial Sequence
  ENSG00000136449_37 (sequence is synthesized)
ggcagacaagaaaaaaaaggagaggtttgcttctctaggtctaggaagcagcatgagtttatggaactgtaaatgtgggaaccagaagaggctgcacaggtgggtaggtcaggggccaga

SEQ ID NO: 328657 - DNA, 120 bp, Artificial Sequence
  ENSG00000136449_38 (sequence is synthesized)
ccatgaaagggctttatgtactaggtcagaaagcctggatgtgctcttgcaggccctggggagacccagcctcagagttgtgaaagctcattgtgaggagaggggaccctcagaaaacta

SEQ ID NO: 328658 - DNA, 120 bp, Artificial Sequence
  ENSG00000136449_39 (sequence is synthesized)
acaggagcttagtcgcttttcagtatggctttatgtttcttcacgtataaaagtccaacgttgagccgggcatggtggtgcacatctgcagtctcagctgctcaggaggctgtggcagga

SEQ ID NO: 328659 - DNA, 120 bp, Artificial Sequence
  ENSG00000136449_40 (sequence is synthesized)
ggattgttccaggccaggagtttatgatcacacctgtgaatagccactgcattccagactgggcaacacagtgagacccccattattaaaaaaataaaagtccaatgctgttttatgaca

SEQ ID NO: 328660 - DNA, 120 bp, Artificial Sequence
  ENSG00000136449_41 (sequence is synthesized)
gatgaagccacaaagcctctggactactccggtacacccagtctcagccctggcttcactgtctttcaactcatgggtcccggtgacagcttcgatggcagtgaccagatcctgccccac

SEQ ID NO: 328661 - DNA, 120 bp, Artificial Sequence
  ENSG00000136449_42 (sequence is synthesized)
tatctggtcgtgcattcagcacgtctgaaaatggtgacagcaacactgacttgagcaagaataaaatcacaaggctgcgagtgtcataagccacttggggcttatacccagcccccaagc

SEQ ID NO: 328662 - DNA, 120 bp, Artificial Sequence
  ENSG00000136449_43 (sequence is synthesized)
atgtaaacaagcaaactcaagtaggtatggctctaagaaggttccaaaatattcttcagatgctaaggaatagaagtgttcattggatataaaatatattttatctggccaggcgcagag

SEQ ID NO: 328663 - DNA, 68 bp, Artificial Sequence
  ENSG00000136449_44 (sequence is synthesized)
aaccccatctctactaaaaatacaaaatagcagggcgtggtggtgggcacctgtaatccctgctactt

SEQ ID NO: 328664 - DNA, 120 bp, Artificial Sequence
  ENSG00000136449_45 (sequence is synthesized)
gcccaggctagtcttgaactcctgggcccaagcaatcctcctgccttggcttctcaaagtgttgggattacaagcttgcaccacggcacccggaatgaaacatctttttgttttgttttg

SEQ ID NO: 328665 - DNA, 65 bp, Artificial Sequence
  ENSG00000136449_46 (sequence is synthesized)
aagtgttgggattacaagcttgcaccacggcacccggaatgaaacatttagagtgcagtcacacg

SEQ ID NO: 328666 - DNA, 89 bp, Artificial Sequence
  ENSG00000136449_47 (sequence is synthesized)
ccgtgggctgctggacaccctggtgactgacctgatggtcctggctgatgagctcagccccataaagaatgtcgaggaggctttgcgcc

SEQ ID NO: 328667 - DNA, 120 bp, Artificial Sequence
  ENSG00000136450_0 (sequence is synthesized)
gccattttggaggggccgcgggagacgtggtgccgctgcgggctcgctctgccgtgcgctaggcttggtgggaaggcctgttctcgagtccgcgcttttcgtcaccgccatgtcgggagg

SEQ ID NO: 328668 - DNA, 120 bp, Artificial Sequence
  ENSG00000136450_1 (sequence is synthesized)
tggtgtgattcgtggccccgcagggaacaacgattgccgcatctacgtgggtaacttacctccagacatccgaaccaaggacattgaggacgtgttctacaaatacggcgctatccgcga

SEQ ID NO: 328669 - DNA, 120 bp, Artificial Sequence
  ENSG00000136450_2 (sequence is synthesized)
catcgacctcaagaatcgccgcgggggaccgcccttcgccttcgttgagttcgaggacccgcgagacgcggaagacgcggtgtatggtcgcgacggctatgattacgatgggtaccgtct

SEQ ID NO: 328670 - DNA, 120 bp, Artificial Sequence
  ENSG00000136450_3 (sequence is synthesized)
gcgggtggagtttcctcgaagcggccgtggaacaggccgaggcggcggcgggggtggaggtggcggagctccccgaggtcgctatggccccccatccaggcggtctgaaaacagagtggt

SEQ ID NO: 328671 - DNA, 120 bp, Artificial Sequence
  ENSG00000136450_4 (sequence is synthesized)
tgtctctggactgcctccaagtggaagttggcaggatttaaaggatcacatgcgtgaagcaggtgatgtatgttatgctgatgtttaccgagatggcactggtgtcgtggagtttgtacg

SEQ ID NO: 328672 - DNA, 120 bp, Artificial Sequence
  ENSG00000136450_5 (sequence is synthesized)
gaaagaagatatgacctatgcagttcgaaaactggataacactaagtttagatctcatgagggagaaactgcctacatccgggttaaagttgatgggcccagaagtccaagttatggaag

SEQ ID NO: 328673 - DNA, 120 bp, Artificial Sequence
  ENSG00000136450_6 (sequence is synthesized)
atctcgatctcgaagccgtagtcgtagcagaagccgtagcagaagcaacagcaggagtcgcagttactccccaaggagaagcagaggatcaccacgctattctccccgtcatagcagatc

SEQ ID NO: 328674 - DNA, 120 bp, Artificial Sequence
  ENSG00000136450_7 (sequence is synthesized)
tcgctctcgtacataagatgattggtgacactttttgtagaacccatgttgtatacagttttcctttattcagtacaatcttttcattttttaattcaaactgttttgttcagaatgggc

SEQ ID NO: 328675 - DNA, 120 bp, Artificial Sequence
  ENSG00000136450_8 (sequence is synthesized)
taaagtgttgaattgcattcttgtaatatccccttgctcctaacatctacattcccttcgtgtctttgataaattgtattttaagtgatgtcatagacaggattgtttaaatttagttaa

SEQ ID NO: 328676 - DNA, 120 bp, Artificial Sequence
  ENSG00000136450_9 (sequence is synthesized)
ctccatactcttcagactgtgatattgtgtaaatgtctatctgccctggtttgtgtgaactgggatgttgggggtgtttgtggttatcttacctggggaagttcttatgtttatcttgct

SEQ ID NO: 328677 - DNA, 120 bp, Artificial Sequence
  ENSG00000136450_10 (sequence is synthesized)
tttcatgtgtctttctgtagacatatctgaagagatggattaagaatgctttggattaaggattgtggagcacatttcaatcattttaggattgtcaaaaggaggattgaggaggatcag

SEQ ID NO: 328678 - DNA, 120 bp, Artificial Sequence
  ENSG00000136450_11 (sequence is synthesized)
atcaataatggaggcaatggtatgactccaagtgctattgtcacagatgaaattggcagtattgaccttatactaaaaggcaggggttaaaaatgattatatacattttccttaaaacac

SEQ ID NO: 328679 - DNA, 120 bp, Artificial Sequence
  ENSG00000136450_12 (sequence is synthesized)
ttgcaaacattttattcagttgtctttagctacaattgctttgctttttaaaccttggcaattgtggcaaaattatattgcccattttgtagcaacttattttgctcccttccccccatt

SEQ ID NO: 328680 - DNA, 120 bp, Artificial Sequence
  ENSG00000136450_13 (sequence is synthesized)
tttgttttaatagggactaatgtgggaagaactggctaatttgtcacagtgcttagttacaactgttaatgtgtgacctgctgttggtgtacatgtgggtacagggtgtttttaaatcca

SEQ ID NO: 328681 - DNA, 120 bp, Artificial Sequence
  ENSG00000136450_14 (sequence is synthesized)
acaagatagagtataatatcaatactgctaaatctgcatgtcctctgtgtgactgatagagcgttgctatttcatttttttaagacaaaatgaaagcaaaatatagagttccaatgtatt

SEQ ID NO: 328682 - DNA, 120 bp, Artificial Sequence
  ENSG00000136450_15 (sequence is synthesized)
ggtgtagataatctagttgggaatacttttaagtctcaccttcccctttaaactaatattcataattggttcatatgtttaaaagactttaatttacaaattaaattgcaaatgggagca

SEQ ID NO: 328683 - DNA, 120 bp, Artificial Sequence
  ENSG00000136450_16 (sequence is synthesized)
ttagatttagttttagacttaggtgggtagcaatgccagtaaacttaaattacgtaacttcttgcaaccacgaaacctgtaatacgctgtacagtaacaagtgttggcattatcagttga

SEQ ID NO: 328684 - DNA, 120 bp, Artificial Sequence
  ENSG00000136450_17 (sequence is synthesized)
actgtaaatacaaaatgcttcttccaattagtctctatgatgattaagtttctaaaatttatctgaacaccattcagaaacttgttttggggaatttgatagttattgatgtgcatctgt

SEQ ID NO: 328685 - DNA, 120 bp, Artificial Sequence
  ENSG00000136450_18 (sequence is synthesized)
taaactgatgacagacataactcatcattccccagaaaccttttttgattacagtatctaacattttgcctcctcttttttggttttgctggttataaaggtttggattggagagggctc

SEQ ID NO: 328686 - DNA, 120 bp, Artificial Sequence
  ENSG00000136450_19 (sequence is synthesized)
actggatcccaatccttggagctggatcattggattcaaatcataatgtggataggatagggaggatgaattaccaggattcatggagcgggatcagattaccaggaacataggagtgga

SEQ ID NO: 328687 - DNA, 120 bp, Artificial Sequence
  ENSG00000136450_20 (sequence is synthesized)
ttcctgccccaaccaaaccgcattcgtgtggatttttttattcaacttaattggctattccaaagattttttttttcctatttttgacgattggagcccttaagatgcacgatggaattg

SEQ ID NO: 328688 - DNA, 120 bp, Artificial Sequence
  ENSG00000136450_21 (sequence is synthesized)
tgttttgcgttttttggtaaaaggagcaaagcgaggacctggagataaacgctggagcaatctccttggaaggattcagcacgagtagatggtaaacatttaaaggggaaagggggggtt

SEQ ID NO: 328689 - DNA, 120 bp, Artificial Sequence
  ENSG00000136450_22 (sequence is synthesized)
aataagtaggtttccaattggctattgccgttttctttgaaaaaataaacattttttaaaaaactatgcatggttgtcctttttcctcttcatgtaagattctaactgggtctatcagtt

SEQ ID NO: 328690 - DNA, 120 bp, Artificial Sequence
  ENSG00000136450_23 (sequence is synthesized)
aatctttaaattgttaagtaagataagattttgactcttgtgttaatgtgttagcaaattaaaagttcttaaaaggcaatctaatggtattagccatcttttattgttaattgtaaaagt

SEQ ID NO: 328691 - DNA, 120 bp, Artificial Sequence
  ENSG00000136450_24 (sequence is synthesized)
cttcaggggaaagcaaaaggggagaataaggcatttgtgtatgtaacttggtaaatgacggtgggggatggatctagcatctgaaagataagcttctctactttgttataaagtggttaa

SEQ ID NO: 328692 - DNA, 120 bp, Artificial Sequence
  ENSG00000136450_25 (sequence is synthesized)
aaaactatagatgctgcttattttctggtggtcatagacaacataggcttttgtgcaaaattggttgatggctactaatgttcacttggagatagcttttgatattctcaatgaaactca

SEQ ID NO: 328693 - DNA, 120 bp, Artificial Sequence
  ENSG00000136450_26 (sequence is synthesized)
cttggagatagcttttgatattctcaatgaaactcatctcaaaaaaaggtaagtattaaatgttaacatcagcacagatgtattagaactgttttttgtttttgagacagagtctcgctc

SEQ ID NO: 328694 - DNA, 89 bp, Artificial Sequence
  ENSG00000136450_27 (sequence is synthesized)
gatctaggctcactgcaacctccacccctggatttgagtgattctcgagtgtgtgccacccttgcccggctaattttgtatttttagta

SEQ ID NO: 328695 - DNA, 120 bp, Artificial Sequence
  ENSG00000136450_28 (sequence is synthesized)
taacccaagtctcatttcttttttgaaagggaagagtgcacaagattaactgcttctttggatgaatcattgttaataaaaagctgggcatttagaattttgccttataagcccttctcc

SEQ ID NO: 328696 - DNA, 120 bp, Artificial Sequence
  ENSG00000136450_29 (sequence is synthesized)
aaccataagattattttgtaccaaaaactttggtgttctctaccaaagcagttaaaaacttttagcctgctacttcttgtatttgtctactgacagccccttggtactatttaggttggg

SEQ ID NO: 328697 - DNA, 120 bp, Artificial Sequence
  ENSG00000136450_30 (sequence is synthesized)
ggaggggacctaaaataaatagactttaacatttcccttgggtgctaatcatagttggaagttgaatttaaggtgattatttgggtgacaattaaaaacctaaggaaaaccagaaatctt

SEQ ID NO: 328698 - DNA, 120 bp, Artificial Sequence
  ENSG00000136450_31 (sequence is synthesized)
ggtagtggaagaaatgtgtaaggtcaccccaatcggtagattttaatgaacgttgtggaatgttgggaagaggggatgttaagttgaatgcagaatttcactaagtacttagtgtaagtt

SEQ ID NO: 328699 - DNA, 120 bp, Artificial Sequence
  ENSG00000136450_32 (sequence is synthesized)
taaggatgtagctctttttatctaagaattcaatgtaatggccaaaaggcagatttactgtttaaaaatttgaataattttacatgacattcttgaaattctaagaagttttatgtgtag

SEQ ID NO: 328700 - DNA, 120 bp, Artificial Sequence
  ENSG00000136450_33 (sequence is synthesized)
aacattttaaaaattcatcagattattaaagggaaaataaatgattaatgataattttggaaggttaatgtgagctagacttaagtaaactttggttcatttgtgttcattgaatgtttt

SEQ ID NO: 328701 - DNA, 120 bp, Artificial Sequence
  ENSG00000136450_34 (sequence is synthesized)
ggaaatgaccaaaaaatgtaaatggccttcactcaagtttgagtgtttaaagttgaaagatgtgctctactaaaagttatagtaattctaacctcacattgaaatgagacagtattcctt

SEQ ID NO: 328702 - DNA, 120 bp, Artificial Sequence
  ENSG00000136450_35 (sequence is synthesized)
gttatacaggctgaatttgaagattagagaggatctaatgtttacttaggtaaaggggcataggttttgtagttaagatgaccagacagctaaaagctgtgatgggaagtatggactgct

SEQ ID NO: 328703 - DNA, 120 bp, Artificial Sequence
  ENSG00000136450_36 (sequence is synthesized)
cctatttatagtctcagaaaatggacctttaggtctctatccgtattggcaattattagaagaaagttacacccttttgaaactacaaaagctgtcttggaatttccccctcttctccct

SEQ ID NO: 328704 - DNA, 120 bp, Artificial Sequence
  ENSG00000136450_37 (sequence is synthesized)
atttatgtccccttagaatattttagggagcctataattattttctaaccaaggaaaaacttaagtctctttaagaagcaattacttttcataacatcagattgaataacccaccttgct

SEQ ID NO: 328705 - DNA, 120 bp, Artificial Sequence
  ENSG00000136450_38 (sequence is synthesized)
gttcagcccacatcctactggaaacaaaaggtaagaaacccattttctggttcttgattgtttgggtctgaattttgtttttaaaactaagctaagtttaatgttttttaaaatgctgtt

SEQ ID NO: 328706 - DNA, 120 bp, Artificial Sequence
  ENSG00000136450_39 (sequence is synthesized)
tggaatatgaatagattccccgtaaaatgatttttcctaagttttatgctttagtaaatattcagtgctcacgtctgtgcatcatagtgcttgcgtttaatatgatttattgtagaatct

SEQ ID NO: 328707 - DNA, 120 bp, Artificial Sequence
  ENSG00000136450_40 (sequence is synthesized)
caacttttcttggtgtttgttgtctttgaaacattgtcttggtcattagggctggtgttttcacatttctgtggtcaaggtggatttcttatgtgtgcctttttgcttactttgtatatg

SEQ ID NO: 328708 - DNA, 120 bp, Artificial Sequence
  ENSG00000136450_41 (sequence is synthesized)
aattttgtaatttaaattgcaagtaagttatatatatgtatttaccataaatagtattaaaagatgagaaactgttagactgaagttctgttgtaacataaccattatttccatcacagt

SEQ ID NO: 328709 - DNA, 120 bp, Artificial Sequence
  ENSG00000136450_42 (sequence is synthesized)
atgaagactgcaaacgcagaaaacagattacagtctcttatccattttttgaaatccaaaaactacgaaaacaaaagattttctgttgttgagctaattaaatgtgaaccctgaccagaa

SEQ ID NO: 328710 - DNA, 120 bp, Artificial Sequence
  ENSG00000136450_43 (sequence is synthesized)
cctatgcagttcgaaaactggataacactaagtttagatctcatgaggtaggttatacacgtattcttttctttgaccagaattggatacagtggtcttaacagtggaatttcaaggtaa

SEQ ID NO: 328711 - DNA, 120 bp, Artificial Sequence
  ENSG00000136450_44 (sequence is synthesized)
ggattcaggcaaggttgtccaagtaaattgccagatttctggttttagttacattgtattcattcagcatgtctgaagatagatgaaagcttagatctttcaatggaaagttctgtctat

SEQ ID NO: 328712 - DNA, 120 bp, Artificial Sequence
  ENSG00000136451_0 (sequence is synthesized)
gtggccgcgctcggcgctgccatgttgaggagccgccgctgccgttgccgccgccgccgccgccgctttgttgtcgcctcctccggctgaggaggctccccgagcggggggagtggggag

SEQ ID NO: 328713 - DNA, 120 bp, Artificial Sequence
  ENSG00000136451_1 (sequence is synthesized)
gaggggggtcggccgccgcagccatggaggccaactggaccgcgttcctgttccaggcccatgaagcttcccatcaccaacagcaggcagcacagaacagcttgctgcccctcctgagct

SEQ ID NO: 328714 - DNA, 120 bp, Artificial Sequence
  ENSG00000136451_2 (sequence is synthesized)
ctgccgtggagccccctgatcagaaaccattgcttccaataccaataactcagaaacctcagggtgcaccagaaacattaaaggatgccattgggattaaaaaagaaaaacccaaaactt

SEQ ID NO: 328715 - DNA, 120 bp, Artificial Sequence
  ENSG00000136451_3 (sequence is synthesized)
catttgtgtgcacttactgcagtaaagctttcagggacagctatcacctgaggcgccacgaatcctgccacacagggatcaagttggtgtcccggccaaagaaaacccccaccacggtgg

SEQ ID NO: 328716 - DNA, 120 bp, Artificial Sequence
  ENSG00000136451_4 (sequence is synthesized)
ttccccttatctctaccatcgctggggacagcagccgaacttcgttggtctcgaccattgcaggcatcttgtcaacagtcactacatcttcctcgggcaccaaccccagtagcagtgcca

SEQ ID NO: 328717 - DNA, 120 bp, Artificial Sequence
  ENSG00000136451_5 (sequence is synthesized)
gcaccacagctatgccagtgacccagtctgtcaagaaacccagtaagcctgtcaagaagaaccatgcttgtgagatgtgtgggaaggccttccgagatgtgtaccatctcaatcgacaca

SEQ ID NO: 328718 - DNA, 120 bp, Artificial Sequence
  ENSG00000136451_6 (sequence is synthesized)
agctctcccattcagatgagaaaccctttgagtgtcctatttgtaatcagcgcttcaagaggaaggaccggatgacttaccatgtgaggtctcatgaaggaggcatcaccaaaccctata

SEQ ID NO: 328719 - DNA, 120 bp, Artificial Sequence
  ENSG00000136451_7 (sequence is synthesized)
cttgcagtgtttgtgggaaaggcttctcaaggcctgaccacttaagctgtcatgtaaaacatgtccattcaacagaaagacccttcaaatgccaaacgtgcactgctgcctttgccacca

SEQ ID NO: 328720 - DNA, 120 bp, Artificial Sequence
  ENSG00000136451_8 (sequence is synthesized)
aagacagactgcggacacacatggtgcgccatgaaggcaaggtatcatgtaacatctgtgggaagctcctgagtgcagcatacatcaccagccacttaaagactcatgggcagagccaaa

SEQ ID NO: 328721 - DNA, 120 bp, Artificial Sequence
  ENSG00000136451_9 (sequence is synthesized)
taaagactcatgggcagagccaaagtatcaactgtaatacatgtaaacaaggcatcagtaaaacatgcatgagtgaagagaccagtaaccaaaagcagcagcagcagcagcagcagcagc

SEQ ID NO: 328722 - DNA, 120 bp, Artificial Sequence
  ENSG00000136451_10 (sequence is synthesized)
aacaacatgtgacaagctggccagggaagcaagtagaaacactgagactgtgggaagaagctgttaaagcaaggaagaaagaagctgctaacctgtgccaaacctccacggctgctacga

SEQ ID NO: 328723 - DNA, 120 bp, Artificial Sequence
  ENSG00000136451_11 (sequence is synthesized)
cacctgtgactctcactactccattcagtataacatcctctgtgtcgtctgggactatgtcaaacccagtcacagtggcagctgcaatgagcatgagaagtccagtaaatgtttcaagtg

SEQ ID NO: 328724 - DNA, 120 bp, Artificial Sequence
  ENSG00000136451_12 (sequence is synthesized)
cagttaacataaccagcccaatgaacatagggcatcctgtaactataaccagtccattatccatgacctctcctttaacactcactaccccagtcaacctccccacccccgtcactgccc

SEQ ID NO: 328725 - DNA, 120 bp, Artificial Sequence
  ENSG00000136451_13 (sequence is synthesized)
cagtgaatatagcacaccctgtcaccatcacatctccaatgaatctacccacacctatgacattagccgcccctctcaatatagcaatgagacctgtagagagcatgcctttcttgcccc

SEQ ID NO: 328726 - DNA, 120 bp, Artificial Sequence
  ENSG00000136451_14 (sequence is synthesized)
aagctttgcctacatcaccgccttggtaaacagtattataaaatcaaaatatgggtaaaagtaaatatttaccagcaacttaacttttagttgattaaagcaaaaagtaaaccatgaaat

SEQ ID NO: 328727 - DNA, 120 bp, Artificial Sequence
  ENSG00000136451_15 (sequence is synthesized)
tgggagattttattacattagttaataagagtgtggtagcatttttctccaatttggctgggattattcaaagtagggtgtgtatgtaacttatcactggaccactttagtttaatcaga

SEQ ID NO: 328728 - DNA, 120 bp, Artificial Sequence
  ENSG00000136451_16 (sequence is synthesized)
aattccttttagctgacaacattgcttaaacaggatagtagttggcaagatgaaatgccagaattaaaaccaatcataagtagaacccacttcaaaataaaaaaacagcattactatttc

SEQ ID NO: 328729 - DNA, 120 bp, Artificial Sequence
  ENSG00000136451_17 (sequence is synthesized)
taatcccaaggaatcactttattgtaaacactagcagaactcttctccctatacaaggtggatggctgattttaacctgaaattttaaatccacagattgagagctagtgtagaattgtc

SEQ ID NO: 328730 - DNA, 120 bp, Artificial Sequence
  ENSG00000136451_18 (sequence is synthesized)
tgtgtttattgtttttatgagtaaatacatgcattgtcataataaaatgcatttcagagaatatgcattttacctttgggaatatgttaatttcaggcagcattccctatgggaaaggtg

SEQ ID NO: 328731 - DNA, 120 bp, Artificial Sequence
  ENSG00000136451_19 (sequence is synthesized)
cctgatatttggagatgtaaatattgctcagcatattaatcccgatggaatatagcattgtagttgactttttaaaaaaaaaaaaaatttaaaaaaaatctacaaattgtgttttgctaa

SEQ ID NO: 328732 - DNA, 120 bp, Artificial Sequence
  ENSG00000136451_20 (sequence is synthesized)
gaaaagcctcaactgacagaggagaagtcaagtgtgtggacaggcaagctcctaataaacagagtccagtgggattcctatttaggagccaaggagtactttggaacagtacaaatatat

SEQ ID NO: 328733 - DNA, 120 bp, Artificial Sequence
  ENSG00000136451_21 (sequence is synthesized)
tgctttaaattggaagacgctggaggcactgggatgtgatatgcccctctctctcccaatcagagcctgttgatattacaacagggacagatgtgttagttgctcactagagtttatgtc

SEQ ID NO: 328734 - DNA, 120 bp, Artificial Sequence
  ENSG00000136451_22 (sequence is synthesized)
ttatattaaattgtatacagtttttattctaaccactaactaggtagtgtatgccccttcagaacatgcagagtgtatctttttttaaatttctccttccgtttcttaagtattgcgcag

SEQ ID NO: 328735 - DNA, 120 bp, Artificial Sequence
  ENSG00000136451_23 (sequence is synthesized)
atttgttcaactttgtaaatatggacatcactttttttttctttgagaaaacacttgtatcagctttgtggtgttttcagggagacagctgtctgcattccctgtagaaacccagcaatg

SEQ ID NO: 328736 - DNA, 120 bp, Artificial Sequence
  ENSG00000136451_24 (sequence is synthesized)
attatgcacgttgagacatgtgctttttatttcttagcaagatattttatctctgtacataaagtagaaaccaaaagctagggaaacagatactctttacaccatcatgccacgcattgt

SEQ ID NO: 328737 - DNA, 120 bp, Artificial Sequence
  ENSG00000136451_25 (sequence is synthesized)
ttttaaagcattgcgttaaaaaaaaaattaactaaaccaagatgctgtgattttttaagttgcaatatgtttttggtttttttcattttttaatcattgcagttaagagaaatggaaatt

SEQ ID NO: 328738 - DNA, 120 bp, Artificial Sequence
  ENSG00000136451_26 (sequence is synthesized)
agttgtgttaatcttgcagaatgtttgcaggactgactatcaaactggatgatttccatttataccctactgtgtcagttcaagcatcaaaataccttgcatctgagacagacttcctac

SEQ ID NO: 328739 - DNA, 120 bp, Artificial Sequence
  ENSG00000136451_27 (sequence is synthesized)
atcagggacaggtatctgtgtgtcattatacaaaacagttctagggggttgaactacatagtaaaaaaataaaataaatagtacttagtgtaaaataattttataaatgatcttttgtac

SEQ ID NO: 328740 - DNA, 120 bp, Artificial Sequence
  ENSG00000136451_28 (sequence is synthesized)
tttaggacattaaattgtacaacttttgtatatataaaagcttaggaactttctgtttagcaggaaggcaacacattcctacacttttaatgtatatgtttgttataatgtccatgtaaa

SEQ ID NO: 328741 - DNA, 120 bp, Artificial Sequence
  ENSG00000136451_29 (sequence is synthesized)
catgccctatgtttgtgccttttaattagtttgtctcaataaacaaaatgtagagaaaaatatgtagctatgactttgttacaactgttcttatccacagtacaaaaatggtttgttttt

SEQ ID NO: 328742 - DNA, 120 bp, Artificial Sequence
  ENSG00000136451_30 (sequence is synthesized)
aatatgtagagcattatgtgtggactactggaaggactcgtgtagggaaagcccaagaatgaccttgctgaggcctggattgggaggcacagtggccacatttggaggaagttcacattt

SEQ ID NO: 328743 - DNA, 120 bp, Artificial Sequence
  ENSG00000136451_31 (sequence is synthesized)
cctggcatgcagacccaaaactgggttctggctctgcctgctgggatctgttatctctggtgggctggcagtcataattcacaattcagacagcccaggcttcctccacagtggtccaag

SEQ ID NO: 328744 - DNA, 120 bp, Artificial Sequence
  ENSG00000136451_32 (sequence is synthesized)
gagcagtcctcagtgggggcaggtgtgggccctacccctaagctagaatgtggttgtcagaaccctgaaagtattagttctaaaaaaaaaaagatatatactagaagtaattgttttatc

SEQ ID NO: 328745 - DNA, 120 bp, Artificial Sequence
  ENSG00000136451_33 (sequence is synthesized)
aattcattgtataataaacaggagtgagacttcattgtatgacttcagttaaaatactattttgtatgcattctttattcacttaagaagcttgtctgcaataataaagccacgtcatgt

SEQ ID NO: 328746 - DNA, 120 bp, Artificial Sequence
  ENSG00000136451_34 (sequence is synthesized)
cttcttttgggagggagagagtcgatggcaggagggggttttgggtgggccactgaaaaggggtaccgaataggttgtgtgatgaaattctgtgtcttggaactggaattgagtttcgat

SEQ ID NO: 328747 - DNA, 120 bp, Artificial Sequence
  ENSG00000136451_35 (sequence is synthesized)
gttgatgaactgattcaaccaggtgttgaaggcacgacagccactgctctacgaaaaggcagagtacgtttttcccttctggttgtaacctggttgagagcttcccctttatcagattgg

SEQ ID NO: 328748 - DNA, 120 bp, Artificial Sequence
  ENSG00000136451_36 (sequence is synthesized)
cagctaaacagttgtattagataatccttaaatctgacatccagcctgttacgctctagggctcgctgcttggcctgcgtttgctttttattgtgtatccgttcccctcctacggtgtgc

SEQ ID NO: 328749 - DNA, 120 bp, Artificial Sequence
  ENSG00000136451_37 (sequence is synthesized)
tcctgaatgaaggtttctatgtaagcagatgatgattttacctgtcaataccagcactgtattactaacatgcaaaatactgcagatttattttgaaaattaaagttaactggtcacaaa

SEQ ID NO: 328750 - DNA, 120 bp, Artificial Sequence
  ENSG00000136451_38 (sequence is synthesized)
cagggacctggtgtgaccctcctgtgagagtgagcttcagcaatgctgtaaaaatactttatgttgccacagacatctgaattggtaaaatggcagcccatgaagcttcccatcaccaac

SEQ ID NO: 328751 - DNA, 120 bp, Artificial Sequence
  ENSG00000136451_39 (sequence is synthesized)
gcttggcaatgtgtgcagtgaaatttgttggaaaacttaaaatttagagccgagagcagttgaatgggtaaagagaatatttcagtcttttctatggaaaggcccatgaagcttcccatc

SEQ ID NO: 328752 - DNA, 120 bp, Artificial Sequence
  ENSG00000136457_0 (sequence is synthesized)
aaagagggcggcagacccgagcgcctaggactcgccgctgcccgcgccccgccgccgctgctgcccccagccccggccccaggcgtcccagccatggtccgcccaatgctcttgctcagc

SEQ ID NO: 328753 - DNA, 120 bp, Artificial Sequence
  ENSG00000136457_1 (sequence is synthesized)
ctcggcctcctggctggtctgctgccggcgctggccgcctgcccccagaactgccactgccacagcgacctgcagcacgtcatctgcgacaaggtggggctgcagaagatccccaaggtg

SEQ ID NO: 328754 - DNA, 120 bp, Artificial Sequence
  ENSG00000136457_2 (sequence is synthesized)
tcagagaagaccaagctgctcaacctacagcgcaacaacttcccggtgctggctgccaattcgttccgggccatgccgaacctcgtgtcattgcacctgcagcactgccagatccgcgag

SEQ ID NO: 328755 - DNA, 120 bp, Artificial Sequence
  ENSG00000136457_3 (sequence is synthesized)
gtggccgccggtgccttccgcggcctcaagcaacttatctacttgtacctgtcccataacgacatccgcgtgctgcgcgcaggtgccttcgacgacctgaccgagctgacctacctctac

SEQ ID NO: 328756 - DNA, 120 bp, Artificial Sequence
  ENSG00000136457_4 (sequence is synthesized)
ctggaccacaacaaggtcactgagctgccccgggggttgctctccccgctggtcaacctcttcatcttgcagctcaacaacaacaagatccgtgagctgcgcgcaggcgccttccaggga

SEQ ID NO: 328757 - DNA, 120 bp, Artificial Sequence
  ENSG00000136457_5 (sequence is synthesized)
gccaaggacctgcgctggctctacctgtcggaaaacgcgttgagctccctgcagcccggggccctggacgacgtggagaacctcgccaaattccacgtggacaggaaccagctgtccagc

SEQ ID NO: 328758 - DNA, 120 bp, Artificial Sequence
  ENSG00000136457_6 (sequence is synthesized)
tacccctcagctgccctgagcaagctacgggtggtggaggagctgaagctgtcccacaaccccctgaaaagcatcccggacaatgccttccagtcctttggcagatacctggagaccctc

SEQ ID NO: 328759 - DNA, 120 bp, Artificial Sequence
  ENSG00000136457_7 (sequence is synthesized)
gctgaaacacgtccatttggagaacaaccgcttgaaccagctaccctccaacttccccttcgacagcctggagaccctcgcccttaccaataacccctggaagtgtacctgccagctccg

SEQ ID NO: 328760 - DNA, 120 bp, Artificial Sequence
  ENSG00000136457_8 (sequence is synthesized)
gggccttcggcggtggctggaagccaaggcctcccgcccagatgccacctgtgcctcacctgccaagttcaagggccagcacatccgtgacacggacgccttccgcagctgcaagttccc

SEQ ID NO: 328761 - DNA, 120 bp, Artificial Sequence
  ENSG00000136457_9 (sequence is synthesized)
caccaagaggtccaagaaagctggccgccattaaacaggtgggggccaggttctgacccagccagtcctggtgactggcctctgccttccaccggagagactactgaccttctcacctcc

SEQ ID NO: 328762 - DNA, 120 bp, Artificial Sequence
  ENSG00000136457_10 (sequence is synthesized)
acccataccttctccccacagcctctgctgatgcacagagctgcctacacctagacacgtcctggcagggggcctcgggcactccactaccaacccagctccacccagcagtgtcctggg

SEQ ID NO: 328763 - DNA, 120 bp, Artificial Sequence
  ENSG00000136457_11 (sequence is synthesized)
gagaaggaaggctgagcctctccccagccttcatgccttccccaccctccagctcctcttggagaagctgttgctgagaccccccccccaagtcaatcagaaccacaacaggttggtcat

SEQ ID NO: 328764 - DNA, 120 bp, Artificial Sequence
  ENSG00000136457_12 (sequence is synthesized)
caggatggccaccctcccaggatcatccttcctctgttcctctttccctgccacgtggaaacaatcatcagatccttgccccaccccttgcttccagaaagggttttaaagcccatgccc

SEQ ID NO: 328765 - DNA, 120 bp, Artificial Sequence
  ENSG00000136457_13 (sequence is synthesized)
caactctgccagcccccacctgccaggacgttctagcaggacatcggtgctttgctgtccatcttcccatgctgcaatttcttcctgagatttctataaatataaatgtatgtatgtatt

SEQ ID NO: 328766 - DNA, 120 bp, Artificial Sequence
  ENSG00000136463_0 (sequence is synthesized)
agtcccgggtgccgcggggacagtgtagggtcattagctgttgagccgccccgggcgggcccaagcctttggatctcaggtgaccggcacaggcggccgcggggtccggaactgcttgtt

SEQ ID NO: 328767 - DNA, 120 bp, Artificial Sequence
  ENSG00000136463_1 (sequence is synthesized)
ccggcagtggaagagacgcgccggcgttggccgctgctgctagcagcttgaaccccagggtcgggaccgatgtcggcttgggctgctgccagcctaagcagggccgctgcccgatgcttg

SEQ ID NO: 328768 - DNA, 120 bp, Artificial Sequence
  ENSG00000136463_2 (sequence is synthesized)
cagggcggctcctccgcgcgacccccggccctcccaccccgagccccggggctgcggtgccgctccgggcaggacgctgcactttaccgcggctgtccccgccgggcacaacaagtggtc

SEQ ID NO: 328769 - DNA, 120 bp, Artificial Sequence
  ENSG00000136463_3 (sequence is synthesized)
gccgggcacaacaagtggtccaaagtcaggcacatcaagggtccgaaggacgtcgaaaggagtcgcatcttctccaaactctgtttgaacatccgcctggcagtgaaagaaggaggcccc

SEQ ID NO: 328770 - DNA, 120 bp, Artificial Sequence
  ENSG00000136463_4 (sequence is synthesized)
aaccctgagcacaacagcaacctggccaatatcttagaggtgtgtcgcagcaaacatatgcccaagtcaacgattgagacagcactgaaaatggagaaatccaaggacacttatttgctg

SEQ ID NO: 328771 - DNA, 120 bp, Artificial Sequence
  ENSG00000136463_5 (sequence is synthesized)
tatgagggtcgaggccctggtggctcttctctgctcatcgaggcattatctaacagtagccacaagtgccaagcagacattagacatatcctgaataagaatggaggagtgatggctgta

SEQ ID NO: 328772 - DNA, 120 bp, Artificial Sequence
  ENSG00000136463_6 (sequence is synthesized)
cgtcactcttttgacaaaaagggggtgattgtggttgaagtggaggacagagagaagaaggctgtgaacctagagcgtgccctggagatggcaatcgaagcaggagctgaggatgtcaag

SEQ ID NO: 328773 - DNA, 120 bp, Artificial Sequence
  ENSG00000136463_7 (sequence is synthesized)
gaaactgaagatgaagaagaaaggaacgtttttaaatttatttgtgatgcctcttcactgcaccaagtgaggaagaagctggactccctgggcctgtgttctgtgtcctgtgcactagag

SEQ ID NO: 328774 - DNA, 120 bp, Artificial Sequence
  ENSG00000136463_8 (sequence is synthesized)
ttcatccccaactcaaaggtgcagctggctgagcccgacctggaacaggccgcacatctcattcaggctctcagcaaccacgaggatgtgattcacgtctatgataacattgaataacca

SEQ ID NO: 328775 - DNA, 120 bp, Artificial Sequence
  ENSG00000136463_9 (sequence is synthesized)
ggctacatgtgcccccgggttccttcctagaaatgtggcagcccattccagcacacaggcttctgcagcaatctctgagggtaaagccggtgggaggctcagcaggccaggaggcccaag

SEQ ID NO: 328776 - DNA, 120 bp, Artificial Sequence
  ENSG00000136463_10 (sequence is synthesized)
gacaggacttgcgaccttgaagccaaaggaatctcacttgtggggcctccttgtcagctctgctgctgtctcagagccatctggatgagtgtcccgacaccctctcggatgcagggcagg

SEQ ID NO: 328777 - DNA, 120 bp, Artificial Sequence
  ENSG00000136463_11 (sequence is synthesized)
accacccagctggtcagactctgatgttgggtagctggcctctgtggggattgtaagtgccctgaggcgctctgtactagaaactgctcttaataataacggtgattattggttgctgca

SEQ ID NO: 328778 - DNA, 120 bp, Artificial Sequence
  ENSG00000136463_12 (sequence is synthesized)
agtgtgcgtctgggaggagtggtaggggacagagcctttatgttccaattctctgcaaggcaagtactgttgatctctgctagtgtttcagggttttgttttttgtttttttgttttttg

SEQ ID NO: 328779 - DNA, 120 bp, Artificial Sequence
  ENSG00000136463_13 (sequence is synthesized)
tgcctggccatgtttcaggttttaagcacacttgctccttagcagaatctaatgagttaattgactttcccttaatgtagtttctactagcaggatcccaaagacttgttcatcggatgt

SEQ ID NO: 328780 - DNA, 120 bp, Artificial Sequence
  ENSG00000136463_14 (sequence is synthesized)
agaaggggatctttgtcctattatccccatctgtagccatataatgcctaagtcttaaaatgctccaccaggactggcatcttaatggcacaggaaattatcagctaagtctgcttcctc

SEQ ID NO: 328781 - DNA, 120 bp, Artificial Sequence
  ENSG00000136463_15 (sequence is synthesized)
ccaactgcaatcagggcagaaaatcgagcgtggggacattcttgggctgttcccttacccagcagcagctgcattttctccttgaggatgcgatctgctccatgtctgtgtgtacttcat

SEQ ID NO: 328782 - DNA, 120 bp, Artificial Sequence
  ENSG00000136463_16 (sequence is synthesized)
agactgggtaagaaagagacagtgatagaatgatgagctttatggaggctgagcttctagaggcatccactcatgccagcctgtttccttccctgtcagaggagtgatggctgtaggagc

SEQ ID NO: 328783 - DNA, 120 bp, Artificial Sequence
  ENSG00000136478_0 (sequence is synthesized)
gtcgcgcggccgggagcacgggcgccggcatagtacaatgaggcagccagcggatcttggagcctgagcccttgtgaagccggcaatgacaagtctgtatggtcgccatgccgagaaaac

SEQ ID NO: 328784 - DNA, 120 bp, Artificial Sequence
  ENSG00000136478_1 (sequence is synthesized)
cactgacatgccaaaaccatcagcccctaaagtgcacgtgcagaggtccgtgtcccgagataccatcgccattcacttctcggcatccggcgaggaggaggaggaagaggaggaggagtt

SEQ ID NO: 328785 - DNA, 120 bp, Artificial Sequence
  ENSG00000136478_2 (sequence is synthesized)
cagggagtactttgaggaggggctggatgaccaaagcattgtaacagggctggaagccaaggaagacctctatcttgaaccccaagttggccatgaccccgccggccctgctgcctcgcc

SEQ ID NO: 328786 - DNA, 120 bp, Artificial Sequence
  ENSG00000136478_3 (sequence is synthesized)
tgtcctggcagatggactgtccgtgtcccaggcccctgccattttgcccgtctccaagaacactgtaaagctgttggagtcccctgttccagcagcacaagtattaagtacagtgccatt

SEQ ID NO: 328787 - DNA, 120 bp, Artificial Sequence
  ENSG00000136478_4 (sequence is synthesized)
ggctgtgtccccagggtcgtcttcgtcggggcccttagctagctctcccagtgtgtcatccctttctgagcagaaaaccagttcttcctccccattgtcctctccttctaagtctcccat

SEQ ID NO: 328788 - DNA, 120 bp, Artificial Sequence
  ENSG00000136478_5 (sequence is synthesized)
cctctcatccagtgcctcaacctccaccctttccagtgcaaaacccttcatgagccttgtgaagtccctgtcgaccgaggtggagccaaaagaatccccacaccccgcaaggcacaggca

SEQ ID NO: 328789 - DNA, 120 bp, Artificial Sequence
  ENSG00000136478_6 (sequence is synthesized)
cttgatgaagacattagtcaagtctctgtccacggacacttcccggcaggagtcggatacagtgtcctataagccacctgattccaaactgaacttacacctgttcaagcagttcacaca

SEQ ID NO: 328790 - DNA, 120 bp, Artificial Sequence
  ENSG00000136478_7 (sequence is synthesized)
gccccgaaacacaggtggagattccaaaactgcaccttcttccccactgacttctccctctgatactcgttccttttttaaagtgcccgaaatggaggctaaaattgaagatactaaacg

SEQ ID NO: 328791 - DNA, 120 bp, Artificial Sequence
  ENSG00000136478_8 (sequence is synthesized)
acgcctttcagaagtcatctatgagccttttcagctccttagtaaaattataggggaagaaagtggcagccataggcccaaagccttatcttcaagtgcttcagaactctccaatctgtc

SEQ ID NO: 328792 - DNA, 120 bp, Artificial Sequence
  ENSG00000136478_9 (sequence is synthesized)
cagcttgaatgggcacttggaaagcaataacaactacagcatcaaggaggaggagtgtgattctgagggggatggctacggaagtgattccaacatccccagaagtgaccacccaaagtc

SEQ ID NO: 328793 - DNA, 120 bp, Artificial Sequence
  ENSG00000136478_10 (sequence is synthesized)
cactggtgagcccacaagagagatagaactgaaaagttcccaggggagcagtctgaaggatttaggcctgaagacaagttctctagttctggagaaatgttctttgtctgccttagtgag

SEQ ID NO: 328794 - DNA, 120 bp, Artificial Sequence
  ENSG00000136478_11 (sequence is synthesized)
caaagaagatgaagagttttgtgaactgtacactgaggacttcgatttggaaacggagggggagagtaaagttgataagctctcagatattcctctcaagccagaggtgctcgcggaaga

SEQ ID NO: 328795 - DNA, 120 bp, Artificial Sequence
  ENSG00000136478_12 (sequence is synthesized)
tggtgtggtccttgacagtgaggacgaggtggactcggccgtgcagcacccggaattgccagtgaagacgttgggcttctttataatgtgtgtctatgtgtacctcatcctccccctccc

SEQ ID NO: 328796 - DNA, 120 bp, Artificial Sequence
  ENSG00000136478_13 (sequence is synthesized)
ccactatgtgagtggactctttctgggaattggccttggattcatgactgcagtttgcgtgatttggttttttacaccaccaagtgctcataaatatcacaagttacacaaaaatctgcg

SEQ ID NO: 328797 - DNA, 120 bp, Artificial Sequence
  ENSG00000136478_14 (sequence is synthesized)
acactggaacacaagatctctggatatcaaagaacctgaaatactgaagggatggatgaatgagatttacaactatgatccagaaacctaccatgcgactttgacacattcagtctttgt

SEQ ID NO: 328798 - DNA, 120 bp, Artificial Sequence
  ENSG00000136478_15 (sequence is synthesized)
tcgacttgagggtggaaccttaagactttcaaagcccaataaaaatatatccaggagggccagctacaatgaacccaagccagaggtcacctacatcagccagaaaatctatgacctctc

SEQ ID NO: 328799 - DNA, 120 bp, Artificial Sequence
  ENSG00000136478_16 (sequence is synthesized)
agacagcaagatttatcttgtacctaaaactttggctcgaaagcgaatctggaataaaaagtaccccatttgtatcgagcttggtcagcaagatgactttatgtctaaagctcagactga

SEQ ID NO: 328800 - DNA, 120 bp, Artificial Sequence
  ENSG00000136478_17 (sequence is synthesized)
taaggagacttcagaagagaagccgccagctgagggaagtgaggaccctaagaagccaccccgccctcaggagggaacaagatctagccagcgagatcagatactctatctctttgggag

SEQ ID NO: 328801 - DNA, 120 bp, Artificial Sequence
  ENSG00000136478_18 (sequence is synthesized)
aactggccgagaaaaagaggaatggtttaggagatttattctggcatctaagctaaagtcggaaatcaagaagtcatcgggtgtctctggaggtaaaccagcccccgtcttcttggctcc

SEQ ID NO: 328802 - DNA, 120 bp, Artificial Sequence
  ENSG00000136478_19 (sequence is synthesized)
agggcttttgcctgcacacagcagacacaacagtccgtccgggcacctgacccacagccgcagcagcagcaaaggcagtgtggaggagatcatgtcacagccaaagcagaaggagctggc

SEQ ID NO: 328803 - DNA, 120 bp, Artificial Sequence
  ENSG00000136478_20 (sequence is synthesized)
aggcagcgtgcggcagaagatgcttctcgactacagcgtgtacatgggcaggtgtgtcccccaggaaagccgaagcccccagaggagccccctgcagagtgcggagagcagccccacagc

SEQ ID NO: 328804 - DNA, 120 bp, Artificial Sequence
  ENSG00000136478_21 (sequence is synthesized)
aagaatattttgggacttcttaggagagaaatactggtctgatctggtgtctaagaagatccaaatgaaactcagcaaaataaagctcccctactttatgaatgagctcactctgacgga

SEQ ID NO: 328805 - DNA, 120 bp, Artificial Sequence
  ENSG00000136478_22 (sequence is synthesized)
acttgacatgggcgtggctgtgccaaaaatcctccaggccttcaagccttacgttgatcaccaaggactctggattgatttggaaatgtcctacaatgggtcctttctgatgactctcga

SEQ ID NO: 328806 - DNA, 120 bp, Artificial Sequence
  ENSG00000136478_23 (sequence is synthesized)
gaccaaaatgaatttgaccaaactaggtaaagagcctcttgttgaagccctgaaggttggagaaattggcaaagaaggttgcaggccccgggcattctgtctggcggacagcgatgagga

SEQ ID NO: 328807 - DNA, 120 bp, Artificial Sequence
  ENSG00000136478_24 (sequence is synthesized)
atcctccagcgctggctcctccgaggaagacgatgccccagagcccagcgggggagacaaacagctcctcccaggggctgaagggtacgttggaggtcatcgaacaagtaagattatgag

SEQ ID NO: 328808 - DNA, 120 bp, Artificial Sequence
  ENSG00000136478_25 (sequence is synthesized)
gtttgttgataaaattaccaagtcaaaatatttccaaaaagcaacagagacagagtttattaaaaagaagatcgaagaagtctccaacacacccctgctgctcactgttgaagtacaaga

SEQ ID NO: 328809 - DNA, 120 bp, Artificial Sequence
  ENSG00000136478_26 (sequence is synthesized)
atgtagaggaaccttggcggtcaacattccaccacccccgactgaccgagtatggtatggtttccgaaagccaccacatgtggagctgaaagctcggccaaaacttggagagagagaagt

SEQ ID NO: 328810 - DNA, 120 bp, Artificial Sequence
  ENSG00000136478_27 (sequence is synthesized)
gactttagttcatgtgacagactggatagagaagaaactggagcaagagtttcagaaagtttttgtcatgccaaacatggatgatgtttatatcactataatgcactcagccatggaccc

SEQ ID NO: 328811 - DNA, 120 bp, Artificial Sequence
  ENSG00000136478_28 (sequence is synthesized)
tcgctctacttcctgcctcctgaaagacccacctgtggaggctgctgatcagccatgatgggtgatgtcagatgttccccatattgtgacatcgagctggatgtgtggggttcttggccg

SEQ ID NO: 328812 - DNA, 120 bp, Artificial Sequence
  ENSG00000136478_29 (sequence is synthesized)
ccatctgtactgtagcactggcctctgtgccacagctactgtttcttaaaggactgcttctgccctctgcctgccagtgcccattccactgtgaggtgtcattccctgcatctagtgaca

SEQ ID NO: 328813 - DNA, 120 bp, Artificial Sequence
  ENSG00000136478_30 (sequence is synthesized)
actgtctggattgcctgctgcaaagctttgatttggcaaaggagaccatggaagaatcatggtggatccagaagttatacgtgacccacaccatggcttttaaaagtctacccatgtttg

SEQ ID NO: 328814 - DNA, 120 bp, Artificial Sequence
  ENSG00000136478_31 (sequence is synthesized)
tggcagcaaatgagcacagtaagagcaaagctgaacaacttgcctcctctactcctccaaagcttttcttcaggcagccggtgcacagtggactttttcacttctatactttgtatgcgg

SEQ ID NO: 328815 - DNA, 120 bp, Artificial Sequence
  ENSG00000136478_32 (sequence is synthesized)
ccttccacacttccagagaatgtcagtgtgcaatgtgtctggagggtggggagaggaattctgtgagccttttcatttcggtgacagaagagatgggcagagcaacttattttccacatt

SEQ ID NO: 328816 - DNA, 120 bp, Artificial Sequence
  ENSG00000136478_33 (sequence is synthesized)
aaattgtgcatttgggaagcaagtagccatagtacacacacaacacgctatcagcttgggtaaggacagtgggatttatgtgaacatcaggcaaagccatgagatcaaaccatcccaagc

SEQ ID NO: 328817 - DNA, 120 bp, Artificial Sequence
  ENSG00000136478_34 (sequence is synthesized)
ctttcaccaatgaggtacaaccacctgggggctagctaatcttgaatgttttcctgagacaggagcgtatgtgaaaacatcaaacactgcacatgacaggatgggtcctctcatacagat

SEQ ID NO: 328818 - DNA, 120 bp, Artificial Sequence
  ENSG00000136478_35 (sequence is synthesized)
gggatggggttagaaagccagagccagtttttccatctggcgtttcctgtgtcctccaggtttatatgggaatcgaaacagtttgttaatctgattgggagagttccatgggcagatttc

SEQ ID NO: 328819 - DNA, 120 bp, Artificial Sequence
  ENSG00000136478_36 (sequence is synthesized)
ccttcctgaaggccaaaacggagaactgctctctttaattatttcaagagtcaagaccaaaagtttgctcagcatcacactacatctcaaaattaatgttgccaacttaattttgtgcat

SEQ ID NO: 328820 - DNA, 120 bp, Artificial Sequence
  ENSG00000136478_37 (sequence is synthesized)
ttgtgtcagaatgtttagtttacaaggttgggggctctctttgcttcgagaagtaaacctaataccatttttttattgtttaaagctgcattcaacgtcaaaattaccttgggtaacttt

SEQ ID NO: 328821 - DNA, 120 bp, Artificial Sequence
  ENSG00000136478_38 (sequence is synthesized)
tgataacttacatgtgtggacaaagctaatagtggttttttaaacagcaccttgcctgaacatgactttaaagaaattaatatattgaaaacatgtttgaacccttattttaattgcacc

SEQ ID NO: 328822 - DNA, 120 bp, Artificial Sequence
  ENSG00000136478_39 (sequence is synthesized)
attaaaacatttgacttaaattgtttgaccattccagttggtgtactgttctgatttttcgttgtgtaggccgatctgcctgtcagagtccacgtgtcctggtcactggtctttataatt

SEQ ID NO: 328823 - DNA, 120 bp, Artificial Sequence
  ENSG00000136478_40 (sequence is synthesized)
gttgtgcaataactaaaggctaaggactagatgcactatcgtgtaaagagattacacatgactgtaccatgttgcacttaatcaaatagtatgtggggatttaaaatcgcttgcattgtt

SEQ ID NO: 328824 - DNA, 120 bp, Artificial Sequence
  ENSG00000136478_41 (sequence is synthesized)
tcacaaaataaatatctcaatgtcaaatactagataagcatctaagtcatttctacggaatcctgttcagataggggcacaataaaatgagtacagagcaccggggccctcacctggcaa

SEQ ID NO: 328825 - DNA, 120 bp, Artificial Sequence
  ENSG00000136478_42 (sequence is synthesized)
tcgcagctttcatttactgcgttgatcactgcccagtcctaaggctacaaagccatcctcactacatccttcaaactatgtgccattatcttcagcccacatttaaagaatccagtgaaa

SEQ ID NO: 328826 - DNA, 120 bp, Artificial Sequence
  ENSG00000136478_43 (sequence is synthesized)
gacaatggaggaagcttccctcagtttacagcagaaccccaggctcagggaggtgaagtggggagctccgtcactgtcatttgagggccatttgagggctgtggtcctccgtggagctcc

SEQ ID NO: 328827 - DNA, 120 bp, Artificial Sequence
  ENSG00000136478_44 (sequence is synthesized)
gtgccccagccgaagccggagtcgcgcggccgggagcacgggcgccggcatagtacaatgaggcagccagcggatcttggcagaaacaaccttatacaaagtggttccgtggaggagaga

SEQ ID NO: 328828 - DNA, 120 bp, Artificial Sequence
  ENSG00000136478_45 (sequence is synthesized)
aaataaacatcccattatttgacctccaaggcagaagactggcaccaaggaaatggcagcttcgtccctttcctgtcttgggcattgagcctgagcccttgtgaagccggcaatgacaag

SEQ ID NO: 328829 - DNA, 120 bp, Artificial Sequence
  ENSG00000136478_46 (sequence is synthesized)
ctcccagtgcacagggctggggccactgccgggccttcagttccacactggcatgtgtgctgtgcccttgggtgcctttggctcctgttggtcaggcgataactgtccccgtgggcctct

SEQ ID NO: 328830 - DNA, 120 bp, Artificial Sequence
  ENSG00000136478_47 (sequence is synthesized)
ggtggcccaaggacagcatcaggaaaaccaaaggactgcagctgcagggagataggccctgagccccactgccttcccttgtccatgtaactgtgtccttgtcaaaaatacaatgaccag

SEQ ID NO: 328831 - DNA, 120 bp, Artificial Sequence
  ENSG00000136478_48 (sequence is synthesized)
cctctgcttggtgaccatttggttgtgtaatagtgttcagagactactctgtcccttgttcattttgtcccatttaagtctctgggctcagacacagccctgccagtactttctgaagca

SEQ ID NO: 328832 - DNA, 120 bp, Artificial Sequence
  ENSG00000136478_49 (sequence is synthesized)
aagccacggtccagggaggaagctgctttctataggcccgaggctcagcccagaagcccccaggtcccctccgacgggaactggacccctcacctctgcgggtaatccagcaaccccaca

SEQ ID NO: 328833 - DNA, 120 bp, Artificial Sequence
  ENSG00000136478_50 (sequence is synthesized)
cctctggaactgagtatctgccctggagagctgagtgagggacactgctgtcccatgaggctttcccttacttcagtcaaaggaatggtctttagacatgtatttttccggaaaatttcc

SEQ ID NO: 328834 - DNA, 120 bp, Artificial Sequence
  ENSG00000136478_51 (sequence is synthesized)
tgggttctcatgtcagttgcttcctagagtctcctgagactttttgtgtgtgtgtgtgtatgtggttgttggctttttctgtgaccctcaggagatagggcaggtgtggagtgaaatacg

SEQ ID NO: 328835 - DNA, 120 bp, Artificial Sequence
  ENSG00000136478_52 (sequence is synthesized)
taatttcactggaaaggagtcatgagtcaaaactcacttggagggttactaagccagaaagcatcagagttgctgaattaagccagagccaagggacttgcctcaacatcccatcatcag

SEQ ID NO: 328836 - DNA, 120 bp, Artificial Sequence
  ENSG00000136478_53 (sequence is synthesized)
tgagaagtggccatgtcaccagtataagctgtcacctcactcttgcaaccatccgctctttctgttcatcctcccgtgtggctccgctgcactgctggttgaaatcactgcattttatgt

SEQ ID NO: 328837 - DNA, 120 bp, Artificial Sequence
  ENSG00000136478_54 (sequence is synthesized)
gcgcatcacactcccacctcctgtccttctgacgcatgctcaaaagcaacctcttctgggtccaaggcctctgtggtcctgtcagaggccttggtgctgaagagtgtcctgagcatctgc

SEQ ID NO: 328838 - DNA, 120 bp, Artificial Sequence
  ENSG00000136478_55 (sequence is synthesized)
gctgatccaaggattcttggattgggcctcttctggtttgggtgggttggagagaatgacgagatgtagttaacagttacatcccgaccctgttgtggttgagtgtgtgtgcatgggtgt

SEQ ID NO: 328839 - DNA, 120 bp, Artificial Sequence
  ENSG00000136478_56 (sequence is synthesized)
atgtgacagactggatagagaagaaactggagcaagagtttcaggtaaacctctagtgttatctagtatttcacaccaagtatagaagctctgggtttagccgaggttctgaacttcagc

SEQ ID NO: 328840 - DNA, 120 bp, Artificial Sequence
  ENSG00000136478_57 (sequence is synthesized)
tgggtcaggatcctcttttgaaaatctgatggtgaccttcatcccggaagagtattacatttgatcaaatatgggaataaaacttcaggtacagtatcaaagccctgaaacttatccaca

SEQ ID NO: 328841 - DNA, 120 bp, Artificial Sequence
  ENSG00000136478_58 (sequence is synthesized)
gaacattactaagtcatcttcagaggaaacccaaaagatttgggtcagagcaaaatgatgatgtcttttcccagcaagcctgccaggactgtcaggctttgttttctcttatgcaaggcc

SEQ ID NO: 328842 - DNA, 120 bp, Artificial Sequence
  ENSG00000136478_59 (sequence is synthesized)
tggccttgcccaactcttagcacccggcctgtgggcagggaggctgccccctgttcttgtgtgctgttcaccttgctcagtttgttcagttcaacaaacattcctggaaacccttctgtg

SEQ ID NO: 328843 - DNA, 120 bp, Artificial Sequence
  ENSG00000136478_60 (sequence is synthesized)
tgccaggtaccacctgccctgggagtccaaagatgaatctggcctctccctcccctgggtagcttctagtgtagtctgggagttcattaagccagagcttactctctcagcttttctttc

SEQ ID NO: 328844 - DNA, 120 bp, Artificial Sequence
  ENSG00000136478_61 (sequence is synthesized)
tgcatttggccaccaaaggtaatagcagtatagctgaggccctaggatgagctatttccatcaaacttttatcagatatttgaagcacagttgtctgtcggggttttatggattagcaaa

SEQ ID NO: 328845 - DNA, 120 bp, Artificial Sequence
  ENSG00000136478_62 (sequence is synthesized)
ctatttacttttaatgaaattcaccttttgaagaagacctacattctttttgcagtggtatattttgagttactgccttaaaaaaatcctcttatttaaaaactagagattaaacataac

SEQ ID NO: 328846 - DNA, 69 bp, Artificial Sequence
  ENSG00000136478_63 (sequence is synthesized)
tcgcacctggccattagcttacattttatcgctaggatttattaataaaaggataattcacatggaata

SEQ ID NO: 328847 - DNA, 120 bp, Artificial Sequence
  ENSG00000136478_64 (sequence is synthesized)
cgctaggatttattaataaaaggataattcacatggaatatgtgttctagacatagtaactgggaactactgtgaacagcttaagccaattctcttaaattgttggatatatatcagtgc

SEQ ID NO: 328848 - DNA, 120 bp, Artificial Sequence
  ENSG00000136478_65 (sequence is synthesized)
atatgggcaaccttattatatgtatacaaaatcaaaggccacttctgcctccgagctgatatattagaggattctcgtatccatgcgctggtatgattcctcaactctttctaaagtatg

SEQ ID NO: 328849 - DNA, 120 bp, Artificial Sequence
  ENSG00000136478_66 (sequence is synthesized)
tatggtgggagaattagtttggaatgcatagcaagtttttatatgtacttttaaaaatcagtctaagccctaaaattatcagaacaaaggagggtgacagcctggcaaggcattcttcca

SEQ ID NO: 328850 - DNA, 120 bp, Artificial Sequence
  ENSG00000136478_67 (sequence is synthesized)
aaggtagattatgttggactttctgtggtgtgctaagcattcagcacccgtacctgggagacttggccctacctgtaggcatctctgcagtgggtgcagtcctgagtgtggagcaaggtg

SEQ ID NO: 328851 - DNA, 120 bp, Artificial Sequence
  ENSG00000136478_68 (sequence is synthesized)
gaccggaagcagctgttcctctgctcttgcctgcagttgtttgctttagtgtttggatgcgggcagatctttcaccttttttcctgataagaggagacagagactactggccttacagcc

SEQ ID NO: 328852 - DNA, 120 bp, Artificial Sequence
  ENSG00000136478_69 (sequence is synthesized)
tctgggtccaaggcctctgtggtcctgtcagaggccttggtgctgaagagtgtcctgagcatctgcgctgatccaaggattcttggattgggcctcttctggtttggttgcaggccccgg

SEQ ID NO: 328853 - DNA, 120 bp, Artificial Sequence
  ENSG00000136485_0 (sequence is synthesized)
gtcgtccgttcccaagctggtttgaaactaggggtcgggctcggccgtcgtcgttgtttgtcgccgcatccccgcttccgggttaggccgttcctgcccgccccctcctctcctcccttc

SEQ ID NO: 328854 - DNA, 120 bp, Artificial Sequence
  ENSG00000136485_1 (sequence is synthesized)
ggacccatagatctcaggctcggctccccgcccgccgcagcccactgttgacccggcccgtactgcggccccgtggccaccatgtccctgcacggcaaacggaaggagatctacaagtat

SEQ ID NO: 328855 - DNA, 120 bp, Artificial Sequence
  ENSG00000136485_2 (sequence is synthesized)
gaagcgccctggacagtctacgcgatgaactggagtgtgcggcccgataagcgctttcgcttggcgctgggcagcttcgtggaggagtacaacaacaaggttcagcttgttggtttagat

SEQ ID NO: 328856 - DNA, 120 bp, Artificial Sequence
  ENSG00000136485_3 (sequence is synthesized)
gaggagagttcagagtttatttgcagaaacacctttgaccacccataccccaccacaaagctcatgtggatccctgacacaaaaggcgtctatccagacctactggcaacaagcggtgac

SEQ ID NO: 328857 - DNA, 120 bp, Artificial Sequence
  ENSG00000136485_4 (sequence is synthesized)
tatctccgtgtgtggagggttggtgaaacagagaccaggctggagtgtttgctaaacaataataagaactctgatttctgtgctcccctgacctcctttgactggaatgaggtggatcct

SEQ ID NO: 328858 - DNA, 120 bp, Artificial Sequence
  ENSG00000136485_5 (sequence is synthesized)
tatcttttaggtacctcaagcattgatacgacatgcaccatctgggggctggagacagggcaggtgttagggcgagtgaatctcgtgtctggccacgtgaagacccagctgatcgcccat

SEQ ID NO: 328859 - DNA, 120 bp, Artificial Sequence
  ENSG00000136485_6 (sequence is synthesized)
gacaaagaggtctatgatattgcatttagccgggccgggggtggcagggacatgtttgcctctgtgggtgctgatggctcggtgcggatgtttgacctccgccatctagaacacagcacc

SEQ ID NO: 328860 - DNA, 120 bp, Artificial Sequence
  ENSG00000136485_7 (sequence is synthesized)
atcatttacgaagacccacagcatcacccactgcttcgcctctgctggaacaagcaggaccctaactacctggccaccatggccatggatggaatggaggtggtgattctagatgtccgg

SEQ ID NO: 328861 - DNA, 120 bp, Artificial Sequence
  ENSG00000136485_8 (sequence is synthesized)
gttccctgcacacctgtcgccaggttaaacaaccatcgagcatgtgtcaatggcattgcttgggccccacattcatcctgccacatctgcactgcagcggatgaccaccaggctctcatc

SEQ ID NO: 328862 - DNA, 120 bp, Artificial Sequence
  ENSG00000136485_9 (sequence is synthesized)
tgggacatccagcaaatgccccgagccattgaggaccctatcctggcctacacagctgaaggagagatcaacaatgtgcagtgggcatcaactcagcccgactggatcgccatctgctac

SEQ ID NO: 328863 - DNA, 120 bp, Artificial Sequence
  ENSG00000136485_10 (sequence is synthesized)
aacaactgcctggagatactcagagtgtagtgttggtggcgctgtgcccacgaggcaggggcttttgtatttcctgcctctgccccacccccaaagtaagaagaaacatgtttccagtgg

SEQ ID NO: 328864 - DNA, 120 bp, Artificial Sequence
  ENSG00000136485_11 (sequence is synthesized)
ccagtatgtctttcattgctttgcacccactgttaccagaagctgctctaggagttcctggccagtcaccccatcgccctctgtggcagactcagtgctgtgtggcgcctcctcagccca

SEQ ID NO: 328865 - DNA, 120 bp, Artificial Sequence
  ENSG00000136485_12 (sequence is synthesized)
gggctgagttttaagattttctctcctttcctcttctcctttggttcctcaattaaaaaatgtgtgtatatttgtttgtcaggcgttgtgttgaggagcagttcacgcactggctgtgtc

SEQ ID NO: 328866 - DNA, 120 bp, Artificial Sequence
  ENSG00000136485_13 (sequence is synthesized)
tattcctctgcccaggtgtctctgtttgctgcccaaggcagcagttcatgtctcgtccatgtccatgttcgtgttagcacttacgtgggaacaaataccaatttgtcttttctcctagta

SEQ ID NO: 328867 - DNA, 120 bp, Artificial Sequence
  ENSG00000136485_14 (sequence is synthesized)
tcagtgtgtttaacaaattttaactttgtatatttgttatctatcaggctaatttttttatgaaaagaattttactctcctgcttcatttctttgtcttatagtcctccctctttgcacc

SEQ ID NO: 328868 - DNA, 120 bp, Artificial Sequence
  ENSG00000136485_15 (sequence is synthesized)
ttcttctcttccctcagtgcctggagctggtactgggcccctggccccatgagcagtttgccttcttgagtcactgcctgtgtagtacatacctgaccgggagtccaaaccaccttggtg

SEQ ID NO: 328869 - DNA, 120 bp, Artificial Sequence
  ENSG00000136485_16 (sequence is synthesized)
ctctgaagtccactgactcatcacacctttcttagcctggctcctctcaagggcattctgggcttgtaaacagacataggaagcctctgtttaccctgaagcaccactgtccagcccatt

SEQ ID NO: 328870 - DNA, 120 bp, Artificial Sequence
  ENSG00000136485_17 (sequence is synthesized)
ggttcccactggcagcatggtagagctgagagaaacaggctctcagggtacctgacttgaggggaatcgtttcatgaagctgaacttcaagcatatttccagtacattctttcagagtct

SEQ ID NO: 328871 - DNA, 120 bp, Artificial Sequence
  ENSG00000136485_18 (sequence is synthesized)
gtttttccatccaaatataagccccaggccattccacttagtgtcttttcaatgataggcaagaatgatatctgagttgaacttcggtgcttctgttgtttgagtttactgtgcctggtg

SEQ ID NO: 328872 - DNA, 120 bp, Artificial Sequence
  ENSG00000136485_19 (sequence is synthesized)
gtatattgggcattctttggattgagtgttctgaggtgagagagtcttcccgaggcatcctgtctgtgcttccaaccctgaacaagaccttacatgagagatggactgatggactgcggc

SEQ ID NO: 328873 - DNA, 120 bp, Artificial Sequence
  ENSG00000136485_20 (sequence is synthesized)
aatcctgggctgtcaagtggatagatagttaaaaagcattatactgtgggtaatgaaaagggaggaaaaaaaaagaaggaaaaggaattatagacccccagggtcagccagttaagagct

SEQ ID NO: 328874 - DNA, 120 bp, Artificial Sequence
  ENSG00000136485_21 (sequence is synthesized)
ctacccacacctgtcaacccctctctcccccagtttaggttctgagcagtattggacttgtagcctgcagttgtcttttgacttgcaggccgcaggtgtctttctgttatgtgaatgagt

SEQ ID NO: 328875 - DNA, 120 bp, Artificial Sequence
  ENSG00000136485_22 (sequence is synthesized)
tccatggaggggcatatgtgtgattccaccgttagatgagcccttggggcaggcagtttgggatgtgctcttgggggaaagttggctgtttccttgcgctctgctcctacccgaaggttt

SEQ ID NO: 328876 - DNA, 120 bp, Artificial Sequence
  ENSG00000136485_23 (sequence is synthesized)
ttaagtccctctgaattgctcatctgagattagtagagtagcaggcctgaaggatgatggttttgtcctctttggttctcacctgcttgagaagtaaaacagtaactttgttcttctggg

SEQ ID NO: 328877 - DNA, 120 bp, Artificial Sequence
  ENSG00000136485_24 (sequence is synthesized)
cccttaagcttttttggttaagtcttccttttcagaagtagatgtcattatatgccaaaagtctagctctttgctttaccatacagggacctgtcccaaagaaaaaggctctttttttag

SEQ ID NO: 328878 - DNA, 120 bp, Artificial Sequence
  ENSG00000136485_25 (sequence is synthesized)
ccagcatatttccccttctacccttttactttgttgttctgattttaggactctggctggccatgtgcttgtggttgcctctcctgcatttgccactggatttgcactgcatcgtttgga

SEQ ID NO: 328879 - DNA, 120 bp, Artificial Sequence
  ENSG00000136485_26 (sequence is synthesized)
gtagcaaggccaagctgatggctgcttgtttaggaggccatcagttccttcctgtggagaagggtctgaaatggaagtcagtggtagaaggggctggtctgctgggcagggcttacatcc

SEQ ID NO: 328880 - DNA, 120 bp, Artificial Sequence
  ENSG00000136485_27 (sequence is synthesized)
actgagttctaagattcctttcctgatctgcacctacgcctggtctgtatggtggaatttgtcagctggaactcagaaacaacaacttgaaaaaaaaataataattagaacatatttgca

SEQ ID NO: 328881 - DNA, 120 bp, Artificial Sequence
  ENSG00000136485_28 (sequence is synthesized)
taagatagctatttactctggaaaccaacaacttttgagatttcccttgccctgtggacgcccagctcctgtcatccttccttaggtcctgcagtacagtcttcccctgaatgccaccgg

SEQ ID NO: 328882 - DNA, 120 bp, Artificial Sequence
  ENSG00000136485_29 (sequence is synthesized)
ggacccagggggactccacccccctaagcaagcacacacatactcacagttgatgagttgctggtctttgagtcccagctctcttaccctccctttactccaccagcccgacgacccatg

SEQ ID NO: 328883 - DNA, 120 bp, Artificial Sequence
  ENSG00000136485_30 (sequence is synthesized)
actgaggaggggatttctacagtctcaggatttagaaagtctgtaagccatccatgctccagaaagcaccgatctgttgtagttgcaaaaacaactctgtaatttgttgaggttctcaaa

SEQ ID NO: 328884 - DNA, 120 bp, Artificial Sequence
  ENSG00000136485_31 (sequence is synthesized)
ctgacagccagcgagactgggtgggaggccctggatctgttctccctgactgcgggaggagcagccactaggactttagcaggaagcccacatggaggctccgccaggctgtggcccagc

SEQ ID NO: 328885 - DNA, 120 bp, Artificial Sequence
  ENSG00000136485_32 (sequence is synthesized)
tggtgatggcccttttgctcctggcagcctgaggcacagctgcctgtattgtcctcatctgttctgactgaaggatggaggtgctgaataaattaggcctcaggcctctaccaccagaga

SEQ ID NO: 328886 - DNA, 120 bp, Artificial Sequence
  ENSG00000136485_33 (sequence is synthesized)
gctggagaatgggtccacgtcattcaaggacctgaattttttatgctcaggagcattggaatcctcttcttccagggaggaattagcctgcaaggttaggacttgaagagggaaggtatt

SEQ ID NO: 328887 - DNA, 67 bp, Artificial Sequence
  ENSG00000136485_34 (sequence is synthesized)
aattagcctgcaaggttaggacttgaagagggaaggtatttaataactgggcgaggccagatcccaa

SEQ ID NO: 328888 - DNA, 89 bp, Artificial Sequence
  ENSG00000136485_35 (sequence is synthesized)
aaaaaaaaaataggtgaaaattccttataaatccaggattggctctgagagaactggctaagattcaggaagaaacaaaaaattcagaa

SEQ ID NO: 328889 - DNA, 120 bp, Artificial Sequence
  ENSG00000136485_36 (sequence is synthesized)
agaactggctaagattcaggaagaaacaaaaaattcagaatcctacaaggttttgatgacaattagggccaaaattttaggaggagatgtaggatgcaggagaaaattaaagtgttttct

SEQ ID NO: 328890 - DNA, 120 bp, Artificial Sequence
  ENSG00000136485_37 (sequence is synthesized)
ttatatcagaggaggaaatagtagaggtcagtgaaggtctggggtagggaaacattcagactgtccattgcatggctgtggagtgagactgcccttagcctgggtcagccttcctgggcc

SEQ ID NO: 328891 - DNA, 120 bp, Artificial Sequence
  ENSG00000136485_38 (sequence is synthesized)
ataaattgggcatccgtgatgctaggtaactgtgggaacaaaatgacagcttagagcagccatgggtgatgtttggtggtaaaaaacctacaggcgtttggggtcccatgattgttccag

SEQ ID NO: 328892 - DNA, 120 bp, Artificial Sequence
  ENSG00000136485_39 (sequence is synthesized)
accatgactcttcctggttgtgggtttgttacagagcaggagaagcagaggttatgacagttatgcagactttccccctcctttttctcttttctcttccccttgcttttccactgtttc

SEQ ID NO: 328893 - DNA, 120 bp, Artificial Sequence
  ENSG00000136485_40 (sequence is synthesized)
ttcctgctgccacctgggccttgaattcctgggctgtgaagacatgtagcagctgcagggtttaccacacgtgggagggcagcccagtactgtccctctgccttccccactttgagaata

SEQ ID NO: 328894 - DNA, 120 bp, Artificial Sequence
  ENSG00000136485_41 (sequence is synthesized)
tggcagcccctttcattcctggcttggggtaggggagaccattgaagtagaagcctcaaagcagacttttccctttactgtgtgtactccaggacgaagaaggaagatcatgcttgatac

SEQ ID NO: 328895 - DNA, 120 bp, Artificial Sequence
  ENSG00000136485_42 (sequence is synthesized)
ttagattggttttcccagggaagagggcggagcagagcaaagtcactgtgaaccctgggccaggccctggctgggccagctcctgagagcgtctcgtgttgcagacccttgcccacttca

SEQ ID NO: 328896 - DNA, 120 bp, Artificial Sequence
  ENSG00000136485_43 (sequence is synthesized)
cccacctgcaccttctccccctctcacagtgtcactgctgctaatggtcaaagtcaaatgtgtggccacatgggatgggccaggtcctctcaggctactttctggatgtcatttttaaaa

SEQ ID NO: 328897 - DNA, 120 bp, Artificial Sequence
  ENSG00000136485_44 (sequence is synthesized)
tatggaaacatgcaggtgccttcccaaagaggcttggactggtatatccaacgagaaacaaataagctaaagaaagtttaaactcaagaagaaagatgttgacagtctatgtaacagctg

SEQ ID NO: 328898 - DNA, 120 bp, Artificial Sequence
  ENSG00000136485_45 (sequence is synthesized)
gaaagtttataggcacccacctttgggacaacccagtgattatgaacatgtgatatctactatttaaaagaaatgttctcaccttgggttgattgtggtataccatgtgttatgaaaatt

SEQ ID NO: 328899 - DNA, 120 bp, Artificial Sequence
  ENSG00000136485_46 (sequence is synthesized)
gttgagctgaagctttgaatcgatttagttgagtctgactcacttgctttggttcctgtgtattttactacccctcttgtcagtgaccttccttccccaccccacccagagtgaatttgt

SEQ ID NO: 328900 - DNA, 120 bp, Artificial Sequence
  ENSG00000136485_47 (sequence is synthesized)
agcatgattgtataaacctctatgtagaaaatggagatttcttgctctgaaatgttaagctctaactgatccatttctgtgtcctttagcctagtatgtctgaacttccattcttgttat

SEQ ID NO: 328901 - DNA, 120 bp, Artificial Sequence
  ENSG00000136485_48 (sequence is synthesized)
atatttaaactttccctctatattataggttttgtggcatccacggtcaggtgtagaggaagctgccccttgcagaactgtactgtaatatttttcttttataaatattttcacaggact

SEQ ID NO: 328902 - DNA, 120 bp, Artificial Sequence
  ENSG00000136485_49 (sequence is synthesized)
gattgtacacagggcttgtaataaaattttaacactgtgctgtgaaacaactatggggaatctccattgaaggctacttcatgggcacctgaaagtggagtgttatagctatgactttct

SEQ ID NO: 328903 - DNA, 120 bp, Artificial Sequence
  ENSG00000136485_50 (sequence is synthesized)
atttcttgtttcctaagtaaattaaacctaattttcaccctttcattctgtttcagcctcctgtataagaagtaccgtattttctgcccatcatactttgtaataaaacttgaacatgta

SEQ ID NO: 328904 - DNA, 120 bp, Artificial Sequence
  ENSG00000136485_51 (sequence is synthesized)
acaaggtcctctttggagtccactttgagaagctgatgaaagctatggattctcattgtccagacattacacatacatgaacaatttacaaacaaatccaaggaatatgcactgatcttt

SEQ ID NO: 328905 - DNA, 120 bp, Artificial Sequence
  ENSG00000136485_52 (sequence is synthesized)
aagtccacccattgcccgggcgagatagagctttctttcctctgttgcttctttcttccttatggcccatagtggacagcagaactggaaatgggattcacgattctgatgtggacaccg

SEQ ID NO: 328906 - DNA, 120 bp, Artificial Sequence
  ENSG00000136485_53 (sequence is synthesized)
tctcctgcatttgccactggatttgcactgcatcgtttggagatacaaagcgagcagttcttgcctcctgtataagaagtaccgtattttctgcccatcatactttgtaataaaacttga

SEQ ID NO: 328907 - DNA, 120 bp, Artificial Sequence
  ENSG00000136487_0 (sequence is synthesized)
aaacatgcagagaaacaggtgaggagaagcagcgagagagaaggggccaggtataaaaagggcccacaagagaccagctcaaggatcccaaggcccaactccccgaaccactcagggtcc

SEQ ID NO: 328908 - DNA, 120 bp, Artificial Sequence
  ENSG00000136487_1 (sequence is synthesized)
tgtggacagctcacctagcggcaatggctgcaggctcccggacgtccctgctcctggcttttggcctgctctgcctgtcctggcttcaagagggcagtgccttcccaaccattcccttat

SEQ ID NO: 328909 - DNA, 120 bp, Artificial Sequence
  ENSG00000136487_2 (sequence is synthesized)
ccaggctttttgacaacgctatgctccgcgcccgtcgcctgtaccagctggcatatgacacctatcaggagtttgaagaagcctatatcctgaaggagcagaagtattcattcctgcaga

SEQ ID NO: 328910 - DNA, 120 bp, Artificial Sequence
  ENSG00000136487_3 (sequence is synthesized)
agcagaaatctaacctagagctgctccgcatctccctgctgctcatccagtcatggctggagcccgtgcagctcctcaggagcgtcttcgccaacagcctggtgtatggcgcctcggaca

SEQ ID NO: 328911 - DNA, 120 bp, Artificial Sequence
  ENSG00000136487_4 (sequence is synthesized)
gcaacgtctatcgccacctgaaggacctagaggaaggcatccaaacgctgatgtggaggctggaagatggcagcccccggactgggcagatcttcaatcagtcctacagcaagtttgaca

SEQ ID NO: 328912 - DNA, 120 bp, Artificial Sequence
  ENSG00000136487_5 (sequence is synthesized)
caaaatcgcacaacgatgacgcactgctcaagaactacgggctgctctactgcttcaggaaggacatggacaaggtcgagacattcctgcgcatcgtgcagtgccgctctgtggagggca

SEQ ID NO: 328913 - DNA, 120 bp, Artificial Sequence
  ENSG00000136487_6 (sequence is synthesized)
gctgtggcttctagctgcccgggtggcatccctgtgacccctccccagtgcctctcctggtcgtggaaggtgctactccagtgcccaccagccttgtcctaataaaattaagttgcatca

SEQ ID NO: 328914 - DNA, 120 bp, Artificial Sequence
  ENSG00000136487_7 (sequence is synthesized)
cgtctatcgccacctgaaggacctagaggaaggcatccaaacgctgatgtgggtgagggtggcaccagggatccccaatcctggggccccactggcttccagggactggggagagaaaca

SEQ ID NO: 328915 - DNA, 120 bp, Artificial Sequence
  ENSG00000136487_8 (sequence is synthesized)
ctgctgccctctttttagcagtcaggcgctgacccaagagaactcaccgtattcttcatttcccctcgtgaatcctccaggcctttctctacaacctggaggggagggaggaaaatggat

SEQ ID NO: 328916 - DNA, 120 bp, Artificial Sequence
  ENSG00000136488_0 (sequence is synthesized)
taggatcccaaggcccaactccccgaaccactcagggtcctgtggacagctcacctagtggcaatggctccaggctcccggacgtccctgctcctggcttttgccctgctctgcctgccc

SEQ ID NO: 328917 - DNA, 120 bp, Artificial Sequence
  ENSG00000136488_1 (sequence is synthesized)
tggcttcaagaggctggtgccgtccaaaccgttcccttatccaggctttttgaccacgctatgctccaagcccatcgcgcgcaccagctggccattgacacctaccaggagtttgaagaa

SEQ ID NO: 328918 - DNA, 120 bp, Artificial Sequence
  ENSG00000136488_2 (sequence is synthesized)
acctatatcccaaaggaccagaagtattcattcctgcatgactcccagacctccttctgcttctcagactctattccgacaccctccaacatggaggaaacgcaacagaaatccaatcta

SEQ ID NO: 328919 - DNA, 120 bp, Artificial Sequence
  ENSG00000136488_3 (sequence is synthesized)
cagcgatgactatcacctcctaaaggacctagaggaaggcatccaaacgctgatggggaggctggaagacggcagccgccggactgggcagatcctcaagcagacctacagcaagtttga

SEQ ID NO: 328920 - DNA, 120 bp, Artificial Sequence
  ENSG00000136488_4 (sequence is synthesized)
cacaaactcgcacaaccatgacgcactgctcaagaactacgggctgctctactgcttcaggaaggacatggacaaggtcgagacattcctgcgcatggtgcagtgccgctctgtggaggg

SEQ ID NO: 328921 - DNA, 120 bp, Artificial Sequence
  ENSG00000136488_5 (sequence is synthesized)
cagctgtggcttctaggtgcccgagtagcatcctgtgacccctccccagtgcctctcctggccctgaaggtgccactccagtgcccaccagccttgtcctaataaaattaagttgtatca

SEQ ID NO: 328922 - DNA, 120 bp, Artificial Sequence
  ENSG00000136488_6 (sequence is synthesized)
gttcttggggaatgggtgcgggtcaggggtggcaagaaggggtgactttcccccactggggaagtaatgggaggagactaaggagctcagggttgttttctgaagcgaaaatgcaggcag

SEQ ID NO: 328923 - DNA, 120 bp, Artificial Sequence
  ENSG00000136488_7 (sequence is synthesized)
tactgctgccctctttttagcagtaaggcgctgacccaagagaactcaccttattcttcatttcgcctggtgaatcctccaggcctttctctacaccctgaaggggagggaggaaaatgg

SEQ ID NO: 328924 - DNA, 120 bp, Artificial Sequence
  ENSG00000136488_8 (sequence is synthesized)
ataaatgagagagggagggaacagtgcccaagcgcttggcctctccttctcttccttcactttgcagaggctggaagacggcagccgccggactgggcagatcctcaagcagacctacag

SEQ ID NO: 328925 - DNA, 120 bp, Artificial Sequence
  ENSG00000136488_9 (sequence is synthesized)
ccagggtataaaaagggcccacaagagaccggctctaggatcccaaggcccaactccccgaaccactcagggtcctgtggacagctcacctagtggcaatggctccaggtaagcgcccct

SEQ ID NO: 328926 - DNA, 120 bp, Artificial Sequence
  ENSG00000136488_10 (sequence is synthesized)
aaaatccctttgggcacaacgtgtcctgaggggagaggcagcgccctgtagatgggacgggggcactaaccctcaggtttggggcttatgaatgtgagtatcgccatctaaggccagata

SEQ ID NO: 328927 - DNA, 120 bp, Artificial Sequence
  ENSG00000136488_11 (sequence is synthesized)
tttggccaatctctgaatgttcctggtctctggagggatggagagagagaaaaaaaacaaacagctcctggagcagggagagcgctggcctcttcctctccggctccctccattgccctc

SEQ ID NO: 328928 - DNA, 120 bp, Artificial Sequence
  ENSG00000136488_12 (sequence is synthesized)
cagcgatgactatcacctcctaaaggacctagaggaaggcatccaaacgctgatgggggtgagggtggcgccaggggtcaccaatcctggaaccccactggcttcgagggctgggggaga

SEQ ID NO: 328929 - DNA, 120 bp, Artificial Sequence
  ENSG00000136490_0 (sequence is synthesized)
gaccactggtagcggcagcagctcgcgcccgcgccctcctcgtacccgtgcgcccccggagaccgatcccgccccgcggcccaggccgggcctgaacccagcgggtgccgcttctccacc

SEQ ID NO: 328930 - DNA, 120 bp, Artificial Sequence
  ENSG00000136490_1 (sequence is synthesized)
cgaggcttccacctccaacgagccatgttccaggctgcaggagccgcccaggccaccccctctcatgacgccaaaggcggcggcagcagcacggtgcagcgctccaagtccttcagcctg

SEQ ID NO: 328931 - DNA, 120 bp, Artificial Sequence
  ENSG00000136490_2 (sequence is synthesized)
cgggcccaggtgaaggagacctgcgccgcctgccagaagaccgtgtaccccatggagcggctggtggccgacaagctcattttccacaactcttgcttctgctgcaagcactgtcacacc

SEQ ID NO: 328932 - DNA, 120 bp, Artificial Sequence
  ENSG00000136490_3 (sequence is synthesized)
aagctcagcctgggcagctacgccgcgctgcacggggagttctactgcaaaccccacttccagcagctgtttaagagcaaaggcaactacgacgaggggtttggccgcaagcagcacaag

SEQ ID NO: 328933 - DNA, 120 bp, Artificial Sequence
  ENSG00000136490_4 (sequence is synthesized)
gagctctgggcccacaaggaggtggaccccggcaccaagacggcctgaggcctctgtaaccttccaccccctctgcggaaggcctggagccggcagggggaaggtgggaaggaggtcgag

SEQ ID NO: 328934 - DNA, 120 bp, Artificial Sequence
  ENSG00000136490_5 (sequence is synthesized)
ctgggcttgcgtgggggccaggtgggaaggggatgaggcttgctcaggcgtaggggaccagggcagggctctgctccaggactccttccttcttccttctcccgcagccggtgagggttt

SEQ ID NO: 328935 - DNA, 120 bp, Artificial Sequence
  ENSG00000136490_6 (sequence is synthesized)
ggaaaccaggattggggtctgcccaccaccctgcttcctgcttcgttcagcctccctccccacctcaccccaggaccccctgggaggcccccaagcccagctcccctatctaggtgcctt

SEQ ID NO: 328936 - DNA, 120 bp, Artificial Sequence
  ENSG00000136490_7 (sequence is synthesized)
ttctccagcaaggagtcagcatgcccccctcagggtcccaagctccctcactgccaccggagactgtgtggcccccacgtctccccatctacctctacccttaacctgtttctgagccac

SEQ ID NO: 328937 - DNA, 120 bp, Artificial Sequence
  ENSG00000136490_8 (sequence is synthesized)
ggagacagggaggaaggagcgcgacagtgccacctgttgggcatcataaatgcccctgcagcccatgggggaggagatggggaagtggagccaccctgcctctgcagggcaaggcagggc

SEQ ID NO: 328938 - DNA, 120 bp, Artificial Sequence
  ENSG00000136490_9 (sequence is synthesized)
ctgccccagtggggcttgggaccatctcgaaccaccagcgtggagaagcagaagcaaaagcactcgccaggctgcagcctcaggcactggcaggggctggtgcggccccactcccctccc

SEQ ID NO: 328939 - DNA, 120 bp, Artificial Sequence
  ENSG00000136490_10 (sequence is synthesized)
ccgctcccatttgtgcccatcctgttgtgaccaaccccgttttaaacatgtttcaatagatccagattctctattgtgtggcctgctgggggatctgtcacaggaagggtgcagactcac

SEQ ID NO: 328940 - DNA, 120 bp, Artificial Sequence
  ENSG00000136490_11 (sequence is synthesized)
catggggcgggcatggggggacagggccagccccgactacctcggccctgatgggggcagggagctagaagtgggtgtcagttccctgacacaccattgagaaatgggagggctcctctt

SEQ ID NO: 328941 - DNA, 120 bp, Artificial Sequence
  ENSG00000136490_12 (sequence is synthesized)
cacagcgagggcttcatgctgtcacacccacagtggttttggaactgaaactccacctcacccctcagttctgggttggttcagacccaccaacttaccatatgcaccccattgtgaaga

SEQ ID NO: 328942 - DNA, 120 bp, Artificial Sequence
  ENSG00000136490_13 (sequence is synthesized)
tgcaagctgccgcgttccctggctggttccagctgtctagctccctcccttcttcccagccctttgacctggaagtaagttagcgaagaatggcggtaaccagcagacccagcaagtgct

SEQ ID NO: 328943 - DNA, 120 bp, Artificial Sequence
  ENSG00000136490_14 (sequence is synthesized)
gcccaaggttttagtgacccctggattgtcccccctcatcattacccctcgctgctgtcatcatccccttgccttttcaagctctgcggaggtgcagtcacagctactgtctcaggaaat

SEQ ID NO: 328944 - DNA, 120 bp, Artificial Sequence
  ENSG00000136490_15 (sequence is synthesized)
ccaaagagaaactacctctgcttctctgaaaacccagggacaatgagggatgagttcacagcagagcaaaccaggcaagttgggaggacctgagggcgccccggtgggacacaggcagaa

SEQ ID NO: 328945 - DNA, 120 bp, Artificial Sequence
  ENSG00000136490_16 (sequence is synthesized)
gtctgggttgtcctgctccagattcaacttcctgatgtctccagacatgggatcgatgagaacagagactcctggagggtttgctgccaccacaccatacaactgcctgagttcctaagt

SEQ ID NO: 328946 - DNA, 120 bp, Artificial Sequence
  ENSG00000136490_17 (sequence is synthesized)
ggcctccccgtggaacagggcagggagctgggccacaggctccagtgtcacataagtcactatgctgaggcaggcactgctcctcgagggagcagagcgaatactcagcagagatggtgc

SEQ ID NO: 328947 - DNA, 120 bp, Artificial Sequence
  ENSG00000136490_18 (sequence is synthesized)
cccggcctggatcctcccaagtgtgaagtgagcgcctcagagcctctcagggcaggccaacttcctgcaccagaggtctcagatggcaaggatcatcttggttcggttaagcaacagtag

SEQ ID NO: 328948 - DNA, 120 bp, Artificial Sequence
  ENSG00000136490_19 (sequence is synthesized)
cagatgaccacaagggggtactggagaggtggctcttggagacacctgacccctgccctgcaaagatgggactgaaggaagtcctctgggccaggaagaccctaccaaatatcatgaaag

SEQ ID NO: 328949 - DNA, 120 bp, Artificial Sequence
  ENSG00000136490_20 (sequence is synthesized)
ctccgggaactcagccactggtgacgttcaggttgtgagggccagcagtgccaccctggtaaatcagccctgttgggaccaccccagtggagctcctggaggggcaactggaggaaaggg

SEQ ID NO: 328950 - DNA, 120 bp, Artificial Sequence
  ENSG00000136490_21 (sequence is synthesized)
gcagacacctctggactgacaatggtatcagccagatcaccccaggacccctctacttggagtcaagttctcttctgcttgaaaggcccaggctcgttgccaggcaccatacctggcccc

SEQ ID NO: 328951 - DNA, 120 bp, Artificial Sequence
  ENSG00000136490_22 (sequence is synthesized)
tgctaagcaaaaacctacctccaccccccacaactgaaagcactgccacaggacccctctgatataaatgatcccttttattgtaagtaatgcgcaacactggcctggctttgcactgca

SEQ ID NO: 328952 - DNA, 120 bp, Artificial Sequence
  ENSG00000136490_23 (sequence is synthesized)
agccctcggtcaagatatagtcaaataactatggctgcaggttccacagttccacaataaccatggctgcacgatccacaattcagacacagacatagagctggggtgggtggaaggggc

SEQ ID NO: 328953 - DNA, 120 bp, Artificial Sequence
  ENSG00000136490_24 (sequence is synthesized)
aggagggtggcagagtgcggactgtccccagccctggcctctccatgcagagttggcccaggcagacacaccccatggaatgatgagaaagtgacggcacggccccttcccacagcaagc

SEQ ID NO: 328954 - DNA, 120 bp, Artificial Sequence
  ENSG00000136490_25 (sequence is synthesized)
ctggggctgccaggaactgcccttcagaacctttgggcccaggtcaccctgaagccccacaactttttatctggattagttattaaaaaacaataaattaagcaacaacttggtcctgag

SEQ ID NO: 328955 - DNA, 120 bp, Artificial Sequence
  ENSG00000136490_26 (sequence is synthesized)
cgggccaggctccggggtcgccccggctgggtctctgcggccccacagctctgggcggggatgggggcgccggcgcctacgcgcgaggccaaccgggggaaaccgaggcagtgaatggcc

SEQ ID NO: 328956 - DNA, 120 bp, Artificial Sequence
  ENSG00000136490_27 (sequence is synthesized)
gaggcagtgaatggcccaggccccgcccggttatcccggagccaggccgggagcgcccagtgtcccgcgaccgcagccgccgcagcctgaactcgtcccctcccagtaggatgcggagcg

SEQ ID NO: 328957 - DNA, 120 bp, Artificial Sequence
  ENSG00000136490_28 (sequence is synthesized)
ccttccatcctgtccctgccaccgttgcttccccacgccgggccgccgtcgggatgggcagacggcgcggccggctggggccgggctggcggggccctcccgactgacttccccttgcag

SEQ ID NO: 328958 - DNA, 120 bp, Artificial Sequence
  ENSG00000136490_29 (sequence is synthesized)
ctgcggcgcgcccctgggccttgggctgatggctgcagccctgatccagggcctcccggagctgcccctgccctgaccgcccctctccctcaggacgccaaaggcggcggcagcagcacg

SEQ ID NO: 328959 - DNA, 120 bp, Artificial Sequence
  ENSG00000136490_30 (sequence is synthesized)
atttccggccaagccacgcagtccctggtgcccgggaaggcgccggcctcgccgccgctccaaagcgagtggccgtctctcgccggctgtgcctccggcctgctgtgcggctgcagggag

SEQ ID NO: 328960 - DNA, 120 bp, Artificial Sequence
  ENSG00000136490_31 (sequence is synthesized)
cagcgggtgccgcttctccacccgaggcttccacctccaacgagccatgttccaggctgcaggagccgcccaggccaccccctctcatgtaagtgcccggctgggtgggagggccccccg

SEQ ID NO: 328961 - DNA, 80 bp, Artificial Sequence
  ENSG00000136490_32 (sequence is synthesized)
ctcgcgcccgcgccctcctcgtacccgtgcgcccccggagaccgatcccgccccgcggcccaggccgggcctggtgagag

SEQ ID NO: 328962 - DNA, 120 bp, Artificial Sequence
  ENSG00000136490_33 (sequence is synthesized)
ggagaggcgccgaggggtgtggggtgagggccgcccgtggggtcccggcgagtctgcgagccgctctcgcccggggcgcacaggctcgagtcctcgtttcagggccggcccccggctggg

SEQ ID NO: 328963 - DNA, 80 bp, Artificial Sequence
  ENSG00000136490_34 (sequence is synthesized)
cggagccgagacccgctggcggggctcgcggcgtcggggtctggggtccggtcctcgcggggccaggtcgggggccgagg

SEQ ID NO: 328964 - DNA, 80 bp, Artificial Sequence
  ENSG00000136490_35 (sequence is synthesized)
cgcagcctaggcctggacgcccgggcgcggcgcagggcagcgagggccggggtcaggtcggggcagcggcttctcatcgc

SEQ ID NO: 328965 - DNA, 120 bp, Artificial Sequence
  ENSG00000136490_36 (sequence is synthesized)
cagcccgcgggacgcacacggcggctgcgcgggagcccccggcccctccgctcccgctaactttgttcttccgagggacggtgccactcgggaccccggcccctggggagcaggggtggg

SEQ ID NO: 328966 - DNA, 120 bp, Artificial Sequence
  ENSG00000136490_37 (sequence is synthesized)
ggaggtgggtgaggggcggaagtggcaagaccaagagcaacaggaaatgacttagggaaagtcccaaccgcaatccccccagcccctgcctgtcaacaccccccaccctgcaggctgggg

SEQ ID NO: 328967 - DNA, 80 bp, Artificial Sequence
  ENSG00000136490_38 (sequence is synthesized)
gatcccgccccgcggcccaggccgggcctggctggggccgggctggcggggccctcccgactgacttccccttgcagaac

SEQ ID NO: 328968 - DNA, 120 bp, Artificial Sequence
  ENSG00000136492_0 (sequence is synthesized)
aattcgtctcgggttgtgtggttgaggggtctggtgggtcgaggaaaggtaacggcggccccagtcctgcacacaaggccggggaagtagcagcacccccaggaagagggaggaggaagg

SEQ ID NO: 328969 - DNA, 120 bp, Artificial Sequence
  ENSG00000136492_1 (sequence is synthesized)
gctcgtgccctttcttctcttccagggctccgctttatttgctctcagaagtcggtttcctttccttttcttcagtgaatcggagctcagagcgttgcttcggtttccctccagacagtt

SEQ ID NO: 328970 - DNA, 120 bp, Artificial Sequence
  ENSG00000136492_2 (sequence is synthesized)
aggaatctgaaataaacaggaaagcactatgtcttcaatgtggtctgaatatacaattggtggggtgaagatttactttccttataaagcttacccgtcacagcttgctatgatgaattc

SEQ ID NO: 328971 - DNA, 120 bp, Artificial Sequence
  ENSG00000136492_3 (sequence is synthesized)
tattctcagaggattaaacagcaagcaacattgtttgttggagagtcccacaggaagtggaaaaagcttagccttactttgttctgctttagcatggcaacaatctcttagtgggaaacc

SEQ ID NO: 328972 - DNA, 120 bp, Artificial Sequence
  ENSG00000136492_4 (sequence is synthesized)
agcagatgagggcgtaagtgaaaaagctgaagtacaattgtcatgttgttgtgcatgccattcaaaggattttacaaacaatgacatgaaccaaggaacttcacgtcatttcaactatcc

SEQ ID NO: 328973 - DNA, 120 bp, Artificial Sequence
  ENSG00000136492_5 (sequence is synthesized)
aagcacaccaccttctgaaagaaatggcacttcatcaacttgtcaagactcccctgaaaaaaccactctggctgcaaagttatctgctaagaaacaggcatccatatacagagatgaaaa

SEQ ID NO: 328974 - DNA, 120 bp, Artificial Sequence
  ENSG00000136492_6 (sequence is synthesized)
tgatgattttcaagtagagaagaaaagaattcgacccttagaaactacacagcagattagaaaacgtcattgctttggaacagaagtacacaatttggatgcaaaagttgattcaggaaa

SEQ ID NO: 328975 - DNA, 120 bp, Artificial Sequence
  ENSG00000136492_7 (sequence is synthesized)
gactgtaaaactcaactctccactggaaaagataaactccttttcgccacagaaaccccctggccactgttctaggtgctgttgttctactaaacaaggaaacagtcaagagtcatcgaa

SEQ ID NO: 328976 - DNA, 120 bp, Artificial Sequence
  ENSG00000136492_8 (sequence is synthesized)
taccattaagaaggatcatacagggaaatccaagatacccaaaatatattttgggacacgcacacacaagcagattgctcagattactagagagctccggaggacggcatattcaggggt

SEQ ID NO: 328977 - DNA, 120 bp, Artificial Sequence
  ENSG00000136492_9 (sequence is synthesized)
tccaatgactattctttccagcagggatcatacttgtgtccatcctgaggtagtcggtaacttcaacagaaatgagaagtgcatggaattgctagatgggaaaaacggaaaatcctgcta

SEQ ID NO: 328978 - DNA, 120 bp, Artificial Sequence
  ENSG00000136492_10 (sequence is synthesized)
tttttatcatggagttcataaaattagtgatcagcacacattacagactttccaagggatgtgcaaagcctgggatatagaagaacttgtcagcctggggaagaaactaaaggcctgtcc

SEQ ID NO: 328979 - DNA, 120 bp, Artificial Sequence
  ENSG00000136492_11 (sequence is synthesized)
atattacacagcccgagaactaatacaagatgctgacatcatattttgtccctacaactatcttctagatgcacaaataagggaaagtatggatttaaatctgaaagaacaggttgtcat

SEQ ID NO: 328980 - DNA, 120 bp, Artificial Sequence
  ENSG00000136492_12 (sequence is synthesized)
tttagatgaagctcataacatcgaggactgtgctcgggaatcagcaagttacagtgtaacagaagttcagcttcggtttgctcgggatgaactagatagtatggtcaacaataatataag

SEQ ID NO: 328981 - DNA, 120 bp, Artificial Sequence
  ENSG00000136492_13 (sequence is synthesized)
gaagaaagatcatgaacccctacgagctgtgtgctgtagcctcattaattggttagaagcaaacgctgaatatcttgtagaaagagattatgaatcagcttgtaaaatatggagtggaaa

SEQ ID NO: 328982 - DNA, 120 bp, Artificial Sequence
  ENSG00000136492_14 (sequence is synthesized)
tgaaatgctcttaactttacacaaaatgggtatcaccactgctacttttcccattttgcagggacatttttctgctgttcttcaaaaagaggaaaaaatctcaccaatttatggtaaaga

SEQ ID NO: 328983 - DNA, 120 bp, Artificial Sequence
  ENSG00000136492_15 (sequence is synthesized)
ggaggcaagagaagtacctgttattagtgcatcaactcaaataatgcttaaaggactttttatggtacttgactatctttttaggcaaaatagcagatttgcagatgattataaaattgc

SEQ ID NO: 328984 - DNA, 120 bp, Artificial Sequence
  ENSG00000136492_16 (sequence is synthesized)
gattcaacagacttactcctggacaaatcagattgatatttcagacaaaaatgggttgttggttctaccaaaaaataagaaacgttcacgacagaaaactgcagttcatgtgctaaactt

SEQ ID NO: 328985 - DNA, 120 bp, Artificial Sequence
  ENSG00000136492_17 (sequence is synthesized)
ttggtgcttaaatccagctgtggccttttcagatattaatggcaaagttcagaccattgttttgacatctggtacattatcaccaatgaaatccttttcgtcagaacttggtgttacatt

SEQ ID NO: 328986 - DNA, 120 bp, Artificial Sequence
  ENSG00000136492_18 (sequence is synthesized)
tactatccagctggaggctaatcatatcattaaaaattcacaggtttgggttggtaccattgggtcaggccccaagggtcggaatctctgtgctaccttccagaatactgaaacatttga

SEQ ID NO: 328987 - DNA, 120 bp, Artificial Sequence
  ENSG00000136492_19 (sequence is synthesized)
gttccaagatgaagtgggagcacttttgttatctgtgtgccagactgtgagccaaggaattttgtgtttcttgccatcttacaagttattagaaaaattaaaagaacgttggctctctac

SEQ ID NO: 328988 - DNA, 120 bp, Artificial Sequence
  ENSG00000136492_20 (sequence is synthesized)
tggtttatggcataatctggagttggtgaagacagtcattgtagaaccacagggaggagaaaaaacaaattttgatgaattactgcaggtgtactatgacgcaatcaaatacaaaggaga

SEQ ID NO: 328989 - DNA, 120 bp, Artificial Sequence
  ENSG00000136492_21 (sequence is synthesized)
gaaagatggagctctcctggtagcagtttgtcgtggtaaagtgagtgagggtctggatttctcagatgacaatgcccgtgctgtcataacaataggaattccttttccaaatgtgaaaga

SEQ ID NO: 328990 - DNA, 120 bp, Artificial Sequence
  ENSG00000136492_22 (sequence is synthesized)
tctacaggttgaactaaaacgacaatacaatgaccaccattcaaaattgagaggtcttctacctggccgtcagtggtatgaaattcaagcatacagggccttaaaccaggcccttggtag

SEQ ID NO: 328991 - DNA, 120 bp, Artificial Sequence
  ENSG00000136492_23 (sequence is synthesized)
atgtattagacacagaaatgattggggagctcttattctagtggatgatcgctttaggaataacccaagtcgctatatatctggactttctaaatgggtacggcagcagattcagcacca

SEQ ID NO: 328992 - DNA, 120 bp, Artificial Sequence
  ENSG00000136492_24 (sequence is synthesized)
ttcaacctttgaaagtgcactggaatccttggctgaattttccaaaaagcatcaaaaagttcttaatgtatccataaaggacagaaccaatatacaggacaatgagtctacacttgaagt

SEQ ID NO: 328993 - DNA, 120 bp, Artificial Sequence
  ENSG00000136492_25 (sequence is synthesized)
tcatctatcaccagaaaattttgtggaagatgaagcaaagatatgtgtccaggaactacagtgtcctaaaattattaccaaaaattcacctctaccaagtagcattatctccagaaagga

SEQ ID NO: 328994 - DNA, 120 bp, Artificial Sequence
  ENSG00000136492_26 (sequence is synthesized)
gaaaaatgatccagtattcctggaagaagcagggaaagcagaaaaaattgtgatttccagatccacaagcccaactttcaacaaacaaacaaagagagttagctggtcaagctttaattc

SEQ ID NO: 328995 - DNA, 120 bp, Artificial Sequence
  ENSG00000136492_27 (sequence is synthesized)
tttgggacagtattttactggtaaaataccgaaggcaacacctgagctcgggtcatcagagaatagtgcctctagtcctccccgtttcaaaacagagaagatggaaagtaaaactgtttt

SEQ ID NO: 328996 - DNA, 120 bp, Artificial Sequence
  ENSG00000136492_28 (sequence is synthesized)
gcccttcactgataaatgtgaatcctcaaatctgacagtaaacacatcgtttggatcatgccctcaatcagaaaccattatttcatcattaaagattgatgccacccttactagaaaaaa

SEQ ID NO: 328997 - DNA, 120 bp, Artificial Sequence
  ENSG00000136492_29 (sequence is synthesized)
tcattctgaacatccgctctgttctgaagaagccctggatccagacattgaattgtctctagtaagtgaagaagataaacagtccacttcaaatagagattttgaaacagaagcagaaga

SEQ ID NO: 328998 - DNA, 120 bp, Artificial Sequence
  ENSG00000136492_30 (sequence is synthesized)
tgaatctatctattttacacctgaactttatgatcctgaagatacagatgaagaaaaaaatgacctagctgaaactgatagaggaaatagattggctaacaattcagattgcattttagc

SEQ ID NO: 328999 - DNA, 120 bp, Artificial Sequence
  ENSG00000136492_31 (sequence is synthesized)
taaagacctttttgaaattagaactataaaagaagtagattcagccagagaagtgaaagctgaggattgcatagatacaaagttgaatggaattctgcatattgaagaaagtaaaattga

SEQ ID NO: 329000 - DNA, 120 bp, Artificial Sequence
  ENSG00000136492_32 (sequence is synthesized)
tgacattgatggtaatgtaaaaacaacttggataaatgaactggaactgggaaaaactcatgaaatagaaataaagaactttaaaccatctccttccaaaaataaaggcatgtttcctgg

SEQ ID NO: 329001 - DNA, 120 bp, Artificial Sequence
  ENSG00000136492_33 (sequence is synthesized)
ttttaagtaataatacttaactctcaagctaagtaaaaatatgtcatcatgcttatgttaaactctgttgtaagtaataatttgtaaattgaataagtggcatactttttaaaaaactat

SEQ ID NO: 329002 - DNA, 76 bp, Artificial Sequence
  ENSG00000136492_34 (sequence is synthesized)
ataagtggcatactttttaaaaaactattttatgttcagaaatgtaaatgttattattcttgagtttttgggatgc

SEQ ID NO: 329003 - DNA, 82 bp, Artificial Sequence
  ENSG00000136492_35 (sequence is synthesized)
cttctctgcctccctaagtttcttgagttttgataaagtaattcatacaaagtactgtcctcaaataagtcttccttagcta

SEQ ID NO: 329004 - DNA, 120 bp, Artificial Sequence
  ENSG00000136492_36 (sequence is synthesized)
tcatacaaagtactgtcctcaaataagtcttccttagctaaatgcaatttaaaattattcaaagatcctagggcacttctagtttcacgtaaatattcatattaggtggttctcttcatc

SEQ ID NO: 329005 - DNA, 120 bp, Artificial Sequence
  ENSG00000136492_37 (sequence is synthesized)
catttgttttcacactgatacataaaaattaacagcagtctaatctagtgacacctcagtcatatttcgctatagattttacctcaaatcagtccaagactttttcagagatcaccattt

SEQ ID NO: 329006 - DNA, 120 bp, Artificial Sequence
  ENSG00000136492_38 (sequence is synthesized)
gtcttgaaaggtttatttcgttattaaactgcctacttataagtaattaagagaaattaagaaagtagtatgcatttttaattgaaattgttttacattctttgtataataaacctaaaa

SEQ ID NO: 329007 - DNA, 120 bp, Artificial Sequence
  ENSG00000136492_39 (sequence is synthesized)
ccaaacatgtcataaacaaattgacgtaaagatataaaatgccaaatgaagtattccaaattttctattctaattatttagcttcaccatcattgtggaaaaaaatactagatcctgctt

SEQ ID NO: 329008 - DNA, 120 bp, Artificial Sequence
  ENSG00000136492_40 (sequence is synthesized)
agtattatatatttttcctagtggatcagtgagtaataagtaccaaacactagactagaaggtaatttctacattgtttagaaagggtgaaacaatttatcccctctggtattgttctag

SEQ ID NO: 329009 - DNA, 120 bp, Artificial Sequence
  ENSG00000136492_41 (sequence is synthesized)
cataagctttagttatacaatgattaagatagaaaacttcatatataaatttgataagcaaacccacatttatagctgcagctaaaatatgtttccttagggcacagtaatcctttctgt

SEQ ID NO: 329010 - DNA, 120 bp, Artificial Sequence
  ENSG00000136492_42 (sequence is synthesized)
gaattttgaccttgtttgtgtttttgtgaatgaagctatatgtctaatcaaaaatgattataaaagaggctcatctctgacatcattccaaaaatacattcattgatctctttttaagaa

SEQ ID NO: 329011 - DNA, 120 bp, Artificial Sequence
  ENSG00000136492_43 (sequence is synthesized)
acatctgttattcactgggcattgggactttttgtgagtaatttgaattgaaattttatgagctatccaagaattctgtatggtctattattttcaagtcaaaatttccagtaaggattt

SEQ ID NO: 329012 - DNA, 120 bp, Artificial Sequence
  ENSG00000136492_44 (sequence is synthesized)
actttacatttcatttggataaatgaatcattatataggtatgtctttgcttccattttgagacatttagatttttacagcctgtttctatagcatttgatgttacaactctaagcgtag

SEQ ID NO: 329013 - DNA, 120 bp, Artificial Sequence
  ENSG00000136492_45 (sequence is synthesized)
ttcaaagacatttaaattgacaagttaccagttaaagaatttagaatatattagatcccatctagtattatatattttttctagttgatcattgagcagtaaataccaaatactcgatta

SEQ ID NO: 329014 - DNA, 120 bp, Artificial Sequence
  ENSG00000136492_46 (sequence is synthesized)
gaaggtaatttttacattgttttgaaagggtgaaacaatttatctcctctggtattattcttaaaccacagatagggatagtagggtagtgaaacgaataaatacctggtagaagacaag

SEQ ID NO: 329015 - DNA, 120 bp, Artificial Sequence
  ENSG00000136492_47 (sequence is synthesized)
agacttgggctctacacctggctctgccactgatttgctaagtcatattggcaatcaccacacccttcagggaattagtttcatctgtaaaatgcagcggttagtactataaaatcatac

SEQ ID NO: 329016 - DNA, 120 bp, Artificial Sequence
  ENSG00000136492_48 (sequence is synthesized)
aaatttctttgtgctttgagaatctataaaggaatgtctgttgatattctgagtcgattttcatttgcttttgttccagaacggttaaaataaagcatattatttcatttaaaaagtaaa

SEQ ID NO: 329017 - DNA, 120 bp, Artificial Sequence
  ENSG00000136492_49 (sequence is synthesized)
tgtaatataaggtgttatcataaaatagtgaaacagtatggtgtactgtaatgggaacaaacttttgtcaggagaccagagcatattttctggttttccactaactggctttgccactta

SEQ ID NO: 329018 - DNA, 120 bp, Artificial Sequence
  ENSG00000136492_50 (sequence is synthesized)
ctagctttgtgatcatgagcaagtcatttgtcctttttgagtcgtaataggaaaaaaaaaatgcctgcctagctatcccttcaggttgggttgtaaaggtcaaaattataaatatcacag

SEQ ID NO: 329019 - DNA, 120 bp, Artificial Sequence
  ENSG00000136492_51 (sequence is synthesized)
cattgtaaagtaccatgtaagtggtagatgttattctaaaggctatataaaaatttggcctaatttttatgtagatacttctatatgaactacttttcctatatagatagttcttatgaa

SEQ ID NO: 329020 - DNA, 120 bp, Artificial Sequence
  ENSG00000136492_52 (sequence is synthesized)
cttatttttaggaggtgagagacatttattttaagtgatgaaaaataatattttaaaatattttgaaataatcatctgtatcagattggcaaactgtggcccatgggccaaatttggcct

SEQ ID NO: 329021 - DNA, 120 bp, Artificial Sequence
  ENSG00000136492_53 (sequence is synthesized)
gctgcctgtttttgtaaataaagtttaatgaaatgtagtcatgcccatttatttacattttagaaacaacagcagagttgagtatttgtgtgtattgcactagaacagcataattgagta

SEQ ID NO: 329022 - DNA, 120 bp, Artificial Sequence
  ENSG00000136492_54 (sequence is synthesized)
gtcgcaacagatacattatgctccacaaagcctaaatattactatctggcctatgacagaaaaggtttgccaaactctggtctattccattggatataatttcagttgttttaattcata

SEQ ID NO: 329023 - DNA, 90 bp, Artificial Sequence
  ENSG00000136492_55 (sequence is synthesized)
tctattccattggatataatttcagttgttttaattcatatatccaaggcgggtggatcatccgtgtggtgaaacaccgtctctactaaa

SEQ ID NO: 329024 - DNA, 77 bp, Artificial Sequence
  ENSG00000136492_56 (sequence is synthesized)
tacaagcaggttgggaggctgaggaacatggtgaaactctgcctctacaaaatacaaaaattagctgggtgtggtgg

SEQ ID NO: 329025 - DNA, 85 bp, Artificial Sequence
  ENSG00000136492_57 (sequence is synthesized)
acagtgagctatgattgcacccctgcactccagcgtgggcaacagaataagactctctctaaaataaaataaaataatctgaaag

SEQ ID NO: 329026 - DNA, 120 bp, Artificial Sequence
  ENSG00000136492_58 (sequence is synthesized)
ctacagttaaccagtgctactgctgagggcactaatggctatgcccaaagctgggtctcctattctaaaatggctgatgctgccttgactacagctactgatgaaacagttgacatctac

SEQ ID NO: 329027 - DNA, 120 bp, Artificial Sequence
  ENSG00000136492_59 (sequence is synthesized)
ccaagaaatctactgtcaccatcaacagcattggtgctgcattccactgaagtagagtgctactgatggcactgctgttggtactggtattgtctccttttaatgtcttatcattttact

SEQ ID NO: 329028 - DNA, 120 bp, Artificial Sequence
  ENSG00000136492_60 (sequence is synthesized)
ctagctctacattattgcactaaggctgctttgttaaagtggaaagaatccttttcccttctttagaccacatcttcttccaatatcttaataaaatacaattttgttccctaaaactaa

SEQ ID NO: 329029 - DNA, 120 bp, Artificial Sequence
  ENSG00000136492_61 (sequence is synthesized)
tcctttccttttcttcagtgaatcggagctcagagcgttgcttcggtttccctccagacagcttttttcttctaactggaggactgcagaaaggggtaacacaaaggggaagaactggag

SEQ ID NO: 329030 - DNA, 120 bp, Artificial Sequence
  ENSG00000136504_0 (sequence is synthesized)
gcagaacgctccagacgctgagaggcaggaggcactagggatcgtccgcaggattgggactgatacagaggccgccacggagcccgccggagccaccgttcctgctgctgccgccgctgc

SEQ ID NO: 329031 - DNA, 120 bp, Artificial Sequence
  ENSG00000136504_1 (sequence is synthesized)
ccgaatcggaaccgtcgggccgcagccgccggcaatgccgcgaaggaagaggaatgcaggcagtagttcagatggaaccgaagattccgatttttctacagatctcgagcacacagacag

SEQ ID NO: 329032 - DNA, 120 bp, Artificial Sequence
  ENSG00000136504_2 (sequence is synthesized)
ttcagaaagtgatggcacatcccgacgatctgctcgagtcacccgctcctcagccaggctaagccagagttctcaagattccagtcctgttcgaaatctgcagtcttttggcactgagga

SEQ ID NO: 329033 - DNA, 120 bp, Artificial Sequence
  ENSG00000136504_3 (sequence is synthesized)
gcctgcttactctaccagaagagtgacccgtagtcagcagcagcctaccccagtgacaccgaaaaaataccctcttcggcagactcgttcatctggttcagaaactgagcaagtggttga

SEQ ID NO: 329034 - DNA, 120 bp, Artificial Sequence
  ENSG00000136504_4 (sequence is synthesized)
tttttcagatagagaaactaaaaatacagctgatcatgatgagtcaccgcctcgaactccaactggaaatgcgccttcttctgagtctgacatagacatctccagccccaatgtatctca

SEQ ID NO: 329035 - DNA, 120 bp, Artificial Sequence
  ENSG00000136504_5 (sequence is synthesized)
cgatgagagcattgccaaggacatgtccctgaaggactcaggcagtgatctctctcatcgccccaagcgccgtcgcttccatgaaagctacaacttcaatatgaagtgtcctacaccagg

SEQ ID NO: 329036 - DNA, 120 bp, Artificial Sequence
  ENSG00000136504_6 (sequence is synthesized)
ctgtaactctctaggacaccttacaggaaaacatgagagacatttctccatctcaggatgcccactgtatcataacctctcagctgacgaatgcaaggtgagagcacagagccgggataa

SEQ ID NO: 329037 - DNA, 120 bp, Artificial Sequence
  ENSG00000136504_7 (sequence is synthesized)
gcagatagaagaaaggatgctgtctcacaggcaagatgacaacaacaggcatgcaaccaggcaccaggcaccaacggagagacagcttcgatataaggaaaaagtggctgaactcaggaa

SEQ ID NO: 329038 - DNA, 120 bp, Artificial Sequence
  ENSG00000136504_8 (sequence is synthesized)
gaaaagaaattctggactgagcaaagaacagaaagagaaatatatggaacacagacagacctatgggaacacacgggaacctcttttagaaaacctgacaagcgagtatgacttggatct

SEQ ID NO: 329039 - DNA, 120 bp, Artificial Sequence
  ENSG00000136504_9 (sequence is synthesized)
tttccgaagagcacaagcccgggcttcagaggatttggagaagttaaggctgcaaggccaaatcacagagggaagcaacatgattaaaacaattgcttttggccgctatgagcttgatac

SEQ ID NO: 329040 - DNA, 120 bp, Artificial Sequence
  ENSG00000136504_10 (sequence is synthesized)
ctggtatcattctccatatcctgaagaatatgcacggctgggacgtctctatatgtgtgaattctgtttaaaatatatgaagagccaaacgatactccgccggcacatggccaaatgtgt

SEQ ID NO: 329041 - DNA, 120 bp, Artificial Sequence
  ENSG00000136504_11 (sequence is synthesized)
gtggaaacacccacctggtgatgagatatatcgcaaaggttcaatctctgtgtttgaagtggatggcaagaaaaacaagatctactgccaaaacctgtgcctgttggccaaactttttct

SEQ ID NO: 329042 - DNA, 120 bp, Artificial Sequence
  ENSG00000136504_12 (sequence is synthesized)
ggaccacaagacattatattatgatgtggagcccttcctgttctatgttatgacagaggcggacaacactggctgtcacctgattggatatttttctaaggaaaagaattcattcctcaa

SEQ ID NO: 329043 - DNA, 120 bp, Artificial Sequence
  ENSG00000136504_13 (sequence is synthesized)
ctacaacgtctcctgtatccttactatgcctcagtacatgagacagggctatggcaagatgcttattgatttcagttatttgctttccaaagtcgaagaaaaagttggctccccagaacg

SEQ ID NO: 329044 - DNA, 120 bp, Artificial Sequence
  ENSG00000136504_14 (sequence is synthesized)
tccactctcagatctggggcttataagctatcgcagttactggaaagaagtacttctccgctacctgcataattttcaaggcaaagagatttctatcaaagaaatcagtcaggagacggc

SEQ ID NO: 329045 - DNA, 120 bp, Artificial Sequence
  ENSG00000136504_15 (sequence is synthesized)
tgtgaatcctgtggacattgtcagcactctgcaagcccttcagatgctcaaatactggaagggaaaacacctagttttaaagagacaggacctgattgatgagtggatagccaaagaggc

SEQ ID NO: 329046 - DNA, 120 bp, Artificial Sequence
  ENSG00000136504_16 (sequence is synthesized)
caaaaggtccaactccaataaaaccatggatcccagctgcttaaaatggacccctcccaagggcacttaaagtgacctgtcattccgagccagcgaaccccagcagtaggaatccgtacc

SEQ ID NO: 329047 - DNA, 120 bp, Artificial Sequence
  ENSG00000136504_17 (sequence is synthesized)
ctagggatctgtctgtcatttctctgttgctcttgtgattggcaagtacagtatcctttgggaaggccatccccctcaggactgtcctggctccgacctttgtgtacactgcagacgctg

SEQ ID NO: 329048 - DNA, 120 bp, Artificial Sequence
  ENSG00000136504_18 (sequence is synthesized)
gttctgaggaactgttgtttcggcctcagtgaggttgcctggatgggatctgtattagacttgagtgcaggtctctcagcactgacccaaggagttctgttatggtactgtacctgtcca

SEQ ID NO: 329049 - DNA, 120 bp, Artificial Sequence
  ENSG00000136504_19 (sequence is synthesized)
gtcactggttctctcctcatgtcctctcgccccatgaggttgtgttgtgtcttctaagcgtggtactagtgcttgccacctggtcaccagacctccaaatatggctgccaccaccaggac

SEQ ID NO: 329050 - DNA, 120 bp, Artificial Sequence
  ENSG00000136504_20 (sequence is synthesized)
ctttccagttactccttatatgtgtgttctatggaggggcagggaaaaggtggcacttgtgagtgtgtgtggattggcagggggtccattcactttgggttccatcttgctttaaatttc

SEQ ID NO: 329051 - DNA, 120 bp, Artificial Sequence
  ENSG00000136504_21 (sequence is synthesized)
ttcattttgattaagagacctctttttgatctgtattgggctaaccagagccaaatacttttgaagagtttcccagggactagtcatggtaatagcatataattgatctgaatgagatgg

SEQ ID NO: 329052 - DNA, 120 bp, Artificial Sequence
  ENSG00000136504_22 (sequence is synthesized)
agagaagaatgaaggggtggtggttctgggtttgatttgagttcacctgtgggcagtgggcagtgggcagtgtcttggtgaaagggaacggatactactttttgcctcaccgtaaagtac

SEQ ID NO: 329053 - DNA, 120 bp, Artificial Sequence
  ENSG00000136504_23 (sequence is synthesized)
tcactagtaaatatttccttctctctttactcccactttttacgtttgcaggtgccaaagtaatgtccacttttccctttcatgctgcatattaactggttaattatactgcagaaacct

SEQ ID NO: 329054 - DNA, 120 bp, Artificial Sequence
  ENSG00000136504_24 (sequence is synthesized)
tttcacctccactagtctgatacagtacatctgtacttccatataccttgcactgattttgtctgagtgccctgggagaagtagaaaatgattgaaagtgacttccgtatctcagcccat

SEQ ID NO: 329055 - DNA, 120 bp, Artificial Sequence
  ENSG00000136504_25 (sequence is synthesized)
gactcagcaaggcagaatggccacccctgccaaagtttgcttctcttttcaacagtgcctcaccctccctctaggattaaagtgcttctgcccttccacgaactcctcctccatttcctt

SEQ ID NO: 329056 - DNA, 120 bp, Artificial Sequence
  ENSG00000136504_26 (sequence is synthesized)
tttgggatttgtcaccatccttctattctctggtcttctatttttggtgttgttcaagtgaaggaagagatgttccctctaatttctctctagcccattataacctgctatcttggggca

SEQ ID NO: 329057 - DNA, 120 bp, Artificial Sequence
  ENSG00000136504_27 (sequence is synthesized)
acttttgatgtatgacatgtcacccttcccaacttggtctcctccaacatgctgtcttcatgtggagccctcaccacaatccctgactccggtcatttgtgcctttctcttgtcatctct

SEQ ID NO: 329058 - DNA, 120 bp, Artificial Sequence
  ENSG00000136504_28 (sequence is synthesized)
gtacactacttatattcactgtgggttgggggagctaattttaagcatgttcagtggcagctcccctccagtttcagtgtcactgttaaaatttatcaaaaagcaacttcactaggggtt

SEQ ID NO: 329059 - DNA, 120 bp, Artificial Sequence
  ENSG00000136504_29 (sequence is synthesized)
ttcttaagggataaaggccttttacagaagctaaacccttccccacatgtggtagaatgtgctcttctatatctactcctcaataaagcatgttctctgctcaagtctgtttcatctggg

SEQ ID NO: 329060 - DNA, 120 bp, Artificial Sequence
  ENSG00000136504_30 (sequence is synthesized)
ggctctcatttatatatgaaaatgatgcacacgatctgctactaatagtaaatgcacttgggatttgctttccctagcagtaaactgttgagggatgtggtttgtggctatggaatgttt

SEQ ID NO: 329061 - DNA, 120 bp, Artificial Sequence
  ENSG00000136504_31 (sequence is synthesized)
ttccctgtgatacaggctgtctgtaaagatcaagggagtgctcactctgaacttctctagatggtggcacaaatttgatctgcctcactttggttccagctaatcagtatacgtagcaat

SEQ ID NO: 329062 - DNA, 120 bp, Artificial Sequence
  ENSG00000136504_32 (sequence is synthesized)
gattagtcagtattacccattctttcactaagtgccattttccactgattttaggggcaaaggaaccaataggaaattaggatatatgggggtacagttgatgcctgtaggagatgggaa

SEQ ID NO: 329063 - DNA, 120 bp, Artificial Sequence
  ENSG00000136504_33 (sequence is synthesized)
cagacattccttctcatctccaagctcattcaccagtattgagcagtgtcacctctaattattgactctctcgcaggttgaaattattctttttgaaaatagctgcattttcatgtaaga

SEQ ID NO: 329064 - DNA, 120 bp, Artificial Sequence
  ENSG00000136504_34 (sequence is synthesized)
tatacccagcacaggaaaagggtggctgagcactaacctccgtatggtggaaaggaggaggctgggaattgtatgtgctggaatggtttcactcactgtgaccagtagtggtgagaaccc

SEQ ID NO: 329065 - DNA, 120 bp, Artificial Sequence
  ENSG00000136504_35 (sequence is synthesized)
atacagttgaagttttttgcacagtcctgatcccaggtctccactcgctttgccatcccactttactccctaaaaataaaaggatttattatctcatttaaacccccacaggtgtggaaa

SEQ ID NO: 329066 - DNA, 120 bp, Artificial Sequence
  ENSG00000136504_36 (sequence is synthesized)
cccacaggtgtggaaacagagtttcacttgccttggcaactttgcatgagactatcccatttcattccgtttttttttttttgagtcagagtctggctctgttgcccaggttggagtgca

SEQ ID NO: 329067 - DNA, 86 bp, Artificial Sequence
  ENSG00000136504_37 (sequence is synthesized)
ttttttttttttttttttttttaaaaaaagacagtctcactctatcatccagtccgtctgcctcctggattccagtgattctcctg

SEQ ID NO: 329068 - DNA, 75 bp, Artificial Sequence
  ENSG00000136504_38 (sequence is synthesized)
gacagggttttgccatgttggccaggccagtctcaaactcttgacctcaagtgattctgcacccagcttttaact

SEQ ID NO: 329069 - DNA, 120 bp, Artificial Sequence
  ENSG00000136504_39 (sequence is synthesized)
cgtgagcctctgcacccagcttttaactccctcttatctgcataacagaagcttagctgcttaagctcctttattagaagagcaaaagtctgaaattattcctgaaacctgctcaatgga

SEQ ID NO: 329070 - DNA, 120 bp, Artificial Sequence
  ENSG00000136504_40 (sequence is synthesized)
agtacctactctattggttgcttcccatatggttgtcactgtaccttcatactgcctcatttgaccctcatattagccctgtacagtagatgggtacactggtttgccaaaggagacctg

SEQ ID NO: 329071 - DNA, 120 bp, Artificial Sequence
  ENSG00000136504_41 (sequence is synthesized)
gaatccaaggtggaagtaagcagcaaagccagaaacttcaattctggtctgtctaccttgatagcctgcaccctcccctctaccgttttcttccactatttttgattccttaatgatgaa

SEQ ID NO: 329072 - DNA, 120 bp, Artificial Sequence
  ENSG00000136504_42 (sequence is synthesized)
tcatcctctcccttctagttggatttgtttctaatggcttccattacaaggataataatgaaactggtgaaaactttcaggcaaaaggattttctttttatattttttcttattattttt

SEQ ID NO: 329073 - DNA, 120 bp, Artificial Sequence
  ENSG00000136504_43 (sequence is synthesized)
tattttttcttattattttttaattattaaccaaattaactcattacagtaaaaaggactgatttttaagccagctgtgatagctctgtaatagtctgtaatctcagcactttgggaggc

SEQ ID NO: 329074 - DNA, 120 bp, Artificial Sequence
  ENSG00000136504_44 (sequence is synthesized)
caaggcgggcagatcgcttgagtccaggaattcgagactagcctgggcagcatggtgaaaccccagctctacaaaaaatagaaaaatcagacgtgggcacatgcctgtagtctcagctac

SEQ ID NO: 329075 - DNA, 120 bp, Artificial Sequence
  ENSG00000136504_45 (sequence is synthesized)
ttggctttagaagcagcaagtttagggggctacagagctaaaccaggaagcaaaagatgtgcctcattctggcattgtttctgatttaggaataaactgttcagtaagcactgtcccttt

SEQ ID NO: 329076 - DNA, 120 bp, Artificial Sequence
  ENSG00000136504_46 (sequence is synthesized)
acttccatggttttcttcattcctcaccacagcacagtaaggtggatattatagtcttcttctagatgaaaaattgaggctcatagtggtcttgctgctgtgtcatagcaatagaatgag

SEQ ID NO: 329077 - DNA, 120 bp, Artificial Sequence
  ENSG00000136504_47 (sequence is synthesized)
agagccttgcttccctgagtccaaatcccatacttttggcattgttatgaggtctggtcacctgatgcttccatgctattttcccatttcttatctggggataatgagtcatattaagta

SEQ ID NO: 329078 - DNA, 62 bp, Artificial Sequence
  ENSG00000136504_48 (sequence is synthesized)
ttcccatttcttatctggggataatgagtcatattaagtaatttttttttttgagacggagt

SEQ ID NO: 329079 - DNA, 90 bp, Artificial Sequence
  ENSG00000136504_49 (sequence is synthesized)
tttttttttttttaagacgacgtctcactctgtcacctatgctggagtgcagtggcgtgatctaggctcattgcaacctctgcctcccag

SEQ ID NO: 329080 - DNA, 120 bp, Artificial Sequence
  ENSG00000136504_50 (sequence is synthesized)
aacagtgtggtataacctttaaatgacaaggtgatgcttttgacttgtcctcaactttgatttgtactgatttgtccctatagttctgggtggggtgggtcaaaacaaagtctcgagctg

SEQ ID NO: 329081 - DNA, 120 bp, Artificial Sequence
  ENSG00000136504_51 (sequence is synthesized)
taccaggatcaagcagcacagctcagccatgatccttttaccacttttttcttctgtccttgagactctaattaaagcactggatttttaaaaatcacccttgtaaatatgcacacattt

SEQ ID NO: 329082 - DNA, 120 bp, Artificial Sequence
  ENSG00000136504_52 (sequence is synthesized)
gtctatagttgaggaaattgtgccgttgaagtccattcttggacatggagttaagaaaccctggtttgagaaaaagccccagtgagacagcaggaatccttttaccatacaaccctcaac

SEQ ID NO: 329083 - DNA, 120 bp, Artificial Sequence
  ENSG00000136504_53 (sequence is synthesized)
tagtttagtgtgctcaagctcaaataaccaatcccatcaagtgaaaagaatggcagcagggagaaggcctggctcactgaggctctcagcattagtttcctctacctcttgtgtctcaca

SEQ ID NO: 329084 - DNA, 120 bp, Artificial Sequence
  ENSG00000136504_54 (sequence is synthesized)
ggtgcacatatgtacagcatatcaaagtgttgaatgtcatgagaataaaatatgaaaactactttgctgaatgatagtatgtgatgtgtgctaggacttctagaagccaccctttgcttt

SEQ ID NO: 329085 - DNA, 120 bp, Artificial Sequence
  ENSG00000136504_55 (sequence is synthesized)
gctgttcattgggatcatggaatcggacctcagctggttttgcctcagcactttctttcacaaaattatgtgtgactgcctcctccagactgtttcctgctgataggggcagtttaatag

SEQ ID NO: 329086 - DNA, 120 bp, Artificial Sequence
  ENSG00000136504_56 (sequence is synthesized)
ccttcttcctgtgtggtatctgcaacaaaatcccaatgaatgtcaccaagaaggaaacaaaggattgcccagcgatgagaaatgtccctggtgccaaaacatcagtttgcccctaacctc

SEQ ID NO: 329087 - DNA, 120 bp, Artificial Sequence
  ENSG00000136504_57 (sequence is synthesized)
ttgtgcaatacctttaagtccaggtcatgttgttaccatttgggggtttgcggatttgtttacttgtgcccaagaatggagaaaataacctgtactattgtacaactctggctccatggc

SEQ ID NO: 329088 - DNA, 120 bp, Artificial Sequence
  ENSG00000136504_58 (sequence is synthesized)
tcctcacaaatgttccatgtgagatataaacatctttatcctcgacaagtcatgttcattccaagaaaccagtctttgttcttaattggacatttgtttctgcaaacagcttaccataca

SEQ ID NO: 329089 - DNA, 120 bp, Artificial Sequence
  ENSG00000136504_59 (sequence is synthesized)
ttcaattccaaagttatcagaaacctacactcttatctcacaaatttagaggtgtggtagatcatctccaaagatggccaccaacagttgctctcatcctctgtgcacgtgctatttcca

SEQ ID NO: 329090 - DNA, 120 bp, Artificial Sequence
  ENSG00000136504_60 (sequence is synthesized)
ataaggtctatttttttctacagtgagggctgaacttgtgacttgttttgactaataggatatggaagtgatattttggcagcttccacttttgctcttgaaaataagctgacacgtttc

SEQ ID NO: 329091 - DNA, 120 bp, Artificial Sequence
  ENSG00000136504_61 (sequence is synthesized)
caaacgagaagcttgggctaaattactgaatggtgagagacgatgcataggagaaccaaggtgctctagtcacagcactaaaagcccagacttgtgtctcttgaaggtttcaaccccgcc

SEQ ID NO: 329092 - DNA, 120 bp, Artificial Sequence
  ENSG00000136504_62 (sequence is synthesized)
agactcccagctgaacgcaccctcatgagtggcccttgctggtaccacatgacactaaagacatctagctgagtcctgttaacccagagaattatgagaatactgttttaaccacacgtt

SEQ ID NO: 329093 - DNA, 120 bp, Artificial Sequence
  ENSG00000136504_63 (sequence is synthesized)
ttggaatggtttgatacatggcaatggagaagtgaaacaaggggacttcggaaactaaagggctggaattcagtttgccttgtaggttgattggaagccagatgtgcctagaggaaggct

SEQ ID NO: 329094 - DNA, 120 bp, Artificial Sequence
  ENSG00000136504_64 (sequence is synthesized)
accaccttgtgcaattccaggggacactgtttatgttccgtgtaaatggcagcctcagttcacctcatttggttatttatcgtgtcttcgctgtcagtcaaattgcttctgagataactg

SEQ ID NO: 329095 - DNA, 120 bp, Artificial Sequence
  ENSG00000136504_65 (sequence is synthesized)
gctggccttggaattcttagccacctccttaagcggatcaggaaaactgaagaatatccttctgtatgtatgtatgtatttattgattgatcgatttatgagacagggtctccttctgtc

SEQ ID NO: 329096 - DNA, 120 bp, Artificial Sequence
  ENSG00000136504_66 (sequence is synthesized)
acccaggctggagtgcagtggtacgatcacggctcactgctgcgtcgccttcccaggctccagctatcctcccacctcaacctccagagtagttgagaccacaggcgtgcactaccacgc

SEQ ID NO: 329097 - DNA, 89 bp, Artificial Sequence
  ENSG00000136504_67 (sequence is synthesized)
gcactaccacgcccggctacgccgtgttgcccaggctggttcaagcggagctcaagcaatcagcctgcctcggcctcccaaagtgttgg

SEQ ID NO: 329098 - DNA, 120 bp, Artificial Sequence
  ENSG00000136504_68 (sequence is synthesized)
gagccgctgcgcccaaccttcttctgctgtcgagatactgctcatcacctgcctgctccagaattcatgtggcttctcattgctcaatggattaagttcatgtttatcctggctttcaag

SEQ ID NO: 329099 - DNA, 120 bp, Artificial Sequence
  ENSG00000136504_69 (sequence is synthesized)
tctttccgtaagctgactcaacctacatagctttcatcattcccttacacataacctcaacgtgcaacaggattagtctattattccctttcttgtgtttactgagaaagcctccacttc

SEQ ID NO: 329100 - DNA, 120 bp, Artificial Sequence
  ENSG00000136504_70 (sequence is synthesized)
aacgttccatgaagtgtgttccattaaataccaaagtataggcaaaaagttctgtggtcaaataaatttggaaaacacagagtgtttccaaagttagtatcaggccaggcatggtgggag

SEQ ID NO: 329101 - DNA, 76 bp, Artificial Sequence
  ENSG00000136504_71 (sequence is synthesized)
aatccctacaaaaaaattagttgggcatggtggtgtgcacccgtagtgccagctactcaggaggctgaggtaggag

SEQ ID NO: 329102 - DNA, 73 bp, Artificial Sequence
  ENSG00000136504_72 (sequence is synthesized)
gtgtgcacccgtagtagtcaaggctgtggtcagctgagatcccaccagtgtgctccagcctgggtgacagagc

SEQ ID NO: 329103 - DNA, 120 bp, Artificial Sequence
  ENSG00000136504_73 (sequence is synthesized)
ttgtttttaaatcggggagtatctaccaaagctccttccaaatctcaggattctgggaatttgtagtgtctctgggtttgttgtactttatttatttgtactgtcatgtaaatttttaca

SEQ ID NO: 329104 - DNA, 120 bp, Artificial Sequence
  ENSG00000136504_74 (sequence is synthesized)
tgaaggaacagcgttctgatccacaaagtgtatcttttcagagatagaagaatgaagctcccttctggagctgtgggagcatttcctctccagaatcactggggaacacagacagaccta

SEQ ID NO: 329105 - DNA, 120 bp, Artificial Sequence
  ENSG00000136504_75 (sequence is synthesized)
ttaaaggagttgggctacacgccccttttactgggtctcatttctgtagctggcagtgatgcctgtgttgccttatccttatcagaaggttttgataagctcctgtctcaaatttggatg

SEQ ID NO: 329106 - DNA, 120 bp, Artificial Sequence
  ENSG00000136504_76 (sequence is synthesized)
acacaagttaagcagctccagttaagcagctttatgttgtacagcatttctgtcatttgatgtttttcttaggtgggaggaaattgcccatctgtagaggaatcttcacaaatgctgtct

SEQ ID NO: 329107 - DNA, 120 bp, Artificial Sequence
  ENSG00000136504_77 (sequence is synthesized)
ctatcaaaggttggtttttgactccttggaatggttgattgttacccaagaagttaactctactgggtattgtgtttcccctgaatgtgagaacggaaggcccactgaatatggaccact

SEQ ID NO: 329108 - DNA, 120 bp, Artificial Sequence
  ENSG00000136504_78 (sequence is synthesized)
gcggagaccctcactaaagctgcctaggaatccaaagcatttggcccctgggaatggttattaattggcttctcaaatccagagttgccaacactttaattcttataaaagtcaagaagc

SEQ ID NO: 329109 - DNA, 120 bp, Artificial Sequence
  ENSG00000136504_79 (sequence is synthesized)
gagtgctggaattacaggcgtgagccaccttgcccggccaccttctttcatttttaagtcacctgagaagagatgaactgggaagtgacataagaggggaactatatatctttgaatagg

SEQ ID NO: 329110 - DNA, 120 bp, Artificial Sequence
  ENSG00000136504_80 (sequence is synthesized)
ttttttctccatcacaccttgtgaaggacatagaactcttctcttgccaaaatacacaatgtgtttcattaataattatggtatgtttgtgaattttaggcctttatctgtttaggaatc

SEQ ID NO: 329111 - DNA, 120 bp, Artificial Sequence
  ENSG00000136504_81 (sequence is synthesized)
tggatatttagtaaatgaatgaacaagtaggaaaaacctgaacattgtcattctgcctaatacacattgaacattgaaggagtacaggactcctccttaatgagtaggaggtacagagga

SEQ ID NO: 329112 - DNA, 120 bp, Artificial Sequence
  ENSG00000136504_82 (sequence is synthesized)
tgataaagtaagctctttaggattatcccagtttgagacttttaaacagcacatacatgcatgaggcttaaaatctggtccttgatgctagggatttcacttttgtagggacttgtctag

SEQ ID NO: 329113 - DNA, 120 bp, Artificial Sequence
  ENSG00000136504_83 (sequence is synthesized)
ctattctctggatgggaggtggagcctacaacagagtgggaagggctgaaatcaaaggcttaaaagggaagtttcctttgtagaatctctttcctggaaaggattcttgtagtgactgcc

SEQ ID NO: 329114 - DNA, 120 bp, Artificial Sequence
  ENSG00000136504_84 (sequence is synthesized)
tcaattcaacaaatgtctattgactactttctgcgcggtggttgctgtggattcagaaattaattagatgtgatccctggcttaagggtgtcacagcccgataggagaaaacagacatga

SEQ ID NO: 329115 - DNA, 120 bp, Artificial Sequence
  ENSG00000136504_85 (sequence is synthesized)
ataatcttagaaggatctagtaagttctcagcttggaggtgtatacaaggtgttgctggaaggaagtgaaggagcagttaagtctgccctggagtacaatgggagatatattggtaaaag

SEQ ID NO: 329116 - DNA, 120 bp, Artificial Sequence
  ENSG00000136504_86 (sequence is synthesized)
ccacagagaagagctgagttccaggatcaagccaggaaggaataagtctcacgtcaaggctttaaatatctcgaggaatgcaggcagtagttcagatggaaccgaagattccgatttttc

SEQ ID NO: 329117 - DNA, 120 bp, Artificial Sequence
  ENSG00000136514_0 (sequence is synthesized)
ctcttcctgagaaacgagcaaacctgaaagctactctctcagcttcagagggaaaaaatggttgtagatttctggacttgggagcagacatttcaagaactaatccaagaggcaaaaccc

SEQ ID NO: 329118 - DNA, 120 bp, Artificial Sequence
  ENSG00000136514_1 (sequence is synthesized)
cgggccacatggacgctgaagttggatggcaaccttcagctagactgcctggctcaagggtggaagcaataccaacagagagcatttggctggttccggtgttcctcctgccagcgaagt

SEQ ID NO: 329119 - DNA, 120 bp, Artificial Sequence
  ENSG00000136514_2 (sequence is synthesized)
tgggcttccgcccaagtgcagattctgtgccacacgtactgggagcactggacatcccagggtcaggtgcgtatgaggctctttggccaaaggtgccagaagtgctcctggtcccaatat

SEQ ID NO: 329120 - DNA, 120 bp, Artificial Sequence
  ENSG00000136514_3 (sequence is synthesized)
gagatgcctgagttctcctcggatagcaccatgaggattctgagcaacctggtgcagcatatactgaagaaatactatggaaatggcacgaggaagtctccagaaatgccagtaatcctg

SEQ ID NO: 329121 - DNA, 120 bp, Artificial Sequence
  ENSG00000136514_4 (sequence is synthesized)
gaagtgtccctggaaggatcccatgacacagccaattgtgaggcatgcactttgggcatctgtggacagggcttaaaaagctgcatgacaaagccgtccaaatccctactcccccaccta

SEQ ID NO: 329122 - DNA, 120 bp, Artificial Sequence
  ENSG00000136514_5 (sequence is synthesized)
aagactgggaattcctcacctggaattggtgctgtgtacctcgcaaaccaagccaagaaccagtcagctgaggcaaaagaggctaaggggagtgggtatgagaaattagggcccagtcga

SEQ ID NO: 329123 - DNA, 120 bp, Artificial Sequence
  ENSG00000136514_6 (sequence is synthesized)
gctttacatcagaatgatgaaaataggcttgccactttctcttattttaattccatggtagtcaatgaactggctgccactttaatataactgaaaattcattttgagaccaagcaggat

SEQ ID NO: 329124 - DNA, 120 bp, Artificial Sequence
  ENSG00000136514_7 (sequence is synthesized)
caagtttgtagaataaacactggtttcctagccatcctctgaaaacagtatgaaacatgaccaagtacataatggatttagtaataaatattgtcgaattgctaaaaagtcttcaatcat

SEQ ID NO: 329125 - DNA, 120 bp, Artificial Sequence
  ENSG00000136514_8 (sequence is synthesized)
tcattcactaagtcactcagtgatatcaatatacttagctcagaaagtgtgggaggctgaataatggtgtctcccaacatatgcatgacttaatccccagaacctgtaaacatgttactt

SEQ ID NO: 329126 - DNA, 120 bp, Artificial Sequence
  ENSG00000136514_9 (sequence is synthesized)
tacatggtagaatggactttgcggatgtaattaaggaccttgaaatggttagattatttcatattgtccgggtggataagaaccaggattttgtaacagggaggcaacaagctcaaaatc

SEQ ID NO: 329127 - DNA, 120 bp, Artificial Sequence
  ENSG00000136514_10 (sequence is synthesized)
agaaaaaagagatttgtcaatggaacaagaggttgaagtgctttgaagttggaggaagaggtcacaggcaaaaaagtacaggcagcctttagaaacccaaaaggacaaaggaacagattc

SEQ ID NO: 329128 - DNA, 120 bp, Artificial Sequence
  ENSG00000136514_11 (sequence is synthesized)
tcccctggagtctgcagaaggaaccagccctgcctgcacatggctttagcccagtgacactgattttggacatctgaccttcagaactgcttgctcataaacttgtcttgttttaatgca

SEQ ID NO: 329129 - DNA, 120 bp, Artificial Sequence
  ENSG00000136518_0 (sequence is synthesized)
aagtgtggctgagctccggggtgtgtggacgccgctttgttgcctgaggtgggtggcggtggaagttaagggagtcaggggctatcgctcctcgagactcgcagtcgcggccactgcagt

SEQ ID NO: 329130 - DNA, 120 bp, Artificial Sequence
  ENSG00000136518_1 (sequence is synthesized)
cacttcgccagttagcccttagggtaggagtcgcgccggcagcagccatgagcggcggcgtgtacgggggagatgaagttggagcccttgtttttgacattggatcctatactgtgagag

SEQ ID NO: 329131 - DNA, 120 bp, Artificial Sequence
  ENSG00000136518_2 (sequence is synthesized)
ctggttatgctggtgaggactgccccaaggtggattttcctacagctattggtatggtggtagaaagagatgacggaagcacattaatggaaatagatggcgataaaggcaaacaaggcg

SEQ ID NO: 329132 - DNA, 120 bp, Artificial Sequence
  ENSG00000136518_3 (sequence is synthesized)
gtcccacctactacatagatactaatgctctgcgtgttccgagggagaatatggaggccatttcacctctaaaaaatgggatggttgaagactgggatagtttccaagctattttggatc

SEQ ID NO: 329133 - DNA, 120 bp, Artificial Sequence
  ENSG00000136518_4 (sequence is synthesized)
atacctacaaaatgcatgtcaaatcagaagccagtctccatcctgttctcatgtcagaggcaccgtggaatactagagcaaagagagagaaactgacagagttaatgtttgaacactaca

SEQ ID NO: 329134 - DNA, 120 bp, Artificial Sequence
  ENSG00000136518_5 (sequence is synthesized)
acatccctgccttcttcctttgcaaaactgcagttttgacagcatttgctaatggtcgttctactgggctgattttggacagtggagccactcataccactgcaattccagtccacgatg

SEQ ID NO: 329135 - DNA, 120 bp, Artificial Sequence
  ENSG00000136518_6 (sequence is synthesized)
gctatgtccttcaacaaggcattgtgaaatcccctcttgctggagactttattactatgcagtgcagagaactcttccaagaaatgaatattgaattggttcctccatatatgattgcat

SEQ ID NO: 329136 - DNA, 120 bp, Artificial Sequence
  ENSG00000136518_7 (sequence is synthesized)
tgcctcaggttacgaggtcttggcacaattatatgtgtaattgtgttatccaggattttcaagcttcggtacttcaagtgtcagattcaacttatgatgaacaagtggctgcacagatgc

SEQ ID NO: 329137 - DNA, 120 bp, Artificial Sequence
  ENSG00000136518_8 (sequence is synthesized)
caactgttcattatgaattccccaatggctacaattgtgattttggtgcagagcggctaaagattccagaaggattatttgacccttccaatgtaaaggggttatcaggaaacacaatgt

SEQ ID NO: 329138 - DNA, 120 bp, Artificial Sequence
  ENSG00000136518_9 (sequence is synthesized)
taggagtcagtcatgttgtcaccacaagtgttgggatgtgtgatattgacatcagaccaggtctctatggcagtgtaatagtggcaggaggaaacacactaatacagagttttactgaca

SEQ ID NO: 329139 - DNA, 120 bp, Artificial Sequence
  ENSG00000136518_10 (sequence is synthesized)
ggttgaatagagagctgtctcagaaaactcctccaagtatgcggttgaaattgattgcaaataatacaacagtggaacggaggtttagctcatggattggcggctccattctagcctctt

SEQ ID NO: 329140 - DNA, 120 bp, Artificial Sequence
  ENSG00000136518_11 (sequence is synthesized)
tgggtacctttcaacagatgtggatttccaagcaagaatatgaagaaggagggaagcagtgtgtagaaagaaaatgcccttgagaaagagttcccaagcttctaccttccttttgtcacc

SEQ ID NO: 329141 - DNA, 120 bp, Artificial Sequence
  ENSG00000136518_12 (sequence is synthesized)
ttacgtttcatagctttagtatactcaggaaaagaatgaccatcttttgtagaatgtttatacatttttgcatatttcaatttccacttaaattttttaaagctttaactggctctataa

SEQ ID NO: 329142 - DNA, 120 bp, Artificial Sequence
  ENSG00000136518_13 (sequence is synthesized)
attaagtttgtgctttccttgaaatgcacttattcttattacaagcattttataattttgtataaatgtctattttctctaaatattttgctttcagtaaaatgctttccaactctgttt

SEQ ID NO: 329143 - DNA, 120 bp, Artificial Sequence
  ENSG00000136518_14 (sequence is synthesized)
agtgtattaattaccagtggattggtagaactgctttttattgactagtaaaagttactgcctatgctttttaccttaggcttacagaattaaataaaaattagccattccagaaatata

SEQ ID NO: 329144 - DNA, 120 bp, Artificial Sequence
  ENSG00000136518_15 (sequence is synthesized)
ttgcaaaactgcagttttgacagcctttattcatcatctacttcactaaacaggataaccttcagggaaaaggcagttttggtgcaccattgtgtgtctactgtgttaaaggaattttag

SEQ ID NO: 329145 - DNA, 120 bp, Artificial Sequence
  ENSG00000136518_16 (sequence is synthesized)
tgaagttgatctgtaaaatcagtaggttctgtatactaaagtattaattgttaagtcatagaaacaatttctcaaaagatgctatattcatcttcaactatgcattatttccaagttact

SEQ ID NO: 329146 - DNA, 120 bp, Artificial Sequence
  ENSG00000136518_17 (sequence is synthesized)
ctcttgaagtatgtacgatactaatgaatatgataactctgggagaagacatacgccaattattgcttgttccgaagttgtttttttcccttttctcttgctttttagctattcatcttt

SEQ ID NO: 329147 - DNA, 120 bp, Artificial Sequence
  ENSG00000136518_18 (sequence is synthesized)
gaaggcaatgttttaaccagttggcttaggtgaattgaaagattgccattttaaaatctccttcccttccaatatcatagaaaactggaaattggctgtaaattcattctccttcaaatt

SEQ ID NO: 329148 - DNA, 120 bp, Artificial Sequence
  ENSG00000136518_19 (sequence is synthesized)
tagtcagtcatcaaatcctgcctgttcttccctgctatttgcttctctctgtcctactgccacagcattaggtggaagctatttccaggattactgaagcacgtcctcttgtctgcccat

SEQ ID NO: 329149 - DNA, 120 bp, Artificial Sequence
  ENSG00000136518_20 (sequence is synthesized)
atttccaggattactgaagcacgtcctcttgtctgcccattctttacgctgttgctctaataatctttctatttttatttatttatttatttggtagagatggagtttcgccatgttgcc

SEQ ID NO: 329150 - DNA, 64 bp, Artificial Sequence
  ENSG00000136518_21 (sequence is synthesized)
ataatctttctaaagtgctagtctgctttaagccagaatcgtcttctacatttcttcctttatt

SEQ ID NO: 329151 - DNA, 120 bp, Artificial Sequence
  ENSG00000136518_22 (sequence is synthesized)
gtatccttgaaagagtaatacctttcctcttgaactttattcatcatctacttcactaaacaggataaccttcagggaaaaggcagttttggtgcaccattgtgtgtctactgtgttaaa

SEQ ID NO: 329152 - DNA, 120 bp, Artificial Sequence
  ENSG00000136518_23 (sequence is synthesized)
ggagtgtacatgttatattttagatacaaagtagtagcttcctataagttgaacatcaaccatggttttttgttttgttttgttttttattccacaaactgatttccagacactgagaat

SEQ ID NO: 329153 - DNA, 120 bp, Artificial Sequence
  ENSG00000136518_24 (sequence is synthesized)
ataaaatgatgagtagcactattaaagcatatcagtttctgaataagattttttttaagtatgttaaaaatctttagtatataatgtatatttaaaactgatgcatggctttatttatgt

SEQ ID NO: 329154 - DNA, 120 bp, Artificial Sequence
  ENSG00000136518_25 (sequence is synthesized)
gttgaaggatagttcagttcattctacctgaaaaagttattcacataaatacacccacagaggaaattcgttcaaggaagtttggacttactgccctcttagccttgtttcatctgtttc

SEQ ID NO: 329155 - DNA, 120 bp, Artificial Sequence
  ENSG00000136518_26 (sequence is synthesized)
cctcgctgtgttctcttgcttcttggtcttcccacatgctcctactcttgcccatattcccttccccagattttactattgaatatctcaggaataggtttcccttttacatcaccatct

SEQ ID NO: 329156 - DNA, 120 bp, Artificial Sequence
  ENSG00000136518_27 (sequence is synthesized)
aggcctggaccctagtgattggctgataggaggagccagcaagtgtggctgagctccggggtgtgtggacgccgctttgttgcctgagatgaagttggagcccttgtttttgacattgga

SEQ ID NO: 329157 - DNA, 120 bp, Artificial Sequence
  ENSG00000136521_0 (sequence is synthesized)
cttcctcctgcccgtagtagccatggcggccatgagtttgttgcggcgggtttcggttactgcggtggcagctctgtctggccggccccttggcactcgcctcggatttgggggcttcct

SEQ ID NO: 329158 - DNA, 120 bp, Artificial Sequence
  ENSG00000136521_1 (sequence is synthesized)
cactcgtggctttccgaaggctgctgctcctgttcgacacagtggagaccatgggaaaagactatttgtcatcagaccttctagattctatgacaggcgttttttgaagttattgagatt

SEQ ID NO: 329159 - DNA, 120 bp, Artificial Sequence
  ENSG00000136521_2 (sequence is synthesized)
ctacattgcattgactgggattccagtagcaattttcataactctggtgaatgtattcattggtcaagctgaactagcagaaattccagaaggctatgtcccagaacactgggaatatta

SEQ ID NO: 329160 - DNA, 120 bp, Artificial Sequence
  ENSG00000136521_3 (sequence is synthesized)
taagcatcccatatcaagatggattgcccgtaatttctatgatagtcctgaaaagatatatgaaagaacaatggccgtccttcagattgaagctgaaaaggctgaattacgggtaaagga

SEQ ID NO: 329161 - DNA, 120 bp, Artificial Sequence
  ENSG00000136521_4 (sequence is synthesized)
gctggaagtgcgaaaattgatgcatgtgagaggagatggaccctggtattactatgagacaattgacaaggaacttattgatcattctccgaaagcaactcctgacaattaagcattttt

SEQ ID NO: 329162 - DNA, 120 bp, Artificial Sequence
  ENSG00000136521_5 (sequence is synthesized)
ttctccaaatacaaagtatattctctttattggaaaataaattaataaatatattctgtatttttgctctccgtgaaaaacaaaagagcctctgacattactgtctctcagtgttggttc

SEQ ID NO: 329163 - DNA, 120 bp, Artificial Sequence
  ENSG00000136521_6 (sequence is synthesized)
agattgaggcttttgtttgaggagtttggcttccagtccccaaagaaggtttaaaatgtactaataaaaactggagaaataggaatttgtgaactcctaaaattgtagcaactttgaaag

SEQ ID NO: 329164 - DNA, 120 bp, Artificial Sequence
  ENSG00000136521_7 (sequence is synthesized)
gttagtgttttatttacctgacaaatggaagttatagaagtctaataatgttaagcaccagtaattatagtattttgtacaaatgcctgtactgtagatgtctgtattattgaggggcaa

SEQ ID NO: 329165 - DNA, 120 bp, Artificial Sequence
  ENSG00000136521_8 (sequence is synthesized)
ctcaggattttaagttccataaagtattgaaccaactctaaaatgttaactccttaataaacagattctcagtaaacaaattttaaagtttataatgctttcatggtttttttttttgcc

SEQ ID NO: 329166 - DNA, 79 bp, Artificial Sequence
  ENSG00000136521_9 (sequence is synthesized)
tttcctagatgcaatctctgggatcccttagagtccttttttggggaagtagttgcactaggtaatgtgattcctgcag

SEQ ID NO: 329167 - DNA, 120 bp, Artificial Sequence
  ENSG00000136521_10 (sequence is synthesized)
tttggggaagtagttgcactaggtaatgtgattcctgcagagattataaaatgtgagtaaaagctaaaaatgactcatttattaagcatttattgtctgctagacactatattaaataac

SEQ ID NO: 329168 - DNA, 82 bp, Artificial Sequence
  ENSG00000136521_11 (sequence is synthesized)
ttctttttttttttttttttttttgacgaaatcttgcactgtcacccaggctagagtgcagtgccgtgatctcgctcagcct

SEQ ID NO: 329169 - DNA, 120 bp, Artificial Sequence
  ENSG00000136521_12 (sequence is synthesized)
tgaacttctgacctcaggtgattggcctgtctccacttcccaaagtgctgattacaggcctgagccactgcacccaacattattttcaaaatgacaagaggtagtatttagtacctgagg

SEQ ID NO: 329170 - DNA, 120 bp, Artificial Sequence
  ENSG00000136521_13 (sequence is synthesized)
ctcagatgttaaacacaaactcagtatttacaaaaataaacatttaaaacatttacacttcaacttccaaaatggctttttaccataaacattcaggattttcaaacctgtaacagctta

SEQ ID NO: 329171 - DNA, 120 bp, Artificial Sequence
  ENSG00000136521_14 (sequence is synthesized)
tcaatgcatctcatcttagaagtatgttttacattcttcataaaaataaaaatgaacccaggcttcctaagattcaggccagtgggtctccacttaaggccaaatggagaaataattttt

SEQ ID NO: 329172 - DNA, 120 bp, Artificial Sequence
  ENSG00000136521_15 (sequence is synthesized)
tgctgcctaaacacacaagtgaattgaaaagccacaggccattcattcaacaaataactttattatttttattgataatgtacttgtaatgtgctattttgatacatgtatgcaaagtat

SEQ ID NO: 329173 - DNA, 120 bp, Artificial Sequence
  ENSG00000136521_16 (sequence is synthesized)
ataatttacctactgtactatcaaatactagaacttattccttgtatctaaatgtattcttgtaaccattaactaacttttctgaatttcctactctccccttcccttcccagccttgta

SEQ ID NO: 329174 - DNA, 120 bp, Artificial Sequence
  ENSG00000136521_17 (sequence is synthesized)
accacctttctactctgcctccatgagacccattttttaatctcccacatatgagtgagaacattcaatatttgtctttctaggcttggcttatttcacttacattaatgacctccagtt

SEQ ID NO: 329175 - DNA, 120 bp, Artificial Sequence
  ENSG00000136521_18 (sequence is synthesized)
ccatccatgttgctacaaatgacagaatcccattctttttcataatattgtccatacataccacattttctatatccatttatctgttgatggacacaggttgcaaagggattgctggat

SEQ ID NO: 329176 - DNA, 120 bp, Artificial Sequence
  ENSG00000136521_19 (sequence is synthesized)
tgtatgataattctatgtgtagtttcttgaggaaccttcatggtgttcttcatagtggttgtactactgtacattcctaccaatggtggatgagcgttcccctttctccacatcctcaca

SEQ ID NO: 329177 - DNA, 120 bp, Artificial Sequence
  ENSG00000136521_20 (sequence is synthesized)
agcatttgttattttttcttttttttcaaatgaacattttaactggggtgagatatcttaatgtggtattggtttacatttccctaattatggttgagcattttttcacatatctaatgg

SEQ ID NO: 329178 - DNA, 120 bp, Artificial Sequence
  ENSG00000136521_21 (sequence is synthesized)
ccattcatatgtcttcctttgagaaatgtctatacagatctctggccctttttttaaattttttttttttttgaattggggtcacccagtctggaggtgatctgggcttccacatcctgg

SEQ ID NO: 329179 - DNA, 120 bp, Artificial Sequence
  ENSG00000136521_22 (sequence is synthesized)
gctcaagtgatcattccacctcaggatgacccaaatagctaggaccaaaggcgagtgccaccatgctcagctaatttttttgtattttttgtagcgactgggtttcaccatgttgcccag

SEQ ID NO: 329180 - DNA, 89 bp, Artificial Sequence
  ENSG00000136521_23 (sequence is synthesized)
gtcttgaactcctgtgctcaagtgatccgctcaccttggcctctcaaagtgcaggtactttaggcgtgcctggcctttttgtccatttt

SEQ ID NO: 329181 - DNA, 120 bp, Artificial Sequence
  ENSG00000136521_24 (sequence is synthesized)
ggtgtgagccactgcgcccagcctgtccattttttaatcaggttatgggttttttgctattgaattgtttgagttccttatatattctggttatgaatcccttgttagatggtgtgttag

SEQ ID NO: 329182 - DNA, 120 bp, Artificial Sequence
  ENSG00000136521_25 (sequence is synthesized)
gccattcttgtgttgctataaagaaaatcctgagtctgggtaatttataaagaaaaaaggtgtaaatggctcatagttctgcagactgtacaggaagcatggcaccagcattgcttggct

SEQ ID NO: 329183 - DNA, 120 bp, Artificial Sequence
  ENSG00000136521_26 (sequence is synthesized)
tctggggaggcctcaaggaactttcactcatagcagaaagcaaagcaggagcaggcacatcacatggcaagagagcaagagagagaggtggaggagatgccacacactgttttaaacaac

SEQ ID NO: 329184 - DNA, 120 bp, Artificial Sequence
  ENSG00000136521_27 (sequence is synthesized)
gttttaaacaaccagatctctcaggaactcattgttgttagaaaaggaattaaaagaaatcaaagagtgtgtaagcagaaactcagttgtacgtaagaaaacccaattccccctgagaaa

SEQ ID NO: 329185 - DNA, 72 bp, Artificial Sequence
  ENSG00000136521_28 (sequence is synthesized)
gagaaagagctggagtcctttaaaaattcactgcctgtttttctggtggctagtgagtgttagctctcctcc

SEQ ID NO: 329186 - DNA, 68 bp, Artificial Sequence
  ENSG00000136521_29 (sequence is synthesized)
aagtaagaaatgatgtaatgcatgtcttgactgaataactgccccacgaaatgcttaaaagctaactt

SEQ ID NO: 329187 - DNA, 74 bp, Artificial Sequence
  ENSG00000136521_30 (sequence is synthesized)
atgcttccccctgcacagatctccccctgccccacgaaatgcttaaaaggactgggccggagcacctaaataat

SEQ ID NO: 329188 - DNA, 120 bp, Artificial Sequence
  ENSG00000136521_31 (sequence is synthesized)
gcttcctcactcgtggctttccgaaggctgctgcccctggtaaccaccattctgctgtctttatgattttgactactctatttctcatgtcaagctgaactagcagaaattccagaaggc

SEQ ID NO: 329189 - DNA, 120 bp, Artificial Sequence
  ENSG00000136521_32 (sequence is synthesized)
ttgacaattacatactgttacatgccttgtcaacgcactagttaatgtcttaattcagcaattatgatatagtcaggttttttgttttgttttttttgagacagcatctcgctctgttgc

SEQ ID NO: 329190 - DNA, 90 bp, Artificial Sequence
  ENSG00000136521_33 (sequence is synthesized)
gcgatttcagctcactgcaacttctgcctcccgcacgtcgctgggatcacaggtgtgtgctgccactcctggctaatttttgtattttta

SEQ ID NO: 329191 - DNA, 120 bp, Artificial Sequence
  ENSG00000136521_34 (sequence is synthesized)
tctgatttgttattgaatttctctttaaattagtgaagctttccttcttcacaaaaggatttacactaaatggaggtaaaacttgaaccattcctttcttctgaagattatggcgtttcg

SEQ ID NO: 329192 - DNA, 120 bp, Artificial Sequence
  ENSG00000136521_35 (sequence is synthesized)
aaatagaatctgtgttcctataactaaaatattctttaaattaccaaagaacttgttgaaagacttgcttaaataaaggagctacattattttgggatatgattttatatttatatgttg

SEQ ID NO: 329193 - DNA, 120 bp, Artificial Sequence
  ENSG00000136521_36 (sequence is synthesized)
ttcaggaacatttatttcagagagtaacagggatctatagtgcaatcttaatttagcaataatataattacattgcttatttagaatgctgactatatttctgtctcaaggctctatacg

SEQ ID NO: 329194 - DNA, 120 bp, Artificial Sequence
  ENSG00000136521_37 (sequence is synthesized)
aacaaagtagaggcttagaaaatgggagattgtctggaccatctgccacggtagataaagctctgaatcatcatttgagtactgaccttaaaactttctcttgcccttccgttgtgttta

SEQ ID NO: 329195 - DNA, 120 bp, Artificial Sequence
  ENSG00000136521_38 (sequence is synthesized)
caaatcctatttagtggtagaaatcaccctgatgcttttagacttttgttcttaacatattattttctttcatggcattgctttaccaaaaagtaaaatcacagaaatcaataatttggt

SEQ ID NO: 329196 - DNA, 120 bp, Artificial Sequence
  ENSG00000136521_39 (sequence is synthesized)
actgtatgcccaatttggcaagtttattttataagaaatatgaggaaatcatatcatgaggatgatttgtgtgtggggagagttacgaaatggtcatgagaaacacttttttttttatct

SEQ ID NO: 329197 - DNA, 120 bp, Artificial Sequence
  ENSG00000136521_40 (sequence is synthesized)
atctttaaaatgcggacaaaaatagtatccacctcatctgttaaaattattttatatataggtatattagttacatagtagatgttactggtttatctaactgaaatgatcattttaaag

SEQ ID NO: 329198 - DNA, 120 bp, Artificial Sequence
  ENSG00000136522_0 (sequence is synthesized)
agttatgcgaaaacatggctgcggccggtttggcccttctttgtaggagagtttcatccgccctgaaatcttcccgatcgttaataactcctcaggtccctgcctgcacagggttttttc

SEQ ID NO: 329199 - DNA, 120 bp, Artificial Sequence
  ENSG00000136522_1 (sequence is synthesized)
ttagtttgttgcctaagagtacaccaaatgtgacatcctttcaccaatatagattacttcataccacattgtcaaggaaaggactagaagaattttttgatgacccaaaaaactgggggc

SEQ ID NO: 329200 - DNA, 120 bp, Artificial Sequence
  ENSG00000136522_2 (sequence is synthesized)
aagaaaaagtaaaatctggagcagcatggacctgtcagcaactaaggaacaaaagtaatgaagatttacacaaactttggtatgtcttactgaaagaaagaaacatgcttctaaccctag

SEQ ID NO: 329201 - DNA, 120 bp, Artificial Sequence
  ENSG00000136522_3 (sequence is synthesized)
agcaggaggccaagcggcagagattgccaatgccaagtccagagcggttagataaggtagtagattccatggatgcattagataaagttgtccaggaaagagaagatgccctaaggcttc

SEQ ID NO: 329202 - DNA, 120 bp, Artificial Sequence
  ENSG00000136522_4 (sequence is synthesized)
ttcagactggtcaagaaagagctagacctggtgcttggagaagagacatctttggaagaatcatctggcacaagttcaagcagtgggttataccttggcacctaaataaaagatacaata

SEQ ID NO: 329203 - DNA, 120 bp, Artificial Sequence
  ENSG00000136522_5 (sequence is synthesized)
ttttctcagactggaacgtgagaaacgagcccgcatcaaagcacggaaggaaaatttagagagaaagaaagcaaaaattcttttaaaaaagtttccacatcttgctgaagcccaaaagtc

SEQ ID NO: 329204 - DNA, 120 bp, Artificial Sequence
  ENSG00000136522_6 (sequence is synthesized)
aagtcttgtctaagatgtctgaactattaaatttaccattttgtttttcttgaatagtctgtgtacaggagtaaatatgttaagtggtttataaagaaattctgtttttagtcaagtgac

SEQ ID NO: 329205 - DNA, 120 bp, Artificial Sequence
  ENSG00000136522_7 (sequence is synthesized)
tttactaatcagttgttctaagtgtgaatatggcatgctaattagctaatttggtagaagctaatttgcttctaaaaatcaggtataaagttcagatgagattcccactttataaattct

SEQ ID NO: 329206 - DNA, 120 bp, Artificial Sequence
  ENSG00000136522_8 (sequence is synthesized)
gacatttaagcaggctttaaatgtcacctgctaccttagagtgtgaaggtgatggtaactgccacagcaaaggcaataccgtagtttttgaatttgaataatagttttacctctgttgtt

SEQ ID NO: 329207 - DNA, 120 bp, Artificial Sequence
  ENSG00000136522_9 (sequence is synthesized)
aataggctatgaagaggatgtgggtattgctgttaataaacggaggactttgattcaaaataatgagaaatacatttagtccttaaagtagtaatcacagtgcacaacagtccaaaatat

SEQ ID NO: 329208 - DNA, 120 bp, Artificial Sequence
  ENSG00000136522_10 (sequence is synthesized)
atttctggaatggctaatttttatttaattctgtaagcctaaggtaaaaagcataggcagtaacttttactagtcaataaaaagcagttctaccaatccactggtaattaatacactaaa

SEQ ID NO: 329209 - DNA, 120 bp, Artificial Sequence
  ENSG00000136522_11 (sequence is synthesized)
ccagttatgcgaaaacatggctgcggccggtttggcccttctttgtaggagagtttcatccgccctgaaatcttcccgatcgttaataactcctcaggtccctgcctgcacaggattact

SEQ ID NO: 329210 - DNA, 120 bp, Artificial Sequence
  ENSG00000136522_12 (sequence is synthesized)
cgcgttttgccagttatgcgaaaacatggctgcggccggtttggcccttctttgtaggagagtttcatccgccctgaaatcttcccgatcgttaataactcctcaggtccctgcctgcac

SEQ ID NO: 329211 - DNA, 120 bp, Artificial Sequence
  ENSG00000136527_0 (sequence is synthesized)
agagcccgtgcggaggcggtgcggagcatttcggctctgagcggctgggcgaccggcgcgtcgtgcggggctgcggcggagcctccttaaggaaggtgcaagaggttggcagcttcgatt

SEQ ID NO: 329212 - DNA, 120 bp, Artificial Sequence
  ENSG00000136527_1 (sequence is synthesized)
gaagcacatcgaccggcgacagcagccaggagtcatgagcgacagcggcgagcagaactacggcgagcgggaatcccgttctgcttccagaagtggaagtgctcacggatcggggaaatc

SEQ ID NO: 329213 - DNA, 120 bp, Artificial Sequence
  ENSG00000136527_2 (sequence is synthesized)
tgcaaggcatacccctgcaaggtctcgctccaaggaagattccaggcgttccagatcaaagtccaggtcccgatctgaatctaggtctagatccagaagaagctcccgaaggcattatac

SEQ ID NO: 329214 - DNA, 120 bp, Artificial Sequence
  ENSG00000136527_3 (sequence is synthesized)
ccggtcacggtctcgctcccgctcccatagacgatcacgtagcaggtcttacagtcgagattatcgtagacggcacagccacagccattctcccatgtctactcgcaggcgtcatgttgg

SEQ ID NO: 329215 - DNA, 120 bp, Artificial Sequence
  ENSG00000136527_4 (sequence is synthesized)
gaatcgggcaaatcctgatcctaactgttgtcttggagtatttgggctgagcttgtacaccacagaaagagatctaagagaagtgttctctaaatatggtcccattgccgatgtgtctat

SEQ ID NO: 329216 - DNA, 120 bp, Artificial Sequence
  ENSG00000136527_5 (sequence is synthesized)
tgtatatgaccagcagtctaggcgttcaagaggatttgcctttgtatattttgaaaatgtagatgatgccaaggaagctaaagaacgtgccaatggaatggagcttgatgggcgtaggat

SEQ ID NO: 329217 - DNA, 120 bp, Artificial Sequence
  ENSG00000136527_6 (sequence is synthesized)
cagagttgatttctctataacaaaaagaccacatacgccaacaccaggaatttacatggggagacctacctatggcagctctcgccgtcgggattactatgacagaggatatgatcgggg

SEQ ID NO: 329218 - DNA, 120 bp, Artificial Sequence
  ENSG00000136527_7 (sequence is synthesized)
ctatgatgatcgggactactatagcagatcatacagaggaggaggtggaggaggaggaggatggagagctgcccaagacagggatcagatttatagaaggcggtcaccttctccttacta

SEQ ID NO: 329219 - DNA, 120 bp, Artificial Sequence
  ENSG00000136527_8 (sequence is synthesized)
tagtcgtggaggatacagatcacgttccagatctcgatcatactcacctcgtcgctattaaagcatgaagactttctgaaacctgccctagagctgggatattgtttgtgggcaatattt

SEQ ID NO: 329220 - DNA, 120 bp, Artificial Sequence
  ENSG00000136527_9 (sequence is synthesized)
tttattgtctcttgtttaaaaagtgaacagtgcctagtgaagttaggtgacttttacaccttttacgatgactacttttggtggagttgaaatgctgttttcattctgcatttgtgtagt

SEQ ID NO: 329221 - DNA, 120 bp, Artificial Sequence
  ENSG00000136527_10 (sequence is synthesized)
ttggtgctttgttccaagttaagtgttttcagaaaagtatgttttgcatgtatttttttacagtctaaattttgactgctgagaagtttctattgtacaaaacttcatttaaaaggtttt

SEQ ID NO: 329222 - DNA, 120 bp, Artificial Sequence
  ENSG00000136527_11 (sequence is synthesized)
tctactgaatccagggtattctgaagatcgaagcctgtgtaaaatgctaccaaatggcaaaaagcaacaataaacagtttgatttttacttttctttctaacatatcaatgcttagcaga

SEQ ID NO: 329223 - DNA, 120 bp, Artificial Sequence
  ENSG00000136527_12 (sequence is synthesized)
actattcagattgtcagtagtaaatttaaagacaaatgcccgttttcctccagtccatgaaacataccatacttatatacctgcaactaagtgtttaaaattatgctctgtaactctgta

SEQ ID NO: 329224 - DNA, 120 bp, Artificial Sequence
  ENSG00000136527_13 (sequence is synthesized)
ctgctagtattagaactaaaaatcttaaaatacagccagtgcttaatgcttatatcaatgtggatttgtcggcttttatgtaatctgtaatatgtatagcaggaaatacgaagagttaca

SEQ ID NO: 329225 - DNA, 120 bp, Artificial Sequence
  ENSG00000136527_14 (sequence is synthesized)
cagtgtatgccttaaaaggctgtttcttaaaggtgttacaaggggataatggtatttcaactagttatcagcaagtgacaatacattccaccacaaatacactcttgttcttctagcttt

SEQ ID NO: 329226 - DNA, 120 bp, Artificial Sequence
  ENSG00000136527_15 (sequence is synthesized)
tagactatatgaaaaaaccgggtgcttcaaagtacatgataagggaacactatacctgtcatggatgaactgaagactttgcctgttcattttttaaatattattttcaggtcctttgct

SEQ ID NO: 329227 - DNA, 120 bp, Artificial Sequence
  ENSG00000136527_16 (sequence is synthesized)
taccaaaggaggcccaatttcactcaaatgttttgagaactgtgtttaaataaacgcaaatgaaaagaaaaatgttggtgcagctgttcacaaagaagtgttcttgttctattataatta

SEQ ID NO: 329228 - DNA, 120 bp, Artificial Sequence
  ENSG00000136527_17 (sequence is synthesized)
attcctggaaaattcagagtgcataactaggtattagagtgatctccatttggggatggagttacagtaaataactagactgcgggtactttaatacatgttcttattattttgcattta

SEQ ID NO: 329229 - DNA, 120 bp, Artificial Sequence
  ENSG00000136527_18 (sequence is synthesized)
agtaattttcatgaccaattgtagggatgttgctacaggtgggttattttgttgccttgctaacctttatcgcatctaggtattagtatgtttcaggtactttgggaagaactttacata

SEQ ID NO: 329230 - DNA, 120 bp, Artificial Sequence
  ENSG00000136527_19 (sequence is synthesized)
taatctttagcaatgaaatgatgtagagtaacttaccttagttcaaatagctgtttaagtggcaatgccacgatctgaattgaacctaggtgatcttagtccacagttctcttgatcatg

SEQ ID NO: 329231 - DNA, 120 bp, Artificial Sequence
  ENSG00000136527_20 (sequence is synthesized)
atgtctcaaatctgggtacctgggtgatggaaaataccagtaatggagcataggcagtattggcaggtcttaatttgtaaaacttactgtccagggtgttttcagtgtttgccaacttgt

SEQ ID NO: 329232 - DNA, 120 bp, Artificial Sequence
  ENSG00000136527_21 (sequence is synthesized)
ggtaaattaatatgcttagagaactacccttaggtttgtttctgataagcatgtggaaacaacttagtatatgcctgatgggttatttcaaattgttctcaatgagttttgaaacaagaa

SEQ ID NO: 329233 - DNA, 120 bp, Artificial Sequence
  ENSG00000136527_22 (sequence is synthesized)
tttgtagtatttatatataaagttgagttttagggtgtggtcccagagggggttgtgttatggatggatacattaaaggctgagaaacctggttttatcgtggtagtatatacaggcatc

SEQ ID NO: 329234 - DNA, 120 bp, Artificial Sequence
  ENSG00000136527_23 (sequence is synthesized)
ctttcctgaagtaactacattctccaccattttctccccaaccaaacctctccccatcagttaactgatggcttgcgagttcacactcctgataatctcgaacataaccctcggtttcta

SEQ ID NO: 329235 - DNA, 120 bp, Artificial Sequence
  ENSG00000136527_24 (sequence is synthesized)
tcctaaagcctgagttttagccctttagttgtgtagccatcctttatcctgctgattgaaagtttccttttttaggctagtttgagttgttttctggcttttagatttgaaagaatttta

SEQ ID NO: 329236 - DNA, 120 bp, Artificial Sequence
  ENSG00000136527_25 (sequence is synthesized)
gccatttgacatggctacaaagagtgttaacaggcaaaagactgaggaaaatttggaattttaccaagttgagatagactgagaagtagtgagacaaagtggtagtcttttgatgtgctg

SEQ ID NO: 329237 - DNA, 120 bp, Artificial Sequence
  ENSG00000136527_26 (sequence is synthesized)
taatgctagtcgccagtttcatgaaagggaggcagcagttacccgtaggtaacccctaggtaactgctgccatgggcagctgaatcagacaaaagccatgggaaaggataaatttgagtc

SEQ ID NO: 329238 - DNA, 120 bp, Artificial Sequence
  ENSG00000136527_27 (sequence is synthesized)
ttaaagttactgcctcaaggcaaagggacttggaggcttttatatgccaatacaaacaatccatttcttatagctgtagggctgagactactaaaaccaaatgtaaagttcatttggaag

SEQ ID NO: 329239 - DNA, 120 bp, Artificial Sequence
  ENSG00000136527_28 (sequence is synthesized)
attgctaagttaaatagttttatactaggcttttgtgaaacttctcaggaaatcaacagggtcccagcaagtggaaataaggctgtgtcaaaagatttgtagacctgggagcaggggttt

SEQ ID NO: 329240 - DNA, 120 bp, Artificial Sequence
  ENSG00000136527_29 (sequence is synthesized)
ccgatctcctggccatggattgcctgagctccgccgcctgtcagatcagcaacagcagattttcatagcaggaatcctattgtgaagtgcgcttgagagggatctagcttgcacatttcc

SEQ ID NO: 329241 - DNA, 120 bp, Artificial Sequence
  ENSG00000136527_30 (sequence is synthesized)
ttatggaaatctaactacatgttagagaatgctcaaggtctgcaatgtttacattgttgcccctacataaggaatatatgccttaagataaaactaatagctcttagccctcttacacca

SEQ ID NO: 329242 - DNA, 120 bp, Artificial Sequence
  ENSG00000136527_31 (sequence is synthesized)
ttgactaggattccaattctgcaaggcccaggaggagaaattgagaattagaagtttcaccgagaagaaataaaaagatttggtttgcattatcaaaatttctgtaaattatatggaaat

SEQ ID NO: 329243 - DNA, 120 bp, Artificial Sequence
  ENSG00000136527_32 (sequence is synthesized)
tttgaggatggattaggctggatttattagcagtggacacgcctccaatattccttcagcatgccatctcagtggattttgattggctcttgtaggattggacttaatgctagcttatgc

SEQ ID NO: 329244 - DNA, 120 bp, Artificial Sequence
  ENSG00000136527_33 (sequence is synthesized)
caaatgtcatcaaaaagccagaatgctactacagtaatgtaaaggattattgtatatagtgtaaaggattattatgtgtaatctttaatatataatgtaaagacttaaaagtgacaagaa

SEQ ID NO: 329245 - DNA, 120 bp, Artificial Sequence
  ENSG00000136527_34 (sequence is synthesized)
atgatgccaaggaagtaagtaaaagcccgttcctttgtaaaccatcagttctattgttaacgccaagttatcagtgaccaattgctaggataaggacaaggacaagtcagtaatacttcg

SEQ ID NO: 329246 - DNA, 120 bp, Artificial Sequence
  ENSG00000136527_35 (sequence is synthesized)
aactttttctccaacctcttgtggagactcaagatacatgcagaataacaaaattttgtataacttggggaagttggtcctaccacctgctttattagttgccacctattggggtcaact

SEQ ID NO: 329247 - DNA, 120 bp, Artificial Sequence
  ENSG00000136527_36 (sequence is synthesized)
ataccccaattccgccaggatatgtagtcagtgtttacactgggttcacattctagagtcaaaaataaccaaaagcaaagttatgatgcagaaggaaaacattgttccttttttggctag

SEQ ID NO: 329248 - DNA, 120 bp, Artificial Sequence
  ENSG00000136527_37 (sequence is synthesized)
tgaatgatgtcatatttggattttgatttgttttgaggcagaatatagagtcaagatttgaaatgtggggctagaccccatttaagaaattcagattttaggtacattaaggatggtagc

SEQ ID NO: 329249 - DNA, 120 bp, Artificial Sequence
  ENSG00000136527_38 (sequence is synthesized)
taaagtcatctccaagtatagagaagaggaagaactgagaaacacttaatgacaaacggagtttcactcttcttgcctgggctggagtgcaatggcgcgatctccggctcaccgcaacct

SEQ ID NO: 329250 - DNA, 65 bp, Artificial Sequence
  ENSG00000136527_39 (sequence is synthesized)
attctcctgcctcagcctcctgagcaggtgggattacaggcttcagggtggtctcgaactcccaa

SEQ ID NO: 329251 - DNA, 120 bp, Artificial Sequence
  ENSG00000136527_40 (sequence is synthesized)
tgcccccctcggcctcccaaagtgctgggggattacaggtgtgagccaccatgcgcggccgcccatttcctaattaaatttttgcagtaggatcatagctctcggaaaatagcataaatt

SEQ ID NO: 329252 - DNA, 120 bp, Artificial Sequence
  ENSG00000136527_41 (sequence is synthesized)
aggatcatagctctcggaaaatagcataaattttatcttaatctctagtgccagaaactgcctgggcgtaaacactagcttgaacatctgaactagaagatagcatagtattggaattag

SEQ ID NO: 329253 - DNA, 120 bp, Artificial Sequence
  ENSG00000136527_42 (sequence is synthesized)
aaacttaaattctatttaggtgaaaggatgtttcctcaaattatgaacaaactttaatgtgtttgaaacggggtatttttattttttaaatgtatgctgttaatacatactttgggaaaa

SEQ ID NO: 329254 - DNA, 120 bp, Artificial Sequence
  ENSG00000136527_43 (sequence is synthesized)
ggaactatatgtacttaaggctgtgcttcagtcttagcttttggcttccagagaagggctaagaaaacttccaagggttaaataatgtgttcaggtttcagtcataggatctcagtcgca

SEQ ID NO: 329255 - DNA, 120 bp, Artificial Sequence
  ENSG00000136527_44 (sequence is synthesized)
ttgttttaacccaacagcagccagatgaatgagttggggccctattccaataaaagattattttggggcattggaatttggattttgtgtgtttcttcacttgtcatgaaatactgtttt

SEQ ID NO: 329256 - DNA, 120 bp, Artificial Sequence
  ENSG00000136527_45 (sequence is synthesized)
tccccctagttatttaaatttttagcttatgggttatacagaaacagccagctggccagatttgacctacaggctatagtttgccaattgtgtgctgctttggagctggaaatactgtca

SEQ ID NO: 329257 - DNA, 120 bp, Artificial Sequence
  ENSG00000136527_46 (sequence is synthesized)
ggatcatagttaggtaaaataattgtttcaagtttttatgagtagcttttacaaatgaacatttagtagagggaacaacacatttgtaagttgtagaccttacgttctggctaacattaa

SEQ ID NO: 329258 - DNA, 120 bp, Artificial Sequence
  ENSG00000136527_47 (sequence is synthesized)
gataacttaatgcacctaactgaaatgtccagtgggatcttactcatagccacaggataattagtggctttgttcaggatgtatgtaacaatttatttaccttttgaaggctaaagaacg

SEQ ID NO: 329259 - DNA, 120 bp, Artificial Sequence
  ENSG00000136527_48 (sequence is synthesized)
aatactgacacaatggtgtaactccttagcccatcaaaaaaaaaaacttccgactgcattactatactgtagtatagtattagtacattagttcaaaatatagttctatgctaacattaa

SEQ ID NO: 329260 - DNA, 120 bp, Artificial Sequence
  ENSG00000136527_49 (sequence is synthesized)
ctctttccaggctgcataaacctagttagatgctctcctgactttcccatttaatttgaagctaatttcttttgggtgttgttaaggcattttttacatttcatgaaaggcttcaaatga

SEQ ID NO: 329261 - DNA, 120 bp, Artificial Sequence
  ENSG00000136527_50 (sequence is synthesized)
gatgatatttattgtgatttcactgtataatccaagtggtttaggaggagggtgcagggggggacttaatgtttttagagtagagtagaatttttccctagtaaattgttagtttatgaa

SEQ ID NO: 329262 - DNA, 120 bp, Artificial Sequence
  ENSG00000136527_51 (sequence is synthesized)
ataaatggaatctttaggtaaattcatcacagcatctggaatgttagcaacatatggctcactctttattctttcctcttgtcatctttttttgagacagggcctcactctgtcgcccag

SEQ ID NO: 329263 - DNA, 89 bp, Artificial Sequence
  ENSG00000136527_52 (sequence is synthesized)
taccttgcaggcttaagcgatccggaggcatgccaccacacccagtaatttgttatatttttgtagagacatggggtctcactgtgttg

SEQ ID NO: 329264 - DNA, 120 bp, Artificial Sequence
  ENSG00000136527_53 (sequence is synthesized)
ttgttatatttttgtagagacatggggtctcactgtgttgcccaggctagtctcaaaactcctgagcttcaagcagtccaccagccttggcctcccagagtgtttggattacaagcatga

SEQ ID NO: 329265 - DNA, 120 bp, Artificial Sequence
  ENSG00000136527_54 (sequence is synthesized)
gccactgcgcctggccaactcttgtttcttacgattgcaagctgtttatgacctgtaaaatggtttggtacgcatcccctcaggcttcgtttatgtacttacttgtgtattgtgtttctg

SEQ ID NO: 329266 - DNA, 120 bp, Artificial Sequence
  ENSG00000136527_55 (sequence is synthesized)
aaaaaatcgaaccatacatgctcatctttttggcaattcagagcattctattgaatggaaggtgtgtcaacattacaattttttctagctgatagacacagtgtggttccagttatcctt

SEQ ID NO: 329267 - DNA, 120 bp, Artificial Sequence
  ENSG00000136527_56 (sequence is synthesized)
gtatgtcatgttatgaatatgtgaatttttcttagaataaattcatagaaggaaagatgccaagttgcttttcgccagcacgagtgcttgtttacctacttaattctaaggttgaaattt

SEQ ID NO: 329268 - DNA, 120 bp, Artificial Sequence
  ENSG00000136527_57 (sequence is synthesized)
tttcttttgcattctttcctacccattcccaaaaatacttgtagtacttgctgtaattttgtaatttctaagcagtgtttggtctaatcattatgtacttttcttgttagtgacattttg

SEQ ID NO: 329269 - DNA, 120 bp, Artificial Sequence
  ENSG00000136527_58 (sequence is synthesized)
tattaaatgtcttagcaaacttttgattaagattttatatgattcctcagagtattttaggaagaaattttcagtgatgaagcgtgagtttcctgcgtaattttggagcccaaactgctt

SEQ ID NO: 329270 - DNA, 120 bp, Artificial Sequence
  ENSG00000136527_59 (sequence is synthesized)
aatttggtttgaactaatcaagccttgcgtttacatactcggatgagcatagagtttttagtttttgatgtttttcccgaagccgattgactccaatgtcacgagtgttttagatttttt

SEQ ID NO: 329271 - DNA, 120 bp, Artificial Sequence
  ENSG00000136527_60 (sequence is synthesized)
tttaagttcttgctttcttgggtaagaaagttgggattgagctcaaaagttgttaaaaagtcgtgacttctgatcattggcagttgaatctgttataacagtcattggtgtttggactgc

SEQ ID NO: 329272 - DNA, 120 bp, Artificial Sequence
  ENSG00000136527_61 (sequence is synthesized)
atgctttaatattgtggatattgtctggaactagaacgtgacattttcaagctgacattacaggtgattttataaggttaatgttgaagaaggaaaatgcggaagtcgtcatttgacaag

SEQ ID NO: 329273 - DNA, 120 bp, Artificial Sequence
  ENSG00000136527_62 (sequence is synthesized)
ttttataaatgagtatttgaagctcaggaataagtgaagctgaaatttgaaaaaataaaagaaagaatgcatgctaattatcagaccagaagtcccacttgtagaatattgagcaatttg

SEQ ID NO: 329274 - DNA, 120 bp, Artificial Sequence
  ENSG00000136527_63 (sequence is synthesized)
tgtgaagtggggaagatgaaagaagtcagaatttgaaacggaagaatgaagaaaagaaataaaaatgaagttaagataagaagtaatctggaatcagaaagcactacgctaagaatcccg

SEQ ID NO: 329275 - DNA, 120 bp, Artificial Sequence
  ENSG00000136527_64 (sequence is synthesized)
agaagccgcgcggcaacgcggacccgacccgcagcgggccgcgcttcgtaaggccgcgtggtggggtgcaaggggacagacgacgttcttttgggtctttgggccggtgtttaggttaac

SEQ ID NO: 329276 - DNA, 120 bp, Artificial Sequence
  ENSG00000136527_65 (sequence is synthesized)
gaaggaccgtctttgcctccacggaaaggacggagtctgggatgtctttggggcctcttaagatggaaactaatccaaggccgactaagttctgggcccgttaggtggaggggattgcgt

SEQ ID NO: 329277 - DNA, 120 bp, Artificial Sequence
  ENSG00000136527_66 (sequence is synthesized)
gagggctttgtgtttggcctaaatgaagcgcttttctctgatgccgaaagggcttcccaggcaaaaatctgtatcagtattctattaggacagaccacaaagtcgttaagatgattttgt

SEQ ID NO: 329278 - DNA, 120 bp, Artificial Sequence
  ENSG00000136527_67 (sequence is synthesized)
ggacatcgcatttccacgggattgtgaaggagaaattggcgggcaaccatttacggcgccgttatttcctttgttttgaggcgttctaatacttagaaccacagcgtgtgttggctacag

SEQ ID NO: 329279 - DNA, 120 bp, Artificial Sequence
  ENSG00000136527_68 (sequence is synthesized)
ttttctttcccttaagtttccacctcttaaaggtgttcagtgagggttgattgaattgcgggaacaagacagttctagggtttaaacagcatacgtagctggtctgtggggctctgggta

SEQ ID NO: 329280 - DNA, 120 bp, Artificial Sequence
  ENSG00000136527_69 (sequence is synthesized)
ttggattcggaaagcattgaatgatgcgaacatacgaggcttgctagaattaagaggaatctgttagaagggtgatagaaaagcaccatagaaattgatttttgaggctgtgggaataat

SEQ ID NO: 329281 - DNA, 120 bp, Artificial Sequence
  ENSG00000136527_70 (sequence is synthesized)
cttttgttattaaacagaaaaattcaattattgggtacctttctactcttcaaaaatactaaatgactggcttctgactagagctctcgattgaatacacgtgaagaatgcttgagaatg

SEQ ID NO: 329282 - DNA, 120 bp, Artificial Sequence
  ENSG00000136527_71 (sequence is synthesized)
gaaaattgcccagagttcattagtatattttacgtgagaagggaaacaattgaaactaggttccagtttgagactcggctcaagagaaatttgaaattttctgatgggttatctttttac

SEQ ID NO: 329283 - DNA, 120 bp, Artificial Sequence
  ENSG00000136527_72 (sequence is synthesized)
tagtaaaagtacactgtgtttttcgcaatctttgaattgtagagggaggttaacttaatgtgttaaaaattgagttttttttcttacataagagtcttcgctttctggccgagatctcta

SEQ ID NO: 329284 - DNA, 120 bp, Artificial Sequence
  ENSG00000136527_73 (sequence is synthesized)
aacttttacgttgtgaaatacttccatattgttgtgtttggtgtttgcgtgtttgtgttccaattggaacctttaagggttggaatacacctgaatcaaacacgtgtctaggcttccaaa

SEQ ID NO: 329285 - DNA, 120 bp, Artificial Sequence
  ENSG00000136527_74 (sequence is synthesized)
gcaagcttgggaaaaccataaagctcaatggaacagcttgatcttagacatgcctgtggtgtaaatgatgcttctctggagccagaaaaatgagtgttattcaactccaggcttctgaac

SEQ ID NO: 329286 - DNA, 120 bp, Artificial Sequence
  ENSG00000136527_75 (sequence is synthesized)
tgggtcttaatgtaaatcactaatctcttcaaatcagtggaattctcccttatttatctgtctctaatccagacaaccccacccctctgtgccccaccttttccagtgactgtaggagtt

SEQ ID NO: 329287 - DNA, 120 bp, Artificial Sequence
  ENSG00000136527_76 (sequence is synthesized)
tgttgttgtgtccctcccctttaaggttgggtgtgtgggataaattattctcagtttgatcactcaatagaatacatttgggtgaatataatgacatttaaagaactggtgtgtccctca

SEQ ID NO: 329288 - DNA, 120 bp, Artificial Sequence
  ENSG00000136527_77 (sequence is synthesized)
tccctcgttggtctgtgggatttattttttcccccctctcaaaggtaatagattaacactaaaatctgtctataggggtctaattagcaggcttaacctgatctggccaaaccactttca

SEQ ID NO: 329289 - DNA, 120 bp, Artificial Sequence
  ENSG00000136527_78 (sequence is synthesized)
aaaattgcttgcattttgtaaaggggttgactagcaccatttctttgtaaaaagaggcactcctggcctttaagtcacaattacaagaagttgaataaaaagttgatgaagtgcagggta

SEQ ID NO: 329290 - DNA, 120 bp, Artificial Sequence
  ENSG00000136527_79 (sequence is synthesized)
atctttagagcccaataatggtcacagcgtataggttgtgtgagatttgtatgttggtcttgcacgcagtgtaatgttctgagcctctcaatattgtaatgagtttctacgagtgagtct

SEQ ID NO: 329291 - DNA, 120 bp, Artificial Sequence
  ENSG00000136527_80 (sequence is synthesized)
ttactaaaggaatccagaaactaaggagacactgatgtatggaccagatgttaaagaaaatgttttgacccagcagatactctgatagaatactggctattatttttgtaaagccgatgt

SEQ ID NO: 329292 - DNA, 120 bp, Artificial Sequence
  ENSG00000136527_81 (sequence is synthesized)
gattgcaacataggcacgtaatctttatcattagagatgaatagcagcatctggacaccaacccatcaaactgcttttcaaattctgcagtttttctcatcttctgctgaatcttgggat

SEQ ID NO: 329293 - DNA, 120 bp, Artificial Sequence
  ENSG00000136527_82 (sequence is synthesized)
gtctttttatattccttggttttagctcctaaactctaaattctaattttcaaaactgaaacatctctgaatctacttctttctaaagaattgcagccatctcaccaaatttcctttaaa

SEQ ID NO: 329294 - DNA, 120 bp, Artificial Sequence
  ENSG00000136527_83 (sequence is synthesized)
tgacaatagagctttagcagttggtgcgtgagtgaaatcttcagaggcttttttagtgttttgagagagtcttttaagttaatcttccatgacggggtctgcatttgggctgcctgtcaa

SEQ ID NO: 329295 - DNA, 120 bp, Artificial Sequence
  ENSG00000136527_84 (sequence is synthesized)
attgcttacaaaatatatctgcatagtccgttagttttggaggctgagtgaaaactcctgtgatttcagaaatattgtatctgtgatctgctagattttaaggagaaaacttcattaagt

SEQ ID NO: 329296 - DNA, 120 bp, Artificial Sequence
  ENSG00000136527_85 (sequence is synthesized)
cttattttctaggttaggagtactgtctcttccctcagtggacaggctgccgaagcatcttagcttagaataaaggtttttctgttaaagccaggagcttaaagaggatcttgacttgac

SEQ ID NO: 329297 - DNA, 120 bp, Artificial Sequence
  ENSG00000136527_86 (sequence is synthesized)
ccattcttcctttatactcagattcctgggctgactgatttctgttaactacagttactttattggtagtcttaactgttactgtgaaacacccatattctgctttcacttctggagaaa

SEQ ID NO: 329298 - DNA, 120 bp, Artificial Sequence
  ENSG00000136527_87 (sequence is synthesized)
attgtttcatttccatagaggtaatctttctagtgttggagtaaacaggcttttagcaacttttgggttccccatttctatattctcacctatgttaatttttgcctgtggtaaaaatag

SEQ ID NO: 329299 - DNA, 120 bp, Artificial Sequence
  ENSG00000136527_88 (sequence is synthesized)
caaaaactacaccctcatttttgagacttcctcctttgtccatggagagaagggaagtgtccgttcagaatacttgatagggaattccaagggattgttgttaattggaagccccagagc

SEQ ID NO: 329300 - DNA, 120 bp, Artificial Sequence
  ENSG00000136527_89 (sequence is synthesized)
atcactacatcctttaaccatttcttgatgttaaaggcagctgttcatatatttttcttttaatctttttacagtcagtcatggagggaggtagaggggaaaggctgtcacatttcatgt

SEQ ID NO: 329301 - DNA, 120 bp, Artificial Sequence
  ENSG00000136527_90 (sequence is synthesized)
caccccaccatgttttataatggctttgaagtcatttgaacgtttctagagtcgtctggggcctagagacctgaactcattttactggatgagttagcctttccttctgtgttaaacctc

SEQ ID NO: 329302 - DNA, 120 bp, Artificial Sequence
  ENSG00000136527_91 (sequence is synthesized)
aaaccttaatttgtctattctgtgttacattataaatgttttccctgagcatcaaaggatcatccaaattttctccattatgttgtaaaccacaaaactatcttctaaagtgttttgagc

SEQ ID NO: 329303 - DNA, 120 bp, Artificial Sequence
  ENSG00000136527_92 (sequence is synthesized)
tgtaatttagaataatcctctactgtcctttcaagaatgtccagaatactctgaagatgtatcacacaaggaaatctcttgtgattttatctgaaagcttcacctttgattcatgccata

SEQ ID NO: 329304 - DNA, 120 bp, Artificial Sequence
  ENSG00000136527_93 (sequence is synthesized)
tagtgacttactgtaatactgcttccttttgagtcttgccatttctgctctctggagtagaaaggcttaccaggctttactttgtctaagtttgataacctaaaataaaggttgccttga

SEQ ID NO: 329305 - DNA, 120 bp, Artificial Sequence
  ENSG00000136527_94 (sequence is synthesized)
taattttacctagctatcagactgactaggagtaggttctgtcctttcctcatctactgttttggtgccttggcagaacttttccttggtttcattacttagtatacccttttgttgatt

SEQ ID NO: 329306 - DNA, 120 bp, Artificial Sequence
  ENSG00000136527_95 (sequence is synthesized)
atgtgtctttagctcgttggtgacctagttatcctggttaccattcctttgctatttttcattacaaatccccccttaacctgccagccaatcccagttttggttgggaaagctatgagt

SEQ ID NO: 329307 - DNA, 120 bp, Artificial Sequence
  ENSG00000136527_96 (sequence is synthesized)
acacaatgtttacctaaactttggcttttgtatgtagtttctgtactcttttgcttcctgggccctaggttaggagctcctgatttagctgcctggttttgatgtgtacttaagtaacta

SEQ ID NO: 329308 - DNA, 120 bp, Artificial Sequence
  ENSG00000136527_97 (sequence is synthesized)
ggtaagttaggttaattcctggttttccataagtttgccctggctcatctccatttagctggagaagctgtggaggatctctgacaccctctctactcttatttgtgtgtagttcgctgt

SEQ ID NO: 329309 - DNA, 120 bp, Artificial Sequence
  ENSG00000136527_98 (sequence is synthesized)
tctgttgtagctccatctggttgctttcagttttttagggggcctcccaccatggttagatgcaatagggttttacagggtttagtgtccttcaagctagcctttgctttccactaggtt

SEQ ID NO: 329310 - DNA, 120 bp, Artificial Sequence
  ENSG00000136527_99 (sequence is synthesized)
tctgcttttctctaggatttgaaactgagatcatcatctttatctcttatcactgaattataagtagtaacttgaaaggtcaaggtctttttaaaaatcaagcatttttttaagtaaatt

SEQ ID NO: 329311 - DNA, 120 bp, Artificial Sequence
  ENSG00000136527_100 (sequence is synthesized)
atataaattatataggattttgttttattgattgcaacttgattgaaataggtataaagtataggtgtcatagttaataaggttccgcctcaccctagtctttatggagtaacattctga

SEQ ID NO: 329312 - DNA, 120 bp, Artificial Sequence
  ENSG00000136527_101 (sequence is synthesized)
ggggtcaaataactcttatccctgctccaaaaaggtggaagaaaggacaagttaattgacttatgtcatttggagcaatgaaactattaacaccaggtatattcagttcctgcccttacc

SEQ ID NO: 329313 - DNA, 120 bp, Artificial Sequence
  ENSG00000136527_102 (sequence is synthesized)
tatattttcttatcttggaaggggattgctgtccctcaccatttatctcacagcagcttatttgtttttaaagttgcccagaaagtgtgcaaattaaacttttaacatctacgtgtagga

SEQ ID NO: 329314 - DNA, 120 bp, Artificial Sequence
  ENSG00000136531_0 (sequence is synthesized)
aaaaaaaagatttttttttttttaaagcatgatggaattttagctgcagtcttcttggtgccagcttatcaatcccaaactctgggtgtaaaagattctacagggcactttcttatgcaa

SEQ ID NO: 329315 - DNA, 120 bp, Artificial Sequence
  ENSG00000136531_1 (sequence is synthesized)
ggagctaaacagtgattaaaggagcaggatgaaaagatggcacagtcagtgctggtaccgccaggacctgacagcttccgcttctttaccagggaatcccttgctgctattgaacaacgc

SEQ ID NO: 329316 - DNA, 120 bp, Artificial Sequence
  ENSG00000136531_2 (sequence is synthesized)
attgcagaagagaaagctaagagacccaaacaggaacgcaaggatgaggatgatgaaaatggcccaaagccaaacagtgacttggaagcaggaaaatctcttccatttatttatggagac

SEQ ID NO: 329317 - DNA, 120 bp, Artificial Sequence
  ENSG00000136531_3 (sequence is synthesized)
attcctccagagatggtgtcagtgcccctggaggatctggacccctactatatcaataagaaaacgtttatagtattgaataaagggaaagcaatctctcgattcagtgccacccctgcc

SEQ ID NO: 329318 - DNA, 120 bp, Artificial Sequence
  ENSG00000136531_4 (sequence is synthesized)
ctttacattttaactcccttcaaccctattagaaaattagctattaagattttggtacattctttattcaatatgctcattatgtgcacgattcttaccaactgtgtatttatgaccatg

SEQ ID NO: 329319 - DNA, 120 bp, Artificial Sequence
  ENSG00000136531_5 (sequence is synthesized)
agtaaccctccagactggacaaagaatgtggagtatacctttacaggaatttatacttttgaatcacttattaaaatacttgcaaggggcttttgtttagaagatttcacatttttacgg

SEQ ID NO: 329320 - DNA, 120 bp, Artificial Sequence
  ENSG00000136531_6 (sequence is synthesized)
gatccatggaattggttggatttcacagtcattacttttgcatatgtgacagagtttgtggacctgggcaatgtctcagcgttgagaacattcagagttctccgagcattgaaaacaatt

SEQ ID NO: 329321 - DNA, 120 bp, Artificial Sequence
  ENSG00000136531_7 (sequence is synthesized)
tcagtcattccaggcctgaagaccattgtgggggccctgatccagtcagtgaagaagctttctgatgtcatgatcttgactgtgttctgtctaagcgtgtttgcgctaataggattgcag

SEQ ID NO: 329322 - DNA, 120 bp, Artificial Sequence
  ENSG00000136531_8 (sequence is synthesized)
ttgttcatgggcaacctacgaaataaatgtttgcaatggcctccagataattcttcctttgaaataaatatcacttccttctttaacaattcattggatgggaatggtactactttcaat

SEQ ID NO: 329323 - DNA, 120 bp, Artificial Sequence
  ENSG00000136531_9 (sequence is synthesized)
aggacagtgagcatatttaactgggatgaatatattgaggataaaagtcacttttattttttagaggggcaaaatgatgctctgctttgtggcaacagctcagatgcaggccagtgtcct

SEQ ID NO: 329324 - DNA, 120 bp, Artificial Sequence
  ENSG00000136531_10 (sequence is synthesized)
gaaggatacatctgtgtgaaggctggtagaaaccccaactatggctacacgagctttgacacctttagttgggcctttttgtccttatttcgtctcatgactcaagacttctgggaaaac

SEQ ID NO: 329325 - DNA, 120 bp, Artificial Sequence
  ENSG00000136531_11 (sequence is synthesized)
ctttatcaactgacactacgtgctgctgggaaaacgtacatgatattttttgtgctggtcattttcttgggctcattctatctaataaatttgatcttggctgtggtggccatggcctat

SEQ ID NO: 329326 - DNA, 120 bp, Artificial Sequence
  ENSG00000136531_12 (sequence is synthesized)
gaggaacagaatcaggccacattggaagaggctgaacagaaggaagctgaatttcagcagatgctcgaacagttgaaaaagcaacaagaagaagctcaggcggcagctgcagccgcatct

SEQ ID NO: 329327 - DNA, 120 bp, Artificial Sequence
  ENSG00000136531_13 (sequence is synthesized)
gctgaatcaagagacttcagtggtgctggtgggataggagttttttcagagagttcttcagtagcatctaagttgagctccaaaagtgaaaaagagctgaaaaacagaagaaagaaaaag

SEQ ID NO: 329328 - DNA, 120 bp, Artificial Sequence
  ENSG00000136531_14 (sequence is synthesized)
aaacagaaagaacagtctggagaagaagagaaaaatgacagagtccgaaaatcggaatctgaagacagcataagaagaaaaggtttccgtttttccttggaaggaagtaggctgacatat

SEQ ID NO: 329329 - DNA, 120 bp, Artificial Sequence
  ENSG00000136531_15 (sequence is synthesized)
gaaaagagattttcttctccacaccagtccttactgagcatccgtggctcccttttctctccaagacgcaacagtagggcgagccttttcagcttcagaggtcgagcaaaggacattggc

SEQ ID NO: 329330 - DNA, 120 bp, Artificial Sequence
  ENSG00000136531_16 (sequence is synthesized)
tctgagaatgactttgctgatgatgagcacagcacctttgaggacaatgacagccgaagagactctctgttcgtgccgcacagacatggagaacggcgccacagcaatgtcagccaggcc

SEQ ID NO: 329331 - DNA, 120 bp, Artificial Sequence
  ENSG00000136531_17 (sequence is synthesized)
agccgtgcctccagggtgctccccatcctgcccatgaatgggaagatgcatagcgctgtggactgcaatggtgtggtctccctggtcgggggcccttctaccctcacatctgctgggcag

SEQ ID NO: 329332 - DNA, 120 bp, Artificial Sequence
  ENSG00000136531_18 (sequence is synthesized)
ctcctaccagagggcacaactactgaaacagaaataagaaagagacggtccagttcttatcatgtttccatggatttattggaagatcctacatcaaggcaaagagcaatgagtatagcc

SEQ ID NO: 329333 - DNA, 120 bp, Artificial Sequence
  ENSG00000136531_19 (sequence is synthesized)
agtattttgaccaacaccatggaagaacttgaagaatccagacagaaatgcccaccatgctggtataaatttgctaatatgtgtttgatttgggactgttgtaaaccatggttaaaggtg

SEQ ID NO: 329334 - DNA, 120 bp, Artificial Sequence
  ENSG00000136531_20 (sequence is synthesized)
aaacaccttgtcaacctggttgtaatggacccatttgttgacctggccatcaccatctgcattgtcttaaatacactcttcatggctatggagcactatcccatgacggagcagttcagc

SEQ ID NO: 329335 - DNA, 120 bp, Artificial Sequence
  ENSG00000136531_21 (sequence is synthesized)
agtgtactgtctgttggaaacctggtcttcacagggatcttcacagcagaaatgtttctcaagataattgccatggatccatattattactttcaagaaggctggaatatttttgatggt

SEQ ID NO: 329336 - DNA, 120 bp, Artificial Sequence
  ENSG00000136531_22 (sequence is synthesized)
tttattgtgagccttagtttaatggaacttggtttggcaaatgtggaaggattgtcagttctccgatcattccggctgctccgagttttcaagttggcaaaatcttggccaactctaaat

SEQ ID NO: 329337 - DNA, 120 bp, Artificial Sequence
  ENSG00000136531_23 (sequence is synthesized)
atgctaattaagatcattggcaattctgtgggggctctaggaaacctcaccttggtattggccatcatcgtcttcatttttgctgtggtcggcatgcagctctttggtaagagctacaaa

SEQ ID NO: 329338 - DNA, 120 bp, Artificial Sequence
  ENSG00000136531_24 (sequence is synthesized)
gaatgtgtctgcaagatttccaatgattgtgaactcccacgctggcacatgcatgactttttccactccttcctgatcgtgttccgcgtgctgtgtggagagtggatagagaccatgtgg

SEQ ID NO: 329339 - DNA, 120 bp, Artificial Sequence
  ENSG00000136531_25 (sequence is synthesized)
gactgtatggaggtcgctggccaaaccatgtgccttactgtcttcatgatggtcatggtgattggaaatctagtggttctgaacctcttcttggccttgcttttgagttccttcagttct

SEQ ID NO: 329340 - DNA, 120 bp, Artificial Sequence
  ENSG00000136531_26 (sequence is synthesized)
gacaatcttgctgccactgatgatgataacgaaatgaataatctccagattgctgtgggaaggatgcagaaaggaatcgattttgttaaaagaaaaatacgtgaatttattcagaaagcc

SEQ ID NO: 329341 - DNA, 120 bp, Artificial Sequence
  ENSG00000136531_27 (sequence is synthesized)
tttgttaggaagcagaaagctttagatgaaattaaaccgcttgaagatctaaataataaaaaagacagctgtatttccaaccataccaccatagaaataggcaaagacctcaattatctc

SEQ ID NO: 329342 - DNA, 120 bp, Artificial Sequence
  ENSG00000136531_28 (sequence is synthesized)
aaagacggaaatggaactactagtggcataggcagcagtgtagaaaaatatgtcgtggatgaaagtgattacatgtcatttataaacaaccctagcctcactgtgacagtaccaattgct

SEQ ID NO: 329343 - DNA, 120 bp, Artificial Sequence
  ENSG00000136531_29 (sequence is synthesized)
gttggagaatctgactttgaaaatttaaatactgaagaattcagcagcgagtcagatatggaggaaagcaaagagaagctaaatgcaactagttcatctgaaggcagcacggttgatatt

SEQ ID NO: 329344 - DNA, 120 bp, Artificial Sequence
  ENSG00000136531_30 (sequence is synthesized)
ggagctcccgccgagggagaacagcctgaggttgaacctgaggaatcccttgaacctgaagcctgttttacagaagactgtgtacggaagttcaagtgttgtcagataagcatagaagaa

SEQ ID NO: 329345 - DNA, 120 bp, Artificial Sequence
  ENSG00000136531_31 (sequence is synthesized)
ggcaaagggaaactctggtggaatttgaggaaaacatgctataagatagtggagcacaattggttcgaaaccttcattgtcttcatgattctgctgagcagtggggctctggcctttgaa

SEQ ID NO: 329346 - DNA, 120 bp, Artificial Sequence
  ENSG00000136531_32 (sequence is synthesized)
gatatatacattgagcagcgaaaaaccattaagaccatgttagaatatgctgacaaggttttcacttacatattcattctggaaatgctgctaaagtgggttgcatatggttttcaagtg

SEQ ID NO: 329347 - DNA, 120 bp, Artificial Sequence
  ENSG00000136531_33 (sequence is synthesized)
tattttaccaatgcctggtgctggctagacttcctgattgttgatgtctcactggttagcttaactgcaaatgccttgggttactcagaacttggtgccatcaaatccctcagaacacta

SEQ ID NO: 329348 - DNA, 120 bp, Artificial Sequence
  ENSG00000136531_34 (sequence is synthesized)
agagctctgaggccactgagagctttgtcccggtttgaaggaatgagggttgttgtaaatgctcttttaggagccattccatctatcatgaatgtacttctggtttgtctgatcttttgg

SEQ ID NO: 329349 - DNA, 120 bp, Artificial Sequence
  ENSG00000136531_35 (sequence is synthesized)
ctaatattcagtatcatgggagtgaatctctttgctggcaagttttaccattgtattaattacaccactggagagatgtttgatgtaagcgtggtcaacaactacagtgagtgcaaagct

SEQ ID NO: 329350 - DNA, 120 bp, Artificial Sequence
  ENSG00000136531_36 (sequence is synthesized)
tgccaggtggaaaaatgtgaaagtaaactttgataacgtaggacttggatatctgtctctacttcaagtagccacgtttaagggatggatggatattatgtatgcagctgttgattcacg

SEQ ID NO: 329351 - DNA, 120 bp, Artificial Sequence
  ENSG00000136531_37 (sequence is synthesized)
aaatgtagaattacaacccaagtatgaagacaacctgtacatgtatctttattttgtcatctttattatttttggttcattctttaccttgaatcttttcattggtgtcatcatagataa

SEQ ID NO: 329352 - DNA, 120 bp, Artificial Sequence
  ENSG00000136531_38 (sequence is synthesized)
cttcaaccaacagaaaaagaagtttggaggtcaagacatttttatgacagaagaacagaagaaatactacaatgcaatgaaaaaactgggttcaaagaaaccacaaaaacccatacctcg

SEQ ID NO: 329353 - DNA, 120 bp, Artificial Sequence
  ENSG00000136531_39 (sequence is synthesized)
acctgctaacaaattccaaggaatggtctttgattttgtaaccaaacaagtctttgatatcagcatcatgatcctcatctgccttaacatggtcaccatgatggtggaaaccgatgacca

SEQ ID NO: 329354 - DNA, 120 bp, Artificial Sequence
  ENSG00000136531_40 (sequence is synthesized)
gagtcaagaaatgacaaacattctgtactggattaatctggtgtttattgttctgttcactggagaatgtgtgctgaaactgatctctcttcgttactactatttcactattggatggaa

SEQ ID NO: 329355 - DNA, 120 bp, Artificial Sequence
  ENSG00000136531_41 (sequence is synthesized)
tatttttgattttgtggtggtcattctctccattgtaggaatgtttctggctgaactgatagaaaagtattttgtgtcccctaccctgttccgagtgatccgtcttgccaggattggccg

SEQ ID NO: 329356 - DNA, 120 bp, Artificial Sequence
  ENSG00000136531_42 (sequence is synthesized)
aatcctacgtctgatcaaaggagcaaaggggatccgcacgctgctctttgctttgatgatgtcccttcctgcgttgtttaacatcggcctccttcttttcctggtcatgttcatctacgc

SEQ ID NO: 329357 - DNA, 120 bp, Artificial Sequence
  ENSG00000136531_43 (sequence is synthesized)
catctttgggatgtccaattttgcctatgttaagagggaagttgggatcgatgacatgttcaactttgagacctttggcaacagcatgatctgcctgttccaaattacaacctctgctgg

SEQ ID NO: 329358 - DNA, 120 bp, Artificial Sequence
  ENSG00000136531_44 (sequence is synthesized)
ctgggatggattgctagcacctattcttaatagtggacctccagactgtgaccctgacaaagatcaccctggaagctcagttaaaggagactgtgggaacccatctgttgggattttctt

SEQ ID NO: 329359 - DNA, 120 bp, Artificial Sequence
  ENSG00000136531_45 (sequence is synthesized)
ttttgtcagttacatcatcatatccttcctggttgtggtgaacatgtacatcgcggtcatcctggagaacttcagtgttgctactgaagaaagtgcagagcctctgagtgaggatgactt

SEQ ID NO: 329360 - DNA, 120 bp, Artificial Sequence
  ENSG00000136531_46 (sequence is synthesized)
tgagatgttctatgaggtttgggagaagtttgatcccgatgcgacccagtttatagagtttgccaaactttctgattttgcagatgccctggatcctcctcttctcatagcaaaacccaa

SEQ ID NO: 329361 - DNA, 120 bp, Artificial Sequence
  ENSG00000136531_47 (sequence is synthesized)
caaagtccagctcattgccatggatctgcccatggtgagtggtgaccggatccactgtcttgacatcttatttgcttttacaaagcgtgttttgggtgagagtggagagatggatgccct

SEQ ID NO: 329362 - DNA, 120 bp, Artificial Sequence
  ENSG00000136531_48 (sequence is synthesized)
tcgaatacagatggaagagcgattcatggcatcaaacccctccaaagtctcttatgagcccattacgaccacgttgaaacgcaaacaagaggaggtgtctgctattattatccagagggc

SEQ ID NO: 329363 - DNA, 120 bp, Artificial Sequence
  ENSG00000136531_49 (sequence is synthesized)
ttacagacgctacctcttgaagcaaaaagttaaaaaggtatcaagtatatacaagaaagacaaaggcaaagaatgtgatggaacacccatcaaagaagatactctcattgataaactgaa

SEQ ID NO: 329364 - DNA, 120 bp, Artificial Sequence
  ENSG00000136531_50 (sequence is synthesized)
tgagaattcaactccagagaaaaccgatatgacgccttccaccacgtctccaccctcgtatgatagtgtgaccaaaccagaaaaagaaaaatttgaaaaagacaaatcagaaaaggaaga

SEQ ID NO: 329365 - DNA, 120 bp, Artificial Sequence
  ENSG00000136531_51 (sequence is synthesized)
caaagggaaagatatcagggaaagtaaaaagtaaaaagaaaccaagaattttccattttgtgatcaattgtttacagcccgtgatggtgatgtgtttgtgtcaacaggactcccacagga

SEQ ID NO: 329366 - DNA, 120 bp, Artificial Sequence
  ENSG00000136531_52 (sequence is synthesized)
ggtctatgccaaactgactgtttttacaaatgtatacttaaggtcagtgcctataacaagacagagacctctggtcagcaaactggaactcagtaaactggagaaatagtatcgatggga

SEQ ID NO: 329367 - DNA, 120 bp, Artificial Sequence
  ENSG00000136531_53 (sequence is synthesized)
ggtttctattttcacaaccagctgacactgctgaagagcagaggcgtaatggctactcagacgataggaaccaatttaaaggggggagggaagttaaatttttatgtaaattcaacatgt

SEQ ID NO: 329368 - DNA, 120 bp, Artificial Sequence
  ENSG00000136531_54 (sequence is synthesized)
gacacttgataatagtaattgtcaccagtgtttatgttttaactgccacacctgccatatttttacaaaacgtgtgctgtgaatttatcacttttctttttaattcacaggttgtttact

SEQ ID NO: 329369 - DNA, 120 bp, Artificial Sequence
  ENSG00000136531_55 (sequence is synthesized)
attatatgtgactatttttgtaaatgggtttgtgtttggggagagggattaaagggagggaattctacatttctctattgtattgtataactggatatattttaaatggaggcatgctgc

SEQ ID NO: 329370 - DNA, 120 bp, Artificial Sequence
  ENSG00000136531_56 (sequence is synthesized)
aattctcattcacacataaaaaaatcacatcacaaaagggaagagtttacttcttgtttcaggatgtttttagatttttgaggtgcttaaatagctattcgtatttttaaggtgtctcat

SEQ ID NO: 329371 - DNA, 120 bp, Artificial Sequence
  ENSG00000136531_57 (sequence is synthesized)
ccagaaaaaatttaatgtgcctgtaaatgttccatagaatcacaagcattaaagagttgttttatttttacataacccattaaatgtacatgtatatatgtatatatgtatatgtgcgtg

SEQ ID NO: 329372 - DNA, 120 bp, Artificial Sequence
  ENSG00000136531_58 (sequence is synthesized)
tatatacatatatatgtatacacacatgcacacacagagatatacacataccattacattgtcattcacagtcccagcagcatgactatcacatttttgataagtgtcctttggcataaa

SEQ ID NO: 329373 - DNA, 120 bp, Artificial Sequence
  ENSG00000136531_59 (sequence is synthesized)
ataaaaatatcctatcagtcctttctaagaagcctgaattgaccaaaaaacatccccaccaccactttataaagttgattctgctttatcctgcagtattgtttagccatcttctgctct

SEQ ID NO: 329374 - DNA, 120 bp, Artificial Sequence
  ENSG00000136531_60 (sequence is synthesized)
tggtaaggttgacatagtatatgtcaatttaaaaaataaaagtctgctttgtaaatagtaattttacccagtggtgcatgtttgagcaaacaaaaatgatgatttaagcacactacttat

SEQ ID NO: 329375 - DNA, 120 bp, Artificial Sequence
  ENSG00000136531_61 (sequence is synthesized)
tgcatcaaatatgtaccacagtaagtatagtttgcaagctttcaacaggtaatatgatgtaattggttccattatagtttgaagctgtcactgctgcatgtttatcttgcctatgctgct

SEQ ID NO: 329376 - DNA, 120 bp, Artificial Sequence
  ENSG00000136531_62 (sequence is synthesized)
gtatcttattccttccactgttcagaagtctaatatgggaagccatatatcagtggtaaagtgaagcaaattgttctaccaagacctcattcttcatgtcattaagcaataggttgcagc

SEQ ID NO: 329377 - DNA, 120 bp, Artificial Sequence
  ENSG00000136531_63 (sequence is synthesized)
aaacaaggaagagcttcttgctttttattcttccaaccttaattgaacactcaatgatgaaaagcccgactgtacaaacatgttgcaagctgcttaaatctgtttaaaatatatggttag

SEQ ID NO: 329378 - DNA, 120 bp, Artificial Sequence
  ENSG00000136531_64 (sequence is synthesized)
agttttctaagaaaatataaatactgtaaaaagttcattttattttatttttcagccttttgtacgtaaaatgagaaattaaaagtatcttcaggtggatgtcacagtcactattgttag

SEQ ID NO: 329379 - DNA, 120 bp, Artificial Sequence
  ENSG00000136531_65 (sequence is synthesized)
tttctgttcctagcacttttaaattgaagcacttcacaaaataagaagcaaggactaggatgcagtgtaggtttctgcttttttattagtactgtaaacttgcacacatttcaatgtgaa

SEQ ID NO: 329380 - DNA, 120 bp, Artificial Sequence
  ENSG00000136531_66 (sequence is synthesized)
acaaatctcaaactgagttcaatgtttatttgctttcaatagtaatgccttatcattgaaagaggcttaaagaaaaaaaaaatcagctgatactcttggcattgcttgaatccaatgttt

SEQ ID NO: 329381 - DNA, 120 bp, Artificial Sequence
  ENSG00000136531_67 (sequence is synthesized)
ccacctagtctttttattcagtaatcatcagtcttttccaatgtttgtttacacagatagatcttattgacccatatggcactagaactgtatcagatataatatgggatcccagctttt

SEQ ID NO: 329382 - DNA, 120 bp, Artificial Sequence
  ENSG00000136531_68 (sequence is synthesized)
tttcctctcccacaaaaccaggtagtgaagttatattaccagttacagcaaaatactttgtgtttcacaagcaacaataaatgtagattctttatactgaagctattgacttgtagtgtg

SEQ ID NO: 329383 - DNA, 120 bp, Artificial Sequence
  ENSG00000136531_69 (sequence is synthesized)
ttggtgaaatgcatgcaggaaaatgctgttaccataaagaacggtaaaccacattacaatcaagccaaaagaataaaggtttcgcttttgtttttgtatttaattgttgtctttgtttct

SEQ ID NO: 329384 - DNA, 120 bp, Artificial Sequence
  ENSG00000136531_70 (sequence is synthesized)
atctttgaaatgccatttaaaggtagatttctatcatgtaaaaataatctatctgaaaaacaaatgtaaagaacacacattaattactataattcatctttcaattttttcatggaatgg

SEQ ID NO: 329385 - DNA, 120 bp, Artificial Sequence
  ENSG00000136531_71 (sequence is synthesized)
aagttaattaagaagagtgtattggataactactttaatattggccaaaaagctagatatggcatcaggtagactagtggaaagttacaaaaattaataaaaaattgactaacattttaa

SEQ ID NO: 329386 - DNA, 120 bp, Artificial Sequence
  ENSG00000136531_72 (sequence is synthesized)
aacagacattgggtaccatcgaatgactgtcagaacagaaagctaaggcaaaggagggaggatgctgtggtcatcctttcttgtttttttcttctttaatgaggatagagcacatgtgag

SEQ ID NO: 329387 - DNA, 120 bp, Artificial Sequence
  ENSG00000136531_73 (sequence is synthesized)
attttactttctactccagtaaaaattctgaagaattgcattggagactgttatattcaacacatacgtggattctgtgttatgatttacatttttctttatttcagcactttcttatgc

SEQ ID NO: 329388 - DNA, 120 bp, Artificial Sequence
  ENSG00000136531_74 (sequence is synthesized)
ccttgccatagcaaaaccactgagaggaagctgccagtggttctgctaccgatgtcagcagcatgtctgctccctaaagcaggaagtagagaaggagacaggaacttgaagaatccagac

SEQ ID NO: 329389 - DNA, 120 bp, Artificial Sequence
  ENSG00000136531_75 (sequence is synthesized)
tgtcagtgcccctggaggatctggacccctactatatcaataagaaagtgagttcttagtcaagttgccttcactgcctatttactaattggttctgggctagtcccagggatgatggtg

SEQ ID NO: 329390 - DNA, 120 bp, Artificial Sequence
  ENSG00000136531_76 (sequence is synthesized)
aagaaggctggcctccttccctctgtctaaagtatcactaagatgctggatgggcctgaccgtgtaatggaccaatgatcctagaagtcttttggaagcactcatttgaacctgcatttg

SEQ ID NO: 329391 - DNA, 120 bp, Artificial Sequence
  ENSG00000136531_77 (sequence is synthesized)
agagtaaaaggtctctgcacataaggacaggaaggggatgctgttcagtgctcaattcttttgaggctaaaggagatccagaattccacagaccattatttcccagacagtgattggagg

SEQ ID NO: 329392 - DNA, 120 bp, Artificial Sequence
  ENSG00000136531_78 (sequence is synthesized)
aatactactgttctgctggactaatgaagtgccactccacatccaccagaatggctacaacttaaaaaggcttatcatactgtttgtgagaatctagagctacagaagctgtcagagact

SEQ ID NO: 329393 - DNA, 120 bp, Artificial Sequence
  ENSG00000136531_79 (sequence is synthesized)
tcaggtatcttcacatgaaattgagcttcaaagaagatgaagatgagtaagggccgggaaagccagggaaggtttctgtttcctgtgtatcaagtttcccaaacaagaatcttggagtcc

SEQ ID NO: 329394 - DNA, 120 bp, Artificial Sequence
  ENSG00000136531_80 (sequence is synthesized)
tcttcagcttctgcaactccttctcgatcaacatgcagtcaaacttcaaattgtattgacggaaactcagaactgcttagatcattttcttactctcattatttctgcgtggatttagac

SEQ ID NO: 329395 - DNA, 120 bp, Artificial Sequence
  ENSG00000136531_81 (sequence is synthesized)
attcattgtcttttgcctgggctcttgcaataggcttttatcttatatcctaccgtaaaaggtttcagatgctacacatcctccatactaccaaagtaataggtaaaaaataaatctgat

SEQ ID NO: 329396 - DNA, 120 bp, Artificial Sequence
  ENSG00000136531_82 (sequence is synthesized)
tgtgtctgtacaaaaaaacctgttagaactaataaataaattcagtaaaattgcaggatacaaagtcaacatacaaaaatcagtagtgtttctaaacactaagaatcaactatttgcaag

SEQ ID NO: 329397 - DNA, 120 bp, Artificial Sequence
  ENSG00000136531_83 (sequence is synthesized)
agaagtcaagacaacaatatcattttaaagcatcaaaaatattgaggaataaacttaatgaggtgaaatatctgtacaccaaaaactataaaacatggattaaagaaattaaataagaca

SEQ ID NO: 329398 - DNA, 120 bp, Artificial Sequence
  ENSG00000136531_84 (sequence is synthesized)
cacataaaaagaaagatatcccgtgttaacgagtggaaagaattaatgttcttaaaatacccagagtacttaaagtgatctgtggattcaatgaaatccgtataaaaattccaatgacat

SEQ ID NO: 329399 - DNA, 120 bp, Artificial Sequence
  ENSG00000136531_85 (sequence is synthesized)
aatagatattttttaaatcttaaaattcatatggaatcacaagttaccccaaacagtcaaagcaatcttaagtaaaaataatgaaacttggttgcatcacactgcctgatctcaaaatac

SEQ ID NO: 329400 - DNA, 120 bp, Artificial Sequence
  ENSG00000136531_86 (sequence is synthesized)
attacaaagttgtagtgatcaaaacagcttggtactggcataaaaatcagcacacaaatggaacagaaccaaaagcccagaaataaatccatgcacttatggtcaataaatctttgacaa

SEQ ID NO: 329401 - DNA, 120 bp, Artificial Sequence
  ENSG00000136531_87 (sequence is synthesized)
aagtaccaagaacacaaaatgggaaacgaacagtctcttcagtaaatgatgttggaaaaacttggtatccacatgcagaagaatgaaattggacccttatctcacactatatacaaaaat

SEQ ID NO: 329402 - DNA, 120 bp, Artificial Sequence
  ENSG00000136531_88 (sequence is synthesized)
caactcaaaatggattaacaacttacagaacacctaaaactgtaaaagtactagaagaaaatataggggaaaactctatgacattgatctgggcaatgattttttgaatctgaccccaaa

SEQ ID NO: 329403 - DNA, 120 bp, Artificial Sequence
  ENSG00000136531_89 (sequence is synthesized)
atcacagaccaaaacaaaagaaataatcaacagaatgaaaagacaacctacagaatggaagaaaatatttgcaaaccatatgttcaataaggggttaatgtctaaaatatgtaagaaact

SEQ ID NO: 329404 - DNA, 120 bp, Artificial Sequence
  ENSG00000136531_90 (sequence is synthesized)
ccaacaactcaatagcaaataataataataataataacctgattacaaaatgggcaaaggacctaaatggacatttctcaaaagaaggcatacaaatggccaacaagtgtatgataaaat

SEQ ID NO: 329405 - DNA, 120 bp, Artificial Sequence
  ENSG00000136531_91 (sequence is synthesized)
tcccaatatcactaatcatcaggaaaacacaaattaaaactacagtgaaatagcacctcacattcattaaaaatggctactatcaaaagaacaaaagataagcgttggtaaggatgtgga

SEQ ID NO: 329406 - DNA, 120 bp, Artificial Sequence
  ENSG00000136531_92 (sequence is synthesized)
gaaaacaaaagtgttgtacactgttggtgggattgtaaattagccatcatagaaaacaatatgtaaattcctcaaaaaagtaaatacagaactattgtatgatccagtaattctacttct

SEQ ID NO: 329407 - DNA, 120 bp, Artificial Sequence
  ENSG00000136531_93 (sequence is synthesized)
gggtatatacctagacattcaaagaagaattggtaccaaccctactgcaactatttcacaagatagagaaagaaggaatccaccctaaatcattctattaagtcagtatcacccaaatac

SEQ ID NO: 329408 - DNA, 120 bp, Artificial Sequence
  ENSG00000136531_94 (sequence is synthesized)
caaaatcaggaaaggacacaagaaaaaagaaaactgcagactaatgttcctgatgaacatagatgcaaaaattctcaacaaaattctagctaagcaaatccaagggcatataaaaaagat

SEQ ID NO: 329409 - DNA, 120 bp, Artificial Sequence
  ENSG00000136531_95 (sequence is synthesized)
aatacatcatgatcaagtgggtttcatacccgggatgcagggatggtttaacatatgtaactcaataaatgggatacatcacataaacaattaaaaataaaaatcatatgatcgtcttaa

SEQ ID NO: 329410 - DNA, 120 bp, Artificial Sequence
  ENSG00000136531_96 (sequence is synthesized)
tagacacagaaaaaatgtttgataaaatacagtatccctttatggtaaaaaatcctcaacaaaattggcataggagaaacatacctcaaagtaataaaagccatctgtgacaaacccaga

SEQ ID NO: 329411 - DNA, 120 bp, Artificial Sequence
  ENSG00000136531_97 (sequence is synthesized)
ttccccctgagaactggaacaagacaaggtgacaaaattagtgtgataaagagatatttacactgtcgtgtttattgcagcattatttccaatagacaggatacggaatcaacctaagtc

SEQ ID NO: 329412 - DNA, 120 bp, Artificial Sequence
  ENSG00000136531_98 (sequence is synthesized)
cactgtcgtgtttattgcagcattatttccaatagacaggatacggaatcaacctaagtcttatctgtagatgaggaacggataaagaattgcacacacacacacacgcacacacacaca

SEQ ID NO: 329413 - DNA, 120 bp, Artificial Sequence
  ENSG00000136531_99 (sequence is synthesized)
aacaaagaaggaaattctgtcacttgtgacaacatgaatgaacctggaggacattaggttgagtaaaataagccaagcacagaatgacaaatattgcatgatgtaacttaggtatggaat

SEQ ID NO: 329414 - DNA, 120 bp, Artificial Sequence
  ENSG00000136531_100 (sequence is synthesized)
ctaaaaatgtcaaactcacagaaacagaaagtagaatggtggttaccaggggctactgggtagggctgtaggggtggaggaatggaaaatgttggtcaaagggtacaaaagttcagttaa

SEQ ID NO: 329415 - DNA, 120 bp, Artificial Sequence
  ENSG00000136531_101 (sequence is synthesized)
acaggaggaataagttctggatatctattgtactatgtaatgactgtagttaataatactgtgttgcatattcaaaaattgctatgtgtcgattttaaatgttctcaccaccaaaatata

SEQ ID NO: 329416 - DNA, 120 bp, Artificial Sequence
  ENSG00000136531_102 (sequence is synthesized)
aatatctgaggtgaaggagatattaattagtttgatttaatcatttcacaatgcaaatattaagttgcacactgtaaatatatacaatttttaattgtcaattaaatataattgaaaaat

SEQ ID NO: 329417 - DNA, 120 bp, Artificial Sequence
  ENSG00000136531_103 (sequence is synthesized)
agaacataataaaatattggattattaactctatcaggaaatgaagctttgagtaacattttactgtttatatttatggttttagccaccaagcaaacatggtggtcaagaacttggact

SEQ ID NO: 329418 - DNA, 120 bp, Artificial Sequence
  ENSG00000136531_104 (sequence is synthesized)
cacattcaggttgccatagtccaaattcaggcttccctactcactaatgtgttcttaagcaagaaataaacttattttggcttcctttggtaaaatgggattaataattgttcctatcct

SEQ ID NO: 329419 - DNA, 120 bp, Artificial Sequence
  ENSG00000136531_105 (sequence is synthesized)
acattttattgtgaagattgaattaatgaaatatacacgtaaaacacttaagacaattcctggccttagtaagatttcaacaaaaatggtcattattatgatgctttattctgttacatt

SEQ ID NO: 329420 - DNA, 120 bp, Artificial Sequence
  ENSG00000136531_106 (sequence is synthesized)
tatggattattagacagataaaattggacctcatatgtgaccattctattttcctttattcaaatggaaaaagaatgtcaattcaacatagggaaatactatatatgtataaattattac

SEQ ID NO: 329421 - DNA, 120 bp, Artificial Sequence
  ENSG00000136531_107 (sequence is synthesized)
atatgtttattaaaatcaagtgtttaaatttatatattaacttttacatttataacatcttatttcttctgaaaacaaccaacacaacccatttcttatcagtgataattcaaatggcct

SEQ ID NO: 329422 - DNA, 120 bp, Artificial Sequence
  ENSG00000136531_108 (sequence is synthesized)
tatcagtgataattcaaatggcctctttattctttcctgaatttttcaatcccaattcttctcttctgttctttttcagcagcatcttgcacagggctttatggaaaagactgaggtgct

SEQ ID NO: 329423 - DNA, 120 bp, Artificial Sequence
  ENSG00000136531_109 (sequence is synthesized)
gtggtgaatttaatctcctctgttgtttactttaatctcttcatccagttactctgacttttctccatgcttaatgttatccctcttgatttcacagcttaacaatttcttctttgttct

SEQ ID NO: 329424 - DNA, 120 bp, Artificial Sequence
  ENSG00000136531_110 (sequence is synthesized)
tgaccccatcctagccttcttatttcaaaagtcccctcaagcaagtttcttttcacattcttaatttcttattcttaataactccttttttatgccttcaagcaagtatggctctctctc

SEQ ID NO: 329425 - DNA, 120 bp, Artificial Sequence
  ENSG00000136531_111 (sequence is synthesized)
atgtgctcttccgttctattttgctactgtttttattcacttaacagtaaatttcaaacaagttttgtgcacctaattctttcatttctttacaacccacccattgcttatccactctta

SEQ ID NO: 329426 - DNA, 120 bp, Artificial Sequence
  ENSG00000136531_112 (sequence is synthesized)
ccattgcttatccactcttacagctgtactagaattgtaatttaaatatgtatcatatcagtttttttgtaacattgataatttataatatttaacatattttgtaatagagttttcttc

SEQ ID NO: 329427 - DNA, 120 bp, Artificial Sequence
  ENSG00000136531_113 (sequence is synthesized)
taaaaagcctcagcaagttgccattgactttcggcattgtatttgatacctctggactctggctactatcgccctttctgtataaaatctgtaacttgaccaaggcaagaacctccaccc

SEQ ID NO: 329428 - DNA, 120 bp, Artificial Sequence
  ENSG00000136531_114 (sequence is synthesized)
caggccaactaattttctcatctgctattgtcccaacctgctttggtttctcctataggtcagagtcaggtcctgcttgggtttgggcctttgctcataattttcccttgcaattgaaat

SEQ ID NO: 329429 - DNA, 120 bp, Artificial Sequence
  ENSG00000136531_115 (sequence is synthesized)
attctctcactccaggccagcctttaaagcctaacgtaagtaccaccacatccacgaagcctctgcacatcaacttcagatctcaatgctgttaaccttttataaacaaaaagcaatata

SEQ ID NO: 329430 - DNA, 120 bp, Artificial Sequence
  ENSG00000136531_116 (sequence is synthesized)
gaataaatcctttttgggagcaggagtcaaaatgctagttgcagtcttgcatctgtcacttatttgcttggccagtgacgtagccttattaaaaactcaatttctttatccaaaagatga

SEQ ID NO: 329431 - DNA, 120 bp, Artificial Sequence
  ENSG00000136531_117 (sequence is synthesized)
ggatgtttatacctccctgatctaccttctaagattgttgtacatgataagtaaaatactgtgcataaaaacatttgtaaaaattttaaaaatctgttcaagcttgtcattgttaccaca

SEQ ID NO: 329432 - DNA, 120 bp, Artificial Sequence
  ENSG00000136531_118 (sequence is synthesized)
gataaatcgggtactaccttgctgtcttggattgcttttgtatgttgttctcttatgttgttactggactcggtgttattacttaaatttctctgtatttattttgacaacttaattagg

SEQ ID NO: 329433 - DNA, 120 bp, Artificial Sequence
  ENSG00000136531_119 (sequence is synthesized)
ttttgaattctttggaagcggagagtatgaatggtattatgagcaaagacccagaaggagccacctcctaattattttggagagaattatctaagaggcctaattggacttgtgcttccc

SEQ ID NO: 329434 - DNA, 120 bp, Artificial Sequence
  ENSG00000136531_120 (sequence is synthesized)
attaaagtatgattcatatcagagaagcttacagtcttattgctggccacatggagatagtacataggagatactcgatgggaattctgtcaactgaaagagagtcagcaagacagtgta

SEQ ID NO: 329435 - DNA, 120 bp, Artificial Sequence
  ENSG00000136531_121 (sequence is synthesized)
aacatggttagcgtgtctcagcttacccagcctggcttggtgtaaccaatatagactatggaaaataggaagtagacaaaaggtagtggagattgggctcatgccattttctttaattga

SEQ ID NO: 329436 - DNA, 120 bp, Artificial Sequence
  ENSG00000136531_122 (sequence is synthesized)
aatacaatttccataaaataaaatacagatatttttaagtgcatattactttgagttttgacaaatgtattcccctgtctggcaactgctccaattaagatgtagaatatttctatcacc

SEQ ID NO: 329437 - DNA, 120 bp, Artificial Sequence
  ENSG00000136531_123 (sequence is synthesized)
ccagtacccttttcctgtcaatccctccttctcccagagacaatcactgttccaatttctatcactatagcttagttttaccagttcaaaaacttcacataagtagaatcataaagcatg

SEQ ID NO: 329438 - DNA, 120 bp, Artificial Sequence
  ENSG00000136531_124 (sequence is synthesized)
ttactttttttcctggcttttgtcacttaacagtttttttttttagatttaaccattttgttgcatatgtaagtatatcataactttttgttgttgagtagcactctcctatataagtat

SEQ ID NO: 329439 - DNA, 120 bp, Artificial Sequence
  ENSG00000136531_125 (sequence is synthesized)
gttataataatgtttcatttacctattgatgagcatttgagttgttcctaagttttaactagtataaaaaagtttactatgaacattcttgcataggtctttttgtgggtgtatattttc

SEQ ID NO: 329440 - DNA, 120 bp, Artificial Sequence
  ENSG00000136531_126 (sequence is synthesized)
actactcttaagattgtcagactggataaagagcaaagttcagtggtatgctgttttcaacacatattttaaatataacacagacaggttgaaagtaaaaaaatcagtaaaagatacagc

SEQ ID NO: 329441 - DNA, 120 bp, Artificial Sequence
  ENSG00000136531_127 (sequence is synthesized)
atgaaaacactaagcaaaagaaagctgatatggctatatgaatatcaaaaaagtagattttaagacaaaggatactaacacagataaaaatggtcattttattggggaaaaaaaggccaa

SEQ ID NO: 329442 - DNA, 120 bp, Artificial Sequence
  ENSG00000136531_128 (sequence is synthesized)
tttgtaacaaggcatgacaatcttaaaagggtataacaaagtagaatttcaaaatccaagaagaaaaaaatggcagaataaagtaaaaagcagagaaatccacaataattgttagagatt

SEQ ID NO: 329443 - DNA, 120 bp, Artificial Sequence
  ENSG00000136531_129 (sequence is synthesized)
ttatcaattttatcccagtagttgctagaacaagaagacaaaaaatcaatgatatagacaacttgaataacattatcagggatcaaacctgcagacctaactgacatttatagaatatta

SEQ ID NO: 329444 - DNA, 120 bp, Artificial Sequence
  ENSG00000136531_130 (sequence is synthesized)
tacccaacaacttcagaatatacattcttttcaaatacacatggaacattccacaggtggtgttatgctaggccataaaattagtgacacttcatttcaaagagtatttgactacaatgg

SEQ ID NO: 329445 - DNA, 120 bp, Artificial Sequence
  ENSG00000136531_131 (sequence is synthesized)
aattaaattagaaatcaattacaattagatatatagaaaaggcccctttttacaaaattaagcaacagacttctaaataatcaatccatggatcaaagagggaaatcacacacacacaca

SEQ ID NO: 329446 - DNA, 120 bp, Artificial Sequence
  ENSG00000136531_132 (sequence is synthesized)
cacacacacacacacacacaaatacagtgcgctatacggagtgataattagaatacaacatgttaggaatctctgtgttcatgcctttaaccatttcatattatttcataataatcaaga

SEQ ID NO: 329447 - DNA, 120 bp, Artificial Sequence
  ENSG00000136531_133 (sequence is synthesized)
aatcaagaacttattaatcaaattagcatttaattatcttcagatgaaatgagaaagagggtgggcaaaatgtagactgaaggctgagaattataggaattatggtcacaatcagccagt

SEQ ID NO: 329448 - DNA, 120 bp, Artificial Sequence
  ENSG00000136531_134 (sequence is synthesized)
gttttaactctactgcaattgtaacaaagtcattggatcttggttcaaccaatgggaatagatcctttcaaaatgccaataaataaaatgctaaataaacattttggcaattttctcttg

SEQ ID NO: 329449 - DNA, 120 bp, Artificial Sequence
  ENSG00000136531_135 (sequence is synthesized)
ataaatctcttatagcaatgtgcataatgcttccattttcatccaatgaagtactagtgaaaatagtctagatagtgttaatattgatagaaattataactaaggaataagttagatggt

SEQ ID NO: 329450 - DNA, 120 bp, Artificial Sequence
  ENSG00000136531_136 (sequence is synthesized)
gattaaagagttgaataagcactcaaagaaagttgtgaaatctctgttctgagatatgtgacaaaaccatctgtctctgattttagtttaatccttaatgaatataagaagcctgactaa

SEQ ID NO: 329451 - DNA, 120 bp, Artificial Sequence
  ENSG00000136531_137 (sequence is synthesized)
atgatctcttgggaggcccccttccaaacacaaaacccattattttaatttgcattggttatagtgccaacacaaagaaaaaacacactcaagatcttttttataaagtagggatttaat

SEQ ID NO: 329452 - DNA, 120 bp, Artificial Sequence
  ENSG00000136531_138 (sequence is synthesized)
tctaaatcttagtcatatcttacaatttataaattctttaatgttgaaaaatattttctttgtagaactaaaaccattctctctctctccctccctccctctctctctttctctctgtct

SEQ ID NO: 329453 - DNA, 120 bp, Artificial Sequence
  ENSG00000136531_139 (sequence is synthesized)
gtttgagaacccaaaataaaatgtagtttataatttgtgattatgatttgaacttttcaaaaaatgtatgagtcatttcttgccctttgataatttccaaatgatgatgctttgcttttg

SEQ ID NO: 329454 - DNA, 120 bp, Artificial Sequence
  ENSG00000136531_140 (sequence is synthesized)
cttttagagatcagtctttgcttttaattatttccatatattttggttgggagtgagaaaaataaacggaaaatgtcactcatgagtgtcagcctggtaatgaatatatagaatgcaaat

SEQ ID NO: 329455 - DNA, 120 bp, Artificial Sequence
  ENSG00000136531_141 (sequence is synthesized)
ggtcactttactgggggagacggtaagtttttctgagccttttgcccttttatcttctccagcctgctgttttttctgttttcatttgtagattaaactggtgcagcaatatggtggggt

SEQ ID NO: 329456 - DNA, 120 bp, Artificial Sequence
  ENSG00000136531_142 (sequence is synthesized)
agaaatcacatgaatctgacatatgtgggctcctgtatctgtgcacatggatagagatgctggtcaaaatccaaccatcttatgagttccagacatacttttaaaattcacatgcatgaa

SEQ ID NO: 329457 - DNA, 120 bp, Artificial Sequence
  ENSG00000136531_143 (sequence is synthesized)
tgaagctatacaaaatattttaaaatacagaatccaaaataaaatttctttttgtataaaatactccttctcaattcattcctgtaggcaaaacttgatatttaataatattaagaaaaa

SEQ ID NO: 329458 - DNA, 120 bp, Artificial Sequence
  ENSG00000136531_144 (sequence is synthesized)
aaaatgaattcgaaatattttattgctttacaacacaaaaaaaatggtttacttactcccaataatctgaatttattccaatagtatatttatggatttaaccaggagagggattatcct

SEQ ID NO: 329459 - DNA, 120 bp, Artificial Sequence
  ENSG00000136531_145 (sequence is synthesized)
cctggtgctggctagacttcctgattgttgatgtgagtatgctgcactttgctgctttattcattggcatatatgtaatagttctagcaatggtgcctgacacagtgtaggcactcagta

SEQ ID NO: 329460 - DNA, 120 bp, Artificial Sequence
  ENSG00000136531_146 (sequence is synthesized)
acactgtatcagcccaaatataaattatgtttctcatttcacagtgagaggatgcctcaaaacattttttaccaatttaaatacatatacattcatagataaaaatcaaatgccatcata

SEQ ID NO: 329461 - DNA, 120 bp, Artificial Sequence
  ENSG00000136531_147 (sequence is synthesized)
ctatacttattcacttaatttcaaattaatatttaaaatctcaagttatgcaaaataaaatatgaatttagaaattttgctttttgcacactcacatttcgcaaaataacttgtatttaa

SEQ ID NO: 329462 - DNA, 120 bp, Artificial Sequence
  ENSG00000136531_148 (sequence is synthesized)
atttttcacaggcatctttgacattagtatgtttgtcatcactaaagcctgttgagtttaggtcacacagatgaatcattaattacaaagaaatttgaaagtccaaaaagcaagagacac

SEQ ID NO: 329463 - DNA, 120 bp, Artificial Sequence
  ENSG00000136531_149 (sequence is synthesized)
cacttgatttgtatgatatagaagcaaattggctattgaccaagtagccaaagattttattaaaccacattggtgttgaaataaaataagatagagtactaaaatatgagggtttttata

SEQ ID NO: 329464 - DNA, 120 bp, Artificial Sequence
  ENSG00000136531_150 (sequence is synthesized)
taattgaatatgaggcaaatctaccattaaatgtactactactattaaatgtataaaggttacatgcagaattacattaacagtctctggcaataaaggaagacaataaataatatttag

SEQ ID NO: 329465 - DNA, 120 bp, Artificial Sequence
  ENSG00000136531_151 (sequence is synthesized)
aactacataagtgtggacattacaaacaatagaaaatgcaccaaaactataaccattcttttatttgtataatgggattatgcatgatactatttcttttctctattttctgtatgtact

SEQ ID NO: 329466 - DNA, 120 bp, Artificial Sequence
  ENSG00000136531_152 (sequence is synthesized)
tatcataggttggtaaatccataataaaaatatctgatacttgatatatctatgttaggataaaagtatcaagtcagcactgcttgaatataaggaaactcttcagagaaatctagttgt

SEQ ID NO: 329467 - DNA, 120 bp, Artificial Sequence
  ENSG00000136531_153 (sequence is synthesized)
cctgcagctaatgatcatattacccaaagtactctgatatttacctttttagatttaagaaaactattatgatagtatatgaaactgatcaacactttgccttaaatcaaatatgcttat

SEQ ID NO: 329468 - DNA, 120 bp, Artificial Sequence
  ENSG00000136531_154 (sequence is synthesized)
tgctcatctatttcattatgaaagatacaaatataaataagtcatttttctagtcctgcagtagcttacagttgaaaagtgaggacagctgcgtacacagtaagtcgacacctgtattac

SEQ ID NO: 329469 - DNA, 120 bp, Artificial Sequence
  ENSG00000136531_155 (sequence is synthesized)
aagtgccacctctttacttgaggaaggaggaaaggcttcaatagggaagtggagtgtgagctggagcttgagagatgtgaatgctagcaggcacagctgagggaggaacacggattcgtt

SEQ ID NO: 329470 - DNA, 120 bp, Artificial Sequence
  ENSG00000136531_156 (sequence is synthesized)
aaaacgttggtgcatgacatgcagggcgggttccagaaacaagtagatagggtgaggtaagcctttgtaatgggatgataaggtaagaaagataagttagaaaagatctgaagaacctga

SEQ ID NO: 329471 - DNA, 120 bp, Artificial Sequence
  ENSG00000136531_157 (sequence is synthesized)
gatgccatccaaggaaatttggacttattatttaatacagaggaagctattgaagaattacatatagggaagtgacaagacctgcttgttcttttagtgagggaagttaggtggaggtga

SEQ ID NO: 329472 - DNA, 120 bp, Artificial Sequence
  ENSG00000136531_158 (sequence is synthesized)
gaatgacggaatagaaaggagatttatttagagatcaaaacaccaattaggagattgctgcaatgtcccagaaagagaaggcctatatgtatcttcttttccacatttagctacacaagt

SEQ ID NO: 329473 - DNA, 120 bp, Artificial Sequence
  ENSG00000136531_159 (sequence is synthesized)
cacataaaactgaatattttacaacttcttttcagccagtaaatactaccccattcaaaatattttcctctgtctaacttttatctttcatcctttaacttatgcttatctctttttggt

SEQ ID NO: 329474 - DNA, 120 bp, Artificial Sequence
  ENSG00000136531_160 (sequence is synthesized)
atatcttaaatacagaaaagcttcacaactcatgataattcagtaactatttttcaattatctgttaaaaagggacttacaaagcctaagagtttggattttaagggaactatatgaact

SEQ ID NO: 329475 - DNA, 120 bp, Artificial Sequence
  ENSG00000136531_161 (sequence is synthesized)
atgtaagacataattttacaactcattgttttctgtattcaagaggcttcactttcaaattgcatgtgcaaaattattttgaataagttgttttttgtaacaactttcaatgtgcttcac

SEQ ID NO: 329476 - DNA, 120 bp, Artificial Sequence
  ENSG00000136531_162 (sequence is synthesized)
tcacttattttccttaaaaaatatatttttcaaatatattaacaccatactcttaaaagctgtattgcatatttatttttatttatctgcttttgaaattcaggtgtactttagaacaaa

SEQ ID NO: 329477 - DNA, 120 bp, Artificial Sequence
  ENSG00000136531_163 (sequence is synthesized)
cttatataattttaataatttttctatatgttttcaaggaaattggacatgtgtatgtcccccgaccgtttttctttttctttttagctaagactttataatttttctcaactacattag

SEQ ID NO: 329478 - DNA, 120 bp, Artificial Sequence
  ENSG00000136531_164 (sequence is synthesized)
tcaactgtatgaataactaaagacaacattgttcttgcaatttctaatttatcataaaatctcaactttttttattcactaattttgtctgacctaattaatgatattatgcccttcaaa

SEQ ID NO: 329479 - DNA, 120 bp, Artificial Sequence
  ENSG00000136531_165 (sequence is synthesized)
ctgaaatttacaaaagtcaaagctgctttttagaggcctattcctttttaaatgtgttcatgctcatattcaccagtggtttgtatagtttacttgtgtatcaaatgttactttccattt

SEQ ID NO: 329480 - DNA, 120 bp, Artificial Sequence
  ENSG00000136531_166 (sequence is synthesized)
cagatctgctcaatattattagaaatgatacagaaataagttttacagatctgtagaggaagatcacatttctctctcttttttttctttacttttaattttttaaaaacatttcctacc

SEQ ID NO: 329481 - DNA, 120 bp, Artificial Sequence
  ENSG00000136531_167 (sequence is synthesized)
aagaatcttgaaaaagagcacatatatgggcttcttttttataagtgttcgcagactagtatcattaacttcaccctgggaacctgtagaaatgcaaattcttaggcctttccccaaact

SEQ ID NO: 329482 - DNA, 120 bp, Artificial Sequence
  ENSG00000136531_168 (sequence is synthesized)
tactaagtcagactctgctattggtgtttttaacaagacccctgggtgattttgaaactcatgaaagttcgagaattactgattcattgcatagagcaaggctgaactgtgtagacattt

SEQ ID NO: 329483 - DNA, 120 bp, Artificial Sequence
  ENSG00000136531_169 (sequence is synthesized)
caccaaaaaaagaatataaaattcagaaattattttgagacatttgataatcgataagcttttaagcaattaataattcagatagcatgtttttgatatttttagtctagaaatatgact

SEQ ID NO: 329484 - DNA, 120 bp, Artificial Sequence
  ENSG00000136531_170 (sequence is synthesized)
aatatggcataatttatatattgaataaaggcatctctataaatacagatattagtaacaatagaatgaaatgtgggagccaattttcacatgattactaaggtggattttatagccagc

SEQ ID NO: 329485 - DNA, 120 bp, Artificial Sequence
  ENSG00000136531_171 (sequence is synthesized)
accctgattccctaataatgttgagaagcaaaaactgtaaactaggagtctatttaaattttattttttatatttgcaggagtagtatctaaattcctctttatagtctctagctctcca

SEQ ID NO: 329486 - DNA, 120 bp, Artificial Sequence
  ENSG00000136531_172 (sequence is synthesized)
taagtcactttgatcttcagtgggtttaattattcctttataccatactttctcctttctattgctctccacagaaggaataatagcaggtgacttgtaggtgccaaataagattctgag

SEQ ID NO: 329487 - DNA, 120 bp, Artificial Sequence
  ENSG00000136531_173 (sequence is synthesized)
caaagaacacacctggaaaaccttgaagttctcatgagaaaattttctaaccaaaaaaaaaaatcaaagcctcaattttgtgctttatgtgaattataaatgcggttttaaaatacttac

SEQ ID NO: 329488 - DNA, 120 bp, Artificial Sequence
  ENSG00000136531_174 (sequence is synthesized)
attaaaacttgataaagttgctaagaattcctatggcattgatcacaaattttcttaataatcctcatgtcatttatcaaatttaggaaagtttatagtgctcagaaaaaaaaagcatct

SEQ ID NO: 329489 - DNA, 120 bp, Artificial Sequence
  ENSG00000136531_175 (sequence is synthesized)
atggaaggtatgttaaaagtcctgcgtcacagttacttggtgctttggtaatgatgaaaaaacacttcataaatttcaataaaatacttcctgacttgatattgtatcattattacacat

SEQ ID NO: 329490 - DNA, 120 bp, Artificial Sequence
  ENSG00000136531_176 (sequence is synthesized)
tttactaaataacagtaaaatccgtgcataactcatggattctattatcttccacagattttttttttttatatttagcctccagaaagctgctgcaaatgtaaggtatattttgaacac

SEQ ID NO: 329491 - DNA, 120 bp, Artificial Sequence
  ENSG00000136531_177 (sequence is synthesized)
cactttcatacattaaattctaaacattgaaacttgtgtgcatgacgttgaaaagagtgtaatgataaatgcttatacttatgatgatgctaagccatttggattatattaactgcttga

SEQ ID NO: 329492 - DNA, 120 bp, Artificial Sequence
  ENSG00000136531_178 (sequence is synthesized)
gacacaagttataaaatcctatgacttaaccagaaatataaattaaaaatgtgaattagggtttgatattaacttccttgaagcaaagtgtttaaaattttgtagtcctacttttgcctt

SEQ ID NO: 329493 - DNA, 120 bp, Artificial Sequence
  ENSG00000136531_179 (sequence is synthesized)
tctctgaccagattcttacaatatatcagctttctctttagttgcagattttatctgaatagttaacataatgtgtagcagtctggatctcagaatgccaaaataaagactttggggaca

SEQ ID NO: 329494 - DNA, 120 bp, Artificial Sequence
  ENSG00000136531_180 (sequence is synthesized)
gcttaatctgtgatcaatttctggctctgccatatgttaaatgtgttaatttgtgactttgaatttcagtctcctcatcagtaaaatgtggatgatgatgtttaggcataaggttgttga

SEQ ID NO: 329495 - DNA, 120 bp, Artificial Sequence
  ENSG00000136531_181 (sequence is synthesized)
atggattaaataagccttcttagataaaacactgatgtatttggcatgcagaagacagttaataaatattatcaatattagttgttttgttgttgttatttttgttaattcacatgtttt

SEQ ID NO: 329496 - DNA, 120 bp, Artificial Sequence
  ENSG00000136531_182 (sequence is synthesized)
tgcctttccatactgtaagtgaattcaaacaactgtcaacttcaactacttggaaaatattttcatgtaaaatgtattctatcccccttccttgccctcctattccctcctctccctatc

SEQ ID NO: 329497 - DNA, 120 bp, Artificial Sequence
  ENSG00000136531_183 (sequence is synthesized)
tctttacaaaccttctcccttgtaccccttcccaggtatgtgtgtgagtgtgagtgtgtgtagatgtgtcaagggagaagagaaaaggagaatgaaagcaaaagagagcaagcatacacg

SEQ ID NO: 329498 - DNA, 120 bp, Artificial Sequence
  ENSG00000136531_184 (sequence is synthesized)
tccctttcttattgataattagattttctcttgagattggatagattcctggaataattcttttcctgtctgtatgcaaagatcccataatattattaataccaatacgaaaagcctgaa

SEQ ID NO: 329499 - DNA, 120 bp, Artificial Sequence
  ENSG00000136531_185 (sequence is synthesized)
aatcacagccagaaaaaattcacagtgtagacgactgtgtacatcacagacaagtcagtattacaaaacccaattttcatagtgtcctatttcagtatcctaatgcaattcactgatttc

SEQ ID NO: 329500 - DNA, 120 bp, Artificial Sequence
  ENSG00000136531_186 (sequence is synthesized)
aattgaatattaaactctagtacgttcttccccaacctcgcctgcgttagcttgcactccctcttccccccagctgccagtagcttgctcctccctgtccctccaggtaaatcttttgaa

SEQ ID NO: 329501 - DNA, 120 bp, Artificial Sequence
  ENSG00000136531_187 (sequence is synthesized)
attgtagagatataatgaagcagattaacatggcagtggctctgccaaagctcagggctgagccttctgattgcagcctcagaggcaagccaatattctgagtccaaaggccttttgaac

SEQ ID NO: 329502 - DNA, 120 bp, Artificial Sequence
  ENSG00000136531_188 (sequence is synthesized)
tactccagtaaaaattctgaagaattgcattggagactgttatattcaacacatacgtggattctgtgttatgatttacatttttctttatttcagaatcatttgtataacaagttggta

SEQ ID NO: 329503 - DNA, 120 bp, Artificial Sequence
  ENSG00000136531_189 (sequence is synthesized)
tattgctgagcacatctgtaaagtaagacctgaatatggatttgataattgaagttgacactcatcatagagatttatgaaatattgtgcgcttgattgcagtaggacaacttactatgg

SEQ ID NO: 329504 - DNA, 120 bp, Artificial Sequence
  ENSG00000136535_0 (sequence is synthesized)
atttgctggttgaagtgctttctgtctagtgagggggtctgtggatttctagtttatgataaataggactttaaaaaccagggacgggagggcgagtgttcaggttctagagctatgcag

SEQ ID NO: 329505 - DNA, 120 bp, Artificial Sequence
  ENSG00000136535_1 (sequence is synthesized)
ctggagcactgcctttctccttctatcatgctctccaagaaatttctcaatgtgagcagcagctacccacattcaggcggatccgagcttgtcttgcacgatcatcccattatctcgacc

SEQ ID NO: 329506 - DNA, 120 bp, Artificial Sequence
  ENSG00000136535_2 (sequence is synthesized)
actgacaacctggagagaagttcacctttgaaaaaaattaccagggggatgacgaatcagtcagatacagacaattttcctgactccaaggactcaccaggggacgtccagagaagtaaa

SEQ ID NO: 329507 - DNA, 120 bp, Artificial Sequence
  ENSG00000136535_3 (sequence is synthesized)
ctctctcctgtcttggacggggtctctgagcttcgtcacagtttcgatggctctgctgcagatcgctacctcctctctcagtccagccagccacagtctgcggccactgctcccagtgcc

SEQ ID NO: 329508 - DNA, 120 bp, Artificial Sequence
  ENSG00000136535_4 (sequence is synthesized)
atgttcccgtaccccggccagcacggaccggcgcaccccgccttctccatcggcagccctagccgctacatggcccaccacccggtcatcaccaacggagcctacaacagcctcctgtcc

SEQ ID NO: 329509 - DNA, 120 bp, Artificial Sequence
  ENSG00000136535_5 (sequence is synthesized)
aactcctcgccgcagggataccccacggccggctacccctacccacagcagtacggccactcctaccaaggagctccgttctaccagttctcctccacccagccggggctggtgcccggc

SEQ ID NO: 329510 - DNA, 120 bp, Artificial Sequence
  ENSG00000136535_6 (sequence is synthesized)
aaagcacaggtgtacctgtgcaacaggcccctttggctgaaatttcaccggcaccaaacggagatgatcatcaccaaacagggaaggcgcatgtttccttttttaagttttaacatttct

SEQ ID NO: 329511 - DNA, 120 bp, Artificial Sequence
  ENSG00000136535_7 (sequence is synthesized)
ggtctcgatcccacggctcattacaatatttttgtggatgtgattttggcggatcccaatcactggaggtttcaaggaggcaaatgggttccttgcggcaaagcggacaccaatgtgcaa

SEQ ID NO: 329512 - DNA, 120 bp, Artificial Sequence
  ENSG00000136535_8 (sequence is synthesized)
ggaaatcgggtctatatgcatccggattcccccaacactggggctcactggatgcgccaagaaatctcttttggaaaattaaaacttacgaacaacaaaggagcttcaaataacaatggg

SEQ ID NO: 329513 - DNA, 120 bp, Artificial Sequence
  ENSG00000136535_9 (sequence is synthesized)
cagatggtggttttacagtccttgcacaagtaccagccccgcctgcatgtggtggaagtgaacgaggacggcacggaggacactagccagcccggccgcgtgcagacgttcactttccct

SEQ ID NO: 329514 - DNA, 120 bp, Artificial Sequence
  ENSG00000136535_10 (sequence is synthesized)
gagactcagttcatcgccgtcaccgcctaccagaacacggatattacacaactgaaaatagatcacaacccttttgcaaaaggatttcgggataattatgacacgatctacaccggctgt

SEQ ID NO: 329515 - DNA, 120 bp, Artificial Sequence
  ENSG00000136535_11 (sequence is synthesized)
gacatggaccgcctgaccccctcgcccaacgactcgccgcgctcgcagatcgtgcccggggcccgctacgccatggccggctctttcctgcaggaccagttcgtgagcaactacgccaag

SEQ ID NO: 329516 - DNA, 120 bp, Artificial Sequence
  ENSG00000136535_12 (sequence is synthesized)
tcgtgagcaactacgccaaggcccgcttccacccgggcgcgggcgcgggccccgggccgggtacggaccgcagcgtgccgcacaccaacgggctgctgtcgccgcagcaggccgaggacc

SEQ ID NO: 329517 - DNA, 120 bp, Artificial Sequence
  ENSG00000136535_13 (sequence is synthesized)
cgctggtttgtgacgccggccaacaaccggctggacttcgcggcctcggcctatgacacggccacggacttcgcgggcaacgcggccacgctgctctcttacgcggcggcgggcgtgaag

SEQ ID NO: 329518 - DNA, 120 bp, Artificial Sequence
  ENSG00000136535_14 (sequence is synthesized)
gcgctgccgctgcaggctgcaggctgcactggccgcccgctcggctactacgccgacccgtcgggctggggcgcccgcagtcccccgcagtactgcggcaccaagtcgggctcggtgctg

SEQ ID NO: 329519 - DNA, 120 bp, Artificial Sequence
  ENSG00000136535_15 (sequence is synthesized)
cgagcgctcgccgctgccgcccggcgccgccgaggacgccaagcccaaggacctgtccgattccagctggatcgagacgccctcctcgatcaagtccatcgactccagcgactcggggat

SEQ ID NO: 329520 - DNA, 120 bp, Artificial Sequence
  ENSG00000136535_16 (sequence is synthesized)
ttacgagcaggccaagcggaggcggatctcgccggccgacacgcccgtgtccgagagttcgtccccgctcaagagcgaggtgctggcccagcgggactgcgagaagaactgcgccaagga

SEQ ID NO: 329521 - DNA, 120 bp, Artificial Sequence
  ENSG00000136535_17 (sequence is synthesized)
cattagcggctactatggcttctactcgcacagctaggccgcccctgcccgcccggccccgccgcggcccggacccccagccagcccctcacagctcttccccagctccgcctccccaca

SEQ ID NO: 329522 - DNA, 120 bp, Artificial Sequence
  ENSG00000136535_18 (sequence is synthesized)
ctcctccttgcgcacccactcattttatttgaccctcgatggccgtctgcagcgaataagtgcaggtctccgagcgtgattttaaccttttttgcacagcagtctctgcaattagctcac

SEQ ID NO: 329523 - DNA, 120 bp, Artificial Sequence
  ENSG00000136535_19 (sequence is synthesized)
cgaccttcaactttgctgtaaaccttttggttttcctacttactcttcttctgtggagttatcctcctacaattcccctccccctcgtctttctcttacctcctacttctctttcttgta

SEQ ID NO: 329524 - DNA, 120 bp, Artificial Sequence
  ENSG00000136535_20 (sequence is synthesized)
atgaaactcttcacctttaggagacctgggcagtcctgtcaggcagcagcgattccgacccgccaagtctcggcctccacattaaccataggatgttgactctagaacctggacccaccc

SEQ ID NO: 329525 - DNA, 120 bp, Artificial Sequence
  ENSG00000136535_21 (sequence is synthesized)
agcgcgtcctttcttatccccgagtggatggatggatggatggatggtagggatgttaataattttagtggaacaaagcctgtgaaatgattgtacatagtgttaatttattgtaacgaa

SEQ ID NO: 329526 - DNA, 120 bp, Artificial Sequence
  ENSG00000136535_22 (sequence is synthesized)
tggctagtttttattctcgtcaaggcacaaaaccagttcatgcttaacctttttttcctttcctttctttgcttttctttctctcctctcatactttctcttctctctcttttaattttc

SEQ ID NO: 329527 - DNA, 120 bp, Artificial Sequence
  ENSG00000136535_23 (sequence is synthesized)
ttgtgagataatattctaagaggctctagaaacatgaaatactcagtagtgatgggtttcccacttctcctcaatccgttgcatgaaataattactatgtgccctaatgcacacaaatag

SEQ ID NO: 329528 - DNA, 120 bp, Artificial Sequence
  ENSG00000136535_24 (sequence is synthesized)
ctaaggagaatccacccaaacacctttaaaggataggtgtctgttcataggcaagtcgattaagtggcatgatgcctgcaaagcaaagtcaactggagttgtatgttccccccaccttct

SEQ ID NO: 329529 - DNA, 120 bp, Artificial Sequence
  ENSG00000136535_25 (sequence is synthesized)
aaatagaatagctcgacatcagcaatattattttgccttatttgtttttccccaaagtgccaaatccattactggtctgtgcaggtgccaaatatgctgacaaactgtttctgaatatct

SEQ ID NO: 329530 - DNA, 120 bp, Artificial Sequence
  ENSG00000136535_26 (sequence is synthesized)
ttcagtaccccttcacctttatatgctgtaaatctttgtaatgaatactctattaatgatatagatgactgaattgttggtaactatagtgtagtctagtgaagatgaattgtgtgagtt

SEQ ID NO: 329531 - DNA, 120 bp, Artificial Sequence
  ENSG00000136535_27 (sequence is synthesized)
gtatattttactgcattttagttttgaaaatgacttccccaccacctagaaacagctgaaatttgacttccttgggagaacactagcattaatgcaagtaagactgattttcccctaagt

SEQ ID NO: 329532 - DNA, 120 bp, Artificial Sequence
  ENSG00000136535_28 (sequence is synthesized)
cttgttatatttgataaggagcattaatccccctggaaatagattagtaggatttctaatgttgtgtagcaaacctatacttttttgtatttaaaaattaatgtgaaatatgcatcatac

SEQ ID NO: 329533 - DNA, 120 bp, Artificial Sequence
  ENSG00000136535_29 (sequence is synthesized)
acaatattcaatctagattccagtccatggggggatttttcctaataggaattcagggtctaaacgtgtgtatattttggctcttctgtaaatctaatgttgtgatttttatatttgttt

SEQ ID NO: 329534 - DNA, 120 bp, Artificial Sequence
  ENSG00000136535_30 (sequence is synthesized)
cgttttgtctgtgaactgaataatttatacaagaacacactccattgagaaacgttttgttttttgctcgtttgtatcgtctgtgtataacaagtaaaataaacctggtaaaaacgctaa

SEQ ID NO: 329535 - DNA, 120 bp, Artificial Sequence
  ENSG00000136535_31 (sequence is synthesized)
gccgcggcagcgacgatttggggtcgggagcggagtggaaggcgccctagagttggctagttttggaaagggggaaagtggaagggataaccgccagggtgatgttggtgggggggaccc

SEQ ID NO: 329536 - DNA, 120 bp, Artificial Sequence
  ENSG00000136535_32 (sequence is synthesized)
cgttctaggaacatagtgggagagccagtcagtggccagaggaaggcaagaaaaaggaagagccctggccagcggctgggcgatgggagggacgcatcaacactggcatgcacggacagg

SEQ ID NO: 329537 - DNA, 120 bp, Artificial Sequence
  ENSG00000136535_33 (sequence is synthesized)
tggagacgcaggtcgccaacctcgctctccacctgggcagtgataactgccaccttcccactccagctcacccgccgctctccctgatttgggttgcacttcttttcttctcccaccacc

SEQ ID NO: 329538 - DNA, 120 bp, Artificial Sequence
  ENSG00000136535_34 (sequence is synthesized)
ctttttctaatccagcaaatattcgcctatttgctgcaagtacaagttttgctttgctaactggcgccccgcttcttgcatttaatctttaacatttatgtttcttttttccttgttttc

SEQ ID NO: 329539 - DNA, 120 bp, Artificial Sequence
  ENSG00000136535_35 (sequence is synthesized)
agttcgtcagtgtaaagcagcatatggaactggatacacgtttctttgcttcattaaaaagacttaaaaattgtatttccaccctccaaatttatattaaatctgtaaagttgttctcat

SEQ ID NO: 329540 - DNA, 120 bp, Artificial Sequence
  ENSG00000136535_36 (sequence is synthesized)
tggcaacacctccgtcggcccaattttggagtgcccgaccttcccaagtactaatactgattgattttgagaagaaaccccacaagatctgcaggttgtggaaatctttgttcctcctta

SEQ ID NO: 329541 - DNA, 120 bp, Artificial Sequence
  ENSG00000136535_37 (sequence is synthesized)
caggaggactaggagaagggccctgaggatcgggcggtcggcttcccccttttttccggtgccccggcttatcttcgctcccagaggtgcgaaagccggtctgccccagccagccagccg

SEQ ID NO: 329542 - DNA, 120 bp, Artificial Sequence
  ENSG00000136535_38 (sequence is synthesized)
ccagccaggcgagtcccgcggtcagttagcctggaaggcgggctgcaggctgcctccgccggcccgggcgcgcagccgggcgcacacagccacgcgcacagcgaccgcgttaacacgcca

SEQ ID NO: 329543 - DNA, 120 bp, Artificial Sequence
  ENSG00000136535_39 (sequence is synthesized)
ccaccctctcacattctcccgccatgcaaggctagggtactagcagcgctaacatcagcaacagctggctccgctgtgcgttttaaggcttagggctcggggcctgcccacggcaccttt

SEQ ID NO: 329544 - DNA, 120 bp, Artificial Sequence
  ENSG00000136535_40 (sequence is synthesized)
cctaaataccaagccggtgggaaaaagctttctatttgttttcgtcgctggtcacccgggccacctttgaggtggccaggatttctaaagactcttcttttgggagttttaatttgggct

SEQ ID NO: 329545 - DNA, 120 bp, Artificial Sequence
  ENSG00000136535_41 (sequence is synthesized)
ttgaactagaacagattaaaatctactttaaaaaaaaattctctctttcctttagaaaacaagcagatttccccgtgcattttattcttggcaagctttggcatctaaaaaaaaatttct

SEQ ID NO: 329546 - DNA, 120 bp, Artificial Sequence
  ENSG00000136535_42 (sequence is synthesized)
ctctctctctctttttttcatctcagaactgatggctgaaatgaacaaacatcactgttctgggagatcaaaagaacatacacattcatatatgtgaaaactacaataaatcaaattact

SEQ ID NO: 329547 - DNA, 120 bp, Artificial Sequence
  ENSG00000136535_43 (sequence is synthesized)
gagggctatggattgagctttctagcacttgaaccacttctgatttttcaagtttgcaaaaacagattttagtggctgatttgactactaggagtgataggggtttttgtgtttgtttct

SEQ ID NO: 329548 - DNA, 120 bp, Artificial Sequence
  ENSG00000136535_44 (sequence is synthesized)
tttttttacttaaatgataatatcagaaattaaaacatgcttttaaatccaacctgattttaagatgcaacttgtggtttctcaggttgtgagtcagaagcgacaaacgttttaaaatat

SEQ ID NO: 329549 - DNA, 120 bp, Artificial Sequence
  ENSG00000136535_45 (sequence is synthesized)
aaaatacttaaaatagtcaacatttagtgatgaattcaagttctccttaaagatttttgtctgaacaagtgcattgtgtgtaacaagcatttttaaaatgtgagtttgaacaaatttaga

SEQ ID NO: 329550 - DNA, 120 bp, Artificial Sequence
  ENSG00000136535_46 (sequence is synthesized)
aaacacaggagagctaattgaaagcagttctttggctataggtatcattaatttaaacatgttcctcataactttcatgatactttctctttttttcctttccactcaatccctcaaatt

SEQ ID NO: 329551 - DNA, 120 bp, Artificial Sequence
  ENSG00000136535_47 (sequence is synthesized)
tttcagttaggaaaaccttgctatttaataaattgtaggccttaagcccctgtaaaagtggcagatgatatattctcaaacacccagtcttcacgtataaaaggtgagataacattcatt

SEQ ID NO: 329552 - DNA, 120 bp, Artificial Sequence
  ENSG00000136535_48 (sequence is synthesized)
atagctgtggaattgggctttaggtcaaaggtgtattattatgtacaaggattttgaaagctggaatgtgtgaagacaaggttgttttagaggacttcttcttcttcgtctttcttcttt

SEQ ID NO: 329553 - DNA, 120 bp, Artificial Sequence
  ENSG00000136535_49 (sequence is synthesized)
ttttttttttttttttttttggttggctccccttctctctggtgaccttgtggcttggtacttgcgtggtttttggtcagaggtttcctccacctaattttaactttcctgtggattaca

SEQ ID NO: 329554 - DNA, 120 bp, Artificial Sequence
  ENSG00000136535_50 (sequence is synthesized)
tttcctgtggattacaaagttgttggtgggcctctggggctggctggctggctggggaggctgccctggttctcgggtgcgagtactgtatgtggcgctgcagatgctcagctcagattg

SEQ ID NO: 329555 - DNA, 120 bp, Artificial Sequence
  ENSG00000136535_51 (sequence is synthesized)
tctatgtctgtctgaaacgggcaattctgcctaaaagtgcatgtggctcctctggcagttgttaacagtctccttagcatatgcgacctttatttacccatttccaagttttgtataata

SEQ ID NO: 329556 - DNA, 120 bp, Artificial Sequence
  ENSG00000136535_52 (sequence is synthesized)
gcatttcctgtgcaagttggctacggactgaatacaaatgtgcacccaccacaggcgagttcatgagcagaaccgctgttatggtcattttaggctttcggaaagattcagacggtgttg

SEQ ID NO: 329557 - DNA, 120 bp, Artificial Sequence
  ENSG00000136535_53 (sequence is synthesized)
ctgtgtattatttataagcttcaaaagaaaaatatttcctctttgttttgtatctaggtgtgttttaattaaacatgctggtgcccttttctttaggcctcccttacctccctcctttct

SEQ ID NO: 329558 - DNA, 120 bp, Artificial Sequence
  ENSG00000136535_54 (sequence is synthesized)
atcaaaaggctgttctctggggccaacagtaggtgtaaactgaatgctttctgggcttgttctgcaattctcactcagggtccatagtgcctaagagttcagatagtgtcataaatctaa

SEQ ID NO: 329559 - DNA, 120 bp, Artificial Sequence
  ENSG00000136535_55 (sequence is synthesized)
atctggattgtggggttcccccacgttttctgaccataaaaggaaagggtacatacatcttaatttcgtggcttacattgagcgcctgagacagagctaaaaagttgaagctgcctttga

SEQ ID NO: 329560 - DNA, 120 bp, Artificial Sequence
  ENSG00000136535_56 (sequence is synthesized)
ctagcatagattaaatgtgtggagaaagagacaagtgactgcctctattccatctccaagcagataccaaccatccctcctgatattttctaataatttaaaagagagtcattgatatta

SEQ ID NO: 329561 - DNA, 120 bp, Artificial Sequence
  ENSG00000136535_57 (sequence is synthesized)
ctgcctataaccaccatatatattcttcaaaagtactccaaaggaaccaagtctcatcaatatgattccccagaataaaaacttggctactctattcctcacaatctaaaaaggtgtgcc

SEQ ID NO: 329562 - DNA, 120 bp, Artificial Sequence
  ENSG00000136535_58 (sequence is synthesized)
cagcacagtggaaagtatatggctcaagagactagagatgttagaggagagtcctgtagattttgagattttaattctgttgtgaacatctgttcaaaagcattttattttgcacaaatc

SEQ ID NO: 329563 - DNA, 120 bp, Artificial Sequence
  ENSG00000136535_59 (sequence is synthesized)
aattcagtaatcccaagtgggtgggacctggataggcatctaaactgtatcttttgcggactgcttttttctttttaaaatattgtggtgataaacagagaagatatttgcaccttgcta

SEQ ID NO: 329564 - DNA, 120 bp, Artificial Sequence
  ENSG00000136535_60 (sequence is synthesized)
gttatgttcccttcctgcctccctctacttctcttatttgaaactggaattcaatttcagaagggaaattttgtgcactaaacagaacggacctgagcagccacagcaaaactctcacat

SEQ ID NO: 329565 - DNA, 120 bp, Artificial Sequence
  ENSG00000136535_61 (sequence is synthesized)
acatgcccctcctcctctggctgccttctgttggaaaagccactcctctttgatcttaaatcactttaaatctttcataaaagcttctttatctatacacacacacacacacacacacac

SEQ ID NO: 329566 - DNA, 120 bp, Artificial Sequence
  ENSG00000136535_62 (sequence is synthesized)
aaacctgagatttttaggggacagagaagagttgagtggttcatgacactcttcctttccccttttacgttggttacttggacatggctcaattttggagaaagagggagaagtataagg

SEQ ID NO: 329567 - DNA, 120 bp, Artificial Sequence
  ENSG00000136535_63 (sequence is synthesized)
gttcatggggtactaggagcttgcttggccactcaccagggaatctcctccccaaaggattaaggtctgacaagactgaggctctccttcaaaacagtctgttgactaaagattaaaaca

SEQ ID NO: 329568 - DNA, 120 bp, Artificial Sequence
  ENSG00000136535_64 (sequence is synthesized)
tttatgtgtgagctaaataaaaagggaggcatgtgtgcatgtgtatgagaaaacacttctaccaatcttcatccaacccttggtttcctctcaattctaatgggattttctaggcccagg

SEQ ID NO: 329569 - DNA, 120 bp, Artificial Sequence
  ENSG00000136535_65 (sequence is synthesized)
gcctaaagttaatctttgattattttatctaaggtaattcccaacaacacaatcactgtcgctggttgggcaagttatttaacttccttttgcctcaatttcctcatcggtaaagtggga

SEQ ID NO: 329570 - DNA, 120 bp, Artificial Sequence
  ENSG00000136535_66 (sequence is synthesized)
taataaaagttacctagctcacagtgcctggcatatagtcgagctccgtaaaggttagctattattagtggtccattgcatggagtaggctgataagtacactgtaggtttgccccgaag

SEQ ID NO: 329571 - DNA, 120 bp, Artificial Sequence
  ENSG00000136535_67 (sequence is synthesized)
tttctgcgggtaacggaccaaaagctaggaaaagaaggtcagagtaaagaacaccttttctcttaagagaatatttctgattgatgactactgtttcagagtagtaattcttgtttgtat

SEQ ID NO: 329572 - DNA, 120 bp, Artificial Sequence
  ENSG00000136535_68 (sequence is synthesized)
tagtagaggtgggagtgaaagtttcacacaggggaaacaatagacactaagtactttggaggcttccagcagcaaacctcgggttccagaacacgggtgaaggccagtctttcatgatta

SEQ ID NO: 329573 - DNA, 120 bp, Artificial Sequence
  ENSG00000136535_69 (sequence is synthesized)
ctgcgtgcgcggctttttcctaggggtttctgaaacaatctagaaaaaggagagatatcacctgaacaatcaaatggacacaggaggtcttaaaagggtggaggagtgagtaccttgctt

SEQ ID NO: 329574 - DNA, 120 bp, Artificial Sequence
  ENSG00000136535_70 (sequence is synthesized)
agaaatttcactcataaactgaccgcagaggaaaggcccactgggcaaagagcatcttactccctaggtaaatctgccttaatgtgcacacatatgttggagaagtgggatgaaagtcct

SEQ ID NO: 329575 - DNA, 120 bp, Artificial Sequence
  ENSG00000136535_71 (sequence is synthesized)
tgcttgtgcccctctctcagtaccccagtacacttgacgagagagagcaagagaagagggaagtcgttcccttgatggtctgtatcttgctcaggtccctgcatagacagattggctcct

SEQ ID NO: 329576 - DNA, 120 bp, Artificial Sequence
  ENSG00000136535_72 (sequence is synthesized)
ctataattccgtgatttattttgggaatgatagaggtctgtggcctcttgtattctccaggaaatcctggactgcaagtttgtagatggagggtgtgggggtgggcgaaaagtggaggtg

SEQ ID NO: 329577 - DNA, 120 bp, Artificial Sequence
  ENSG00000136535_73 (sequence is synthesized)
tttgtggactggctcgagcgacttttaaaacgatcggccaatgacttctaaaaggaaacgagggggacagggggacagactgagctgcgagaagggggaggattatgcaaaagctatttt

SEQ ID NO: 329578 - DNA, 120 bp, Artificial Sequence
  ENSG00000136535_74 (sequence is synthesized)
acggcacctttcctaaataccaagccggtgggaaaaagctttctatttgttttcgtcgctggtcacccgggccacctttgagattacacaactgaaaatagatcacaacccttttgcaaa

SEQ ID NO: 329579 - DNA, 120 bp, Artificial Sequence
  ENSG00000136536_0 (sequence is synthesized)
ggtggctggttctgcgccggatccgggagaggggcgggcgccattgtgcttcgctgccgactgcatttcctcagtcacgggcctagaactccaaggagaaaggcggcgaaaaatctttaa

SEQ ID NO: 329580 - DNA, 120 bp, Artificial Sequence
  ENSG00000136536_1 (sequence is synthesized)
gaatggagtctaaaccttcaaggattccaagaagaatttctgttcaaccttccagctccttaagtgctaggatgatgtctggaagcagaggaagtagtttaaatgatacctatcactcaa

SEQ ID NO: 329581 - DNA, 120 bp, Artificial Sequence
  ENSG00000136536_2 (sequence is synthesized)
gagactcttcatttagattggattctgaatatcagtctacatcagcatcagcatctgcgtcaccatttcaatctgcatggtatagtgaatctgagataactcagggagcacgctcaagat

SEQ ID NO: 329582 - DNA, 120 bp, Artificial Sequence
  ENSG00000136536_3 (sequence is synthesized)
cgcagaaccagcaacgggatcatgattcaaaaagacctaaactttcctgtacaaactgtactacctcagctgggagaaatgttggaaatggtttaaacacattatcagattcatcttgga

SEQ ID NO: 329583 - DNA, 120 bp, Artificial Sequence
  ENSG00000136536_4 (sequence is synthesized)
ggcatagtcaagttcctagatcttcatcaatggtacttggatcatttggaacagacttaatgagagagaggagagatttggagagaagaacagattcctctattagtaatcttatggatt

SEQ ID NO: 329584 - DNA, 120 bp, Artificial Sequence
  ENSG00000136536_5 (sequence is synthesized)
atagtcaccgaagtggtgatttcacaacttcatcatatgttcaagacagagttccttcatattcacaaggagcaagaccaaaagaaaactcaatgagcactttacagttgaatacatcat

SEQ ID NO: 329585 - DNA, 120 bp, Artificial Sequence
  ENSG00000136536_6 (sequence is synthesized)
ccacaaaccaccaattgccttctgaacatcagaccatactaagttctagggactccagaaattctttaagatcaaatttttcttcaagagaatcagaatcttcccgaagcaatacgcagc

SEQ ID NO: 329586 - DNA, 120 bp, Artificial Sequence
  ENSG00000136536_7 (sequence is synthesized)
ctggattttcttacagttcaagtagagatgaagccccaatcataagcaattcagaaagggttgtttcatctcaaagaccatttcaagaatcttctgacaatgaaggtaggcggacaacga

SEQ ID NO: 329587 - DNA, 120 bp, Artificial Sequence
  ENSG00000136536_8 (sequence is synthesized)
ggagattgctgtcacgcatagcttctagcatgtcatctacttttttttcacgaagatctagtcaggattccttgaatacaagatcattgaattctgaaaattcttacgtttctccaagaa

SEQ ID NO: 329588 - DNA, 120 bp, Artificial Sequence
  ENSG00000136536_9 (sequence is synthesized)
tcttgacagcttcacagtcccgtagtaatgtaccatcagcttctgaagttcccgataatagggcatctgaagcttctcagggatttcgatttcttaggcgaagatggggtttgtcatctc

SEQ ID NO: 329589 - DNA, 120 bp, Artificial Sequence
  ENSG00000136536_10 (sequence is synthesized)
ttagccacaatcatagctctgagtcagattcagaaaattttaaccaagaatctgaaggtagaaatacaggaccatggttatcttcctcacttagaaatagatgcacacctttgttctcta

SEQ ID NO: 329590 - DNA, 120 bp, Artificial Sequence
  ENSG00000136536_11 (sequence is synthesized)
gaaggaggcgagagggaagagatgaatcttcaaggatacctacctctgatacatcatctagatctcatatttttagaagagaatcaaatgaagtggttcaccttgaagcacagaatgatc

SEQ ID NO: 329591 - DNA, 120 bp, Artificial Sequence
  ENSG00000136536_12 (sequence is synthesized)
ctcttggagctgctgccaacagaccacaagcatctgcagcatcaagcagtgccacaacaggtggctctacatcagattcggctcaaggtggaagaaatacaggaatatcagggattcttc

SEQ ID NO: 329592 - DNA, 120 bp, Artificial Sequence
  ENSG00000136536_13 (sequence is synthesized)
ctggttccttattccggtttgcagtccctccagcacttgggagtaatttgaccgacaatgtcatgatcacagtagatattattccttcaggttggaattcagctgatggtaaaagtgata

SEQ ID NO: 329593 - DNA, 120 bp, Artificial Sequence
  ENSG00000136536_14 (sequence is synthesized)
aaactaaaagtgcgccttcaagagatccagaaagattgcagaaaataaaagagagcctccttttagaggactcagaagaagaagaaggtgacttatgtagaatttgtcaaatggcagctg

SEQ ID NO: 329594 - DNA, 120 bp, Artificial Sequence
  ENSG00000136536_15 (sequence is synthesized)
catcatcatctaatttgctgatagagccatgcaagtgcacaggaagtttgcagtatgtccaccaagactgtatgaaaaagtggttacaggccaaaattaactctggttcttcattagaag

SEQ ID NO: 329595 - DNA, 120 bp, Artificial Sequence
  ENSG00000136536_16 (sequence is synthesized)
ctgtaaccacctgtgaactatgtaaagagaagttggagcttaacctggaggattttgatattcatgaactacatagagctcatgcaaatgaacaagctgagtatgagtttatcagctctg

SEQ ID NO: 329596 - DNA, 120 bp, Artificial Sequence
  ENSG00000136536_17 (sequence is synthesized)
gtctctacctagtggtgttattgcacttgtgcgaacaaagcttttctgatatgatgggaaatacaaatgaaccaagcacacgtgtccgatttattaaccttgcaagaactcttcaggcac

SEQ ID NO: 329597 - DNA, 120 bp, Artificial Sequence
  ENSG00000136536_18 (sequence is synthesized)
atatggaagatctcgaaacttcagaggatgattccgaagaagacggagaccataacaggacatttgatattgcctaacttcatataagacagatggatgatctgtgaacataagtgttta

SEQ ID NO: 329598 - DNA, 120 bp, Artificial Sequence
  ENSG00000136536_19 (sequence is synthesized)
ttaaaaatggcaattaaatataaattacttttgtgggggaatgcctaataaatacattgactatatataaaatgaatatatacatacacatgtatgcctgtatatatatattcattctcc

SEQ ID NO: 329599 - DNA, 120 bp, Artificial Sequence
  ENSG00000136536_20 (sequence is synthesized)
agtgttgctgaattaaaattctgctggactttttaacatagcaaatccgatgtttataaactggtaatcaaaaaggttttttcttttaggtgagtgggaaagtattacccttgttttaaa

SEQ ID NO: 329600 - DNA, 120 bp, Artificial Sequence
  ENSG00000136536_21 (sequence is synthesized)
tatctaagcaatgcctatcaacccttttttgtgttatgattactgtagtcatatttatgaaaaaaggtttgtgttttactcttgctagtgagaaaagtgggacaaaatatacttttgaaa

SEQ ID NO: 329601 - DNA, 120 bp, Artificial Sequence
  ENSG00000136536_22 (sequence is synthesized)
taaaatgctatatggcacctaattattttttcttttaaaatgccttaagttgcagtctcattttgataatcatttgcttccagtgtttaaaaattaaaaaaagaatggggagaaggttat

SEQ ID NO: 329602 - DNA, 120 bp, Artificial Sequence
  ENSG00000136536_23 (sequence is synthesized)
ggagaaggttatgagaagagcattattaagtttccaaatttaatttgaattccaaattcacctagcaataaaatctaatttttaaaaagtatataaatataaaatgtataaatgatggat

SEQ ID NO: 329603 - DNA, 120 bp, Artificial Sequence
  ENSG00000136536_24 (sequence is synthesized)
tagatattccttttaggaatattacagctgtaaattatatgagacttgccagtcaaatgctatttggtttaaaaaaattattgcaatctcaagttaatggaatatttttaaatcccacat

SEQ ID NO: 329604 - DNA, 120 bp, Artificial Sequence
  ENSG00000136536_25 (sequence is synthesized)
tcagagtttaaaacactggttttcaatgtgttttttagtgttgtcacttgtttatagataaatatataaataacctgtttggatcctggtcctttttaactgttccttggtaattctgag

SEQ ID NO: 329605 - DNA, 120 bp, Artificial Sequence
  ENSG00000136536_26 (sequence is synthesized)
catttatttgatgacttaatatttttcactacctttggagaacagatgaacattattcaccatgaatggatctatactgtgtggtcatgagttgtgtatacttccataacactgtatttt

SEQ ID NO: 329606 - DNA, 120 bp, Artificial Sequence
  ENSG00000136536_27 (sequence is synthesized)
tcttctgtcagtacccttaggatacactttaaaacaccttaaggtctgatgttatggcaacaaactactttttcaaacctaaataggaaccatgtaatttctcaaaagtgattgaacagt

SEQ ID NO: 329607 - DNA, 120 bp, Artificial Sequence
  ENSG00000136536_28 (sequence is synthesized)
ttgcccacacttagtttgttggtcttatgtaaaacattggctcaaaataaagtacacactgatttattttactgtttgaaatgtttccttttaaactggtgctcaaagaagacatcagac

SEQ ID NO: 329608 - DNA, 120 bp, Artificial Sequence
  ENSG00000136536_29 (sequence is synthesized)
ttcataaccaagaattttattacaatttcaaatctcattttaagcaataatataaatgttctaaaacatttgctcacctcttgccagttacctttgcattgtctgtcttaaagcaaaaat

SEQ ID NO: 329609 - DNA, 120 bp, Artificial Sequence
  ENSG00000136536_30 (sequence is synthesized)
ataaaatttaagggtggtagttttaatatattctgtgggtcctaagggatgctttgaatttgaagtatatatacttttaataaaattcagtatgacagttgtcttctgcttaacccataa

SEQ ID NO: 329610 - DNA, 120 bp, Artificial Sequence
  ENSG00000136536_31 (sequence is synthesized)
aactttatttaaaaaatttaactagatggtacaaaacattcattggtatgcacataattctgtatagttttgttattaaatgctaaatgacagtgataacaatggcttaagctttacagt

SEQ ID NO: 329611 - DNA, 120 bp, Artificial Sequence
  ENSG00000136536_32 (sequence is synthesized)
attcttgtagttccctagtaccacttagtatttaaatattgtcatattagcttcagattatcatgtaaatgacggtagaggaataagagaaaaggctttcattggttatcagttttaaat

SEQ ID NO: 329612 - DNA, 120 bp, Artificial Sequence
  ENSG00000136536_33 (sequence is synthesized)
tctgaacaaaagagaccatacactgctcactacaagaatgcaattttctaagaaaatgtagtttaaaatgttattctgaatatctgccaaagaattatattgttattactagctagaacc

SEQ ID NO: 329613 - DNA, 120 bp, Artificial Sequence
  ENSG00000136536_34 (sequence is synthesized)
aagatgttgaagaaagcagtttctacattctggatgtagtaaacaagcctgcctgtgtaatccaattatctcttcactaatgagtagataaggtgcctgttatagatgttctggtatata

SEQ ID NO: 329614 - DNA, 77 bp, Artificial Sequence
  ENSG00000136536_35 (sequence is synthesized)
gtgacagatgtctgtgacctgcaaggcggagattggagagagccaagatcgagccactgcactgtagcctgggcagc

SEQ ID NO: 329615 - DNA, 120 bp, Artificial Sequence
  ENSG00000136536_36 (sequence is synthesized)
gagagccaagatcgagccactgcactgtagcctgggcagcacagtgagactccatcatatatatatatatagcacttcattaccagaggcctcttggcctgttgaaaaatgaaaccaaat

SEQ ID NO: 329616 - DNA, 120 bp, Artificial Sequence
  ENSG00000136536_37 (sequence is synthesized)
attgaaaattaaatcagagtttaaagcagctattttggaagagctgccattaggtagaaagtatcaaaatgtacaaaagaaagttgtatgggagttgagtggaaggtaggatttaagagc

SEQ ID NO: 329617 - DNA, 120 bp, Artificial Sequence
  ENSG00000136536_38 (sequence is synthesized)
agcactgcccaataaaacttcctataatgaaaatgttctataatgtatgttgcccagtacagtagccactaaccacctgtgatttgaacacttgacaatgtggctaatgtaattcgaaaa

SEQ ID NO: 329618 - DNA, 120 bp, Artificial Sequence
  ENSG00000136536_39 (sequence is synthesized)
ctggattttaaactaaatttacttaaatagcctcatgtggctagtggctcattggacattgtagttgtagacgtttgagactgttggttttaagttggacttaatcactttcctacccaa

SEQ ID NO: 329619 - DNA, 120 bp, Artificial Sequence
  ENSG00000136536_40 (sequence is synthesized)
attctaccactcctttaagaactcctttagaactcttttagttcacataatacgccatattttttttactgtgcctgtagttcttcaaggagtggtacaatttgggtaggaaaaccaggc

SEQ ID NO: 329620 - DNA, 120 bp, Artificial Sequence
  ENSG00000136536_41 (sequence is synthesized)
aggaattccagggtagtgttcaatattgacattagtaatagtctatcaataataaaatagacatctcaatcactatacaaaatctcagaaatgtaaagctcttacagagcatgcttgtgc

SEQ ID NO: 329621 - DNA, 120 bp, Artificial Sequence
  ENSG00000136536_42 (sequence is synthesized)
ttgtgtaacagctggtgtaatgcctgcattttcagtaccatgtagccgcactgttaatagttttctatcactttttagttactcatgtctcattaatgatagtgccattaattgtgatga

SEQ ID NO: 329622 - DNA, 120 bp, Artificial Sequence
  ENSG00000136536_43 (sequence is synthesized)
gtgttttcgattcatgtggtcaataaaaagagactacacaagctggaactttgttgccattagtcaagctagtgagatagtatatctatctatctccccagaagaaagtaagataattga

SEQ ID NO: 329623 - DNA, 120 bp, Artificial Sequence
  ENSG00000136536_44 (sequence is synthesized)
tggggtgtggattcagaagagggattacttttctttgagcctcagacttctagacagtatacttcagtcagtaatggaccacatatagaacagtgtttccttagtagaccatatttttac

SEQ ID NO: 329624 - DNA, 120 bp, Artificial Sequence
  ENSG00000136536_45 (sequence is synthesized)
tgtaccttttctatatttagatacacaaatattgtgttacaattgtctgcagtattcagcacagtaacatgctgtgtaggtttgggacaaaataggctctaccatctgggtttgtgtaaa

SEQ ID NO: 329625 - DNA, 120 bp, Artificial Sequence
  ENSG00000136536_46 (sequence is synthesized)
tacaagctgattttcacacaagattccctaactatgcatttcttagaacgtatccccattgataagtgatacgtgactaatttacgtgaaatttatacattctttatctttcctgttttt

SEQ ID NO: 329626 - DNA, 120 bp, Artificial Sequence
  ENSG00000136536_47 (sequence is synthesized)
ggtttattgatggtgaggaaaattactcgtttcagctttttcatttttttactccccaaatgattttcacctttttcttaaaatgtacaataaatgcactgaaaactttgatcactgtca

SEQ ID NO: 329627 - DNA, 120 bp, Artificial Sequence
  ENSG00000136536_48 (sequence is synthesized)
ggttctgcgccggatccgggagaggggcgggcgccattgtgcttcgctgccgactgcatttcctcagtcacgggcctagaactccaaggagaaaggcggcggaattcatgatttgttcct

SEQ ID NO: 329628 - DNA, 120 bp, Artificial Sequence
  ENSG00000136536_49 (sequence is synthesized)
gtagctgaaacatacattgaatgctttctgccctggcatgaacttacatggtcagagctggtttttcctgccctcaaatatatttctctgactctaccggttagactagaaaaatcttta

SEQ ID NO: 329629 - DNA, 120 bp, Artificial Sequence
  ENSG00000136536_50 (sequence is synthesized)
tttgtaagctgcgcttcacctgctactaatcttgctgttacttctgctatcccatctttaaatttttatcacaatttgaatgattggcaactatgatcatcttatgtctttagtaacatc

SEQ ID NO: 329630 - DNA, 120 bp, Artificial Sequence
  ENSG00000136536_51 (sequence is synthesized)
gttctgcgccggatccgggagaggggcgggcgccattgtgcttcgctgccgactgcatttcctcagtcacgggcctagaactccaaggagaaaggcggcggtgcgtgttgctgcgagtgg

SEQ ID NO: 329631 - DNA, 120 bp, Artificial Sequence
  ENSG00000136541_0 (sequence is synthesized)
gatgcctttaactctgccagggaactggcaagcaacaaagaaggtggtgattggctggattcttgctcatggctcctggcagatctgacaaatcctcttgcttttgctctaatctctgtc

SEQ ID NO: 329632 - DNA, 120 bp, Artificial Sequence
  ENSG00000136541_1 (sequence is synthesized)
tggatacttttaggaaaagaaccttgttattatgtactaaagtgaataatttgtgctcttagagtaggagttggaactataggacttgaaggcaagagcaggtatcttatcaaggatcta

SEQ ID NO: 329633 - DNA, 120 bp, Artificial Sequence
  ENSG00000136541_2 (sequence is synthesized)
ctcactcagtttccctaaagctctctctccagatcggattcaaccgcacatcatgacagatgttccggctacatttacccaggctgagtgtaatggggataaaccacctgaaaacggtca

SEQ ID NO: 329634 - DNA, 120 bp, Artificial Sequence
  ENSG00000136541_3 (sequence is synthesized)
acaaacaatcactaaaatcagtgaggaattgactgatgtggacagccccctgccacactacagggtagaacccagtctggaaggtgcactcaccaaaggaagtcaggaggaaagaagaaa

SEQ ID NO: 329635 - DNA, 120 bp, Artificial Sequence
  ENSG00000136541_4 (sequence is synthesized)
attacaagggaacatgctgctcaactcatccatggaggacaaaatgctaaaagaaaacccagaagagaaactctttattgttcataaggctatcacagatctttctctccaagaaactag

SEQ ID NO: 329636 - DNA, 120 bp, Artificial Sequence
  ENSG00000136541_5 (sequence is synthesized)
tgctgatgaaatgacattcagagaagggcatcagtgggagaagattcctctgagtggcagtaaccaggaaataagaagacagaaggagaggattactgagcagcctctcaaagaggaaga

SEQ ID NO: 329637 - DNA, 120 bp, Artificial Sequence
  ENSG00000136541_6 (sequence is synthesized)
agatgaggacaggaagaacaaaggtcaccaggcagctgaaattgaatggctgggatttcgaaaacctagccaagctgacatgttacattctaaacatgatgaggagcagaaggtttggga

SEQ ID NO: 329638 - DNA, 120 bp, Artificial Sequence
  ENSG00000136541_7 (sequence is synthesized)
tgaagaaattgatgatgatgatgatgataattgcaataatgatgaagatgaagttcgagtgatagaatttaagaaaaaacatgaagaggtttctcaatttaaagaggaaggtgatgcaag

SEQ ID NO: 329639 - DNA, 120 bp, Artificial Sequence
  ENSG00000136541_8 (sequence is synthesized)
tgaggactccccactgagcagtgccagttcccaagctgtgacacctgatgagcagccaaccttagggaagaagagtgatatctccagaaatgcttattccagatacaatacaatatccta

SEQ ID NO: 329640 - DNA, 120 bp, Artificial Sequence
  ENSG00000136541_9 (sequence is synthesized)
tcggaaaatcagaaagggaaataccaagcaaagaattgatgaattcgagtctatgatgcatttataaactaactggaactgagaaattctcatgcccactaaaggaaaagctaattctat

SEQ ID NO: 329641 - DNA, 120 bp, Artificial Sequence
  ENSG00000136541_10 (sequence is synthesized)
tgccccagggtgcatatttctatgccttatttgagttatcacttggagggaggtggaagttgactctctttttcactgtagaataatgtggaaataaccctagataaaaattcagtctga

SEQ ID NO: 329642 - DNA, 120 bp, Artificial Sequence
  ENSG00000136541_11 (sequence is synthesized)
taacctcaaatcaaaaagctttaaataaattcttgggcatttatcttttaaaacttcactaatatagcattgtgtgataagcactaagcagtcagtcccctgggggaatctggcataatt

SEQ ID NO: 329643 - DNA, 120 bp, Artificial Sequence
  ENSG00000136541_12 (sequence is synthesized)
cggctataaatgtagcaatgcttggaaaggtagtcatcaaatgagactatttgaggggactatttgaaatgattctggtatttcttttggtatctttcttcctgtacattggagtgatgg

SEQ ID NO: 329644 - DNA, 120 bp, Artificial Sequence
  ENSG00000136541_13 (sequence is synthesized)
aaagtctggtattaaaacctctcttacttttaaacttgattttgcagactctggcaataagccttccaaaattctgtgccttttctattatcaccaaacaatatgttaagtggctttcct

SEQ ID NO: 329645 - DNA, 120 bp, Artificial Sequence
  ENSG00000136541_14 (sequence is synthesized)
tggcatctacagagaaaacattctatagccctccttcctaggtgttaccattcactgaatcttctctcagagggagatgagcaattgtcagtcaggataattctgtttgctaaatgttgc

SEQ ID NO: 329646 - DNA, 120 bp, Artificial Sequence
  ENSG00000136541_15 (sequence is synthesized)
agactaaagagttatgttggatagttttatttctgtggctgaaaataaaatcttgtctagcacagttaaagtcattaaaaataaaaatgacagctttagcacaattttaagaaaatgccc

SEQ ID NO: 329647 - DNA, 120 bp, Artificial Sequence
  ENSG00000136541_16 (sequence is synthesized)
ctctctattaccacattttctcttattaacagtatctcagaataattttctttccttagaaacctgagagaatgctagtcataactgtactagttactatgaaaatggaaataattatct

SEQ ID NO: 329648 - DNA, 120 bp, Artificial Sequence
  ENSG00000136541_17 (sequence is synthesized)
tagaatattttcaaagtagagcgtgagcatgtatttttagtgggagagctctgatagttgttgggaatatataatttactggacctcagcccaaatcaagatgcttaaaattgtacttgt

SEQ ID NO: 329649 - DNA, 120 bp, Artificial Sequence
  ENSG00000136541_18 (sequence is synthesized)
ggagcttcactcaaaccaatgtgtcaaataacgtattgaatatttatgaaaagagagactatatttatattcttagatagtttgttccacaatttttcatttcatgcttccatatatatt

SEQ ID NO: 329650 - DNA, 120 bp, Artificial Sequence
  ENSG00000136541_19 (sequence is synthesized)
accctgaactttctatcaccacagataaagattttgttttgccctgcaaataaaaagacaattccttattgtctgaatgtaatacagtcttcattgtactattcaaccctttgtttcttt

SEQ ID NO: 329651 - DNA, 120 bp, Artificial Sequence
  ENSG00000136541_20 (sequence is synthesized)
ctttttcattttgtgaaaaactccatgttagtcctcttagatgactgcttatttatgtgtaacataaatcccacatattctaatgacaacttctttaatccttccgggtcatatattata

SEQ ID NO: 329652 - DNA, 120 bp, Artificial Sequence
  ENSG00000136541_21 (sequence is synthesized)
tttccatagtatcacatactattatttagttgtttacaagactccaatttgaattcaggattacagtgctcctttcattctttcaaacagataacataaaagttctgttaccctcattct

SEQ ID NO: 329653 - DNA, 120 bp, Artificial Sequence
  ENSG00000136541_22 (sequence is synthesized)
atacaacctatggatttcatgtgttacaatatcagtttccagaataaagtgagggaaatcaggtctttattgataaagttagggagaagattgatgcaataggacaatttccaatttaat

SEQ ID NO: 329654 - DNA, 120 bp, Artificial Sequence
  ENSG00000136541_23 (sequence is synthesized)
ttagatcctctaatctttctacatggacaagctgttttcttttctaggttactgataacccctacaattttcgacttaacttcaaaacacagtattgtgttatctatcacataacaggac

SEQ ID NO: 329655 - DNA, 120 bp, Artificial Sequence
  ENSG00000136541_24 (sequence is synthesized)
catgtttttaacctaccatcaagagcctgtattttgagttattccaacagagatgatggattcctgtagaactagaggtgggtgacctatggttatgtggcacggcaaagcaagtacctc

SEQ ID NO: 329656 - DNA, 120 bp, Artificial Sequence
  ENSG00000136541_25 (sequence is synthesized)
ttaagggactctaatatatgctaacgctggtcctcttagctctgtgctctcaccagacaatgaatgaactatgaaagatttagtcaacagaaactattttagggtatgtttagttggtaa

SEQ ID NO: 329657 - DNA, 120 bp, Artificial Sequence
  ENSG00000136541_26 (sequence is synthesized)
atgcttcatgttcatggatgacacaatgtttttgcaaaaaaaccctgaaactattctttggcattggtgtccatggccctataccgccatcttacacgaaagccacagagttgaaagcca

SEQ ID NO: 329658 - DNA, 120 bp, Artificial Sequence
  ENSG00000136541_27 (sequence is synthesized)
cagagttgaaagccacagagttaagtgacctcaggtaacataatggtgatggttggccatttgagtctttgtaacctaggaaagacaaaggtctgattcagattgcatgggggattttta

SEQ ID NO: 329659 - DNA, 120 bp, Artificial Sequence
  ENSG00000136541_28 (sequence is synthesized)
acatatttgaaactcagggggaacatgattaagaacacaaactggtagctacacatgaaggtttacttgagcttttgtgattcaaagttcaggggtggtaaggactctggtaccagggaa

SEQ ID NO: 329660 - DNA, 120 bp, Artificial Sequence
  ENSG00000136541_29 (sequence is synthesized)
gagggagaattaatttattgtgcaaatgctggtatttcttacatgattttttgttttcctctgttgctagataaatagaaactaataatagctctatttctctgccaatataaaatctac

SEQ ID NO: 329661 - DNA, 120 bp, Artificial Sequence
  ENSG00000136541_30 (sequence is synthesized)
ctttcatataatgctacattgaaggcacagaatttgctaccatctctctctccccctacctaccaaactatccacaatttaaataaagaactgctgtgtctgacttactctcaataaaag

SEQ ID NO: 329662 - DNA, 78 bp, Artificial Sequence
  ENSG00000136541_31 (sequence is synthesized)
ctgacaccacgcccagctattttgtggcatcagtgggagaagattcctctgagtggcagtaaccaggaaataagaaga

SEQ ID NO: 329663 - DNA, 120 bp, Artificial Sequence
  ENSG00000136541_32 (sequence is synthesized)
actgggattacagggcatcagtgggagaagattcctctgagtggcagtaaccaggaaataagaagacagaaggagaggattactgagcagcctctcaaagaggaagaagatgaggacagg

SEQ ID NO: 329664 - DNA, 120 bp, Artificial Sequence
  ENSG00000136541_33 (sequence is synthesized)
atccatggaggacaaaatgctaaaagaagagaaactctttattgttcataaggctatcacagatctttctctccaagaaactagtgctgatgaaatgacattcagagaagggcatcagtg

SEQ ID NO: 329665 - DNA, 120 bp, Artificial Sequence
  ENSG00000136541_34 (sequence is synthesized)
cacaactgtctctactgccaaggtgctaatgccgaacccctgtgggatctctggtccaaggaaacatctgcacacaggccagggatggcgcttagcttcatctgtgctgcaaactctcat

SEQ ID NO: 329666 - DNA, 120 bp, Artificial Sequence
  ENSG00000136541_35 (sequence is synthesized)
cagtaggcttgctggctctgtgaccttactagctgaactccttaatctctctgcacttcatttttctagtctataaaatggagataacaacagcacctacctcagaagactgttatgaag

SEQ ID NO: 329667 - DNA, 120 bp, Artificial Sequence
  ENSG00000136541_36 (sequence is synthesized)
atttgacagctgtgaccccagacaactttctgtctcccgaagcctgagtttttttcactagaagaaggcggaataataataataactacaagtctaggaaaacccagaagagaaactctt

SEQ ID NO: 329668 - DNA, 120 bp, Artificial Sequence
  ENSG00000136542_0 (sequence is synthesized)
aatctggcccccaccttttcttgggcttgtaggaaggtggacatgggctcccggagacaagacaagtgatatgttgaactgttcggtggctggaatcaactgctcctggagtgacctaag

SEQ ID NO: 329669 - DNA, 120 bp, Artificial Sequence
  ENSG00000136542_1 (sequence is synthesized)
gccagtgtttatcagaacttagccagggccagccaagcaggcacagatgctctgctatgaaatgccacgcaggcagagactgacaagcggtaggaactgagctttccccttggactgctg

SEQ ID NO: 329670 - DNA, 120 bp, Artificial Sequence
  ENSG00000136542_2 (sequence is synthesized)
cttcctgctgtgttcaggggagggggtcactttctggcaactctgctgctgctgctgctgctgctgctacttcagcttcctctccactcaaggtaagcaggctaagggagggcaggctgc

SEQ ID NO: 329671 - DNA, 120 bp, Artificial Sequence
  ENSG00000136542_3 (sequence is synthesized)
tagggaaagctttgtaccatgaacaggatccgaaagtttttccgaggaagtgggcgagtcttggcatttatctttgtagcttctgtcatctggctcctctttgacatggcagctctccgc

SEQ ID NO: 329672 - DNA, 120 bp, Artificial Sequence
  ENSG00000136542_4 (sequence is synthesized)
ctctcattcagtgagatcaacactcgggtcatcaaggaagacattgtgaggagggagcggataggattcagagttcagccagaccaaggaaaaattttttacagcagcataaaagagatg

SEQ ID NO: 329673 - DNA, 120 bp, Artificial Sequence
  ENSG00000136542_5 (sequence is synthesized)
aaacctcccctaaggggacatgggaaaggggcatggggcaaagagaatgttagaaaaactgaggagagtgtgctcaaggttgaggtggacttggaccaaacccagagggaaagaaaaatg

SEQ ID NO: 329674 - DNA, 120 bp, Artificial Sequence
  ENSG00000136542_6 (sequence is synthesized)
cagaatgccctgggaaggggcaaggttgtgccgttgtggcatcctgcacatctgcagaccctccctgtgactcctaacaagcagaagacagacgggagaggcaccaaacctgaagcctcc

SEQ ID NO: 329675 - DNA, 120 bp, Artificial Sequence
  ENSG00000136542_7 (sequence is synthesized)
tctcaccaggggacaccaaagcaaacgacagctcagggggctccaaagacctcattcatagcagcaaaaggaactcaggtagtcaaaatatcagtacacatgggacgtgtcagtttaaaa

SEQ ID NO: 329676 - DNA, 120 bp, Artificial Sequence
  ENSG00000136542_8 (sequence is synthesized)
caggagccccggaagagtcatagtcccagcagtgacacatcaaaactagcagctgaaagggacttgaatgtgaccatcagtcttagtactgatagaccaaagcagcgatcacaggcagta

SEQ ID NO: 329677 - DNA, 120 bp, Artificial Sequence
  ENSG00000136542_9 (sequence is synthesized)
gcaaacgagagggcacaccctgccagcacagcagtgccgaagtctggggaagccatggccttaaacaaaactaagactcagagcaaagaagtcaatgcaaataaacacaaagccaatacg

SEQ ID NO: 329678 - DNA, 120 bp, Artificial Sequence
  ENSG00000136542_10 (sequence is synthesized)
agtcttccttttcctaagttcactgtcaattcaaatcgcttaaggaagcaatctattaatgagacacctttgggaagtttgtcaaaggatgatggagctagaggggctcatgggaagaaa

SEQ ID NO: 329679 - DNA, 120 bp, Artificial Sequence
  ENSG00000136542_11 (sequence is synthesized)
ctcaatttctctgaaagccatcttgtgattataaccaaagaggaagagcaaaaggcagaccccaaagaggtctctaattctaaaaccaaaacaatatttcctaaagtattgggtaaaagc

SEQ ID NO: 329680 - DNA, 120 bp, Artificial Sequence
  ENSG00000136542_12 (sequence is synthesized)
caaagtaaacacatttccaggaatagaagtgagatgtcttcctcttcacttgctccacatagagtgccactgtcccaaactaaccatgctttaactggagggctagagccagcaaaaatc

SEQ ID NO: 329681 - DNA, 120 bp, Artificial Sequence
  ENSG00000136542_13 (sequence is synthesized)
aacataactgccaaagccccctctacagaatacaaccagagtcatataaaagcccttttacctgaagacagtggaacgcaccaggtgttaagaattgatgtgacactttctccaagggac

SEQ ID NO: 329682 - DNA, 120 bp, Artificial Sequence
  ENSG00000136542_14 (sequence is synthesized)
cccaaagctccagggcagtttgggcgtcctgtagttgtcccccatggaaaggagaaggaggcagaaagaagatggaaagaaggaaacttcaatgtctaccttagcgatttgatcccagtg

SEQ ID NO: 329683 - DNA, 120 bp, Artificial Sequence
  ENSG00000136542_15 (sequence is synthesized)
gatagagccattgaagacaccagacctgctggatgtgcagagcagctagttcacaataacctcccaaccaccagtgtcatcatgtgctttgtggatgaagtgtggtccactctcctgaga

SEQ ID NO: 329684 - DNA, 120 bp, Artificial Sequence
  ENSG00000136542_16 (sequence is synthesized)
tctgttcacagtgtcatcaatcgctctcctccacacctcatcaaggagattctgctggtagatgacttcagcaccaaagactatctaaaagataatttggataaatacatgtcccagttt

SEQ ID NO: 329685 - DNA, 120 bp, Artificial Sequence
  ENSG00000136542_17 (sequence is synthesized)
ccaaaagttcggattcttcgcctcaaagagagacatggcttaataagggccaggctggcaggagcacagaatgcaacaggtgatgtgttgacatttttagattctcatgtggaatgtaac

SEQ ID NO: 329686 - DNA, 120 bp, Artificial Sequence
  ENSG00000136542_18 (sequence is synthesized)
gttggttggttggaacctcttctggaaagagtttatttaagtagaaagaaagtggcctgtccagtaatcgaagtcatcaatgataaggatatgagttacatgacagtggataactttcaa

SEQ ID NO: 329687 - DNA, 120 bp, Artificial Sequence
  ENSG00000136542_19 (sequence is synthesized)
agaggcatctttgtgtggcccatgaactttggttggagaacaattcctccagatgtcattgcaaaaaacagaattaaagaaactgatacaataaggtgccctgtcatggctggtggattg

SEQ ID NO: 329688 - DNA, 120 bp, Artificial Sequence
  ENSG00000136542_20 (sequence is synthesized)
ttttctattgacaaaagttacttttttgaacttggaacatacgaccctggccttgatgtttggggtggggaaaatatggagctctcattcaaggtgtggatgtgtggtggtgaaattgag

SEQ ID NO: 329689 - DNA, 120 bp, Artificial Sequence
  ENSG00000136542_21 (sequence is synthesized)
atcattccctgctcccgagtgggccatatattcagaaatgacaatccatattccttccccaaagaccggatgaagacagtggagcggaacttggtgcgggttgccgaggtctggctggat

SEQ ID NO: 329690 - DNA, 120 bp, Artificial Sequence
  ENSG00000136542_22 (sequence is synthesized)
gagtataaggagctgttctatggccacggagaccacctcatcgaccaagggctagatgttggcaacctcacccagcaaagggagctgcgaaagaaactgaagtgcaaaagtttcaaatgg

SEQ ID NO: 329691 - DNA, 120 bp, Artificial Sequence
  ENSG00000136542_23 (sequence is synthesized)
tacttggagaatgtctttcctgacttaagggctcccattgtgagagctagtggtgtgcttattaatgtggctttgggtaaatgcatttccattgaaaacactacagtcattctggaagac

SEQ ID NO: 329692 - DNA, 120 bp, Artificial Sequence
  ENSG00000136542_24 (sequence is synthesized)
tgcgatgggagcaaagagcttcaacaatttaattacacctggttaagacttattaaatgtggagaatggtgtatagcccccatccctgataaaggagccgtaaggctgcacccttgtgat

SEQ ID NO: 329693 - DNA, 120 bp, Artificial Sequence
  ENSG00000136542_25 (sequence is synthesized)
aacagaaacaaagggctaaaatggctgcataaatcaacatcagtctttcatccagaactggtgaatcacattgtttttgaaaacaatcagcaattattatgcttggaaggaaatttttct

SEQ ID NO: 329694 - DNA, 120 bp, Artificial Sequence
  ENSG00000136542_26 (sequence is synthesized)
caaaagatcctgaaagtagctgcctgtgacccagtgaagccatatcaaaagtggaaatttgaaaaatattatgaagcctgaagtgtaactgatgtttttatatagtaaacccattaaata

SEQ ID NO: 329695 - DNA, 120 bp, Artificial Sequence
  ENSG00000136542_27 (sequence is synthesized)
ctgtgaaaataacactgaacttggaaactatatttctcagcggtagtttaaattttcaattttaataacatttgaatggaagattttttataaatcacaatatttggaataccaaaagat

SEQ ID NO: 329696 - DNA, 120 bp, Artificial Sequence
  ENSG00000136542_28 (sequence is synthesized)
gactcaggaaaacagtccaacattggactgaagtccttcttcggaactgggtggcctttgaattgcctgctttccaccctatgctagacctcatcatgcaaatttccctgtgaaagctaa

SEQ ID NO: 329697 - DNA, 120 bp, Artificial Sequence
  ENSG00000136542_29 (sequence is synthesized)
caggtaactggaaatgaagacagaaggacttgagaaagcatgaggatattcccaatgactatgtttggtaataatcagctcttctggcccacaagtaggaatgatcaatgagaacttaac

SEQ ID NO: 329698 - DNA, 120 bp, Artificial Sequence
  ENSG00000136542_30 (sequence is synthesized)
ttagtcctttatttggggattttttcatcaaacaaaaatttcttgagttcttatggctagaagacctcagatgcccacagctgtcacgtttgtgaaatccctccagactacatgcatgct

SEQ ID NO: 329699 - DNA, 120 bp, Artificial Sequence
  ENSG00000136542_31 (sequence is synthesized)
tacctaacagtttgaaatagtattgatctactgctggtaaccctgcttgatggcagcattttgatctaaattacataatggtttttcccaatctgaatcagtggaaaaaaatttaagtga

SEQ ID NO: 329700 - DNA, 120 bp, Artificial Sequence
  ENSG00000136542_32 (sequence is synthesized)
ggaagaagaggccttcaaatgcttatttaattctaggtatgaacactatttcagttcattttgtgcttttaaaactacagttttaaagatttatgataccaataacttcctagattcatg

SEQ ID NO: 329701 - DNA, 120 bp, Artificial Sequence
  ENSG00000136542_33 (sequence is synthesized)
tggattttttttaaggcaatgaaaaaaggctggattataacacactgtagtaatcaaaaatgcatttaagcattgaatgcactctagtgcagggccaagtaagaggagttgaaatgagta

SEQ ID NO: 329702 - DNA, 120 bp, Artificial Sequence
  ENSG00000136542_34 (sequence is synthesized)
aagcagaaatagagctgctgaaagtttcttttatataaaaataataaaatactactttagatatagtagcattcacagggatgaaatatgcgaaaaatgggttctaaaatatttcaaagg

SEQ ID NO: 329703 - DNA, 120 bp, Artificial Sequence
  ENSG00000136542_35 (sequence is synthesized)
gaaaatgaagtgaaggaaacatcatgaaaggggaaaggaatgaggtaaacaagtcttaggaagagagttaagaaaaaattccgctggacttggccaaagaaagaaggggatctagtatct

SEQ ID NO: 329704 - DNA, 120 bp, Artificial Sequence
  ENSG00000136542_36 (sequence is synthesized)
ctatgaaggaaaaaagagtaaagccctcagtgtgaacccagtgagaacactgacaaatttgggaaaagttaaatactgatttcatccaaataaagcctctaatcttaagcataccaatac

SEQ ID NO: 329705 - DNA, 120 bp, Artificial Sequence
  ENSG00000136542_37 (sequence is synthesized)
tttggcataccagaagacaccttagaaatcaggatagcctttgcattcattttggtaagaaaactgatgctgagaggataaattacctaaaaatcttaaaacccaggcaagttagtcaaa

SEQ ID NO: 329706 - DNA, 120 bp, Artificial Sequence
  ENSG00000136542_38 (sequence is synthesized)
gaatcaagattagaattcaggtttccagagacagggctcattctaatgcctcaggtcactggcccgaacaaatctgcttcacagaattccttagaaagagatacacaattctttgctggg

SEQ ID NO: 329707 - DNA, 120 bp, Artificial Sequence
  ENSG00000136542_39 (sequence is synthesized)
attgggtccctggaggacaaccatactatattcttgttaatatgttttttctttttttaaatttaaacttttgttcagttgagatgattgtgaaactaggtatctttcattctgactcct

SEQ ID NO: 329708 - DNA, 120 bp, Artificial Sequence
  ENSG00000136542_40 (sequence is synthesized)
agtttaacatttaattttgactcccaatgagttacgtaaaagcaaaactataactaagaatgggaaaaagaactatttctgcacatttgtaacatatttaagatgttttcttcatataat

SEQ ID NO: 329709 - DNA, 120 bp, Artificial Sequence
  ENSG00000136542_41 (sequence is synthesized)
tgaaaactgcagatgagtaagagaatgactaggaaatgagatacagttatatgacacataatgatgttttagtcaacaatgaaccacatatttgacattggtcccaaaagattatattaa

SEQ ID NO: 329710 - DNA, 120 bp, Artificial Sequence
  ENSG00000136542_42 (sequence is synthesized)
taatatggtatctttagtgtgcttttctatgtttagacacacaaatactcaccatgatgttacaatagcctacagtgttcaatacagtaacatgcacaagtttgtaacctaggagcaaca

SEQ ID NO: 329711 - DNA, 120 bp, Artificial Sequence
  ENSG00000136542_43 (sequence is synthesized)
tagtaggctacctacaccatctaggtttgtgtaagtacactctgatattcacacaatgatgaaattgcctaatgacacatttctcagaatgtatttgtgttattaaatgatgcatgactc

SEQ ID NO: 329712 - DNA, 120 bp, Artificial Sequence
  ENSG00000136542_44 (sequence is synthesized)
taattcttttcaaaacagagccatatggggcaagggggatggggggacgcaagtcagttgtcaaaagactaattgagttactgacaaactgaacatgctaggtgcctcatgtaattcttc

SEQ ID NO: 329713 - DNA, 120 bp, Artificial Sequence
  ENSG00000136542_45 (sequence is synthesized)
atgtaactaaaaaatgttgagaggtttttttcccccgggtatataggctctctttttatccgaaaatagtttccacaaagaagtcaactctgttctgaaaaaaaatgaattgcattttga

SEQ ID NO: 329714 - DNA, 120 bp, Artificial Sequence
  ENSG00000136542_46 (sequence is synthesized)
atacacttatctttgggtatatcaactaaaggaagttggatttttttccttaacagaaacttctgcagtcctctcagttcacatcctttctgactttaccctgacaaacttattatataa

SEQ ID NO: 329715 - DNA, 120 bp, Artificial Sequence
  ENSG00000136542_47 (sequence is synthesized)
agctatatttaaatctatattgtcaatataacaaaggattgtttttgaacatcacaaatttgttcttggatagaattttatacattgcttttcatcatatatttgctcagttactctaag

SEQ ID NO: 329716 - DNA, 120 bp, Artificial Sequence
  ENSG00000136542_48 (sequence is synthesized)
aagcaaggaactgatcactagttgggaatctatatgggcctaaacttgagtgtattgatttattattacatctactaccaacattttcttaagcatagccttctaaattttttcaggaga

SEQ ID NO: 329717 - DNA, 120 bp, Artificial Sequence
  ENSG00000136542_49 (sequence is synthesized)
ttagaataaaggtatacatgctactcggtcttctggtaattctagtgataaacctttggatgagacaggtcctaatcagcactgaattcttcaataggaggctgtgttacaggagctaca

SEQ ID NO: 329718 - DNA, 120 bp, Artificial Sequence
  ENSG00000136542_50 (sequence is synthesized)
gatttttccctggattagcttaggtcattgcctttactttaaaaaaaaaaaaaaaaagtctatgcatcttgttaccttgaatacaagggtggtcttgataatatttgacagcactaacca

SEQ ID NO: 329719 - DNA, 120 bp, Artificial Sequence
  ENSG00000136542_51 (sequence is synthesized)
acttaccaagccatctaagtgcttctgagacttttcagtttgcacaatttctttctccttttcaacagttacccagcgcttctgccctactctcttgtaagctgacacagttgttgttgg

SEQ ID NO: 329720 - DNA, 120 bp, Artificial Sequence
  ENSG00000136542_52 (sequence is synthesized)
tacaatcttgttctatcaccagcatcaaatttgcttaatactgcttgttgacatcccctcagctgtcattcacagcaaaccaccatgtgccatgatcacaatgtattattagcttcgcca

SEQ ID NO: 329721 - DNA, 120 bp, Artificial Sequence
  ENSG00000136542_53 (sequence is synthesized)
cactaatttggaaacattcttttagatattaaaacaccttacttctagtattagtttgggactgcagaggggcaaagataccatttacagtatataggagtccaatattcccaaccaacc

SEQ ID NO: 329722 - DNA, 120 bp, Artificial Sequence
  ENSG00000136542_54 (sequence is synthesized)
ttgatttcatgaatggcttgtaattatttctagcaggcactcatgcaatagaataagattgaaacatgccagagagtaccatctttctttgttttaacatctctgattgaattcctatat

SEQ ID NO: 329723 - DNA, 120 bp, Artificial Sequence
  ENSG00000136542_55 (sequence is synthesized)
gctgaaattgcgccactgcactccagcctagacaacagagcaagactctatctcaaaaaataataataataatttttacctcagaagaaagccccaaaatcttggattaaaacaaaaaaa

SEQ ID NO: 329724 - DNA, 120 bp, Artificial Sequence
  ENSG00000136542_56 (sequence is synthesized)
aaaacaaaaaaatgacattgggtgatgggaaaaaagaaaggaactaattatcattgagtgtgtgtaggtactatttgtgtaggtgctatatgtgtcccatctcactgatgggtacaactc

SEQ ID NO: 329725 - DNA, 120 bp, Artificial Sequence
  ENSG00000136542_57 (sequence is synthesized)
atcaaatgactctcattctccctgttatatgaacaagaaggataactcccacatacagatgaggaatttggtaaattgcccaaggtcatcccacaagtaagagataaaacccagtttcca

SEQ ID NO: 329726 - DNA, 120 bp, Artificial Sequence
  ENSG00000136542_58 (sequence is synthesized)
ttttatctggctcaaaaaaaatttctctcactataccatgctgctatataattaattttcttctttacaaagggctgtcatctcaggtgggtgcatttaaaagtttcttggtctcagatt

SEQ ID NO: 329727 - DNA, 120 bp, Artificial Sequence
  ENSG00000136542_59 (sequence is synthesized)
actgatgccacagtattgagatgagattgaattaaacccctttggcctcttttggatgttgtataaacagaaaaaagaagcatggtctctctctctctgtggtaaccaattgatgtgtag

SEQ ID NO: 329728 - DNA, 120 bp, Artificial Sequence
  ENSG00000136542_60 (sequence is synthesized)
gtataaacatggctacccccacatgttttgctgtgatctatctctttgacttcatgcagaacctattctttttcatctcctggaccaaatgtgaaagaaagaagtggacatgtggaggat

SEQ ID NO: 329729 - DNA, 120 bp, Artificial Sequence
  ENSG00000136542_61 (sequence is synthesized)
tctttctctgtgaataatattgaaaaagctccattttctggggaaatacccatggttcattgtctgatgccaagaaagaattcaggacacagacacacatgaggagtgggtttaggagtg

SEQ ID NO: 329730 - DNA, 120 bp, Artificial Sequence
  ENSG00000136542_62 (sequence is synthesized)
gaaagtttaatagataaagaagagagtgagaaagcttcctcatgttgagaaagacagttgctcaagagagggttttctgggtttggggcaagatttgattgatttcatacagaggcttga

SEQ ID NO: 329731 - DNA, 120 bp, Artificial Sequence
  ENSG00000136542_63 (sequence is synthesized)
ggaggcggtgattgatatacatagggcccggggattggtttaaccaggtatactacttacatagccggtgaaaagactggccctcccaccctaaccttttattatgcaaatgcatcttct

SEQ ID NO: 329732 - DNA, 120 bp, Artificial Sequence
  ENSG00000136542_64 (sequence is synthesized)
acctggctgtcaccatgacatttgcacacgtggcttcacttcaccagtgccatgtcacccacacacctggtgacaaggaaaagggagcaggaatcaccatattgaatgtgcctggcttcc

SEQ ID NO: 329733 - DNA, 120 bp, Artificial Sequence
  ENSG00000136542_65 (sequence is synthesized)
aggtacagctgctagctttacatatgggagcctctagcttgcatatctatacttgcaacttgacttttcaggctgctttttgttagaaaataagtggcttgggggctgctttttattaaa

SEQ ID NO: 329734 - DNA, 120 bp, Artificial Sequence
  ENSG00000136542_66 (sequence is synthesized)
ggaaaaatccaccgagaactattttaccctttctaatggcctaaaataaatttttaatgactcctgtattaatattaccaacccttgatccctccaacctttaatcaaagctagcagatt

SEQ ID NO: 329735 - DNA, 120 bp, Artificial Sequence
  ENSG00000136542_67 (sequence is synthesized)
gctcatcttgaacagaaataaaaagttaaaaagttggagtcctttaaaacacaaaccatgactttttattcctactcattgtgtaggttgtcactactgtgcttttgcaacaacttttgc

SEQ ID NO: 329736 - DNA, 120 bp, Artificial Sequence
  ENSG00000136542_68 (sequence is synthesized)
atgggttactcaatagttgctacaagacaaaatgccttacaattagaaaaaaaaattaaccagagatattgtacaaaatatttattttttgacagttttgaataagccatataaagtatt

SEQ ID NO: 329737 - DNA, 120 bp, Artificial Sequence
  ENSG00000136542_69 (sequence is synthesized)
atatatccctaatgaagcttaatggatagtattccaggtgttggtggtgtctgtatctcaaagaaagaaaaaaataacatcacactaaacagatttaatgcctctgttttcaacctaatg

SEQ ID NO: 329738 - DNA, 120 bp, Artificial Sequence
  ENSG00000136542_70 (sequence is synthesized)
gaacaatagttatcatttcaattagagtcgctttgcaagtttatgtgaatctttgctttgtaaaaacacatacaaaacacaagggaaaattctcattttccagcaaatacagcaacttct

SEQ ID NO: 329739 - DNA, 120 bp, Artificial Sequence
  ENSG00000136542_71 (sequence is synthesized)
aatatgctgtttctaataatgagtcaccatcaaataagtaataaatatttttttcaaaaacaagagctttctgttttattattgattgacagatatttaccagtttaaggatattggtca

SEQ ID NO: 329740 - DNA, 120 bp, Artificial Sequence
  ENSG00000136542_72 (sequence is synthesized)
taagcatctatataataaaccctttatattagatgttaaattaaaatttttcatagcatgaatagatttttaagtgaccactcaaaaacatagcaatttttgtaaatatactgtatgtgt

SEQ ID NO: 329741 - DNA, 120 bp, Artificial Sequence
  ENSG00000136542_73 (sequence is synthesized)
atatatatttttttttttgatgctttgatctggaagaaagaaatatcaagagtttctattcacaacataaagaaaataaaatgtttttagatatttttaactctttcaggtgtatagctt

SEQ ID NO: 329742 - DNA, 120 bp, Artificial Sequence
  ENSG00000136542_74 (sequence is synthesized)
ctctttcaggtgtatagctttgtctgcatctggccttctgcacaaaagtatctcaagtgaacttacactctggataccattttccaaacttgaaggagtaatcaagttcttaattatcag

SEQ ID NO: 329743 - DNA, 120 bp, Artificial Sequence
  ENSG00000136542_75 (sequence is synthesized)
ggtgcttgttatttagttgaagattacacacatgtcttctgcttcaaacaactaccccaaatttgctagttttatacatattagcttaaaaacaagagaagccaaagattaagtaagtga

SEQ ID NO: 329744 - DNA, 120 bp, Artificial Sequence
  ENSG00000136542_76 (sequence is synthesized)
attgtgttaaagattgcctgaaaacatttgctaaggggagaataaaactaaaactgtggagtataaaggatgttggaattaaacatttttaagtactttttcttttgcatctgatcgact

SEQ ID NO: 329745 - DNA, 120 bp, Artificial Sequence
  ENSG00000136542_77 (sequence is synthesized)
gaagttattataaagaaggaatcaagtatgtaactttaaattctaggtaaacatccaaattactttctaaattcatttccaaaattctcctgtgctggcagttagctactagagatcatc

SEQ ID NO: 329746 - DNA, 120 bp, Artificial Sequence
  ENSG00000136542_78 (sequence is synthesized)
atttgattttgtagtttgccatgttctgagtgagttcagctgcttactactacccatgtcattgtgtttgtattgattgcctggctcagttatctcatgttcttcatgaactatatacac

SEQ ID NO: 329747 - DNA, 120 bp, Artificial Sequence
  ENSG00000136542_79 (sequence is synthesized)
attttcattgtctttaaacaatactgagttttgaagttaagtagaatattgtaggggttatcagaaacccatattcattgtggtatgtttctgtctgatactttaatattggtaaatata

SEQ ID NO: 329748 - DNA, 120 bp, Artificial Sequence
  ENSG00000136542_80 (sequence is synthesized)
gtttttgacattgcattttacaatcctattgttttttagagtgatgaaagttcaagttttaagagaagtggttgcctttctcatactgtcaaacatatttcttctttattatactctggt

SEQ ID NO: 329749 - DNA, 120 bp, Artificial Sequence
  ENSG00000136542_81 (sequence is synthesized)
gctttatccttctccataattctctattattacttattttaaatgttttccctatcacattgaaaaacttaaatgtccgttctccatttgaaaatatgccaaaagtatgatcccatgtaa

SEQ ID NO: 329750 - DNA, 120 bp, Artificial Sequence
  ENSG00000136542_82 (sequence is synthesized)
atatgcagaaacgattgctatgaaaatgtcagcatagtttaaatgtattactctgatgattacagagatttcttcaagttgttcgtgttaagatgcatcttaaacatgatctcagttcct

SEQ ID NO: 329751 - DNA, 120 bp, Artificial Sequence
  ENSG00000136542_83 (sequence is synthesized)
tccttaaaaaatgataaaaatttttcatgtatattacatatctacctaccagaaatcctttttacaattttatatacaatcattttaagacctttttgaaataaataatgcaaatgaact

SEQ ID NO: 329752 - DNA, 120 bp, Artificial Sequence
  ENSG00000136542_84 (sequence is synthesized)
ctgtctggaaaatctcctgatagcaaaaacttactataatattcccccttgaaagtattcgggaaatccaggaaagctatgaaagacaagaaactagtcttaaaaaaatggttctgtttt

SEQ ID NO: 329753 - DNA, 120 bp, Artificial Sequence
  ENSG00000136542_85 (sequence is synthesized)
ttacaaaattcaactgataaataagtttatgtgacctgtttttagataacgcactgtattataaaattgccatttttatgggtccaaatagaatggcagctactttaagtggctcaacct

SEQ ID NO: 329754 - DNA, 120 bp, Artificial Sequence
  ENSG00000136542_86 (sequence is synthesized)
ggtaacttatcagacattttggatttatatacactgttcaaataacaacatgtcaaatataactgtaaaataaatttacaatttttaatttcaaccgctgagcagaaaaaaaaaaaagaa

SEQ ID NO: 329755 - DNA, 120 bp, Artificial Sequence
  ENSG00000136542_87 (sequence is synthesized)
aagaagagtgctaggcagagggtaaaggtcacgtaaagccctaagacaggtgagtgttctccatccaagcactggaaagaagacgaatgttgtcagggtgtgaaggagggaagaatggca

SEQ ID NO: 329756 - DNA, 120 bp, Artificial Sequence
  ENSG00000136542_88 (sequence is synthesized)
ccagatgaaggtgaagaggaaggaaggagccagatcacacaggtccttgtaagcaaacttcctttttcttcatccaagaaattctttaaaaatgtgaccattagttatcccgccctttta

SEQ ID NO: 329757 - DNA, 120 bp, Artificial Sequence
  ENSG00000136546_0 (sequence is synthesized)
gggtaggaggggtctctgggtcagtggctggagagtcgccccagtgagtcggtgtctaactggccatttagtggggcccatttactgcagagccacagctggtgaggacagacgccagcc

SEQ ID NO: 329758 - DNA, 120 bp, Artificial Sequence
  ENSG00000136546_1 (sequence is synthesized)
taacagcagcttctgtacaactagagctcagaaaacccgagagatccgtggagaaagagaagcccaggaggaggaaagggctccaaggagccctgctcctgaagggtccctcaggcactg

SEQ ID NO: 329759 - DNA, 120 bp, Artificial Sequence
  ENSG00000136546_2 (sequence is synthesized)
gtggagacctgtcgcttcgtagcaagtacaaaattggaaatgttggcttcaccagaacctaagggccttgttcccttcactaaagagtcttttgaacttataaaacagcatattgctaaa

SEQ ID NO: 329760 - DNA, 120 bp, Artificial Sequence
  ENSG00000136546_3 (sequence is synthesized)
acacataatgaagaccatgaagaagaagacttaaagccaactcctgatttggaagttggcaaaaagcttccatttatttatggaaacctttctcaaggaatggtgtcagagcccttggaa

SEQ ID NO: 329761 - DNA, 120 bp, Artificial Sequence
  ENSG00000136546_4 (sequence is synthesized)
gatgtggacccatattactacaagaaaaaaaatactttcatagtattaaataaaaatagaacaatcttcagattcaatgcggcttccatcttgtgtacattgtctcctttcaattgtatt

SEQ ID NO: 329762 - DNA, 120 bp, Artificial Sequence
  ENSG00000136546_5 (sequence is synthesized)
agaagaacaactatcaaggttttggtacatccctttttccaactgtttattctaattagtgtcctgattgattgcgtattcatgtccctgactaatttgccaaaatggagaccagtatta

SEQ ID NO: 329763 - DNA, 120 bp, Artificial Sequence
  ENSG00000136546_6 (sequence is synthesized)
gagaatactttgcttggaatttacacatttgaaatacttgtaaaactctttgcaagaggtgtctgggcaggatcattttccttcctcggtgatccatggaactggctcgatttcagcgta

SEQ ID NO: 329764 - DNA, 120 bp, Artificial Sequence
  ENSG00000136546_7 (sequence is synthesized)
actgtgtttgaggttattataagatactcacctctggacttcattccaacgcttcaaactgcaagaactttgagaattttaaaaattattcctttaaatcaaggtctgaaatcccttgta

SEQ ID NO: 329765 - DNA, 120 bp, Artificial Sequence
  ENSG00000136546_8 (sequence is synthesized)
ggggtcctgatccactgcttgaagcagcttattggtgtcattatcctaactctgttttttctgagcatattttctctaattgggatggggctcttcatgggcaacttgaaacataaatgt

SEQ ID NO: 329766 - DNA, 120 bp, Artificial Sequence
  ENSG00000136546_9 (sequence is synthesized)
tttcgatggccccaagagaatgaaaatgaaaccctgcacaacagaactggaaacccatattatattcgagaaacagaaaacttttattatttggaaggagaaagatatgctctcctttgt

SEQ ID NO: 329767 - DNA, 120 bp, Artificial Sequence
  ENSG00000136546_10 (sequence is synthesized)
ggcaacaggacagatgctggtcagtgtcctgaaggatatgtgtgtgtaaaagctggcataaatcctgatcaaggcttcacaaattttgacagttttggctgggccttatttgccctattt

SEQ ID NO: 329768 - DNA, 120 bp, Artificial Sequence
  ENSG00000136546_11 (sequence is synthesized)
cggttaatggctcaggattaccctgaagtactttatcaccagatactttatgcttctgggaaggtctacatgatattttttgtggtggtaagttttttgttttccttttatatggcaagt

SEQ ID NO: 329769 - DNA, 120 bp, Artificial Sequence
  ENSG00000136546_12 (sequence is synthesized)
ttgttcttaggcatacttgccatggcctatgaagaagaaaagcagagagttggtgaaatatctaagaagattgaaccaaaatttcaacagactggaaaagaacttcaagaaggaaatgaa

SEQ ID NO: 329770 - DNA, 120 bp, Artificial Sequence
  ENSG00000136546_13 (sequence is synthesized)
acagatgaggccaagaccatacaaatagaaatgaagaaaaggtcaccaatttccacagacacatcattggatgtgttggaagatgctactctcagacataaggaagaacttgaaaaatcc

SEQ ID NO: 329771 - DNA, 120 bp, Artificial Sequence
  ENSG00000136546_14 (sequence is synthesized)
aagaagatatgcccattatactggtataagtttgctaaaactttcttgatctggaattgttctccctgttggttaaaattgaaagagtttgtccataggattataatggcaccatttact

SEQ ID NO: 329772 - DNA, 120 bp, Artificial Sequence
  ENSG00000136546_15 (sequence is synthesized)
gatcttttccttatcatatgcataattttaaacgtatgttttctgaccttggagcattatccaatgagtaaacaaactaacactcttctcaacattggaaacctggttttcattggaatt

SEQ ID NO: 329773 - DNA, 120 bp, Artificial Sequence
  ENSG00000136546_16 (sequence is synthesized)
ttcacagcagaaatgatttttaaaataattgcaatgcatccatatgggtatttccaagtaggttggaacatttttgatagcatgatagtgttccatggtttaatagaactttgtctagca

SEQ ID NO: 329774 - DNA, 120 bp, Artificial Sequence
  ENSG00000136546_17 (sequence is synthesized)
aatgttgcaggaatggctcttcttcgattattcaggatgttaagaattttcaagttgggaaagtattggccaacattccagattttgatgtggtctcttagtaactcatgggtggccctg

SEQ ID NO: 329775 - DNA, 120 bp, Artificial Sequence
  ENSG00000136546_18 (sequence is synthesized)
aaagacttggtcctgttgttgttcacattcatcttcttttctgctgcattcggcatgaagctgtttggtaagaattatgaagaatttgtctgccacatagacaaagactgtcaactccca

SEQ ID NO: 329776 - DNA, 120 bp, Artificial Sequence
  ENSG00000136546_19 (sequence is synthesized)
cgctggcacatgcatgactttttccactccttcctgaatgtgttccgaattctctgtggagagtgggtagagaccttgtgggactgtatggaggttgcaggccaatcctggtgtattcct

SEQ ID NO: 329777 - DNA, 120 bp, Artificial Sequence
  ENSG00000136546_20 (sequence is synthesized)
ttttacctgatggtcattttaattggaaatttactggtactttacctgtttctggcattggtgagctcatttagttcatgcaaggatgtaacagctgaagagaataatgaagcaaaaaat

SEQ ID NO: 329778 - DNA, 120 bp, Artificial Sequence
  ENSG00000136546_21 (sequence is synthesized)
ctccagcttgcagtggcaagaattaaaaaaggaataaactatgtgcttcttaaaatactatgcaaaacacaaaatgtcccaaaggacacaatggaccatgtaaatgaggtatatgttaaa

SEQ ID NO: 329779 - DNA, 120 bp, Artificial Sequence
  ENSG00000136546_22 (sequence is synthesized)
gaagatatttctgaccataccctttctgaattgagcaacacccaagattttctcaaagataaggaaaaaagcagtggcacagagaaaaacgctactgaaaatgagagccaatcacttatc

SEQ ID NO: 329780 - DNA, 120 bp, Artificial Sequence
  ENSG00000136546_23 (sequence is synthesized)
cccagtcctagtgtctcagaaactgtaccaattgcttcaggagaatctgatatagaaaatctggataataaggagattcagagtaagtctggtgatggaggcagcaaagagaaaataaag

SEQ ID NO: 329781 - DNA, 120 bp, Artificial Sequence
  ENSG00000136546_24 (sequence is synthesized)
atctgaaaaatggttgcagacgcggatcttcacttggtcaaatcagtggagcatccaagaaaggaaaaatctggcagaacatcaggaaaacctgctgcaagattgtagagaacaattggt

SEQ ID NO: 329782 - DNA, 120 bp, Artificial Sequence
  ENSG00000136546_25 (sequence is synthesized)
ttaagtgttttattgggcttgttactctgctcagcactggcactctggcttttgaagatatatatatggatcagagaaagacaattaaaattttattagaatatgctgacatgatcttta

SEQ ID NO: 329783 - DNA, 120 bp, Artificial Sequence
  ENSG00000136546_26 (sequence is synthesized)
cttatatcttcattctggaaatgcttctaaaatggatggcatatggttttaaggcctatttctctaatggctggtacaggctggacttcgtggttgttattgtgttttgtcttagcttaa

SEQ ID NO: 329784 - DNA, 120 bp, Artificial Sequence
  ENSG00000136546_27 (sequence is synthesized)
taggcaaaactcgggaagaactaaaacctcttatttccatgaaattccttcggcccctcagagttctatctcaatttgaaagaatgaaggtggttgtgagagctttgatcaaaacaacct

SEQ ID NO: 329785 - DNA, 120 bp, Artificial Sequence
  ENSG00000136546_28 (sequence is synthesized)
tacccactttgaatgtgtttcttgtctgcctgatgatctggctgatttttagtatcatgggagtagacttatttgctggcagattctatgaatgcattgacccaacaagtggagaaaggt

SEQ ID NO: 329786 - DNA, 120 bp, Artificial Sequence
  ENSG00000136546_29 (sequence is synthesized)
ttccttcatctgaagtcatgaataagagtcggtgtgaaagccttctgtttaacgaatccatgctatgggaaaatgcaaaaatgaactttgataatgttggaaatggtttcctttctctgc

SEQ ID NO: 329787 - DNA, 120 bp, Artificial Sequence
  ENSG00000136546_30 (sequence is synthesized)
ttcaagtagcaacatttaatggatggatcactattatgaattcagcaattgattctgttgctgttaatatacagcctcattttgaagtcaacatctacatgtattgttactttatcaact

SEQ ID NO: 329788 - DNA, 120 bp, Artificial Sequence
  ENSG00000136546_31 (sequence is synthesized)
ttattatatttggagtatttctccctctgagtatgctgattactgttattattgataatttcaacaagcataaaataaagctgggaggctcaaatatctttataacggttaaacagagaa

SEQ ID NO: 329789 - DNA, 120 bp, Artificial Sequence
  ENSG00000136546_32 (sequence is synthesized)
aacagtaccgcaggctgaagaagctaatgtatgaggattctcaaagaccagtacctcgcccattaaacaagctccaaggattcatctttgatgtggtaacaagccaagcttttaatgtca

SEQ ID NO: 329790 - DNA, 120 bp, Artificial Sequence
  ENSG00000136546_33 (sequence is synthesized)
ttgttatggttcttatatgtttccaagcaatagccatgatgatagacactgatgttcagagtctacaaatgtccattgctctctactggattaactcaatttttgttatgctatatacta

SEQ ID NO: 329791 - DNA, 120 bp, Artificial Sequence
  ENSG00000136546_34 (sequence is synthesized)
tggaatgtatactgaagctcatcgctttccgttgtttttatttcaccattgcgtggaacatttttgattttatggtggttattttctccatcacaggactatgtctgcctatgacagtag

SEQ ID NO: 329792 - DNA, 120 bp, Artificial Sequence
  ENSG00000136546_35 (sequence is synthesized)
gatcctaccttgtgcctccttcacttgtgcaactgatacttctctcacggatcattcacatgctgcgtcttggaaaaggaccaaaggtgtttcataatctgatgcttcctttgatgctgt

SEQ ID NO: 329793 - DNA, 120 bp, Artificial Sequence
  ENSG00000136546_36 (sequence is synthesized)
ccctcccagcattattgaacatcattcttctcatcttcctggtcatgttcatctatgccgtatttggaatgtataattttgcctatgttaaaaaagaagctggaattaatgatgtgtcta

SEQ ID NO: 329794 - DNA, 120 bp, Artificial Sequence
  ENSG00000136546_37 (sequence is synthesized)
attttgaaacctttggcaacagtatgctctgtctttttcaagttgcaatatttgctggttgggatgggatgcttgatgcaattttcaacagtaaatggtctgactgtgatcctgataaaa

SEQ ID NO: 329795 - DNA, 120 bp, Artificial Sequence
  ENSG00000136546_38 (sequence is synthesized)
ttaaccctgggactcaagttagaggagattgtgggaacccctctgttgggattttttattttgtcagttatatcctcatatcatggctgatcattgtaaatatgtacattgttgttgtca

SEQ ID NO: 329796 - DNA, 120 bp, Artificial Sequence
  ENSG00000136546_39 (sequence is synthesized)
tggagtttttaaatattgcttctaagaagaaaaacaagaccttgagtgaagatgattttaggaaattctttcaggtatggaaaaggtttgatcctgataggacccagtacatagactcta

SEQ ID NO: 329797 - DNA, 120 bp, Artificial Sequence
  ENSG00000136546_40 (sequence is synthesized)
gcaagctttcagattttgcagctgctcttgatcctcctcttttcatggcaaaaccaaacaagggccagctcattgctttggacctccccatggctgttggggacagaattcattgcctcg

SEQ ID NO: 329798 - DNA, 120 bp, Artificial Sequence
  ENSG00000136546_41 (sequence is synthesized)
atatcttacttgcttttacaaagagagttatgggtcaagatgtgaggatggagaaagttgtttcagaaatagaatcagggtttttgttagccaacccttttaagatcacatgtgagccaa

SEQ ID NO: 329799 - DNA, 120 bp, Artificial Sequence
  ENSG00000136546_42 (sequence is synthesized)
ttacgactactttgaaacgaaaacaagaggcagtttcagcaaccatcattcaacgtgcttataaaaattaccgcttgaggcgaaatgacaaaaatacatcagatattcatatgatagatg

SEQ ID NO: 329800 - DNA, 120 bp, Artificial Sequence
  ENSG00000136546_43 (sequence is synthesized)
gtgacagagatgttcatgctactaaagaaggtgcctattttgacaaagctaaggaaaagtcacctattcaaagccagatctaataccacttaccacctcttttcatatttcttcacatat

SEQ ID NO: 329801 - DNA, 120 bp, Artificial Sequence
  ENSG00000136546_44 (sequence is synthesized)
ctgaaaaatgttgaaagcctaagccaggaataaaagaaaagtagagataataatcagttctttacaaccgatggtaattaagcttgtattcacaagacttcatgccaaattcacttttta

SEQ ID NO: 329802 - DNA, 120 bp, Artificial Sequence
  ENSG00000136546_45 (sequence is synthesized)
gcattatatctaacaaatcaagagaatccttaatattgctgcagtgagtttaaagtgggttaaagtggccatttgacaatctcatatttgttttctctacatggcttatatgatgtgtgc

SEQ ID NO: 329803 - DNA, 120 bp, Artificial Sequence
  ENSG00000136546_46 (sequence is synthesized)
cttctagggaatgaagggaagtggtgatagagatcagcagcagcaggggctttcttttatattttatgtataatttaatgggctttaagtcaccactattaagacttacaaataagcaaa

SEQ ID NO: 329804 - DNA, 120 bp, Artificial Sequence
  ENSG00000136546_47 (sequence is synthesized)
tactttcctgatgtgggatggtgaaatgctaatggccattaaatcataaacttgcctagacaaaagccaattggaagaagggagagagcagttctttagaaagtgcctttgagatcaacc

SEQ ID NO: 329805 - DNA, 120 bp, Artificial Sequence
  ENSG00000136546_48 (sequence is synthesized)
tcagagattcttgggctgattaaaactgcatttgaaaaagattggttgaagctctgtgtttatttttgtatgttcttgttttcatttggaactgggaatgaataggatttcattgtgctc

SEQ ID NO: 329806 - DNA, 120 bp, Artificial Sequence
  ENSG00000136546_49 (sequence is synthesized)
caggtcctccaccatgtgaatgccaacatggccaggtcattagagctgagggaaaactagtgcccaaagatatgaaaagagtgtggatcttctggagaagtgctgttgttcaacaggtac

SEQ ID NO: 329807 - DNA, 86 bp, Artificial Sequence
  ENSG00000136546_50 (sequence is synthesized)
tttctcatctctggatagtttcacctaagctctggctcttaagcaggacagattcgtaaaacaagaagcataaaggagaggtatag

SEQ ID NO: 329808 - DNA, 120 bp, Artificial Sequence
  ENSG00000136546_51 (sequence is synthesized)
tgatgtaataaataacatgttaatagactcaagctttaccttatgaaattgatgtatttttaccagttatttctaatgtaacattgaatatataagatctgacaaatgtatgtttaaaca

SEQ ID NO: 329809 - DNA, 120 bp, Artificial Sequence
  ENSG00000136546_52 (sequence is synthesized)
tgaattagaagagttgagaactaccattatgtatagggattctcatagtgtcttggcccttaattggaaagttgtggcaactttaaagtactttttactgtatgttataattctttataa

SEQ ID NO: 329810 - DNA, 120 bp, Artificial Sequence
  ENSG00000136546_53 (sequence is synthesized)
cttagagagagacaatggtcactcaaactatgagaactatgaattaggagataaaagtttaaatttgttgttgttttataacagtatgtacaagttagttttcccttatatatttacgtt

SEQ ID NO: 329811 - DNA, 120 bp, Artificial Sequence
  ENSG00000136546_54 (sequence is synthesized)
ttcaagttttttaatctcatcatatacatccatactctataaaatgttttatattcaaagaactgtaaaatcctaaacattagttttcactattgaaattgttttttaaagataggcata

SEQ ID NO: 329812 - DNA, 120 bp, Artificial Sequence
  ENSG00000136546_55 (sequence is synthesized)
aatagttgtccttagacttattcatacaaatatagtcatttacttctatgtagtttgagattctgagagttattccaactttatgaagattgatttcaatgtgcctgctaagtcctaaaa

SEQ ID NO: 329813 - DNA, 120 bp, Artificial Sequence
  ENSG00000136546_56 (sequence is synthesized)
cagaaagaaaatttatatattattgatttaaatatcatcctttaaatatgttgtataacattcaatatagtttatgtatcagtgattgtattttattctgaatgcatgatctcaagcctt

SEQ ID NO: 329814 - DNA, 120 bp, Artificial Sequence
  ENSG00000136546_57 (sequence is synthesized)
ccttaactactataatctttttctgcccctcagaaattgaataacctaaccaagatgcctttaggggatgccctaagtaaatgtaatttcagatttcagggttttttttttttcctctct

SEQ ID NO: 329815 - DNA, 120 bp, Artificial Sequence
  ENSG00000136546_58 (sequence is synthesized)
aagtgttccttccctttcttctcctgctctccatcatgttatggagaccagtgaggaaccagtgttaacttggtgacaatgtgacagctggtgctttatctaagctccgttttctatttc

SEQ ID NO: 329816 - DNA, 120 bp, Artificial Sequence
  ENSG00000136546_59 (sequence is synthesized)
ttgggaatgctttattgtggaaactgcttcagatacttaaattgaatcataacttgcttctgtaaattgcgtaaagacaacaaactgattttagtttgaaaagtttatcttttacttgta

SEQ ID NO: 329817 - DNA, 120 bp, Artificial Sequence
  ENSG00000136546_60 (sequence is synthesized)
aaccttgtttgccagttaccttccgaaagctgtgtaaagagttatttttaacaaagtcttaacaatatatgttactttttagatactatagaaaataataaatataacctgtaaaccaca

SEQ ID NO: 329818 - DNA, 120 bp, Artificial Sequence
  ENSG00000136546_61 (sequence is synthesized)
aatggcaccatgcccttgcttctaagataatggtcaaatgtaatatagttttttaaatttttatgtgcagaagaattggaagacaaaagaaaagagaactagaattactgaatgtcaaat

SEQ ID NO: 329819 - DNA, 120 bp, Artificial Sequence
  ENSG00000136546_62 (sequence is synthesized)
atatgctggccacattgccaggtgtattatatcttatttaatctttgaaacaattctacaaggtcagagagagagagagagaagagaggagagagagaagagagtgtgtgtatttgtatg

SEQ ID NO: 329820 - DNA, 62 bp, Artificial Sequence
  ENSG00000136546_63 (sequence is synthesized)
ggcaacctgcttgggtctccttccacaccttgaaaggtttgttctttagctctttgcactaa

SEQ ID NO: 329821 - DNA, 63 bp, Artificial Sequence
  ENSG00000136546_64 (sequence is synthesized)
actgcctttatgagctgtaacactcacctcgaaggtccgcagcgtctgaacatcagaaggaac

SEQ ID NO: 329822 - DNA, 120 bp, Artificial Sequence
  ENSG00000136546_65 (sequence is synthesized)
cagcttcattcttgaagtcagtgagagcaagaacccaccaattccggacacaacttgattaggcttaaacttctcctttaaaggcattccttccgggattacctcacggttcccaggaga

SEQ ID NO: 329823 - DNA, 120 bp, Artificial Sequence
  ENSG00000136546_66 (sequence is synthesized)
gttgttgactgtcctcccttttgaagctgtatcctttgtcccagcctcagctctggggtcacgttgatttgtcacggcagccccactgcatgctggaaagaagtgttcatggtactttac

SEQ ID NO: 329824 - DNA, 120 bp, Artificial Sequence
  ENSG00000136546_67 (sequence is synthesized)
cctattctaaaataacgaggtgactgaaggccctactgtgtaagaggaagcattctcttcaagccctatcaccaaccctttctgatagcacccacttcagagacaacctatggtacaaaa

SEQ ID NO: 329825 - DNA, 120 bp, Artificial Sequence
  ENSG00000136546_68 (sequence is synthesized)
tgggaggcctcaggaaacttacaatcacggtggaagaggaagcaggcatgtccttcacattgcagcagcaaggagaagtgcagagtgaaggtactttacctgtttctggcattggtgagc

SEQ ID NO: 329826 - DNA, 120 bp, Artificial Sequence
  ENSG00000136546_69 (sequence is synthesized)
atggtcattttaattggaaatttactggtaagtagtcaattcttttacattttccatgaaaactggtataaggtagtttggtattttcatgatgtgcattgatgggatctaatggtctgt

SEQ ID NO: 329827 - DNA, 120 bp, Artificial Sequence
  ENSG00000136546_70 (sequence is synthesized)
aactgtggtagtccaatagagtaacccactagccagatgtggccattatcaactgatatatgattagttccatttgaaatgtgctgtaaatgtagaatatgcaccagatttgaagtctta

SEQ ID NO: 329828 - DNA, 120 bp, Artificial Sequence
  ENSG00000136546_71 (sequence is synthesized)
cacaaaaaatgatgtgaactatttcattaataatttttatattgaatgcattttttaatgataatatagtaggtcctccttatgctcagttgcactgtatgtggtttcagttgcctgtgg

SEQ ID NO: 329829 - DNA, 120 bp, Artificial Sequence
  ENSG00000136546_72 (sequence is synthesized)
tcagccatggtctgaaaacatccagtggaaaattccagaaatataaaactcataagttttaaattgcatgtcattctgggtagtgtaatggaatctcctgccataccactctgtcctgct

SEQ ID NO: 329830 - DNA, 120 bp, Artificial Sequence
  ENSG00000136546_73 (sequence is synthesized)
ctgggcatgaaacatccctttgtctagcatattcatgctgtatacaccacctattggtcctttagcagctgtctgggctgtcagatcatgtagtacgcatggggtttggtaccatcctct

SEQ ID NO: 329831 - DNA, 120 bp, Artificial Sequence
  ENSG00000136546_74 (sequence is synthesized)
gcttctggcatccactgggggtcttgggatttatctgccctggattaagggggactactgtatttgtatttaactaaatacaaatactgttaaatacaaatacaatagtctccctttatt

SEQ ID NO: 329832 - DNA, 120 bp, Artificial Sequence
  ENSG00000136560_0 (sequence is synthesized)
tttctcagtggaagttcccacttcaacataagggagagctctggacagtttgagcagcattgttagagcctgtggaaaacactttacaactgtgtaactgtcttcatctttacagaggaa

SEQ ID NO: 329833 - DNA, 120 bp, Artificial Sequence
  ENSG00000136560_1 (sequence is synthesized)
tagtctacaaaggaagacttgtaacctggagaagagacctgtcatttactccatcctttatagtgatgctacaggacgaagaggaatggataaaaacattggcgagcaactcaataaagc

SEQ ID NO: 329834 - DNA, 120 bp, Artificial Sequence
  ENSG00000136560_2 (sequence is synthesized)
gtatgaagccttccggcaggcatgcatggatagagattctgcagtaaaagaattacagcaaaagactgagaactatgagcagagaatacgtgaacaacaggaacagctgtcacttcaaca

SEQ ID NO: 329835 - DNA, 120 bp, Artificial Sequence
  ENSG00000136560_3 (sequence is synthesized)
gactattattgacaagctaaaatctcagttacttcttgtgaattccactcaagataacaattatggctgtgttcctctgcttgaagacagtgaaacaagaaagaataatttgactcttga

SEQ ID NO: 329836 - DNA, 120 bp, Artificial Sequence
  ENSG00000136560_4 (sequence is synthesized)
tcagccacaagataaagtgatttcaggaatagcaagagaaaaactaccaaaggtaagaagacaagaggtttcttctcctagaaaagaaacttcagcaaggagtcttggcagtcctttgct

SEQ ID NO: 329837 - DNA, 120 bp, Artificial Sequence
  ENSG00000136560_5 (sequence is synthesized)
ccatgaaaggggtaatatagagaagactttctgggatctgaaagaagaatttcataaaatatgcatgctagcaaaagcacagaaagaccacttaagcaaacttaatataccagacactgc

SEQ ID NO: 329838 - DNA, 120 bp, Artificial Sequence
  ENSG00000136560_6 (sequence is synthesized)
aactgaaacacagtgctctgtgcctatacagtgtacggataaaacagataaacaagaagcgctgtttaagcctcaggctaaagatgatataaatagaggtgcaccatccatcacatctgt

SEQ ID NO: 329839 - DNA, 120 bp, Artificial Sequence
  ENSG00000136560_7 (sequence is synthesized)
cacaccaagaggactgtgcagagatgaggaagacacctcttttgaatcactttctaaattcaatgtcaagtttccacctatggacaatgactcaactttcttacatagcactccagagag

SEQ ID NO: 329840 - DNA, 120 bp, Artificial Sequence
  ENSG00000136560_8 (sequence is synthesized)
attcagggaattgaccccatagcttcagctatacaaaaccttaaaacaactgacaaaacaaagccctcaaatctcgtaaacacttgtatcaggacaactctggatagagctgcgtgtttg

SEQ ID NO: 329841 - DNA, 120 bp, Artificial Sequence
  ENSG00000136560_9 (sequence is synthesized)
ccacctggagaccataatgcattatatgtaaatagcttcccacttctggacccatctgatgcaccttttccctcactcgattccccgggaaaagcaatccgaggaccacagcagcccatt

SEQ ID NO: 329842 - DNA, 120 bp, Artificial Sequence
  ENSG00000136560_10 (sequence is synthesized)
tggaagccctttcctaatcaagacagtgactcggtggtactaagtggcacagactcagaactgcatatacctcgagtatgtgaattctgtcaagcagttttcccaccatccattacatcc

SEQ ID NO: 329843 - DNA, 120 bp, Artificial Sequence
  ENSG00000136560_11 (sequence is synthesized)
aggggggatttccttcggcatcttaattcacacttcaatggagagacttaagacacatttgaaaacagacatatcaagttctatgtgatgattttgggtttttaatactataaatacttg

SEQ ID NO: 329844 - DNA, 120 bp, Artificial Sequence
  ENSG00000136560_12 (sequence is synthesized)
attgtaaactaaattcaagatcatttataggaaaatctagtttcacagctatttgaatttttttctggatttactatataactcttattttttaaaagatcattctgttctttcaaggag

SEQ ID NO: 329845 - DNA, 120 bp, Artificial Sequence
  ENSG00000136560_13 (sequence is synthesized)
aaataagcctaaaagaagaaaaacaaaaaaaattctgtataaaactgtaatcctttgtattcatgtttacagtgctattactataattcaaaattatgtatgtgacttagagttatataa

SEQ ID NO: 329846 - DNA, 120 bp, Artificial Sequence
  ENSG00000136560_14 (sequence is synthesized)
tcataatttatgtttatttcaaatatctaagtttattgcttggatttctagtgagagctgttgaatttggtgatgtcaaatgtttctagggtttttttagtttgtttttattgaaaaatt

SEQ ID NO: 329847 - DNA, 120 bp, Artificial Sequence
  ENSG00000136560_15 (sequence is synthesized)
taattatttatgctataggtgatattctctttgaataaacctataatagaaaatagcagacaacataaacatctttgtaaatatcaaacctaatacatttcttgtccagtgataaaacaa

SEQ ID NO: 329848 - DNA, 120 bp, Artificial Sequence
  ENSG00000136560_16 (sequence is synthesized)
ctggtagaattatttaaacactttagatttttaaataatatacatggctttaatttttactgtgtgtatagctacatgatgaaattaattaaatattaagaggtacttatgttgtgatca

SEQ ID NO: 329849 - DNA, 120 bp, Artificial Sequence
  ENSG00000136560_17 (sequence is synthesized)
agagggaacgcagctgaaagcgtgaactgtggttgcacaattcccctctgccttcctgtggggtgtcatcatagcctggtcaatgagaagttgggtaacttcccagagggtcacggaggg

SEQ ID NO: 329850 - DNA, 120 bp, Artificial Sequence
  ENSG00000136560_18 (sequence is synthesized)
agtgggtggccaaggcaggaagaacagaagccaaccccgcccacagtgggaacccaggcgttaggagatgcttttgacaagttataataagggagagatggtagtaaaggaagtgaagaa

SEQ ID NO: 329851 - DNA, 120 bp, Artificial Sequence
  ENSG00000136560_19 (sequence is synthesized)
agcagtgcattctgttaaaaattattgtgtcctcatttgagagaggagggatcctcaaataatacaactatgtgcaaagcaggaagtgaaatccttctcagtcctctccccagttgtaat

SEQ ID NO: 329852 - DNA, 120 bp, Artificial Sequence
  ENSG00000136560_20 (sequence is synthesized)
ccaagccttccacatctttcctgtatgtgcataaccatgttattttgctttcttatgaaaatgagattatgcatactgttcgataatctgtttcagattaaatatatatatatggtgaaa

SEQ ID NO: 329853 - DNA, 120 bp, Artificial Sequence
  ENSG00000136560_21 (sequence is synthesized)
ttttctgaagtgatctgctggaattccaaacagaagttccatatatacaaatatgtggcttaaatatttctaaatagaagaactattttcaagtaaaataaaggctgaggttttgtattt

SEQ ID NO: 329854 - DNA, 120 bp, Artificial Sequence
  ENSG00000136560_22 (sequence is synthesized)
cactcggccaggcgccggcgacctgaggggagagggaacgcagctgaaagcgtgaactgtgagatgcttttgacaagttataataagggagagatggtagtaaaggaagtgaagaagcga

SEQ ID NO: 329855 - DNA, 120 bp, Artificial Sequence
  ENSG00000136560_23 (sequence is synthesized)
cttttaaatgcttgttgaattataaggagctgtagcttggttttctttcttcctttaatacagctgcattcttcagcaaagaatctataacaaaagacaaacacgttgatttaaatatat

SEQ ID NO: 329856 - DNA, 120 bp, Artificial Sequence
  ENSG00000136560_24 (sequence is synthesized)
aggccatttttactgaatatcaaaagaagtagacacatagatttttttccccctaagtttctgagcgtatgaggtgcttggtgaacagagcagcaattttgatcaatagttgaatttgag

SEQ ID NO: 329857 - DNA, 120 bp, Artificial Sequence
  ENSG00000136560_25 (sequence is synthesized)
ccttgatttttctcatttaaagaaaaaaatcaattgtatattacatataggtctataagctgtctcaagttatttttcagtagggaaggtaagaagacaagaggtttcttctcctagaaa

SEQ ID NO: 329858 - DNA, 120 bp, Artificial Sequence
  ENSG00000136560_26 (sequence is synthesized)
aagagccctgggctgggtggggcagggcggaagggccctggccttgttgggtggaggtgaagagttaatggctccgcgcgcaggcactgccctctgaactggaacaaaatgcaacttccg

SEQ ID NO: 329859 - DNA, 120 bp, Artificial Sequence
  ENSG00000136560_27 (sequence is synthesized)
gagacttatgtttatagtacttggtggtataatgtttgtggtaaaccttatagaactatctttaagatgcatttttaaaatgaggtttatgtaacttagtaattatctaaattgatctca

SEQ ID NO: 329860 - DNA, 120 bp, Artificial Sequence
  ENSG00000136560_28 (sequence is synthesized)
acgaagaggaatggataaaaacattggcgagcaactcaataaagcgtatgaagccttccggcaggcatgcatggatagagattctgcagtaaaagaattacagcaaaagaatgtttttga

SEQ ID NO: 329861 - DNA, 120 bp, Artificial Sequence
  ENSG00000136560_29 (sequence is synthesized)
actagaaaaatgactgagagatctggcttcggtgataaccagagcttttgttcataaacatgtgctacatgctctgtgtcttagtccatttgcactctataacaaaataccttatacaag

SEQ ID NO: 329862 - DNA, 120 bp, Artificial Sequence
  ENSG00000136560_30 (sequence is synthesized)
ttagaaattgccctgaagaactataattacagaaatgcaggtatatattaatggattaaatttgaagtttttgtttgttgttttttttaaaaatattgcaacccataggaagagttgatt

SEQ ID NO: 329863 - DNA, 120 bp, Artificial Sequence
  ENSG00000136560_31 (sequence is synthesized)
tgatgggctccttttcaggtgattgtgaaagattgtgaatgttgtcttccataaataattttaaaatatcagtatttataaataaggaggaaataactataaaaacagttttatgacaca

SEQ ID NO: 329864 - DNA, 120 bp, Artificial Sequence
  ENSG00000136560_32 (sequence is synthesized)
aattgaaggaaaagaaaatgacctgccttcttaccgcggttggaatacacacccaaacgagagactacagatttcattaatcctttgtgaaatatatggcaaatattttcaagaattatc

SEQ ID NO: 329865 - DNA, 120 bp, Artificial Sequence
  ENSG00000136560_33 (sequence is synthesized)
agtgaattgctggcttccccagaatagtggtaaataaaacagtgattctggccatcctttatcttgtttcttagtttggggatgtttttattatgtcatcattaaatatgaagttactat

SEQ ID NO: 329866 - DNA, 120 bp, Artificial Sequence
  ENSG00000136560_34 (sequence is synthesized)
taatatctaataaattatatttatcagggaagtttcctttaatatttctagctcattgtgatttttgcagagaactgtttggattgcatccaaagtcatttttgcaactggggatgggga

SEQ ID NO: 329867 - DNA, 120 bp, Artificial Sequence
  ENSG00000136560_35 (sequence is synthesized)
gtgtctattgtattagatagcactttgagaacaattttaaataatagatattggatgttcatttggtgtgtatattcattacttcttaacatttttatcaggaatggaagttggattttg

SEQ ID NO: 329868 - DNA, 120 bp, Artificial Sequence
  ENSG00000136560_36 (sequence is synthesized)
cctcagctcttgcttctcatcttatcctgagccgtaagaagacaagaggtttcttctcctagaaaagaaacttcagcaaggagtcttggcagtcctttgctccatgaaaggggtaatata

SEQ ID NO: 329869 - DNA, 120 bp, Artificial Sequence
  ENSG00000136560_37 (sequence is synthesized)
atagcatcgtcggcctctgccccaacggcttcaagggagggactcgtcccggctgctttgcccgggaaatgggggtggaagggcctgcggtgtcgagacctgtcatttactccatccttt

SEQ ID NO: 329870 - DNA, 120 bp, Artificial Sequence
  ENSG00000136560_38 (sequence is synthesized)
agttcctcttcctccgctctgatgtagtttaaatagcctaagaactctgctctttgaagatctgaaagaattcactcatgaaaccatgtgggtctgggagttcattgttcttaagacagc

SEQ ID NO: 329871 - DNA, 120 bp, Artificial Sequence
  ENSG00000136560_39 (sequence is synthesized)
aacaatactcagcaaaatggttcagaacaaacaaaaactccttggagtaaatacaattgaatgaaagagtctgggacacggtaatgtcaagaactaagaacagctgctgtactgatgctg

SEQ ID NO: 329872 - DNA, 120 bp, Artificial Sequence
  ENSG00000136560_40 (sequence is synthesized)
gttatttcccccctacacacaacttttttttcatggacaaggaaaaatgctgtaggtaggctgaggctgttaagtaaaatgtcttgctattctttctcttctcttcttcagttatgttac

SEQ ID NO: 329873 - DNA, 120 bp, Artificial Sequence
  ENSG00000136573_0 (sequence is synthesized)
agaccgggggtgctgccacctctgtctgctgccggcagaaagccacaagccatgaaaactgattgagatgagaagaattcatctgggactggcttttgctttaggatggtgttggaagtt

SEQ ID NO: 329874 - DNA, 120 bp, Artificial Sequence
  ENSG00000136573_1 (sequence is synthesized)
gctcgttgtcgctaggagcctgctccactgtaagggtgtcaggatctgaagagctatggtgaaacaccactgaagcattgccaaggatggggctggtaagtagcaaaaagccggacaagg

SEQ ID NO: 329875 - DNA, 120 bp, Artificial Sequence
  ENSG00000136573_2 (sequence is synthesized)
aaaagccgatcaaagagaaggacaagggccaatggagccccctgaaggtcagcgcccaagacaaggacgccccgccactgccgcccctggttgtcttcaaccaccttactcctccaccgc

SEQ ID NO: 329876 - DNA, 120 bp, Artificial Sequence
  ENSG00000136573_3 (sequence is synthesized)
ccgatgaacacctggatgaagacaagcatttcgtggtggctctgtatgactacaccgctatgaatgatcgggacctgcagatgctgaagggggagaagctacaggtcctgaagggaactg

SEQ ID NO: 329877 - DNA, 120 bp, Artificial Sequence
  ENSG00000136573_4 (sequence is synthesized)
gagactggtggctggccaggtcactcgtcacaggaagagaaggctatgtgcccagtaactttgtggcccgagtggagagcctggaaatggaaaggtggttctttagatcacagggtcgga

SEQ ID NO: 329878 - DNA, 120 bp, Artificial Sequence
  ENSG00000136573_5 (sequence is synthesized)
aggaggctgagaggcagcttcttgctccaatcaacaaggccggctcctttcttatcagagagagtgaaaccaacaaaggtgccttctccctgtctgtgaaggatgtcaccacccaggggg

SEQ ID NO: 329879 - DNA, 120 bp, Artificial Sequence
  ENSG00000136573_6 (sequence is synthesized)
agctgatcaagcactataagatccgctgcctggatgaagggggctactacatctccccccggatcaccttcccctcgctccaggccctggtgcagcactattctaagaagggggatggtc

SEQ ID NO: 329880 - DNA, 120 bp, Artificial Sequence
  ENSG00000136573_7 (sequence is synthesized)
tatgccagaggctgaccctgccctgtgtgcgcccggccccgcagaatccctgggcccaggatgaatgggagatcccccggcagtctctcaggctggtcaggaaactcgggtctggacaat

SEQ ID NO: 329881 - DNA, 120 bp, Artificial Sequence
  ENSG00000136573_8 (sequence is synthesized)
tcggcgaagtctggatgggttactacaaaaacaacatgaaggtggccattaagacgctgaaggagggaaccatgtctccagaagcctttctgggtgaggccaacgtgatgaaggctctgc

SEQ ID NO: 329882 - DNA, 120 bp, Artificial Sequence
  ENSG00000136573_9 (sequence is synthesized)
tgtcaccgagtacatggccagaggatgcctgctggatttcctgaagacagatgaagggagcagattgtcactcccaaggctgattgacatgtcggcgcagattgctgaagggatggcata

SEQ ID NO: 329883 - DNA, 120 bp, Artificial Sequence
  ENSG00000136573_10 (sequence is synthesized)
cattgagcgcatgaattccatccaccgcgacctgcgggcggccaacatcctggtgtctgaggccttgtgctgcaaaattgctgattttggcttggctcgaatcatcgacagtgaatacac

SEQ ID NO: 329884 - DNA, 120 bp, Artificial Sequence
  ENSG00000136573_11 (sequence is synthesized)
ggcccaagagggggccaagttccccatcaagtggacagccccggaagccatccacttcggggtcttcaccatcaaagcagacgtgtggtcgtttggagtcctcctgatggaagttgtcac

SEQ ID NO: 329885 - DNA, 120 bp, Artificial Sequence
  ENSG00000136573_12 (sequence is synthesized)
ttatgggcgggtgccatacccagggatgagcaaccccgaggtcatccgcaacctggagcgcggctaccgcatgccgcgccccgacacctgcccgcccgagctgtaccgcggcgtcatcgc

SEQ ID NO: 329886 - DNA, 120 bp, Artificial Sequence
  ENSG00000136573_13 (sequence is synthesized)
cgagtgctggcgcagccggcccgaggagcggcccaccttcgagttcctgcagtcggtgctggaggacttctacacggccaccgagcggcagtacgagctgcagccctagccggccgcgcc

SEQ ID NO: 329887 - DNA, 120 bp, Artificial Sequence
  ENSG00000136573_14 (sequence is synthesized)
cgcctgcgccccgtgcccacctctgcgcggacgaccccgacttccgtgccatcccagacgggccgcgaaggcggggtgtcgcctgtgcccttttctcagacccggaatccagtgggcaga

SEQ ID NO: 329888 - DNA, 120 bp, Artificial Sequence
  ENSG00000136573_15 (sequence is synthesized)
ggcagcttcgcagggggtccccggacggactccttcaccgactgcacccccgggcgagttacgcggcctctctgtgccgcttcatttgtagagggctgtaacagtgacctcgcacggtca

SEQ ID NO: 329889 - DNA, 120 bp, Artificial Sequence
  ENSG00000136573_16 (sequence is synthesized)
tccggagtactaagccccagtaaggtgttcaggactggtaagcgactgtcatcaagtaaggcccccgtgctgggcaccccccgtgctggccgcgtccccgcctctgcgccctgcgtggac

SEQ ID NO: 329890 - DNA, 120 bp, Artificial Sequence
  ENSG00000136573_17 (sequence is synthesized)
cccgccctgccccgctacagaagccagactgggtcccgcggacgccagcaggggcagccccagcctaggctgcgctccagcactgcggggcttttctgcaataaagtcacgagcgttcga

SEQ ID NO: 329891 - DNA, 90 bp, Artificial Sequence
  ENSG00000136573_18 (sequence is synthesized)
gcagaaattctggagttgcaggataccatcaatgaaatgaaaaatgcagtagagagcttcaacagcagacttgcacagaagaatcagtta

SEQ ID NO: 329892 - DNA, 120 bp, Artificial Sequence
  ENSG00000136573_19 (sequence is synthesized)
agagagcttcaacagcagacttgcacagaagaatcagttaactcgaagacaagtaatttgaaattacagtcagaggcatgaaaaagaatttaaaaaaataaagaaatcctatgagattta

SEQ ID NO: 329893 - DNA, 120 bp, Artificial Sequence
  ENSG00000136573_20 (sequence is synthesized)
accccaggagaaaactttctggtgacagaagggcattgtgacccacgttgcccagggccagggacagggcagctgctcatggtccttcctcacgagttttcctggagcagagggataccc

SEQ ID NO: 329894 - DNA, 120 bp, Artificial Sequence
  ENSG00000136573_21 (sequence is synthesized)
ctggggcttggcagcccagggactttaccatccaccatccacagggctgttgccctggacaggtcattgatatctgactcacagccaattcatggatgacgtgaatccaaaaatcagagg

SEQ ID NO: 329895 - DNA, 120 bp, Artificial Sequence
  ENSG00000136573_22 (sequence is synthesized)
cccacgtggatttagacatggaaatgcctcaccagcttccatgagccagtctctgtgcggcagacttgaactgcacgggggctgataggaagcagggtgggcgctgggatgtgactgcgc

SEQ ID NO: 329896 - DNA, 120 bp, Artificial Sequence
  ENSG00000136573_23 (sequence is synthesized)
ccttgccagtgtttccagtctcccagctcgggttctgtggttgtctaagcctgggggtgctctgccgggtctgtggcgacccggctgccttttcagcctaatcaccagagaagccacaga

SEQ ID NO: 329897 - DNA, 120 bp, Artificial Sequence
  ENSG00000136573_24 (sequence is synthesized)
aagagctggaccacttagaggggcagtctggccacagccacttggaagaacaggctgattttgtacagatgtgtcattttctcctgacttttaaactgtaaacattatataataccctag

SEQ ID NO: 329898 - DNA, 120 bp, Artificial Sequence
  ENSG00000136573_25 (sequence is synthesized)
aaaattttgaaaatagatataaaccatcaataacactggcaacctaacacttttacctaagagctacccattttgatttatctgatgcgcagttttcattgctggaatcataaagacata

SEQ ID NO: 329899 - DNA, 120 bp, Artificial Sequence
  ENSG00000136573_26 (sequence is synthesized)
gcactgactccatcacggtgtgaggagcagcagctcagggccgactgggaccagaaatgctagatttttatttcttggggacaggcagtgcaggagggaggctgtgtgggaatactccga

SEQ ID NO: 329900 - DNA, 120 bp, Artificial Sequence
  ENSG00000136573_27 (sequence is synthesized)
agtttgatcttgtaatggtagagccaggatgttaagcccaagtggttgggctttccctcattgtccacagctgtctcatatccacattggggcatcccccagcgcggtcagggcaaaggc

SEQ ID NO: 329901 - DNA, 120 bp, Artificial Sequence
  ENSG00000136573_28 (sequence is synthesized)
agcagagggcgggggtctgtctgagggtagtgctggtccctgggtacagaatgtccctgagcagcccccacaggcagctgcctctcctccttcagtaggtccctggagataccctggctg

SEQ ID NO: 329902 - DNA, 120 bp, Artificial Sequence
  ENSG00000136573_29 (sequence is synthesized)
ggatacatggatggatgcatggatgtgttgatggatggatgggtgggtggatggatggatgcatggatggatggatgcatggatagatggatggattcatagataaaccaacaaaatgca

SEQ ID NO: 329903 - DNA, 120 bp, Artificial Sequence
  ENSG00000136573_30 (sequence is synthesized)
agcataaggagaagtggaatcaattctagtgctggcttcttgaagtcgcatgtctgaagaggtaaatggggtctctgctttctgcctcagtttcttcgtccattgattgggtgaataaag

SEQ ID NO: 329904 - DNA, 120 bp, Artificial Sequence
  ENSG00000136573_31 (sequence is synthesized)
ccttagtttcctcagctaaaaggtgccaagtagcaccagctgctatccctggcccaggctggtgatcaggggaggagagacaagtctcttcttcttcacagcctctgtccacctggatct

SEQ ID NO: 329905 - DNA, 120 bp, Artificial Sequence
  ENSG00000136573_32 (sequence is synthesized)
gccagtgctccctgggtgcccccacggggcaggcgctgggtgaggttcttggtcacaaatcaacctcgtctaatgcttgcctcaaccccctgccctggagaccacatccctcatgttcca

SEQ ID NO: 329906 - DNA, 120 bp, Artificial Sequence
  ENSG00000136573_33 (sequence is synthesized)
tgtcaggactgtggcccctcggggaggttaagcagcttgctagaggtcagcgacttcccgagggcctccagctccaggagctgtgcttccagccagccagtgagagctgcctgtccttgc

SEQ ID NO: 329907 - DNA, 120 bp, Artificial Sequence
  ENSG00000136573_34 (sequence is synthesized)
ctcctgctccccctccccctccttccttaccatttcttctcttctccctccctctccttttctcctgcctgtgttcttctatcttccatctctgcagacccttggacacagctgtgtgga

SEQ ID NO: 329908 - DNA, 120 bp, Artificial Sequence
  ENSG00000136573_35 (sequence is synthesized)
gcgagaacgaggagggggaggggcacaggtagcccctgtgtctctgatgcccacgttgctgcgttgctgttctgggcttctaggagaggagtttattcggctgaggagcaacacagtcac

SEQ ID NO: 329909 - DNA, 120 bp, Artificial Sequence
  ENSG00000136573_36 (sequence is synthesized)
ctttctactccatccaagaaacagctccttccccagcagcccacaggggctgtgcgggggacacagtgtgggctcggtcttggcgtggaggcccccaggctgtccttcaccatgtgcctg

SEQ ID NO: 329910 - DNA, 120 bp, Artificial Sequence
  ENSG00000136574_0 (sequence is synthesized)
ggcgcaggggccgcgagaggcttcgtcgccgctgcagctccgggggctcccaggggagcgtgcgcggaacctccaggcccagcaggaccccggctgcggcgaggaggaaggagccagcct

SEQ ID NO: 329911 - DNA, 120 bp, Artificial Sequence
  ENSG00000136574_1 (sequence is synthesized)
aggaaggagccagcctagcagcttctgcgcctgtggccgcgggtgtcctggaggcctctcggtgtgacgagtgggggacccgaaggctcgtgcgccacctccaggcctggacgctgccct

SEQ ID NO: 329912 - DNA, 120 bp, Artificial Sequence
  ENSG00000136574_2 (sequence is synthesized)
ccgtcttctgcccccaataggtgcgccggaccttcaggccctggggtgaattcagctgctcctacatcagcttccggaaccaccaaaaattcaaattgggattttccggagtaaacaaga

SEQ ID NO: 329913 - DNA, 120 bp, Artificial Sequence
  ENSG00000136574_3 (sequence is synthesized)
gcctagagccctttgctcaatgctggatttaatacgtatatatttttaagcgagttggttttttcccctttgatttttgatcttcgcgacagttcctcccacgcatattatcgttgttgc

SEQ ID NO: 329914 - DNA, 120 bp, Artificial Sequence
  ENSG00000136574_4 (sequence is synthesized)
cgtcgttttctctccccgcgtggctccttgacctgcgagggagagagaggacaccgaagccgggagctcgcagggaccatgtatcagagcttggccatggccgccaaccacgggccgccc

SEQ ID NO: 329915 - DNA, 120 bp, Artificial Sequence
  ENSG00000136574_5 (sequence is synthesized)
cccggtgcctacgaggcgggcggccccggcgccttcatgcacggcgcgggcgccgcgtcctcgccagtctacgtgcccacaccgcgggtgccctcctccgtgctgggcctgtcctacctc

SEQ ID NO: 329916 - DNA, 80 bp, Artificial Sequence
  ENSG00000136574_6 (sequence is synthesized)
cagctccggtggggccgcgtctggtgcggggcccgggacccagcagggcagcccgggatggagccaggcgggagccgacg

SEQ ID NO: 329917 - DNA, 80 bp, Artificial Sequence
  ENSG00000136574_7 (sequence is synthesized)
gacggagccgcttacaccccgccgccggtgtcgccgcgcttctccttcccggggaccaccgggtccctggcggccgccgc

SEQ ID NO: 329918 - DNA, 120 bp, Artificial Sequence
  ENSG00000136574_8 (sequence is synthesized)
cagtggcggcggagcggcgggtgcgggcctggcgggccgcgagcagtacgggcgcgccggcttcgcgggctcctactccagcccctacccggcttacatggccgacgtgggcgcgtcctg

SEQ ID NO: 329919 - DNA, 120 bp, Artificial Sequence
  ENSG00000136574_9 (sequence is synthesized)
gcagccgccgccgcctccgccggccccttcgacagcccggtcctgcacagcctgcccggccgggccaacccggccgcccgacaccccaatctcgatatgtttgacgacttctcagaaggc

SEQ ID NO: 329920 - DNA, 120 bp, Artificial Sequence
  ENSG00000136574_10 (sequence is synthesized)
agagagtgtgtcaactgtggggctatgtccaccccgctctggaggcgagatgggacgggtcactatctgtgcaacgcctgcggcctctaccacaagatgaacggcatcaaccggccgctc

SEQ ID NO: 329921 - DNA, 120 bp, Artificial Sequence
  ENSG00000136574_11 (sequence is synthesized)
atcaagcctcagcgccggctgtccgcctcccgccgagtgggcctctcctgtgccaactgccagaccaccaccaccacgctgtggcgccgcaatgcggagggcgagcctgtgtgcaatgcc

SEQ ID NO: 329922 - DNA, 120 bp, Artificial Sequence
  ENSG00000136574_12 (sequence is synthesized)
tgcggcctctacatgaagctccacggggtccccaggcctcttgcaatgcggaaagaggggatccaaaccagaaaacggaagcccaagaacctgaataaatctaagacaccagcagctcct

SEQ ID NO: 329923 - DNA, 120 bp, Artificial Sequence
  ENSG00000136574_13 (sequence is synthesized)
tcaggcagtgagagccttcctcccgccagcggtgcttccagcaactccagcaacgccaccaccagcagcagcgaggagatgcgtcccatcaagacggagcctggcctgtcatctcactac

SEQ ID NO: 329924 - DNA, 120 bp, Artificial Sequence
  ENSG00000136574_14 (sequence is synthesized)
gggccctccatccaccctgtcctctcggccctgaagctctccccacaaggctatgcgtctcccgtcagccagtctccacagaccagctccaagcaggactcttggaacagcctggtcttg

SEQ ID NO: 329925 - DNA, 120 bp, Artificial Sequence
  ENSG00000136574_15 (sequence is synthesized)
gccgacagtcacggggacataatcactgcgtaatcttccctcttccctcctcaaattcctgcacggacctgggacttggaggatagcaaagaaggaggccctgggctcccaggggccggc

SEQ ID NO: 329926 - DNA, 120 bp, Artificial Sequence
  ENSG00000136574_16 (sequence is synthesized)
ctcctctgcctggtaatgactccagaacaacaactgggaagaaacttgaagtcgacaatctggttaggggaagcgggtgttggattttctcagatgcctttacacgctgatgggactgga

SEQ ID NO: 329927 - DNA, 120 bp, Artificial Sequence
  ENSG00000136574_17 (sequence is synthesized)
gggagcccacccttcagcacgagcacactgcatctctcctgtgagttggagacttctttcccaagatgtccttgtcccctgcgttccccactgtggcctagaccgtgggttttgcattgt

SEQ ID NO: 329928 - DNA, 120 bp, Artificial Sequence
  ENSG00000136574_18 (sequence is synthesized)
gtttctagcaccgaggatctgagaacaagcggagggccgggccctgggacccctgctccagcccgaatgacggcatctgtttgccatgtacctggatgcgacgggcccctggggacaggc

SEQ ID NO: 329929 - DNA, 120 bp, Artificial Sequence
  ENSG00000136574_19 (sequence is synthesized)
ccttgccccatccatccgcttgaggcatggcaccgccctgcatccctaataccaaatctgactccaaaattgtggggtgtgacatacaagtgactgaacacttcctggggagctacaggg

SEQ ID NO: 329930 - DNA, 120 bp, Artificial Sequence
  ENSG00000136574_20 (sequence is synthesized)
gcacttaacccaccacagcacagcctcatcaaaatgcagctggcaacttctcccccaggtgccttccccctgctgccggcctttgctccttcacttccaacatctctcaaaataaaaatc

SEQ ID NO: 329931 - DNA, 120 bp, Artificial Sequence
  ENSG00000136574_21 (sequence is synthesized)
cctcttcccgctctgagcgattcagctctgcccgcagcttgtacatgtctctcccctggcaaaacaagagctgggtagtttagccaaacggcaccccctcgagttcactgcagacccttc

SEQ ID NO: 329932 - DNA, 120 bp, Artificial Sequence
  ENSG00000136574_22 (sequence is synthesized)
gttcaccgtgtcacacatagaggggttctgagtaagaacaaaacgttctgctgctcaagccagtctggcaagcactcagcccagcctcgaggtccttctggggagagtgtaagtggacag

SEQ ID NO: 329933 - DNA, 120 bp, Artificial Sequence
  ENSG00000136574_23 (sequence is synthesized)
agtcctggtcagggggcaggagtgtcccaagggctggcccacctgctgtctgtctgctcctcctagcccttggtcagatggcagccagagtccctcaggacctgcagcctcgccccggca

SEQ ID NO: 329934 - DNA, 120 bp, Artificial Sequence
  ENSG00000136574_24 (sequence is synthesized)
gaagtcttttgtccaggaggcaaaaagccagagattctgcaacacgaattcgaagcaaacaaacacaacacaacagaattcctggaaagaagacgactgctaagacacggcaggggggcc

SEQ ID NO: 329935 - DNA, 120 bp, Artificial Sequence
  ENSG00000136574_25 (sequence is synthesized)
tggagggagcctccgactctgagctgctccgggatctgccgcgttctcctctgcacattgctgtttctgcccctgatgctggagctcaaggagactccttcctctttctcagcagagctg

SEQ ID NO: 329936 - DNA, 120 bp, Artificial Sequence
  ENSG00000136574_26 (sequence is synthesized)
tagctgactgtggcattactacgcctccccacacgcccagacccctcactccaaaatcctactggctgtagcagagaatacctttgaaccaagattctgttttaatcatcatttacattg

SEQ ID NO: 329937 - DNA, 120 bp, Artificial Sequence
  ENSG00000136574_27 (sequence is synthesized)
ttttcttccaaaggccccctcgtataccctccctaacccacaaacctgttaacattgtcttaaggtgaaatggctggaaaatcagtatttaactaataaatttatctgtattcctctttc

SEQ ID NO: 329938 - DNA, 120 bp, Artificial Sequence
  ENSG00000136574_28 (sequence is synthesized)
cgcggcctctgcgcctcagccgacctccaccgcggcagggacgcatcctgctctgcaccctggttctcggcgctgcgcccgcggaggctcgtgcagggcaggctgcccgtgcgggtgagg

SEQ ID NO: 329939 - DNA, 120 bp, Artificial Sequence
  ENSG00000136574_29 (sequence is synthesized)
actgagtgccgcgcagggaaggagtatcgcagaccggcgcccaggcccagcgggggaatccaagggccgtgttgcaggactcggcattcgttctgcgcgggtcaccttgaatgtctgtcc

SEQ ID NO: 329940 - DNA, 120 bp, Artificial Sequence
  ENSG00000136574_30 (sequence is synthesized)
caacgtctccctcccacccggctgagaacagcctggaatccctgtgcagagtttgcctcacaccaggccttgagcagccgcagggacgccgctccccaccgcggggacgcatcctgctct

SEQ ID NO: 329941 - DNA, 120 bp, Artificial Sequence
  ENSG00000136574_31 (sequence is synthesized)
agtcagcgccctagggccgagttgctgggccggggacccgagccgcgagctggggacttggaggcggccggcgcaggggccgcgagaggcttcgtcgccgctgcagctccgggggctccc

SEQ ID NO: 329942 - DNA, 120 bp, Artificial Sequence
  ENSG00000136574_32 (sequence is synthesized)
gcaaaacctattttgaacagacactaggctgttgatagtctctgtttactccattcagtatgatattcacgtgttttgctgtggggatattattgtatttcattatagagtattatctca

SEQ ID NO: 329943 - DNA, 120 bp, Artificial Sequence
  ENSG00000136574_33 (sequence is synthesized)
ggccctgctggaggtattctgtaataatacacagtatttggatttttaaaaatgtgaatcttcaagttgaatgaggaagaatctttttttaaaaagttttgaagcctgaaacacacgtgg

SEQ ID NO: 329944 - DNA, 120 bp, Artificial Sequence
  ENSG00000136574_34 (sequence is synthesized)
cctcaagggtttgagatgagatagggggaagaagccatccctgtgagaactgtagccctccgcagataaggacctctgctgctgtccccggcaaatgtagataaagccattagcttgcac

SEQ ID NO: 329945 - DNA, 120 bp, Artificial Sequence
  ENSG00000136574_35 (sequence is synthesized)
atgtatcagagcttgccatggccgccaaccacgggccgccccccggtgcctacgaggcgggcggccccggcgccttcatgcacggcgcgggcgccgcgtcctcgccagtctacgtgccca

SEQ ID NO: 329946 - DNA, 120 bp, Artificial Sequence
  ENSG00000136574_36 (sequence is synthesized)
cgcaggggccgcgagaggcttcgtcgccgctgcagctccgggggctcccaggggagcgtgcgcggaacctccaggcccagcagttatgaaagaaaaaaaattacattatcttgaagaact

SEQ ID NO: 329947 - DNA, 120 bp, Artificial Sequence
  ENSG00000136603_0 (sequence is synthesized)
acagccgaagggagcgggcgagcggcgacggcggcggcggcgggcacagattaattaaaagaagaatgaactataatccttgaagataactgggcaattttttaagtcggaggctgttct

SEQ ID NO: 329948 - DNA, 120 bp, Artificial Sequence
  ENSG00000136603_1 (sequence is synthesized)
tactggtgtgaggatttacacacgtcttcagtttttcagcacagaccagcagaccatcatttttagaggaaatactccctctgccctcctttttggtttccttggtggtaaagattaaat

SEQ ID NO: 329949 - DNA, 120 bp, Artificial Sequence
  ENSG00000136603_2 (sequence is synthesized)
ttggttgcatcattttgacttgtgtttgagtctagattttatggcacaaggaatggcataaacttttcatgtgttttggttaaaacaaaccagaccattgcattgaccctggacatcttt

SEQ ID NO: 329950 - DNA, 120 bp, Artificial Sequence
  ENSG00000136603_3 (sequence is synthesized)
aattgagaaattggtaactttattttaatatgtatatctgaagaattcaagaaaacaaaggcatcctcagaggtgtgcctcttttctttattattagaggcaaaacgaacaattttatag

SEQ ID NO: 329951 - DNA, 120 bp, Artificial Sequence
  ENSG00000136603_4 (sequence is synthesized)
gatttgtagtgaaattataccagattataaggagaaccaaaactaagtcgcaaaatttattaatttaaggggctctcgctttgaaagtttgagagtaagttacgataggcatttgtatcc

SEQ ID NO: 329952 - DNA, 120 bp, Artificial Sequence
  ENSG00000136603_5 (sequence is synthesized)
attcattactttcctcttttcaaataagcaactaaatagaaatgctaatctcagacttaattatttaacagaagagtgtaccatggaaaacctccagacaaatttctccttggttcaggg

SEQ ID NO: 329953 - DNA, 120 bp, Artificial Sequence
  ENSG00000136603_6 (sequence is synthesized)
ctcaactaaaaaactgaatgggatgggagatgatggcagccccccagcgaaaaaaatgataacggacattcatgcaaatggaaaaacgataaacaaggtgccaacagttaagaaggaaca

SEQ ID NO: 329954 - DNA, 120 bp, Artificial Sequence
  ENSG00000136603_7 (sequence is synthesized)
cttggatgactatggagaagcaccagtggaaactgatggagagcatgttaagcgaacctgtacttctgttcctgaaactttgcatttaaatcccagtttgaaacacacattggcacaatt

SEQ ID NO: 329955 - DNA, 120 bp, Artificial Sequence
  ENSG00000136603_8 (sequence is synthesized)
ccatttaagtagtcagagctcgctgggtggaccagcagcattttctgctcggcattcccaagaaagcatgtcgcctactgtatttctgcctcttccatcacctcaggttcttcctggccc

SEQ ID NO: 329956 - DNA, 120 bp, Artificial Sequence
  ENSG00000136603_9 (sequence is synthesized)
attgctcatcccttcagatagctccacagaactcactcagactgtgttggaaggggaatctatttcttgttttcaagttggaggagaaaagagactctgtttgccccaagtcttaaattc

SEQ ID NO: 329957 - DNA, 120 bp, Artificial Sequence
  ENSG00000136603_10 (sequence is synthesized)
tgttctccgagaatttacactccagcaaataaatacagtgtgtgatgaactgtacatatattgttcaaggtgtacttcagaccagcttcatatcttaaaggtactgggcatacttccatt

SEQ ID NO: 329958 - DNA, 120 bp, Artificial Sequence
  ENSG00000136603_11 (sequence is synthesized)
caatgccccatcctgtgggctgattacattaactgatgcacaaagattatgtaatgctttattgcggccacgaacttttcctcaaaatggtagcgtacttcctgctaaaagctcattggc

SEQ ID NO: 329959 - DNA, 120 bp, Artificial Sequence
  ENSG00000136603_12 (sequence is synthesized)
ccagttaaaggaaactggcagtgcctttgaagtggagcatgaatgcctaggcaaatgtcagggtttatttgcaccccagttttatgttcagcctgatgctccgtgtattcaatgtctgga

SEQ ID NO: 329960 - DNA, 120 bp, Artificial Sequence
  ENSG00000136603_13 (sequence is synthesized)
gtgttgtggaatgtttgcaccccagacgtttgtgatgcattctcacagatcacctgacaaaagaacttgccactggggctttgaatcagctaaatggcattgctatcttcatgtgaacca

SEQ ID NO: 329961 - DNA, 120 bp, Artificial Sequence
  ENSG00000136603_14 (sequence is synthesized)
aaaatacttaggaacacctgaagaaaagaaactgaagataattttagaagaaatgaaggagaagtttagcatgagaagtggaaagagaaatcaatccaagacagatgcaccatcaggaat

SEQ ID NO: 329962 - DNA, 120 bp, Artificial Sequence
  ENSG00000136603_15 (sequence is synthesized)
ggaattacagtcatggtatcctgttataaagcaggaaggtgaccatgtttctcagacacattcatttttacaccccagctactacttatacatgtgtgataaagtggttgccccaaatgt

SEQ ID NO: 329963 - DNA, 120 bp, Artificial Sequence
  ENSG00000136603_16 (sequence is synthesized)
gtcacttacttctgctgtatcccagtctaaagagctcacaaagacagaggcaagtaagtccatatcaagacagtcagagaaggctcacagtagtggtaaacttcaaaaaacagtgtctta

SEQ ID NO: 329964 - DNA, 120 bp, Artificial Sequence
  ENSG00000136603_17 (sequence is synthesized)
tccagatgtctcacttgaggaacaggagaaaatggatttaaaaacaagtagagaattatgtagccgtttagatgcatcaatctcaaataattctacaagtaaaaggaaatctgagtctgc

SEQ ID NO: 329965 - DNA, 120 bp, Artificial Sequence
  ENSG00000136603_18 (sequence is synthesized)
cacttgcaacttagtcagagacataaacaaagtgggaattggccttgttgctgccgcttcatctccgcttcttgtgaaagatgtcatttgtgaggatgataagggaaaaatcatggaaga

SEQ ID NO: 329966 - DNA, 120 bp, Artificial Sequence
  ENSG00000136603_19 (sequence is synthesized)
agtaatgagaacttatttaaaacaacaggaaaaactaaacttgattttgcaaaagaagcaacaacttcagatggaagtaaaaatgttgagtagttcaaaatctatgaaggaactcactga

SEQ ID NO: 329967 - DNA, 120 bp, Artificial Sequence
  ENSG00000136603_20 (sequence is synthesized)
agaacagcagaatttacagaaagagcttgaatctttgcagaatgaacatgctcaaagaatggaagaattttatgttgaacagaaagacttagagaaaaaattggagcagataatgaagca

SEQ ID NO: 329968 - DNA, 120 bp, Artificial Sequence
  ENSG00000136603_21 (sequence is synthesized)
aaaatgtacctgtgactcaaatttagaaaaagacaaagaggctgaatatgcaggacagttggcagaactgaggcagagattggaccatgctgaggccgataggcaagaactccaagatga

SEQ ID NO: 329969 - DNA, 120 bp, Artificial Sequence
  ENSG00000136603_22 (sequence is synthesized)
actcagacaggaacgggaagcaagacagaagttagagatgatgataaaagagctaaagctgcaaattctgaaatcatcaaagactgctaaagaatagaaactgttaaagagattcatctg

SEQ ID NO: 329970 - DNA, 120 bp, Artificial Sequence
  ENSG00000136603_23 (sequence is synthesized)
tgtattactgacaaggttttttttgtttgttgcttgctttggtaattgaattctgaagaatttatctgcatgacgataactaggcattctatccatttgtagatcagagaaagtgaagag

SEQ ID NO: 329971 - DNA, 120 bp, Artificial Sequence
  ENSG00000136603_24 (sequence is synthesized)
agagattatatattagtacttaaatttttacattttccaaatgaatgaaaatgtatgtttctttgtacttttttaaaaaaatcagcttagtaacaatactatatggtttcaactagtagg

SEQ ID NO: 329972 - DNA, 120 bp, Artificial Sequence
  ENSG00000136603_25 (sequence is synthesized)
ctgcttatatttctaatgcaaacttaacaattgtgtactttttaaaagctgcaatatgtgttggaaaatagctgtggtcaattttgttatccatatttcagactcaattttagatacaat

SEQ ID NO: 329973 - DNA, 120 bp, Artificial Sequence
  ENSG00000136603_26 (sequence is synthesized)
ggtggctttatattttaagtatatagagctactcaaggagttgaatctccccttttctcattaacacaatttttctaagttgatatggtgtactcattaacatacaccaaatttactttt

SEQ ID NO: 329974 - DNA, 120 bp, Artificial Sequence
  ENSG00000136603_27 (sequence is synthesized)
actttgttcagattgtggaatgaatttccaccagttctcttctttttaatgtgtaccctaggaggaattttactgaggttatagcataccccatgagcacagtggggaagaagaatgtgt

SEQ ID NO: 329975 - DNA, 120 bp, Artificial Sequence
  ENSG00000136603_28 (sequence is synthesized)
tgttatgtgctgctgctaaacagaagcagcagttgtaatttgtttttcagtttaaatgtggttatagttagatttttttttaagcagcaacttttcaaaaataaaatgtgataatttctg

SEQ ID NO: 329976 - DNA, 120 bp, Artificial Sequence
  ENSG00000136603_29 (sequence is synthesized)
tcagtttctatacaatccataatcctcctgtacagtttttacatgtagttatgagtcttactaaaatttatataatggacttgttttcctttaagttgtaaaatgttaaacaccttgaag

SEQ ID NO: 329977 - DNA, 120 bp, Artificial Sequence
  ENSG00000136603_30 (sequence is synthesized)
gttattttggacttctgtatgtttaaatgttgtcttaccaaaatttgcacgaatggaccattttcatttactacttaatatcaaaatcaggaatttacagtcaactgatagtacatgata

SEQ ID NO: 329978 - DNA, 120 bp, Artificial Sequence
  ENSG00000136603_31 (sequence is synthesized)
ggtgcatataggacagtttagttacctgctactaaaagatttttagataagttttagaagataaaggaattccatagtttcaggagggacaacatcttctgcactttttttttgcacaga

SEQ ID NO: 329979 - DNA, 120 bp, Artificial Sequence
  ENSG00000136603_32 (sequence is synthesized)
aaagtctgtcattctctaatggcaaatttcatatttgttaattcttggctcaaaatatattaggtaaaattcttagatctgtttttaaagggagtttcctgaaactatcattaattgaca

SEQ ID NO: 329980 - DNA, 120 bp, Artificial Sequence
  ENSG00000136603_33 (sequence is synthesized)
ttattaccccatggattttatgggataataaatgtttttcatgttctcttataagatactatgtatgaaattacttcagagagctatatttattttaaaataaattagctagggttaagg

SEQ ID NO: 329981 - DNA, 120 bp, Artificial Sequence
  ENSG00000136603_34 (sequence is synthesized)
ttatattctatttccagcatagaaggtagataatctaatggtgtagaaagaatcactaggttgtcatttaaccagttattttcatattttgcttaatagtacatatccaaaaagaatttt

SEQ ID NO: 329982 - DNA, 120 bp, Artificial Sequence
  ENSG00000136603_35 (sequence is synthesized)
gtacttccccaaatgtaatttatttactaaattgagtataacctaaatgtgtgttttctattttccatttaaattttgctatattaagactaatttaattcgttgagtcttggaatcttc

SEQ ID NO: 329983 - DNA, 75 bp, Artificial Sequence
  ENSG00000136603_36 (sequence is synthesized)
atattaagactaatttaattcgttgagtcttggaatcttctcaaggaggaacaaatattaaaatgacatgtagaa

SEQ ID NO: 329984 - DNA, 120 bp, Artificial Sequence
  ENSG00000136603_37 (sequence is synthesized)
atgacatattctcccaatacaatctatttagatctggagaaggaaaaatcagatatttatgatatagttttattttaattttgaattatttgtgtcacagctcagctttttggaagacaa

SEQ ID NO: 329985 - DNA, 120 bp, Artificial Sequence
  ENSG00000136603_38 (sequence is synthesized)
actcaaacacctataatttcatttatatttctaattcacttggaacctttctgctttatgttacctagaaaatgataatttgtttaacccaaaacttctaaaataaattgcttaatcctt

SEQ ID NO: 329986 - DNA, 120 bp, Artificial Sequence
  ENSG00000136603_39 (sequence is synthesized)
gaaatatgttattggaaaattttaagcagtgcttaaacaccattaaattattatgaacttgtaattcagaattgagtaaagaaatattttttctagtccttcatatattgaaaacttgcc

SEQ ID NO: 329987 - DNA, 120 bp, Artificial Sequence
  ENSG00000136603_40 (sequence is synthesized)
acatgacattgtatcgtcttcattttccagaagatgcgttggtgtgccataggtttctaacttccttgaaaatagttttttaagtcaattgtaaatatacgtattattgttaaaagtaac

SEQ ID NO: 329988 - DNA, 120 bp, Artificial Sequence
  ENSG00000136603_41 (sequence is synthesized)
tttaaactgcaacacatagcttcaaaacaatatagagattttgtaataccttataagtggagttggctaaaataccttatccatataaaacttattctattctttgcatgcttattttgt

SEQ ID NO: 329989 - DNA, 120 bp, Artificial Sequence
  ENSG00000136603_42 (sequence is synthesized)
gtgttggttgctagcttaaagtttgatttgttgttactctttgtgtgccaaattcactaggcaagcggatttttcctcagacttcaaaaaataattcttttaagaaaaaatgtaaaaatg

SEQ ID NO: 329990 - DNA, 120 bp, Artificial Sequence
  ENSG00000136603_43 (sequence is synthesized)
tttattctaaaaagctgcattaaagggacaacctataaaaagttttgctagctcatctttagaaggaagaaagaatattagcttgggtgatgtttaatttgggtggcgatagtttctgta

SEQ ID NO: 329991 - DNA, 120 bp, Artificial Sequence
  ENSG00000136603_44 (sequence is synthesized)
ggctaaactttatgagaaaagtgtacctactctataaaggtaataaatgtaaaacctcttgctgttattgaggaagctcttcaactaccctaaatttcacaaatgtaacttataacacta

SEQ ID NO: 329992 - DNA, 120 bp, Artificial Sequence
  ENSG00000136603_45 (sequence is synthesized)
tgaaaagatttgaccaacaatttacgtttgctgtgtgctttagtttttgtttaagcatattcttttgcttgaatttctgtgttcatgagagttagggtgttttatgcttcttgaactaat

SEQ ID NO: 329993 - DNA, 120 bp, Artificial Sequence
  ENSG00000136603_46 (sequence is synthesized)
tttataacatatttaatatattaccagttaagatataaaatcatttgtacatagcgaattgtaaagcagctattaaagtaggtgaaataaagtatatatttgccggttatccatatcttt

SEQ ID NO: 329994 - DNA, 120 bp, Artificial Sequence
  ENSG00000136603_47 (sequence is synthesized)
tagaagtcctgacagaacaaccagtttatttgcacataggtagcttctgtttgaaggaaggtaaagttataaggaaactcaaatactataagatgtgtcaaggtatttctccagaattaa

SEQ ID NO: 329995 - DNA, 120 bp, Artificial Sequence
  ENSG00000136603_48 (sequence is synthesized)
ttgcaaagctagtgctgaaggattttaatcagcttctaaaattttcttctcaataaggcatatgttttgattacttagggaagattcctcatttttatttgccctttatgcatttaatcc

SEQ ID NO: 329996 - DNA, 120 bp, Artificial Sequence
  ENSG00000136603_49 (sequence is synthesized)
acatgataggacattaaaaattaatataaagaaaaatcgtgctcatactgtacatctgtttctgtgcttggaactacttgttaatagtttttatcgaagctgtcagcaataagggacata

SEQ ID NO: 329997 - DNA, 120 bp, Artificial Sequence
  ENSG00000136603_50 (sequence is synthesized)
aaactgctgtattatacattgtggaattgaataaacagcctaattttttttttctagtatagggtacttaagcatttccacttttggaagaaaagtgtattagtattttatattgcattt

SEQ ID NO: 329998 - DNA, 120 bp, Artificial Sequence
  ENSG00000136603_51 (sequence is synthesized)
catttaaaaggacagttttttttttttttttgtaaatccattcattgaaatggtttctaaactgtataatgtaatttggagcctatttagtaatagaattaaatgtcctatgtagtgcta

SEQ ID NO: 329999 - DNA, 120 bp, Artificial Sequence
  ENSG00000136603_52 (sequence is synthesized)
caatttttgaattagaaagtgatcaaatgtaagaaaaaaatttaaaaattcagcccagaaaacaaaatagtgtattaaattagtttaatgtaaaaggaatttataagatttttttcctca

SEQ ID NO: 330000 - DNA, 120 bp, Artificial Sequence
  ENSG00000136603_53 (sequence is synthesized)
atatagatacctcacttgaaaagaaagcacagcatacttaaagtagttctagtaaacatgtcctagaaaacagttgctaaatgtaggacatcttttgaggaattagtttatgagaaataa

SEQ ID NO: 330001 - DNA, 120 bp, Artificial Sequence
  ENSG00000136603_54 (sequence is synthesized)
aattttacttgtttttactatcctgttagaagtatttgtttatcctgataattttaagccaacatagtagtcttaaattacttttgaatttctaatctgtgaaggcagtaaatgaaatat

SEQ ID NO: 330002 - DNA, 120 bp, Artificial Sequence
  ENSG00000136603_55 (sequence is synthesized)
ctgttctgcaactgttgaaacaaataattggctacattgaccataattaaagttaaaattttgccaatgatgtacagttttatggttaaagttgctgtggttggttgcattacatgacac

SEQ ID NO: 330003 - DNA, 120 bp, Artificial Sequence
  ENSG00000136603_56 (sequence is synthesized)
agaaaactgtcctctacctcacgtgaaataaatattttatatggttttactaaaaataagactcatgtatctggtcacctagtttacaaattttgaattatatttattgaaacatgacat

SEQ ID NO: 330004 - DNA, 120 bp, Artificial Sequence
  ENSG00000136603_57 (sequence is synthesized)
actgtgctctgagcttatacctcaattgtattttgtgctgttttccattttcatgccttgtaaataacttgtatagattgtggatcaaatactaaataaaaacttttaatgccaattaaa

SEQ ID NO: 330005 - DNA, 120 bp, Artificial Sequence
  ENSG00000136603_58 (sequence is synthesized)
gtgtagcgatgtgtgtggggttcggagccgcgccggcacagccgaagggagcgggcgagcggcgacggcggcggcggcgggcacaggtgcggctccggcttacggcggcgacgcggcgga

SEQ ID NO: 330006 - DNA, 120 bp, Artificial Sequence
  ENSG00000136603_59 (sequence is synthesized)
taggggctcccccattctaggtcatgcctcttgctctcttccttggcctgtgttgagtaaggtgtgttcctgtggtggacgaaagtctgtacgatggttggtggcattggtccttaatcc

SEQ ID NO: 330007 - DNA, 120 bp, Artificial Sequence
  ENSG00000136603_60 (sequence is synthesized)
acacatttattgagcattttcaaacaggctttttgtttgagctaaattttcagataattggagcttttacctttaaaaatgctacccttcaaaactctgggtgatttattttaatctcag

SEQ ID NO: 330008 - DNA, 120 bp, Artificial Sequence
  ENSG00000136603_61 (sequence is synthesized)
ttgctatacttttctagcgtggtgatagctcaggagactgagatagatacaggctacctggcctcagactgcaagttatttttgtccgaatttttttcctttcctaccttttatttgctg

SEQ ID NO: 330009 - DNA, 120 bp, Artificial Sequence
  ENSG00000136628_0 (sequence is synthesized)
gaaggctgcggcggcgtcgggtacgcgcacacgttgcatcttcttcctttcgcggggtcctccgtagttctggcacgagccaggcgtactgacaggtggaccagcggactggtggagatg

SEQ ID NO: 330010 - DNA, 120 bp, Artificial Sequence
  ENSG00000136628_1 (sequence is synthesized)
gcgacgctctctctgaccgtgaattcaggagaccctccgctaggagctttgctggcagtagaacacgtgaaagacgatgtcagcatttccgttgaagaagggaaagagaatattcttcat

SEQ ID NO: 330011 - DNA, 120 bp, Artificial Sequence
  ENSG00000136628_2 (sequence is synthesized)
gtttctgaaaatgtgatattcacagatgtgaattctatacttcgctacttggctagagttgcaactacagctgggttatatggctctaatctgatggaacatactgagattgatcactgg

SEQ ID NO: 330012 - DNA, 120 bp, Artificial Sequence
  ENSG00000136628_3 (sequence is synthesized)
ttggagttcagtgctacaaaattatcttcatgtgattcctttacttctacaattaatgaactcaatcattgcctgtctctgagaacatacttagttggaaactccttgagtttagcagat

SEQ ID NO: 330013 - DNA, 120 bp, Artificial Sequence
  ENSG00000136628_4 (sequence is synthesized)
ttatgtgtttgggccaccctaaaaggaaatgctgcctggcaagaacagttgaaacagaagaaagctccagttcatgtaaaacgttggtttggctttcttgaagcccagcaggccttccag

SEQ ID NO: 330014 - DNA, 120 bp, Artificial Sequence
  ENSG00000136628_5 (sequence is synthesized)
tcagtaggtaccaagtgggatgtttcaacaaccaaagctcgagtggcacctgagaaaaagcaagatgttgggaaatttgttgagcttccaggtgcggagatgggaaaggttaccgtcaga

SEQ ID NO: 330015 - DNA, 120 bp, Artificial Sequence
  ENSG00000136628_6 (sequence is synthesized)
tttcctccagaggccagtggttacttacacattgggcatgcaaaagctgctcttctgaaccagcactaccaggttaactttaaagggaaactgatcatgagatttgatgacacaaatcct

SEQ ID NO: 330016 - DNA, 120 bp, Artificial Sequence
  ENSG00000136628_7 (sequence is synthesized)
gaaaaagaaaaggaagattttgagaaggttatcttggaagatgttgcaatgttgcatatcaaaccagatcaatttacttatacttcggatcattttgaaactataatgaagtatgcagag

SEQ ID NO: 330017 - DNA, 120 bp, Artificial Sequence
  ENSG00000136628_8 (sequence is synthesized)
aagctaattcaagaagggaaggcttatgtggatgatactcctgctgaacagatgaaagcagaacgtgagcagaggatagactctaaacatagaaaaaaccctattgagaagaatctacaa

SEQ ID NO: 330018 - DNA, 120 bp, Artificial Sequence
  ENSG00000136628_9 (sequence is synthesized)
atgtgggaagaaatgaaaaaagggagccagtttggtcagtcctgttgtttgcgagcaaaaattgacatgagtagtaacaatggatgcatgagagatccaaccctttatcgctgcaaaatt

SEQ ID NO: 330019 - DNA, 120 bp, Artificial Sequence
  ENSG00000136628_10 (sequence is synthesized)
caaccacatccaagaactggaaataaatacaatgtttatccaacatatgattttgcctgccccatagttgacagcatcgaaggtgttacacatgccctgagaacaacagaataccatgac

SEQ ID NO: 330020 - DNA, 120 bp, Artificial Sequence
  ENSG00000136628_11 (sequence is synthesized)
agagatgagcagttttactggattattgaagctttaggcataagaaaaccatatatttgggaatatagtcggctaaatctcaacaacacagtgctatccaaaagaaaactcacatggttt

SEQ ID NO: 330021 - DNA, 120 bp, Artificial Sequence
  ENSG00000136628_12 (sequence is synthesized)
gtcaatgaaggactagtagatggatgggatgacccaagatttcctacggttcgtggtgtactgagaagagggatgacagttgaaggactgaaacagtttattgctgctcagggctcctca

SEQ ID NO: 330022 - DNA, 120 bp, Artificial Sequence
  ENSG00000136628_13 (sequence is synthesized)
cgttcagtcgtgaacatggagtgggacaaaatctgggcgtttaacaaaaaggttattgacccagtggctccacgatatgttgcattactgaagaaagaagtgatcccagtgaatgtacct

SEQ ID NO: 330023 - DNA, 120 bp, Artificial Sequence
  ENSG00000136628_14 (sequence is synthesized)
gaagctcaggaggagatgaaagaagtagccaaacacccaaagaatcctgaggttggcttgaagcctgtgtggtatagtcccaaagttttcattgaaggtgctgatgcagagactttttcg

SEQ ID NO: 330024 - DNA, 120 bp, Artificial Sequence
  ENSG00000136628_15 (sequence is synthesized)
gagggtgagatggttacatttataaattggggcaacctcaacattacaaaaatacacaaaaatgcagatggaaaaatcatatctcttgatgcaaagttgaatttggaaaacaaagactac

SEQ ID NO: 330025 - DNA, 120 bp, Artificial Sequence
  ENSG00000136628_16 (sequence is synthesized)
aagaaaaccactaaggtcacttggcttgcagagactacacatgctcttcctattccagtaatctgtgtcacttatgagcacttgatcacaaagccagtgctaggaaaagacgaggacttt

SEQ ID NO: 330026 - DNA, 120 bp, Artificial Sequence
  ENSG00000136628_17 (sequence is synthesized)
aagcagtatgtcaacaagaacagtaagcatgaagagctaatgctaggggatccctgccttaaggatttgaaaaaaggagatattatacaactccagagaagaggattcttcatatgtgat

SEQ ID NO: 330027 - DNA, 120 bp, Artificial Sequence
  ENSG00000136628_18 (sequence is synthesized)
caaccttatgaacctgttagcccatatagttgcaaggaagccccgtgtgttttgatatacattcctgatgggcacacaaaggaaatgccaacatcagggtcaaaggaaaagaccaaagta

SEQ ID NO: 330028 - DNA, 120 bp, Artificial Sequence
  ENSG00000136628_19 (sequence is synthesized)
gaagccacaaaaaatgagacctctgctccttttaaggaaagaccaacaccttctctgaataataattgtactacatctgaggattccttggtcctttacaatagagtggctgttcaagga

SEQ ID NO: 330029 - DNA, 120 bp, Artificial Sequence
  ENSG00000136628_20 (sequence is synthesized)
acagcttttgtctttgaaagctgaatataaggagaaaactggccaggaatataaacctggaaaccctcctgctgaaataggacagaatatttcttctaattcctcagcaagtattctgga

SEQ ID NO: 330030 - DNA, 120 bp, Artificial Sequence
  ENSG00000136628_21 (sequence is synthesized)
aagtaaatctctgtatgatgaagttgctgcacaaggggaggtggttcgtaagctaaaagctgaaaaatcccctaaggctaaaataaatgaagctgtagaatgcttactgtccctgaaggc

SEQ ID NO: 330031 - DNA, 120 bp, Artificial Sequence
  ENSG00000136628_22 (sequence is synthesized)
tcagtataaagaaaaaactgggaaggagtacatacctggtcagcccccattatctcaaagttcggattcaagcccaaccagaaattctgaacctgctggtttagaaacaccagaagcgaa

SEQ ID NO: 330032 - DNA, 120 bp, Artificial Sequence
  ENSG00000136628_23 (sequence is synthesized)
agtactttttgacaaagtagcttctcaaggggaagtagttcggaaacttaaaactgaaaaagcccctaaggatcaagtagatatagctgttcaagaactccttcagctaaaggcacagta

SEQ ID NO: 330033 - DNA, 120 bp, Artificial Sequence
  ENSG00000136628_24 (sequence is synthesized)
caagtctttgataggagtagagtataagcctgtgtcggccactggagctgaggacaaagataagaagaagaaagaaaaagaaaataaatctgaaaagcagaataagcctcagaaacaaaa

SEQ ID NO: 330034 - DNA, 120 bp, Artificial Sequence
  ENSG00000136628_25 (sequence is synthesized)
tgatggccaaaggaaagacccttctaaaaaccaaggaggtgggctctcatcaagtggagcaggagaagggcaggggcctaagaaacagaccaggttgggtcttgaggcaaaaaaagaaga

SEQ ID NO: 330035 - DNA, 120 bp, Artificial Sequence
  ENSG00000136628_26 (sequence is synthesized)
aaatcttgctgattggtattctcaggtcatcacaaagtcagaaatgattgaataccatgacataagtggctgttatattcttcgtccctgggcctatgccatttgggaagccatcaagga

SEQ ID NO: 330036 - DNA, 120 bp, Artificial Sequence
  ENSG00000136628_27 (sequence is synthesized)
cttttttgatgctgagatcaagaaacttggtgttgaaaactgctacttccccatgtttgtgtctcaaagtgcattagagaaagagaagactcatgttgctgactttgccccagaggttgc

SEQ ID NO: 330037 - DNA, 120 bp, Artificial Sequence
  ENSG00000136628_28 (sequence is synthesized)
ttgggttacaagatctggcaaaaccgagctggcagaaccaattgccattcgtcctactagtgaaacagtaatgtatcctgcatatgcaaaatgggtacagtcacacagagacctgcccat

SEQ ID NO: 330038 - DNA, 120 bp, Artificial Sequence
  ENSG00000136628_29 (sequence is synthesized)
caagctcaatcagtggtgcaatgtggtgcgttgggaattcaagcatcctcagcctttcctacgtactcgtgaatttctttggcaggaagggcacagtgcttttgctaccatggaagaggc

SEQ ID NO: 330039 - DNA, 120 bp, Artificial Sequence
  ENSG00000136628_30 (sequence is synthesized)
agcggaagaggtcttgcagatacttgacttatatgctcaggtatatgaagaactcctggcaattcctgttgttaaaggaagaaagacggaaaaggaaaaatttgcaggaggagactatac

SEQ ID NO: 330040 - DNA, 120 bp, Artificial Sequence
  ENSG00000136628_31 (sequence is synthesized)
aactacaatagaagcatttatatctgctagtggaagagctatccagggaggaacatcacatcatttagggcagaatttttccaaaatgtttgaaatcgtttttgaagatccaaagatacc

SEQ ID NO: 330041 - DNA, 120 bp, Artificial Sequence
  ENSG00000136628_32 (sequence is synthesized)
aggagagaagcaatttgcctatcaaaactcctggggcctgacaactcgaactattggtgttatgaccatggttcatggggacaacatgggtttagtattaccaccccgtgtagcatgtgt

SEQ ID NO: 330042 - DNA, 120 bp, Artificial Sequence
  ENSG00000136628_33 (sequence is synthesized)
tcaggtggtgattattccttgtggcattaccaatgcactttctgaagaagacaaagaagcgctgattgcaaaatgcaatgattatcgaaggcgattactcagtgttaacatccgcgttag

SEQ ID NO: 330043 - DNA, 120 bp, Artificial Sequence
  ENSG00000136628_34 (sequence is synthesized)
agctgatttacgagataattattctccaggttggaaattcaatcactgggagctcaagggagttcccattagacttgaagttgggccacgtgatatgaagagctgtcagtttgtagccgt

SEQ ID NO: 330044 - DNA, 120 bp, Artificial Sequence
  ENSG00000136628_35 (sequence is synthesized)
cagacgagatactggagaaaagctgacagttgctgaaaatgaggcagagactaaacttcaagctattttggaagacatccaggtcacccttttcacaagggcttctgaagaccttaagac

SEQ ID NO: 330045 - DNA, 120 bp, Artificial Sequence
  ENSG00000136628_36 (sequence is synthesized)
tcatatggttgtggctaatacaatggaagactttcagaagatactagattctggaaagattgttcagattccattctgtggggaaattgactgtgaggactggatcaaaaagaccactgc

SEQ ID NO: 330046 - DNA, 120 bp, Artificial Sequence
  ENSG00000136628_37 (sequence is synthesized)
cagggatcaagatcttgaacctggtgctccatccatgggagctaaaagcctttgcatccccttcaaaccactctgtgaactgcagcctggagccaaatgtgtctgtggcaagaaccctgc

SEQ ID NO: 330047 - DNA, 120 bp, Artificial Sequence
  ENSG00000136628_38 (sequence is synthesized)
caagtactacaccttatttggtcgcagctactgagggatgaacgaaagccccctcttcaactcctctcactttttaaagcattgatattagtatcttctcagatacagaccgttttatga

SEQ ID NO: 330048 - DNA, 120 bp, Artificial Sequence
  ENSG00000136628_39 (sequence is synthesized)
ttttttaaaaagtaaaagttctaaaatgaagtcacacaggacaattattcttatgcctaagttaacagtggataaaagacttttctgtaaacaactccagtaataaatatcatgaactaa

SEQ ID NO: 330049 - DNA, 120 bp, Artificial Sequence
  ENSG00000136628_40 (sequence is synthesized)
aagagaatgctcactgaacgttagagacagcctctaaagttgagtctcagcttttgctttgtgatagctataatctctgttgacgatataacatttcatgaatgttgatgaagattgaat

SEQ ID NO: 330050 - DNA, 120 bp, Artificial Sequence
  ENSG00000136628_41 (sequence is synthesized)
gcaaacttaagttgtctagagttttattctctaatattcattgtagagctccttatcattaaattataggatttttaatttaaatactcatttttatgctgtaaatttttaggacttttc

SEQ ID NO: 330051 - DNA, 120 bp, Artificial Sequence
  ENSG00000136628_42 (sequence is synthesized)
cctgaaaaaaggttgggagacctatcctttttgcttgccagtttaatatagaactcaaatgttccttctgcagaatagaattgaaggagttataaatactgattacttttccttttctta

SEQ ID NO: 330052 - DNA, 120 bp, Artificial Sequence
  ENSG00000136628_43 (sequence is synthesized)
gacccaagatttcctacggttcgtggtgtactgagaagagggatgacagttgaaggactgaaacagtttattgctgctcaggttattgacccagtggctccacgatatgttgcattactg

SEQ ID NO: 330053 - DNA, 120 bp, Artificial Sequence
  ENSG00000136630_0 (sequence is synthesized)
attacttttccccccccctaactaacggactattattgttgttgttttaaatttagctcttagggcttagctatttgggttttcttgcggtgtccggctcccgtctccctggctcccccg

SEQ ID NO: 330054 - DNA, 120 bp, Artificial Sequence
  ENSG00000136630_1 (sequence is synthesized)
cccgccctgcggccccagcgcccctcgctctcatccagcccgcgaggagtgcgggcgccgcgccgcctttaaagcgaggccagggagcgaggcggtgaccggccgagatccggccctcgc

SEQ ID NO: 330055 - DNA, 120 bp, Artificial Sequence
  ENSG00000136630_2 (sequence is synthesized)
ctcctccctcggtggcgctagggctcccggcctctcttcctcagtgcgggcggagaagcgaaagcggatcgtcctcggctgccgccgccttctccgggactcgcgcgcccctccccgcgc

SEQ ID NO: 330056 - DNA, 120 bp, Artificial Sequence
  ENSG00000136630_3 (sequence is synthesized)
gcccacccacccagtccggctggactgcggcagccgcgcggctcaccccggcaggatgttcgcagccgggctggctcccttctacgcctccaacttcagcctctggtcggccgcttactg

SEQ ID NO: 330057 - DNA, 120 bp, Artificial Sequence
  ENSG00000136630_4 (sequence is synthesized)
ctcctcggccggcccaggcggctgctccttccccttggaccccgccgccgtcaaaaagccctccttctgcatcgcagacattctgcacgccggcgtgggggatctgggggcggccccgga

SEQ ID NO: 330058 - DNA, 120 bp, Artificial Sequence
  ENSG00000136630_5 (sequence is synthesized)
gggcctggcaggggcctcggccgccgccctcaccgcgcacttgggctcggttcacccgcacgcctctttccaagcggcggccagatccccgcttcgacccaccccagtggtggcgccctc

SEQ ID NO: 330059 - DNA, 120 bp, Artificial Sequence
  ENSG00000136630_6 (sequence is synthesized)
cgaagtcccggctggcttcccgcagcggctgtctccgctctcagccgcctaccaccaccatcacccgcaacaacaacagcagcagcaacagccgcagcagcaacagcctccgcctccgcc

SEQ ID NO: 330060 - DNA, 120 bp, Artificial Sequence
  ENSG00000136630_7 (sequence is synthesized)
ccgggctggcgccctgcagcccccggcctcggggacgcgagtggttccgaacccccaccacagtggctctgccccggccccctccagcaaagacctcaaatttggaattgaccgcatttt

SEQ ID NO: 330061 - DNA, 120 bp, Artificial Sequence
  ENSG00000136630_8 (sequence is synthesized)
atctgcagaatttgacccaaaagtcaaagaaggcaacacgctgagagatctcacttccctgctaaccggtgggcggcccgccggggtgcacctctcaggcctgcagccctcggccggcca

SEQ ID NO: 330062 - DNA, 120 bp, Artificial Sequence
  ENSG00000136630_9 (sequence is synthesized)
ttcagcatcagttccaagacacgtttccaggtccctatgctgtgctcacgaaggacaccatgccgcagacgtacaaaaggaagcgttcatggtcgcgcgctgtgttctccaacctgcaga

SEQ ID NO: 330063 - DNA, 120 bp, Artificial Sequence
  ENSG00000136630_10 (sequence is synthesized)
ggaaaggcctggagaaaaggtttgagattcagaagtacgtgaccaagccggaccgaaagcagctggcggcgatgctgggcctcacggacgcacaggtgaaggtgtggttccagaaccggc

SEQ ID NO: 330064 - DNA, 120 bp, Artificial Sequence
  ENSG00000136630_11 (sequence is synthesized)
ggatgaagtggcggcactccaaggaggcccaggcccaaaaggacaaggacaaggaggctggcgagaagccatcaggtggagccccggctgcggatggcgagcaggacgagaggagcccca

SEQ ID NO: 330065 - DNA, 120 bp, Artificial Sequence
  ENSG00000136630_12 (sequence is synthesized)
gccgttctgaaggcgaggctgagagcgagagcagcgactccgagtccctggacatggcccccagcgacacggagcggactgaggggagtgagcgttctctgcaccaaacaacagttatta

SEQ ID NO: 330066 - DNA, 120 bp, Artificial Sequence
  ENSG00000136630_13 (sequence is synthesized)
aggccccggtcactggcgccctcattaccgccagcagtgctgggagtggtgggagcagcggcggcggcggcaatagtttcagcttcagcagcgccagcagtcttagtagcagcagcacca

SEQ ID NO: 330067 - DNA, 120 bp, Artificial Sequence
  ENSG00000136630_14 (sequence is synthesized)
gtgcgggttgcgccagcagccttggcggcggcggcgcctcggagcttctccctgcaacacagcccacagccagcagcgctcccaaaagccccgagccagcccaaggcgcgcttggctgct

SEQ ID NO: 330068 - DNA, 120 bp, Artificial Sequence
  ENSG00000136630_15 (sequence is synthesized)
tatagactgtactagggcggaggggatccgggccttgcgtgcagcctcccaaccatgggctgggttttgtgcttactgtatgttggcgacttggtagggcaggagacgcagcgtggagcc

SEQ ID NO: 330069 - DNA, 120 bp, Artificial Sequence
  ENSG00000136630_16 (sequence is synthesized)
tacctcccgacattcacgcttcgccccacgctgctccgactggctgcagcggacactgcccaaagcagaggggagtctcagtgtcctgctagccagccgaacacttctctccggaagcag

SEQ ID NO: 330070 - DNA, 120 bp, Artificial Sequence
  ENSG00000136630_17 (sequence is synthesized)
gctggttcgactgtgaggtgtttgactaaactgtttctctgactcgccccagaggtcgtggctcaaaggcacttaggacgccttaaatttgtaaataaaatgtttactacggtttgtaaa

SEQ ID NO: 330071 - DNA, 120 bp, Artificial Sequence
  ENSG00000136630_18 (sequence is synthesized)
tggcttggggtgcctttgagtgtttttacaattaaggacaaatcggtaaaacgggagagaagaaaacgaattgtaagaaaactacaaaacattaggtctaaaactcacctgttctatgta

SEQ ID NO: 330072 - DNA, 120 bp, Artificial Sequence
  ENSG00000136630_19 (sequence is synthesized)
aaacaaacaaaaaatgactccagggattctttaaaaacacgtcttagaatcaatatttataaaagtggttggtgtaattatctgctaacatgactttgatctctttaataatgtatctag

SEQ ID NO: 330073 - DNA, 120 bp, Artificial Sequence
  ENSG00000136630_20 (sequence is synthesized)
agacagaattatattttctgacagctaaagcatttttgggaaacactttcgcacttatctgatttctagtaaaaatttcacccaggaaatgtaaataataaacaaaaccgcctagatgag

SEQ ID NO: 330074 - DNA, 120 bp, Artificial Sequence
  ENSG00000136630_21 (sequence is synthesized)
cgggcagagtggggccaccttggggcggaggttttgcgtctgtggcgttcttggaagacacgtgaaagtgaggccgtaagccgatttatgtaaagcctttacttactatatacatgcata

SEQ ID NO: 330075 - DNA, 120 bp, Artificial Sequence
  ENSG00000136630_22 (sequence is synthesized)
tggacgtgagggacacacaggaacttttcgtgcgtcgctccttggcaactgttgggagagagaggtttcagcgcctagacgggttctctcttgacttcgctcaataaaagtgaatccagg

SEQ ID NO: 330076 - DNA, 120 bp, Artificial Sequence
  ENSG00000136630_23 (sequence is synthesized)
gcaaggggaaggggaggaacaaatcagcggagagtgtgagtgtgcccgagatgtaacctgctatccttttcccttgtccccagatctcacttccctgctaaccggtgggcggcccgccgg

SEQ ID NO: 330077 - DNA, 120 bp, Artificial Sequence
  ENSG00000136630_24 (sequence is synthesized)
tcagttccaagacacgtttccaggtacggaaaaactccagagtactgcctaacgggcgagccgactaacagtcagaaatctcaggactgacgcctccagggctgccacggtgtcgcaatc

SEQ ID NO: 330078 - DNA, 120 bp, Artificial Sequence
  ENSG00000136630_25 (sequence is synthesized)
tcacaattggggcgggaggctacggagtcaggagagagaaaccgaaagatttctcagcgagctagcgctcgcttcggatggttccccttgaaaaggggtagaggcgcctggagatcccag

SEQ ID NO: 330079 - DNA, 120 bp, Artificial Sequence
  ENSG00000136630_26 (sequence is synthesized)
aaagtgtgtgcgtggacggtggggtggggggctttctcgaagtcttttcgccccagagggcttgaaaaatgcagcatcaatgttgcttattagcatatacacattttgggatgacctcaa

SEQ ID NO: 330080 - DNA, 86 bp, Artificial Sequence
  ENSG00000136630_27 (sequence is synthesized)
tgttgcttattagcatatacacattttgggatgacctcaaacacttgtgcttggcgagtttatgtctgggtgcctggacacatgcg

SEQ ID NO: 330081 - DNA, 120 bp, Artificial Sequence
  ENSG00000136630_28 (sequence is synthesized)
ggctgtcatcattcaggcccaagggacatttttgtctactcttcgtaggcctgatggccacgcatgaggtttatgtttttctcttggaattaaaggacaagccgccaggcttctccactc

SEQ ID NO: 330082 - DNA, 120 bp, Artificial Sequence
  ENSG00000136630_29 (sequence is synthesized)
cacgctcgctttaggtcttccgactgtcgtgtaaaattcctccttagaggggccattcggtgtatgtgcgaagggctttctgaatgagggtggaatcgacagttaacacgaaacagtttc

SEQ ID NO: 330083 - DNA, 120 bp, Artificial Sequence
  ENSG00000136630_30 (sequence is synthesized)
gtcccctccatcccggccgactggcctcctgcggtgcaaacgcaagatcttgactttcaagaggctttgtggactacgcaacttgaggcaggagaagaggagggtggagatggggtgagg

SEQ ID NO: 330084 - DNA, 120 bp, Artificial Sequence
  ENSG00000136630_31 (sequence is synthesized)
gagaaggaccgagagaagagctcatccccaagatgtgtgtcaacaagcactgcatgtttattttggccaacaggctaaagaaccacggagaaagcaaaagggccgctggaaataacactg

SEQ ID NO: 330085 - DNA, 120 bp, Artificial Sequence
  ENSG00000136630_32 (sequence is synthesized)
atacactcaactgtagtgcaattcgctgtaggaggcagtttatttcagaaaagataaaaacccaaaggcaagagattgttgttgggtttttttccctctcaccctccctccttcctcctc

SEQ ID NO: 330086 - DNA, 120 bp, Artificial Sequence
  ENSG00000136630_33 (sequence is synthesized)
ctcctgctgcttctgctggattgtgaaatccccagttgtgaggaagtgaaaatataatttcaaacggaattagttagctccaggagggcagggagtctgcttggagtggccacacattac

SEQ ID NO: 330087 - DNA, 120 bp, Artificial Sequence
  ENSG00000136630_34 (sequence is synthesized)
aaggcttaggctctgaagaaaatctgaaggaaggggagaggtgagggaaagaaagaaagaaaaatgattctcttagaatacccaagagcatttcagcaggttctgcctatttgaattttt

SEQ ID NO: 330088 - DNA, 120 bp, Artificial Sequence
  ENSG00000136630_35 (sequence is synthesized)
tcaagacaataggaaatgtattgtggctgaaataattttattctttttcttaaatttaagaactgggcttccccaccccccaccacccgagctttgactgtggaagagtcactcttgtgc

SEQ ID NO: 330089 - DNA, 120 bp, Artificial Sequence
  ENSG00000136630_36 (sequence is synthesized)
accccatagcactggctctggctctggggtgctgattttccccagcaggtcagaagccagaggcaggcttctttttcttagctccttggtccccaaattgctgtctctgtttctttctga

SEQ ID NO: 330090 - DNA, 79 bp, Artificial Sequence
  ENSG00000136630_37 (sequence is synthesized)
gcccagccgttttccaccagctgtggatgttatttttaaaagggaagctggaacttgtgtgaatgcgttgggtccccca

SEQ ID NO: 330091 - DNA, 120 bp, Artificial Sequence
  ENSG00000136630_38 (sequence is synthesized)
aagggaagctggaacttgtgtgaatgcgttgggtcccccaggggatcgtatatatctgtatagattctctgccccatctctatccccttccttaattttgcacacatttaattccattgt

SEQ ID NO: 330092 - DNA, 120 bp, Artificial Sequence
  ENSG00000136630_39 (sequence is synthesized)
tttctgagcccccaggagaatttgtttatccttaacaggggcaaggtccttatcagctcttgcgtacaaacacaccaaagaaatgctgtcttactgaaagcccaacaatgcccccaccct

SEQ ID NO: 330093 - DNA, 120 bp, Artificial Sequence
  ENSG00000136630_40 (sequence is synthesized)
actgtgattaacagtttaaaacccctttccctttctgcttcccatgtttccttttttgaaaaaagtattgctttgggtagtggcagtagaggagagggccaacttagagcaggaattctt

SEQ ID NO: 330094 - DNA, 120 bp, Artificial Sequence
  ENSG00000136630_41 (sequence is synthesized)
aacactggcacaccaaacccttgacattgtaagcaatatcttgggcatatgtgtatttttctgggctaggagtccataactttaatcagattctcatgggggtcctggcataaaaaaatt

SEQ ID NO: 330095 - DNA, 120 bp, Artificial Sequence
  ENSG00000136630_42 (sequence is synthesized)
acatggatttagagtagagagagagtatgttgggggtcgggtgcaggaatctgcctttccaacagtcactcaggtcattttagtcctggggcctgagggttgcattttgaaaacggtctt

SEQ ID NO: 330096 - DNA, 120 bp, Artificial Sequence
  ENSG00000136630_43 (sequence is synthesized)
agtgggttccctaggccaggattcctggcttcttgtgttcccctgggctgccccttggctcctgcgcctaccacagtgtctggtccttggtagagtcgccaagtaagcgttgctttttca

SEQ ID NO: 330097 - DNA, 120 bp, Artificial Sequence
  ENSG00000136630_44 (sequence is synthesized)
ctcagggaggtggcttgagggtgcacgcgagtcggataggagcaaacctgggtctcatctcggtgtctcttcttgtctcccggtgtggcgcggcgcaggtgaaggtgtggttccagaacc

SEQ ID NO: 330098 - DNA, 120 bp, Artificial Sequence
  ENSG00000136631_0 (sequence is synthesized)
gagacccggccaacagactgggggttaatttagccagaaaagggggcgggaagggctgtagggtacttgtcaattcgccgccatgaacgtggtttttgctgtgaagcagtacatttccaa

SEQ ID NO: 330099 - DNA, 120 bp, Artificial Sequence
  ENSG00000136631_1 (sequence is synthesized)
aatgatagaggacagcgggcctggtatgaaagtacttctcatggataaagagacgactggcatagtgagtatggtatacacacaatcggagattctacagaaggaagtgtacctctttga

SEQ ID NO: 330100 - DNA, 120 bp, Artificial Sequence
  ENSG00000136631_2 (sequence is synthesized)
acgcattgattctcaaaatcgagagatcatgaaacacctgaaggcaatttgttttcttcgacctacaaaggagaatgtggattatattattcaggagctccgaagacccaaatacactat

SEQ ID NO: 330101 - DNA, 120 bp, Artificial Sequence
  ENSG00000136631_3 (sequence is synthesized)
atatttcatttatttcagtaatgtgatcagcaagagtgacgtgaagtcattggctgaagctgatgaacaggaagttgtggctgaggttcaggaattttatggtgattacattgctgtgaa

SEQ ID NO: 330102 - DNA, 120 bp, Artificial Sequence
  ENSG00000136631_4 (sequence is synthesized)
cccacatttgttttccctcaatattttgggttgctgccagggtcgaaattgggatccagcccagctatctagaacaactcaagggcttacagctctccttttatctctgaagaagtgtcc

SEQ ID NO: 330103 - DNA, 120 bp, Artificial Sequence
  ENSG00000136631_5 (sequence is synthesized)
catgattcgttatcagctctcatcagaggcagcaaagagacttgcagagtgcgttaagcaagtgataactaaagaatatgaactgtttgaattccgtcggacagaggttcctccattgct

SEQ ID NO: 330104 - DNA, 120 bp, Artificial Sequence
  ENSG00000136631_6 (sequence is synthesized)
ccttattttagatcgctgtgatgatgccatcaccccattgctaaaccagtggacatatcaggccatggtccacgaactactaggcataaacaacaatcggattgatctttccagagtgcc

SEQ ID NO: 330105 - DNA, 120 bp, Artificial Sequence
  ENSG00000136631_7 (sequence is synthesized)
gggaatcagtaaagacttaagagaagtggtcctatctgctgaaaatgatgaattctatgctaataatatgtacctgaactttgctgagattggtagcaatataaagaatctcatggaaga

SEQ ID NO: 330106 - DNA, 120 bp, Artificial Sequence
  ENSG00000136631_8 (sequence is synthesized)
ttttcagaagaagaaaccaaaagaacagcaaaaactagaatcaatagcagacatgaaggcgtttgttgagaattatccacagttcaagaaaatgtctgggactgtttcaaagcatgtgac

SEQ ID NO: 330107 - DNA, 120 bp, Artificial Sequence
  ENSG00000136631_9 (sequence is synthesized)
ggtttcagaggttgagcaagaactggcctgtcaaaatgaccattctagtgctctccagaatataaaaaggcttctgcagaaccccaaagtgacagagtttgatgctgcccgcctggtgat

SEQ ID NO: 330108 - DNA, 120 bp, Artificial Sequence
  ENSG00000136631_10 (sequence is synthesized)
gctttatgctttacattatgagcgacacagcagcaatagcctgccaggactaatgatggacctcaggaataaaggtgtttctgagaagtatcgaaagctcgtgtctgcagttgttgaata

SEQ ID NO: 330109 - DNA, 120 bp, Artificial Sequence
  ENSG00000136631_11 (sequence is synthesized)
tggtggtaaacgagtcagaggaagtgacctcttcagccccaaagatgctgtggctatcaccaaacaattcctcaaaggactgaagggagtagaaaatgtatatacacagcatcaaccttt

SEQ ID NO: 330110 - DNA, 120 bp, Artificial Sequence
  ENSG00000136631_12 (sequence is synthesized)
cctacatgaaaccctggatcatctcatcaaaggaaggcttaaggaaaacctatatccttatttaggccccagcacactcagagacagacctcaggatatcattgtgtttgtaattggagg

SEQ ID NO: 330111 - DNA, 120 bp, Artificial Sequence
  ENSG00000136631_13 (sequence is synthesized)
agccacctatgaagaggctctaacagtttataacctgaaccgcaccactcctggagtgaggattgtcctgggaggcaccacagtgcacaacacgaaaagtttcctagaggaagttctggc

SEQ ID NO: 330112 - DNA, 120 bp, Artificial Sequence
  ENSG00000136631_14 (sequence is synthesized)
ttctggactgcacagccgaagcaaggagagctctcaagtcacatcaaggtcagcgagcagaagatgaaacggtggttgggggaagggcacagcttcctctcttgtccccactacaggttt

SEQ ID NO: 330113 - DNA, 120 bp, Artificial Sequence
  ENSG00000136631_15 (sequence is synthesized)
tccctactaaacaaaggtgttggagagcagctttgggttctgtgctggttgttagaactcatctccaggtagcccacggatacgtggttggcacagacacaagactcccagagttgtcct

SEQ ID NO: 330114 - DNA, 120 bp, Artificial Sequence
  ENSG00000136631_16 (sequence is synthesized)
aacaataagtctgagcccatctcaacccacttttctccggtagtctttatgtatctgttagcacaatcacttcagttactgatgaattttgttgggatctgacttggggaaagggttatc

SEQ ID NO: 330115 - DNA, 120 bp, Artificial Sequence
  ENSG00000136631_17 (sequence is synthesized)
agagcctagaggggcttaaaaagtaatcatttgatgtacataccacactccttggcttcctttctcttcccttaaccctttctgcttttcattaaccacattcctgcacaactcatttct

SEQ ID NO: 330116 - DNA, 120 bp, Artificial Sequence
  ENSG00000136631_18 (sequence is synthesized)
gaaaacctaccatgtttctttacagagccatccaaaaattttttgtccctacatagcaattttctgtggcactgagaaaccatgtatgaccacaataaaaatccattttgtgaaaggata

SEQ ID NO: 330117 - DNA, 120 bp, Artificial Sequence
  ENSG00000136631_19 (sequence is synthesized)
gacgcaatgaacccgggaagacgaatctcgaccactgtttcgcaaataccgcgtgtgatttattaaatgccgtctctccgagtcccaagcggccgggagcattatgccacctcccttgcc

SEQ ID NO: 330118 - DNA, 120 bp, Artificial Sequence
  ENSG00000136631_20 (sequence is synthesized)
ctcatctctcactgccatgcaagaaagcgttaatggcaaatagggcacgtagccacactccgtcgttcctgcttccaagcaaaccttgtgccaggttcctcatttcgcgaggctccactc

SEQ ID NO: 330119 - DNA, 120 bp, Artificial Sequence
  ENSG00000136631_21 (sequence is synthesized)
tcttgggcttcaggctgccgctgggcctccagcaccaaagggcaataggggtctgagagtccgggcctcaggcatcttcaggccgcagactggcatagtgagtatggtatacacacaatc

SEQ ID NO: 330120 - DNA, 120 bp, Artificial Sequence
  ENSG00000136631_22 (sequence is synthesized)
aatttgttttcttcgacctacaaaggtactgcataaactgagcttccatctgcccaggcagatgcagaacactctgatctgaaagcattaagaaggcaaaataaatttgtattatcataa

SEQ ID NO: 330121 - DNA, 120 bp, Artificial Sequence
  ENSG00000136631_23 (sequence is synthesized)
gctctcatcagaggcagcaaagagacttgcagagtgcgttaaggtatggcattacctattcctggttccaaaacataaaggccattcatttctctatcatatttcagaaactaaaggaat

SEQ ID NO: 330122 - DNA, 120 bp, Artificial Sequence
  ENSG00000136631_24 (sequence is synthesized)
agtttatttacaaccaaggagatgattgtatgttaggtttccgcgaaaagaggtaggtatatgtaatttaaaacaaaaagcaacaattagagctaagattcttaggtttaacccaagaaa

SEQ ID NO: 330123 - DNA, 120 bp, Artificial Sequence
  ENSG00000136631_25 (sequence is synthesized)
cattcacaagctatttaactttttttggtccagttaaaccacttataaaatagggtttcatatcctaacctcttaaatagtatgctactaaactttgtgagacttttgaatccttcatat

SEQ ID NO: 330124 - DNA, 120 bp, Artificial Sequence
  ENSG00000136631_26 (sequence is synthesized)
ggaagatctatgtgggtgcaaagaactattgttaaatgtagtgtttattaatttcctatttatatcatttctatatgtaactagatggttgcacaaaccatctttctctctcacccacag

SEQ ID NO: 330125 - DNA, 61 bp, Artificial Sequence
  ENSG00000136631_27 (sequence is synthesized)
gagctcctcggcctcccaaaatgcatataggcatgagccatcatccccacccttgtataaa

SEQ ID NO: 330126 - DNA, 120 bp, Artificial Sequence
  ENSG00000136631_28 (sequence is synthesized)
tgcatataggcatgagccatcatccccacccttgtataaattttactgggaaatctctgcaatttagagactatctgaacattttaaaatagccacaatagctgattctgtttcagtgaa

SEQ ID NO: 330127 - DNA, 120 bp, Artificial Sequence
  ENSG00000136631_29 (sequence is synthesized)
gtcccacaagaacaaatactctctcagttaattctttcaaggtattttagaaagagagagagagagacaagcaggaaggaaatgtagggttggggtttttttcatgatttatacataagc

SEQ ID NO: 330128 - DNA, 120 bp, Artificial Sequence
  ENSG00000136631_30 (sequence is synthesized)
atgtatattccttgattaaagatgtttctggttagttttgtgcaataacattcaaaacggatgcttctgattgatgtagttttagtgtccaatgagtgatttaacaaaattatttgccta

SEQ ID NO: 330129 - DNA, 120 bp, Artificial Sequence
  ENSG00000136631_31 (sequence is synthesized)
gtaatggttttgaaaataatttgatctccttcttggtgatatttaaggaaggagctaataggaacattcacttttgttatgaagccattttgatacggattgaaacaggaaacagagtaa

SEQ ID NO: 330130 - DNA, 120 bp, Artificial Sequence
  ENSG00000136631_32 (sequence is synthesized)
aacaacacagtgctacccaagtgaagctagtgactgagctgtgttcgcatgtccagtatcagctacactcatggtttttttggtttccatggtttctttttcttggtttatcaaaggatt

SEQ ID NO: 330131 - DNA, 120 bp, Artificial Sequence
  ENSG00000136631_33 (sequence is synthesized)
ggggacatctaaatatgctagttctttcaaaaatgctttgaggtccttgtacagaggccattgtaatagcactgtattaagtatttgacaaaggcttatacatgaaaggagatgtgtagt

SEQ ID NO: 330132 - DNA, 120 bp, Artificial Sequence
  ENSG00000136631_34 (sequence is synthesized)
attaatacaaacataaaattctgccgtattgatatcatgtcatggtaaggcactctgcaccctcttgaatataaaagaatatttctacatttggttccagcaaacactattgtgctattc

SEQ ID NO: 330133 - DNA, 120 bp, Artificial Sequence
  ENSG00000136631_35 (sequence is synthesized)
tgaaatccacagcacagaaattataagacatccgctcataaacagaaagcaaatcactattcagcatttcctgctctgtttcctgccaatttcagataattgaaactttttttaaacctt

SEQ ID NO: 330134 - DNA, 120 bp, Artificial Sequence
  ENSG00000136631_36 (sequence is synthesized)
ttattctattctgctttaattctgcttcctccaccaaaaaaaaagatttagaaattaaaactctgtgtatgtaagtcacagtcctttttttttcttatcctgtgataatatctcattctt

SEQ ID NO: 330135 - DNA, 120 bp, Artificial Sequence
  ENSG00000136631_37 (sequence is synthesized)
cagccggatttttccatccccggggtaggcttggtcccctgtacactccagcggaactacaactcccagcaccgtggctgcccggactcccggaagccgaatcccggctgggaggaagca

SEQ ID NO: 330136 - DNA, 83 bp, Artificial Sequence
  ENSG00000136631_38 (sequence is synthesized)
tggagtgaggattgtcctgggaggcaccacagtgcacaacacgaaaagagatggggtttcactatgttcccctgcctggtttc

SEQ ID NO: 330137 - DNA, 120 bp, Artificial Sequence
  ENSG00000136631_39 (sequence is synthesized)
atatgtttatcacataaatgaggaatattgttttcagaggcagcaaataaactagttttgaatttttcagaaggatgtgataggtgataaatgaataaaaagaatacctgttttaaatta

SEQ ID NO: 330138 - DNA, 120 bp, Artificial Sequence
  ENSG00000136631_40 (sequence is synthesized)
tattctctctcatgacaacacattggacagcaaagttcttttttatctgagtagaacattgtatctcctattagcagtattttatttttactaattgataagtatgcatagaggtctcca

SEQ ID NO: 330139 - DNA, 120 bp, Artificial Sequence
  ENSG00000136631_41 (sequence is synthesized)
gaaatataatgtgtataaccttacaacctttatttgttagatttattattattgctactgttttgtaattattttaattctcccacgttgactgttgttacccaattattaattgaacaa

SEQ ID NO: 330140 - DNA, 120 bp, Artificial Sequence
  ENSG00000136631_42 (sequence is synthesized)
tttagtatctctttacacctgtatttcacaaagtttggctatatcatattatatcacttatgaaaatattactgcttgatacaattgaagtttatggaatgactattcttggtgctttat

SEQ ID NO: 330141 - DNA, 120 bp, Artificial Sequence
  ENSG00000136631_43 (sequence is synthesized)
ttgcaggaattttatggtgattacattgctgtgaacccacatttgttttccctcaatattttgggttgctgccaggtatggaaggaaaggtttaatttatcagtcgagagttaattcagc

SEQ ID NO: 330142 - DNA, 120 bp, Artificial Sequence
  ENSG00000136631_44 (sequence is synthesized)
tgggttgctgccaggtatggaaggaaaggtttaatttatcagtcgagagttaattcagcaaataattagacttgtaagagaaaattcaaatattttctctgaatatatgtttttaacaaa

SEQ ID NO: 330143 - DNA, 120 bp, Artificial Sequence
  ENSG00000136631_45 (sequence is synthesized)
gaacagttgaagtccttgaggctgagagtgaatgaatatgatcttcaaagtatcttgaagattgctgctaatttagtactgtgtcagttaaatgaaattaaaactggcatcctcttgaaa

SEQ ID NO: 330144 - DNA, 120 bp, Artificial Sequence
  ENSG00000136631_46 (sequence is synthesized)
tttcagaggttgagcaagaactggcctgtcaaaatgaccattctagtgctctccaggtcagtccaatttgatgagcacctactatgtgtaaggcactgtgccaggcagagcaagagataa

SEQ ID NO: 330145 - DNA, 120 bp, Artificial Sequence
  ENSG00000136631_47 (sequence is synthesized)
aaaggcaagtaatccttcttcatcaacatggaatttagtccaacaaggagctgacatgagaacacaaattaatattatttaagatagatctataaaaagagtcacaagagaagtgtaatg

SEQ ID NO: 330146 - DNA, 120 bp, Artificial Sequence
  ENSG00000136631_48 (sequence is synthesized)
tgcaattcccaagggttcagttaattagtataagggcagcctagtctactagaaagagcaccaaactagaatcagaagatctagattggagtgtttggtataccacttacaggctttgtg

SEQ ID NO: 330147 - DNA, 120 bp, Artificial Sequence
  ENSG00000136631_49 (sequence is synthesized)
acatggagctgttgacttaatctctgagccagtttcattatttgtaaaataggtatattaatactcatctcacagagtggttaggaagactttaaaagataaaacatatattaaaatgta

SEQ ID NO: 330148 - DNA, 120 bp, Artificial Sequence
  ENSG00000136631_50 (sequence is synthesized)
aaaccagagtgccgggaatcagtaaagacttaagagaagtggtcctatctgctgaaaatgatgaattctatgctaataatatgtacctgaactttgctgagattggtagcaatataaaga

SEQ ID NO: 330149 - DNA, 120 bp, Artificial Sequence
  ENSG00000136631_51 (sequence is synthesized)
tagcatttaattaaacatacgaaaatgagggtcggtttgtgtggaattgaaaagttgtttatataaagcttgcccggtgggttttcagtctacatggctccagccactgcctagagacta

SEQ ID NO: 330150 - DNA, 120 bp, Artificial Sequence
  ENSG00000136631_52 (sequence is synthesized)
cttctacccggaacaatttattggaatcagaaatccttttctaaatgtccccgccaagaaatcattaatatgtcagagcacttggaaggctttgggatgggcctactgtttccactcaac

SEQ ID NO: 330151 - DNA, 120 bp, Artificial Sequence
  ENSG00000136631_53 (sequence is synthesized)
atgcattccagaatcagtcaattcaaaaaggaagtacttttcatgtttatacaaatgtagtagaatcttgttgctacagcttattttttgtttctgtgaagcagcagtcctttttcattg

SEQ ID NO: 330152 - DNA, 120 bp, Artificial Sequence
  ENSG00000136634_0 (sequence is synthesized)
acacatcaggggcttgctcttgcaaaaccaaaccacaagacagacttgcaaaagaaggcatgcacagctcagcactgctctgttgcctggtcctcctgactggggtgagggccagcccag

SEQ ID NO: 330153 - DNA, 120 bp, Artificial Sequence
  ENSG00000136634_1 (sequence is synthesized)
gccagggcacccagtctgagaacagctgcacccacttcccaggcaacctgcctaacatgcttcgagatctccgagatgccttcagcagagtgaagactttctttcaaatgaaggatcagc

SEQ ID NO: 330154 - DNA, 120 bp, Artificial Sequence
  ENSG00000136634_2 (sequence is synthesized)
tggacaacttgttgttaaaggagtccttgctggaggactttaagggttacctgggttgccaagccttgtctgagatgatccagttttacctggaggaggtgatgccccaagctgagaacc

SEQ ID NO: 330155 - DNA, 120 bp, Artificial Sequence
  ENSG00000136634_3 (sequence is synthesized)
aagacccagacatcaaggcgcatgtgaactccctgggggagaacctgaagaccctcaggctgaggctacggcgctgtcatcgatttcttccctgtgaaaacaagagcaaggccgtggagc

SEQ ID NO: 330156 - DNA, 120 bp, Artificial Sequence
  ENSG00000136634_4 (sequence is synthesized)
aggtgaagaatgcctttaataagctccaagagaaaggcatctacaaagccatgagtgagtttgacatcttcatcaactacatagaagcctacatgacaatgaagatacgaaactgagaca

SEQ ID NO: 330157 - DNA, 120 bp, Artificial Sequence
  ENSG00000136634_5 (sequence is synthesized)
tcagggtggcgactctatagactctaggacataaattagaggtctccaaaatcggatctggggctctgggatagctgacccagccccttgagaaaccttattgtacctctcttatagaat

SEQ ID NO: 330158 - DNA, 120 bp, Artificial Sequence
  ENSG00000136634_6 (sequence is synthesized)
agaagcccaatattataatttttttcaatatttattattttcacctgtttttaagctgtttccatagggtgacacactatggtatttgagtgttttaagataaattataagttacataag

SEQ ID NO: 330159 - DNA, 120 bp, Artificial Sequence
  ENSG00000136634_7 (sequence is synthesized)
ggaggaaaaaaaatgttctttggggagccaacagaagcttccattccaagcctgaccacgctttctagctgttgagctgttttccctgacctccctctaatttatcttgtctctgggctt

SEQ ID NO: 330160 - DNA, 120 bp, Artificial Sequence
  ENSG00000136634_8 (sequence is synthesized)
ggggcttcctaactgctacaaatactcttaggaagagaaaccagggagcccctttgatgattaattcaccttccagtgtctcggagggattcccctaacctcattccccaaccacttcat

SEQ ID NO: 330161 - DNA, 86 bp, Artificial Sequence
  ENSG00000136634_9 (sequence is synthesized)
tcggagggattcccctaacctcattccccaaccacttcattcttgaaagctgtggccagcttgttatttataacaacctaaatttg

SEQ ID NO: 330162 - DNA, 120 bp, Artificial Sequence
  ENSG00000136634_10 (sequence is synthesized)
gttctaatagaactcagttttaactagaatttattcaattcctctgggaatgttacattgtttgtctgtcttcatagcagattttaattttgaataaataaatgtatcttattcacatca

SEQ ID NO: 330163 - DNA, 120 bp, Artificial Sequence
  ENSG00000136634_11 (sequence is synthesized)
agtcccttcggggaggcttctggtgaaggaggatcgctagaaccaagctgtcctcttaagctagttgcagcagcccctcctcccagccacctccgccaatctctcactcacctttggctc

SEQ ID NO: 330164 - DNA, 120 bp, Artificial Sequence
  ENSG00000136634_12 (sequence is synthesized)
ataggccccattcttcattggagagagtgtgggaacctgacagatggtatgacctgctcagccagtgaggagctgctgccttgattgtatttgttttctgttaagtgtctttgggggttt

SEQ ID NO: 330165 - DNA, 120 bp, Artificial Sequence
  ENSG00000136634_13 (sequence is synthesized)
ggtgcccatgctgagtccacttctggaacacccagctcagagagggggttagacctgcaggctaacacagacacagcccagaaaacccaggagccgagggggaaggagaaaggtgcaaga

SEQ ID NO: 330166 - DNA, 120 bp, Artificial Sequence
  ENSG00000136634_14 (sequence is synthesized)
aggggaaacccaggtcctggtccccttctctctgcttcctggcagcagaactcagacagaacccttaagccagtctaagtctggcaggaccagcaacctgcctaacatgcttcgagatct

SEQ ID NO: 330167 - DNA, 120 bp, Artificial Sequence
  ENSG00000136634_15 (sequence is synthesized)
agcccctgtggaaggggaaggtgaaggctcaatcaaaggatccccagagactttccagatatctgaagaagtcctgatgtcactgccccggtccttccccaggcaacctgcctaacatgc

SEQ ID NO: 330168 - DNA, 120 bp, Artificial Sequence
  ENSG00000136634_16 (sequence is synthesized)
gggcggggagctaaggttcccaagcagaggaaacatcattcacctcttttaatctcaatgttttgaaagcaaagctctaagaagggcccaattgactgacaggatttcccctggcatttt

SEQ ID NO: 330169 - DNA, 120 bp, Artificial Sequence
  ENSG00000136634_17 (sequence is synthesized)
ctaaggccaatttaatccaaggtttcattctatgtgctggagatggtgtacagtagggtgaggaaaccaaattctcagttggcactggtgtacccttgtacaggtgatgtaatatctctg

SEQ ID NO: 330170 - DNA, 120 bp, Artificial Sequence
  ENSG00000136634_18 (sequence is synthesized)
tgcctcagtttgctcactataaaatagagacggtaggggtcatggtgagcactacctgactagcatataagaagctttcagcaagtgcagactactcttacccacttcccccaagcacag

SEQ ID NO: 330171 - DNA, 120 bp, Artificial Sequence
  ENSG00000136634_19 (sequence is synthesized)
ttggggtgggggacagctgaagaggtggaaacatgtgcctgagaatcctaatgaaatcggggtaaaggagcctggaacacatcctgtgaccccgcctgtactgtaggaagccagtctctg

SEQ ID NO: 330172 - DNA, 120 bp, Artificial Sequence
  ENSG00000136634_20 (sequence is synthesized)
gaaagtaaaatggaagggctgcttgggaactttgaggatatttagcccaccccctcatttttacttggggaaactaaggcccagagacctaaggtgactgcctaagttagcaaggagaag

SEQ ID NO: 330173 - DNA, 120 bp, Artificial Sequence
  ENSG00000136634_21 (sequence is synthesized)
tcttgggtattcatcccaggttggggggacccaattatttctcaatcccattgtattctggaatgggcaatttgtccacgtcactgtgacctaggaacacgcgaatgagaacccacagct

SEQ ID NO: 330174 - DNA, 120 bp, Artificial Sequence
  ENSG00000136634_22 (sequence is synthesized)
gagggcctctgcgcacagaacagctgttctccccaggaaatcaactttttttaattgagaagctaaaaaattattctaagagaggtagcccatcctaaaaatagctgtaatgcagaagtt

SEQ ID NO: 330175 - DNA, 120 bp, Artificial Sequence
  ENSG00000136634_23 (sequence is synthesized)
catgttcaaccaatcatttttgcttacgatgcaaaaattgaaaactaagtttattagagaggttagagaaggaggagctctaagcagaaaaaatcctgtgccgggaaaccttgattgtgg

SEQ ID NO: 330176 - DNA, 120 bp, Artificial Sequence
  ENSG00000136636_0 (sequence is synthesized)
attctaggcggcagtggcgggcgaagcgtgagcgctgcggtattttgtcccgaacggtgacccctcctcccaggcaggctgcggcggcgtcggtggcagcggagcacggagaagaggccc

SEQ ID NO: 330177 - DNA, 120 bp, Artificial Sequence
  ENSG00000136636_1 (sequence is synthesized)
ggcccggcggcctggaggccgcgaaaggtggaggccgggccgcccttgtgcaccgcaggattgacccgggaaggggcagaagctagcgagccccgcccggccgccgggaaggtgggggaa

SEQ ID NO: 330178 - DNA, 80 bp, Artificial Sequence
  ENSG00000136636_2 (sequence is synthesized)
ccgctggccctgcagccgtcgccgctgcctcgggctacagccccgggctcggcggtcccggctggggaaggagggcggcg

SEQ ID NO: 330179 - DNA, 120 bp, Artificial Sequence
  ENSG00000136636_3 (sequence is synthesized)
agcgcgtccggagccgccggagatggcgggagggcactgcggcagcttccccgcggcggcggccggcagcggcgagatcgtccaactgaacgtaggggggaccagatttagtacctcaag

SEQ ID NO: 330180 - DNA, 120 bp, Artificial Sequence
  ENSG00000136636_4 (sequence is synthesized)
acaaactcttatgtggattccagattcttttttttccagtttgctgagtgggagaatttcaacacttcgagatgaaactggtgctatatttattgatagagatccagcagcatttgcacc

SEQ ID NO: 330181 - DNA, 120 bp, Artificial Sequence
  ENSG00000136636_5 (sequence is synthesized)
cattttaaattttcttcggacaaaagaactagacttaaggggagtgagtattaatgttctcaggcatgaagcagaattttacgggatcactccattagtaagaaggcttctcttatgtga

SEQ ID NO: 330182 - DNA, 120 bp, Artificial Sequence
  ENSG00000136636_6 (sequence is synthesized)
agaattggagcgttcctcttgtggcagtgtcctttttcatggttacttgcccccaccaggtattcctagtcgtaaaataaacaacacagtcagatctgctgattctaggaatggtctaaa

SEQ ID NO: 330183 - DNA, 120 bp, Artificial Sequence
  ENSG00000136636_7 (sequence is synthesized)
ttctacagaaggtgaagcccggggaaatggtacacagcctgttctctctggaacgggagaagaaactgttaggctaggatttcctgtggatccacgaaaggtgctaatagtagctggcca

SEQ ID NO: 330184 - DNA, 120 bp, Artificial Sequence
  ENSG00000136636_8 (sequence is synthesized)
tcacaactggattgtagctgcatatgcccattttgctgtgtgttacagaatcaaagaatcttcaggatggcagcaagtgtttacgagcccatatttggattggactatcgaacgagtagc

SEQ ID NO: 330185 - DNA, 120 bp, Artificial Sequence
  ENSG00000136636_9 (sequence is synthesized)
tttaaatgcaaaggtggttggagggccacatggagacaaagacaaaatggttgctgttgcctcagagagtagcatcatcttgtggagtgttcaggatgggggaagtggaagtgaaattgg

SEQ ID NO: 330186 - DNA, 120 bp, Artificial Sequence
  ENSG00000136636_10 (sequence is synthesized)
agtgttcagcctgggtgttcctgtagatgctctcttctttattggtaaccagttggtggccacgagtcatacagggaaagtgggagtgtggaatgctgtcactcagcactggcaggttca

SEQ ID NO: 330187 - DNA, 120 bp, Artificial Sequence
  ENSG00000136636_11 (sequence is synthesized)
agatgttgttcctataactagttatgacactgctggatcattccttctgcttggatgtaacaatggatcaatatattacatagatatgcagaagttccccttgcgaatgaaagataatga

SEQ ID NO: 330188 - DNA, 120 bp, Artificial Sequence
  ENSG00000136636_12 (sequence is synthesized)
tcttcttgtaactgaactgtatcatgatccttcaaatgatgctattactgctctgagtgtttacctcacacccaaaacaagtgtcagtggtaactggatcgagatcgcctatggtacgag

SEQ ID NO: 330189 - DNA, 120 bp, Artificial Sequence
  ENSG00000136636_13 (sequence is synthesized)
ctctggagcagtacgagtgattgtacaacacccagagacagttgggtcaggtcctcagctttttcagactttcacagttcaccgaagtcccgtaacaaaaatcatgctatcagagaagca

SEQ ID NO: 330190 - DNA, 120 bp, Artificial Sequence
  ENSG00000136636_14 (sequence is synthesized)
tcttgtatcagtctgtgcagataataatcatgtccggacgtggacagtaacacgattcagaggaatgatctctactcagccaggttctactcctttagcgtcattcaagatactatccct

SEQ ID NO: 330191 - DNA, 120 bp, Artificial Sequence
  ENSG00000136636_15 (sequence is synthesized)
ggaggagacagaaagtcatggtagctattcctctggaaatgacataggaccttttggagagcgagacgatcaacaggtgtttatccagaaagttgttcccatcaccaacaaactatttgt

SEQ ID NO: 330192 - DNA, 120 bp, Artificial Sequence
  ENSG00000136636_16 (sequence is synthesized)
tatcctcatttacagtgagggaatgtgagggatccagtaggatgggctcaagaccaaggcgctacttgttcacaggccatacaaatggcagtattcaaatgtgggatctgaccactgcta

SEQ ID NO: 330193 - DNA, 120 bp, Artificial Sequence
  ENSG00000136636_17 (sequence is synthesized)
tggatatggttaacaaaagtgaagataaggatgtaggtggtccaaccgaagaagagctactcaaattactcgatcaatgtgatttgagcacatctcgctgtgctactcctaacatcagtc

SEQ ID NO: 330194 - DNA, 120 bp, Artificial Sequence
  ENSG00000136636_18 (sequence is synthesized)
cagcaacttccgtagttcagcatagccacttacgagaatcaaattctagccttcagcttcagcaccatgataccacccatgaagcagctacttacggttccatgaggccttacagagaaa

SEQ ID NO: 330195 - DNA, 120 bp, Artificial Sequence
  ENSG00000136636_19 (sequence is synthesized)
gtcctttattagcaagggcaagaaggactgagagctttcacagttatagggacttccagactattaatttgaacagaaatgtagaaagagctgtccctgaaaatggtaacttgggtccaa

SEQ ID NO: 330196 - DNA, 120 bp, Artificial Sequence
  ENSG00000136636_20 (sequence is synthesized)
tacaagctgaagtgaaaggggcaacaggggaatgtaatatatctgagagaaagtctcctggagtagaaataaaaagtttgagagaattggatagtggattggaagtgcataaaatagctg

SEQ ID NO: 330197 - DNA, 120 bp, Artificial Sequence
  ENSG00000136636_21 (sequence is synthesized)
aaggtttttcagaatccaagaaaaggtcatcagaagatgaaaatgaaaataaaatagagtttaggaagaaaggaggatttgaagggggaggattccttggaagaaagaaagttccctatc

SEQ ID NO: 330198 - DNA, 120 bp, Artificial Sequence
  ENSG00000136636_22 (sequence is synthesized)
tggcgtcatcaccaagtacttccgatggaggaactgactcacctggtactgcgtccccatctcctacaaagactactccatctcctcggcataaaaaaagtgattcttcaggtcaggagt

SEQ ID NO: 330199 - DNA, 120 bp, Artificial Sequence
  ENSG00000136636_23 (sequence is synthesized)
acagcttgtgaaaactcaccaaaatgaatagttgtttcgttacatttagatgaaagttaaactttactgaatttcagtacattagtttttacactaaaactttacaagataaaattggac

SEQ ID NO: 330200 - DNA, 120 bp, Artificial Sequence
  ENSG00000136636_24 (sequence is synthesized)
ggacttcatttagtatctttttaacagaattacttggaataatgagatacaataatcatatctcttttgacattttggaaatttttttaattttacaagtacatttaacagatcatttat

SEQ ID NO: 330201 - DNA, 120 bp, Artificial Sequence
  ENSG00000136636_25 (sequence is synthesized)
caggagtccattttaacacttaccgactttttttggtttggaaacatattaccacgtcttaataggatggtgcccatataggtgagcatccctttagatcatgggaaccagcagactgca

SEQ ID NO: 330202 - DNA, 120 bp, Artificial Sequence
  ENSG00000136636_26 (sequence is synthesized)
ttcctaatcttcattatgcctgagacttgtcttacaatgttacctttaagtgaatcacataattgtctttggaacttggtctcccaacacttattgtgattgcaaagtgtttaccagata

SEQ ID NO: 330203 - DNA, 120 bp, Artificial Sequence
  ENSG00000136636_27 (sequence is synthesized)
tttgatgaggtgctatgtttgtgaaaaacatatcatgtaattcaaaaacactattgatattgaataccagataccactatgtagtaagtcttttaggatgattttaatttagtcgtgcgt

SEQ ID NO: 330204 - DNA, 120 bp, Artificial Sequence
  ENSG00000136636_28 (sequence is synthesized)
cattttctgattctcatcattgggagatcttaaatcttagcaagcattagcaatattaaatgccaaaattccattgaaactttcaagttggagcaattgtctgtgtttgaaaagatgaaa

SEQ ID NO: 330205 - DNA, 120 bp, Artificial Sequence
  ENSG00000136636_29 (sequence is synthesized)
taaaaataataatcaagggcaaagctttgagtgcccagaagggaaagctgtaccagttgctaacctgtcttgtttcaggagccaccatgtttttttttcagtgttaacaacaatcatgat

SEQ ID NO: 330206 - DNA, 120 bp, Artificial Sequence
  ENSG00000136636_30 (sequence is synthesized)
aattaaattaaaacactagtttgttcacttgtaggactgcagttctgaattttgggttaaaggttttggctgctgtaagaatgtgaatttgaatgtattttgaattgtaagagcaaaaga

SEQ ID NO: 330207 - DNA, 120 bp, Artificial Sequence
  ENSG00000136636_31 (sequence is synthesized)
acgtttttgtacaattttttttcatttaattggaatgatcttcaggtttctacaaatagggtaattgtaaatttaaagcattagcatttattggtgaataatgtatatatccccattcca

SEQ ID NO: 330208 - DNA, 120 bp, Artificial Sequence
  ENSG00000136636_32 (sequence is synthesized)
agaaatataagtgagtgaagttgaaataaaatctttaaaatttactatattgccagtggtttcacaacagttctcttgtatttatttatcaattaaatcaaataaaaatgattatgtcaa

SEQ ID NO: 330209 - DNA, 120 bp, Artificial Sequence
  ENSG00000136636_33 (sequence is synthesized)
gctcaagaatgagactaggatagtctttatcactacatgtgggcatgtaggaattatctttttccctcctttttgtccggcctactaggaagctcatctaagcttcatattctattcctg

SEQ ID NO: 330210 - DNA, 120 bp, Artificial Sequence
  ENSG00000136636_34 (sequence is synthesized)
tatgcttctcaaattcatgtggattgtatttttttttgtctatttttttgaccttgcgtttgcctatactgatttttcttttttaataaactccctcaactcttttgaagtaggctggga

SEQ ID NO: 330211 - DNA, 120 bp, Artificial Sequence
  ENSG00000136636_35 (sequence is synthesized)
taactaattcagtcaagtacaattcagttagcccttacgtgactttggaacaatcatttgctgatgttatcccattgtttcctgatccgtcaatgtggataaaaattgttctctctcagg

SEQ ID NO: 330212 - DNA, 120 bp, Artificial Sequence
  ENSG00000136636_36 (sequence is synthesized)
ttcttttatcttttatgaaaatcaactaaaaagtcataaaaatctttttttgaagttgagtattatcctaatgatggatacaatatgggccatctccatagagctgtatattttttctgg

SEQ ID NO: 330213 - DNA, 120 bp, Artificial Sequence
  ENSG00000136636_37 (sequence is synthesized)
ctggtttcagattttaaagatttacacataaattttaaatgattttttaaaagtcttttctagtataacatgtttgctttctttctttctgtctttttagtttcatagcttctttttaaa

SEQ ID NO: 330214 - DNA, 120 bp, Artificial Sequence
  ENSG00000136636_38 (sequence is synthesized)
agtttggtttctagatccagccaagagcccacataactaaaagggcatttggagaatatgtgagatccaggctgttgactgtactacaatatcctcatttacagtgagggaatgtgaggg

SEQ ID NO: 330215 - DNA, 79 bp, Artificial Sequence
  ENSG00000136636_39 (sequence is synthesized)
aaaggtgctaatagtagctggccatcacaactggattgtagctgcatatgcccattttgctgtgtgttacagagtgttt

SEQ ID NO: 330216 - DNA, 120 bp, Artificial Sequence
  ENSG00000136643_0 (sequence is synthesized)
gacccggaagcagagctgtgcagctgaggcgccgccgtggagccgccttggagccaccgccccctcgccgcttcgccgctgcgttggggaacctggaccgcggcggcgccgggtttccct

SEQ ID NO: 330217 - DNA, 120 bp, Artificial Sequence
  ENSG00000136643_1 (sequence is synthesized)
catgatcccgggcgggtggcggcggcggcagaggcggcgggaggatgacctcttaccgggagcggagtgccgacctggcccgtttctacactgtcaccgagccccagcgacacccgaggg

SEQ ID NO: 330218 - DNA, 120 bp, Artificial Sequence
  ENSG00000136643_2 (sequence is synthesized)
gctacacagtatataaggtcaccgcccgggttgtttcacgaagaaatccagaggatgtccaggagataattgtatggaagagatacagtgattttaagaaactacacaaagaactatggc

SEQ ID NO: 330219 - DNA, 120 bp, Artificial Sequence
  ENSG00000136643_3 (sequence is synthesized)
aaattcacaaaaacttattccgacattcagagttgtttcctccatttgctaaaggaatagtgtttgggcgatttgatgaaactgttatcgaagagagaagacaatgtgctgaagacctgc

SEQ ID NO: 330220 - DNA, 120 bp, Artificial Sequence
  ENSG00000136643_4 (sequence is synthesized)
tacagttctctgccaatattcctgctctttacaatagtaaacagcttgaagactttttcaagggtggaataattaatgatagttctgaattaattggtcctgctgaagctcactcagatt

SEQ ID NO: 330221 - DNA, 120 bp, Artificial Sequence
  ENSG00000136643_5 (sequence is synthesized)
ccctcattgatacctttcctgagtgtagtacggaaggcttctccagtgacagtgatctggtatctcttactgttgatgtggattctcttgctgagttagatgatggaatggcttccaatc

SEQ ID NO: 330222 - DNA, 120 bp, Artificial Sequence
  ENSG00000136643_6 (sequence is synthesized)
aaaattctcccattagaacttttggtctcaatctttcttcggattcttcagcactaggggctgttgcttctgacagtgaacagagcaaaacagaagaagaacgggaaagtcgtagcctct

SEQ ID NO: 330223 - DNA, 120 bp, Artificial Sequence
  ENSG00000136643_7 (sequence is synthesized)
ttcctggcagtttaaagccgaagcttggcaagagagattatttggagaaagcaggagaattaataaagctggctttaaaaaaggaagaagaagacgactatgaagctgcttctgattttt

SEQ ID NO: 330224 - DNA, 120 bp, Artificial Sequence
  ENSG00000136643_8 (sequence is synthesized)
ataggaagggagttgatttactcctagaaggtgttcaaggagagtcaagccctacccgtcgagaagctgtgaagagaagaacagccgagtacctcatgcgggcagaaagtatctctagtc

SEQ ID NO: 330225 - DNA, 120 bp, Artificial Sequence
  ENSG00000136643_9 (sequence is synthesized)
tttatgggaaacctcagcttgatgatgtatctcagcctccaggatcactaagttcaaggcccctttggaacctaaggagccctgccgaggagctgaaggccttcagagtccttggggtga

SEQ ID NO: 330226 - DNA, 120 bp, Artificial Sequence
  ENSG00000136643_10 (sequence is synthesized)
ttgacaaggttttacttgtaatggacacaaggacagaacagactttcattttaaaaggtctaaggaaaagcagtgaatacagcaggaacagaaagaccatcatcccccgctgtgtgccca

SEQ ID NO: 330227 - DNA, 120 bp, Artificial Sequence
  ENSG00000136643_11 (sequence is synthesized)
acatggtgtgtctgcataagtacatcatctctgaggagtcagtatttcttgtgctgcagcatgcggaaggtggcaaactgtggtcatatatcagtaaatttctaaacagaagtcctgaag

SEQ ID NO: 330228 - DNA, 120 bp, Artificial Sequence
  ENSG00000136643_12 (sequence is synthesized)
aaagctttgacatcaaggaagtgaaaaaacctacacttgcaaaagttcacctgcagcagccaacttctagtcctcaggacagcagtagctttgaatccagaggaagtgatggtggaagca

SEQ ID NO: 330229 - DNA, 120 bp, Artificial Sequence
  ENSG00000136643_13 (sequence is synthesized)
tgcttaaagctctgcctttgaagagtagtcttactccaagttctcaagatgacagcaaccaggaagatgatggccaagatagctctccaaagtggccagattctggttcaagttcagaag

SEQ ID NO: 330230 - DNA, 120 bp, Artificial Sequence
  ENSG00000136643_14 (sequence is synthesized)
aagaatgtactactagttatttaacattatgcaatgaatatgggcaagaaaagattgaaccagggtctttgaatgaggagcccttcatgaagactgaagggaatggtgttgatacaaaag

SEQ ID NO: 330231 - DNA, 120 bp, Artificial Sequence
  ENSG00000136643_15 (sequence is synthesized)
ctattaaaagcttcccagcacaccttgctgctgacagtgacagccccagcacacagctgagagctcacgagctgaagttcttccccaacgatgacccagaagcagttagttctccaagaa

SEQ ID NO: 330232 - DNA, 120 bp, Artificial Sequence
  ENSG00000136643_16 (sequence is synthesized)
catcagattccctcagtagatcaaaaaatagccccatggaattctttaggatagacagtaaggatagcgcaagtgaactcctgggacttgactttggagaaaaattgtatagtctaaaat

SEQ ID NO: 330233 - DNA, 120 bp, Artificial Sequence
  ENSG00000136643_17 (sequence is synthesized)
cagaacctttgaaaccattctttactcttccagatggagacagtgcttctaggagttttaatactagtgaaagcaaggtagagtttaaagctcaggacaccattagcaggggctcagatg

SEQ ID NO: 330234 - DNA, 120 bp, Artificial Sequence
  ENSG00000136643_18 (sequence is synthesized)
actcagtgccagttatttcatttaaagatgctgcttttgatgatgtcagtggtactgatgaaggaagacctgatcttcttgtaaatttacctggtgaattggagtcaacaagagaagctg

SEQ ID NO: 330235 - DNA, 120 bp, Artificial Sequence
  ENSG00000136643_19 (sequence is synthesized)
cagcaatgggacctactaagtttacacaaactaatatagggataatagaaaataaactcttggaagcccctgatgttttatgcctcaggcttagtactgaacaatgccaagcacatgagg

SEQ ID NO: 330236 - DNA, 120 bp, Artificial Sequence
  ENSG00000136643_20 (sequence is synthesized)
agaaaggcatagaggaactgagtgatccctctgggcccaaatcctatagtataacagagaaacactatgcacaggaggatcccaggatgttatttgtagcagctgttgatcatagtagtt

SEQ ID NO: 330237 - DNA, 120 bp, Artificial Sequence
  ENSG00000136643_21 (sequence is synthesized)
caggagatatgtctttgttacccagctcagatcctaagtttcaaggacttggagtggttgagtcagcagtaactgcaaacaacacagaagaaagcttattccgtatttgtagtccactct

SEQ ID NO: 330238 - DNA, 120 bp, Artificial Sequence
  ENSG00000136643_22 (sequence is synthesized)
tattccagagagactctgagactaagggtgaaagtggtttagtgctagaaggagacaaggaaatacatcagatttttgaggaccttgataaaaaattagcactagcctccaggttttaca

SEQ ID NO: 330239 - DNA, 120 bp, Artificial Sequence
  ENSG00000136643_23 (sequence is synthesized)
tcccagagggctgcattcaaagatgggcagctgaaatggtggtagcccttgatgctttacatagagagggaattgtgtgccgcgatttgaacccaaacaacatcttattgaatgatagag

SEQ ID NO: 330240 - DNA, 120 bp, Artificial Sequence
  ENSG00000136643_24 (sequence is synthesized)
gacacattcagctaacgtattttagcaggtggagtgaggttgaagattcctgtgacagcgatgccatagagagaatgtactgtgccccagaggttggagcaatcactgaagaaactgaag

SEQ ID NO: 330241 - DNA, 120 bp, Artificial Sequence
  ENSG00000136643_25 (sequence is synthesized)
cctgtgattggtggagtttgggtgctgtcctctttgaacttctcactggcaagactctggttgaatgccatccagcaggaataaatactcacactactttgaacatgccagaatgtgtct

SEQ ID NO: 330242 - DNA, 120 bp, Artificial Sequence
  ENSG00000136643_26 (sequence is synthesized)
ctgaagaggctcgctcactcattcaacagctcttgcagttcaatcctctggaacgacttggtgctggagttgctggtgttgaagatatcaaatctcatccattttttacccctgtggatt

SEQ ID NO: 330243 - DNA, 120 bp, Artificial Sequence
  ENSG00000136643_27 (sequence is synthesized)
gggcagaactgatgagatgaacgtaatgcagggttatcttcacacattctgatcttctctgtgacaggcatctccagcactgaggcacctctgactcacagttacttatggagcaccaaa

SEQ ID NO: 330244 - DNA, 120 bp, Artificial Sequence
  ENSG00000136643_28 (sequence is synthesized)
gcatttggataaagaccgttataggaaatgggggggaaatggctaaaagagaacaattcgtttacaattacaagatattagctaattgtgccaggggctgttatatacatatatacacaa

SEQ ID NO: 330245 - DNA, 120 bp, Artificial Sequence
  ENSG00000136643_29 (sequence is synthesized)
ccaaggtgtgatctgaatttaatccacatttggtgttgcagatgagttgtaaagccaactgaaagagttccttcaagaagttcctctgataggaagctagaagtgtagaatgaagtttta

SEQ ID NO: 330246 - DNA, 120 bp, Artificial Sequence
  ENSG00000136643_30 (sequence is synthesized)
cttgacagaaggacctttacatggcagctaacagtgctttttgctgaccaggattggtttatatgattaaattaatatttgcttaataatacactaaaagtatatgaacaatgtcatcaa

SEQ ID NO: 330247 - DNA, 120 bp, Artificial Sequence
  ENSG00000136643_31 (sequence is synthesized)
tgaaacttaaaagcgagaaaaaagaatatacacataatttctgacggaaaacctgtaccctgatgctgtataatgtatgttgaatgtggtcccagattatttctgtaagaagacactcca

SEQ ID NO: 330248 - DNA, 120 bp, Artificial Sequence
  ENSG00000136643_32 (sequence is synthesized)
tgttgtcagctttgtactctttgttgatactgcttatttagagaagggttcatataaacactcactctgtgtcttcaacagcatctttctttccccatctttctattttctgcaccctct

SEQ ID NO: 330249 - DNA, 120 bp, Artificial Sequence
  ENSG00000136643_33 (sequence is synthesized)
gcttgttccctcatattctgttcttccgactcctgctaacacacatgcaacaaaaaagggaagggagtgcttatttccctttgtgtaaggactaagaaatcatgatatcaaataaacatg

SEQ ID NO: 330250 - DNA, 120 bp, Artificial Sequence
  ENSG00000136643_34 (sequence is synthesized)
gtgaaacattagatctcttcttcatttaataaccctcccccctttttttccttgaagaaatgcgtctgttcctttccttgtgaaatattatcagtttctaccattgcttctcatgcttga

SEQ ID NO: 330251 - DNA, 120 bp, Artificial Sequence
  ENSG00000136643_35 (sequence is synthesized)
ctttgttttactttttggcttggtatactaagaagcaaaggatctcatctaaatggaattgaatggcagtcctagtttgttacttatggtgatgagattttcagatttgaactaatctat

SEQ ID NO: 330252 - DNA, 120 bp, Artificial Sequence
  ENSG00000136643_36 (sequence is synthesized)
ttgacgtgatttagaaagaatgtaagtattcacacatctccaaacatttgtatttgttacttctttttgttgctaaggtagctcctgtagttatgcattgttgcaaaaatttacaaatgt

SEQ ID NO: 330253 - DNA, 120 bp, Artificial Sequence
  ENSG00000136643_37 (sequence is synthesized)
tttaaaagtgttaacatctgtttttttttaaacgttagccaaagaagaagtcactatttccaagttagaaaccaccagaaataattgaaatttttgatatgttctaatcttctttgcatt

SEQ ID NO: 330254 - DNA, 120 bp, Artificial Sequence
  ENSG00000136643_38 (sequence is synthesized)
tttgagatctgtgtgagagcccaaccccactccaggagcatctgtacagcttccatctgccatcgaccaggtcctctcatcaaattaaatggaacagaaaatgctctagtgaaacaaagg

SEQ ID NO: 330255 - DNA, 120 bp, Artificial Sequence
  ENSG00000136643_39 (sequence is synthesized)
aaatgtgcaagcatttttcctttttctattattctatttccctttttcctttttggcccccttataatccaaaccccagctgaaaggctgcaacaacaccaggttggggagcaggtcacc

SEQ ID NO: 330256 - DNA, 120 bp, Artificial Sequence
  ENSG00000136643_40 (sequence is synthesized)
aggatcatagttcagtcaaaatgacatcactccctggaactagatttcaactcactagtcccctggcctcataacaggaacttatgcaggtgagacacaagaatgacttcctgtgtagga

SEQ ID NO: 330257 - DNA, 120 bp, Artificial Sequence
  ENSG00000136643_41 (sequence is synthesized)
ctagtaggaaatctgcaagtacttagagctggccattacagaacttccttccagaagtgccctgtgacatgaaagtaggacttcacaactaaggtgaagatccctgccctaccacatgat

SEQ ID NO: 330258 - DNA, 120 bp, Artificial Sequence
  ENSG00000136643_42 (sequence is synthesized)
ttgagtctcttggattcaaaggacattaatgtcaacagatggttgccatgtcagtctgttgacacaattccattgcttcagtttctccccttttctctctatatgtttggttggagcttg

SEQ ID NO: 330259 - DNA, 120 bp, Artificial Sequence
  ENSG00000136643_43 (sequence is synthesized)
tgcctaatgtaaatacatcattcataattagaatggacattaattattttagtaataaacacaggataaatagctttggggtgatgaaccagagtctgtttttattttatggtgtgtaca

SEQ ID NO: 330260 - DNA, 120 bp, Artificial Sequence
  ENSG00000136643_44 (sequence is synthesized)
tattttaagctgtacttctgtgaatggtactgatttttgtggttgttttttttttatattttgtttgtttaagcagaagagtggaatatggggtcaaaatcataaaagaagttgccatga

SEQ ID NO: 330261 - DNA, 120 bp, Artificial Sequence
  ENSG00000136643_45 (sequence is synthesized)
cttagtccttttttcgggaaaactcttttataataacaactgttggtgaaccattcatctgaaaactcttataattgtatggaagagatacagtgattttaagaaactacacaaagaact

SEQ ID NO: 330262 - DNA, 120 bp, Artificial Sequence
  ENSG00000136643_46 (sequence is synthesized)
caaaaggagaaaatgactcaaatgcatgtgcactttacaataacaaaagcaaaagagaaaaagcttttatctgagcaattcatgtaaggtcatgcaaaatatatttgagctaaaggagaa

SEQ ID NO: 330263 - DNA, 120 bp, Artificial Sequence
  ENSG00000136643_47 (sequence is synthesized)
caggaacttttgcaaatgcatttctttttattcgctgttgcttccaattaactgagtaggcgttttatcttgtaattagtatcttcatttcctgtctagagcttcattatcagtgcagca

SEQ ID NO: 330264 - DNA, 120 bp, Artificial Sequence
  ENSG00000136682_0 (sequence is synthesized)
aagggacgaggcgcttctcgtccagagcccaggtaatccgggcgggatcagcgagcgtcgcgatgtgatgacgtcaggccccgggcaggccgggagtggcgtgctgggcgtgcgcggctg

SEQ ID NO: 330265 - DNA, 120 bp, Artificial Sequence
  ENSG00000136682_1 (sequence is synthesized)
cggtacggcgtgttggtcccagcggttcagctgaggtagggacgtgctgtaggccggaatgttaccggctgttggatctgcggatgaggaggaggatcctgcggaggaggattgtcctga

SEQ ID NO: 330266 - DNA, 120 bp, Artificial Sequence
  ENSG00000136682_2 (sequence is synthesized)
ctgaattggttcccatggagacgacgcaaagcgaggaggaggaaaagtctggcctcggcgccaagatcccagtcacaattatcaccgggtatttaggtgctgggaagacaacacttctga

SEQ ID NO: 330267 - DNA, 120 bp, Artificial Sequence
  ENSG00000136682_3 (sequence is synthesized)
tattttgacagagcaacatagtaaaagagtagcggtcattttaaatgaatttggggaaggaagtgcgctggagaaatccttagctgtcagccaaggtggagagctctatgaagagtggct

SEQ ID NO: 330268 - DNA, 120 bp, Artificial Sequence
  ENSG00000136682_4 (sequence is synthesized)
ggaacttagaaacggttgcctctgctgttcagtgaaggacaatggccttagagctattgagaatttgatgcaaaagaaggggaaatttgattacatactgttagagaccactggattggc

SEQ ID NO: 330269 - DNA, 120 bp, Artificial Sequence
  ENSG00000136682_5 (sequence is synthesized)
agacccaggtgcagtggcttctatgttttgggttgatgctgaattagggagtgatatttaccttgatggtatcataactatagtggattcaaaatatggattaaaacatttagcagaaga

SEQ ID NO: 330270 - DNA, 120 bp, Artificial Sequence
  ENSG00000136682_6 (sequence is synthesized)
gaaacctgatggccttatcaatgaagctactaggcaagttgctttggcagatgccattctcattaataaaacagacttggttccagaagaagatgtaaagaaattaagagcgacaattag

SEQ ID NO: 330271 - DNA, 80 bp, Artificial Sequence
  ENSG00000136682_7 (sequence is synthesized)
gatcttcatgcctttgatagtctctctggaatcctcaccttgatcagagtattgttacaatcacatttgaagtaccagga

SEQ ID NO: 330272 - DNA, 120 bp, Artificial Sequence
  ENSG00000136682_8 (sequence is synthesized)
tgatcagagtattgttacaatcacatttgaagtaccaggaaatgcaaaggaagaacatcttaatatgtttattcagaatctcctgtgggaaaagaatgtgagaaacaaggacaatcactg

SEQ ID NO: 330273 - DNA, 120 bp, Artificial Sequence
  ENSG00000136682_9 (sequence is synthesized)
caatcaaagacaaatcacaacaagtgattgtccagggtgtccatgagctctatgatctggaggagactccagtgagctggaaggatgacactgagagaacaaatcgattggtcctccttg

SEQ ID NO: 330274 - DNA, 120 bp, Artificial Sequence
  ENSG00000136682_10 (sequence is synthesized)
cactgagagaacaaatcgattggtcctccttggcagaaatttagataaggatatccttaaacagctgtttatagctactgtgacagaaacagaaaagcagtggacaacacatttcaaaga

SEQ ID NO: 330275 - DNA, 120 bp, Artificial Sequence
  ENSG00000136682_11 (sequence is synthesized)
agatcaagtttgtacataacactagaggcatttcttatcaaaaggattggataataaaaataagtttctactgggtatatttcaagcatttatttattactttagttacgaattccaata

SEQ ID NO: 330276 - DNA, 120 bp, Artificial Sequence
  ENSG00000136682_12 (sequence is synthesized)
tactttaaaatggtatttgttttacagcatacataaaatgtagcaaatcggtactgtaaaacatttaacattcatacagttatatataatatccttttttttaaagaatggtatttcaca

SEQ ID NO: 330277 - DNA, 120 bp, Artificial Sequence
  ENSG00000136682_13 (sequence is synthesized)
aaaatgtcttttgaaattggctttggagtttacatatactgaacatgaaagtttataataatgatgatacaactttcaacattgtcattttttcttagaacttcagctgattgcagagat

SEQ ID NO: 330278 - DNA, 120 bp, Artificial Sequence
  ENSG00000136682_14 (sequence is synthesized)
ataatgattacattgttattaaatttttttaacacaagtaagtgtcaccattttatgacatgaaataaaaggttatgactgttattgatgttgatgttgacgacctgatcacctggctga

SEQ ID NO: 330279 - DNA, 120 bp, Artificial Sequence
  ENSG00000136682_15 (sequence is synthesized)
ctagaaatgtttattgattatatttccagctttaattttcttgagtaatttaactgaatttacacagtttgcttcattgtattttcaaacaaatagaaaataaacttattaggaagcatt

SEQ ID NO: 330280 - DNA, 120 bp, Artificial Sequence
  ENSG00000136682_16 (sequence is synthesized)
ttcttaaagtgtttcttgctgtcttttctatctgctctaatgttttggtccttttattgagtttttattgcttttgatgtcagggcttatttaatctctagtgcatgaaagtctcatatg

SEQ ID NO: 330281 - DNA, 120 bp, Artificial Sequence
  ENSG00000136682_17 (sequence is synthesized)
taaaaaatgattattctgaatttaatctgtcattggtcatatttctaagtgttcaaccttataaaaaaaataaatgactatcaaaaaagagaaaaaccttacattatgttctactagtta

SEQ ID NO: 330282 - DNA, 120 bp, Artificial Sequence
  ENSG00000136682_18 (sequence is synthesized)
agttttcaaggacagtgttcactagtctaccatagaccctagaagagttacccaacacatagtagcactcaaatatttgttgaatgaattataaaaatgactacttgtactgttaatttt

SEQ ID NO: 330283 - DNA, 120 bp, Artificial Sequence
  ENSG00000136682_19 (sequence is synthesized)
tttaaaagaggaaaagtactcggttgtcattttctttggcagttgaatgaatgaacggagtatttcttggtacttttaagctgttaatagaatttgaagttttattgattgacttaggat

SEQ ID NO: 330284 - DNA, 120 bp, Artificial Sequence
  ENSG00000136682_20 (sequence is synthesized)
tatttgtaagaacagaagttgttaaaaataaggacatgtaggaagagcagagacgttctacctctaagtacagttgtcccttggcatccatggggtattagttccggaacctctgaggat

SEQ ID NO: 330285 - DNA, 120 bp, Artificial Sequence
  ENSG00000136682_21 (sequence is synthesized)
ttggcatccatggggtattagttccggaacctctgaggataccaaaatctattaatgttcaagtcccttacataaaatggtgtagtatttgcctataacctatgcacatcctcccatata

SEQ ID NO: 330286 - DNA, 120 bp, Artificial Sequence
  ENSG00000136682_22 (sequence is synthesized)
ttttaaaatgctggtaatggtcttttttttcttttttttttttcttggtgattttaatgctttggaaaagatctcatggttttatctccaaaggaggaaattaatttgatgccatggaaa

SEQ ID NO: 330287 - DNA, 120 bp, Artificial Sequence
  ENSG00000136682_23 (sequence is synthesized)
ttagttttctagtcgtatgccttgaatgagtgaagaatttctttttcatggtggtactaaatttggggaaagctatagaaactttcatctggaagcttacacttttcctcttttttgaaa

SEQ ID NO: 330288 - DNA, 120 bp, Artificial Sequence
  ENSG00000136682_24 (sequence is synthesized)
atttggtgagagacttggatattttattattttctgtaaaagagtgtaatttgttgtacaggtctaatattgatccttttttggaagtatggaaagaatctgagtataaagcagaattac

SEQ ID NO: 330289 - DNA, 120 bp, Artificial Sequence
  ENSG00000136682_25 (sequence is synthesized)
ctctggatggcatgtattctcaaggacactgtcacagtgaaacagtttatttagaagcttgtgtttccaaagtgttgaatttgatattcacaaaattggcatgtgtaaactttattaaac

SEQ ID NO: 330290 - DNA, 120 bp, Artificial Sequence
  ENSG00000136682_26 (sequence is synthesized)
tattcacaaaattggcatgtgtaaactttattaaactttaagctatttcctaagatgaagatgacaaacttggagggaaacttcattcatttggtttatttttatttttatttttattta

SEQ ID NO: 330291 - DNA, 87 bp, Artificial Sequence
  ENSG00000136682_27 (sequence is synthesized)
ttgtatttttagtagagacggtttcgccacattggccaggttggtgtcaaactcctggcctcaagcccccgtgccccttgtttgtga

SEQ ID NO: 330292 - DNA, 120 bp, Artificial Sequence
  ENSG00000136682_28 (sequence is synthesized)
gtttgtgacctgtcaatataaatatgctcagtaatggggggaggggtggggggtgaaaaaggaaatatgtttaatattaagactttggccttttagtgtaaactgatattcaaaaatttc

SEQ ID NO: 330293 - DNA, 120 bp, Artificial Sequence
  ENSG00000136682_29 (sequence is synthesized)
ttcatagaacatttgcttctttgcttgatcatttttctaattctgtacatctaaaatgcccagaatttgagttgctgttatagtctactaacatagaactttggagtaataagatgggaa

SEQ ID NO: 330294 - DNA, 120 bp, Artificial Sequence
  ENSG00000136682_30 (sequence is synthesized)
tttgtctctcttttgccaagacaagcattcgtaatctaacacagtattgttgccacgagtacgagtatgtgatagactgttgagaataaagaaagcaggcacagttggtcagtcctaaga

SEQ ID NO: 330295 - DNA, 120 bp, Artificial Sequence
  ENSG00000136682_31 (sequence is synthesized)
taaaggagatgtttttcttatatgtttgtgcattaaagaaaaaaaaatcttgaatctgaccaatgatgttttttttccttgtaagaaaatttaacaaatgtttggcaagcttctggaatc

SEQ ID NO: 330296 - DNA, 120 bp, Artificial Sequence
  ENSG00000136682_32 (sequence is synthesized)
taaatttgaaattatacatttgtcattttctttaaatatttcttcacctcagctttgattatgagaaatcactgtcctctgctgttctttttttttttttttcttttgaggcggagtctc

SEQ ID NO: 330297 - DNA, 70 bp, Artificial Sequence
  ENSG00000136682_33 (sequence is synthesized)
gctgttctttttttttttttttcttttgaggcggagtctcactctttcctgggttcaaatgattctcctg

SEQ ID NO: 330298 - DNA, 75 bp, Artificial Sequence
  ENSG00000136682_34 (sequence is synthesized)
gtcctctgtggttttctgggcttatgttaaaattataactcaatcaccagtctttataaatttgcttttttatat

SEQ ID NO: 330299 - DNA, 120 bp, Artificial Sequence
  ENSG00000136682_35 (sequence is synthesized)
taactcaatcaccagtctttataaatttgcttttttatatttaaaccaaacctaatgctaattgtgatatgttatttattctcacctgatttgaatcattggattcaattaaatgagttt

SEQ ID NO: 330300 - DNA, 120 bp, Artificial Sequence
  ENSG00000136682_36 (sequence is synthesized)
aattatcattaaataattctaagagaaataatgtctattcggatggtgggaattttctttctacatgcagccccattctgaatgaatgaaatcaaatcacgtgaagatcagggtcctaga

SEQ ID NO: 330301 - DNA, 120 bp, Artificial Sequence
  ENSG00000136682_37 (sequence is synthesized)
gtaacttaatattttgtacattggttatttgactcctcatttttatattacatgttatatcaagggagggggcataaaagaaatacaaaaattgcagaggtatctggaatgtacctattt

SEQ ID NO: 330302 - DNA, 120 bp, Artificial Sequence
  ENSG00000136682_38 (sequence is synthesized)
gttaattctatttgtcatttcttttgtttcatcttttgagtaataagctgcttggaaaagtttctgttctttagctgattttttagctataaaaatgtatttgaaaagctcataaatttc

SEQ ID NO: 330303 - DNA, 120 bp, Artificial Sequence
  ENSG00000136682_39 (sequence is synthesized)
aggattgaaaagataattgaaagttttaaaaaaacctaattcattgaagtaataaccaaataattttcaatcttgattcaactgtgattcaaatcttacaccatttgcccacttctatga

SEQ ID NO: 330304 - DNA, 120 bp, Artificial Sequence
  ENSG00000136682_40 (sequence is synthesized)
tcctctggtgaattgctattccatatttaaaaatgaaaatgcaaggtattgtattgatgtggatagctttagaaaagttggattaatttctgttaagatttatatgggttgagatactga

SEQ ID NO: 330305 - DNA, 120 bp, Artificial Sequence
  ENSG00000136682_41 (sequence is synthesized)
tgggttgagatactgaaattagttttaataaaattttattttgtataactttggaattcttattaacagaattaaactacatttttacatgaaataaatgactccagaagtaaaaatcta

SEQ ID NO: 330306 - DNA, 120 bp, Artificial Sequence
  ENSG00000136682_42 (sequence is synthesized)
tccccctcccgtcctgtccccatcagtgttgaaatgtatgctacagttattatggttgtaatttgttatgccatgttgatcttcttgtgcttttcatatcagaacaatgcatttttaaca

SEQ ID NO: 330307 - DNA, 120 bp, Artificial Sequence
  ENSG00000136682_43 (sequence is synthesized)
ttctgactttctttttctctcaattggtaactgactatatagaaaatttatatttatggatactatttcttttttaataagttcaagggaaaacattgataaaggaaaatttatcctttc

SEQ ID NO: 330308 - DNA, 120 bp, Artificial Sequence
  ENSG00000136682_44 (sequence is synthesized)
aactttctttaggtgccagcattattttcatattaggaagcaggagaaagttaaggaactctgagcaatactagaatggttatatatatttaagtttgtattaaacctgttggaatggta

SEQ ID NO: 330309 - DNA, 120 bp, Artificial Sequence
  ENSG00000136682_45 (sequence is synthesized)
aagaaatttactgacatatttaaccatacaaaatagtgttgctaaaagactagtttttctctttattctgtgcatatgtatatatatgaatgtgtgggttttttttaagaaattttaaaa

SEQ ID NO: 330310 - DNA, 120 bp, Artificial Sequence
  ENSG00000136682_46 (sequence is synthesized)
aaacttaatctgccagcttttctctattggaatttgcgaacaacttgtaaaattggaattacagaatattagaatagtcagttatggaaagtcacttcattatccttgtgtcactaaata

SEQ ID NO: 330311 - DNA, 120 bp, Artificial Sequence
  ENSG00000136682_47 (sequence is synthesized)
ctgaaggtacagtttactgttgcagactttcggacaaagtccttttcttggctgttataaaaactatatttggttttaaacagaaacactggttttagtacaaatcatctttgtctactt

SEQ ID NO: 330312 - DNA, 120 bp, Artificial Sequence
  ENSG00000136682_48 (sequence is synthesized)
tcatttttctttattattttcatgactgaaaaggagctttggaaatcactgcataaggcttgatttatttgcacaactttctttagggttgcagctagaacaaacctgtgtgctttgaaa

SEQ ID NO: 330313 - DNA, 120 bp, Artificial Sequence
  ENSG00000136682_49 (sequence is synthesized)
tgttaccttctgctctctgttcccaagtacagagaaataatgttgcaaatctcacttctgctgaacattatgcttcctgatgcatttagcagacactaaacatttgtcatactctaaaca

SEQ ID NO: 330314 - DNA, 120 bp, Artificial Sequence
  ENSG00000136682_50 (sequence is synthesized)
aagttacaaaggactagaagaattcttgttctgtatttagaaacccactcacgttacttgatatttgggtatttaagtcatgaaaggtatttcttctaggaagcagtgattctaaagtgt

SEQ ID NO: 330315 - DNA, 120 bp, Artificial Sequence
  ENSG00000136682_51 (sequence is synthesized)
atgcttaaccagtcagttgagtgtctactcttgtgtgttcacaagtgtgcacaaagtttttggtaaattaagaatattatttcaaataaattaatttcatccccataggagccagtttat

SEQ ID NO: 330316 - DNA, 120 bp, Artificial Sequence
  ENSG00000136682_52 (sequence is synthesized)
tgattgcaacccatttctaaaacaaattatttaatataatcaaactcctttaacttctcaacttttcccactaaaactgtgaaacattatataaaatctttaatcaataggatatgatac

SEQ ID NO: 330317 - DNA, 120 bp, Artificial Sequence
  ENSG00000136682_53 (sequence is synthesized)
atatttcatcattttgtttcaggttttggttgtgataaataacactgaaaaaccatcctaatatatgtattaactttatcattagaaaaggggattgttcaaaaaaaaatcaatacacag

SEQ ID NO: 330318 - DNA, 120 bp, Artificial Sequence
  ENSG00000136682_54 (sequence is synthesized)
aaaccttttttgaaaattaaaaacattaagaaacttcttgtaattcacaaataattggaattaagtaattttctcagcttaagagtttgtattttttaagtgaatatcagtaattaatcc

SEQ ID NO: 330319 - DNA, 120 bp, Artificial Sequence
  ENSG00000136682_55 (sequence is synthesized)
aagtgaaaaatatatttgaaagggatatcatgtgccactcaaacagattaaccattcaggtcctcttttaaaactaaataagcttgtggtcaatgtttcatctttatcacgttacaacgt

SEQ ID NO: 330320 - DNA, 120 bp, Artificial Sequence
  ENSG00000136682_56 (sequence is synthesized)
tcgtaaaagcttgttaggacttttgttcttcttcagttttagaaaagtggttaatccaaggaccaatgtgactttgatgtactgacctggaaagttaaagatggaatcactcaattacta

SEQ ID NO: 330321 - DNA, 120 bp, Artificial Sequence
  ENSG00000136682_57 (sequence is synthesized)
ttctttttgtaaatttctaaacaccataaagcatttaatgaactggaattgataggtgaactgtgtcattttaataagcataatgtaatcacgtcatattttgttttgtttgcaggcaga

SEQ ID NO: 330322 - DNA, 120 bp, Artificial Sequence
  ENSG00000136682_58 (sequence is synthesized)
ttgagctgcttcaagaacgttagggaatcacatatattgttgatggctaattgttatataaatggtaatacataaaattagtccccagtgcttgcagaatatagttcacagttaatagac

SEQ ID NO: 330323 - DNA, 120 bp, Artificial Sequence
  ENSG00000136682_59 (sequence is synthesized)
tgatattcagggtcttcgcactccatctttcttttcctgtcttctctttgactctttcctaatgtcaatcttccctaactttacccaggatggttaattcactttcccatggatgcatcc

SEQ ID NO: 330324 - DNA, 120 bp, Artificial Sequence
  ENSG00000136688_0 (sequence is synthesized)
atcactgaccttggaagctgctggagccacgattcagtcccctggactgtagataaagaccctttcttgccaggtgctgagacaaccacactatgagaggcactccaggagacgctgatg

SEQ ID NO: 330325 - DNA, 120 bp, Artificial Sequence
  ENSG00000136688_1 (sequence is synthesized)
gtggaggaagggccgtctatcaatcaatgtgtaaacctattactgggactattaatgatttgaatcagcaagtgtggacccttcagggtcagaaccttgtggcagttccacgaagtgaca

SEQ ID NO: 330326 - DNA, 120 bp, Artificial Sequence
  ENSG00000136688_2 (sequence is synthesized)
gtgtgaccccagtcactgttgctgttatcacatgcaagtatccagaggctcttgagcaaggcagaggggatcccatttatttgggaatccagaatccagaaatgtgtttgtattgtgaga

SEQ ID NO: 330327 - DNA, 120 bp, Artificial Sequence
  ENSG00000136688_3 (sequence is synthesized)
aggttggagaacagcccacattgcagctaaaagagcagaagatcatggatctgtatggccaacccgagcccgtgaaacccttccttttctaccgtgccaagactggtaggacctccaccc

SEQ ID NO: 330328 - DNA, 120 bp, Artificial Sequence
  ENSG00000136688_4 (sequence is synthesized)
ttgagtctgtggccttcccggactggttcattgcctcctccaagagagaccagcccatcattctgacttcagaacttgggaagtcatacaacactgcctttgaattaaatataaatgact

SEQ ID NO: 330329 - DNA, 120 bp, Artificial Sequence
  ENSG00000136688_5 (sequence is synthesized)
agaggtggcagcttggtctttgtcttaaagtttctggttcccaatgtgttttcgtctacattttcttagtgtcattttcacgctggtgctgagacaggggcaaggctgctgttatcatct

SEQ ID NO: 330330 - DNA, 120 bp, Artificial Sequence
  ENSG00000136688_6 (sequence is synthesized)
cattttataatgaagaagaagcaattacttcatagcaactgaagaacaggatgtggcctcagaagcaggagagctgggtggtataaggctgtcctctcaagctggtgctgtgtaggccac

SEQ ID NO: 330331 - DNA, 120 bp, Artificial Sequence
  ENSG00000136688_7 (sequence is synthesized)
aaggcatctgcatgagtgactttaagactcaaagaccaaacactgagctttcttctaggggtgggtatgaagatgcttcagagctcatgcgcgttacccacgatggcatgactagcacag

SEQ ID NO: 330332 - DNA, 120 bp, Artificial Sequence
  ENSG00000136688_8 (sequence is synthesized)
agctgatctctgtttctgttttgctttattccctcttgggatgatatcatccagtctttatatgttgccaatatacctcattgtgtgtaatagaaccttcttagcattaagaccttgtaa

SEQ ID NO: 330333 - DNA, 120 bp, Artificial Sequence
  ENSG00000136688_9 (sequence is synthesized)
gaaccttcttagcattaagaccttgtaaacaaaaataattcttgtgttaagttaaatcatttttgtcctaattgtaatgtgtaatcttaaagttaaataaactttgtgtatttatataat

SEQ ID NO: 330334 - DNA, 120 bp, Artificial Sequence
  ENSG00000136688_10 (sequence is synthesized)
tttgctttcttgtccagtcttgggagtgcctgaccacagcaggatcttctggtaggaggagctggttttctttcatgtcatacgtttctcatgccccacccaggaagctggagcctcctt

SEQ ID NO: 330335 - DNA, 120 bp, Artificial Sequence
  ENSG00000136689_0 (sequence is synthesized)
agctccaccctgggagggactgtggcccaggtactgcccgggtgctactttatgggcagcagctcagttgagttagagtctggaagacctcagaagacctcctgtcctatgaggccctcc

SEQ ID NO: 330336 - DNA, 120 bp, Artificial Sequence
  ENSG00000136689_1 (sequence is synthesized)
ccatggctttagagacgatctgccgaccctctgggagaaaatccagcaagatgcaagccttcagaatctgggatgttaaccagaagaccttctatctgaggaacaaccaactagttgctg

SEQ ID NO: 330337 - DNA, 120 bp, Artificial Sequence
  ENSG00000136689_2 (sequence is synthesized)
gatacttgcaaggaccaaatgtcaatttagaagaaaagatagatgtggtacccattgagcctcatgctctgttcttgggaatccatggagggaagatgtgcctgtcctgtgtcaagtctg

SEQ ID NO: 330338 - DNA, 120 bp, Artificial Sequence
  ENSG00000136689_3 (sequence is synthesized)
gtgatgagaccagactccagctggaggcagttaacatcactgacctgagcgagaacagaaagcaggacaagcgcttcgccttcatccgctcagacagtggccccaccaccagttttgagt

SEQ ID NO: 330339 - DNA, 120 bp, Artificial Sequence
  ENSG00000136689_4 (sequence is synthesized)
ctgccgcctgccccggttggttcctctgcacagcgatggaagctgaccagcccgtcagcctcaccaatatgcctgacgaaggcgtcatggtcaccaaattctacttccaggaggacgagt

SEQ ID NO: 330340 - DNA, 120 bp, Artificial Sequence
  ENSG00000136689_5 (sequence is synthesized)
agtactgcccaggcctgcctgttcccattcttgcatggcaaggactgcagggactgccagtccccctgccccagggctcccggctatgggggcactgaggaccagccattgaggggtgga

SEQ ID NO: 330341 - DNA, 120 bp, Artificial Sequence
  ENSG00000136689_6 (sequence is synthesized)
ccctcagaaggcgtcacaacaacctggtcacaggactctgcctcctcttcaactgaccagcctccatgctgcctccagaatggtctttctaatgtgtgaatcagagcacagcagcccctg

SEQ ID NO: 330342 - DNA, 120 bp, Artificial Sequence
  ENSG00000136689_7 (sequence is synthesized)
ctcttgccactgcctcttcctccctcattccaccttcccatgccctggatccatcaggccacttgatgacccccaaccaagtggctcccacaccctgttttacaaaaaagaaaagaccag

SEQ ID NO: 330343 - DNA, 120 bp, Artificial Sequence
  ENSG00000136689_8 (sequence is synthesized)
tccatgagggaggtttttaagggtttgtggaaaatgaaaattaggatttcatgatttttttttttcagtccccgtgaaggagagcccttcatttggagattatgttctttcggggagagg

SEQ ID NO: 330344 - DNA, 120 bp, Artificial Sequence
  ENSG00000136689_9 (sequence is synthesized)
ctgaggacttaaaatattcctgcatttgtgaaatgatggtgaaagtaagtggtagcttttcccttctttttcttctttttttgtgatgtcccaacttgtaaaaattaaaagttatggtac

SEQ ID NO: 330345 - DNA, 120 bp, Artificial Sequence
  ENSG00000136689_10 (sequence is synthesized)
tatgttagccccataattttttttttccttttaaaacacttccataatctggactcctctgtccaggcactgctgcccagcctccaagctccatctccactccagattttttacagctgc

SEQ ID NO: 330346 - DNA, 120 bp, Artificial Sequence
  ENSG00000136689_11 (sequence is synthesized)
ctgcagtactttacctcctatcagaagtttctcagctcccaaggctctgagcaaatgtggctcctgggggttctttcttcctctgctgaaggaataaattgctccttgacattgtagagc

SEQ ID NO: 330347 - DNA, 120 bp, Artificial Sequence
  ENSG00000136689_12 (sequence is synthesized)
ttctggcacttggagacttgtatgaaagatggctgtgcctctgcctgtctcccccaccgggctgggagctctgcagagcaggaaacatgactcgtatatgtctcaggtccctgcagggcc

SEQ ID NO: 330348 - DNA, 120 bp, Artificial Sequence
  ENSG00000136689_13 (sequence is synthesized)
aagcacctagcctcgctcttggcaggtactcagcgaatgaatgctgtatatgttgggtgcaaagttccctacttcctgtgacttcagctctgttttacaataaaatcttgaaaatgccta

SEQ ID NO: 330349 - DNA, 120 bp, Artificial Sequence
  ENSG00000136689_14 (sequence is synthesized)
gaattagcagttcacaaagcacattcgcatataagggcttgttttgaattgatcttggcagcaattctatgagacaagtaaaagcacaagaggaataggaactgcacctcttccttcagt

SEQ ID NO: 330350 - DNA, 120 bp, Artificial Sequence
  ENSG00000136689_15 (sequence is synthesized)
ttcagcttgaataatatcaggaagattcgtatcggtctgagttgggtcacgtacccgacgtgctatagctgaggatgggctgacttgtatgaagaaggaggtggaggaggaggagaaggt

SEQ ID NO: 330351 - DNA, 120 bp, Artificial Sequence
  ENSG00000136689_16 (sequence is synthesized)
gaagacaatgctgactcaaaggggggattataaaactaatcatcaaagccaagaaggcaagagcaagcatgtaccgctgaaaacacaagataactgcataagtaatgactttcagtgcag

SEQ ID NO: 330352 - DNA, 120 bp, Artificial Sequence
  ENSG00000136689_17 (sequence is synthesized)
atttctttataaaccacaactctgggcccgcaatggcagtccactgccttgctgcagtcacagaatggaaatctgcagaggcctccgcagtcacctaatcactctcctcctcttcctgtt

SEQ ID NO: 330353 - DNA, 120 bp, Artificial Sequence
  ENSG00000136689_18 (sequence is synthesized)
ttcagaagccccttcaccatgatcaagagtctccagtcactcagaattccacggttcccaaatgccagctctcccactactcccagcgttctccatctctgggatgttgggctccaggct

SEQ ID NO: 330354 - DNA, 120 bp, Artificial Sequence
  ENSG00000136689_19 (sequence is synthesized)
tgcacaaaccctaggtgcaatgtcctaatccttgttgggtctttgtattcaagtttgaagctgggagggcctggctactgaagggcacatatgagggcagcctgaagagggtgtggagag

SEQ ID NO: 330355 - DNA, 120 bp, Artificial Sequence
  ENSG00000136689_20 (sequence is synthesized)
gtagagtctaggtcagaggtcagtgcctataggcacagtggtcccagggccacagctgggaagggcaaataccagaaggcaaggttgaccattcccttcctcaagtgcctattaaggctc

SEQ ID NO: 330356 - DNA, 120 bp, Artificial Sequence
  ENSG00000136689_21 (sequence is synthesized)
atctcagaaacacagcttttacaaaggataaatgaagagaaattcaccagagatacattgtaatgaatctgtaaatcaccaaagctaaagatattatttcacaagtggaatgacagctga

SEQ ID NO: 330357 - DNA, 120 bp, Artificial Sequence
  ENSG00000136689_22 (sequence is synthesized)
gaccttgtctggcttgttcccaatgcctggaagagtgcctggcacacaggattaagccaacacatatgttttgaatgaatgtgtgcacacatgcatgagctggcggcagtcggggttggg

SEQ ID NO: 330358 - DNA, 120 bp, Artificial Sequence
  ENSG00000136689_23 (sequence is synthesized)
aaccctaactcaatcccaaattaatccaccatgtataaggttgagctatgtctcttattcctggacaccatactcagccatattctggtccacacattaaacaagctggatgaccttgaa

SEQ ID NO: 330359 - DNA, 120 bp, Artificial Sequence
  ENSG00000136694_0 (sequence is synthesized)
agaaaacccaagtgcagtagaagccattgttcataatggtagggatacagggtccttcgtaacagattatcagtgtggcctatgctggaaagtctggtgacctctgattttttttgcttc

SEQ ID NO: 330360 - DNA, 120 bp, Artificial Sequence
  ENSG00000136694_1 (sequence is synthesized)
caggtctttggccttggcactctttgtcatattagagttcctgggtctaggcctgggcaggattcataggtgcagctgcttctgctggaggtagactgcatccaacaaagtaagggtgct

SEQ ID NO: 330361 - DNA, 120 bp, Artificial Sequence
  ENSG00000136694_2 (sequence is synthesized)
gggtgagttctgggagtatagattctgactggggtcactgctgggctggccgccagtctttcatctgacccagggttaaactgtggcttgggactgactcaggtcctctcttggggtcgg

SEQ ID NO: 330362 - DNA, 120 bp, Artificial Sequence
  ENSG00000136694_3 (sequence is synthesized)
acaatggaaaaagcattgaaaattgacacacctcagcaggggagcattcaggatatcaatcatcgggtgtgggttcttcaggaccagacgctcatagcagtcccgaggaaggaccgtatg

SEQ ID NO: 330363 - DNA, 120 bp, Artificial Sequence
  ENSG00000136694_4 (sequence is synthesized)
tctccagtcactattgccttaatctcatgccgacatgtggagacccttgagaaagacagagggaaccccatctacctgggcctgaatggactcaatctctgcctgatgtgtgctaaagtc

SEQ ID NO: 330364 - DNA, 120 bp, Artificial Sequence
  ENSG00000136694_5 (sequence is synthesized)
ggggaccagcccacactgcagctgaaggaaaaggatataatggatttgtacaaccaacccgagcctgtgaagtcctttctcttctaccacagccagagtggcaggaactccaccttcgag

SEQ ID NO: 330365 - DNA, 120 bp, Artificial Sequence
  ENSG00000136694_6 (sequence is synthesized)
tctgtggctttccctggctggttcatcgctgtcagctctgaaggaggctgtcctctcatccttacccaagaactggggaaagccaacactactgactttgggttaactatgctgttttaa

SEQ ID NO: 330366 - DNA, 120 bp, Artificial Sequence
  ENSG00000136695_0 (sequence is synthesized)
ggagagtcccacctctaacatctcctgtaggcctggcaatggcaggcaggaaagacagaggaaggaaggagggagaagggaaggagtgaaggaaggagtgaaaaaggggagtctacaccc

SEQ ID NO: 330367 - DNA, 120 bp, Artificial Sequence
  ENSG00000136695_1 (sequence is synthesized)
tgtggagctcaagatggtcctgagtggggcgctgtgcttccgaatgaaggactcggcattgaaggtgctttatctgcataataaccagcttctagctggagggctgcatgcagggaaggt

SEQ ID NO: 330368 - DNA, 120 bp, Artificial Sequence
  ENSG00000136695_2 (sequence is synthesized)
cattaaaggtgaagagatcagcgtggtccccaatcggtggctggatgccagcctgtcccccgtcatcctgggtgtccagggtggaagccagtgcctgtcatgtggggtggggcaggagcc

SEQ ID NO: 330369 - DNA, 120 bp, Artificial Sequence
  ENSG00000136695_3 (sequence is synthesized)
gactctaacactagagccagtgaacatcatggagctctatcttggtgccaaggaatccaagagcttcaccttctaccggcgggacatggggctcacctccagcttcgagtcggctgccta

SEQ ID NO: 330370 - DNA, 120 bp, Artificial Sequence
  ENSG00000136695_4 (sequence is synthesized)
cccgggctggttcctgtgcacggtgcctgaagccgatcagcctgtcagactcacccagcttcccgagaatggtggctggaatgcccccatcacagacttctacttccagcagtgtgacta

SEQ ID NO: 330371 - DNA, 120 bp, Artificial Sequence
  ENSG00000136695_5 (sequence is synthesized)
gggcaacgtgccccccagaactccctgggcagagccagctcgggtgaggggtgagtggaggagacccatggcggacaatcactctctctgctctcaggacccccacgtctgacttagtgg

SEQ ID NO: 330372 - DNA, 120 bp, Artificial Sequence
  ENSG00000136695_6 (sequence is synthesized)
gcacctgaccactttgtcttctggttcccagtttggataaattctgagatttggagctcagtccacggtcctcccccactggatggtgctactgctgtggaatcttgtaaaaaccatgtg

SEQ ID NO: 330373 - DNA, 120 bp, Artificial Sequence
  ENSG00000136695_7 (sequence is synthesized)
gggtaaactgggaataacatgaaaagatttctgtggaggtggggtgggggagtggtgggaatcattcctgcttaatggtaactgaccagtgttaccctgagccccgcaggccaacccatc

SEQ ID NO: 330374 - DNA, 120 bp, Artificial Sequence
  ENSG00000136695_8 (sequence is synthesized)
cccagttgagccttatagggtcagtagctctccacatgaagacctgtcactcaccactatgcaggagagggaggtggtcatagagtcagggatctatggcccttggcccagccccacctc

SEQ ID NO: 330375 - DNA, 120 bp, Artificial Sequence
  ENSG00000136695_9 (sequence is synthesized)
cttccctttaatcctgccactgtcatatgctacctttcctatctcttccctcatcatcttgttgtgggcatgaggaggtgctgatgtcagaagaaatggctcgagctcagaagataaaag

SEQ ID NO: 330376 - DNA, 120 bp, Artificial Sequence
  ENSG00000136695_10 (sequence is synthesized)
ataagtagggtatgctgatcctcttttaaaaacccaagatacaatcaaaatcccagatgctggtctctattcccatgaaaaagtgctcatgacatattgagaagacctacttacaaagtg

SEQ ID NO: 330377 - DNA, 120 bp, Artificial Sequence
  ENSG00000136695_11 (sequence is synthesized)
acctatttatatatttctttatagaaaaaagtctggaagagtttacttcaattgtagcaatgtcagggtggtggcagtataggtgatttttcttttaattctgttaatttacctgtattt

SEQ ID NO: 330378 - DNA, 120 bp, Artificial Sequence
  ENSG00000136695_12 (sequence is synthesized)
cctaatttttctacaatgaagatgaattccttgtataaaaataagaaaagaaattaatcttgaggtaagcagagtagacatcatctctgattgtcctcagcctccacttccccagagtaa

SEQ ID NO: 330379 - DNA, 120 bp, Artificial Sequence
  ENSG00000136695_13 (sequence is synthesized)
attcaaattgaatcgagctctgctgctctggttggttgtagtagtgatcaggaaacagatctcagcaaagccactgaggaggaggctgtgctgagtttgtgtggctggaatctctgggta

SEQ ID NO: 330380 - DNA, 120 bp, Artificial Sequence
  ENSG00000136695_14 (sequence is synthesized)
aggaacttaaagaacaaaaatcatctggtaattctttcctagaaggatcacagcccctgggattccaaggcattggatccagtctctaagaaggctgctgtactggttgaattgtgtccc

SEQ ID NO: 330381 - DNA, 120 bp, Artificial Sequence
  ENSG00000136695_15 (sequence is synthesized)
cctcaaattcacatccttcttggaatctcagtctgtgagtttatttggagataaggtctctgcagatgtagttagttaagacaaggtcatgctggatgaaggtagacctaaattcaatat

SEQ ID NO: 330382 - DNA, 120 bp, Artificial Sequence
  ENSG00000136695_16 (sequence is synthesized)
gactggtttccttgtatgaaaaggagaggacacagagacagaggagatgcggggaagactatgtaaagatgaaggcagagatcggagttttgcagccacaagctaagaaacaccaaggat

SEQ ID NO: 330383 - DNA, 120 bp, Artificial Sequence
  ENSG00000136695_17 (sequence is synthesized)
tgtggcaaccatcagaagcttggaagaggcaaagaagaattcttccctagaggctttagagggataacggctctgctgaaaccttaatctcagacttccagcctcctgaacgaagaaaga

SEQ ID NO: 330384 - DNA, 120 bp, Artificial Sequence
  ENSG00000136695_18 (sequence is synthesized)
ataaatttcggctgttttaagccaccaaggataattggttacagcagctctaggaaactaatacagctgctaaaatgatccctgtctcctcgtgtttacattctgtgtgtgtcccctccc

SEQ ID NO: 330385 - DNA, 120 bp, Artificial Sequence
  ENSG00000136695_19 (sequence is synthesized)
acaatgtaccaaagttgtctttgtgaccaatagaatatggcagaagtgatggcatgccacttccaagattaggttataaaagacactgcagcttctacttgagccctctctctctgccac

SEQ ID NO: 330386 - DNA, 120 bp, Artificial Sequence
  ENSG00000136695_20 (sequence is synthesized)
ccaccgcccccaatctatcttggctcactcgctctgggggaagctagctgccatgctatgagcaggcctataaagagacttacgtggtaaaaaatgaagtctcctgcccacagccacatt

SEQ ID NO: 330387 - DNA, 120 bp, Artificial Sequence
  ENSG00000136695_21 (sequence is synthesized)
agtgaacctagaagcagagactctgtgagataatcgatgtttgttgttttaagttgctcagttttggtctaacttgttatgcagcaatagataaataatatgcagagaaagagaaacaaa

SEQ ID NO: 330388 - DNA, 120 bp, Artificial Sequence
  ENSG00000136695_22 (sequence is synthesized)
cgctgggaatcctgctcctcctcaggtcctggcagtttcagggcccctccctaggccttacttaaaaggctgaggcatccttggaggaacaggcagactccacagctcccgccaggagaa

SEQ ID NO: 330389 - DNA, 120 bp, Artificial Sequence
  ENSG00000136695_23 (sequence is synthesized)
cagcttggtggttgagagtccactgaggcactggcaaggaggtggccaggacagacaaggctgcctctatggacctcacagctccagcccagattcagctgaagtcctcaggcaacaggc

SEQ ID NO: 330390 - DNA, 120 bp, Artificial Sequence
  ENSG00000136695_24 (sequence is synthesized)
agcacagctcctaccccaggcctctcagggctgccaagaacatgagctccggatgctaggctgtgtttcagaccctgttcacactctctttgtccatgggcccagacacagtcttgtgct

SEQ ID NO: 330391 - DNA, 120 bp, Artificial Sequence
  ENSG00000136695_25 (sequence is synthesized)
gctccctctgcttttgggtcctccatccatcctctctgcctagataaatctctcatctttcaataccctgctaagatgtcacctcctccaagaagcttttactgagttgagacaccccca

SEQ ID NO: 330392 - DNA, 120 bp, Artificial Sequence
  ENSG00000136696_0 (sequence is synthesized)
cacgggttcctccccactctgtctttctcacctctccttcacttttcctagcctcctcaccaccatctgatctatcttgttctcttcacaaaaggctctgaagacatcatgaacccacaa

SEQ ID NO: 330393 - DNA, 120 bp, Artificial Sequence
  ENSG00000136696_1 (sequence is synthesized)
cgggaggcagcacccaaatcctatgctattcgtgattctcgacagatggtgtgggtcctgagtggaaattctttaatagcagctcctcttagccgcagcattaagcctgtcactcttcat

SEQ ID NO: 330394 - DNA, 120 bp, Artificial Sequence
  ENSG00000136696_2 (sequence is synthesized)
ttaatagcctgtagagacacagaattcagtgacaaggaaaagggtaatatggtttacctgggaatcaagggaaaagatctctgtctcttctgtgcagaaattcagggcaagcctactttg

SEQ ID NO: 330395 - DNA, 120 bp, Artificial Sequence
  ENSG00000136696_3 (sequence is synthesized)
cagcttaaggaaaaaaatatcatggacctgtatgtggagaagaaagcacagaagccctttctctttttccacaataaagaaggctccacttctgtctttcagtcagtctcttaccctggc

SEQ ID NO: 330396 - DNA, 120 bp, Artificial Sequence
  ENSG00000136696_4 (sequence is synthesized)
tgtggaataaatccagcctaggctgtgggtggctggttccaggatagagaatcaagctgtcagagtcatcttaacagatcattatgcgactgagttcactagcagttcagcccatccata

SEQ ID NO: 330397 - DNA, 120 bp, Artificial Sequence
  ENSG00000136696_5 (sequence is synthesized)
gcttacctcattcttactatccaaaagccacctcctcctccaaacatccatttctgtaccaagaccctcactcgaatgtcactatcccaagatgaaacctaaaaatcactttccattctt

SEQ ID NO: 330398 - DNA, 120 bp, Artificial Sequence
  ENSG00000136696_6 (sequence is synthesized)
tcttgatcttaccccaccatccactcagctgccatgcccagtttagtcaaccccccaaatgctgcttcatgcaaccttccattcctattccttttgccaacccatgatgtagagatgtgg

SEQ ID NO: 330399 - DNA, 120 bp, Artificial Sequence
  ENSG00000136696_7 (sequence is synthesized)
attcatgacattttgttcatacaacttcttcaataaaacattataatatgtgccccaaagataaagctgaagaatgagatgaatgtgaaattaaaggtttgcatgtctttctaatcctaa

SEQ ID NO: 330400 - DNA, 120 bp, Artificial Sequence
  ENSG00000136696_8 (sequence is synthesized)
cagcttaagcttcagggctcccaagataacatagggaaggacacttgctggaaactagttggaattcacacatgcataaacctggatgtgagagagagctgcttcatgggaacccttgac

SEQ ID NO: 330401 - DNA, 120 bp, Artificial Sequence
  ENSG00000136696_9 (sequence is synthesized)
ccaggaaggatgtagaaataaggggaggaagattcccatctctacaatctttgagtgggtttgctatcaatgaaatgctacaaatggaataagttgcagaaatttttctcttttcttggg

SEQ ID NO: 330402 - DNA, 120 bp, Artificial Sequence
  ENSG00000136696_10 (sequence is synthesized)
ttctggagagtttgtaaaacaaggacactatgtatttttaaagagttggtaaatcttacctgtaaagctagagaaggtcggagtctttttaggagtagatttggactacataacctgtaa

SEQ ID NO: 330403 - DNA, 120 bp, Artificial Sequence
  ENSG00000136696_11 (sequence is synthesized)
atgtgttttgtccagtccttagagtgttttttaaaaaattgtaaagtcaaggttttcatgaaaaatgggaagatcagacaacattgctcctgaattcccacagagcagcaagctactaga

SEQ ID NO: 330404 - DNA, 120 bp, Artificial Sequence
  ENSG00000136696_12 (sequence is synthesized)
gctcaatctgttatttcttttcctgatgtacaggggttaagtcctatggaagaaacagcagaattattcaaaattatttacataatgtgcaattattcactagagcatgaggagtgaaac

SEQ ID NO: 330405 - DNA, 120 bp, Artificial Sequence
  ENSG00000136696_13 (sequence is synthesized)
gctctgtttagtatgtataacttaaaaggaacacatacaattaaaagtaattgaaagacatttcttcttaaaaattctataatcttacactggtaaaataaactagtttttcccatgtaa

SEQ ID NO: 330406 - DNA, 120 bp, Artificial Sequence
  ENSG00000136697_0 (sequence is synthesized)
agttggagtctccagggatcagggttccaggaactcaggatctgcagtgaggaccagacaccactgattgcaggaatgtgttccctccccatggcaagatactacataattaaatatgca

SEQ ID NO: 330407 - DNA, 120 bp, Artificial Sequence
  ENSG00000136697_1 (sequence is synthesized)
gaccagaaggctctatacacaagagatggccagctgctggtgggagatcctgttgcagacaactgctgtgcagagaagatctgcatacttcctaacagaggcttggcccgcaccaaggtc

SEQ ID NO: 330408 - DNA, 120 bp, Artificial Sequence
  ENSG00000136697_2 (sequence is synthesized)
cccattttcctggggatccagggagggagccgctgcctggcatgtgtggagacagaagaggggccttccctacagctggaggatgtgaacattgaggaactgtacaaaggtggtgaagag

SEQ ID NO: 330409 - DNA, 120 bp, Artificial Sequence
  ENSG00000136697_3 (sequence is synthesized)
gccacacgcttcaccttcttccagagcagctcaggctccgccttcaggcttgaggctgctgcctggcctggctggttcctgtgtggcccggcagagccccagcagccagtacagctcacc

SEQ ID NO: 330410 - DNA, 120 bp, Artificial Sequence
  ENSG00000136697_4 (sequence is synthesized)
gggagacaggaaactgcgttttagccttgtgcccccaaaccaagctcatcctgctcagggtctatggtaggcagaataatgtcccccgaaatatgtccacatcctaatcccaagatctgt

SEQ ID NO: 330411 - DNA, 120 bp, Artificial Sequence
  ENSG00000136697_5 (sequence is synthesized)
gcatatgttaccatacatgtccaaagaggttttgcaaatgtgattatgttaaggatcttgaaatgaggagacaatcctgggttatccttgtgggctcagtttaatcacaagaaggaggca

SEQ ID NO: 330412 - DNA, 120 bp, Artificial Sequence
  ENSG00000136697_6 (sequence is synthesized)
ggaagggagagtcagagagagaatggaagataccatgcttctaattttgaagatggagtgaggggccttgagccaacaaatgcaggtgtttttagaaggtggaaaagccaagggaacgga

SEQ ID NO: 330413 - DNA, 120 bp, Artificial Sequence
  ENSG00000136697_7 (sequence is synthesized)
ttctcctctagagtctccggaaggaacacagctcttgacacatggatttcagctcagtgacacccatttcagacttctgacctccacaactataaaataataaacttgtgttattgtaaa

SEQ ID NO: 330414 - DNA, 120 bp, Artificial Sequence
  ENSG00000136697_8 (sequence is synthesized)
ggcagtgggactgggtttgagctgggcttatcctccaactgtgagggaggctacagcacactccaccccactctcagggctgggaattgttgtggctcagctatttgggggaatctgttt

SEQ ID NO: 330415 - DNA, 120 bp, Artificial Sequence
  ENSG00000136697_9 (sequence is synthesized)
tccagtttctcagaaccagcgcaagcacacacatcccaggctcacacccctggtggctggacttgctcccggatagcctcagtcagggagaggcagagctgcctggagcctgctgggctg

SEQ ID NO: 330416 - DNA, 120 bp, Artificial Sequence
  ENSG00000136697_10 (sequence is synthesized)
gtggaagccttggtggattctggcaggccaattatagacgaatggcctggggaacccgtgcagcccttggctgagtggttctaagccccagcacgtctgcctctggcttcacccagcctc

SEQ ID NO: 330417 - DNA, 120 bp, Artificial Sequence
  ENSG00000136697_11 (sequence is synthesized)
gctgtggcctctcctagcgaggggacatgactcctgcagaagtcctggctcaccgtccagtctgcatgcagggccaggccaggtgtgcccatgtccagttccttcctgcctgagccttta

SEQ ID NO: 330418 - DNA, 120 bp, Artificial Sequence
  ENSG00000136698_0 (sequence is synthesized)
atagagggaattgttcttcaggctcggaggggcctgcctgtcactgcgcccccgaccctagctcagggactgcagaactcaagataccatcccgtttctcctggctgaggaagggaaggg

SEQ ID NO: 330419 - DNA, 120 bp, Artificial Sequence
  ENSG00000136698_1 (sequence is synthesized)
aacatccacatcttctgtactcgtccattctgtgtccccggggcctggagtaaagacaccttcaaatgcagagactcttcagattcagctttcctggaaactgatcttcaatgcactaag

SEQ ID NO: 330420 - DNA, 120 bp, Artificial Sequence
  ENSG00000136698_2 (sequence is synthesized)
agaaggagactctcaaaccaaaaatgacctggaggcaccatgtcaggcttctgtttacggtcagtttggcattacagatcatcaatttgggaaacagctatcaaagagagaaacataacg

SEQ ID NO: 330421 - DNA, 120 bp, Artificial Sequence
  ENSG00000136698_3 (sequence is synthesized)
gcggtagagaggaagtcaccaaggttgccactcagaagcaccgacagtcaccgctcaactggacctccagtcatttcggagaggtgactgggagcgccgagggctgggggccggaggagc

SEQ ID NO: 330422 - DNA, 120 bp, Artificial Sequence
  ENSG00000136698_4 (sequence is synthesized)
ttctgcgtgtgcccggcccacttcaccggccgctactgcgagcatgaccagaggcgcagtgaatgcggcgccctggagcacggagcctggaccctccgcgcctgccacctctgcaggtgc

SEQ ID NO: 330423 - DNA, 120 bp, Artificial Sequence
  ENSG00000136698_5 (sequence is synthesized)
atcttcggggccctgcactgcctccccctccagacgcctgaccgctgtgacccgaaagacttcctggcctcccacgctcacgggccgagcgccgggggcgcgcccagcctgctactcttg

SEQ ID NO: 330424 - DNA, 120 bp, Artificial Sequence
  ENSG00000136698_6 (sequence is synthesized)
ctgccctgcgcactcctgcaccgcctcctgcgcccggatgcgcccgcgcaccctcggtccctggtcccttccgtcctccagcgggagcggcgcccctgcggaaggccgggacttgggcat

SEQ ID NO: 330425 - DNA, 120 bp, Artificial Sequence
  ENSG00000136698_7 (sequence is synthesized)
cgcctttaattttctatgttgtaaataatagatgtgtttagtttaccgtaagctgaagcactgggtgaatatttttattgggtaataaatattttcatgaaagcgcctttggctccagat

SEQ ID NO: 330426 - DNA, 120 bp, Artificial Sequence
  ENSG00000136698_8 (sequence is synthesized)
ctgacagttagcaccttcctttcacaacatctcccttaagggggaagcgtctgctgtggaacccaccgcaaggcaacgcaggcagagttcagcctgaagagcgccaggccagcctcctct

SEQ ID NO: 330427 - DNA, 120 bp, Artificial Sequence
  ENSG00000136698_9 (sequence is synthesized)
gtcttccgagcaccgcttctcaggtcgcttcccaatctgaggaggctgtcgtgtccacaaccagtccagggggatgtgcgccactagctgaggacgccaggcccggcgacaccacaaagg

SEQ ID NO: 330428 - DNA, 120 bp, Artificial Sequence
  ENSG00000136698_10 (sequence is synthesized)
cttggccatgcggaatgtgccctcaagagcacacacttcgggtagagggcacttgcattgagctcttcagctttttaaatccactgtagttcatgagcctgtgtgacataattactttta

SEQ ID NO: 330429 - DNA, 120 bp, Artificial Sequence
  ENSG00000136698_11 (sequence is synthesized)
cattttatattgtcaattagtttattggcattttcaatcttttcaactattggctatgaaaatatgaatttaacgtaacattcaaatgagtattaaagaaaaataaagtagaacttcatt

SEQ ID NO: 330430 - DNA, 120 bp, Artificial Sequence
  ENSG00000136699_0 (sequence is synthesized)
gggcagagacacggccgcagggtcctggggctcgctcgctagcctctgcccggcacacatggacttgagcatctggaagacggcgaggggggccacgttcagcttcagcaggtccaccag

SEQ ID NO: 330431 - DNA, 120 bp, Artificial Sequence
  ENSG00000136699_1 (sequence is synthesized)
gatcctggcggggacagacgcggggccggtgagccctctccgcccggcgcggccacctccctgaagacccgacaaggacgggggcgggggctcctcccgaccagcgggccgggcgtaccc

SEQ ID NO: 330432 - DNA, 120 bp, Artificial Sequence
  ENSG00000136699_2 (sequence is synthesized)
ggaaagcagaggtcggggggtgtctggctagcatgcggcccccacccgccccgctcacttgaacacgtcggggtcgatagcgccgcccgccgcctgcgccagctcgtacagctccatctc

SEQ ID NO: 330433 - DNA, 120 bp, Artificial Sequence
  ENSG00000136699_3 (sequence is synthesized)
cagctccatctcctcggtgctcagcaccttcttccgccgcagcgccagcttctgccgggccgcctccagccccgggggcgccgccgaccccggcccaggccctacgccctgcgccgccat

SEQ ID NO: 330434 - DNA, 120 bp, Artificial Sequence
  ENSG00000136699_4 (sequence is synthesized)
cccctagcggctgcgcccaccaccctctccctgcagcgtcaacgtctggcctcccgggctgccctggcgggaggggcgggagcgcggggacggggccgcctccgcggcgtcattgaagcc

SEQ ID NO: 330435 - DNA, 120 bp, Artificial Sequence
  ENSG00000136699_5 (sequence is synthesized)
gggccgcctccgcggcgtcattgaagcccaacagttattgggcgctcacggtgtgctgagcggcgctctaggagccgggagtggcatggcggaccgcaggggtccgctgcttggcgatct

SEQ ID NO: 330436 - DNA, 120 bp, Artificial Sequence
  ENSG00000136699_6 (sequence is synthesized)
gggcctccctgatagactgcattggtcgtgctcgcttaggtggcagcacccagcccagtgccaggcatacattgggcgctcggtaaatgcctctttcaagaaagcgtgcaattttctggt

SEQ ID NO: 330437 - DNA, 120 bp, Artificial Sequence
  ENSG00000136699_7 (sequence is synthesized)
ccgcaccggtgcaccactaggggtcgcttttcggggcgggcggggggaaggggggggcactaatcaacaatactgcttacgcgcacgcggattccttgctggggagaaagtaccttgggg

SEQ ID NO: 330438 - DNA, 120 bp, Artificial Sequence
  ENSG00000136699_8 (sequence is synthesized)
cgccggaggccgccacaacgcaggcgcattcagctaaggaccactccctcccccgcactcctgcctcgccatttctcttccccgcccggccggccttcgctttgcgcacgcgccttttga

SEQ ID NO: 330439 - DNA, 120 bp, Artificial Sequence
  ENSG00000136699_9 (sequence is synthesized)
ggtaacggcccaaagaggtggaagcgcttttcccgcccggccgcggggcgtggctctgcgcgcagcttgatgacgactttcggcgccgtggcggaatggcggcttccatctctgaggcga

SEQ ID NO: 330440 - DNA, 120 bp, Artificial Sequence
  ENSG00000136699_10 (sequence is synthesized)
gcgacgctatggatcccacagtggtttgctaagaaggccattttcaactctccactggaggctgctatggcgttccctcacctgcagcagcccagctttctactggctagcctgaaagct

SEQ ID NO: 330441 - DNA, 120 bp, Artificial Sequence
  ENSG00000136699_11 (sequence is synthesized)
gactctataaataagccctttgcacagcagtgccaagacttggttaaagtcattgaggactttccagcaaaggagctgcacaccatcttcccatggctggtagaaagcatttttggcagc

SEQ ID NO: 330442 - DNA, 120 bp, Artificial Sequence
  ENSG00000136699_12 (sequence is synthesized)
ctagatggtgtcctcgttggctggaacctccgctgcttacaggggcgcgtgaatcctgtggagtacagcatcgtgatggaatttctcgaccctggtggcccaatgatgaagttggtttat

SEQ ID NO: 330443 - DNA, 120 bp, Artificial Sequence
  ENSG00000136699_13 (sequence is synthesized)
aagcttcaagctgaagactataagttcgactttcctgtctcctacttgcctggtcctgtgaaggcgtccatccaggagtgcatcctccctgacagtcctctgtaccacaacaaggtccag

SEQ ID NO: 330444 - DNA, 120 bp, Artificial Sequence
  ENSG00000136699_14 (sequence is synthesized)
ttcacccctactgggggccttggtctgaacttggccctgaatccgttcgagtattacatattcttctttgccttgagcctcatcactcagaagccacttcctgtgtccctccacgtccgt

SEQ ID NO: 330445 - DNA, 120 bp, Artificial Sequence
  ENSG00000136699_15 (sequence is synthesized)
acttcagactgtgcctatttcatcctggtggacaggtacctgtcatggttcctgcccaccgaaggcagtgtgcccccaccactctcctccagcccaggggggaccagcccctcaccacct

SEQ ID NO: 330446 - DNA, 120 bp, Artificial Sequence
  ENSG00000136699_16 (sequence is synthesized)
cccaggacaccagccataccctttgcttcctatggcctccaccacactagcctcctaaagcgacacatctctcatcagacgtctgtgaatgcagaccccgcctcccacgagatctggagg

SEQ ID NO: 330447 - DNA, 120 bp, Artificial Sequence
  ENSG00000136699_17 (sequence is synthesized)
tcagaaactctgctccaggtttttgttgaaatgtggcttcatcactattccttggagatgtatcaaaaaatgcagtcccctcatgccaagctggaggttctgcactaccgactcagtgtc

SEQ ID NO: 330448 - DNA, 120 bp, Artificial Sequence
  ENSG00000136699_18 (sequence is synthesized)
tccagcgccctctacagccccgcccaacccagcctccaggccctccacgcctaccaagagtcgttcacgcctactgaggagcatgtgttggtggtgcgcctgctgctgaagcacctgcac

SEQ ID NO: 330449 - DNA, 120 bp, Artificial Sequence
  ENSG00000136699_19 (sequence is synthesized)
gcctttgccaacagcctgaagccagagcaggcctcaccctccgcccactcccacgccaccagccccctggaggagttcaaacgggctgctgtcccgaggttcgtccagcagaaactctac

SEQ ID NO: 330450 - DNA, 120 bp, Artificial Sequence
  ENSG00000136699_20 (sequence is synthesized)
gcgcctgacaagcaggctccgggcagcgactcccagccccggtgtgtgtcggagaaatgggcaccctttgtccaggagaacctgctgatgtacaccaagttgtttgtgggctttctgaac

SEQ ID NO: 330451 - DNA, 120 bp, Artificial Sequence
  ENSG00000136699_21 (sequence is synthesized)
cgcgcgctccgcacagacctggtcagccccaagcacgcgctcatggtgttccgagtggccaaagtctttgcccagcccaacctggctgagatgattcagaaaggtgagcagctattcctg

SEQ ID NO: 330452 - DNA, 120 bp, Artificial Sequence
  ENSG00000136699_22 (sequence is synthesized)
gagccagagctggtcatcccccaccgccagcaccgactcttcacggcccccacattcactgggagcttcctgtcaccctggccaccagcggtcactgatgcctccttcaaggtgaagagc

SEQ ID NO: 330453 - DNA, 120 bp, Artificial Sequence
  ENSG00000136699_23 (sequence is synthesized)
cacgtctacagcctggagggccaggactgcaagtacaccccgatgtttgggcccgaggcccgcaccctggtcctgcgcctcgctcagctcatcacacaggccaaacacacagccaagtcc

SEQ ID NO: 330454 - DNA, 120 bp, Artificial Sequence
  ENSG00000136699_24 (sequence is synthesized)
atctccgaccagtgtgcggagagcccggctggccactccttcctctcatggctgggctttagctccatggacaccaatggctcctacacagccaacgacctggacgagatggggcaagac

SEQ ID NO: 330455 - DNA, 120 bp, Artificial Sequence
  ENSG00000136699_25 (sequence is synthesized)
agtgtccggaagacagatgaatacctggagaaggccctggagtacctgcgccagatattccggctcagcgaagcgcagctcaggcagttcacactcgccttgggcaccacccaggatgag

SEQ ID NO: 330456 - DNA, 120 bp, Artificial Sequence
  ENSG00000136699_26 (sequence is synthesized)
aatggaaaaaagcaactccccgactgcatcgtgggtgaggacggactcatccttacgcccctggggcggtaccagatcatcaatgggctgcgaaggtttgaaattgagtaccagggggac

SEQ ID NO: 330457 - DNA, 120 bp, Artificial Sequence
  ENSG00000136699_27 (sequence is synthesized)
ccggagctgcagcccatccggagctatgagatcgccagcttggtccgcacactctttaggctgtcgtctgccatcaaccacagatttgcaggacagatggcggctctgtgttcccgggat

SEQ ID NO: 330458 - DNA, 120 bp, Artificial Sequence
  ENSG00000136699_28 (sequence is synthesized)
gacttcctcggcagcttctgtcgctaccacctcacagaacctgggctggccagcaggcacctgctgagccctgtggggcggaggcaggtggccggccacacccgcggccccaggctcagc

SEQ ID NO: 330459 - DNA, 120 bp, Artificial Sequence
  ENSG00000136699_29 (sequence is synthesized)
ctgcgcttcctgggcagttaccggacgctggtctcgctgctgctggccttcttcgtggcctctctgttctgcgtcgggcccctcccatgcacgctgctgctcaccctgggctatgtcctc

SEQ ID NO: 330460 - DNA, 120 bp, Artificial Sequence
  ENSG00000136699_30 (sequence is synthesized)
tacgcctctgccatgacactgctgaccgagcgggggaagctgcaccagccctgaaggtgtcagctgccttcagagcaggctggagggatttgccacacagccccacccttgggctgagag

SEQ ID NO: 330461 - DNA, 120 bp, Artificial Sequence
  ENSG00000136699_31 (sequence is synthesized)
gacctgggaagcccctccaggagggaacacggtcatcctcgggcttctggagcggggttcctgcagccgcagaggcatctggaggaaacgcaaccaagaaaggaaggcaggtgggcccca

SEQ ID NO: 330462 - DNA, 120 bp, Artificial Sequence
  ENSG00000136699_32 (sequence is synthesized)
gcaaaggagtagctgccagggctcaacagctacgctctgtgacagcgcagagctcagcggcggcctttccctccctccgccaaggactcacggccaagccagctctcggggccttttttc

SEQ ID NO: 330463 - DNA, 120 bp, Artificial Sequence
  ENSG00000136699_33 (sequence is synthesized)
cactgcccatttggctactctgctgcaccaagcttgggagccagcctgccaacagccacctgggcctggcctccccactggctggccttgaggttggcagagtgggttgtggcgcttcct

SEQ ID NO: 330464 - DNA, 120 bp, Artificial Sequence
  ENSG00000136699_34 (sequence is synthesized)
ctctctgtgtgggaccaggacagtggcttaagtctccactccaggaaagaatcaaagtttctagagttgtgagaaaaccagagagtggctgtcctgattcttcactgtgaggggcgttct

SEQ ID NO: 330465 - DNA, 120 bp, Artificial Sequence
  ENSG00000136699_35 (sequence is synthesized)
tcatgttctcccagctgttccaagactgggccgtagaattccatgtttcaggagcctaagaccctcccagagcccaggggcttcaccgcagaccccaagccattgagcacatcacccaaa

SEQ ID NO: 330466 - DNA, 120 bp, Artificial Sequence
  ENSG00000136699_36 (sequence is synthesized)
gcagtggccaacatcgcggacccctgtgccttgtcacagatgggtgctggtcctcaggcgttggggacactgctgggtcgatggggtcggattctgccagtttctgctctgcagccaaag

SEQ ID NO: 330467 - DNA, 120 bp, Artificial Sequence
  ENSG00000136699_37 (sequence is synthesized)
atggtcagaagcattgtcacttcagtaacatcaagtgctcaaagacatggcaaccgttcagtggtacttaagtattcaaaatatacaactacagattctctgacagaaaccagcacgggg

SEQ ID NO: 330468 - DNA, 120 bp, Artificial Sequence
  ENSG00000136699_38 (sequence is synthesized)
tcttcaccttcattcaccccacaggcgacatgcgagggagaacagcatctcagtggtgatttccaaaccaagcctttgttttcggtgtggggttttgggggtttgctttaatgtttttga

SEQ ID NO: 330469 - DNA, 120 bp, Artificial Sequence
  ENSG00000136699_39 (sequence is synthesized)
aattgtaaatgttgggctttgtattttgatgtaaactgagcataatggcattttagggcctgtgaccaaaaatgaagcttgtaacgaccatggatctgaataaacatgtccttgcttctg

SEQ ID NO: 330470 - DNA, 120 bp, Artificial Sequence
  ENSG00000136699_40 (sequence is synthesized)
gccaagctggaggttctgcactaccgactcagtgtctccagcgccctctacagccccgcccaacccagcctccaggccctccacgcctaccaaatggagtctcactccgttgcccaggct

SEQ ID NO: 330471 - DNA, 120 bp, Artificial Sequence
  ENSG00000136699_41 (sequence is synthesized)
ttgggaaatttcaaatgtagaagatcatcctttagtctttaaaagtcttctggcagaagccactcctcctgacgctcagcagtctggctgtgcattgctcttggggctgcctgggtggca

SEQ ID NO: 330472 - DNA, 120 bp, Artificial Sequence
  ENSG00000136699_42 (sequence is synthesized)
agatgtggctgagctacctgcagccgtggcggtacgcgcctgacaagcaggctccgggcagcgactcccagccccgggcaccctttgtccaggagaacctgctgatgtacaccaagttgt

SEQ ID NO: 330473 - DNA, 120 bp, Artificial Sequence
  ENSG00000136699_43 (sequence is synthesized)
ataccacaagctggtcacagttcagaccaagcagtgcaaggcacatctgggtgccaggcacagtggtgccccatggggtggccccactcctggcctggctcatgcctcccgtgggggcag

SEQ ID NO: 330474 - DNA, 120 bp, Artificial Sequence
  ENSG00000136699_44 (sequence is synthesized)
cagagcaactggctcagggcgggatgtggtcagacctggaggcggagtgctatgggtgccacgctccttcccaggccctcacccctccttctccacccaggagtcgttcacgcctactga

SEQ ID NO: 330475 - DNA, 120 bp, Artificial Sequence
  ENSG00000136699_45 (sequence is synthesized)
atggatcccacaggtgagtggcgcgggatgcgcgcctgagacggtccggcgccctgggggcttccccgagcccctgcggaggccatctccgttcctccgcgagccccaggactcgggccg

SEQ ID NO: 330476 - DNA, 120 bp, Artificial Sequence
  ENSG00000136699_46 (sequence is synthesized)
gccagccggctctgcccaggcagggcaggctggggagtggagggccccggttgagtcttctgccacccctctgggccatgcctttgtgccaccttcccgcgcggctcgtacactctgtcc

SEQ ID NO: 330477 - DNA, 120 bp, Artificial Sequence
  ENSG00000136699_47 (sequence is synthesized)
gaagtgctgtgatccagcaggaaggagggaggctgggtatagatttgacgccatatctccttcccccgttttagtaaagtctaattttttcctgataacgaaggcagtgtttcttgggaa

SEQ ID NO: 330478 - DNA, 120 bp, Artificial Sequence
  ENSG00000136699_48 (sequence is synthesized)
ctctcctgcgccctctggaggaagtgagaagagtcagtcccacccagctgccgcctggtatctgggctccaggccaccgagtatttggcccccagccacggagcccttagcacacacctc

SEQ ID NO: 330479 - DNA, 120 bp, Artificial Sequence
  ENSG00000136699_49 (sequence is synthesized)
aggtgcccagtgctctcccccggcggagccaaccctcactgatgggagccctggggtcatctgtgagcagggcctccttactgggcaagcagcaggtgaccctccccatcccctgcaggg

SEQ ID NO: 330480 - DNA, 85 bp, Artificial Sequence
  ENSG00000136699_50 (sequence is synthesized)
ctgaggcaccacacctgggttccatgtgctttctgcacacacttgggaggcaggtgggagaccctggatccagagcttgtgggtg

SEQ ID NO: 330481 - DNA, 120 bp, Artificial Sequence
  ENSG00000136699_51 (sequence is synthesized)
ggaggcaggtgggagaccctggatccagagcttgtgggtgatgctggctttctcctgccctggggatcaagacaggcaccagcgcccaagggcacagcctgtgccacccgctgcggattt

SEQ ID NO: 330482 - DNA, 120 bp, Artificial Sequence
  ENSG00000136699_52 (sequence is synthesized)
ttgaggtgggaggtcctttggggcagataaaggaggagagcaagtgttatcacagaggccttggcaaggagggggtcttggagggccacattgttctttctgtttgagtttccaaagcca

SEQ ID NO: 330483 - DNA, 120 bp, Artificial Sequence
  ENSG00000136699_53 (sequence is synthesized)
gccctcaggaaagccctgccctgtcccacctgtctggtgcagggcaggttcctacccttacctgaccagggagtactctgccccctgggctgggaaaagcccaccctggcttctggaggg

SEQ ID NO: 330484 - DNA, 120 bp, Artificial Sequence
  ENSG00000136699_54 (sequence is synthesized)
gccaggcccttagctgggggtggctggtctttaagagggacccacacgcccagagtgggccccggcaaagggtgctgtggagactcctgggacacgtctgtgtggtgaggtctgaaaccg

SEQ ID NO: 330485 - DNA, 120 bp, Artificial Sequence
  ENSG00000136699_55 (sequence is synthesized)
gctggatcctgcctgccctgcagccaccaggcactgggtgggggatcgcaggtgtgcccacagagcgggccggcacggtccaagctgcggccccgtgaccccgctgtttctccctggcaa

SEQ ID NO: 330486 - DNA, 120 bp, Artificial Sequence
  ENSG00000136699_56 (sequence is synthesized)
ctcgtgttggccgcttcaggaggtgagcctggtctctgccttgcattcatcctggctgggttgggcgttggtttctgtcgatcctcctgttgtttacctcctgcagacactgctaggggc

SEQ ID NO: 330487 - DNA, 120 bp, Artificial Sequence
  ENSG00000136699_57 (sequence is synthesized)
tctgtgagccagcagctcccccatccgccctccccatgtcagccacctactgtgtgggagatgctgccaggcagggcctcaggaggacacccctgggtcatggctccccagacacctcag

SEQ ID NO: 330488 - DNA, 120 bp, Artificial Sequence
  ENSG00000136709_0 (sequence is synthesized)
agagcgtgcgttcggtggcccataggggaagatggcggctgctcctttggaggagcgggattgagaggatcggggtggggagaccaaacaagagagacatttctggctctgaaggcgaac

SEQ ID NO: 330489 - DNA, 120 bp, Artificial Sequence
  ENSG00000136709_1 (sequence is synthesized)
gcttcgctggccatttaggagctctgctcaaagccagacgtatcctagaaggaaaacatcaccatggctacagaaattggttctcctcctcgttttttccatatgccaaggttccagcac

SEQ ID NO: 330490 - DNA, 120 bp, Artificial Sequence
  ENSG00000136709_2 (sequence is synthesized)
caggcacctcgacagctgttttataagcgacctgattttgcacaacagcaagcaatgcaacagcttacttttgatggaaaacgaatgagaaaagctgtgaaccgaaaaaccatagactac

SEQ ID NO: 330491 - DNA, 120 bp, Artificial Sequence
  ENSG00000136709_3 (sequence is synthesized)
aatccatctgtaattaagtatttggagaacagaatatggcaaagagaccagagagatatgcgggcaattcagcctgatgcaggttattacaatgatctggtcccacctataggaatgttg

SEQ ID NO: 330492 - DNA, 120 bp, Artificial Sequence
  ENSG00000136709_4 (sequence is synthesized)
aataatcctatgaatgcagtaacaacaaaatttgttcggacatcaacaaataaagtaaagtgtcctgtatttgttgttaggtggactccagaaggaagacgcttggtcactggagcttct

SEQ ID NO: 330493 - DNA, 120 bp, Artificial Sequence
  ENSG00000136709_5 (sequence is synthesized)
agtggggagtttaccctgtggaatggactcactttcaattttgaaacaatattacaggctcacgacagcccagtgagggccatgacgtggtcacataatgacatgtggatgttgacagca

SEQ ID NO: 330494 - DNA, 120 bp, Artificial Sequence
  ENSG00000136709_6 (sequence is synthesized)
gaccacggaggatatgtgaaatattggcagtcgaacatgaacaacgtcaagatgttccaggcacataaggaggcgattagagaggccagtttctcacccacggataataaatttgctaca

SEQ ID NO: 330495 - DNA, 120 bp, Artificial Sequence
  ENSG00000136709_7 (sequence is synthesized)
tgctctgatgacggcactgttagaatctgggactttcttcgttgccatgaggaaagaattctccgagggcatggtgctgatgtgaaatgtgtagactggcatccaaccaaagggttagtt

SEQ ID NO: 330496 - DNA, 120 bp, Artificial Sequence
  ENSG00000136709_8 (sequence is synthesized)
gtttcaggaagtaaagatagtcaacagccaatcaagttctgggatcccaagactgggcagagtcttgcaacacttcatgcccataaaaacacagtaatggaagtgaaattaaacctcaat

SEQ ID NO: 330497 - DNA, 120 bp, Artificial Sequence
  ENSG00000136709_9 (sequence is synthesized)
ggcaattggctactcacagcatcacgtgatcatctctgtaaactttttgatatcagaaacctaaaagaagagcttcaagtcttccgaggtcataagaaagaagccacagctgtggcctgg

SEQ ID NO: 330498 - DNA, 120 bp, Artificial Sequence
  ENSG00000136709_10 (sequence is synthesized)
catcctgttcatgaaggactttttgccagtggagggtctgatggttctttgttattctggcatgttggggtagagaaggaagtgggtgggatggagatggctcacgaagggatgatctgg

SEQ ID NO: 330499 - DNA, 120 bp, Artificial Sequence
  ENSG00000136709_11 (sequence is synthesized)
agtctggcttggcatcctcttgggcatattctctgctcaggctcaaatgaccatactagcaaattctggactcgaaaccgaccaggtgataaaatgcgagatcgatataatctaaacctt

SEQ ID NO: 330500 - DNA, 120 bp, Artificial Sequence
  ENSG00000136709_12 (sequence is synthesized)
ttacctggaatgtctgaagatggagtagaatatgatgacctcgaacctaatagcctggcagtaattccaggaatgggaataccagaacaactaaaattagctatggaacaagaacagatg

SEQ ID NO: 330501 - DNA, 120 bp, Artificial Sequence
  ENSG00000136709_13 (sequence is synthesized)
gggaaagatgaatcaaatgaaattgaaatgacaattccaggtttagattggggaatggaggaagtgatgcaaaaggatcagaaaaaagtacctcagaagaaagttccttatgcaaaaccc

SEQ ID NO: 330502 - DNA, 120 bp, Artificial Sequence
  ENSG00000136709_14 (sequence is synthesized)
attcctgctcagttccagcaggcttggatgcaaaataaagttccaattcctgctccaaatgaggtgctgaatgacagaaaagaagacattaaattggaagagaagaaaaaaacacaagca

SEQ ID NO: 330503 - DNA, 120 bp, Artificial Sequence
  ENSG00000136709_15 (sequence is synthesized)
gaaattgagcaagaaatggctacattacaatatactaacccacaacttctggagcaacttaaaattgaaagacttgcacagaaacaagttgagcaaattcagcctcctccctcatctggc

SEQ ID NO: 330504 - DNA, 120 bp, Artificial Sequence
  ENSG00000136709_16 (sequence is synthesized)
acccctctcctcggaccccagccttttccaggacaaggtccaatgtctcagattcctcaaggttttcaacagccccatccatctcagcagatgccaatgaacatggctcaaatggggcct

SEQ ID NO: 330505 - DNA, 120 bp, Artificial Sequence
  ENSG00000136709_17 (sequence is synthesized)
ccaggtccacagggacagtttaggcctcctggaccccagggacaaatgggaccacaaggtcctccactgcatcagggaggtggggggccacaaggattcatgggaccacaggggccccag

SEQ ID NO: 330506 - DNA, 120 bp, Artificial Sequence
  ENSG00000136709_18 (sequence is synthesized)
ggcccgccccaggggttgccacggcctcaggacatgcatgggccccaaggaatgcagaggcatcctggacctcatggccctttgggacctcaagggccacctggaccacaaggtagttct

SEQ ID NO: 330507 - DNA, 120 bp, Artificial Sequence
  ENSG00000136709_19 (sequence is synthesized)
ggtcctcaaggtcatatgggtcctcagggtccacctggcccacagggtcacataggcccccaaggcccgcctggccctcagggtcacttgggcccacaggggcctccgggtactcaaggt

SEQ ID NO: 330508 - DNA, 120 bp, Artificial Sequence
  ENSG00000136709_20 (sequence is synthesized)
atgcagggaccacctggtcccagaggaatgcaagggcctcctcatcctcatgggatccaaggcggaccagggtctcaagggatccaaggtcctgtgtctcagggacctctgatgggattg

SEQ ID NO: 330509 - DNA, 120 bp, Artificial Sequence
  ENSG00000136709_21 (sequence is synthesized)
aatccaagaggaatgcaggggcctccaggcccccgggagaaccagggtcctgctccccaagggatgattatgggccacccgcctcaagagatgagaggacctcaccctccaggtggacta

SEQ ID NO: 330510 - DNA, 120 bp, Artificial Sequence
  ENSG00000136709_22 (sequence is synthesized)
ctgggacacggccctcaggaaatgagaggtcctcaggagatccgaggcatgcaggggcctccaccccaaggatcaatgctgggacctccccaggaattgcgagggcctccaggctcacaa

SEQ ID NO: 330511 - DNA, 120 bp, Artificial Sequence
  ENSG00000136709_23 (sequence is synthesized)
agtcagcaggggccgccccagggctctttaggacctccaccccagggtggcatgcaaggaccccccggacctcagggacagcagaacccagcaagagggccacatccatctcaagggcca

SEQ ID NO: 330512 - DNA, 120 bp, Artificial Sequence
  ENSG00000136709_24 (sequence is synthesized)
ataccattccagcaacagaaaacgcctctgctaggtgatgggccccgggcccccttcaaccaggaaggacagagcacaggccccccacccctgataccaggcctagggcagcagggagca

SEQ ID NO: 330513 - DNA, 120 bp, Artificial Sequence
  ENSG00000136709_25 (sequence is synthesized)
caaggtcgcattccccctctgaaccccggacaaggacctggccccaacaaaggtgactcccgcggccctccaaaccatcacatgggcccgatgtcagagaggcggcatgagcagagcggc

SEQ ID NO: 330514 - DNA, 120 bp, Artificial Sequence
  ENSG00000136709_26 (sequence is synthesized)
gggcctgagcatgggcccgagagggggcctttccggggtggccaggactgcaggggtccccctgataggcgtggccctcacccagacttccccgatgacttcagcagaccagatgacttc

SEQ ID NO: 330515 - DNA, 120 bp, Artificial Sequence
  ENSG00000136709_27 (sequence is synthesized)
caccctgacaagcgctttggccaccggttacgtgaatttgaggggcgaggaggacctttaccgcaagaagagaagtggaggcgagggggccctgggcctccgtttccccctgatcacagg

SEQ ID NO: 330516 - DNA, 120 bp, Artificial Sequence
  ENSG00000136709_28 (sequence is synthesized)
gaattcagcgagggggatggccggggtgcagcccgaggccctccgggggcatgggaaggccgcaggcccggagatgaacgtttcccccgggatcccgaggacccacgttttcgagggcgc

SEQ ID NO: 330517 - DNA, 120 bp, Artificial Sequence
  ENSG00000136709_29 (sequence is synthesized)
agagaagaaagtttcagaagaggagccccgccgaggcatgagggccgtgctccccccagaggaagggatggttttcctggtcctgaagactttggtccagaggagaattttgatgcttct

SEQ ID NO: 330518 - DNA, 120 bp, Artificial Sequence
  ENSG00000136709_30 (sequence is synthesized)
gaggaagcggcccgaggacgagatctcagaggtcgaggtcggggtaccccacgaggaggaaggaagggtttacttcccactcctgacgagttccctcgctttgaaggagggcggaagcca

SEQ ID NO: 330519 - DNA, 120 bp, Artificial Sequence
  ENSG00000136709_31 (sequence is synthesized)
gattcctgggatggaaacagagagcctgggccaggtcatgaacattttcgtgatactccccgccctgatcatccccctcacgacggtcattccccagccagcagagaacgctcctcttct

SEQ ID NO: 330520 - DNA, 120 bp, Artificial Sequence
  ENSG00000136709_32 (sequence is synthesized)
ctccaaggcatggacatggcatccctacctccccgaaagcgcccctggcatgatggcccaggcacttctgagcacagagagatggaggccccaggaggcccttctgaagaccgaggaggc

SEQ ID NO: 330521 - DNA, 120 bp, Artificial Sequence
  ENSG00000136709_33 (sequence is synthesized)
aaaggccgagggggcccaggacctgctcagagagtgcccaaatctgggcgttccagctccttagacggagagcaccacgatggataccacagagatgaaccttttgggggccctccaggc

SEQ ID NO: 330522 - DNA, 120 bp, Artificial Sequence
  ENSG00000136709_34 (sequence is synthesized)
agtggcaccccttctcgagggggccggagtggcagtaactggggtagagggagtaacatgaactctggcccgccgaggcgaggagcttcacggggtggtggaaggggtcggtagaagctg

SEQ ID NO: 330523 - DNA, 120 bp, Artificial Sequence
  ENSG00000136709_35 (sequence is synthesized)
gaactgagtaccctgaggcctctctggacagtatgtaagaacttcttgtggactcaccaagagaaacaaaaggaagcctgcaccattgtagccctgaactcttttctgggcacctgaatc

SEQ ID NO: 330524 - DNA, 120 bp, Artificial Sequence
  ENSG00000136709_36 (sequence is synthesized)
ccaggaaccctcaatgaggtcttcaagatgaagagactgctgccagctaccagcctggctggccctgtcctgtccaccctcattgccccaactcccatgttgttttgtgaagataaaagc

SEQ ID NO: 330525 - DNA, 120 bp, Artificial Sequence
  ENSG00000136709_37 (sequence is synthesized)
tgggatctttttcttttttttaagtctcacaagacatggggcatctccacaaatttaagttcctgtccatttggaaatttgtttctatgtgtacagtttgtcagagaaaaacaaagtttt

SEQ ID NO: 330526 - DNA, 120 bp, Artificial Sequence
  ENSG00000136709_38 (sequence is synthesized)
tgtatgaatacagaatgtgatttacgcaagaattgacagaaaactagttgtgaagtgcttgccttaaggaaacctttggtttccatcgcatcccatctgccaaggaatgcacggttgttg

SEQ ID NO: 330527 - DNA, 120 bp, Artificial Sequence
  ENSG00000136709_39 (sequence is synthesized)
tgagcatattaaccactaggttatctaaattaatctcagctgtgaactttgtgtttttcaacacattctgtcacaccatttttgtgacagaaaaatacttgaaaattattctaatgtagt

SEQ ID NO: 330528 - DNA, 120 bp, Artificial Sequence
  ENSG00000136709_40 (sequence is synthesized)
ttgtagtaggttcaaatttttattcagacatgctctgacagatggaaaattgtactctgaagagaaaatgcaatcttctggatgtccaacgagggagcttccccttggaagcatctccta

SEQ ID NO: 330529 - DNA, 120 bp, Artificial Sequence
  ENSG00000136709_41 (sequence is synthesized)
agaatcacagtttaggtttgaatcgccttgttatgatgaggagaggaacttgatgttagtcagaaataaagtcacatgccctttagataacttgaaatcacacatggagttgataaggaa

SEQ ID NO: 330530 - DNA, 120 bp, Artificial Sequence
  ENSG00000136709_42 (sequence is synthesized)
tggaccaaaataggtcctcaaacaattttgcaacacttaattaagttttcctctcttcctcttccatactatgtggaaataccagtgttacggcagggcgtacttctaactcacagtaag

SEQ ID NO: 330531 - DNA, 120 bp, Artificial Sequence
  ENSG00000136709_43 (sequence is synthesized)
ccagatagatcttgtccatggcaaattccttgtttaaaataaacataccatttagcccagtttggattggaagccaaaaattcagtttgttatataccccatgatactttctatactgac

SEQ ID NO: 330532 - DNA, 120 bp, Artificial Sequence
  ENSG00000136709_44 (sequence is synthesized)
ctttattttggttttacatggaagcttttattaaaaggactgtcctatggccaccttaacatttcattacattggcagcttcagttttggcatcagtcaaatttatttggcaaatttagt

SEQ ID NO: 330533 - DNA, 120 bp, Artificial Sequence
  ENSG00000136709_45 (sequence is synthesized)
tttgacagagtcttgctctgtcacccagccaggagtgcagtggtgcaatcacggctcacttcagctttgaccctgcctcagcctccctagtagctaggactacaggcatatgccaccatg

SEQ ID NO: 330534 - DNA, 120 bp, Artificial Sequence
  ENSG00000136709_46 (sequence is synthesized)
agtagctaggactacaggcatatgccaccatgcccagctaattttttgtgtgtgtgttttttgtagagatggagtttcaccactttgtctatgctggtttcaaactcctgggctcaagcg

SEQ ID NO: 330535 - DNA, 120 bp, Artificial Sequence
  ENSG00000136709_47 (sequence is synthesized)
gtccacctgctgtggcctcccaaagtgctgggattgcagatctgagccacagtacctggccgctggtgctggaagtttcaatggttgcttagaaaaggcatactgatatagtttaacagg

SEQ ID NO: 330536 - DNA, 120 bp, Artificial Sequence
  ENSG00000136709_48 (sequence is synthesized)
atatgaaaatttaactggttctctatgaatgtaaaaaacagcaaaagctaattgatttctgtggagtgagaaaatgtcagccatatacactgcttttcagtgttagaatctagagactat

SEQ ID NO: 330537 - DNA, 120 bp, Artificial Sequence
  ENSG00000136709_49 (sequence is synthesized)
tttttttttaactttgaaattacagcttatttaatcagcgctccaccataaacatgctattaggaggctcaagattgctttaggttatgggtatttcttcactcacccccaactggtata

SEQ ID NO: 330538 - DNA, 120 bp, Artificial Sequence
  ENSG00000136709_50 (sequence is synthesized)
gcttaaagagagagaaactgtaatcaaatttcatgaagctaaaaccggatccagagaccaaacccatatcaagattagactttttttccctgagattctagtggaaaaattttcattatt

SEQ ID NO: 330539 - DNA, 120 bp, Artificial Sequence
  ENSG00000136709_51 (sequence is synthesized)
ttgggctttaactttagaaacatagtatctcagtaagcagataaccagatcacatttaaaaattttcattttaccttgaagctctactggacttgacagatcacattttgagagtgaatt

SEQ ID NO: 330540 - DNA, 120 bp, Artificial Sequence
  ENSG00000136709_52 (sequence is synthesized)
catttaaacaataaacctctacattatacttattaaatatatatggcatttaaaaacatcactgtcagcatacatactagatgttgtgatttgaagcttataaaaagtagattttcaatg

SEQ ID NO: 330541 - DNA, 120 bp, Artificial Sequence
  ENSG00000136709_53 (sequence is synthesized)
aagtagattttcaatgatgtttgatttgagaaaaaatttttgagacaaggtctcgctgttgcctaggctgtggtgcagtggtgtgatcacagttcactgcagcctcaacctcctgggctc

SEQ ID NO: 330542 - DNA, 120 bp, Artificial Sequence
  ENSG00000136709_54 (sequence is synthesized)
cacctcagccccaccccaagtagctgggatcacagttgtgtgccaccatatctggcaaattttttgaagattttctgtggcgatggggtttaactgtgttgcccaggctggtcttgaact

SEQ ID NO: 330543 - DNA, 120 bp, Artificial Sequence
  ENSG00000136709_55 (sequence is synthesized)
gctgggattacaggtgtgagccaccagctgagaaatgttgaatttttaagtttttatttaagaaataaacattgtaaaacatcattataaaacccccaactattgcaagttctagagaaa

SEQ ID NO: 330544 - DNA, 120 bp, Artificial Sequence
  ENSG00000136709_56 (sequence is synthesized)
ttataaaacccccaactattgcaagttctagagaaatttaaaactagaacagaaatttaggggactagaaagagcagccaatggcacaagtctttacaattaattaaaaaaataaatcat

SEQ ID NO: 330545 - DNA, 120 bp, Artificial Sequence
  ENSG00000136709_57 (sequence is synthesized)
tctgaagatactgcatttgctctctcacaagcagcctcctgaggtaggtaaccttgtttactgatggggaacaaggcagtgttctttaccaaatctcagggcgggtagcctgcaagccta

SEQ ID NO: 330546 - DNA, 120 bp, Artificial Sequence
  ENSG00000136709_58 (sequence is synthesized)
cagtgtggatgttggccacttgtgtcacttcttgggacggggcttagggacctgacttacttaggaacataaattttggggttggaggaagcagcagtgctctactgcggcacgacagac

SEQ ID NO: 330547 - DNA, 120 bp, Artificial Sequence
  ENSG00000136709_59 (sequence is synthesized)
accctgttaaggcaacactgggatccagctcaggaaaagcattactttcaaattgtgcaagccaatgcacagaaaagtggtcctcaaacttggggaacgtagaatcacttggggagcttt

SEQ ID NO: 330548 - DNA, 120 bp, Artificial Sequence
  ENSG00000136709_60 (sequence is synthesized)
aaaaaggtcctgatgtctgggacctacttcccaggttctgactgcattgatctgaggtgtggctcttcaagtaactgatgtgcagtcaagcgcgaggaccactggcacacaatgtttaaa

SEQ ID NO: 330549 - DNA, 120 bp, Artificial Sequence
  ENSG00000136709_61 (sequence is synthesized)
ttctaaatatattttacttcctagtgtattgctactgacaaaacgtagttttctggactcatcagaatgttaggctcataccttctggcaataaattaaggtagttaaaagtaactgctg

SEQ ID NO: 330550 - DNA, 120 bp, Artificial Sequence
  ENSG00000136709_62 (sequence is synthesized)
aacctaaaatgaaggcagcagcaattagatataaaaaaatcttaagatcagcctgcaaattgtaaactagtttacaaagcaggctatacaatgaggaataattcgagcttgtagaaatcc

SEQ ID NO: 330551 - DNA, 120 bp, Artificial Sequence
  ENSG00000136709_63 (sequence is synthesized)
atggtttccaccagatacaggtattccggatctagaattatctttctatttgcaggatttccgaagagaccgttaagcatctacgcgccccttcctggatcccatgcttcttggggcagg

SEQ ID NO: 330552 - DNA, 120 bp, Artificial Sequence
  ENSG00000136709_64 (sequence is synthesized)
aaatttcttttggtccgtcgctttcgtcgtgaaatacacaactaattttcctttcatgttataaggcaccatatttatgattttgttaactgaagaaaaaacccgagataaaccatctta

SEQ ID NO: 330553 - DNA, 120 bp, Artificial Sequence
  ENSG00000136709_65 (sequence is synthesized)
agtacttttaaaagtccagtggctgaattcggtgtttaatctgatacccttctggattcgctgacactggagagaataatttccaagtcttagtatagccaaaacaaaaaactaccgtcg

SEQ ID NO: 330554 - DNA, 120 bp, Artificial Sequence
  ENSG00000136709_66 (sequence is synthesized)
ctaagctacatctaccactggattttaaaatgacaaaacagcctgagaaaaatcacaagagcagctaactcgaagaaaaatcctttttctttactcagccgaacctaagaccacagttac

SEQ ID NO: 330555 - DNA, 120 bp, Artificial Sequence
  ENSG00000136709_67 (sequence is synthesized)
ttcgaaagcaacttctaataaccgtctcacatcctgtcaccagttcaatgacaaaatctcagttttcagagcgtgtgccaagtccagcacaaaaagctgacatcgaggagctcccaacgc

SEQ ID NO: 330556 - DNA, 120 bp, Artificial Sequence
  ENSG00000136709_68 (sequence is synthesized)
tgctgtcgcctccgctggcagcagccgctcccggattagactcgcaggctgttagggcagggccttcgccacgggcttccgcacagcggcgtgcagtcctcagctcggccggcgcggtct

SEQ ID NO: 330557 - DNA, 120 bp, Artificial Sequence
  ENSG00000136709_69 (sequence is synthesized)
ccgacggcgctggctccgcgtacttccccagcggcgagggcgcgaggtcctcacacgggcagcaccttggcgaggccggcgccgcggcccaggcgacccagtgcgaggcgcagcgcggtg

SEQ ID NO: 330558 - DNA, 120 bp, Artificial Sequence
  ENSG00000136709_70 (sequence is synthesized)
gcagcccaaccagcgcggccagcagcgcggccacctgcgcgcccgcgcccagcaccgtgagcagcgtgctgcgaaggcccagcgcggcgaacagcgtggcgcccagcgctgccatgtaga

SEQ ID NO: 330559 - DNA, 120 bp, Artificial Sequence
  ENSG00000136709_71 (sequence is synthesized)
ctgccatgtagagcagcgcgggccgggacggcgcttcttcgcagcgcagcaggcgtccgcacgccgcgccgccccgcagcagcgcgcttcccgccaacgccagcgccgagcccagtgacc

SEQ ID NO: 330560 - DNA, 120 bp, Artificial Sequence
  ENSG00000136709_72 (sequence is synthesized)
gaccagagcagcgcgaacttgcgcgcgcgcagcagcaacaccggtgcgtagagcgcggctaggccgaaacacagtgcagccagcagcaggcacccgccgcccgccgccagccgctgcccg

SEQ ID NO: 330561 - DNA, 80 bp, Artificial Sequence
  ENSG00000136709_73 (sequence is synthesized)
cgcgtcacgctcgggaggcacgtcaggccggccgctgccgactccgcagggctccgcgcccacgtccagcgcaagcccgc

SEQ ID NO: 330562 - DNA, 120 bp, Artificial Sequence
  ENSG00000136709_74 (sequence is synthesized)
tccgccttctccgcggcgagcagcggctccgcggccgccgggccgccagctttcccctgcgccaggtactcctgcagctggcggtggaggtccgccatcttggacaaggcggtggcagaa

SEQ ID NO: 330563 - DNA, 120 bp, Artificial Sequence
  ENSG00000136709_75 (sequence is synthesized)
aggaaaagctgcggctcacttccggccctccgctgaagcggttcggtcttcgggcggcaattggtcggcgacggcgaaaggggcagggcctgcggcgctcgcggaagtgccgcggtgcct

SEQ ID NO: 330564 - DNA, 120 bp, Artificial Sequence
  ENSG00000136709_76 (sequence is synthesized)
gctctgcggacttttgtggtgtccccaagtaccgtggtcgcaggtgctgcctgtccgcttgcagtcgccctcccagcgcctgaccctcttccttgttcggagtaggcgcccttgcggtct

SEQ ID NO: 330565 - DNA, 120 bp, Artificial Sequence
  ENSG00000136709_77 (sequence is synthesized)
ggctaagtcctgccagcattaatagttggaaggcaggggtgggtgtggttctaaaggggcacaagaagtgacccttttgctgacggaaatgtcttatggcctcactgcgtctaccgtggc

SEQ ID NO: 330566 - DNA, 120 bp, Artificial Sequence
  ENSG00000136709_78 (sequence is synthesized)
ggtgatattgtgctagttttgcaacatggaggaatgggtaaagggtacacagaatctctcttgtttcttacaactgaacacaaacagtgatctcaaaataaaaatttaatttttaaaaaa

SEQ ID NO: 330567 - DNA, 120 bp, Artificial Sequence
  ENSG00000136709_79 (sequence is synthesized)
cctattgtcatggttaaattattctctaagtgtattctgggtgcagagatgcatgggctctgtcagtttctgggaaactttctgcaccctataaacacaatatttttctttgttttcaca

SEQ ID NO: 330568 - DNA, 120 bp, Artificial Sequence
  ENSG00000136709_80 (sequence is synthesized)
cattcaccattttgctggcacctttctgaagtagtgttgtcccggtatcagcctttgcaatatgttagagatgtactgtctgccgcattttgcactggttttctcttttcatttatgatt

SEQ ID NO: 330569 - DNA, 120 bp, Artificial Sequence
  ENSG00000136709_81 (sequence is synthesized)
aataatgtgtatacgttattcctttttattatctactgtgtaagacaagaatatttcattccaaataaagaattcagtctttaattatgcaactgaataaaatctaaagcctacagaaaa

SEQ ID NO: 330570 - DNA, 120 bp, Artificial Sequence
  ENSG00000136709_82 (sequence is synthesized)
caacttcagaattcacacaaagtggaaaaaggcttaagtgaagacctggttggcttggttatgccacgacttccaaaggaaagtataggactaaaaccctcacagataactggatgtggc

SEQ ID NO: 330571 - DNA, 120 bp, Artificial Sequence
  ENSG00000136709_83 (sequence is synthesized)
aaacattaacggagtaatgaatgggttcttcaagctttgcagctgtaagcagatcattgtcaagaagactctaggacttttcttctgattcactgttgataacatcacttatgcaaatgt

SEQ ID NO: 330572 - DNA, 120 bp, Artificial Sequence
  ENSG00000136709_84 (sequence is synthesized)
gaagaattgctgcagcctcagaataaagctaagcagcattctttaaggttgtgccacccatgtgtgggaggaggttgacatctttatggaaacatcatccactgtagtcatttgttcata

SEQ ID NO: 330573 - DNA, 120 bp, Artificial Sequence
  ENSG00000136709_85 (sequence is synthesized)
ctttcagaatcttaacagaaattgttggatgaacatgcttctgctttgtagattttgccttagtgtcatgcccatacattgagtttacacagctggtccttcataggattccaaagttca

SEQ ID NO: 330574 - DNA, 120 bp, Artificial Sequence
  ENSG00000136709_86 (sequence is synthesized)
agggagtttttagagttagttgagaaacttgatgatctttcactgctgggaaaaactgactccttcttgcagcagattctttggctttacacacaagtctgaatgtccttattttaaagt

SEQ ID NO: 330575 - DNA, 120 bp, Artificial Sequence
  ENSG00000136709_87 (sequence is synthesized)
tttcctcaaaggtgcaacattcatggaatagcttgccaggaagatgtgaaacttttctacagacctttgaaatggatgagaaacattgtatgtagggatgtttagcaatcagtcttttaa

SEQ ID NO: 330576 - DNA, 120 bp, Artificial Sequence
  ENSG00000136709_88 (sequence is synthesized)
tagacagcccacattgtttcagcttatttcatgaagtgtctgaggcagaagctgatgataattttgggagcagtattcgtgtgtgatttaaaagactgcaggaatactgcaaaaatagaa

SEQ ID NO: 330577 - DNA, 120 bp, Artificial Sequence
  ENSG00000136709_89 (sequence is synthesized)
tccatttattttcaccacttaaggcagcttcatgtgatttcctcgtatcatagaaaatagagaaggaacatggatagcattagcactaataatacacacttgaagttctcagaatactga

SEQ ID NO: 330578 - DNA, 120 bp, Artificial Sequence
  ENSG00000136709_90 (sequence is synthesized)
tgattgaaaactcaaacaactgctctgttgaagtcttcttttgatgagatgcctatgttagctgacgacattcactttaagggcttcttcactggattcttccctctcctgtttataatg

SEQ ID NO: 330579 - DNA, 120 bp, Artificial Sequence
  ENSG00000136709_91 (sequence is synthesized)
cagcacagtgtttttatttttccctgtctgagaagcacagattatctgttaaatgctgacttctttcccctgctgtgtgtcttcatgtaacagtttctcacccacggataataaatttgc

SEQ ID NO: 330580 - DNA, 120 bp, Artificial Sequence
  ENSG00000136709_92 (sequence is synthesized)
tacatgctctgatgacggcactgttagaatctgggactttcttcgttgccatgaggaaagaattctccgaggtacgtgtactaacagtactgattggaatatttaaatagggaagacatt

SEQ ID NO: 330581 - DNA, 120 bp, Artificial Sequence
  ENSG00000136709_93 (sequence is synthesized)
tgtggttaaatcatcacaaaaccacaatactggcttacacctccattcaattttttttacatatacacaccgtctcaggctcttcaaaaaaacccagcactttctctgactcacagtcat

SEQ ID NO: 330582 - DNA, 120 bp, Artificial Sequence
  ENSG00000136709_94 (sequence is synthesized)
tttgtaggtttttactaccagtgttatctttgaatttttcagctgtaaattaaatacaagagtgcctcccccttacttgcttatctgtatgcatcttttagggctgtattccttttcctt

SEQ ID NO: 330583 - DNA, 120 bp, Artificial Sequence
  ENSG00000136709_95 (sequence is synthesized)
ccttgtagccagggtacttgttcccaacatattgacactgtggtttgatttagatagccgtcattctcctggcagtccttttacaatatgaattaaccgacaagatagaggtatcaaagc

SEQ ID NO: 330584 - DNA, 120 bp, Artificial Sequence
  ENSG00000136709_96 (sequence is synthesized)
tacacttcttagtgttactatttttgaaagcagttggtttttcagtacaccacatttgtactacatggccggcttgttactaagttcgggtggcattgctgcttgtttacttttgttgat

SEQ ID NO: 330585 - DNA, 120 bp, Artificial Sequence
  ENSG00000136709_97 (sequence is synthesized)
acagtaggtggacaaagtttagggagccacatttaccaacttctgtgaatatacccaagaagattctggcaaaacatagattcaaattacagttgatgctgtggatggctatgggttaac

SEQ ID NO: 330586 - DNA, 120 bp, Artificial Sequence
  ENSG00000136709_98 (sequence is synthesized)
tactcttctactttgacacggattatttgttgcttttatgtttctaaattctcaattaaaaagaagtgtatccttaatctggccaactgaaagtgaacttgttcattcacctctaccttg

SEQ ID NO: 330587 - DNA, 120 bp, Artificial Sequence
  ENSG00000136709_99 (sequence is synthesized)
ctttcaaaaggactgcttaccatggaagtgctccagaagaatcatttgaaacatcttttgttttccttcttggttctgcgttttcttccttaccaggggcttcagtcatggcttctcttt

SEQ ID NO: 330588 - DNA, 120 bp, Artificial Sequence
  ENSG00000136709_100 (sequence is synthesized)
attcttggcctgggttgtctgctggcactaatacatctattattaacgtagtgtaggtactggcctttctaatagtcttggtatttagtgccagactcccatcaatcttttgaatgtctt

SEQ ID NO: 330589 - DNA, 120 bp, Artificial Sequence
  ENSG00000136709_101 (sequence is synthesized)
ttctttttctttttgcacttttctagcttttcaagtgatgactatatactgcttttcttgactgtatatattgttactgaattgtgaatatctgcagaaatgtttactagagaacctgtg

SEQ ID NO: 330590 - DNA, 120 bp, Artificial Sequence
  ENSG00000136709_102 (sequence is synthesized)
actgttgaataacatgtgcccgaacatacacacacacatatgtacacacacacctcagagtactctttcttacagcggactttgctgctgctttctgcatgtgtgggacactggtatctc

SEQ ID NO: 330591 - DNA, 120 bp, Artificial Sequence
  ENSG00000136709_103 (sequence is synthesized)
attgccacattcctttaagcatctttgatgaatactctgcaaagtagcctttaaaaaaatgtaaattttttaaaaagtccacagaggagaatttgctggttagcacaaaacatactgcaa

SEQ ID NO: 330592 - DNA, 120 bp, Artificial Sequence
  ENSG00000136709_104 (sequence is synthesized)
aattgcttctttctggttattataactgaagaatatagaagattgacacacattttatacaccctcaggcagtgttttggaataatattgtaccttttcaaattgttatcaattaactgt

SEQ ID NO: 330593 - DNA, 120 bp, Artificial Sequence
  ENSG00000136709_105 (sequence is synthesized)
ttttctccatttcataattctcaagatttttctaaatacagcctttaaatttgactcaaatggaaattgtgcactttcctgtttatacccttccccacgttattgtaaaagagtttaaca

SEQ ID NO: 330594 - DNA, 120 bp, Artificial Sequence
  ENSG00000136709_106 (sequence is synthesized)
gcagcctgatatgtaagtttcagcaaaacttatacctgtatatgtttttatttgactcaaaaattagatattttaccatatagtcataagaatttgctcactttgatgccagaagtactt

SEQ ID NO: 330595 - DNA, 120 bp, Artificial Sequence
  ENSG00000136709_107 (sequence is synthesized)
aagaagttacacggcactaattttatgagttgtatgcctaatttcaatttctaacctatttgacagtttcttttaggtcagcctttgttggtcttccatgtaaatacaagttggtacaaa

SEQ ID NO: 330596 - DNA, 120 bp, Artificial Sequence
  ENSG00000136709_108 (sequence is synthesized)
tcaatagaaaccattttacctacataggcaaagtaaatgtgtgacttagagactgccagatttatggtgcatctacctttttatccatttgagcttgcttttttatgtttgtgtattggt

SEQ ID NO: 330597 - DNA, 120 bp, Artificial Sequence
  ENSG00000136709_109 (sequence is synthesized)
tgctcctgacactatacatttcaaaattttttataacttgaaaaacacttctgtgctaccactcagttctgatcaaatccttacattttgcaacactcatttctgaattttcagtaaaga

SEQ ID NO: 330598 - DNA, 120 bp, Artificial Sequence
  ENSG00000136709_110 (sequence is synthesized)
aatacacattacaaattaaaggttaaaggcccctttacatgcccttccccagtctcctcttcctcccccggaagtgtccattctgctgaattcaggttcatcattgccagacaaatgtag

SEQ ID NO: 330599 - DNA, 120 bp, Artificial Sequence
  ENSG00000136709_111 (sequence is synthesized)
taagctagtgtttcacatttccaaaatcagccttctggcagacttggaagtactcttgagaaaagaagactcgtgaccaaattctcccacagatttgtaataatgtacatattgaaagga

SEQ ID NO: 330600 - DNA, 120 bp, Artificial Sequence
  ENSG00000136709_112 (sequence is synthesized)
ctgaaggctctcagactgggaaagaaacttacccattttaaaattcagcattgctcaacttacctgactgccggaccccttcacccatgattctatgcactgtattgttggaacatacat

SEQ ID NO: 330601 - DNA, 120 bp, Artificial Sequence
  ENSG00000136709_113 (sequence is synthesized)
tgtgaaaacactgccctgcctaggcataccccctttccagaattaactttccatttaattctatagtttttcactgatgtaactttctagactggacaacaaagatgactaatagtaatc

SEQ ID NO: 330602 - DNA, 120 bp, Artificial Sequence
  ENSG00000136709_114 (sequence is synthesized)
actccaagttgatgttgactgttgggttgtggtgaaatcattttgcattaaaggaaggtaaaatactaataaattgcatattccttgaccagagcacagattacttatgcttcttaattt

SEQ ID NO: 330603 - DNA, 120 bp, Artificial Sequence
  ENSG00000136709_115 (sequence is synthesized)
tttaaaatcttaaatcctctgtccaactggagtatctggctatgggccatgggtactcatataccctttgtcttaaactgatctgttacattttatgttcttgtggctagaagtagcctg

SEQ ID NO: 330604 - DNA, 120 bp, Artificial Sequence
  ENSG00000136709_116 (sequence is synthesized)
agtttgctgttaatgtttaacacattttcttgagtaacagttctgttaatattgtacaagatggtacttgaattctttgtttgccttttttcttcctgtattagaaaatcttggtgcttt

SEQ ID NO: 330605 - DNA, 120 bp, Artificial Sequence
  ENSG00000136709_117 (sequence is synthesized)
ttataagttttgtataaaagaattttttttaagatttgttcataaaatggtctgatccaggaaaaataaaatgggaacatggacaccatttctgaccttcaaataaaacttattatgtat

SEQ ID NO: 330606 - DNA, 120 bp, Artificial Sequence
  ENSG00000136709_118 (sequence is synthesized)
attttcgggctcggccgttgcgtgctttgggggcctggacgggcgcctgggcacaggttggaggaactgggagaatcgacctcggggcggctgttcgaggcaggttcgagacttatggga

SEQ ID NO: 330607 - DNA, 120 bp, Artificial Sequence
  ENSG00000136709_119 (sequence is synthesized)
gggggctggaggctggaggccaaccgggaaaagcggccatggttagaactaaggccctgactgggagcggtggcgacgagaagactatcctagaaggaaaacatcaccatggctacagaa

SEQ ID NO: 330608 - DNA, 120 bp, Artificial Sequence
  ENSG00000136710_0 (sequence is synthesized)
gacaaggaagaaggtggctccagatctggaggtgtgtccatggcggcgcttgacctgcgagcggagctggattcgctggtcctgcagctgcttggggacctggaggagctggaggggaaa

SEQ ID NO: 330609 - DNA, 120 bp, Artificial Sequence
  ENSG00000136710_1 (sequence is synthesized)
cgaacggtgttgaacgcccgggtggaggagggctggctctcgctcgccaaggctcgctacgcgatgggcgccaagtcggtagggcccctgcagtatgcttcccacatggagccccaggtc

SEQ ID NO: 330610 - DNA, 120 bp, Artificial Sequence
  ENSG00000136710_2 (sequence is synthesized)
tgcctccacgccagcgaggcccaggagggactccagaagttcaaggtggtgagagctggtgtccacgccccagaggaggtggggcctcgcgaagcaggtctgcggaggcgcaagggcccc

SEQ ID NO: 330611 - DNA, 120 bp, Artificial Sequence
  ENSG00000136710_3 (sequence is synthesized)
actaagaccccagaaccggagtcctctgaggcccctcaggaccccctgaactggtttggaatcctagttcctcacagtctacgtcaggctcaagcaagcttccgggatggcctgcagctg

SEQ ID NO: 330612 - DNA, 120 bp, Artificial Sequence
  ENSG00000136710_4 (sequence is synthesized)
gccgcagacatagccagcctccagaaccgcattgactggggtcgaagccagctccggggactccaagagaaactcaagcagctggagcctggggctgcctgacatgcgcgcaaagaggca

SEQ ID NO: 330613 - DNA, 120 bp, Artificial Sequence
  ENSG00000136710_5 (sequence is synthesized)
gggcagcgagcacagctgttctccgacatggctacgtgatctcaggccttcttccttcacaattagctcttgcccctaccccacgccagctaatgccccttctgtgtccctgctctgcat

SEQ ID NO: 330614 - DNA, 120 bp, Artificial Sequence
  ENSG00000136710_6 (sequence is synthesized)
gtttccattttccttaggtgtgaagtttgaagaggcaaacagtaattttgaaagccactactttgaaaccattctaaggcctgagttcccataggacacactcacataggcaggtacacg

SEQ ID NO: 330615 - DNA, 120 bp, Artificial Sequence
  ENSG00000136710_7 (sequence is synthesized)
aggaagtagcgcttcatgcttagtacatcctccaaattgtctttgctggaggagaaaaccgtactcagccaaaagatcaggacaatatgacttgagtccacaaggacacaaacacctgag

SEQ ID NO: 330616 - DNA, 120 bp, Artificial Sequence
  ENSG00000136710_8 (sequence is synthesized)
tagctgggcagcccttggcagggtctaagccaggaagtaaaaatgatctggcctagatatttaagggaactctaggaagaggcctaggtttttaaaatcctgtctctttgtcttaccata

SEQ ID NO: 330617 - DNA, 120 bp, Artificial Sequence
  ENSG00000136710_9 (sequence is synthesized)
agaggctgagcctctcttcatttttttgaagggccacttgtgttttctgttctgggaacttcattcatttttctactgggttgttgatctttgcagtaatttctaggagctgtttatgtt

SEQ ID NO: 330618 - DNA, 120 bp, Artificial Sequence
  ENSG00000136710_10 (sequence is synthesized)
tggaggtaattggtcctttgtccatatatatgagatgtaagtcttattttccagtttatctttttgcttattttttttgactttttattgtaaaataaaacatcaaactgcacagaacag

SEQ ID NO: 330619 - DNA, 120 bp, Artificial Sequence
  ENSG00000136710_11 (sequence is synthesized)
ttgaatagcttaatgaataactacagtaaaagctatggtaaccactacccaacttttgtgttttttgatcattatttgtacgtacagttgaatgtatccagctgtcacatgattctgaat

SEQ ID NO: 330620 - DNA, 120 bp, Artificial Sequence
  ENSG00000136710_12 (sequence is synthesized)
ttgggtttgtaactgataaggcaatcagggaattctccagcattttcaagaacctctgtggtttcagttgaaatgtccagtgagtcatgtccagcttttccaccatcctcccacgtgctg

SEQ ID NO: 330621 - DNA, 120 bp, Artificial Sequence
  ENSG00000136710_13 (sequence is synthesized)
tatgtcggttaatgctgcccttttgttttgctaactcccagtgtaaacctaatgtaatttgggggttttcattctgtttcgtggacattactgtcaatacaccagtaccacattgtttta

SEQ ID NO: 330622 - DNA, 120 bp, Artificial Sequence
  ENSG00000136710_14 (sequence is synthesized)
cacgtgacttaggaccgcagctaataaatatgtccgcccaggcttctccatcctcgtcctccccccaccaccgccgtgcagaatgcagttttcagatgacgaaccgctaaaacaatcata

SEQ ID NO: 330623 - DNA, 120 bp, Artificial Sequence
  ENSG00000136710_15 (sequence is synthesized)
attagcggctggaaacagttcaactgtaaaaaccgcacaccgactgaaggttgcttgccggctcctttccaaattaactttaaaaccactcttccctcaaccaaaatggtttctgtagag

SEQ ID NO: 330624 - DNA, 120 bp, Artificial Sequence
  ENSG00000136710_16 (sequence is synthesized)
cttcgccttcttccatcgccacaacagtggcgcgacttctaagattcggcagcttccggaaggactcagaaccacctataaccctagccgacagttcagcaggctgatccacttgggggc

SEQ ID NO: 330625 - DNA, 120 bp, Artificial Sequence
  ENSG00000136710_17 (sequence is synthesized)
taattggagaaaccagttgattggttgcttccgtgctgcttctctaagggcgcttgcccttaaagaagctgacccagaggccttggtgctgccggcgtggggatccccagatgggaacgc

SEQ ID NO: 330626 - DNA, 120 bp, Artificial Sequence
  ENSG00000136710_18 (sequence is synthesized)
ctgctgaacaggaggccgaagacgagagctgcccggaggactgggcagcagctgttccagcagagacatcagcaaaagccatctagaggtggatccagagtgtggactaacagagaaaag

SEQ ID NO: 330627 - DNA, 120 bp, Artificial Sequence
  ENSG00000136710_19 (sequence is synthesized)
ggtaggcgcctggggcgggcaggagggtacacgggcgtaaactgagtctcaccgctttcctctccctgcagggctggctctcgctcgccaaggctcgctacgcgatgggcgccaagtcgg

SEQ ID NO: 330628 - DNA, 120 bp, Artificial Sequence
  ENSG00000136710_20 (sequence is synthesized)
tagggcccctgcagtatgcttcccacatggagccccaggtctgcctccacgccaggtgaggaagcttccatgctgggctgggtgggcgggcgggcgcgttctaggcccgggctgccaaag

SEQ ID NO: 330629 - DNA, 120 bp, Artificial Sequence
  ENSG00000136710_21 (sequence is synthesized)
ctccatcctcccttctcgtccttcagcgaggcccaggagggactccagaagttcaaggtggtgagagctggtgtccacgccccagaggaggtggggcctcgcgaagcaggtgagccccct

SEQ ID NO: 330630 - DNA, 120 bp, Artificial Sequence
  ENSG00000136710_22 (sequence is synthesized)
cttccttctgcagaaccccttcccagtgtcaaagacaaaatgcaaattatggagatgatttaaattaggtttttgcgataagagagagcatcccagagcagaagaacagaatgtttttgt

SEQ ID NO: 330631 - DNA, 120 bp, Artificial Sequence
  ENSG00000136710_23 (sequence is synthesized)
agggtggttttgccttagacttttataggaagtagagaaattgttggtgagttgctttacactgggaatagatttacaatcacatacatttcagtcagctgaacagaaaatatttatctg

SEQ ID NO: 330632 - DNA, 120 bp, Artificial Sequence
  ENSG00000136710_24 (sequence is synthesized)
tgtgtctagctagtttcagagggacaaacttctaatcccagttaatcatcctgagacaaagaatggggagttggaacgtctatgtctggtctgttggcatgttcaggtacaatgggtaag

SEQ ID NO: 330633 - DNA, 120 bp, Artificial Sequence
  ENSG00000136710_25 (sequence is synthesized)
atcagtgtcacaggcaaacagggtcatcagtgggtcttacaggagtcacgggaaagagtggacaaacagtctcatctgaatcacaaggggaaaggctgtgttttgtggtaagctgtttcc

SEQ ID NO: 330634 - DNA, 120 bp, Artificial Sequence
  ENSG00000136710_26 (sequence is synthesized)
tggaaccccaaagttggaattttccaaccaacagtgttttatagaatcatgagctcagatcaagctcaacattgtcaccaagatgataaaggtcagggagtaagatcccagcctcctcca

SEQ ID NO: 330635 - DNA, 120 bp, Artificial Sequence
  ENSG00000136710_27 (sequence is synthesized)
tgaaaggctttgcaggttttcctccatccaaacttccgttgtacacccattattttttccaaaagcatttactggttgttggcagcattcgggttcatgctagctgctggggatacagca

SEQ ID NO: 330636 - DNA, 120 bp, Artificial Sequence
  ENSG00000136710_28 (sequence is synthesized)
gggaacaaaagagacaaacacttttcatgtaatgtttagaagcagacaaaggcaacgtgcaaataagtaggcccttaacataagtcaggctgtgaaaattgttatgaaaaacacataatg

SEQ ID NO: 330637 - DNA, 120 bp, Artificial Sequence
  ENSG00000136710_29 (sequence is synthesized)
gagtgggacaggagtgggccaggggaggtctctctgaggaggtgaaggaaaagctttgtgggtgattttggggaacagtgctctagatggaggaaccagccaggacaaaagccctgaagc

SEQ ID NO: 330638 - DNA, 120 bp, Artificial Sequence
  ENSG00000136710_30 (sequence is synthesized)
cagagaggctctgagcagaggatggtgcaactggctgtacagggtcacaggaatgcttgggtgctgggcggggacacagagcagagggaggaagtaggtgtcagggagcagccagtgtga

SEQ ID NO: 330639 - DNA, 120 bp, Artificial Sequence
  ENSG00000136710_31 (sequence is synthesized)
gaagcagatagcgtcactggaggaggaggtaagtggtgggaacctgcacaggttttaagaatagaagccccagaatttgctgacagataagatatgggagtaagggaaggaaaggagtcc

SEQ ID NO: 330640 - DNA, 120 bp, Artificial Sequence
  ENSG00000136710_32 (sequence is synthesized)
aggagagcctgcggtctccacccagaacccctgggaggatggagcgaccctcacctgctgtgggcagctgagaggattccagaaggcaggagttggtgtggtctgtgtggtatccaccga

SEQ ID NO: 330641 - DNA, 120 bp, Artificial Sequence
  ENSG00000136710_33 (sequence is synthesized)
cgccctgctggagagtctgagtgggcacttgggcacatgtatctggagtttgggagaggcctgggctggagagagatttgggagtccactgcatagcactggtgtttaaattccaaagtt

SEQ ID NO: 330642 - DNA, 120 bp, Artificial Sequence
  ENSG00000136710_34 (sequence is synthesized)
tttgacacaaacactggtttaaagctgagataggatgagatcagcagagggcctggggagtatggacgggaggtgagggagaagaggggagaagccagtcaaggaaactgaggagcaaca

SEQ ID NO: 330643 - DNA, 120 bp, Artificial Sequence
  ENSG00000136715_0 (sequence is synthesized)
aatagacgggaggctcgttacggcggcggaagcagcggcgctggagtgaggggtggggggcagagtgctagctccccggcggtggctgcgggtccggagcctggggacgtcggccccaca

SEQ ID NO: 330644 - DNA, 120 bp, Artificial Sequence
  ENSG00000136715_1 (sequence is synthesized)
gacggagagcgcgcgggagcgagctcaaggcggcgcggcggccactgggcgcagcacccaggtggaaatgagttctcaacagtttcctcggttaggagccccttctaccgggctgagcca

SEQ ID NO: 330645 - DNA, 120 bp, Artificial Sequence
  ENSG00000136715_2 (sequence is synthesized)
ggccccttctcagattgcaaacagtggttctgctggattgataaacccagctgctacagtcaatgatgaatctggtcgagattctgaagtcagtgccagggagcacatgagttccagcag

SEQ ID NO: 330646 - DNA, 120 bp, Artificial Sequence
  ENSG00000136715_3 (sequence is synthesized)
ctccctccagtcccgggaggagaagcaagagcctgttgtggtaaggccctatccacaggtgcagatgttgtcgacacaccatgctgtcgcatcagccacacctgttgcagtgacagcccc

SEQ ID NO: 330647 - DNA, 120 bp, Artificial Sequence
  ENSG00000136715_4 (sequence is synthesized)
gccagcacacctgacgccagcagtgccactttcattttcggagggacttatgaagccgcccccgaagcccaccatgcctagccgtcccattgctcctgctccaccttctaccctgtcact

SEQ ID NO: 330648 - DNA, 120 bp, Artificial Sequence
  ENSG00000136715_5 (sequence is synthesized)
tccccccaaggttccagggcaggttaccgttaccatggagagtagcatccctcaagcttcagccattcctgtggcaacaatcagtggacaacagggccatcccagtaacctgcatcacat

SEQ ID NO: 330649 - DNA, 120 bp, Artificial Sequence
  ENSG00000136715_6 (sequence is synthesized)
catgactacaaatgtgcaaatgtctatcatccgcagcaatgctcctgggccccctcttcacattggagcttctcatttacctcgaggtgcagctgctgctgctgtgatgtccagttctaa

SEQ ID NO: 330650 - DNA, 120 bp, Artificial Sequence
  ENSG00000136715_7 (sequence is synthesized)
agtaaccacagtcctgaggccgacctcacagctgccaaatgctgctactgctcagccagcagtacagcacatcattcaccaaccaatccagtctcggccacctgtgaccacctccaatgc

SEQ ID NO: 330651 - DNA, 120 bp, Artificial Sequence
  ENSG00000136715_8 (sequence is synthesized)
catccctcctgctgtggtagcaactgtctcagccaccagagctcagtctccagtcatcactacgacagcggcgcatgctactgattcagcacttagtaggccaaccttgtctatccagca

SEQ ID NO: 330652 - DNA, 120 bp, Artificial Sequence
  ENSG00000136715_9 (sequence is synthesized)
tcctccatctgcagcaatcagtattcagcgtcctgcccagtcacgagatgtcacaacaagaatcacactaccatctcaccctgcattagggacgccaaaacagcagcttcatacaatggc

SEQ ID NO: 330653 - DNA, 120 bp, Artificial Sequence
  ENSG00000136715_10 (sequence is synthesized)
tcagaaaacaatcttcagtactggcacgccagtggctgcagccacagtagcacctattttggcaaccaacaccattccttcagcgaccacagctggatctgtgtcacacacgcaagctcc

SEQ ID NO: 330654 - DNA, 120 bp, Artificial Sequence
  ENSG00000136715_11 (sequence is synthesized)
cacaagtaccattgttaccatgacagtaccctcccattcctcccatgctactgctgtgaccacctcaaacatcccagtcgccaaggtggtgccccagcagatcacgcacacttctcctcg

SEQ ID NO: 330655 - DNA, 120 bp, Artificial Sequence
  ENSG00000136715_12 (sequence is synthesized)
gatccagccagactaccctgccgagaggagtagcctgattcccatctccggacatcgggcctctcccaatcctgtggccatggaaacccgaagtgacaacagaccgtctgttcccgttca

SEQ ID NO: 330656 - DNA, 120 bp, Artificial Sequence
  ENSG00000136715_13 (sequence is synthesized)
gttccaatattttttgccaacttaccccccttctgcatacccactggcggcacatacctacaccccaatcaccagttccgtgtccactatccgacagtatccagtttcagctcaggctcc

SEQ ID NO: 330657 - DNA, 120 bp, Artificial Sequence
  ENSG00000136715_14 (sequence is synthesized)
aaactctgccatcacagctcagactggtgttggggtagcgtctaccgtccacctaaaccccatgcagttgatgacagtggatgcatcgcatgctcgacatattcaagggatccagccagc

SEQ ID NO: 330658 - DNA, 120 bp, Artificial Sequence
  ENSG00000136715_15 (sequence is synthesized)
acccatcagtacccagggtatccagccggcccccattgggaccccagggatacagcctgcaccacttggcacacagggaattcactcagcaaccccaatcaacacacaagggcttcagcc

SEQ ID NO: 330659 - DNA, 120 bp, Artificial Sequence
  ENSG00000136715_16 (sequence is synthesized)
tgcacctatgggtactcagcagcctcagcctgaaggaaagacttcagtggtgttggcagatggagccacaattgtggccaaccctattagcaatccattcagtgctgctccagcagcaac

SEQ ID NO: 330660 - DNA, 120 bp, Artificial Sequence
  ENSG00000136715_17 (sequence is synthesized)
gccacggccaagcatactccggaagaaacctgccacagatggaatggcagttcggaaaaccctcattcctcctcagcctcctgatgttgctagtcctcgagtggaaagctctatgcggag

SEQ ID NO: 330661 - DNA, 120 bp, Artificial Sequence
  ENSG00000136715_18 (sequence is synthesized)
tacgtctgggtcacctaggcctgcaggtgccaaacccaagtctgaaatccacgtgtctatggccactccggtcactgtgtccatggagactgtatccaatcaaaataatgatcagcctac

SEQ ID NO: 330662 - DNA, 120 bp, Artificial Sequence
  ENSG00000136715_19 (sequence is synthesized)
cattgccgtccctccaactgcccagcagcccccaccgaccattccaactatgattgcagcagccagtcccccgtcacaaccagccgttgccctttcaaccattcctggagcggtccccat

SEQ ID NO: 330663 - DNA, 120 bp, Artificial Sequence
  ENSG00000136715_20 (sequence is synthesized)
cactccacccatcaccaccattgcagctgcaccacctccatcagtcactgtgggtggcagtctttcctccgtcttgggccctcccgttcctgaaattaaagtgaaagaagaagtagaacc

SEQ ID NO: 330664 - DNA, 120 bp, Artificial Sequence
  ENSG00000136715_21 (sequence is synthesized)
aatggatatcatgaggccagtttctgcagttcctccactggctaccaacactgtgtctccatctcttgcattgctggcaaacaacttgtccatgcctacaagtgacctaccacctggtgc

SEQ ID NO: 330665 - DNA, 120 bp, Artificial Sequence
  ENSG00000136715_22 (sequence is synthesized)
ctccccaaggaaaaagcctcgaaagcaacagcatgtgatctcaacagaagaaggtgacatgatggagacaaacagcactgatgatgagaagtccactgccaagagtcttctggtgaaggc

SEQ ID NO: 330666 - DNA, 120 bp, Artificial Sequence
  ENSG00000136715_23 (sequence is synthesized)
tgagaagcgcaagtctcctcccaaggagtatattgatgaggaaggtgtgagatatgtcccagtgcgtccaagaccccccattactttgcttcgtcactatcggaacccctggaaagctgc

SEQ ID NO: 330667 - DNA, 120 bp, Artificial Sequence
  ENSG00000136715_24 (sequence is synthesized)
ttaccaccactttcagaggtacagtgacgtccgggtcaaagaggagaagaaagctatgctgcaggaaatagctaatcagaaaggagtatcctgtcgtgctcaaggctggaaagtccacct

SEQ ID NO: 330668 - DNA, 120 bp, Artificial Sequence
  ENSG00000136715_25 (sequence is synthesized)
ctgtgctgcccagttactacagctgacgaatctagaacatgatgtctatgaaagacttactaacctgcaggaagggattatcccaaagaaaaaagcagcaacagatgatgatctccaccg

SEQ ID NO: 330669 - DNA, 120 bp, Artificial Sequence
  ENSG00000136715_26 (sequence is synthesized)
aataaacgaactgatacagggaaatatgcagaggtgtaaacttgtgatggatcaaatcagtgaagccagagactccatgcttaaggttttagatcataaagaccgtgtcctgaagctgct

SEQ ID NO: 330670 - DNA, 120 bp, Artificial Sequence
  ENSG00000136715_27 (sequence is synthesized)
taacaagaacgggactgtcaaaaaagtgtccaaattgaagcgaaaggaaaaagtctagacccagaacaatcaggagattggaagcaaatttatgaagaatgatggtgggggtggggggag

SEQ ID NO: 330671 - DNA, 120 bp, Artificial Sequence
  ENSG00000136715_28 (sequence is synthesized)
ggttttggttttttccaaagtggaacattgaaataaaggaagtgttccttagttcccgtgtgaaagcagaggaacccatgacatccaagggcgtgaaaggatcagagctgactggacata

SEQ ID NO: 330672 - DNA, 120 bp, Artificial Sequence
  ENSG00000136715_29 (sequence is synthesized)
gtgagctgccttcttgcgttcgggtgcacccctgttaaacctgatctgtgtcataagtgactccggatgcatcagtgtccaccagttggaagcaatgacaaggatggctggctggtgttt

SEQ ID NO: 330673 - DNA, 120 bp, Artificial Sequence
  ENSG00000136715_30 (sequence is synthesized)
ttcagccttccggtttatagactgtatttatctagtggattcctgcaggccccatactgagcctggactgaaagtatccactcggaccatctgttatctctctacactgaaaataaaacc

SEQ ID NO: 330674 - DNA, 120 bp, Artificial Sequence
  ENSG00000136715_31 (sequence is synthesized)
tcttccacccaccccattcggttcttctgcctgaccttcaaatgcccatgttggccttttacagcagtgccacggcaccaagcgagctgccacatctcacactctaaagggtttgaacta

SEQ ID NO: 330675 - DNA, 120 bp, Artificial Sequence
  ENSG00000136715_32 (sequence is synthesized)
ttagttcttgtcattttttaaaaaaaaccattcccaagtgaaattgttatatcgtctgtcttgcgtgtgtcagaactgggtttttgtggaggttcagagcaggcaacaccataagttgct

SEQ ID NO: 330676 - DNA, 120 bp, Artificial Sequence
  ENSG00000136715_33 (sequence is synthesized)
ctcagatccttgttctgaagtacattcttggttatctgtacttctgtagctggtgtgatgctgttaattgtatgtaccacacatctccagacgttaataaaggactcaaagaggtttttg

SEQ ID NO: 330677 - DNA, 120 bp, Artificial Sequence
  ENSG00000136715_34 (sequence is synthesized)
cagtgccactttcattttcggagggacttatgaaggttccagggcaggttaccgttaccatggagagtagcatccctcaagcttcagccattcctgtggcaacaatcagtggacaacagg

SEQ ID NO: 330678 - DNA, 120 bp, Artificial Sequence
  ENSG00000136715_35 (sequence is synthesized)
cgccgccgagatgggccctccgcggcacccccaggccggcgagatagaagcgggcggtgcgggcggcgggcggcggctacaggtggaaatgagttctcaacagtttcctcggttaggagc

SEQ ID NO: 330679 - DNA, 80 bp, Artificial Sequence
  ENSG00000136715_36 (sequence is synthesized)
aagaggactgcgagcacagcggcggccgggtggcgggggtgagtggggccagcggggctggacagcagcgggccccgggc

SEQ ID NO: 330680 - DNA, 120 bp, Artificial Sequence
  ENSG00000136717_0 (sequence is synthesized)
cccctccctcctcgcggacctggcggtgccggcgcccggagtggccctttaaaaggcagcttattgtccggagggggcgggcggggggcgccgaccgcggcctgaggcccggcccctccc

SEQ ID NO: 330681 - DNA, 120 bp, Artificial Sequence
  ENSG00000136717_1 (sequence is synthesized)
tcccctctccctccctctgtccccgcgtcgctcgctggctagctcgctggctcgctcgcccgtccggcgcacgctccgcctccgtcagttggctccgctgtcgggtgcgcggcgtggagc

SEQ ID NO: 330682 - DNA, 120 bp, Artificial Sequence
  ENSG00000136717_2 (sequence is synthesized)
gtctggacgcgcggccggggctgggggctgggagcgcggcgcgcaagatctccccgcgcgagagcggcccctgccaccgggcgaggcctgcgccgcgatggcagagatgggcagtaaagg

SEQ ID NO: 330683 - DNA, 120 bp, Artificial Sequence
  ENSG00000136717_3 (sequence is synthesized)
agtaaaggggtgacggcgggaaagatcgccagcaacgtgcagaagaagctcacccgcgcgcaggagaaggttctccagaagctggggaaggcagatgagaccaaggatgagcagtttgag

SEQ ID NO: 330684 - DNA, 120 bp, Artificial Sequence
  ENSG00000136717_4 (sequence is synthesized)
cagtgcgtccagaatttcaacaagcagctgacggagggcacccggctgcagaaggatctccggacctacctggcctccgtcaaagccatgcacgaggcttccaagaagctgaatgagtgt

SEQ ID NO: 330685 - DNA, 120 bp, Artificial Sequence
  ENSG00000136717_5 (sequence is synthesized)
ctgcaggaggtgtatgagcccgattggcccggcagggatgaggcaaacaagatcgcagagaacaacgacctgctgtggatggattaccaccagaagctggtggaccaggcgctgctgacc

SEQ ID NO: 330686 - DNA, 120 bp, Artificial Sequence
  ENSG00000136717_6 (sequence is synthesized)
atggacacgtacctgggccagttccccgacatcaagtcacgcattgccaagcgggggcgcaagctggtggactacgacagtgcccggcaccactacgagtcccttcaaactgccaaaaag

SEQ ID NO: 330687 - DNA, 120 bp, Artificial Sequence
  ENSG00000136717_7 (sequence is synthesized)
aaggatgaagccaaaattgccaaggccgaggaggagctcatcaaagcccagaaggtgtttgaggagatgaatgtggatctgcaggaggagctgccgtccctgtggaacagccgcgtaggt

SEQ ID NO: 330688 - DNA, 120 bp, Artificial Sequence
  ENSG00000136717_8 (sequence is synthesized)
tggaggaaaacttccacaaggagatgagcaagctcaaccagaacctcaatgatgtgctggtcggcctggagaagcaacacgggagcaacaccttcacggtcaaggcccagcccagtgaca

SEQ ID NO: 330689 - DNA, 120 bp, Artificial Sequence
  ENSG00000136717_9 (sequence is synthesized)
acgcgcctgcaaaagggaacaagagcccttcgcctccagatggctcccctgccgccacccccgagatcagagtcaaccacgagccagagccggccggcggggccacgcccggggccaccc

SEQ ID NO: 330690 - DNA, 120 bp, Artificial Sequence
  ENSG00000136717_10 (sequence is synthesized)
tccccaagtccccatctcagagctctcttcctgctgtcgtggtggagaccttcccagcaactgtgaatggcaccgtggagggcggcagtggggccgggcgcttggacctgcccccaggtt

SEQ ID NO: 330691 - DNA, 120 bp, Artificial Sequence
  ENSG00000136717_11 (sequence is synthesized)
tcatgttcaaggtacaggcccagcacgactacacggccactgacacagacgagctgcagctcaaggctggtgatgtggtgctggtgatccccttccagaaccctgaagagcaggatgaag

SEQ ID NO: 330692 - DNA, 120 bp, Artificial Sequence
  ENSG00000136717_12 (sequence is synthesized)
gctggctcatgggcgtgaaggagagcgactggaaccagcacaaggagctggagaagtgccgtggcgtcttccccgagaacttcactgagagggtcccatgacggcggggcccaggcagcc

SEQ ID NO: 330693 - DNA, 120 bp, Artificial Sequence
  ENSG00000136717_13 (sequence is synthesized)
tccgggcgtgtgaagaacacctcctcccgaaaaatgtgtggttcttttttttgttttgttttcgtttttcatcttttgaagagcaaagggaaatcaagaggagacccccaggcagagggg

SEQ ID NO: 330694 - DNA, 120 bp, Artificial Sequence
  ENSG00000136717_14 (sequence is synthesized)
cgttctcccaaagattaggtcgttttccaaagagccgcgtcccggcaagtccggcggaattcaccagtgttcctgaagctgctgtgtcctctagttgagtttctggcgcccctgcctgtg

SEQ ID NO: 330695 - DNA, 120 bp, Artificial Sequence
  ENSG00000136717_15 (sequence is synthesized)
cccgcatgtgtgcctggccgcagggcggggctgggggctgccgagccaccatgcttgcctgaagcttcggccgcgccacccgggcaagggtcctcttttcctggcagctgctgtgggtgg

SEQ ID NO: 330696 - DNA, 120 bp, Artificial Sequence
  ENSG00000136717_16 (sequence is synthesized)
ggcccagacaccagcctagcctggctctgccccgcagacggtctgtgtgctgtttgaaaataaatcttagtgttcaaaacaaaatgaaacaaaaaaaaaatgataaaaactctcagaaaa

SEQ ID NO: 330697 - DNA, 120 bp, Artificial Sequence
  ENSG00000136717_17 (sequence is synthesized)
tgtttgaggacacgtttgtccctgagatcagcgtgaccaccccctcccagccagcagaggcctcggaggtggcgggtgggacccaacctgcggctggagcccaggagccaggggagacgg

SEQ ID NO: 330698 - DNA, 120 bp, Artificial Sequence
  ENSG00000136717_18 (sequence is synthesized)
agatcctcagcctgtttgaggacacgtttgtccctgagatcagcgtgaccaccccctcccagcccacagagagtccagccggcagcctgccttccggggagcccagcgctgccgagggca

SEQ ID NO: 330699 - DNA, 120 bp, Artificial Sequence
  ENSG00000136717_19 (sequence is synthesized)
aattgccaagcctgtctcgctgcttgagaaagccgccccccagtggtgccaaggcaaactgcaggctcatctcgtagctcaaactaacctgctccgaaatcaggccgaggaggagctcat

SEQ ID NO: 330700 - DNA, 120 bp, Artificial Sequence
  ENSG00000136717_20 (sequence is synthesized)
cagcctgtttgaggacacgtttgtccctgagatcagcgtgaccaccccctcccagtttgaggccccggggcctttctcggagcaggccagtctgctggacctggactttgaccccctccc

SEQ ID NO: 330701 - DNA, 120 bp, Artificial Sequence
  ENSG00000136717_21 (sequence is synthesized)
gcccgtgacgagccctgtgaaggcacccacgccctctggtcagtcaattccatgggacctctgggagcccacagagagtccagccggcagcctgccttccggggagcccagcgctgccga

SEQ ID NO: 330702 - DNA, 120 bp, Artificial Sequence
  ENSG00000136717_22 (sequence is synthesized)
gtcactctcgccggcagtgtcctcccgcagtgagccagcacagccccttccctgggcgggctgggcaccgggcagggtctgtgactcacctgctgcccgcagtcccttccccagcactct

SEQ ID NO: 330703 - DNA, 120 bp, Artificial Sequence
  ENSG00000136717_23 (sequence is synthesized)
gaacagtggtcgctgctaggaagggttggggatggtgggcctcaagcccctatgcaaagactaggactagaactaaggaactgaggctgcaggtgtctgggtgggtgacgccctagttca

SEQ ID NO: 330704 - DNA, 120 bp, Artificial Sequence
  ENSG00000136717_24 (sequence is synthesized)
ggggcctggcaggcgcgggagcccctctctgtgggatagtggcagagggcgatgtaggaagagcagtgtgggggcagggctgaggacctccagggctgcttgctgctggcctccccggct

SEQ ID NO: 330705 - DNA, 120 bp, Artificial Sequence
  ENSG00000136717_25 (sequence is synthesized)
cgagcatgcctccgccctggtgatgcccagtgtgtgtgcaggcgagggagacgggatggcatggacactggcaaatactgagcagagaacggtgccagccacttcctataccccattgtt

SEQ ID NO: 330706 - DNA, 120 bp, Artificial Sequence
  ENSG00000136717_26 (sequence is synthesized)
tggttttcaatcaccctctgggaggacatcatgcccccatttaacaggtgaggaaaggaacccagggcctgtgccgcgggcccacgccagagcaaggtgtgccaggccaggaggtggtgc

SEQ ID NO: 330707 - DNA, 120 bp, Artificial Sequence
  ENSG00000136717_27 (sequence is synthesized)
agagaccacccgcacccaggctctgagcgcgcctatccctccataccatacctgcctccctggccaccgcgtgtgccatctccaggcaactggtcttcccggtctggtctggggtcgggg

SEQ ID NO: 330708 - DNA, 120 bp, Artificial Sequence
  ENSG00000136717_28 (sequence is synthesized)
agccatgacctttgggtggggcatggggcaggggtgggcttgcctttgtccatgacacgggtgcccacgggcttcccggctgtggggtggtgagtagcctgtgtccctgcatggagggac

SEQ ID NO: 330709 - DNA, 120 bp, Artificial Sequence
  ENSG00000136717_29 (sequence is synthesized)
agtcccgggcctgcatggcgaggtgccacctgccggggcagcacagcgaagggatggtcagctctctggcggatgaccctcccctcagcacatgacggatattgctgcctgggttggctg

SEQ ID NO: 330710 - DNA, 120 bp, Artificial Sequence
  ENSG00000136717_30 (sequence is synthesized)
acttttctgagacaggagggaggggtgttgctggggcagggtgggggccactggggagagatgctggccgcccgctggtgggaggcacctcgaggctgtgcaccggcgtcctcagggctc

SEQ ID NO: 330711 - DNA, 120 bp, Artificial Sequence
  ENSG00000136717_31 (sequence is synthesized)
cttcagagacggccggttatggggcagagcagtgacctccctgccctgggttccccagacagggctggacctaaaggaaagtcagctgctgggattggcccagggcagggcttggggcct

SEQ ID NO: 330712 - DNA, 120 bp, Artificial Sequence
  ENSG00000136717_32 (sequence is synthesized)
agggcccctggttctaggaagtgagtccacttggcctgagctgtctgacaccttggcttggccatgtggactgctccacgccttgtcccctgagctgcaggacagctgggtcctcttagg

SEQ ID NO: 330713 - DNA, 120 bp, Artificial Sequence
  ENSG00000136717_33 (sequence is synthesized)
actgaggaccttgggtctctcccaatgggccctcggctcagctatggaggtgcctctggggagcccggcccacagccccaggtctcacatccttcatggtggaggccgggtgggagggcg

SEQ ID NO: 330714 - DNA, 120 bp, Artificial Sequence
  ENSG00000136717_34 (sequence is synthesized)
cccctgtcagtgtccggtgcctgtcaagagtgtgtagagccgggaagccgctggcctgggctgcggggctggagttcttccagcactgcctgagggccccggaggggagcaccccggcca

SEQ ID NO: 330715 - DNA, 120 bp, Artificial Sequence
  ENSG00000136717_35 (sequence is synthesized)
cgtccctctccttttaaacctgggcaaagttctctctggcccccaaagggaagccccaggtacaagatggagaccgcagccgagccagtccctgctcctcagaaggcagcttgtgccctg

SEQ ID NO: 330716 - DNA, 120 bp, Artificial Sequence
  ENSG00000136717_36 (sequence is synthesized)
ggcatggatgctgccccagggctcaccggagtcattgtctccgcctgtgccgggggctctaaggaagccccttcctcccatgctagtctggcccagcttatggggaggcttgtccctgtg

SEQ ID NO: 330717 - DNA, 120 bp, Artificial Sequence
  ENSG00000136717_37 (sequence is synthesized)
tggccagggccaccgtgtcccatccctggggccatgcctgtcacatgcctattcctgggctcactggaaggagatcttggcgaggggctgctgggaggggtcaggggcctgcagttttaa

SEQ ID NO: 330718 - DNA, 120 bp, Artificial Sequence
  ENSG00000136717_38 (sequence is synthesized)
cccaagtgccccgggtggttctgaagcccccgaatgttgaagaccccactttgaagcttggcctgttgggctttgtggctggctccactctttctccgtccctggagctgacggctggtg

SEQ ID NO: 330719 - DNA, 120 bp, Artificial Sequence
  ENSG00000136717_39 (sequence is synthesized)
gtgtcgccagagagtgacctccctgtctggggtggaggaaaagccagtgtgaagtctctgcctttggaactttcccagtcgggagcactgagggtggctgtggcatggtgttactctcgc

SEQ ID NO: 330720 - DNA, 120 bp, Artificial Sequence
  ENSG00000136717_40 (sequence is synthesized)
cactggggggtagcaagatcagcagaactcttggcgcagggagcggagaggaggttcgggcattggtggggaggggcccaccagtctgtggatggtggcggaagagagctggggcctggt

SEQ ID NO: 330721 - DNA, 120 bp, Artificial Sequence
  ENSG00000136717_41 (sequence is synthesized)
gctggccctgcggggtggcggccacgggcggacctatgactgggagtttgaggcgggcactggggtcgtcctcctggtgtgggcgggagcctgtgccggggcgcgtggctttgggcagtg

SEQ ID NO: 330722 - DNA, 120 bp, Artificial Sequence
  ENSG00000136717_42 (sequence is synthesized)
ctcccgtgtgtgaggtggatgagttggtgcctgggctgtgtgccagcgtgtgtgcgtgtatgtgcgcttgctctgcatgcgtggtgtgtgtatgtgtgtgtgtccacgcgtgtgcctgtg

SEQ ID NO: 330723 - DNA, 120 bp, Artificial Sequence
  ENSG00000136717_43 (sequence is synthesized)
cctgcagtgtctgcctggggtgagggctcccagcttaacactaactgcttcctcctctgctgctgctgctgctgccaagtttgaggccccggggcctttctcggagcaggccagtctgct

SEQ ID NO: 330724 - DNA, 120 bp, Artificial Sequence
  ENSG00000136717_44 (sequence is synthesized)
agcttccaggtgcccaaccctgggctcatgttgcctattggccacgtgaccccagctaggcctgggtcactgcccttcccctggcacctcagccttcagccctcatcacctcctggttgt

SEQ ID NO: 330725 - DNA, 120 bp, Artificial Sequence
  ENSG00000136717_45 (sequence is synthesized)
agggcaggaagcagcccctgatcagctgggagaactctcagtagggggttactgaacacttcctggcaactttgtgctcatcgcttggggcagaagcatcctggcttggggtcttgaagc

SEQ ID NO: 330726 - DNA, 120 bp, Artificial Sequence
  ENSG00000136717_46 (sequence is synthesized)
tccctgagaggtgtcgggagctcggccacctgcaaatcttggagtctacctggctccgagccactcctgtgcctgctgggctggatggcctggggcgagcgggggtagggtccctgggga

SEQ ID NO: 330727 - DNA, 120 bp, Artificial Sequence
  ENSG00000136717_47 (sequence is synthesized)
ctgcttgccgccctgtctctaacctctgtgctaactgtccttctcgccctcactgctgcgctcagtcaattccatgggacctctgggaggtaagctgcacgtctgctctttgtccagccc

SEQ ID NO: 330728 - DNA, 120 bp, Artificial Sequence
  ENSG00000136717_48 (sequence is synthesized)
ctgggggagccactcttccgtatgtgtccaggcccacatgctcctagcctgttcacaggtgcatgcaccccacacaccccccacacgcaggacacacaggcacgtgctcacgcacaggga

SEQ ID NO: 330729 - DNA, 120 bp, Artificial Sequence
  ENSG00000136717_49 (sequence is synthesized)
gctggtgaagccacccgcctccagccattctgctgcttctccctctggcaggcccttggaaaaggggatcttcggtttagcttgagacaggggtcccctgagatctggtcctgttttcac

SEQ ID NO: 330730 - DNA, 120 bp, Artificial Sequence
  ENSG00000136717_50 (sequence is synthesized)
agcctgtgagtgtttgcctccagacagaagtgggccggtcacccaggatggacgagtgtcctcagggtgtggggcaggagggcctcagggtagaaggttcttgccttctctgagcttttt

SEQ ID NO: 330731 - DNA, 120 bp, Artificial Sequence
  ENSG00000136717_51 (sequence is synthesized)
ggcagtggggagctgtttgcgaggaaggggagaggggaggaatggatggtttgagagagtcagggaagacagggtgtggctgagtgccttctgagagcagggcctgcaggcaggtgcaag

SEQ ID NO: 330732 - DNA, 120 bp, Artificial Sequence
  ENSG00000136717_52 (sequence is synthesized)
gccatctcacacagcaccatgtcactgtcacctgatagctcaggacacagaggctcagggaaggctcagtacttgcccaagaactggtcatggtagagccagaattccaacagggtctcc

SEQ ID NO: 330733 - DNA, 120 bp, Artificial Sequence
  ENSG00000136717_53 (sequence is synthesized)
tgggctctgtccctgagaccccctgatacaggcagagatgctgggaggggcaggcgggtgtgcaggcgcccttggggcatgcgctggcagcccaggctcctgggagctctggaggctcca

SEQ ID NO: 330734 - DNA, 120 bp, Artificial Sequence
  ENSG00000136717_54 (sequence is synthesized)
ccgcaggatttccctctggaggaagccagaaagagccagcctggtgcgagctggtagggccattttgacaagtggatttcggtaggtgctgagcttgggcagcacagtcacacctgcctg

SEQ ID NO: 330735 - DNA, 120 bp, Artificial Sequence
  ENSG00000136717_55 (sequence is synthesized)
tccctttgacagtggtaggagagaggatgtgggaggcgggtggctggccgggctccgctggtacccaccctgcccccaccaaccccagccgctggtgacattttctcttgtcttgtgatc

SEQ ID NO: 330736 - DNA, 120 bp, Artificial Sequence
  ENSG00000136717_56 (sequence is synthesized)
ctgcccattgcctttccaccccggcctccccgccccctccctgttctctcctcgtggcctgttaccagcccacagagagtccagccggcagcctgccttccggggagcccagcgctgccg

SEQ ID NO: 330737 - DNA, 120 bp, Artificial Sequence
  ENSG00000136718_0 (sequence is synthesized)
cccatctggggatccccacgccggcagcaccaaggcctctgggtcagcttctttaagggcaagcgcccttagagaagcagcacggaagcaaccaatcaactggtttctccaattagcccc

SEQ ID NO: 330738 - DNA, 120 bp, Artificial Sequence
  ENSG00000136718_1 (sequence is synthesized)
caagtggatcagcctgctgaactgtcggctagggttataggtggttctgagtccttccggaagctgccgaatcttagaagtcgcgccactgttgtggcgatggaagaaggcgaagctcta

SEQ ID NO: 330739 - DNA, 120 bp, Artificial Sequence
  ENSG00000136718_2 (sequence is synthesized)
cagaaaccattttggttgagggaagagtggttttaaagttaatttggaaaggagccggcaagcaaccttcagtcggtgtgcggtttttacagttgaactgtttccagccgctaattatga

SEQ ID NO: 330740 - DNA, 120 bp, Artificial Sequence
  ENSG00000136718_3 (sequence is synthesized)
ttgttttagcggttcgtcatctgaaaactgcattctgcacggcggtggtggggggaggacgaggatggagaagcctgggcggacatatttattagctgcggtcctaagtcacgtgtgaca

SEQ ID NO: 330741 - DNA, 120 bp, Artificial Sequence
  ENSG00000136718_4 (sequence is synthesized)
ttctgtatccagtctatcggttatcccaaggagaacgccctgccggaatggccaatcgccttgagatgtccccgccctattcgccatcttaacatagggcattccccacagctgcaggca

SEQ ID NO: 330742 - DNA, 120 bp, Artificial Sequence
  ENSG00000136718_5 (sequence is synthesized)
ccagtgaagcgtctaagggaccatcttggttgagggcggaagtgaggactgtgtcgcgctggaggagcccacagattctcccggacccacgtggaagcggcactcaagatgctgcgccgc

SEQ ID NO: 330743 - DNA, 120 bp, Artificial Sequence
  ENSG00000136718_6 (sequence is synthesized)
gaggcccgcctgcgccgcgagtacctgtaccgcaaggcccgggaggaggcgcagcgctcagcccaggagaggaaggagcggctgcggcgcgcgctggaagaaaaccgcctgattcccact

SEQ ID NO: 330744 - DNA, 120 bp, Artificial Sequence
  ENSG00000136718_7 (sequence is synthesized)
gaaggtgtgaccagccacgtggatgatgaataccgatgggcaggagtcgaggatcccaaggttatgatcactacctcccgagaccccagttcccgcctcaagatgtttgcaaaggagctg

SEQ ID NO: 330745 - DNA, 120 bp, Artificial Sequence
  ENSG00000136718_8 (sequence is synthesized)
aagctggtgttcccgggcgcccagcgaatgaaccgaggtcgacatgaagtgggggcactggtgcgagcctgcaaagccaacggcgtcaccgatctgctggtcgttcacgagcatcggggc

SEQ ID NO: 330746 - DNA, 120 bp, Artificial Sequence
  ENSG00000136718_9 (sequence is synthesized)
acacctgtggggctcatcgtcagccacctgccctttggtcctactgcctacttcacgctgtgcaatgtggtcatgcggcatgacatcccagacctgggcaccatgtcggaggccaagccc

SEQ ID NO: 330747 - DNA, 120 bp, Artificial Sequence
  ENSG00000136718_10 (sequence is synthesized)
cacctcatcacacacggcttctcctcccgcctgggcaagcgggtctctgacatcctccgatacctatttcccgtgcccaaagatgacagccaccgggtcatcaccttcgcaaaccaggac

SEQ ID NO: 330748 - DNA, 120 bp, Artificial Sequence
  ENSG00000136718_11 (sequence is synthesized)
gactacatatcattccggcaccatgtgtataagaagacagaccaccgcaacgtggagctcactgaggtcgggccccgctttgagctgaagctgtacatgatccgtctgggcacgctggag

SEQ ID NO: 330749 - DNA, 120 bp, Artificial Sequence
  ENSG00000136718_12 (sequence is synthesized)
caggaggccacagcagacgtggagtggcgctggcacccttacaccaataccgcacgcaagagagtcttcctgagcaccgagtgagcacactcaccactcagtcaggacatggacttggaa

SEQ ID NO: 330750 - DNA, 120 bp, Artificial Sequence
  ENSG00000136718_13 (sequence is synthesized)
ctcaggatggggctgtcatagacagacccaccagtaggaactgtcacagaatggcctgctgaactgggatgtggaactgtggcgggtggagaggtctgaataaaccgtctgtgtcatggc

SEQ ID NO: 330751 - DNA, 120 bp, Artificial Sequence
  ENSG00000136718_14 (sequence is synthesized)
cggcactcaagatggtaggagaatgagctcctgtttcggaggtccggggcgcgtgaagtgctggggatgtggctctggggacttggaggctcagcggctccggggctccggggttccggg

SEQ ID NO: 330752 - DNA, 120 bp, Artificial Sequence
  ENSG00000136718_15 (sequence is synthesized)
gtgggggttaacagagagagagatttgatgctaacgtcccctcaagagtgagggtcatatgagctcttcagcaggcagatgtgggtagcagggccagcctgtgtcaggggcagcccacca

SEQ ID NO: 330753 - DNA, 120 bp, Artificial Sequence
  ENSG00000136718_16 (sequence is synthesized)
agttaactcactgagtggaagccgccagtgtgccaacgcggaggggacaggccacacccagtgctcagcagctgattcctcatgtaagtggcatcatgtggtatttgttttgtgtctggc

SEQ ID NO: 330754 - DNA, 120 bp, Artificial Sequence
  ENSG00000136718_17 (sequence is synthesized)
ttatttctattaacataatgttctccaggttcctccatgttattgcaaatgataggatttctttccttgtaaaaaataacatgccacattttcttaccaatccgtccaccaatagacact

SEQ ID NO: 330755 - DNA, 120 bp, Artificial Sequence
  ENSG00000136718_18 (sequence is synthesized)
taggtcgttttcatagtttggcagttgtggaaatgctgcagtaaacatgggagtatagctatcttttgaagataatgatttcatctcttttttatatgtatacccagaagtgggattgct

SEQ ID NO: 330756 - DNA, 120 bp, Artificial Sequence
  ENSG00000136718_19 (sequence is synthesized)
gcatcaaatggtggttctatttttaattttttgaggaaccgccatactgttttccataaaggctgtactaatttccattctcaccaacagttcactagggttcccttttctccacattgt

SEQ ID NO: 330757 - DNA, 120 bp, Artificial Sequence
  ENSG00000136718_20 (sequence is synthesized)
tgccaacattctttatcttgtgttttttaataacagctatcctaacaggtatgaggtgatctctctcattgcggttttgatttgcatttccctaacggttggtgatactgagcatttttg

SEQ ID NO: 330758 - DNA, 120 bp, Artificial Sequence
  ENSG00000136718_21 (sequence is synthesized)
catacaccgggtcatttgttctttgttgttgacttgagtcccttatatagtttggatactgctgtggcctgaatgtttgtgtcccccaaaaattcgtatattgaactctcatccctaagg

SEQ ID NO: 330759 - DNA, 120 bp, Artificial Sequence
  ENSG00000136718_22 (sequence is synthesized)
tcaacagtttagggaagcgattaggtcctgaggactctgccctcttgcatagaattagtgctcttataaaagatgcccgagggagctcttttgcccctcctgccatgtgaggacacagct

SEQ ID NO: 330760 - DNA, 120 bp, Artificial Sequence
  ENSG00000136718_23 (sequence is synthesized)
ttttgcccctcctgccatgtgaggacacagctagaagctaccatctgtgaaccaggaagcccccctcaccagacactgaatctgctggagccaccatcttggacttcccagcctccagag

SEQ ID NO: 330761 - DNA, 120 bp, Artificial Sequence
  ENSG00000136718_24 (sequence is synthesized)
tacctcgtgctgcttgccgttgacccacagctgttccctcccaggcaccatgtgtataagaagacagaccaccgcaacgtggagctcactgagtgtacatgatccgtctgggcacgctgg

SEQ ID NO: 330762 - DNA, 120 bp, Artificial Sequence
  ENSG00000136718_25 (sequence is synthesized)
ggcaccatcccatcagaggaaactgctcctggaactgtcccccatgcccttgtcactgcacagatggcattgcagggctctccctgagtgtgccctgtcccacttacatggcacacatgg

SEQ ID NO: 330763 - DNA, 120 bp, Artificial Sequence
  ENSG00000136718_26 (sequence is synthesized)
gagtgcctcactgactctgcacctggcttgttaattacctcccccactggagtgcctgctggggaaagacagtgtccctcacacattattggtgcccatacgtttattcactgcattatt

SEQ ID NO: 330764 - DNA, 120 bp, Artificial Sequence
  ENSG00000136718_27 (sequence is synthesized)
tttccaaatgcttgccggccgttttccttgcccattgggttctcctgttggttttgagagtgtttcttccgtgtgatgaaaaccgcctgattcccactgagttacgccgagaggctctgg

SEQ ID NO: 330765 - DNA, 80 bp, Artificial Sequence
  ENSG00000136720_0 (sequence is synthesized)
agagcgttctcggcgcggagtggagcggagcgggctggtgctgggggcgcggagagcgctgtgctggccggggccgggag

SEQ ID NO: 330766 - DNA, 120 bp, Artificial Sequence
  ENSG00000136720_1 (sequence is synthesized)
cgccccgcgcccgggccccggcgatggtgacacatgcggcggcggcgcgccggcggcaggaccatggttgagcgcgccagcaagttcgtgctggtggtggcgggctcggtgtgcttcatg

SEQ ID NO: 330767 - DNA, 120 bp, Artificial Sequence
  ENSG00000136720_2 (sequence is synthesized)
tgctggtggtggcgggctcggtgtgcttcatgctcatcttgtaccagtacgcgggcccaggactgagcctgggcgcgcccggcggccgcgcgccgcccgacgacctggacctgttcccca

SEQ ID NO: 330768 - DNA, 120 bp, Artificial Sequence
  ENSG00000136720_3 (sequence is synthesized)
cacccgacccccactacgagaagaagtactacttcccggtccgcgagctggagcgctcgctgcgcttcgacatgaagggcgacgacgtgatcgtcttcctgcacatccagaagacgggcg

SEQ ID NO: 330769 - DNA, 120 bp, Artificial Sequence
  ENSG00000136720_4 (sequence is synthesized)
gcaccaccttcggccgccacctcgtgcagaacgtacgcctcgaggtgccgtgcgactgccggcccggccagaagaagtgcacctgctaccggcccaaccgccgcgagacttggctcttct

SEQ ID NO: 330770 - DNA, 120 bp, Artificial Sequence
  ENSG00000136720_5 (sequence is synthesized)
cccgcttctccaccggctggagctgcgggctgcacgccgactggaccgagctcaccaactgcgtgcccggcgtgctggaccgccgcgactccgccgcgctgcgcacgcccaggaagttct

SEQ ID NO: 330771 - DNA, 120 bp, Artificial Sequence
  ENSG00000136720_6 (sequence is synthesized)
actacatcaccctgctacgagaccccgtgtcccgctacctgagcgagtggcggcatgtgcagaggggtgccacgtggaagacgtcgttgcatatgtgtgatgggcgcacgcccacgcctg

SEQ ID NO: 330772 - DNA, 120 bp, Artificial Sequence
  ENSG00000136720_7 (sequence is synthesized)
aggagctgccgccctgctacgagggcacggactggtcgggctgcacgctacaggagttcatggactgcccgtacaacctggccaacaaccgccaggtgcgcatgctggccgacctgagcc

SEQ ID NO: 330773 - DNA, 120 bp, Artificial Sequence
  ENSG00000136720_8 (sequence is synthesized)
tggtgggctgctacaacctgtccttcatccccgagggcaagcgggcccagctgctgctcgagagcgccaagaagaacctgcggggcatggccttcttcggcctgaccgagttccagcgca

SEQ ID NO: 330774 - DNA, 120 bp, Artificial Sequence
  ENSG00000136720_9 (sequence is synthesized)
agacgcagtacctgttcgagcggacgttcaacctcaagttcatccggcccttcatgcagtacaatagcacgcgggcgggcggcgtggaggtggatgaagacaccatccggcgcatcgagg

SEQ ID NO: 330775 - DNA, 120 bp, Artificial Sequence
  ENSG00000136720_10 (sequence is synthesized)
agctcaacgacctggacatgcagctgtacgactacgccaaggacctcttccagcagcgctaccagtacaagcggcagctggagcgcagggagcagcgcctgaggagccgcgaggagcgtc

SEQ ID NO: 330776 - DNA, 120 bp, Artificial Sequence
  ENSG00000136720_11 (sequence is synthesized)
tgctgcaccgggccaaggaggcactgccgcgggaggatgccgacgagccgggccgcgtgcccaccgaggactacatgagccacatcattgagaagtggtagtggcggtggtggccacggg

SEQ ID NO: 330777 - DNA, 120 bp, Artificial Sequence
  ENSG00000136720_12 (sequence is synthesized)
gaggcctcttggggggtgtgggggataaaacaggacagacgacaggtccacccaagactgtcaagggatgagcatcccaaacctgctccacagaggtagctgcgtcctgaaaaaaaacag

SEQ ID NO: 330778 - DNA, 120 bp, Artificial Sequence
  ENSG00000136720_13 (sequence is synthesized)
agcagggatgtagtggggctgggcagggatgggggcttgagaaatcaacaggtgcagcccagtgggtcagaggaaagcgtgctcgaaggatgccatggtcagggcagggcctccagagca

SEQ ID NO: 330779 - DNA, 120 bp, Artificial Sequence
  ENSG00000136720_14 (sequence is synthesized)
ggtgttgtgcctggagctgctctcctggcctccttggatttatcgcaaaaactgaaggtttgcgcaagagacgaggacagcggaaagtggacctgccaggccgggagtgtgtccctcacc

SEQ ID NO: 330780 - DNA, 120 bp, Artificial Sequence
  ENSG00000136720_15 (sequence is synthesized)
aactatgcacacagcactcgctcttagctcctctgtccgggctactaggagtgagaccagcttctggcaactgccccagctccaggccatcccatagcccctcctcttctggctgccccc

SEQ ID NO: 330781 - DNA, 120 bp, Artificial Sequence
  ENSG00000136720_16 (sequence is synthesized)
cccagctcacccatctgtagctccctcaaagtcagggcccaccccatctgaggcagagaagactcgagtccagcccccaggaagcctgctcccctctctggcccatggtcctgcttcatg

SEQ ID NO: 330782 - DNA, 120 bp, Artificial Sequence
  ENSG00000136720_17 (sequence is synthesized)
ctttgggtcaggaggccaaagctgatgttcaggccccacccactccctacagtcctcagaccaaggaggggtttgggtagtaggcccgagctgcattgccggccttcctcgggccaactg

SEQ ID NO: 330783 - DNA, 120 bp, Artificial Sequence
  ENSG00000136720_18 (sequence is synthesized)
gcagcccaggagtggggaggctttggccagggatgctgccacttgtgcgtgagtccgcggctggcccttggaggtgaccatccaggcaggcctggctcagactggaagggctggggaccg

SEQ ID NO: 330784 - DNA, 120 bp, Artificial Sequence
  ENSG00000136720_19 (sequence is synthesized)
agggctcccctgcctctgttctcctttctgacccactgggatttgctagcaggctgccccagccccatcaccgaaacacatactcaagagctcaaataccactgctcccaccagcgtacg

SEQ ID NO: 330785 - DNA, 120 bp, Artificial Sequence
  ENSG00000136720_20 (sequence is synthesized)
gattaagttcatcaggcttccatcggctggagcatgggaccatagcccctgcccaggagccgtaccctcggaccacagtggctctgtatggccaggaactgggactcgagctttcagatt

SEQ ID NO: 330786 - DNA, 120 bp, Artificial Sequence
  ENSG00000136720_21 (sequence is synthesized)
ctcaactagccttggcaaaacagctgtaggtggcctccctgacaacagacactcagccctccccaccctggctctccttgcatttccccatgctccccaccccctggcaaaaggctggcc

SEQ ID NO: 330787 - DNA, 120 bp, Artificial Sequence
  ENSG00000136720_22 (sequence is synthesized)
atgctctgttcccagcagccgcgcaggtttccccactggctgcaatggccctaccaaaagccatgttgcatatccgttgtaagcacgtgccctgtgccctgtccccattccttatgccct

SEQ ID NO: 330788 - DNA, 120 bp, Artificial Sequence
  ENSG00000136720_23 (sequence is synthesized)
aggaggccaagctggtgtctctaggagggcccacacaggcaccctggatcccccagagagtagattggtgtgctcaggccgcaggctgactcagaggtagggcagtgggctctgcaggcc

SEQ ID NO: 330789 - DNA, 120 bp, Artificial Sequence
  ENSG00000136720_24 (sequence is synthesized)
acctggctggggttggtgggggtcctctctcctgccccagcttccactcagccaccacagttgccacaccatggggtggagacgtgggtcaccacgggcttgggagcaagcgccttctgc

SEQ ID NO: 330790 - DNA, 120 bp, Artificial Sequence
  ENSG00000136720_25 (sequence is synthesized)
agcacaggaagccgaagctggggtcaggtgaggtcgctacccctggaggtctggcataagggccccaccctcaggtctcctacactggccccattttactttggggtccaaggacaggat

SEQ ID NO: 330791 - DNA, 120 bp, Artificial Sequence
  ENSG00000136720_26 (sequence is synthesized)
ggtcaacagggcagggtggacagcgtgccagcgccgcgcagggccacctccctgggtggatgcatcacactaaggaagtgagtgccaaggggatttagtggtgtggttctttcaaaggga

SEQ ID NO: 330792 - DNA, 120 bp, Artificial Sequence
  ENSG00000136720_27 (sequence is synthesized)
ggtcagggtcaatgggaatctgctcggacactcaacatgggggtgggtgcactccttggaggaggaggaacacgttcaggggattgtgaggtcttgcacaagccacgtggggcaccttgg

SEQ ID NO: 330793 - DNA, 120 bp, Artificial Sequence
  ENSG00000136720_28 (sequence is synthesized)
cttcccggcaggaggtggacacccagccagaggcctggctcaaggtgacctcaccttcaccatgggcttcctgggtgcgcgggcctgagcgcaggttgttttgtacatattggaatatgt

SEQ ID NO: 330794 - DNA, 120 bp, Artificial Sequence
  ENSG00000136720_29 (sequence is synthesized)
gttaacttatgccccgcatcccaactcacacggaagcacgggtcttgtctcagtctcttcgctgcatttggaaagcagtctcctctcgggccagcgccgggctgaggtgtccagaggcgg

SEQ ID NO: 330795 - DNA, 120 bp, Artificial Sequence
  ENSG00000136720_30 (sequence is synthesized)
cggcagctggcagtgccctcagcccccaagtgtccagcctggcacttcccattcaggccacctgctttgggtcaacagttcctttgccagcagcatctcctaaattgtaaggactctgtc

SEQ ID NO: 330796 - DNA, 120 bp, Artificial Sequence
  ENSG00000136720_31 (sequence is synthesized)
caccggggccctcccagggctgtgaggacggaaacaggcagggagtggagctaacagcttagtcaccaggacccccagacctgcaaacgtcccctcctggaaggggaagccaggaacagc

SEQ ID NO: 330797 - DNA, 120 bp, Artificial Sequence
  ENSG00000136720_32 (sequence is synthesized)
agaactgcccacaaaacaaggctgtgaacttttcgggaactggaactgtttaacttgaacccaggattgtttaaagctttatttatttatagcttcttcttaaaaaaaagtgttgaagaa

SEQ ID NO: 330798 - DNA, 120 bp, Artificial Sequence
  ENSG00000136720_33 (sequence is synthesized)
attttttggttattcatacaaaaaaatgagttgatgatggaaaagcaagtcataatcatctaattgtttttgtctaggtcgagaatgaatgttagctgatgaaataaaccctgacaagga

SEQ ID NO: 330799 - DNA, 120 bp, Artificial Sequence
  ENSG00000136720_34 (sequence is synthesized)
aagagtcgaggatcggccaactgtggcttgtccaagctggacagccctgccactgtgctccatggccacagatggccagcccttgacagaatggctgcctgctccttggaccccacacag

SEQ ID NO: 330800 - DNA, 120 bp, Artificial Sequence
  ENSG00000136720_35 (sequence is synthesized)
tccctgccagctggggtgggcccatcctcatgccgagcgtcatgctgtgacctccaggaggcatattgtcttgttttgtgcaaggaggaaacagatgacagatgcattccttggggaact

SEQ ID NO: 330801 - DNA, 120 bp, Artificial Sequence
  ENSG00000136720_36 (sequence is synthesized)
ttacaaagtcgttgaaatggtagtaaagtgaacctcatacctttcaccgagacccactgcttgttaacattttgcaatatttgtgcttgtgagtgggtgctctcacttgctgtttacata

SEQ ID NO: 330802 - DNA, 120 bp, Artificial Sequence
  ENSG00000136720_37 (sequence is synthesized)
tatgtatatctgtagatacatgtgtacttacatgtatatttatatatgtagttatatacatgcttttgcattttagtagaatcatttgaatgtaagctgcaggcatttcctcaatatttt

SEQ ID NO: 330803 - DNA, 120 bp, Artificial Sequence
  ENSG00000136731_0 (sequence is synthesized)
agctgggcaattgctttgcgaggctgggtgttgagtcgagccgcgggaaaggcgcgtgtcggcctctcactggcgcagcctgcactgccgctgccgcctcgccccgccctgccctggcgt

SEQ ID NO: 330804 - DNA, 120 bp, Artificial Sequence
  ENSG00000136731_1 (sequence is synthesized)
tgtctctggcactgtggcggactgaccacggcccgggcatgggctgcaagggagacgcgagcggtgcgtgtgccgcgggtgcgctgccggtgacaggagtttgctataaaatgggagttc

SEQ ID NO: 330805 - DNA, 120 bp, Artificial Sequence
  ENSG00000136731_2 (sequence is synthesized)
tggttgtactcactgttctgtggctgttctcctcagtaaaggccgactcaaaagccattacaacctctcttacaacaaaatggttttccactccattgttgttagaagccagtgagtttt

SEQ ID NO: 330806 - DNA, 120 bp, Artificial Sequence
  ENSG00000136731_3 (sequence is synthesized)
tagcagaagacagtcaagagaaattttggaattttgtagaagccagtcaaaatattggatcatcagatcatgacggtaccgattattcctactatcatgcaatattggaggctgcatttc

SEQ ID NO: 330807 - DNA, 120 bp, Artificial Sequence
  ENSG00000136731_4 (sequence is synthesized)
agtttctgtcacccctccagcagaatttgtttaaattttgtctgtcccttcgttcttactcagctacaatccaagccttccagcagatagcagctgatgaacctccaccagaaggatgta

SEQ ID NO: 330808 - DNA, 120 bp, Artificial Sequence
  ENSG00000136731_5 (sequence is synthesized)
attcgtttttttcagtgcatggaaagaagacttgtgaatctgatacccttgaggctcttctactgacagcctctgaaagacccaaacctttattgttcaaaggagatcacagatatccct

SEQ ID NO: 330809 - DNA, 120 bp, Artificial Sequence
  ENSG00000136731_6 (sequence is synthesized)
cgtctaatcctgaaagccctgtggtgattttctactctgagattggctctgaggaattttccaattttcaccgccagcttatatcaaaaagcaatgcaggcaaaatcaattatgtattca

SEQ ID NO: 330810 - DNA, 120 bp, Artificial Sequence
  ENSG00000136731_7 (sequence is synthesized)
gacattatatatttaatcccaggaaggagcctgtttacctctctggctatggcgtggaattggccattaagagcactgagtacaaggccaaggatgatactcaggtgaaaggaactgagg

SEQ ID NO: 330811 - DNA, 120 bp, Artificial Sequence
  ENSG00000136731_8 (sequence is synthesized)
taaacaccacagtgattggtgaaaatgatcctattgatgaggttcaggggttcctctttggaaaattaagagatctgcaccccgacctggagggacagttgaaagaactcagaaagcatc

SEQ ID NO: 330812 - DNA, 120 bp, Artificial Sequence
  ENSG00000136731_9 (sequence is synthesized)
ttgtagagagcaccaatgaaatggcacctttaaaggtttggcagttgcaagatctcagtttccagactgctgctcgaatcttggcttctcctgttgagttggctttggttgtcatgaagg

SEQ ID NO: 330813 - DNA, 120 bp, Artificial Sequence
  ENSG00000136731_10 (sequence is synthesized)
atcttagtcagaattttcctaccaaagccagagcaataacaaaaacagctgtgagctcagaacttagaaccgaagtggaagagaatcagaagtatttcaagggaactttaggattacaac

SEQ ID NO: 330814 - DNA, 120 bp, Artificial Sequence
  ENSG00000136731_11 (sequence is synthesized)
ctggagattcagccctcttcatcaatggacttcacatggatttagatacacaggatatattcagtctgtttgatgtgttgaggaatgaagctcgggtaatggagggtctgcatagattgg

SEQ ID NO: 330815 - DNA, 120 bp, Artificial Sequence
  ENSG00000136731_12 (sequence is synthesized)
gaatagaaggcctttctctgcataatgttttgaagctgaacatccagccctctgaggcagactatgccgtagacatccggagtcctgctatttcatgggtcaacaacctggaggttgata

SEQ ID NO: 330816 - DNA, 120 bp, Artificial Sequence
  ENSG00000136731_13 (sequence is synthesized)
gcagatataattcgtggccttctagtttacaagagttgcttcgacccacctttcctggtgttattcggcagatcaggaaaaacttacataatatggttttcatagttgatcctgcacatg

SEQ ID NO: 330817 - DNA, 120 bp, Artificial Sequence
  ENSG00000136731_14 (sequence is synthesized)
agaccacagcagagttgatgaacacagctgagatgttccttagtaatcatataccactaagaattggttttatctttgtggttaatgactctgaagatgttgatgggatgcaagatgctg

SEQ ID NO: 330818 - DNA, 120 bp, Artificial Sequence
  ENSG00000136731_15 (sequence is synthesized)
gagtggctgttcttagagcatataattatgttgcccaagaagtggatgattatcatgccttccagactctgacacatatctataacaaggtgaggactggagaaaaagtgaaagttgaac

SEQ ID NO: 330819 - DNA, 120 bp, Artificial Sequence
  ENSG00000136731_16 (sequence is synthesized)
atgtggtcagtgtcctggagaagaaatatccgtatgtagaagtgaatagcattttggggattgattctgcttatgatcggaatcggaaggaagcaagaggctactatgagcagactggag

SEQ ID NO: 330820 - DNA, 120 bp, Artificial Sequence
  ENSG00000136731_17 (sequence is synthesized)
ttggacctctgcccgttgtgctgttcaatggaatgccctttgaaagggaacagctagaccctgatgagttagaaaccatcacaatgcataaaatcctggagaccaccaccttcttccaaa

SEQ ID NO: 330821 - DNA, 120 bp, Artificial Sequence
  ENSG00000136731_18 (sequence is synthesized)
gagcggtgtacttgggtgaactgccccatgatcaagatgtggtagagtatatcatgaatcagccaaatgttgttccacgaatcaattctaggattttgacagctgaacgagactacctgg

SEQ ID NO: 330822 - DNA, 120 bp, Artificial Sequence
  ENSG00000136731_19 (sequence is synthesized)
atttaacagcgagtaataacttctttgtggatgattatgctagatttactatcttggattcccaaggcaagactgctgctgtagccaatagtatgaactatctgacaaagaaaggaatgt

SEQ ID NO: 330823 - DNA, 120 bp, Artificial Sequence
  ENSG00000136731_20 (sequence is synthesized)
cctccaaggaaatctatgatgattcttttattaggccagtaactttttggattgttggggattttgatagcccttctggacggcagttactgtatgatgccatcaaacatcagaaatcca

SEQ ID NO: 330824 - DNA, 120 bp, Artificial Sequence
  ENSG00000136731_21 (sequence is synthesized)
gtaacaatgttagaataagcatgatcaataatcctgccaaagagataagctatgagaacactcagatctccagagcaatctgggcagctctccaaactcagacttccaacgctgctaaga

SEQ ID NO: 330825 - DNA, 120 bp, Artificial Sequence
  ENSG00000136731_22 (sequence is synthesized)
acttcatcaccaaaatggccaaggagggggctgcagaggccctggctgcaggagctgacattgcggagttctctgttgggggaatggatttcagtctttttaaagaggtctttgagtctt

SEQ ID NO: 330826 - DNA, 120 bp, Artificial Sequence
  ENSG00000136731_23 (sequence is synthesized)
ccaaaatggatttcattttgtctcatgccgtgtactgcagggatgttctgaagctgaagaagggacagagggcagtgatcagcaatggaaggatcattgggccactggaggatagtgagc

SEQ ID NO: 330827 - DNA, 120 bp, Artificial Sequence
  ENSG00000136731_24 (sequence is synthesized)
tctttaatcaagacgatttccacctcctcgaaaatatcatcttaaaaacctcaggacagaaaataaaatctcatattcaacagcttcgggtagaagaagatgtggcaagcgacttggtaa

SEQ ID NO: 330828 - DNA, 120 bp, Artificial Sequence
  ENSG00000136731_25 (sequence is synthesized)
tgaaggtggatgctcttctgtcagcgcaaccaaaaggagatccaagaatcgagtaccagttttttgaagacagacacagtgcaatcaaactgaggccgaaggaaggggagacatactttg

SEQ ID NO: 330829 - DNA, 120 bp, Artificial Sequence
  ENSG00000136731_26 (sequence is synthesized)
atgttgtggctgtcgttgaccctgtcaccagagaagcacagagacttgctcctttgctcttggttttggctcagctgataaacatgaatctgagagtatttatgaactgccaatccaaac

SEQ ID NO: 330830 - DNA, 120 bp, Artificial Sequence
  ENSG00000136731_27 (sequence is synthesized)
tttctgacatgcctttaaaaagcttttaccgttatgtcttagaaccagagatttctttcacttcagacaatagttttgctaagggtccaatcgcaaaatttttggatatgcctcagtctc

SEQ ID NO: 330831 - DNA, 120 bp, Artificial Sequence
  ENSG00000136731_28 (sequence is synthesized)
cactgttcactctgaatttgaacacacctgagagctggatggtagaatctgtcagaacaccatatgatcttgataatatttatttagaagaggtggacagtgtagtggctgctgagtatg

SEQ ID NO: 330832 - DNA, 120 bp, Artificial Sequence
  ENSG00000136731_29 (sequence is synthesized)
agctggaatacctgttactggaaggtcattgctacgacatcaccacaggccagcctccacggggactacagtttaccttaggaacttcagccaacccggtcattgtggacaccattgtta

SEQ ID NO: 330833 - DNA, 120 bp, Artificial Sequence
  ENSG00000136731_30 (sequence is synthesized)
tggccaatctgggctactttcagctgaaagccaacccaggagcttggatcctcagacttaggaagggacgctctgaagatatttatagaatttacagccacgatggcactgattctcccc

SEQ ID NO: 330834 - DNA, 120 bp, Artificial Sequence
  ENSG00000136731_31 (sequence is synthesized)
ctgatgctgatgaggtggttatcgtcctcaacaacttcaaaagcaaaattattaaagtgaaggttcagaagaaggcagatatggtgaacgaagacttgctgagtgatggaacgagtgaga

SEQ ID NO: 330835 - DNA, 120 bp, Artificial Sequence
  ENSG00000136731_32 (sequence is synthesized)
atgaatctggattttgggattccttcaaatggggctttacaggacagaagactgaggaagtgaagcaagataaagatgacataattaatattttctccgttgcatctggtcatctctacg

SEQ ID NO: 330836 - DNA, 120 bp, Artificial Sequence
  ENSG00000136731_33 (sequence is synthesized)
aaagatttcttcgcataatgatgctatccgtgctgaagaataccaagactcctgtgaaattctggttcttgaagaattacttgtcccccacatttaaggagtttataccttacatggcaa

SEQ ID NO: 330837 - DNA, 120 bp, Artificial Sequence
  ENSG00000136731_34 (sequence is synthesized)
atgaatacaatttccagtatgagcttgttcagtacaaatggccccggtggcttcatcaacaaactgaaaaacagcgtatcatctggggttacaagatcctcttcctggatgtacttttcc

SEQ ID NO: 330838 - DNA, 120 bp, Artificial Sequence
  ENSG00000136731_35 (sequence is synthesized)
cactagttgttgacaagttcctgtttgtggatgctgatcagattgtacgaacagatctgaaagagttaagagatttcaatttggatggtgctccttatggttacactcctttctgtgaca

SEQ ID NO: 330839 - DNA, 120 bp, Artificial Sequence
  ENSG00000136731_36 (sequence is synthesized)
gccgaagagaaatggacggctacaggttctggaagtcagggtactgggccagtcatttagccgggcgaaagtatcatatcagtgcactatatgttgtggatctgaagaagtttaggaaaa

SEQ ID NO: 330840 - DNA, 120 bp, Artificial Sequence
  ENSG00000136731_37 (sequence is synthesized)
tagctgctggtgacagactcaggggacagtaccaaggtctgagtcaggaccctaacagcctttcaaatcttgatcaagatctgcccaataacatgattcatcaggtgccaattaaatccc

SEQ ID NO: 330841 - DNA, 120 bp, Artificial Sequence
  ENSG00000136731_38 (sequence is synthesized)
tccctcaagaatggctttggtgtgaaacgtggtgtgatgacgcctctaagaaaagggcaaaaaccattgatttgtgtaataatccgatgaccaaagagccgaaactggaagcagctgtgc

SEQ ID NO: 330842 - DNA, 120 bp, Artificial Sequence
  ENSG00000136731_39 (sequence is synthesized)
ggattgtcccggagtggcaggactacgaccaagagatcaaacagctacagatccgctttcagaaggagaaagaaacgggagcactgtacaaagagaagacaaaagaaccaagccgagaag

SEQ ID NO: 330843 - DNA, 120 bp, Artificial Sequence
  ENSG00000136731_40 (sequence is synthesized)
gtcctcagaaacgtgaagaattatgatctctggagaaggacaggaaatcaccccatttgaaaaacagtttttataataaatgctagttttttctgatctgtctatacaactgctgataag

SEQ ID NO: 330844 - DNA, 120 bp, Artificial Sequence
  ENSG00000136731_41 (sequence is synthesized)
ccggctgggcaggagtgccacaccttttgattctgagcatttgattctgacttctgtactctggtggccactggatctttgggattaaagctctgttggatttgtacctcagaggaagac

SEQ ID NO: 330845 - DNA, 120 bp, Artificial Sequence
  ENSG00000136731_42 (sequence is synthesized)
caagtggctgatcctttggactctgtaaagagcattcttctagtcagagggtggaatggcagcagcaactggaagaaaatgagttttttggtgcccacacccaagagcacacacatgctg

SEQ ID NO: 330846 - DNA, 120 bp, Artificial Sequence
  ENSG00000136731_43 (sequence is synthesized)
cactgtctcggaaagcagggccagctagagccaccatgttcttccttacctcagtttacctgcggcctgcgctgcactgcagatgcccaccctgccctgggtctggccggcggaagctct

SEQ ID NO: 330847 - DNA, 120 bp, Artificial Sequence
  ENSG00000136731_44 (sequence is synthesized)
gtttaattgaaatccaaccaacaattgtgtgtcaaggctggtttggtgcagtggctgggcaaattaattttgggccaggatgggggtgggttgcagtgagggtagggaaaatgtcaggag

SEQ ID NO: 330848 - DNA, 120 bp, Artificial Sequence
  ENSG00000136731_45 (sequence is synthesized)
taggaaggttcgggggttaagggaagggaaggaagaccagaactggccatcctcttttataatccattagtagcaccatggctcatttgaaatgaaaatattacacttattccccaccca

SEQ ID NO: 330849 - DNA, 120 bp, Artificial Sequence
  ENSG00000136731_46 (sequence is synthesized)
accgcagtgaactttctaggtaattgttttgaaaacaatttttgtatctgtgaaagtctttgctttttctttccaccttctagaaaagtctgctaccagtttccttactgaatacagcca

SEQ ID NO: 330850 - DNA, 120 bp, Artificial Sequence
  ENSG00000136731_47 (sequence is synthesized)
tactcagcccctctcgcatccagcccgtcagggtcagggtcagggtcaggctccctcaagacgagcaccgcattgtctgccctcttttgcgtaggatttttctctcagacccaggggaca

SEQ ID NO: 330851 - DNA, 120 bp, Artificial Sequence
  ENSG00000136731_48 (sequence is synthesized)
ttgccttggacttttctctacaaatgccctcagatgtaagaccagaaatgattctgcttgtggaactcgtggctttctgtcctattttccttttatgtgagccctgcaggttgcctttgg

SEQ ID NO: 330852 - DNA, 120 bp, Artificial Sequence
  ENSG00000136731_49 (sequence is synthesized)
cgcccacaccagttctgtcttcatgtcgctgcatcgtgaagccccatttgcctttagtccctgctttgtgtgtcttcacttccacagccagtgttgcccctcagggcatactttgctggt

SEQ ID NO: 330853 - DNA, 120 bp, Artificial Sequence
  ENSG00000136731_50 (sequence is synthesized)
gaacgggctgtagagtcttgagtatgttattggcctaagtgggcatgaggccccagcatccgactccatctgccaggctgcagggcacagcagcactggcatagacaggcacgctctgtc

SEQ ID NO: 330854 - DNA, 120 bp, Artificial Sequence
  ENSG00000136731_51 (sequence is synthesized)
ttccaacgtgcaccagccttttcttacatattttgcctgtttttaaaaaatacgaggagagggtgcagatggatactgtgccctcaccctcctaagccaggtaatatattgatgtgcaga

SEQ ID NO: 330855 - DNA, 120 bp, Artificial Sequence
  ENSG00000136731_52 (sequence is synthesized)
cttttaagaaatcttagtcttatcacaaatatcaagtaatttattttttccattttcaaatgcaaaagttagcctaggaagcctcccagtcatcctgaaggaccttttgactttgctttt

SEQ ID NO: 330856 - DNA, 120 bp, Artificial Sequence
  ENSG00000136731_53 (sequence is synthesized)
ataattctgttaaaaattgaggaggggattaatgagtacaatgaaaacaaaacaaaacaaaaaattaagaagaggaaagctcaaaagaggataagagactgaaaaggcacctcagaatgg

SEQ ID NO: 330857 - DNA, 120 bp, Artificial Sequence
  ENSG00000136731_54 (sequence is synthesized)
ctgctgtgggcagagtctgtgacatgactttccccgccctgcccctctgttcagagcagctggaaagatgggatcagtaagattaaaaaacttttgttcggccaggcgtggtggctcaca

SEQ ID NO: 330858 - DNA, 62 bp, Artificial Sequence
  ENSG00000136731_55 (sequence is synthesized)
aatacaaaaattagccgggtgttgtggctcaccctctattcccagctactcgggaggcagag

SEQ ID NO: 330859 - DNA, 120 bp, Artificial Sequence
  ENSG00000136731_56 (sequence is synthesized)
agagcgagactccatctcagaaaacaaacaaacaaaaagaaacttttgttcaagctgcatcttcacattgaatgaaagcattcagacgggtgactgctgctgtccacaactgtgggcgga

SEQ ID NO: 330860 - DNA, 120 bp, Artificial Sequence
  ENSG00000136731_57 (sequence is synthesized)
agtgtgccttttcccagtttctcgtccaggaggttgcatagcaaatactcaagtcactgggatatatgctttccaaatgctggcccccatagcacctttccccatgtctttctaccaagc

SEQ ID NO: 330861 - DNA, 120 bp, Artificial Sequence
  ENSG00000136731_58 (sequence is synthesized)
ctcttatgtttaatctgtgcagggaagacaagagtagaccatattctctgtgtgctgtgcatgtcctggtgtcactcattgcctcttatctgtcgccattctaatataagtcagcttaat

SEQ ID NO: 330862 - DNA, 120 bp, Artificial Sequence
  ENSG00000136731_59 (sequence is synthesized)
agttgactctgaataatgcaaaacccagcttgcttccagaatggcctaggaccctcctcctcctgccagtttttttttttttttttggttcatgtggcataatcatctttcaaaattaac

SEQ ID NO: 330863 - DNA, 120 bp, Artificial Sequence
  ENSG00000136731_60 (sequence is synthesized)
caaatgccccagaaaatgatgttaccactaaaatattttctccaagaaggcatactgtaacagaaaagataggtaagatatttttttcccaagaagtaagaattgattgtgctgaatgtt

SEQ ID NO: 330864 - DNA, 120 bp, Artificial Sequence
  ENSG00000136731_61 (sequence is synthesized)
caaactctggaaactgttcacagtatgttgttcttagctgttatttatataaagtgaattattttctctctcaatcatgccatagtggagacttttgtttgtgagtaagtgacagagtaa

SEQ ID NO: 330865 - DNA, 120 bp, Artificial Sequence
  ENSG00000136731_62 (sequence is synthesized)
tatgaaataatgtgatatgtcagagtgacatgcagcatcctgagcctgtttttatgttctgtgtacagtggcatttgattgagatcaaagcctgtcacagcctgctgctgggggtgtggg

SEQ ID NO: 330866 - DNA, 120 bp, Artificial Sequence
  ENSG00000136731_63 (sequence is synthesized)
gatatgccagagtcctgtgtttggttttagaagtttactgaatgtttcccacatggagaataatggatggcatgttagtttctttaagagtggtaaagttgtacatctgtcattgttgca

SEQ ID NO: 330867 - DNA, 120 bp, Artificial Sequence
  ENSG00000136731_64 (sequence is synthesized)
tttcgaattgaacacatagatgcttgcctgtctgcttgggtgaatgcctcttgggagagcgaagattacgtgcatgatgtatgttaagaaacagtttccggtcaggcacagtggcttaca

SEQ ID NO: 330868 - DNA, 88 bp, Artificial Sequence
  ENSG00000136731_65 (sequence is synthesized)
ttccataaatggagcttaatttgctctgctgtccttaagccctcgtgggtttttttttaagagagtctcattctgtcacccaggctgg

SEQ ID NO: 330869 - DNA, 61 bp, Artificial Sequence
  ENSG00000136731_66 (sequence is synthesized)
tctgctgtccttaagccctcgtgggtttttttttaacctctgcctcccaagttcaaacaat

SEQ ID NO: 330870 - DNA, 120 bp, Artificial Sequence
  ENSG00000136731_67 (sequence is synthesized)
tgggattacaggcgtgagccactatgtccggtcaagccctcgtgttctgaaccttgtcaaggctctgcctgaatgagttttcatctgattgtggggaccaagtccctgagtagagggcca

SEQ ID NO: 330871 - DNA, 120 bp, Artificial Sequence
  ENSG00000136731_68 (sequence is synthesized)
gagggccaagagctagggacagggggaagagactggcccaggtggtagggaggaaagaactcccagagtttcctttagccaggaaacctgctctactgaccccgtgacttggacagtcag

SEQ ID NO: 330872 - DNA, 120 bp, Artificial Sequence
  ENSG00000136731_69 (sequence is synthesized)
acatcaccctgagagtgacaagtgtaaaatgactcccttcctcccccgccctccggaagtatatttagatacttgaaagcagtccttttctaaaatggccttacctatgtggcctgaacg

SEQ ID NO: 330873 - DNA, 120 bp, Artificial Sequence
  ENSG00000136731_70 (sequence is synthesized)
attaaaagaaagaactcagagttacaagggaaaaagaaaaagagttacaagggaattgtagtctttttctgaatagaatattagtactgtggtattgcatttcatgggaatggaaatgta

SEQ ID NO: 330874 - DNA, 120 bp, Artificial Sequence
  ENSG00000136731_71 (sequence is synthesized)
ttggtaaagctacctgatggaagctttctcttggtaacaaaaatggagggtgtattatgtgcagttatttaaatatatgtattccattgttgcgtggtttttttcccccctcaagacaga

SEQ ID NO: 330875 - DNA, 69 bp, Artificial Sequence
  ENSG00000136731_72 (sequence is synthesized)
attccattgttgcgtggtttttttcccccctcaagacagagatttgctcttgttgcccagggtggagta

SEQ ID NO: 330876 - DNA, 81 bp, Artificial Sequence
  ENSG00000136731_73 (sequence is synthesized)
cggcccgtcccattgttgtgtaattttaataattagttttttaagtacttgattttatgggcacatttttgtgggatgatt

SEQ ID NO: 330877 - DNA, 120 bp, Artificial Sequence
  ENSG00000136731_74 (sequence is synthesized)
taagtacttgattttatgggcacatttttgtgggatgattggagttaatcaaataaagcttgtcatgtgtgtagtttggtaagataacttctttaaattcatgttttctctgccttgagg

SEQ ID NO: 330878 - DNA, 120 bp, Artificial Sequence
  ENSG00000136731_75 (sequence is synthesized)
tagtgagggaaagatcttaatcagtattttggtaattaactgattgaattcaagcaaatgagacatcatgaacttcagtggttattgatatttcagggtatatacctgaaatgcctagag

SEQ ID NO: 330879 - DNA, 120 bp, Artificial Sequence
  ENSG00000136731_76 (sequence is synthesized)
gatacagatttctcatttcattctttggtctttcatttctctatatacagaaatgaaatgacacttctgggaggcagtagaagcaggaagtcaatgaattgagtagagggtcccattccc

SEQ ID NO: 330880 - DNA, 120 bp, Artificial Sequence
  ENSG00000136731_77 (sequence is synthesized)
tcaggctgtcattgatcagtgacaatttataaaaacaaactgcaaagtctgtggcaagtggctgcctgcttcctagaaggagcccatgaaggttaaactctgtggtcggtatttgcaagc

SEQ ID NO: 330881 - DNA, 90 bp, Artificial Sequence
  ENSG00000136731_78 (sequence is synthesized)
ggaggccatgaggatttgcaagcaaaaggtcctctcctgagtctttcccagatacccagcagtgcagaggctagctgtggaaggttgcag

SEQ ID NO: 330882 - DNA, 120 bp, Artificial Sequence
  ENSG00000136731_79 (sequence is synthesized)
gatacccagcagtgcagaggctagctgtggaaggttgcagtgggacaggaatgtattgtatgccttgccttacttgtcaccattgagatttccagagaaatgggcataacgtctcttaac

SEQ ID NO: 330883 - DNA, 120 bp, Artificial Sequence
  ENSG00000136731_80 (sequence is synthesized)
aacaacagcagaaagcaaaatacattaacttaaggttgacaacaaaagattatcaagtaccatgttttccaaccaaccagttattcgtggtaataataaaataaaggtgggaaaatgtta

SEQ ID NO: 330884 - DNA, 120 bp, Artificial Sequence
  ENSG00000136731_81 (sequence is synthesized)
taatttttaaggaaactgtgtactttaaaaatcttctttatgaatatccaatgttactgtaatcctgctccattaaatgcagcattgttgtcaggtgctgcctcttgcttgggaacagca

SEQ ID NO: 330885 - DNA, 120 bp, Artificial Sequence
  ENSG00000136731_82 (sequence is synthesized)
ttgggcttttaaatgtctgcagaatctctgcgttcgaagggaattgagaatgaacttcctggtactgtaatgaaaataaggtctgctcaacacagtaaacgtttcctctcttctttaaaa

SEQ ID NO: 330886 - DNA, 120 bp, Artificial Sequence
  ENSG00000136731_83 (sequence is synthesized)
cataatgatgctatccgtgctgaagaataccaagactcctgtgaaattctggttcttgaagaattacttgtcccccacatttaaggatctgcccaataacatgattcatcaggtgccaat

SEQ ID NO: 330887 - DNA, 120 bp, Artificial Sequence
  ENSG00000136731_84 (sequence is synthesized)
aagagagggtttggggcacaaggcgaccctgtgcccctgtcacattgagcttccgcctctaccgtgactcagtttaccctctggtgtcctatcccttcccctattcgcgagcgccccgag

SEQ ID NO: 330888 - DNA, 120 bp, Artificial Sequence
  ENSG00000136731_85 (sequence is synthesized)
atttttttaaaaagaaatatcttgagttattttttctttacaatatttctattgattgttgttagaacaggcatgtaagaaaaatatgctgtgttccatttgtctcacaaaaggcaaaaa

SEQ ID NO: 330889 - DNA, 120 bp, Artificial Sequence
  ENSG00000136731_86 (sequence is synthesized)
atgcctttaaaaaggtaaaacatgctatgtaagaaaacagttgaagaaattgtactgaatccaagttctgatattgcatgttagaggatcagatggatttataggtggacatcatgtttg

SEQ ID NO: 330890 - DNA, 120 bp, Artificial Sequence
  ENSG00000136731_87 (sequence is synthesized)
ttttcctgccttccattagccactcacacattctttgtagatgtaaatacagctttacatagcccactaccatattgcttctgtgtaataatccgatgaccaaagagccgaaactggaag

SEQ ID NO: 330891 - DNA, 120 bp, Artificial Sequence
  ENSG00000136732_0 (sequence is synthesized)
cctctcgccgccgagggtcaggagcccgggagcgcgaccctcccccggcccggcctggcccggcctggccagtccccgcggtctctgcccgggctgacgcccaggaatgtggtcgacgag

SEQ ID NO: 330892 - DNA, 120 bp, Artificial Sequence
  ENSG00000136732_1 (sequence is synthesized)
aagccccaacagcacggcgtggcctctcagcctcgagcctgatccggggatggcctctgcctccaccacaatgcatactaccaccattgcagagcctgatccagggatgtctggatggcc

SEQ ID NO: 330893 - DNA, 120 bp, Artificial Sequence
  ENSG00000136732_2 (sequence is synthesized)
ggatggcagaatggagacctccacccccaccataatggacattgtcgtcattgcaggtgtgattgctgctgtggccatcgtcctagtctccctcctcttcgtcatgctgcgctacatgta

SEQ ID NO: 330894 - DNA, 120 bp, Artificial Sequence
  ENSG00000136732_3 (sequence is synthesized)
ccggcacaagggcacgtaccacaccaatgaggccaagggcacggagtttgctgagagtgcagatgcagccctgcagggagaccctgccctccaagatgctggtgatagcagcagaaagga

SEQ ID NO: 330895 - DNA, 120 bp, Artificial Sequence
  ENSG00000136732_4 (sequence is synthesized)
aggaaaaatacaccccatcgcccagcacccctgctgataccaccagacagagagagagagcacttgattcttcccgagatagccacctggaaacactaggtgcctgcccagggaggaacg

SEQ ID NO: 330896 - DNA, 120 bp, Artificial Sequence
  ENSG00000136732_5 (sequence is synthesized)
gaggaggactcgcgctacaagaggccactcccagggacccagggaggcgatggccaccccagaggccaccttttgctccacggaggtgggagaaaatctgggcacatggggccccctggg

SEQ ID NO: 330897 - DNA, 120 bp, Artificial Sequence
  ENSG00000136732_6 (sequence is synthesized)
cagtgcaggacaacatcagctcactggcaggaaagtccttgttgagggtgagggggtgctggggtacccgggggctggggaagcaaggaaataagtcatctgtatgctgactggggataa

SEQ ID NO: 330898 - DNA, 120 bp, Artificial Sequence
  ENSG00000136732_7 (sequence is synthesized)
tggcatcaaatgtcagtccttgacatttggggggaacagcaggtgccagagctaaaaggtacctttgtctgccattgatccagctcagaacgattggaaataaatttgaaatgtaaccga

SEQ ID NO: 330899 - DNA, 120 bp, Artificial Sequence
  ENSG00000136732_8 (sequence is synthesized)
ctcggaagtctccaaggacccccatgaaacacctgcatttcctgtcatgattttgaggctgaaatcatcttcctcctcccagaacacctaggtgttctagtctgaagccatcctcactct

SEQ ID NO: 330900 - DNA, 120 bp, Artificial Sequence
  ENSG00000136732_9 (sequence is synthesized)
caactcccctccttcgagccctcaccctgtgcctgaattcttccttctttgctgggacagatggacaggaggaagacaggaagtggggaaccccttcaacaactcctatggcagagggga

SEQ ID NO: 330901 - DNA, 120 bp, Artificial Sequence
  ENSG00000136732_10 (sequence is synthesized)
gccataggagatgggccgggaaatgtaaagaccagcccacgcaggaaaaaaagagaactttttagcacagtgtcatctgaaaatgcaagagaagagaggctcttggtggcaacagaggag

SEQ ID NO: 330902 - DNA, 120 bp, Artificial Sequence
  ENSG00000136732_11 (sequence is synthesized)
tgtgacttccagcctcagggctagcacctgacccctgctctccgtccacatctgaaaaataccactggccctgagaatccattgcaactgaggttctgcaccccaacagctgcactcaag

SEQ ID NO: 330903 - DNA, 120 bp, Artificial Sequence
  ENSG00000136732_12 (sequence is synthesized)
ctgccaactgaagcagagagcactgcccgcactgcagggttgtgcctgtgtgccccgctgcctccaggggtggctgccttctgccagagaatggacagctgacatcctgaggacatagag

SEQ ID NO: 330904 - DNA, 120 bp, Artificial Sequence
  ENSG00000136732_13 (sequence is synthesized)
agttagtaggaatgactgtagccaatggcaaatcccatggatgaaaagccactcccaactccacaaagatgagcatagtgaaggctgcagtttagttggttcgtggttccccagaaggct

SEQ ID NO: 330905 - DNA, 120 bp, Artificial Sequence
  ENSG00000136732_14 (sequence is synthesized)
acattcagcagttgtcattcagtgccaggcacccagtctaatgctgagtatagagttgtgagcaagacaagcctgaacgtgtggagcttcctgtctgagcctgatccggggatggcctct

SEQ ID NO: 330906 - DNA, 120 bp, Artificial Sequence
  ENSG00000136732_15 (sequence is synthesized)
aggctgagaggcattctcatgtctgaagaggatgggcttgcctgacccccgcccccgtgcccagcccagcccagcagcccaagcagttctccaggactcaggtttcagaccttcaacact

SEQ ID NO: 330907 - DNA, 120 bp, Artificial Sequence
  ENSG00000136732_16 (sequence is synthesized)
tgccttgggagacaaacagcggtgcagcccttgcttgcaagccattccacattagacttcggattgatttatggcaggatccctgctgtgcgagaactgcagggggggtggggggcggct

SEQ ID NO: 330908 - DNA, 120 bp, Artificial Sequence
  ENSG00000136732_17 (sequence is synthesized)
atttcttgctgctaactcaggcaggatgtgtctatatcctgtctcagtttatgtagctgctcatcagagccagaggttagagcggagaggacccacttccgccaggccggcctgctctgc

SEQ ID NO: 330909 - DNA, 120 bp, Artificial Sequence
  ENSG00000136732_18 (sequence is synthesized)
ccaatgccacagttactgcgcgtgagtcatgcacagcaatccattgccttgcccttggatggaaggggtcaaggctcagtgagaagacggccaggtttggcagctttatatagaattcac

SEQ ID NO: 330910 - DNA, 120 bp, Artificial Sequence
  ENSG00000136732_19 (sequence is synthesized)
cgcctctggcagaagcagaggattgcattaagtgccaaatgaaattccacctcagccattgctcaattcctccagatgtcactggcactgggagtcacatgatgctggtggtcagcagct

SEQ ID NO: 330911 - DNA, 120 bp, Artificial Sequence
  ENSG00000136732_20 (sequence is synthesized)
ggacccttccaagggtgcccgtggttgggcaagtatttctggggacttgcagagctccctggggagcaaagggttgtgaagtacaaggcattctgcgcttgtggtgggaacaagtgaacc

SEQ ID NO: 330912 - DNA, 120 bp, Artificial Sequence
  ENSG00000136732_21 (sequence is synthesized)
catctgcagtgagtaggaagaggtcccctcaacagaggtgagaggttgggccaagtcaagtcagtttgcctcttcaggtggcagacctgtatgtacatctatgcctcaagtgcctgtctg

SEQ ID NO: 330913 - DNA, 120 bp, Artificial Sequence
  ENSG00000136732_22 (sequence is synthesized)
aggccacagccaaaacatcttccagtaactgagcatacccagtgggccaacaagcacgctctaaatacaaaaccaaacaaacagtaaagttaacagtgaatgaagagttaaaaataggag

SEQ ID NO: 330914 - DNA, 120 bp, Artificial Sequence
  ENSG00000136732_23 (sequence is synthesized)
aaagacaccttctccctacctcaatggcaattactttatttattgaggataatccttctagaagtaaatttgctgatacaaatatttcttattttacataataaaaatgcattttatata

SEQ ID NO: 330915 - DNA, 120 bp, Artificial Sequence
  ENSG00000136732_24 (sequence is synthesized)
gtgtatacactacccacaaccttcacaggcatcctttcctgcgagcctggtcaccaccctctgctgcaggctccctccccatcccactgagcctgtgtgcctctggctcatacagagcca

SEQ ID NO: 330916 - DNA, 120 bp, Artificial Sequence
  ENSG00000136732_25 (sequence is synthesized)
gcctttcctgaacccttgagttctcacggagccctctctggctagggaggaggagaagccttctagggaatgaggagaagcggccccctgcatcctgctcctgcacttttccttccttcc

SEQ ID NO: 330917 - DNA, 120 bp, Artificial Sequence
  ENSG00000136732_26 (sequence is synthesized)
agcatccttcaccactgcatctccaccctttgtgcccataaactgtgggtcctgttgtctctgggccactttggcctccccttcctcagcacatctcctggggaagcacggctatctgcc

SEQ ID NO: 330918 - DNA, 120 bp, Artificial Sequence
  ENSG00000136732_27 (sequence is synthesized)
ttgggatgtagccacgaacctcctccttggagccaatcctcctgaatgtttgaactgagtttccaggcagcagaatgttccctcctgcctcctgccgcccctgcggtcctgcccactccc

SEQ ID NO: 330919 - DNA, 120 bp, Artificial Sequence
  ENSG00000136738_0 (sequence is synthesized)
ccttgctgttgccgccgccgcagctgctgccgcggttggtggggttgggtgagaggaggagctgtcgcggaccctgtagagtcggtctctgttgctctttttgcctgaggagtcttccat

SEQ ID NO: 330920 - DNA, 120 bp, Artificial Sequence
  ENSG00000136738_1 (sequence is synthesized)
cctacgtcgagctctgactcccgtgctgtcgagagggagtccccggggacacctcggcacgcagcggagatgcctctttttgccaccaatcccttcgatcaggatgttgagaaagcaacc

SEQ ID NO: 330921 - DNA, 120 bp, Artificial Sequence
  ENSG00000136738_2 (sequence is synthesized)
agcgagatgaatactgctgaggactggggcctcattttggatatctgtgataaagttggtcagtctcgcactggacctaaggattgtcttcggtctattatgagaagagtgaaccacaaa

SEQ ID NO: 330922 - DNA, 120 bp, Artificial Sequence
  ENSG00000136738_3 (sequence is synthesized)
gatcctcacgttgctatgcaggctttgactcttctaggagcatgtgtatcaaactgtggcaaaatttttcatttagaagtatgttcaagagattttgctagtgaagtaagcaacgtatta

SEQ ID NO: 330923 - DNA, 120 bp, Artificial Sequence
  ENSG00000136738_4 (sequence is synthesized)
aataagggtcatcctaaagtatgtgaaaaattaaaggctcttatggttgaatggacagatgaatttaagaatgatccacagcttagtctaatatcagcaatgattaagaaccttaaggaa

SEQ ID NO: 330924 - DNA, 120 bp, Artificial Sequence
  ENSG00000136738_5 (sequence is synthesized)
caaggagttacgttcccagctattggctctcaggctgcagaacaagcaaaagcaagcccagctcttgtagccaaggatcctggtactgtggctaacaaaaaagaagaagaagatttagca

SEQ ID NO: 330925 - DNA, 120 bp, Artificial Sequence
  ENSG00000136738_6 (sequence is synthesized)
aaagccattgagttgtctctcaaggaacaaaggcagcagtcaaccaccctttccactttgtatccaagcacatccagtctcttaactaaccaccaacatgaaggccgaaaagttcgtgct

SEQ ID NO: 330926 - DNA, 120 bp, Artificial Sequence
  ENSG00000136738_7 (sequence is synthesized)
atatatgactttgaagctgctgaagacaatgaacttacttttaaagctggagaaattattacagttcttgatgacagtgatcctaactggtggaaaggtgaaacccatcaaggcataggg

SEQ ID NO: 330927 - DNA, 120 bp, Artificial Sequence
  ENSG00000136738_8 (sequence is synthesized)
ttatttccttctaattttgtgactgcagatctcactgctgaaccagaaatgattaaaacagagaagaagacggtacaatttagtgatgatgttcaggtagagacaatagaaccagagccg

SEQ ID NO: 330928 - DNA, 120 bp, Artificial Sequence
  ENSG00000136738_9 (sequence is synthesized)
gaaccagcctttattgatgaagataaaatggaccagttgctacagatgctgcaaagtacagaccccagtgatgatcagccagacctaccagagctgcttcatcttgaagcaatgtgtcac

SEQ ID NO: 330929 - DNA, 120 bp, Artificial Sequence
  ENSG00000136738_10 (sequence is synthesized)
cagatgggacctctcattgatgaaaagctggaagatattgatagaaaacattcagaactctcagaacttaatgtgaaagtgatggaggccctttccttatataccaagttaatgaacgaa

SEQ ID NO: 330930 - DNA, 120 bp, Artificial Sequence
  ENSG00000136738_11 (sequence is synthesized)
gatccgatgtattccatgtatgcaaagttacagaatcagccatattatatgcagtcatctggtgtttctggttctcaggtgtatgcagggcctcctccaagtggtgcctacctggttgca

SEQ ID NO: 330931 - DNA, 120 bp, Artificial Sequence
  ENSG00000136738_12 (sequence is synthesized)
gggaacgcgcagatgagccacctccagagctacagtcttcccccggagcagctgtcttctctcagccaggcagtggtcccaccatccgcaaacccagcccttcctagtcagcagactcag

SEQ ID NO: 330932 - DNA, 120 bp, Artificial Sequence
  ENSG00000136738_13 (sequence is synthesized)
gccgcttacccaaatacaatggtcagttccgttcaaggaaacacatatcccagccaggcgccagtatatagtcctcctcctgccgctactgctgctgctgcaactgccgatgtcactctg

SEQ ID NO: 330933 - DNA, 120 bp, Artificial Sequence
  ENSG00000136738_14 (sequence is synthesized)
taccagaatgcaggacctaatatgccccaggtgccaaactataacttaacatcatcaactctgcctcagcccggaggcagccaacagccacctcagccacagcaaccatattctcagaag

SEQ ID NO: 330934 - DNA, 120 bp, Artificial Sequence
  ENSG00000136738_15 (sequence is synthesized)
gctctgctataggacccggtgttcctcttggtggcagatacctgctaaatgccactgacaatgttatgagattcattactatcttaagatgtgtttatcctcagcttataggaatctctc

SEQ ID NO: 330935 - DNA, 120 bp, Artificial Sequence
  ENSG00000136738_16 (sequence is synthesized)
aatattcaagaaggtagaactctcctcaatttacactgactttttagaggttcttccccccccgcccctgcagaggaatgaaactacttacaacatttaattcctttcataatatgaaag

SEQ ID NO: 330936 - DNA, 120 bp, Artificial Sequence
  ENSG00000136738_17 (sequence is synthesized)
aattgatacaaggctatttgtctcgtaaacctggtctgcagaaagtcaaacttacaaaaactgttgtgacaaatgttatgtacatatattgatatgtaactgcattagtggccattttga

SEQ ID NO: 330937 - DNA, 120 bp, Artificial Sequence
  ENSG00000136738_18 (sequence is synthesized)
atcacagtggtgatcgtgtgaatatatttaacactgtgttaaattaatttacgttgctattttattttaatcataaacaactaccatgtttcttaatgttttgtgtaaatttaaggtaat

SEQ ID NO: 330938 - DNA, 120 bp, Artificial Sequence
  ENSG00000136738_19 (sequence is synthesized)
tatactatccttttaaacttcaagaaaacaaagttgttagcgtatttacatgaaggcgcattatgttgtcgtgtgtttcagtttcacattaaactgaaccttttactaattgtgagctaa

SEQ ID NO: 330939 - DNA, 120 bp, Artificial Sequence
  ENSG00000136738_20 (sequence is synthesized)
atatatgtgtgtgtatatatatatatctacatgtctttctgtagcctctgcatactactggctgtcatcacaccagcgtacagtagctaaatttttggtgcaattatagcaaatgataat

SEQ ID NO: 330940 - DNA, 120 bp, Artificial Sequence
  ENSG00000136738_21 (sequence is synthesized)
gcaaatgataatgttcccttttgaacttttacattttggcatgacatttcagagtattgtgggaccatgagacaaaattaagtacgatcacattctttatttctcattttaaagaaatga

SEQ ID NO: 330941 - DNA, 120 bp, Artificial Sequence
  ENSG00000136738_22 (sequence is synthesized)
tgttggtttaccttttcctagttgaagatagtaattaggtttctaagctgtatactgtgtttattggtggcagtgacaccaaagatagaggcaatggatagaaatttttaaactggaaag

SEQ ID NO: 330942 - DNA, 120 bp, Artificial Sequence
  ENSG00000136738_23 (sequence is synthesized)
aaaacctgaattacactacattttcgaagtctcttgtaattatttgggatatcaacaaaatttgattcgtctgtctaatcccttgctagtattttaaatatgtctttaacacattgtatc

SEQ ID NO: 330943 - DNA, 120 bp, Artificial Sequence
  ENSG00000136738_24 (sequence is synthesized)
ctttaattcttcattaaaatggaaataagtagatgtttcaaagtaatctacattcctggctttgcttaacgtttatataggtattgttttctttcacactggatttttgggttgctcttt

SEQ ID NO: 330944 - DNA, 120 bp, Artificial Sequence
  ENSG00000136738_25 (sequence is synthesized)
ctggccttttaaaattctaatggaattattttggcttcttacttgggaatattttcaaatgaatgcttttcttttaattcatgcgaaaaatgttttccactgacattgtaatcttaaata

SEQ ID NO: 330945 - DNA, 120 bp, Artificial Sequence
  ENSG00000136738_26 (sequence is synthesized)
tttacgatttccctggttgggctatactattattttagcactatttaaacaacggaaaagttgagtcgaacatcatatttaatgaattgatgtaacaggtttcatactataaatgaaaat

SEQ ID NO: 330946 - DNA, 120 bp, Artificial Sequence
  ENSG00000136738_27 (sequence is synthesized)
ttcatttttattttctaagactgttgtaatcaggtagcttgtttattttctttttgagagaagattaaatctttagccagtaatcttaagggtgactaatttcacagactcagatttaaa

SEQ ID NO: 330947 - DNA, 120 bp, Artificial Sequence
  ENSG00000136738_28 (sequence is synthesized)
gcaccgtagttttaaatctgagcctgtgaaattagtcacctgtaagattacttaagggtaacttaagtgtttcgctcaagtgttgtgttctgatttcctgtgtttaaaatatgttgccct

SEQ ID NO: 330948 - DNA, 120 bp, Artificial Sequence
  ENSG00000136738_29 (sequence is synthesized)
gccctgaagtcaaatttcacattttaaatactataagttagtttttgataaatatctgtcggattataatcttttccactccaatttgagtattatggtttaactgatatacttttctgc

SEQ ID NO: 330949 - DNA, 120 bp, Artificial Sequence
  ENSG00000136738_30 (sequence is synthesized)
aatttttctttgtcttttgataaattcctgtttaccaatgttaaatgtatcattttcccattttaattttgatatctttcatgctgaaaatcaatgacatagtctctactatgatttttg

SEQ ID NO: 330950 - DNA, 120 bp, Artificial Sequence
  ENSG00000136738_31 (sequence is synthesized)
ccctataaaagtcaagtaacagtgaatagaaaaaactacccttattacaacccatatacatttttctttaccttttacattactagccttataaaggtttaaatgatgagtactttaaaa

SEQ ID NO: 330951 - DNA, 120 bp, Artificial Sequence
  ENSG00000136738_32 (sequence is synthesized)
atgttctagtttctaactatactattgaaggaagaataccttttatcttgatgtctttttctacttcttcagactgttggatataataacattttgggtctttaaaaactcattgttttc

SEQ ID NO: 330952 - DNA, 120 bp, Artificial Sequence
  ENSG00000136738_33 (sequence is synthesized)
ggtcagtctcgcactggataaggaaaagagaggatgtgtcttacaaaaagttttaaaataccaaaatggggttttaagaagctttttgagagagatgaggatttgcccaccctttaaaca

SEQ ID NO: 330953 - DNA, 120 bp, Artificial Sequence
  ENSG00000136750_0 (sequence is synthesized)
cccgccggtccccgcgcggtgccctcctcccgccacacgggcacgcacgcgcgcgcagggccaagcccgaggcagctcgcccgcagctcgcactcgcaggcgacctgctccagtctccaa

SEQ ID NO: 330954 - DNA, 120 bp, Artificial Sequence
  ENSG00000136750_1 (sequence is synthesized)
cgacctgctccagtctccaaagccgatggcatctccgggctctggcttttggtctttcgggtcggaagatggctctggggattccgagaatcccggcacagcgcgagcctggtgccaagt

SEQ ID NO: 330955 - DNA, 120 bp, Artificial Sequence
  ENSG00000136750_2 (sequence is synthesized)
ggctcagaagttcacgggcggcatcggaaacaaactgtgcgccctgctctacggagacgccgagaagccggcggagagcggcgggagccaacccccgcgggccgccgcccggaaggccgc

SEQ ID NO: 330956 - DNA, 120 bp, Artificial Sequence
  ENSG00000136750_3 (sequence is synthesized)
ctgcgcctgcgaccagaagccctgcagctgctccaaagtggatgtcaactacgcgtttctccatgcaacagacctgctgccggcgtgtgatggagaaaggcccactttggcgtttctgca

SEQ ID NO: 330957 - DNA, 120 bp, Artificial Sequence
  ENSG00000136750_4 (sequence is synthesized)
agatgttatgaacattttacttcagtatgtggtgaaaagtttcgatagatcaaccaaagtgattgatttccattatcctaatgagcttctccaagaatataattgggaattggcagacca

SEQ ID NO: 330958 - DNA, 120 bp, Artificial Sequence
  ENSG00000136750_5 (sequence is synthesized)
accacaaaatttggaggaaattttgatgcattgccaaacaactctaaaatatgcaattaaaacagggcatcctagatacttcaatcaactttctactggtttggatatggttggattagc

SEQ ID NO: 330959 - DNA, 120 bp, Artificial Sequence
  ENSG00000136750_6 (sequence is synthesized)
agcagactggctgacatcaacagcaaatactaacatgttcacctatgaaattgctccagtatttgtgcttttggaatatgtcacactaaagaaaatgagagaaatcattggctggccagg

SEQ ID NO: 330960 - DNA, 120 bp, Artificial Sequence
  ENSG00000136750_7 (sequence is synthesized)
gggctctggcgatgggatattttctcccggtggcgccatatctaacatgtatgccatgatgatcgcacgctttaagatgttcccagaagtcaaggagaaaggaatggctgctcttcccag

SEQ ID NO: 330961 - DNA, 120 bp, Artificial Sequence
  ENSG00000136750_8 (sequence is synthesized)
gctcattgccttcacgtctgaacatagtcatttttctctcaagaagggagctgcagccttagggattggaacagacagcgtgattctgattaaatgtgatgagagagggaaaatgattcc

SEQ ID NO: 330962 - DNA, 120 bp, Artificial Sequence
  ENSG00000136750_9 (sequence is synthesized)
atctgatcttgaaagaaggattcttgaagccaaacagaaagggtttgttcctttcctcgtgagtgccacagctggaaccaccgtgtacggagcatttgaccccctcttagctgtcgctga

SEQ ID NO: 330963 - DNA, 120 bp, Artificial Sequence
  ENSG00000136750_10 (sequence is synthesized)
tgtcccgaaaacacaagtggaaactgagtggcgtggagagggccaactctgtgacgtggaatccacacaagatgatgggagtccctttgcagtgctctgctctcctggttagagaagagg

SEQ ID NO: 330964 - DNA, 120 bp, Artificial Sequence
  ENSG00000136750_11 (sequence is synthesized)
gattgatgcagaattgcaaccaaatgcatgcctcctacctctttcagcaagataaacattatgacctgtcctatgacactggagacaaggccttacagtgcggacgccacgttgatgttt

SEQ ID NO: 330965 - DNA, 120 bp, Artificial Sequence
  ENSG00000136750_12 (sequence is synthesized)
ttaaactatggctgatgtggagggcaaaggggactaccgggtttgaagcgcatgttgataaatgtttggagttggcagagtatttatacaacatcataaaaaaccgagaaggatatgaga

SEQ ID NO: 330966 - DNA, 120 bp, Artificial Sequence
  ENSG00000136750_13 (sequence is synthesized)
tggtgtttgatgggaagcctcagcacacaaatgtctgcttctggtacattcctccaagcttgcgtactctggaagacaatgaagagagaatgagtcgcctctcgaaggtggctccagtga

SEQ ID NO: 330967 - DNA, 120 bp, Artificial Sequence
  ENSG00000136750_14 (sequence is synthesized)
ttaaagccagaatgatggagtatggaaccacaatggtcagctaccaacccttgggagacaaggtcaatttcttccgcatggtcatctcaaacccagcggcaactcaccaagacattgact

SEQ ID NO: 330968 - DNA, 120 bp, Artificial Sequence
  ENSG00000136750_15 (sequence is synthesized)
tcctgattgaagaaatagaacgccttggacaagatttataataaccttgctcaccaagctgttccacttctctagagaacatgccctcagctaagccccctactgagaaacttcctttga

SEQ ID NO: 330969 - DNA, 120 bp, Artificial Sequence
  ENSG00000136750_16 (sequence is synthesized)
gaattgtgcgacttcacaaaatgcaaggtgaacaccactttgtctctgagaacagacgttaccaattatggagtgtcaccagctgccaaaatcgtaggtgttggctctgctggtcactgg

SEQ ID NO: 330970 - DNA, 120 bp, Artificial Sequence
  ENSG00000136750_17 (sequence is synthesized)
agtagttgctactcttcagaatatggacaaagaaggcacaggtgtaaatatagtagcaggatgaggaacctcaaactgggtatcattttgcacgtgctcttctgttctcaaatgctaaat

SEQ ID NO: 330971 - DNA, 120 bp, Artificial Sequence
  ENSG00000136750_18 (sequence is synthesized)
gcaaacactgtgtatttattagttaggtgtgccaaactaccgttcccaaattggtgtttctgaatgacatcaacattcccccaacattactccattactaaagacagaaaaaaataaaaa

SEQ ID NO: 330972 - DNA, 120 bp, Artificial Sequence
  ENSG00000136750_19 (sequence is synthesized)
cataaaatatacaaacatgtggcaacctgttcttcctaccaaatataaacttgtgtatgatccaagtattttatctgtgttgtctctctaaacccaaataaatgtgtaaatgtggacaca

SEQ ID NO: 330973 - DNA, 120 bp, Artificial Sequence
  ENSG00000136750_20 (sequence is synthesized)
tgctcaccaagctgttccacttctctaggtagacaattaagttgtcacaaactgtgtgaatgtatttgtagtttgttccaaagtaaatctatttctatattgtggtgtcaaagtagagtt

SEQ ID NO: 330974 - DNA, 120 bp, Artificial Sequence
  ENSG00000136750_21 (sequence is synthesized)
taaaaattaaacaaaaaagacattgctccttttaaaagtcctttcttaagtttagaatacctctctaagaattcgtgacaaaaggctatgttctaatcaataaggaaaagcttaaaattg

SEQ ID NO: 330975 - DNA, 120 bp, Artificial Sequence
  ENSG00000136750_22 (sequence is synthesized)
ttataaatacttcccttacttttaatatagtgtgcaaagcaaactttattttcacttcagactagtaggactgaatagtgccaaattgcccctgaatcataaaaggttctttggggtgca

SEQ ID NO: 330976 - DNA, 120 bp, Artificial Sequence
  ENSG00000136750_23 (sequence is synthesized)
tgcagtaaaaaggacaaagtaaatataaaatatatgttgacaataaaaactcttgcctttttcatagtattagaaaaaaatttctaatttacctatagcaacatttcaaatgtatttaaa

SEQ ID NO: 330977 - DNA, 120 bp, Artificial Sequence
  ENSG00000136750_24 (sequence is synthesized)
tataattttacaaaaggaaaatatatatattaaaaaagatatcctattttgtaacatatagatttttattttatataggttatacaaactgcgggggcagatataaaatctaagccagat

SEQ ID NO: 330978 - DNA, 120 bp, Artificial Sequence
  ENSG00000136750_25 (sequence is synthesized)
ttttttttcctttctcttaatggaggcacaataaaacacttagcaaagttattttgaaacattgacccacgaaattcttaaaaggtattattgcttctttctatacatgttatggcttat

SEQ ID NO: 330979 - DNA, 120 bp, Artificial Sequence
  ENSG00000136750_26 (sequence is synthesized)
cacatctctaaagttagtatttcaagacaaacacaaaagaatactgcgagttctttaaaataattgatcccattggcagtaagattctcttcccctttaagttttccacccattttactc

SEQ ID NO: 330980 - DNA, 120 bp, Artificial Sequence
  ENSG00000136750_27 (sequence is synthesized)
gctagttcttgaggcatcttccaaatagtattcttttattaggtcatttgaattaattagagaaagtaaaaataaaaccttatcagcctgagcaaagaggaatgaagcacactcccagaa

SEQ ID NO: 330981 - DNA, 120 bp, Artificial Sequence
  ENSG00000136750_28 (sequence is synthesized)
tgtggtgagcccagaaaattaaagttggccttgggagaagagatctctgtgggacaataatgacatcatcctggcgccatattgccactgtccaggaaagagaaatttacctccaggcca

SEQ ID NO: 330982 - DNA, 120 bp, Artificial Sequence
  ENSG00000136750_29 (sequence is synthesized)
gttgcgcatttccatcccctccccattcctccccacaaagtctctcccactagactccctaccactgggacccaaaatagttactttatattccatgggtggttgtttttcttccatgaa

SEQ ID NO: 330983 - DNA, 120 bp, Artificial Sequence
  ENSG00000136750_30 (sequence is synthesized)
atgagcctctcaccctagattttgaggcattatcttaagattttcctttatccatctcccatcgagatccaaagtgaccagaatatgcagaaataataagatccttagaattcaaaatag

SEQ ID NO: 330984 - DNA, 120 bp, Artificial Sequence
  ENSG00000136750_31 (sequence is synthesized)
tatttttaaaacatccttctttccctgtgaacctgatagaaaaacatgagctaacaaaagcttccatagatatttatggggtcacacatcgtcagattccaagtgctgattggagaacaa

SEQ ID NO: 330985 - DNA, 120 bp, Artificial Sequence
  ENSG00000136750_32 (sequence is synthesized)
tagattgatatgcagactgcaaatgcaaatttaggaacattctccatttctgaatggaccaggtagttcagtactcagactgcaggtatacaagggaagagagaaggccctgcccttcaa

SEQ ID NO: 330986 - DNA, 120 bp, Artificial Sequence
  ENSG00000136750_33 (sequence is synthesized)
cgggtagaaatgccctacaatataacatagagaaatgccctataatataaccacaggatccagccatctgaaattttcataagcttccccctacattatttctcctaggctatatgcaaa

SEQ ID NO: 330987 - DNA, 120 bp, Artificial Sequence
  ENSG00000136750_34 (sequence is synthesized)
aacagtgataacttgatatgaacatggctttgggccctttctgtctagaaaaacaaatgggttcactatgacaatcagaaataaactctttcatctgtcccgcagaatttcatgaaggag

SEQ ID NO: 330988 - DNA, 120 bp, Artificial Sequence
  ENSG00000136750_35 (sequence is synthesized)
taaccttccattctaggctttgtctaatggccaagcattagacaaagcattagaaagcagttcctttctcaaaactgcctgctgagaataagcacatagctgcccgactatccggagcct

SEQ ID NO: 330989 - DNA, 120 bp, Artificial Sequence
  ENSG00000136750_36 (sequence is synthesized)
caggcccaaaggttccacttcagagacagagatgctaattgatccaacctgctgtccttcgtggagaagacagtggggcccagtgccctggtgaaccaaccctgctgtactccaggatgc

SEQ ID NO: 330990 - DNA, 120 bp, Artificial Sequence
  ENSG00000136750_37 (sequence is synthesized)
tttatcttttgagttacagatcctagattataaactgctgctttttaggttaatgagatggtaaaattttaaaggacaatttgtgcctatatatgaaattccagcaaaacaattctagca

SEQ ID NO: 330991 - DNA, 120 bp, Artificial Sequence
  ENSG00000136750_38 (sequence is synthesized)
acaacaatagctcttcttccccgctcccctaccccttcccagtactccttcaaattggctgagagccttgctcaggcctgtgcagggaaatccttaccaactgtagcccaaagaaggaag

SEQ ID NO: 330992 - DNA, 120 bp, Artificial Sequence
  ENSG00000136750_39 (sequence is synthesized)
agcccaaagaaggaagcaaataaaagcctagtaggtcccagtagtttaataaatcatcttgaaaggagatgtggaatcaggtcagaagagagtaagggaggaagggagggagggagggag

SEQ ID NO: 330993 - DNA, 120 bp, Artificial Sequence
  ENSG00000136750_40 (sequence is synthesized)
ggaggaaggaaatgaagggagggagggagggaggaaagaagggagattatttttaatattagcccaaattcccagtgccatggtctttatgtgtgcccattctttacaaatcttagaaaa

SEQ ID NO: 330994 - DNA, 120 bp, Artificial Sequence
  ENSG00000136750_41 (sequence is synthesized)
gtttggttttagctttaatcagaactgacatggccattttcatttatacagcaatattgtgtttatcatttaaaatacttgaacaaacaagtgtgatatgtctttatctgagacctatac

SEQ ID NO: 330995 - DNA, 120 bp, Artificial Sequence
  ENSG00000136750_42 (sequence is synthesized)
atggtatggacttcatatactgccacaggatgtgaggaaagaaaaggaaatcaattctgactgtgttgcctttattatctggataatactgtcttgtcacctcagattggggttgtgcac

SEQ ID NO: 330996 - DNA, 120 bp, Artificial Sequence
  ENSG00000136750_43 (sequence is synthesized)
tttagatctgaactgtacagtgttgcaaatcaacatgtgtttctgtaaaagcttgtacaatatattattgatatgtctttttctgtgtggtagctgtattgaactttgatattatgaaaa

SEQ ID NO: 330997 - DNA, 120 bp, Artificial Sequence
  ENSG00000136750_44 (sequence is synthesized)
ctacatttgcatctgttcctgttctctctctctctctctttcctaactatatgccctccacatcggctctaatagagaacatgccctcagctaagccccctactgagaaacttcctttga

SEQ ID NO: 330998 - DNA, 120 bp, Artificial Sequence
  ENSG00000136750_45 (sequence is synthesized)
tccaagagggctctgaggccgtggcgctcttcccccagcgcggcccttgggatggcgggtggccgacgatccaggcgctcgtgcgctcactgaatcgatgacggctggcttccctaggcc

SEQ ID NO: 330999 - DNA, 120 bp, Artificial Sequence
  ENSG00000136750_46 (sequence is synthesized)
attttctcccggtacatgatatttcaactttctttgtgttttttcttctaatatgcaatgccttgttgtaaacctagggaagattaaaaatctagcctatgcctctgcttaggttaaata

SEQ ID NO: 331000 - DNA, 120 bp, Artificial Sequence
  ENSG00000136750_47 (sequence is synthesized)
ggggacatggaattccgtggtcctggggcgctgctaagatccgggtgtctggaccctggggtgggacggagtgaccgtgaagatagaaaaaaaaaatgggaaagcgcgagcctggtgcca

SEQ ID NO: 331001 - DNA, 120 bp, Artificial Sequence
  ENSG00000136754_0 (sequence is synthesized)
atggcagagctgcagatgttactagaggaggagatcccgtctggcaagagggcgctgatcgagagttaccagaacctgactcgggtggcagactactgtgaaaacaactacatacaggct

SEQ ID NO: 331002 - DNA, 120 bp, Artificial Sequence
  ENSG00000136754_1 (sequence is synthesized)
acagacaagagaaaagctttagaggagaccaaagcctatacaacccaatctctagctagtgttgcttatcaaataaatgcattggccaacaatgtactccagttgctggatatccaagcc

SEQ ID NO: 331003 - DNA, 120 bp, Artificial Sequence
  ENSG00000136754_2 (sequence is synthesized)
tctcagcttcggagaatggagtcttccatcaatcatatctcacagactgtggatattcataaggagaaagtggcacgaagagagattggtattttgacaacaaataagaatacatcaaga

SEQ ID NO: 331004 - DNA, 120 bp, Artificial Sequence
  ENSG00000136754_3 (sequence is synthesized)
actcacaaaataatagcacctgcgaatatggagcgccctgtaaggtatattcggaaacctatcgattacacagttctggatgatgtgggccatggtgtcaagtggctaaaagccaagcat

SEQ ID NO: 331005 - DNA, 120 bp, Artificial Sequence
  ENSG00000136754_4 (sequence is synthesized)
ggaaataaccagcctgcaagaactggcacactgtcgagaacaaatcctcctactcagaaaccgccaagtcctcccatgtcaggccggggaacactgggacggaatactccttataaaacc

SEQ ID NO: 331006 - DNA, 120 bp, Artificial Sequence
  ENSG00000136754_5 (sequence is synthesized)
ctggaacctgttaaacccccaacagttcctaatgactatatgaccagtcctgctaggcttggaagtcagcatagtccaggcaggacagcatctttaaatcagagaccaaggacacacagt

SEQ ID NO: 331007 - DNA, 120 bp, Artificial Sequence
  ENSG00000136754_6 (sequence is synthesized)
agtggaggaagtggaagtcgagaaaacagtggtagcagtagtattggcattcccattgctgtgcctacaccttcgccacccactattggaccagcagccccgggctcagctcctggttcc

SEQ ID NO: 331008 - DNA, 120 bp, Artificial Sequence
  ENSG00000136754_7 (sequence is synthesized)
cagtatggcacaatgaccaggcagatatctcgacacaactctactacttcttcgacatcttctggtggatacagacgaactccctctgtgactgctcaattttctgctcagcctcatgtt

SEQ ID NO: 331009 - DNA, 120 bp, Artificial Sequence
  ENSG00000136754_8 (sequence is synthesized)
aatggaggtccactttattctcaaaattcaatttctattgctccaccccctccccctatgcctcagttgactccacagatacctctcacaggcttcgtggccagggtgcaggaaaacatt

SEQ ID NO: 331010 - DNA, 120 bp, Artificial Sequence
  ENSG00000136754_9 (sequence is synthesized)
gctgatagtccaactccaccgccaccacctccaccagatgacattcccatgtttgatgactctccacctcccccaccaccaccaccagtggattatgaagatgaggaggctgcagtagtt

SEQ ID NO: 331011 - DNA, 120 bp, Artificial Sequence
  ENSG00000136754_10 (sequence is synthesized)
cagtataatgatccatatgcagatggggatcctgcttgggcccccaagaattatattgagaaagttgttgcaatatatgattatacaaaagacaaggatgatgagctgtcatttatggag

SEQ ID NO: 331012 - DNA, 120 bp, Artificial Sequence
  ENSG00000136754_11 (sequence is synthesized)
ggtgcaatcatttatgttataaagaagaatgatgatggctggtatgaaggagtctgcaatcgagtgactggtctgttccctgggaactatgttgaatcaatcatgcactatactgattaa

SEQ ID NO: 331013 - DNA, 120 bp, Artificial Sequence
  ENSG00000136754_12 (sequence is synthesized)
gtgggactattatggttaacagaactgtcttaatatgttttaaaatgtgcccatattttcagaacatgctgttttattggtaaattgaatgtctacctgtaagcataaatctttgaggca

SEQ ID NO: 331014 - DNA, 120 bp, Artificial Sequence
  ENSG00000136754_13 (sequence is synthesized)
ctgaatagcaatttatacaagaagctgtccataactgattatgcttatgtacttacttacacatttttaactttatgaccagcctaaatattctgggggaagtggggtataatatttaac

SEQ ID NO: 331015 - DNA, 120 bp, Artificial Sequence
  ENSG00000136754_14 (sequence is synthesized)
gaatcatgattcagattgtaccattacatgtttcagtgcagcatggttactaacgctatgtcagactaatattaaaatcagaaaatttaaatgctggtgctggtcagactttttttgtta

SEQ ID NO: 331016 - DNA, 120 bp, Artificial Sequence
  ENSG00000136754_15 (sequence is synthesized)
gattctctcatttaaaaaaaatactgtttgtttaaagcatgcataaaaatttatgtattgaaatatacttaaaaattcaagatgcttcccatttgtgtaatatttacctggaggactcgt

SEQ ID NO: 331017 - DNA, 120 bp, Artificial Sequence
  ENSG00000136754_16 (sequence is synthesized)
acttaggtgtcttaacgtgaattgagtctccaaggtctccatgtgaaacaagcaaaaagagaattatctgtaatgttgtaatttgtacctaagttttttaatgagtgaaatttgcattat

SEQ ID NO: 331018 - DNA, 120 bp, Artificial Sequence
  ENSG00000136754_17 (sequence is synthesized)
aaactttttccattcataaatacataagtgaaccaaaggtttttgtcctttccttcactgatttgctttaaaaaaaataaaagataatgatttattgcagaattatgattctattttctc

SEQ ID NO: 331019 - DNA, 120 bp, Artificial Sequence
  ENSG00000136754_18 (sequence is synthesized)
aatatgttaacttggaaaaaaattttagccttatcttaatctgtcccaacagcaatgtgacggatttttgcagattcaaaatctgcaatggttatttacaagtcaatctactgaattcct

SEQ ID NO: 331020 - DNA, 120 bp, Artificial Sequence
  ENSG00000136754_19 (sequence is synthesized)
tttttaaataatcttttgaaactaagaaaatgtgtcaaattgtgtgcattcattctgtaggtaaaattcttaaggattgccatgtcagtccttcagttgtacagtgaactgttgtacact

SEQ ID NO: 331021 - DNA, 120 bp, Artificial Sequence
  ENSG00000136754_20 (sequence is synthesized)
ggttcaatgaaaggaagttaaaagtaccttttacatattgtaaaagtggatacagttgatttgtgagtaggcactctttaatccattacctggcactagcaacattagaattttaaaata

SEQ ID NO: 331022 - DNA, 120 bp, Artificial Sequence
  ENSG00000136754_21 (sequence is synthesized)
aaataattgggaaagaaggtgggtcatgtattaatcagtgaacagagatttacctaaccaacagacttggattgtcttttgacataatcaaaatgcaacacatgcactttgtgtgtctcc

SEQ ID NO: 331023 - DNA, 120 bp, Artificial Sequence
  ENSG00000136754_22 (sequence is synthesized)
tcttaattgaagggagggctgagggatgttttctcttcttgtcttgtgtataattctctattgcttaggatattaaagtagagcactcaagtgtgggtttctgtgttattgaggatttgt

SEQ ID NO: 331024 - DNA, 120 bp, Artificial Sequence
  ENSG00000136754_23 (sequence is synthesized)
ttggaattcaaattacagttatgtactggatgctacagacttataacagcatagtgaatggtaagactagtgcaaaacagttatttctgaaaattaaagaccattattgctaccaaatca

SEQ ID NO: 331025 - DNA, 120 bp, Artificial Sequence
  ENSG00000136754_24 (sequence is synthesized)
atgtgactatttcatatgcattttgcctttgttaattttaaacaaacaaagtatcattagtgatcagctagctaccttctactttccatttttcaagtggattgttctcttaatttgtat

SEQ ID NO: 331026 - DNA, 120 bp, Artificial Sequence
  ENSG00000136754_25 (sequence is synthesized)
ataacctgttgtctaaattttatgtacagtcttttataataaaccattctcctatatgaaattttggatactgttaaaatataactcatgtggacttcaatgcagacttcacatttttct

SEQ ID NO: 331027 - DNA, 120 bp, Artificial Sequence
  ENSG00000136754_26 (sequence is synthesized)
gacctttactcctacggtaaatcaagacaaaccatttgaattttaacattggttatttatttgtgtaatggccttacatgtggatattaacagtgtaaacaataccacatataaccatca

SEQ ID NO: 331028 - DNA, 120 bp, Artificial Sequence
  ENSG00000136754_27 (sequence is synthesized)
agataccttgattataatttataggactagaatgacagattcaggtggtttattaattacatttaaaaagttttctgaaaaaacttttgcaataaaaaaaaataaattgcccatcaataa

SEQ ID NO: 331029 - DNA, 120 bp, Artificial Sequence
  ENSG00000136754_28 (sequence is synthesized)
gggggctggagagagtgaggaggaaggggaggaggtgccgtcccacaataccaggcgggagggcgggtaggcggtttgtatccgggctgtgaggtgctcggagcctcggcggaccttgct

SEQ ID NO: 331030 - DNA, 120 bp, Artificial Sequence
  ENSG00000136754_29 (sequence is synthesized)
gattttaatagattctctttagcagctggcattataattttcatacaatatttaatatgaattttactaaggttggggtgcaattttatcagttgaataggctgtattaaaaagatatta

SEQ ID NO: 331031 - DNA, 120 bp, Artificial Sequence
  ENSG00000136754_30 (sequence is synthesized)
aaattagaaatggttattaagccataaatcctagacaaatattacccatttgtgttgtgaattctatgtctttctttcactactgaacatttaaaaataaaagtctacatgcttttcaaa

SEQ ID NO: 331032 - DNA, 120 bp, Artificial Sequence
  ENSG00000136754_31 (sequence is synthesized)
aagtctacatgcttttcaaaattactttagaaaataatttataaatacttttatcgtttcatttctaaatatgtatatatatttgtatacctgtgtgtgtatctataatgccagcaactt

SEQ ID NO: 331033 - DNA, 120 bp, Artificial Sequence
  ENSG00000136758_0 (sequence is synthesized)
ggcggattgtctgtcgttgcagtagctgtaggaaggggaggccattttccgtttctgggaggagtgaggggcaacgggtcggagaaaaaggaaaaaagaagggctcagcgcctccccgcc

SEQ ID NO: 331034 - DNA, 120 bp, Artificial Sequence
  ENSG00000136758_1 (sequence is synthesized)
gggccgtggacagaggggcacagtttcggcaggcgggtgaggtcgctgagggcccgccggagatgttttccttgtcgagcacggtgcaaccccaggttacagttcctctgagtcatctca

SEQ ID NO: 331035 - DNA, 120 bp, Artificial Sequence
  ENSG00000136758_2 (sequence is synthesized)
tcaatgccttccatacaccaaaaaacacttctgtttctctcagtggagtgtcagtttctcaaaaccagcatcgagatgtagttcctgagcatgaggctcccagcagtgagccttcactta

SEQ ID NO: 331036 - DNA, 120 bp, Artificial Sequence
  ENSG00000136758_3 (sequence is synthesized)
acttaagggaccttggattatctgaactaaaaattggacagattgatcagctggtagaaaatctacttcctggattttgtaaaggcaaaaacatttcttcccattggcatacatcccatg

SEQ ID NO: 331037 - DNA, 120 bp, Artificial Sequence
  ENSG00000136758_4 (sequence is synthesized)
tctctgcacaatccttctttgaaaataaatatggtaacttagatatatttagtacattacgttcctcttgcttgtatcgacatcattcaagagctcttcaaagcatttgttcagatcttc

SEQ ID NO: 331038 - DNA, 120 bp, Artificial Sequence
  ENSG00000136758_5 (sequence is synthesized)
agtactggccagttttcatacagtctcggggttttaaaactttgaaatcaaggacacgacgtctccagtctacctccgagagattagctgaaacacagaatatagcgccatcattcgtga

SEQ ID NO: 331039 - DNA, 120 bp, Artificial Sequence
  ENSG00000136758_6 (sequence is synthesized)
aggggtttcttttgcgggacagaggatcagatgttgagagtttggacaaactcatgaaaaccaaaaatatacctgaagctcaccaagatgcatttaaaactggttttgcggaaggttttc

SEQ ID NO: 331040 - DNA, 120 bp, Artificial Sequence
  ENSG00000136758_7 (sequence is synthesized)
tgaaagctcaagcactcacacaaaaaaccaatgattccctaaggcgaacccgtctgattctcttcgttctgctgctattcggcatttatggacttctaaaaaacccatttttatctgtcc

SEQ ID NO: 331041 - DNA, 120 bp, Artificial Sequence
  ENSG00000136758_8 (sequence is synthesized)
gcttccggacaacaacagggcttgattctgcagtagatcctgtccagatgaaaaatgtcacctttgaacatgttaaaggggtggaggaagctaaacaagaattacaggaagttgttgaat

SEQ ID NO: 331042 - DNA, 120 bp, Artificial Sequence
  ENSG00000136758_9 (sequence is synthesized)
tcttgaaaaatccacaaaaatttactattcttggaggtaaacttccaaaaggaattcttttagttggacccccagggactggaaagacacttcttgcccgagctgtggcgggagaagctg

SEQ ID NO: 331043 - DNA, 120 bp, Artificial Sequence
  ENSG00000136758_10 (sequence is synthesized)
atgttcctttttattatgcttctggatccgaatttgatgagatgtttgtgggtgtgggagccagccgtatcagaaatctttttagggaagcaaaggcgaatgctccttgtgttatattta

SEQ ID NO: 331044 - DNA, 120 bp, Artificial Sequence
  ENSG00000136758_11 (sequence is synthesized)
ttgatgaattagattctgttggtgggaagagaattgaatctccaatgcatccatattcaaggcagaccataaatcaacttcttgctgaaatggatggttttaaacccaatgaaggagtta

SEQ ID NO: 331045 - DNA, 120 bp, Artificial Sequence
  ENSG00000136758_12 (sequence is synthesized)
tcataataggagccacaaacttcccagaggcattagataatgccttaatacgtcctggtcgttttgacatgcaagttacagttccaaggccagatgtaaaaggtcgaacagaaattttga

SEQ ID NO: 331046 - DNA, 120 bp, Artificial Sequence
  ENSG00000136758_13 (sequence is synthesized)
aatggtatctcaataaaataaagtttgatcaatccgttgatccagaaattatagctcgaggtactgttggcttttccggagcagagttggagaatcttgtgaaccaggctgcattaaaag

SEQ ID NO: 331047 - DNA, 120 bp, Artificial Sequence
  ENSG00000136758_14 (sequence is synthesized)
cagctgttgatggaaaagaaatggttaccatgaaggagctggagttttccaaagacaaaattctaatggggcctgaaagaagaagtgtggaaattgataacaaaaacaaaaccatcacag

SEQ ID NO: 331048 - DNA, 120 bp, Artificial Sequence
  ENSG00000136758_15 (sequence is synthesized)
catatcatgaatctggtcatgccattattgcatattacacaaaagatgcaatgcctatcaacaaagctacaatcatgccacgggggccaacacttggacatgtgtccctgttacctgaga

SEQ ID NO: 331049 - DNA, 120 bp, Artificial Sequence
  ENSG00000136758_16 (sequence is synthesized)
aactagagcccagctgcttgcacaaatggatgttagtatgggaggaagagtggcagaggagcttatatttggaaccgaccatattacaacaggtgcttccagtgattttgataatgccac

SEQ ID NO: 331050 - DNA, 120 bp, Artificial Sequence
  ENSG00000136758_17 (sequence is synthesized)
taaaatagcaaagcggatggttaccaaatttggaatgagtgaaaagcttggagttatgacctacagtgatacagggaaactaagtccagaaacccaatctgccatcgaacaagaaataag

SEQ ID NO: 331051 - DNA, 120 bp, Artificial Sequence
  ENSG00000136758_18 (sequence is synthesized)
aatccttctaagggactcatatgaacgagcaaaacatatcttgaaaactcatgcaaaggagcataagaatctcgcagaagctttattgacctatgagactttggatgccaaagagattca

SEQ ID NO: 331052 - DNA, 120 bp, Artificial Sequence
  ENSG00000136758_19 (sequence is synthesized)
aattgttcttgaggggaaaaagttggaagtgagatgataactctcttgatatggatgcttgctggttttattgcaagaatacaagtagcattgcagtagtctacttttacaacgctttcc

SEQ ID NO: 331053 - DNA, 120 bp, Artificial Sequence
  ENSG00000136758_20 (sequence is synthesized)
cctcattcttgatgtggtgtaattgaagggtgtgaaatgctttgtcaatcatttgtcacatttatccagtttgggttattctcattatgacacctattgcaaattagcatcccatggcaa

SEQ ID NO: 331054 - DNA, 120 bp, Artificial Sequence
  ENSG00000136758_21 (sequence is synthesized)
atatattttgaaaaaataaagaactatcaggattgaaaacagctcttttgaggaatgtcaattagttattaagttgaaagtaattaatgattttatgtttggttactctactagatttga

SEQ ID NO: 331055 - DNA, 120 bp, Artificial Sequence
  ENSG00000136758_22 (sequence is synthesized)
taaaaattgtgcctttagccttctatatacatcagtggaaacttaagatgcagtaattatgttccagattgaccatgaataaaatattttttaatctaaatgtagagaagttgggattaa

SEQ ID NO: 331056 - DNA, 120 bp, Artificial Sequence
  ENSG00000136758_23 (sequence is synthesized)
aaaatattttttaatctaaatgtagagaagttgggattaaaagcagtctcggaaacacagagccaggaatatagccttttggcatggtgccatggctcacatctgtaatcccagcacttt

SEQ ID NO: 331057 - DNA, 79 bp, Artificial Sequence
  ENSG00000136758_24 (sequence is synthesized)
gagaccagcctggccaacgtggtgaaacgctgtctctactaaaatacaaaaaaatagcagaggccaaggcgggcaaatc

SEQ ID NO: 331058 - DNA, 85 bp, Artificial Sequence
  ENSG00000136758_25 (sequence is synthesized)
atggtgaaaccccatctctactaaacatgcaaaaattacctgggcatggtggcaggtgcttataatcccagctactctgggggcc

SEQ ID NO: 331059 - DNA, 83 bp, Artificial Sequence
  ENSG00000136758_26 (sequence is synthesized)
acagagcaagactctgcctcaaaaaaaaattaaaataaatttaaatacaaaaaaaaatagccaggtgtggggtgcatgcctgg

SEQ ID NO: 331060 - DNA, 120 bp, Artificial Sequence
  ENSG00000136758_27 (sequence is synthesized)
agtgagactctgtctcaaaaaaaaattaaataaattattataacctttcagaaatgctgtgtgcattttcatgttcttttttttagcattactgtcactctccctaatgaaatgtacttc

SEQ ID NO: 331061 - DNA, 120 bp, Artificial Sequence
  ENSG00000136758_28 (sequence is synthesized)
ttactgtcactctccctaatgaaatgtacttcagagaagcagtattttgttaaataaatacataacctcattctgaataatgtccctcattttgactataactgtgcttggtttcaaaag

SEQ ID NO: 331062 - DNA, 120 bp, Artificial Sequence
  ENSG00000136758_29 (sequence is synthesized)
caaaattaaacaaaaatctcagtcccctccgaagtgaactttgtgttaccctgcgtcagaaatgccaagttgtgtttacttttcattcagattttgtgaatatgaacatgctgttatagg

SEQ ID NO: 331063 - DNA, 120 bp, Artificial Sequence
  ENSG00000136758_30 (sequence is synthesized)
atctacagatgaatatttaactcaatagaaaaattattttagaacacattgtattggtattacaaccagattatattcttgacgttgacttcattaaaattatctacaatttcctaataa

SEQ ID NO: 331064 - DNA, 120 bp, Artificial Sequence
  ENSG00000136758_31 (sequence is synthesized)
ggagggggcgtcgggaaagccccgacttcgcagccttacactcttcgtgggcggcgaccgcggccccactgacatcattcctcatgagggaggaggcacaaacagttctgggccgaccag

SEQ ID NO: 331065 - DNA, 120 bp, Artificial Sequence
  ENSG00000136758_32 (sequence is synthesized)
aaaaaggacgactgggacttgactctgaatcgcaggatttgaagagatttctcctggcttcccaacgaggctggtgggaagcggtcctcctcccatacacgacctcccaccctcgcgagg

SEQ ID NO: 331066 - DNA, 120 bp, Artificial Sequence
  ENSG00000136758_33 (sequence is synthesized)
cgtagaaaccagttctgactgtacagtaaagcgagggccagggctgaggtctggaagctaatgaaagcacagaaagtgtcgaaactggatgagcaggaagcgagtggcctcccctgtcat

SEQ ID NO: 331067 - DNA, 120 bp, Artificial Sequence
  ENSG00000136758_34 (sequence is synthesized)
ctgacgttttcccaggatgtaatttgcctgactgaaacagatcaggaccaacagggagagttttcgatttagtgtgaggaaaagagcactaaattgtagcaaaagaccttattgctcaag

SEQ ID NO: 331068 - DNA, 120 bp, Artificial Sequence
  ENSG00000136758_35 (sequence is synthesized)
aaagagcactaaattgtagcaaaagaccttattgctcaaggcccagtcagaagatttcataaggaagctgtagaaagtcttaagaggaaatcagccgggcgtggtggcgggcacctgtaa

SEQ ID NO: 331069 - DNA, 120 bp, Artificial Sequence
  ENSG00000136758_36 (sequence is synthesized)
agtgagccgagatcgcgccactgtacgccagcctgggcgaaagaacgaaactccgtctccaaaaaaaaaaaaaacgaagaaaaagtccaaagagggtaaaggctgttctccccttaaaaa

SEQ ID NO: 331070 - DNA, 120 bp, Artificial Sequence
  ENSG00000136758_37 (sequence is synthesized)
ggctgttctccccttaaaaaacagctaaagacctttgggggcgctgctccttgtaaatgtcaactacttccgcgggaaagaacgcgcaggcacttggccttgtgggcgctcacttgcccc

SEQ ID NO: 331071 - DNA, 120 bp, Artificial Sequence
  ENSG00000136758_38 (sequence is synthesized)
aaaaggatgaagaagagcttggacacaaccgataactggcacatccgtccagaacccttctccctctcaatccctgtacactgcgggtttctccaaatgcctattgtctatgatttgttt

SEQ ID NO: 331072 - DNA, 120 bp, Artificial Sequence
  ENSG00000136758_39 (sequence is synthesized)
tgtccatcgttcttagtcacggcttagttcaggttcttgccatctttcacttgttccatcagccttctctctcatccagtctagtttctttgtttgtttgttttatcatttttaaatttt

SEQ ID NO: 331073 - DNA, 120 bp, Artificial Sequence
  ENSG00000136758_40 (sequence is synthesized)
ttgtaaagacagggtcttgctttcttcaccaggctgatctcgaactcctggcctgaagcagtcctcccacctcagcctctcaaaagtgttgggattacaggctcgagccaccatgctagg

SEQ ID NO: 331074 - DNA, 120 bp, Artificial Sequence
  ENSG00000136758_41 (sequence is synthesized)
aattttttctttccttgaattttttgagatattccagacccttggatggctttttgtttgcccccgtccctaagccgccttgatcatttttaatagcttaaaaagtacttttaagtattt

SEQ ID NO: 331075 - DNA, 120 bp, Artificial Sequence
  ENSG00000136758_42 (sequence is synthesized)
tatttcatcatgcctttaactgtcttttactatgtgctgtcatgttgtatgctaggatacgtagatgagtaaggcatgatctctgcctttgatccttactattaggaaataaggtgtatt

SEQ ID NO: 331076 - DNA, 120 bp, Artificial Sequence
  ENSG00000136758_43 (sequence is synthesized)
ttatagttatgttagtattgagaaaatgaattctaagaatatgagttatagctaatttaaaaagtaccgtattcccagacatcagtccagagctatataatccgtgtccatgcctctttt

SEQ ID NO: 331077 - DNA, 120 bp, Artificial Sequence
  ENSG00000136758_44 (sequence is synthesized)
aaaaaaaactttatttttagagacagggtctcccctttgtagcccaggctgaagtgcagtgatgctgtcatagctcactgcaacctccagctcctgggctcaaacatttctcctgagtag

SEQ ID NO: 331078 - DNA, 90 bp, Artificial Sequence
  ENSG00000136758_45 (sequence is synthesized)
caacctccagctcctgggctcaaacatttctcctgagtagctggtgctgcgggtgcatacatcaagatgatgtcttaccatgttgctcag

SEQ ID NO: 331079 - DNA, 120 bp, Artificial Sequence
  ENSG00000136758_46 (sequence is synthesized)
tagctgttttgggtttgagtaacatgtaattgttacttgcctttaagtgcctctctttcagctcatgtggacaagaaaataatccctatcctgttgtttaaaagtgggtatacacacatt

SEQ ID NO: 331080 - DNA, 120 bp, Artificial Sequence
  ENSG00000136758_47 (sequence is synthesized)
tttgtgatttttagacttttttgcctgattttcacacagttttgactttaattttcttctttattagaagatatgggtaactttagaacctctgagttcaaggaaggatctaagcaatga

SEQ ID NO: 331081 - DNA, 120 bp, Artificial Sequence
  ENSG00000136758_48 (sequence is synthesized)
ggccagaggagtgagatgtcctatggtaaccaagcataccatttctttgtcaagtgggcttttgtttatggctgcttaggggcttaaaagctccatggactggtgaggattatcatttga

SEQ ID NO: 331082 - DNA, 120 bp, Artificial Sequence
  ENSG00000136758_49 (sequence is synthesized)
atggaatttccccaattcaagaaccttactattatcctccaatcagttctacactgttggggaaaatcccctggaccttatataacatactttgtaaccctgcagttagttactcttaca

SEQ ID NO: 331083 - DNA, 120 bp, Artificial Sequence
  ENSG00000136758_50 (sequence is synthesized)
ctcttgtcattataaatgcttgatcaatagttgatagactagctcttgatcagagtacccttgtatggagagaaggaaaaaatgccatacatttcacttgattctgtgaaccataatgct

SEQ ID NO: 331084 - DNA, 120 bp, Artificial Sequence
  ENSG00000136758_51 (sequence is synthesized)
taggacagtagtggtttgggtttgatttaaaaaaaaaaaaagtttttctcattcatgctgaaatgtcatctctttatttaaggataccattaggaatataattttttaacctatgtcaaa

SEQ ID NO: 331085 - DNA, 120 bp, Artificial Sequence
  ENSG00000136758_52 (sequence is synthesized)
cctcatatgactgatctcagtaaaacgaactgtgaaaatatttgcatcaatttatttttaaatattaaaaaaaggaaatatatttgttagacttttaaaatctgattgttttaactgata

SEQ ID NO: 331086 - DNA, 120 bp, Artificial Sequence
  ENSG00000136758_53 (sequence is synthesized)
atggctatgaaccctgttggaattgtataaagggaacaattgaggaagaggttggtgcagtgattatttgaaaacttcagtcatcagcgtggagggcccttctcattgtgtttgaggtgg

SEQ ID NO: 331087 - DNA, 120 bp, Artificial Sequence
  ENSG00000136758_54 (sequence is synthesized)
gtaatttcaaactggcagaaatgttgccagcataatacatggatgtctcatataccctgcatccagatttaccagttgttatcattctgcccgttttttattgccccaaacctgttctgt

SEQ ID NO: 331088 - DNA, 120 bp, Artificial Sequence
  ENSG00000136758_55 (sequence is synthesized)
ctccctctctgtatgtacatacatacacgtataaaatattgataaagtcttatctgtcttaaatttttttacatatttgttgaggtataatttacatatgataaaattcattttaaatgt

SEQ ID NO: 331089 - DNA, 120 bp, Artificial Sequence
  ENSG00000136770_0 (sequence is synthesized)
actgtgcagcccaggcgccgggcgctgcctctacagctgtgtgtaggcctgggggcgagggtcttcggaacgtagcgctggctgcggccccgcccgcctacccacccgcccgtccggcag

SEQ ID NO: 331090 - DNA, 120 bp, Artificial Sequence
  ENSG00000136770_1 (sequence is synthesized)
ccggctcccgccgcctccgcgctctgtctggggccagccacctggcgggccgctccggtgcgcctgcccgcgcttttcactgacaggcgctgttccccacagccagcgccgcccgccacg

SEQ ID NO: 331091 - DNA, 120 bp, Artificial Sequence
  ENSG00000136770_2 (sequence is synthesized)
tcccagctctcggccaacggagctgcgcggcgggtgacctttccgagcccagcgcgatgacggctccttgctcccagccggcgcagcttcctggacgccgccagctcgggctggtgccgt

SEQ ID NO: 331092 - DNA, 120 bp, Artificial Sequence
  ENSG00000136770_3 (sequence is synthesized)
tcccgccgccgccgccgcggacgccgctgctgtggctgctgctgctgctgctggccgccgtggcgccggcgcgcggctgggagagcggagacctggagttgtttgacttagtggaggagg

SEQ ID NO: 331093 - DNA, 120 bp, Artificial Sequence
  ENSG00000136770_4 (sequence is synthesized)
tgcagctcaacttctaccagttcctcggggtgcagcaggatgcatcatctgcagacatcagaaaagcatatcgtaagctttcactaactttacatccagacaagaataaagatgaaaatg

SEQ ID NO: 331094 - DNA, 120 bp, Artificial Sequence
  ENSG00000136770_5 (sequence is synthesized)
cagaaactcagtttagacaattggtggccatttatgaagttttaaaggatgatgaacgaaggcagaggtatgatgatattctgatcaatggacttccagattggcgacagcctgtattct

SEQ ID NO: 331095 - DNA, 120 bp, Artificial Sequence
  ENSG00000136770_6 (sequence is synthesized)
actacaggcgggtgagaaaaatgagcaatgctgagctggcattactcttgttcattattctcacagtgggtcattatgctgtggtttggtcaatctacctggaaaaacaactggatgaac

SEQ ID NO: 331096 - DNA, 120 bp, Artificial Sequence
  ENSG00000136770_7 (sequence is synthesized)
tactaagtagaaaaaagagagaaaagaaaaaaaagactggcagcaagagtgtggatgtatcaaaactcggtgcttcagaaaaaaatgaaagattgctgatgaaaccacagtggcatgatt

SEQ ID NO: 331097 - DNA, 120 bp, Artificial Sequence
  ENSG00000136770_8 (sequence is synthesized)
tccaggatgctgggcagttttatgctaaatataaagaaacaagattgaaggaaaaggaagatgcactgactagaactgaacttgaaacacttcaaaaacagaagaaagttaaaaaaccaa

SEQ ID NO: 331098 - DNA, 120 bp, Artificial Sequence
  ENSG00000136770_9 (sequence is synthesized)
aacctgaatttcctgtatacacacctttagaaactacatatattcagtcttatgatcatggaacttccatagaagaaattgaggaacaaatggatgattggttggaaaacaggaaccgaa

SEQ ID NO: 331099 - DNA, 120 bp, Artificial Sequence
  ENSG00000136770_10 (sequence is synthesized)
cacagaaaaaacaggcacctgaatggacagaagaggacctcagccaactgacaagaagtatggttaagttcccaggagggactccaggtcgatgggaaaagattgcccacgaattgggtc

SEQ ID NO: 331100 - DNA, 120 bp, Artificial Sequence
  ENSG00000136770_11 (sequence is synthesized)
gatctgtgacagatgtgacaaccaaagccaagcaactgaaggattcagtgacctgctccccaggaatggttagactctccgaactcaaatcgacagttcagaattccaggcccatcaaaa

SEQ ID NO: 331101 - DNA, 120 bp, Artificial Sequence
  ENSG00000136770_12 (sequence is synthesized)
cggccaccaccttgcccgatgacatgatcacccagcgagaggacgcagagggggtggcagcggaggaggagcaggagggagactccggtgagcaggagaccggggccactgatgcccggc

SEQ ID NO: 331102 - DNA, 120 bp, Artificial Sequence
  ENSG00000136770_13 (sequence is synthesized)
ctcggaggcggaagccagccaggctgctggaggctacagcgaagccggagccagaggagaagtccagagccaagcggcagaaggactttgacatagcagaacaaaacgagtccagcgacg

SEQ ID NO: 331103 - DNA, 120 bp, Artificial Sequence
  ENSG00000136770_14 (sequence is synthesized)
aggagagcctgagaaaagagagagctcggtctgcagaggagccgtggactcaaaatcaacagaaacttctggaactggcgttgcagcagtacccaaggggatcctctgaccgctgggaca

SEQ ID NO: 331104 - DNA, 120 bp, Artificial Sequence
  ENSG00000136770_15 (sequence is synthesized)
aaatagccagatgtgtcccgtccaagagcaaggaagactgtatcgctaggtacaagttgctggttgaactggtccaaaagaaaaaacaagctaaaagctgaatattctgggagatgatgt

SEQ ID NO: 331105 - DNA, 120 bp, Artificial Sequence
  ENSG00000136770_16 (sequence is synthesized)
tcaccttcattttccaaaatgaatatcttaaaaatcttatgcagaaatttgcattttgtacctcaatatttctacgtcatgtgccttagtaaaaaaaaataataaataaataaaagatga

SEQ ID NO: 331106 - DNA, 120 bp, Artificial Sequence
  ENSG00000136770_17 (sequence is synthesized)
ttcaactgatgaaaatttctgtttctctctgtatacttctcattctaatagttttatactcaatgtttgacatatttctaagtcaagaagaacccatgaaataagaaaatattcttcttt

SEQ ID NO: 331107 - DNA, 120 bp, Artificial Sequence
  ENSG00000136770_18 (sequence is synthesized)
tgaacttaccatagaaatgtgcacacattagactctcagtaagtacttgttaagttaatcaagcacccaattagtcatggtgacctctgctgagagagcataatcttgggaagagtggga

SEQ ID NO: 331108 - DNA, 120 bp, Artificial Sequence
  ENSG00000136783_0 (sequence is synthesized)
agcctgcgtctgccaatgatccaggagccgctcctttccactcgggaaaccttcagaggagtctcagaaaggacacggctggctgcttttctcagcgccgaagccgcgccatgctcgtcc

SEQ ID NO: 331109 - DNA, 120 bp, Artificial Sequence
  ENSG00000136783_1 (sequence is synthesized)
tcagaagcgccctgactcgggcgctggcctcacggacgctggcgcctcagatgtgctcatcttttgctacgggacccagacaatacgatggaatattctatgaatttcgttcttattacc

SEQ ID NO: 331110 - DNA, 120 bp, Artificial Sequence
  ENSG00000136783_2 (sequence is synthesized)
ttaagccctcaaagatgaatgagttcctggaaaattttgagaaaaacgctcatcttcggacagctcactctgaattggttggatactggagtgtagaatttggaggcagaatgaatacag

SEQ ID NO: 331111 - DNA, 120 bp, Artificial Sequence
  ENSG00000136783_3 (sequence is synthesized)
tgtttcatatttggaagtatgataattttgctcatcgaactgaagttcggaaagccttggccaaagataaggaatggcaagaacaattcctcattccaaatttggctctcattgataaac

SEQ ID NO: 331112 - DNA, 120 bp, Artificial Sequence
  ENSG00000136783_4 (sequence is synthesized)
aagagagtgagattacttatctggtaccatggtgcaaattagaaaaacctccaaaagaaggagtctatgaactggccacttttcagatgaaacctggtgggccagctctgtggggtgatg

SEQ ID NO: 331113 - DNA, 120 bp, Artificial Sequence
  ENSG00000136783_5 (sequence is synthesized)
catttaaaagggcagttcatgctcatgtcaatctaggctacacaaaactagttggagtgttccacacagagtacggagcactcaacagagttcatgttctttggtggaatgagagtgcag

SEQ ID NO: 331114 - DNA, 120 bp, Artificial Sequence
  ENSG00000136783_6 (sequence is synthesized)
cctagtatctcagcagaatatgcttctgattcctacatcgttttcaccactgaaatagttttctactgaaatacaaaacatttcattaactgctataggatctgtctgctaatggtgctt

SEQ ID NO: 331115 - DNA, 120 bp, Artificial Sequence
  ENSG00000136783_7 (sequence is synthesized)
aaattctcccaagaggttctcacttttatttgaaggaggtgttaagttaatttgctatgtttcttgcattatgaaggctacatctgtgctttgtaagtaccacttcaaaaaatagttctg

SEQ ID NO: 331116 - DNA, 120 bp, Artificial Sequence
  ENSG00000136783_8 (sequence is synthesized)
tttactttctgcatggtatttcagtgtctgtcatacattaaaaatacttgtcactgttttaagatcttgactcttcatttgtttcagaatagctcttctactgtattctgacaactcttt

SEQ ID NO: 331117 - DNA, 120 bp, Artificial Sequence
  ENSG00000136783_9 (sequence is synthesized)
gctttatagcattttgttgtattcaaatgataatggtagcatttccatgcttgtgacagcatttttaagttattaatatattttatcaacctttccatcatgtctgttttcctggttttt

SEQ ID NO: 331118 - DNA, 120 bp, Artificial Sequence
  ENSG00000136783_10 (sequence is synthesized)
tttggttgttttttgaccagtaaaatttattttgtaataccaaataggatttaagaaaattaacgtatttctttactatggaaaaccacattgtcatttgtgacatcatctatattaaat

SEQ ID NO: 331119 - DNA, 120 bp, Artificial Sequence
  ENSG00000136783_11 (sequence is synthesized)
atggttttcacattagttatttgtcacttacttggaaaatgatgctgttaggtcctggtattaaaaatctagaaaagacttgttggtttatgtgctgaaatgtctttatttataattaat

SEQ ID NO: 331120 - DNA, 120 bp, Artificial Sequence
  ENSG00000136783_12 (sequence is synthesized)
tttaactactatttacttcatttcggatcctgtttaacaaagatacttgagacatccatttgttttaatgaaatctgtatggatatggaaatgcttgccctaataaaagcctacatatac

SEQ ID NO: 331121 - DNA, 120 bp, Artificial Sequence
  ENSG00000136783_13 (sequence is synthesized)
ttaagatttgtcttcttgctgatttcacttcttgctgacttaaagaaactattacctcaatccagttttaaataaaggtcagattagaaaagcataaacttatttaaatgttattttact

SEQ ID NO: 331122 - DNA, 120 bp, Artificial Sequence
  ENSG00000136783_14 (sequence is synthesized)
tcccccattattcccaactttgtagtgtatttaggttacaaaaaatttacaaagtcttccttggatctttacctacttaggtgtcccctcagctctcagcactatctaaataaaatagtt

SEQ ID NO: 331123 - DNA, 120 bp, Artificial Sequence
  ENSG00000136783_15 (sequence is synthesized)
cacttctctgacagtgtcaaatcttggttctcctcctctgtgtacatcactgcttggaaatttttacatgcttttcctacttgtcccagagtttctttctctccaccagccctatacttc

SEQ ID NO: 331124 - DNA, 120 bp, Artificial Sequence
  ENSG00000136783_16 (sequence is synthesized)
tgtccaaagtgtacaatacttttcaagtatttacctggatatttaggaaaaataaaaccatctctttaggtttgtcttttttcctccaaaattcaaagatatcacttcaggtccactctt

SEQ ID NO: 331125 - DNA, 120 bp, Artificial Sequence
  ENSG00000136783_17 (sequence is synthesized)
attggaaagaatgaaaatatagattggaaaattcttcttttattcttttattttctaaaagcatagacttttgcagctcaaaattctatatcattatacattctcaacagttttttaaca

SEQ ID NO: 331126 - DNA, 120 bp, Artificial Sequence
  ENSG00000136783_18 (sequence is synthesized)
aatgttatagattaaaaatatttcagataatagttataatagcttccagttctttttctttgtcatctgtatgattaagcataacaactcactcttaaacatgggcaaggactttctaag

SEQ ID NO: 331127 - DNA, 120 bp, Artificial Sequence
  ENSG00000136783_19 (sequence is synthesized)
cataaaagcagagagtgcaaatataataaacatgtctacataatatgtatgcatgtctgatcctccaaatctgtgtgtgtagatagtgaaagactattcactgagaaacgtgattggata

SEQ ID NO: 331128 - DNA, 120 bp, Artificial Sequence
  ENSG00000136802_0 (sequence is synthesized)
gtgcttcagaaaccaggagtttccgcctcggctcccccatgtccccttgtcatcccctgggtccccccagatcctcacccctccacacacactctcccgttcctagaggttccacctctg

SEQ ID NO: 331129 - DNA, 120 bp, Artificial Sequence
  ENSG00000136802_1 (sequence is synthesized)
ggctctctccttgccatttctttttcaaagatttccttagctgtcttctcctgagttcctggtccccttctcttcccttgcacccctccttcctatcgttccgatgggggcagtgccctg

SEQ ID NO: 331130 - DNA, 120 bp, Artificial Sequence
  ENSG00000136802_2 (sequence is synthesized)
acttgggggcaggatccccggctaggctcttggggcctttctgggatgggatatttgggaagaccggtccggaatctaagaacccagaccctgtcccagtcctgtgcattcaggtgggcc

SEQ ID NO: 331131 - DNA, 120 bp, Artificial Sequence
  ENSG00000136802_3 (sequence is synthesized)
cgagggcgaggcgagatccagtgaggtccaggcctggtgcagccctagggaggcagcgtccatggagcaaaaggaatgccaggatcctgcacaggcagacgcgggccagcctcagcaccg

SEQ ID NO: 331132 - DNA, 120 bp, Artificial Sequence
  ENSG00000136802_4 (sequence is synthesized)
acagccgacgcgcagatagcagagccatccttggggttgaaccatgattccggtgacagagctccgctactttgcggacacgcagccagcataccggatcctgaagccgtggtgggatgt

SEQ ID NO: 331133 - DNA, 120 bp, Artificial Sequence
  ENSG00000136802_5 (sequence is synthesized)
gttcacagactacatctctatcgtcatgctgatgattgccgtcttcggggggacgctgcaggtcacccaagacaagatgatctgcctgccttgtaagtgggtcaccaaggactcctgcaa

SEQ ID NO: 331134 - DNA, 120 bp, Artificial Sequence
  ENSG00000136802_6 (sequence is synthesized)
tgattcgttccggggctgggcagcccctggcccggagcccacctaccccaactccaccattctgccgacccctgacacgggccccacaggcatcaagtatgacctggaccggcaccagta

SEQ ID NO: 331135 - DNA, 120 bp, Artificial Sequence
  ENSG00000136802_7 (sequence is synthesized)
caactacgtggacgctgtgtgctatgagaaccgactgcactggtttgccaagtacttcccctacctggtgcttctgcacacgctcatcttcctggcctgcagcaacttctggttcaaatt

SEQ ID NO: 331136 - DNA, 120 bp, Artificial Sequence
  ENSG00000136802_8 (sequence is synthesized)
cccgcgcaccagctcgaagctggagcactttgtgtctatcctgctgaagtgcttcgactcgccctggaccacgagggccctgtcggagacagtggtggaggagagcgaccccaagccggc

SEQ ID NO: 331137 - DNA, 120 bp, Artificial Sequence
  ENSG00000136802_9 (sequence is synthesized)
cttcagcaagatgaatgggtccatggacaaaaagtcatcgaccgtcagtgaggacgtggaggccaccgtgcccatgctgcagcggaccaagtcacggatcgagcagggtatcgtggaccg

SEQ ID NO: 331138 - DNA, 120 bp, Artificial Sequence
  ENSG00000136802_10 (sequence is synthesized)
ctcagagacgggcgtgctggacaagaaggagggggagcaagccaaggcgctgtttgagaaggtgaagaagttccggacccatgtggaggagggggacattgtgtaccgcctctacatgcg

SEQ ID NO: 331139 - DNA, 120 bp, Artificial Sequence
  ENSG00000136802_11 (sequence is synthesized)
gcagaccatcatcaaggtgatcaagttcatcctcatcatctgctacaccgtctactacgtgcacaacatcaagttcgacgtggactgcaccgtggacattgagagcctgacgggctaccg

SEQ ID NO: 331140 - DNA, 120 bp, Artificial Sequence
  ENSG00000136802_12 (sequence is synthesized)
cacctaccgctgtgcccaccccctggccacactcttcaagatcctggcgtccttctacatcagcctagtcatcttctacggcctcatctgcatgtatacactgtggtggatgctacggcg

SEQ ID NO: 331141 - DNA, 120 bp, Artificial Sequence
  ENSG00000136802_13 (sequence is synthesized)
ctccctcaagaagtactcgtttgagtcgatccgtgaggagagcagctacagcgacatccccgacgtcaagaacgacttcgccttcatgctgcacctcattgaccaatacgacccgctcta

SEQ ID NO: 331142 - DNA, 120 bp, Artificial Sequence
  ENSG00000136802_14 (sequence is synthesized)
ctccaagcgcttcgccgtcttcctgtcggaggtgagtgagaacaagctgcggcagctgaacctcaacaacgagtggacgctggacaagctccggcagcggctcaccaagaacgcgcagga

SEQ ID NO: 331143 - DNA, 120 bp, Artificial Sequence
  ENSG00000136802_15 (sequence is synthesized)
caagctggagctgcacctgttcatgctcagtggcatccctgacactgtgtttgacctggtggagctggaggtcctcaagctggagctgatccccgacgtgaccatcccgcccagcattgc

SEQ ID NO: 331144 - DNA, 120 bp, Artificial Sequence
  ENSG00000136802_16 (sequence is synthesized)
ccagctcacgggcctcaaggagctgtggctctaccacacagcggccaagattgaagcgcccgcgctggccttcctgcgtgagaacctgcgggcgctgcacatcaagttcaccgacatcaa

SEQ ID NO: 331145 - DNA, 120 bp, Artificial Sequence
  ENSG00000136802_17 (sequence is synthesized)
ggagatcccgctgtggatctatagcctgaagacactggaggagctgcacctgacgggcaacctgagcgcggagaacaaccgctacatcgtcatcgacgggctgcgggagctcaaacgcct

SEQ ID NO: 331146 - DNA, 120 bp, Artificial Sequence
  ENSG00000136802_18 (sequence is synthesized)
caaggtgctgcggctcaagagcaacctaagcaagctgccacaggtggtcacagatgtgggcgtgcacctgcagaagctgtccatcaacaatgagggcaccaagctcatcgtcctcaacag

SEQ ID NO: 331147 - DNA, 120 bp, Artificial Sequence
  ENSG00000136802_19 (sequence is synthesized)
tcccccactccatcttcagcctccacaacctgcaggagattgacctcaaggacaacaacctcaagaccatcgaggagatcatcagcttccagcacctgcaccgcctcacctgccttaagc

SEQ ID NO: 331148 - DNA, 120 bp, Artificial Sequence
  ENSG00000136802_20 (sequence is synthesized)
tgtggtacaaccacatcgcctacatccccatccagatcggcaacctcaccaacctggagcgcctctacctgaaccgcaacaagatcgagaagatccccacccagctcttctactgccgca

SEQ ID NO: 331149 - DNA, 120 bp, Artificial Sequence
  ENSG00000136802_21 (sequence is synthesized)
agctgcgctacctggacctcagccacaacaacctgaccttcctccctgccgacatcggcctcctgcagaacctccagaacctagccatcacggccaaccggatcgagacgctccctccgg

SEQ ID NO: 331150 - DNA, 120 bp, Artificial Sequence
  ENSG00000136802_22 (sequence is synthesized)
agctcttccagtgccggaagctgcgggccctgcacctgggcaacaacgtgctgcagtcactgccctccagggtgggcgagctgaccaacctgacgcagatcgagctgcggggcaaccggc

SEQ ID NO: 331151 - DNA, 120 bp, Artificial Sequence
  ENSG00000136802_23 (sequence is synthesized)
tggagtgcctgcctgtggagctgggcgagtgcccactgctcaagcgcagcggcttggtggtggaggaggacctgttcaacacactgccacccgaggtgaaggagcggctgtggagggctg

SEQ ID NO: 331152 - DNA, 120 bp, Artificial Sequence
  ENSG00000136802_24 (sequence is synthesized)
acaaggagcaggcctgagcgaggccggcccagcacagcaagcagcaggaccgctgcccagtcctcaggcccggaggggcaggcctagcttctcccagaactcccggacagccaggacagc

SEQ ID NO: 331153 - DNA, 120 bp, Artificial Sequence
  ENSG00000136802_25 (sequence is synthesized)
ctcgtggctgggcaggagcctggggccgcttgtgagtcaggccagagcgagaggacagtatctgtggggctggccccttttctccctctgagactcacgtcccccagggcaagtgcttgt

SEQ ID NO: 331154 - DNA, 120 bp, Artificial Sequence
  ENSG00000136802_26 (sequence is synthesized)
ggaggagagcaagtctcaagagcgcagtatttggataatcagggtctcctccctggaggccagctctgccccaggggctgagctgccaccagaggtcctgggaccctcactttagttctt

SEQ ID NO: 331155 - DNA, 120 bp, Artificial Sequence
  ENSG00000136802_27 (sequence is synthesized)
ggtatttatttttctccatctcccacctccttcatccagataacttatacattcccaagaaagttcagcccagatggaaggtgttcagggaaaggtgggctgccttttccccttgtcctt

SEQ ID NO: 331156 - DNA, 120 bp, Artificial Sequence
  ENSG00000136802_28 (sequence is synthesized)
atttagcgatgccgccgggcatttaacacccacctggacttcagcagagtggtccggggcgaaccagccatgggacggtcacccagcagtgccgggctgggctctgcggtgcggtccacg

SEQ ID NO: 331157 - DNA, 120 bp, Artificial Sequence
  ENSG00000136802_29 (sequence is synthesized)
ggagagcaggcctccagctggaaaggccaggcctggagcttgcctcttcagtatttgtggcagttttagttttttgtttttttttttttaatcaaaaaacaatttttttaaaaaaaaagc

SEQ ID NO: 331158 - DNA, 120 bp, Artificial Sequence
  ENSG00000136802_30 (sequence is synthesized)
aagaaaaaaaaaacttaaaaaaaaaaagacactaacggccagtgagttggagtctcagggcagggtggcagtttcccttgagcaaagcagccagacgttgaactgtgtttcctttccctg

SEQ ID NO: 331159 - DNA, 120 bp, Artificial Sequence
  ENSG00000136802_31 (sequence is synthesized)
agacgttgaactgtgtttcctttccctgggcgcagggtgcagggtgtcttccggatctggtgtgaccttggtccaggagttctatttgttcctggggagggaggtttttttgtttgtttt

SEQ ID NO: 331160 - DNA, 120 bp, Artificial Sequence
  ENSG00000136802_32 (sequence is synthesized)
ttgggtttttttggtgtcttgttttctttctcctccatgtgtcttggcaggcactcatttctgtggctgtcggccagagggaatgttctggagctgccaaggagggaggagactcgggtt

SEQ ID NO: 331161 - DNA, 120 bp, Artificial Sequence
  ENSG00000136802_33 (sequence is synthesized)
ggctaatccccggatgaacggtgctccattcgcacctcccctcctcgtgcctgccctgcctctccacgcacagtgttaaggagccaagaggagccacttcgcccagactttgtttcccca

SEQ ID NO: 331162 - DNA, 120 bp, Artificial Sequence
  ENSG00000136802_34 (sequence is synthesized)
ccgcctgcggcatgggtgtgtccagtgccaccgctggcctccgctgcttccatcagccctgtcaccacctggtccttcatgaagagcagacacttagaggctggtcgggaatggggaggt

SEQ ID NO: 331163 - DNA, 120 bp, Artificial Sequence
  ENSG00000136802_35 (sequence is synthesized)
cgcccctgggagggcaggcgttggttccaagccggttcccgtccctggcgcctggagtgcacacagcccagtcggcacctggtggctggaagccaccctgctttagatcactcgggtccc

SEQ ID NO: 331164 - DNA, 120 bp, Artificial Sequence
  ENSG00000136802_36 (sequence is synthesized)
caccttagaagggtccccgccttagatcaatcacgtggacactaaggcacgttttagagtctcttgtcttaatgattatgtccatccgtctgtccgtccatttgtgttttctgcgtcgtg

SEQ ID NO: 331165 - DNA, 120 bp, Artificial Sequence
  ENSG00000136802_37 (sequence is synthesized)
tcattggatataatcctcagaaataatgcacactagcctctgacaaccatgaagcaaaaatccgttacatgtgggtctgaacttgtagactcggtcacagtatcaaataaaatctataac

SEQ ID NO: 331166 - DNA, 120 bp, Artificial Sequence
  ENSG00000136802_38 (sequence is synthesized)
acttccggggcggaggaggctgagtggtgcagtgagggacaaacaaaaggaggcgccggagcagcgctgcggccggcggcgggacggagcggccggggcctggggctgcctgccgggcgg

SEQ ID NO: 331167 - DNA, 120 bp, Artificial Sequence
  ENSG00000136802_39 (sequence is synthesized)
tcagtccaggtgtctttgtctacccccgccctcctccttcctgggtaactcctgctgatcctttggctctctctggtggctgggccactctcccagctcctggctccccgaaacccgtgt

SEQ ID NO: 331168 - DNA, 120 bp, Artificial Sequence
  ENSG00000136802_40 (sequence is synthesized)
tgggtggatttggtgtttaagttggagtctgggcactggctggtctctgcctgacccagccaccccactgtggctcatctcttgccacttcccctctctggctctggatctcgccatgcc

SEQ ID NO: 331169 - DNA, 120 bp, Artificial Sequence
  ENSG00000136802_41 (sequence is synthesized)
gagcccgcaagccttctccagatgccatgtactctctcctccagggaggcagcgtccatggagcaaaaggaatgccaggatcctgcacaggcagacgcgggccagcctcagcaccgacag

SEQ ID NO: 331170 - DNA, 120 bp, Artificial Sequence
  ENSG00000136807_0 (sequence is synthesized)
cggaggggcctggagtgcggcggcggcgggacccggagcaggagcggcggcagcagcgactgggggcggcggcggcgcgttggaggcggccatggcaaagcagtacgactcggtggagtg

SEQ ID NO: 331171 - DNA, 120 bp, Artificial Sequence
  ENSG00000136807_1 (sequence is synthesized)
aaagcagtacgactcggtggagtgccctttttgtgatgaagtttccaaatacgagaagctcgccaagatcggccaaggcaccttcggggaggtgttcaaggccaggcaccgcaagaccgg

SEQ ID NO: 331172 - DNA, 120 bp, Artificial Sequence
  ENSG00000136807_2 (sequence is synthesized)
ccagaaggtggctctgaagaaggtgctgatggaaaacgagaaggaggggttccccattacagccttgcgggagatcaagatccttcagcttctaaaacacgagaatgtggtcaacttgat

SEQ ID NO: 331173 - DNA, 120 bp, Artificial Sequence
  ENSG00000136807_3 (sequence is synthesized)
tgagatttgtcgaaccaaagcttccccctataaccgctgcaagggtagtatatacctggtgttcgacttctgcgagcatgaccttgctgggctgttgagcaatgttttggtcaagttcac

SEQ ID NO: 331174 - DNA, 120 bp, Artificial Sequence
  ENSG00000136807_4 (sequence is synthesized)
gctgtctgagatcaagagggtgatgcagatgctgcttaacggcctctactacatccacagaaacaagatcctgcatagggacatgaaggctgctaatgtgcttatcactcgtgatggggt

SEQ ID NO: 331175 - DNA, 120 bp, Artificial Sequence
  ENSG00000136807_5 (sequence is synthesized)
cctgaagctggcagactttgggctggcccgggccttcagcctggccaagaacagccagcccaaccgctacaccaaccgtgtggtgacactctggtaccggcccccggagctgttgctcgg

SEQ ID NO: 331176 - DNA, 120 bp, Artificial Sequence
  ENSG00000136807_6 (sequence is synthesized)
ggagcgggactacggcccccccattgacctgtggggtgctgggtgcatcatggcagagatgtggacccgcagccccatcatgcagggcaacacggagcagcaccaactcgccctcatcag

SEQ ID NO: 331177 - DNA, 120 bp, Artificial Sequence
  ENSG00000136807_7 (sequence is synthesized)
tcagctctgcggctccatcacccctgaggtgtggccaaacgtggacaactatgagctgtacgaaaagctggagctggtcaagggccagaagcggaaggtgaaggacaggctgaaggccta

SEQ ID NO: 331178 - DNA, 120 bp, Artificial Sequence
  ENSG00000136807_8 (sequence is synthesized)
tgtgcgtgacccatacgcactggacctcatcgacaagctgctggtgctggaccctgcccagcgcatcgacagcgatgacgccctcaaccacgacttcttctggtccgaccccatgccctc

SEQ ID NO: 331179 - DNA, 120 bp, Artificial Sequence
  ENSG00000136807_9 (sequence is synthesized)
cgacctcaagggcatgctctccacccacctgacgtccatgttcgagtacttggcaccaccgcgccggaagggcagccagatcacccagcagtccaccaaccagagtcgcaatcccgccac

SEQ ID NO: 331180 - DNA, 120 bp, Artificial Sequence
  ENSG00000136807_10 (sequence is synthesized)
tgacttgcatcgtggagacagggcatttgagtttatatctctcatgcatattttatttaatccccaccctgggctctgggagcagcccgctgagtggactggagtggagcattggctgag

SEQ ID NO: 331181 - DNA, 120 bp, Artificial Sequence
  ENSG00000136807_11 (sequence is synthesized)
agaccaggagggcactggagctgtcttgtccttgctggttttctggatggttcccagagggtttccatggggtaggaggatgggctcgcccaccagtgactttttctaagagctcccggc

SEQ ID NO: 331182 - DNA, 120 bp, Artificial Sequence
  ENSG00000136807_12 (sequence is synthesized)
gtggtggaagaggggacaggtccctcacccacccacaatcctattctcgggctgagaaccctgcgtggggacagggctcgcctcaggaatgggctgtttttggcctaaccctcagaaaca

SEQ ID NO: 331183 - DNA, 120 bp, Artificial Sequence
  ENSG00000136807_13 (sequence is synthesized)
ctggggctggcacaaactcttggtttcttcaacaggagaattttactgtgtttcttttggttccattgtttggagacattcctgggcacagtttggtccgttagaattaaaagttgaatt

SEQ ID NO: 331184 - DNA, 120 bp, Artificial Sequence
  ENSG00000136807_14 (sequence is synthesized)
ttttttttttttaaatttttttttttcctccaggacttgtgtgttttgttctgcgcacacaccgccaactgttcccccacagtcagcagcaggttgggcctgaccattgggacttgattg

SEQ ID NO: 331185 - DNA, 120 bp, Artificial Sequence
  ENSG00000136807_15 (sequence is synthesized)
tcaagtcactggaggtcttgacttttttatctcagttcatgttctcttccataattggaaaggacctttgtctgtttttcctcttgggtgccttccagaacgcatctcatgtccctggtg

SEQ ID NO: 331186 - DNA, 120 bp, Artificial Sequence
  ENSG00000136807_16 (sequence is synthesized)
agggaattggtgagggcctgctgtgagctgctgtggctgcgatggtcacccagctgggcaaatcactggagtgacaatttgacctgtcacctgagaaggatggtccctcagactgctggg

SEQ ID NO: 331187 - DNA, 120 bp, Artificial Sequence
  ENSG00000136807_17 (sequence is synthesized)
tagagggcctggggcaggctggagagagaaagtgggcagagggtgaagggatcacaggggtcttggaaggtggcagtagtttggacgggggtggggagtatgtgggagaaaaaaacagac

SEQ ID NO: 331188 - DNA, 120 bp, Artificial Sequence
  ENSG00000136807_18 (sequence is synthesized)
tgaaggtagaatccttgggaacctttgaggagcggcacattctggcaggcacgttttctgtgagcctgaagttaggaagagacattctggaggtcaatttcctacatcctcttacaggcg

SEQ ID NO: 331189 - DNA, 120 bp, Artificial Sequence
  ENSG00000136807_19 (sequence is synthesized)
gagaccttgaagtggggccaggaaggaaggttggcaaaacctttgaccagaactgtccttcatttacagaaactgacccagaccacaacacaaaaggccagtaaaagtaagaaaaaaaaa

SEQ ID NO: 331190 - DNA, 120 bp, Artificial Sequence
  ENSG00000136807_20 (sequence is synthesized)
caggcatctacctggccccttccccccaactgccagggcttcttgagctgccggccctggggcattgagcctcaggaggccctcgggctcaaggggccctcctggtgcgctcttcttccc

SEQ ID NO: 331191 - DNA, 80 bp, Artificial Sequence
  ENSG00000136807_21 (sequence is synthesized)
gaggagcagggcactgcggctggccccggatcgggcgccagagcggcagcagcttcggcagcagcggcggcccgggccca

SEQ ID NO: 331192 - DNA, 80 bp, Artificial Sequence
  ENSG00000136807_22 (sequence is synthesized)
ccgatcggggccgccgctagtagtggcggcggcggaggcgggggcagcggcggcggcggcggaggcgcctctgcagctcc

SEQ ID NO: 331193 - DNA, 120 bp, Artificial Sequence
  ENSG00000136810_0 (sequence is synthesized)
gaagctctgtttggtgctttggatccatttccatcggtccttacagccgctcgtcagactccagcagccaagatggtgaagcagatcgagagcaagactgcttttcaggaagccttggac

SEQ ID NO: 331194 - DNA, 120 bp, Artificial Sequence
  ENSG00000136810_1 (sequence is synthesized)
gctgcaggtgataaacttgtagtagttgacttctcagccacgtggtgtgggccttgcaaaatgatcaagcctttctttcattccctctctgaaaagtattccaacgtgatattccttgaa

SEQ ID NO: 331195 - DNA, 120 bp, Artificial Sequence
  ENSG00000136810_2 (sequence is synthesized)
gtagatgtggatgactgtcaggatgttgcttcagagtgtgaagtcaaatgcatgccaacattccagttttttaagaagggacaaaaggtgggtgaattttctggagccaataaggaaaag

SEQ ID NO: 331196 - DNA, 120 bp, Artificial Sequence
  ENSG00000136810_3 (sequence is synthesized)
tgaattagtctaatcatgttttctgaaaatataaccagccattggctatttaaaacttgtaatttttttaatttacaaaaatataaaatatgaagacataaacccagttgccatctgcgt

SEQ ID NO: 331197 - DNA, 120 bp, Artificial Sequence
  ENSG00000136810_4 (sequence is synthesized)
gacaataaaacattaatgctaacactttttaaaaccgtctcatgtctgaatagctttcaaaataaatgtgaaatggtcatttaatgtattttcctatattctcaatcactttttagtaac

SEQ ID NO: 331198 - DNA, 120 bp, Artificial Sequence
  ENSG00000136810_5 (sequence is synthesized)
cttgtaggccactgattattttaagattttaaaaattattattgctaccttaatgtattgctacaaaaatctcttgttgggggcaatgcaggtaataaagtagtatgttgttatttgtta

SEQ ID NO: 331199 - DNA, 120 bp, Artificial Sequence
  ENSG00000136810_6 (sequence is synthesized)
ctgatgctagtaacattctgaacattctgcctgttaatgtgcccgtcaaaggaagtaaatattaataaaacttcttcattgagaatataaccggtttggcttttgtaatgccattatatt

SEQ ID NO: 331200 - DNA, 120 bp, Artificial Sequence
  ENSG00000136810_7 (sequence is synthesized)
cattatattaattttcatatgctgaaaaatgtcctcatgcggaaatgtggggtacatgacagggaaaagtttctggttttggattacttctgtcaaagctcagtactcgcagtcttgtat

SEQ ID NO: 331201 - DNA, 120 bp, Artificial Sequence
  ENSG00000136811_0 (sequence is synthesized)
cccttctcctaggagacagttgtccggccccgccccagcatccccgcggctccctgcgcggttctggccctctggggcccacttggggccgagcggttctcacccgccctctccgcacgt

SEQ ID NO: 331202 - DNA, 120 bp, Artificial Sequence
  ENSG00000136811_1 (sequence is synthesized)
ccgccggcgcctcaggtttcccccggacagttgctgtgcgacttggacagtagaggagcgcctcccaagttttcatccaactgccaaccccaaagcttccacccttctcccctcagagag

SEQ ID NO: 331203 - DNA, 120 bp, Artificial Sequence
  ENSG00000136811_2 (sequence is synthesized)
gacgtttgatgccgggccccttgagaggctcattgacaagcctgcccctctgggtccccctgagcagagcctgctgacccaattgcccacctttgcggctttgatgcctagccatgtctg

SEQ ID NO: 331204 - DNA, 120 bp, Artificial Sequence
  ENSG00000136811_3 (sequence is synthesized)
cctcatcctcaggcggctcccccaggtttccatcgtgtgggaagaacggagtaacgagtctcacgcagaaaaaggtcttgagagcaccttgtggcgcacccagtgtaactgtgacgaaat

SEQ ID NO: 331205 - DNA, 120 bp, Artificial Sequence
  ENSG00000136811_4 (sequence is synthesized)
ctcacaagcgaggaatgaaaggggacactgtgaatgtgcggcggagtgtccgggtgaaaaccaagaatccacctcattgcctggagatcacgccaccatcttcagaaaagctggtctcag

SEQ ID NO: 331206 - DNA, 120 bp, Artificial Sequence
  ENSG00000136811_5 (sequence is synthesized)
tgatgcggttaagtgacctctctacagaagatgatgactcaggtcactgtaaaatgaaccgttatgataagaagattgatagtctaatgaatgcggttggttgtctgaagtctgaggtca

SEQ ID NO: 331207 - DNA, 120 bp, Artificial Sequence
  ENSG00000136811_6 (sequence is synthesized)
agatgcaaaaaggtgagcgccagatggccaaaaggttcctggaggaacggaaggaagagctggaggaggtggcccacgaactggctgagactgagcacgagaacacggtgttgaggcaca

SEQ ID NO: 331208 - DNA, 120 bp, Artificial Sequence
  ENSG00000136811_7 (sequence is synthesized)
acatcgagcgcatgaaggaggagaaggacttcaccatacttcagaagaaacacctacaacaggagaaggagtgcctcatgtccaagctggtggaggcggaaatggatggggctgcggctg

SEQ ID NO: 331209 - DNA, 120 bp, Artificial Sequence
  ENSG00000136811_8 (sequence is synthesized)
ccaagcaggtcatggccttgaaggataccatcgggaagctgaaaacagagaaacaaatgacctgcacggacatcaacaccctgacaaggcagaaggaacttctcctgcagaagctgagca

SEQ ID NO: 331210 - DNA, 120 bp, Artificial Sequence
  ENSG00000136811_9 (sequence is synthesized)
ctgaaacggctggcggaggccgactcagagaaagcgcgcctgctgttactgctgcaagacaaggacaaggaggtggaagagctccttcaggaaatacaatgtgagaaggctcaagcaaag

SEQ ID NO: 331211 - DNA, 120 bp, Artificial Sequence
  ENSG00000136811_10 (sequence is synthesized)
acagcctctgagctttctaaatccatggagtccatgcgtgggcatttgcaggcacagcttcggtccaaagaggctgagaacagtcgcctgtgcatgcagattaagaatctggagcgcagc

SEQ ID NO: 331212 - DNA, 120 bp, Artificial Sequence
  ENSG00000136811_11 (sequence is synthesized)
gggaatcagcataaggcagaagtggaggccatcatggagcagctgaaggagttgaagcagaagggagaccgagacaaagagagcttgaagaaggccatccgagcccagaaggagcgagcc

SEQ ID NO: 331213 - DNA, 120 bp, Artificial Sequence
  ENSG00000136811_12 (sequence is synthesized)
gagaagagcgaggagtatgctgagcagctacacgtgcaactcgctgacaaggatctttatgtcgctgaagctttatccactctggaatcctggaggagccgctacaaccaagttgtaaaa

SEQ ID NO: 331214 - DNA, 120 bp, Artificial Sequence
  ENSG00000136811_13 (sequence is synthesized)
gaaaagggagaccttgagctggaaattattgtcctgaatgaccgggtaacagatcttgtaaaccaacaacaaaccctggaggagaagatgcgggaagaccgggatagcctggtggagaga

SEQ ID NO: 331215 - DNA, 120 bp, Artificial Sequence
  ENSG00000136811_14 (sequence is synthesized)
ctacaccgtcagactgctgagtattccgcattcaagctggagaatgagaggctgaaggccagctttgctccaatggaggacaaactcaaccaggcacacctcgaggtccagcagctgaag

SEQ ID NO: 331216 - DNA, 120 bp, Artificial Sequence
  ENSG00000136811_15 (sequence is synthesized)
gcctcagtgaagaactatgaggggatgattgacaactataagagtcaggtgatgaagaccagattggaggctgatgaagtagctgcccagctagaacgctgtgacaaagagaacaagatc

SEQ ID NO: 331217 - DNA, 120 bp, Artificial Sequence
  ENSG00000136811_16 (sequence is synthesized)
cttaaagatgagatgaacaaagagattgaggcggcacgaaggcagttccagtctcagctggctgacctgcagcagctccctgacatcctgaagatcacggaggcgaagctggctgagtgc

SEQ ID NO: 331218 - DNA, 120 bp, Artificial Sequence
  ENSG00000136811_17 (sequence is synthesized)
caagaccaactgcagggctatgagcggaagaacatcgacctcacagccatcatatcagacctgcgcagccgggtaagggactggcagaaagggtcccacgaactgacccgagcaggggcc

SEQ ID NO: 331219 - DNA, 120 bp, Artificial Sequence
  ENSG00000136811_18 (sequence is synthesized)
cgcataccaagatgagctgcacgccccccaagggaggactacttcctttttcttggctgctgctttttaaaaggagtgagctatcatcagtgctgtgaaataaaagtctggtgtgccaaa

SEQ ID NO: 331220 - DNA, 120 bp, Artificial Sequence
  ENSG00000136811_19 (sequence is synthesized)
tggcggggcggggcatctctgtgacgctaggggctgggcctcgatggcgaaacccaagcggctcccgggggggtttgaactggccaatgggcgagctgccgaccgggtgtcggaaaagga

SEQ ID NO: 331221 - DNA, 120 bp, Artificial Sequence
  ENSG00000136811_20 (sequence is synthesized)
ggcggaagcggggaggagccgctgccagagccagactgcatccgccgcggcgtctccatggcacgaccctggcctccgacttcaacgacttcataaggcggcgtttctgggcgcagccgt

SEQ ID NO: 331222 - DNA, 120 bp, Artificial Sequence
  ENSG00000136811_21 (sequence is synthesized)
tcctcccccacctgccagaagccaaccatgaaggaccgctcttcaactccccccttacatgttcacgtggatgagaacacccctgtccacgtccacataaaaaaactcccgaaaccatca

SEQ ID NO: 331223 - DNA, 120 bp, Artificial Sequence
  ENSG00000136811_22 (sequence is synthesized)
gaaggaaaataaacagctgagtctgaaggtggatgaactggagaggaaactggaggcgaccagtgcccagaatatcgagttcctacaggtgattgccaagagggaggaggcaatccacca

SEQ ID NO: 331224 - DNA, 120 bp, Artificial Sequence
  ENSG00000136811_23 (sequence is synthesized)
gtcccagctgcggctggaggagaaaacacgggaatgtgggaccctggcaaggcagttggagagtgccattgaagatgcgaggaggcaggtggaacaaaccaaggagcacgcactctccaa

SEQ ID NO: 331225 - DNA, 120 bp, Artificial Sequence
  ENSG00000136811_24 (sequence is synthesized)
ggagcgagcagcccagaacaaaatcctggaccttgagacccagctgagcagaaccaaaacggaattgagccagctgcggcggagccgtgatgatgcggaccgccgctaccagagccggct

SEQ ID NO: 331226 - DNA, 120 bp, Artificial Sequence
  ENSG00000136811_25 (sequence is synthesized)
gcaagacctgaaagatcgcctggagcagtccgagagcaccaaccgcagcatgcagaactacgtccagttcctcaaatcatcatacgccaacgtgtttggggatggtccctattccacctt

SEQ ID NO: 331227 - DNA, 120 bp, Artificial Sequence
  ENSG00000136811_26 (sequence is synthesized)
cctgactagctctcccatccgctcccgatctcctcctgcctgaggccacttatcagggcctggagccctgatggaagccataggaactccagagttgccaagccatagctgagaagcctg

SEQ ID NO: 331228 - DNA, 120 bp, Artificial Sequence
  ENSG00000136811_27 (sequence is synthesized)
gtggttttcctctcccagtgaaaaaatgggttcagggtcttgtccttagctactagctctagaaaagtcccaaaagcagcagaaggtgaagcaggaagcacttggttttctccttcctga

SEQ ID NO: 331229 - DNA, 120 bp, Artificial Sequence
  ENSG00000136811_28 (sequence is synthesized)
tatagtcacctgttggaagtgttaaaatttcctcgacaggccttaaatttactactacattagggtaccacattttaacttaccatgactttgctccttcctttcctgagaaaatatttc

SEQ ID NO: 331230 - DNA, 120 bp, Artificial Sequence
  ENSG00000136811_29 (sequence is synthesized)
cactggattttttccaccagtccccttacagccctcattgttttaggaatctctctcaggttttttctgacctaaaccagcaggaagtcgtcctgggctgtaagcaccatcacttgcttt

SEQ ID NO: 331231 - DNA, 120 bp, Artificial Sequence
  ENSG00000136811_30 (sequence is synthesized)
ttttttttttctgatttcacaagtgtggtgttttcccaaggctcccttcccaagctcagtgcaaacctctcactcccaagtttctttgaggccacttgcccccaagcacttcacaataga

SEQ ID NO: 331232 - DNA, 120 bp, Artificial Sequence
  ENSG00000136811_31 (sequence is synthesized)
ccctcgagggcttgtgtccatttggccttttacaagtgtaatgccaatttcattgatttttgtttcttttggcctgatttgtatctctggaatgcatttattcttgaaatatttgtgtga

SEQ ID NO: 331233 - DNA, 120 bp, Artificial Sequence
  ENSG00000136811_32 (sequence is synthesized)
ttttacaaaaagcttttgtaatcagttatttaaggctccatttgatgatttcctttacccaaccagtcctcatccctcctctaaaaaatgattaagtaaaatgctgcaggacagccagta

SEQ ID NO: 331234 - DNA, 120 bp, Artificial Sequence
  ENSG00000136811_33 (sequence is synthesized)
gacatttttaaagtacttggtgcctgaaacatcaggcttctcatttcattttagctcaggttggtgctttcacattgtaatcaatgaactgtcaggagggaacaaactgtaagaaggatt

SEQ ID NO: 331235 - DNA, 120 bp, Artificial Sequence
  ENSG00000136811_34 (sequence is synthesized)
gcttggtgttttagggtagatcactttagctattaggaagaggatggggtagtgtacagtatatatttttaaaatgtgaattggtttctgaataagaatctgggccatttttgttcacca

SEQ ID NO: 331236 - DNA, 120 bp, Artificial Sequence
  ENSG00000136811_35 (sequence is synthesized)
ccaccggcgcggggcctctcctcctcccgctaacgggcggtcggccgcctccttcctctcttggctaccacggggctctgcccctcctctgccgcccgcgggcagggcttcacctttctc

SEQ ID NO: 331237 - DNA, 120 bp, Artificial Sequence
  ENSG00000136811_36 (sequence is synthesized)
cggagtgtccgggtgaaaaccaaggtaccttggatgccccctggaaaatcatctgcccggcctgtgggatgcaagtgggagaatccacctcattgcctggagatcacgccaccatcttca

SEQ ID NO: 331238 - DNA, 120 bp, Artificial Sequence
  ENSG00000136811_37 (sequence is synthesized)
taattgagaagatggcggaccagcaaggacctcatcagaataggtctgtacacagagcggcatagagagtgcaggagggtagtagaccgggcgcggaggctcaagcctgtaatacaagca

SEQ ID NO: 331239 - DNA, 120 bp, Artificial Sequence
  ENSG00000136811_38 (sequence is synthesized)
cagctgagtctgaaggtggatgaactggagaggttagaggcacttggtcccatctctgtcctcttcctaggacctgagactttcagccacttagctgttttttgcttagtgtgcggaagt

SEQ ID NO: 331240 - DNA, 120 bp, Artificial Sequence
  ENSG00000136811_39 (sequence is synthesized)
tatgattcagggtcagctatagctactggaatgtcctaacagaccccatttactgagggccttgctaaaccctgaaactatgtgaatcttcttgagttcttatgatactgctgtgtggga

SEQ ID NO: 331241 - DNA, 120 bp, Artificial Sequence
  ENSG00000136811_40 (sequence is synthesized)
agtcctgctgtccaaaggcagagatgaggaaccagacctcagagagaagtgattttcccagagtcacagagaagttagcagagctggagttaagattcattctagaggcagtactcttag

SEQ ID NO: 331242 - DNA, 120 bp, Artificial Sequence
  ENSG00000136811_41 (sequence is synthesized)
agagcaagactccatctcaaaaaaaaagaggtgggcaagagtcctccagccctggtcccagccttagtttcagaggtgaaggtgcctgacatcctaggaggccctaagtgcctcaggtgg

SEQ ID NO: 331243 - DNA, 120 bp, Artificial Sequence
  ENSG00000136811_42 (sequence is synthesized)
gtggccagtgcacttgcaaggaggctacaaccaagtgggctccttccaggctccacctctgctctgccctgccagccttggaaatggcagctagatcccccaggccctgcagagctcctt

SEQ ID NO: 331244 - DNA, 120 bp, Artificial Sequence
  ENSG00000136811_43 (sequence is synthesized)
aaattggaaggcatcctggaagtgcactgaggacagtgtgtgtatatcgggatggccatatttgccctatggctggtcacacaagatgttgagtggtgtagctgaagtccctttgctgtg

SEQ ID NO: 331245 - DNA, 120 bp, Artificial Sequence
  ENSG00000136811_44 (sequence is synthesized)
ggaggcagcagtgaacagcagaagttgcaggcttaggttttggttacagacttgccagctgtgctgacttcaggccaatgaattcccctctctgaggctcagtttcttcatttctgaagt

SEQ ID NO: 331246 - DNA, 120 bp, Artificial Sequence
  ENSG00000136811_45 (sequence is synthesized)
ggggataataatggtaccatttttctgagctgcaagttgctgtgttccatgtgatgctatccacacttaacaaagcccacggtcagtctctgcgttcccacccttcactctgttctctaa

SEQ ID NO: 331247 - DNA, 120 bp, Artificial Sequence
  ENSG00000136811_46 (sequence is synthesized)
ttggcatgatgagatccccagtccaggagaggctggcagccccctggcggggtggaacatgacaggttggggtatgcccaggatctgattgagtgctttcacctaggaaactggaggcga

SEQ ID NO: 331248 - DNA, 120 bp, Artificial Sequence
  ENSG00000136813_0 (sequence is synthesized)
gcgtgtttccccaggtcgggcccagccaacgtgacagccgcagacctcggaaaagggcgctccggccccgcctcgaggatttcccccggccgctagggcagcccgggcccgctcggccca

SEQ ID NO: 331249 - DNA, 120 bp, Artificial Sequence
  ENSG00000136813_1 (sequence is synthesized)
gcccctcacggactgcggcgcgcggctccccggggcccggcccgccgaacgcctcgctctacagccctcacctcgcggcgccgagcgcagcgtccgcggcatggagaccggctccgactc

SEQ ID NO: 331250 - DNA, 120 bp, Artificial Sequence
  ENSG00000136813_2 (sequence is synthesized)
agatcagcttgaacgggtctttttacgacttggccatgctgaaacagatgaacaattacagaatattatatctaaattccttcctcctgttttgctcaaactctctagcacccaagaagg

SEQ ID NO: 331251 - DNA, 120 bp, Artificial Sequence
  ENSG00000136813_3 (sequence is synthesized)
agtacgtaaaaaggtaatggaactgctggtccatctgaataaacgtataaaaagccgccccaaaatacaacttccagtagagacactgttggttcagtaccaggaccctgctgcagtttc

SEQ ID NO: 331252 - DNA, 120 bp, Artificial Sequence
  ENSG00000136813_4 (sequence is synthesized)
ctttgtcacaaattttactataatttatgttaaaatgggctatcctcgcctaccagtggaaaaacaatgtgaactggcccctacgcttcttactgccatggaagggaagcctcagccaca

SEQ ID NO: 331253 - DNA, 120 bp, Artificial Sequence
  ENSG00000136813_5 (sequence is synthesized)
gcaggatagcttaatgcatcttttaataccaaccctttttcacatgaaataccctgttgaatcatcaaaatcagcttctccatttaatcttgctgagaaaccaaagactgtgcagctgct

SEQ ID NO: 331254 - DNA, 120 bp, Artificial Sequence
  ENSG00000136813_6 (sequence is synthesized)
tttggacttcatgctagatgtccttctgatgccttatggttacgtgttaaatgaatcccagagtcgccaaaattcatcttcagcacagggttcttcttcaaacagtggcggaggttctgg

SEQ ID NO: 331255 - DNA, 120 bp, Artificial Sequence
  ENSG00000136813_7 (sequence is synthesized)
aatcccacagcctcctccgggaatgagcttttatgcagccaaacgagttattggtgataacccatggacacctgaacaattggaacagtgcaaattgggaatcgtgaaattcatagaagc

SEQ ID NO: 331256 - DNA, 120 bp, Artificial Sequence
  ENSG00000136813_8 (sequence is synthesized)
tgaacaggtgcctgaacttgaagctgttctccacttggtgattgcctctagtgatacacgccacagtgtggcaacggcagcagacctggaattgaaaagcaaacagagcttaattgactg

SEQ ID NO: 331257 - DNA, 120 bp, Artificial Sequence
  ENSG00000136813_9 (sequence is synthesized)
gaataatcctgccatcattaataagatgtacaaggtgtaccttggagatataccactgaagacaaaagagggtgcagttctgaagccagagttgaaaagggaccctgtcagtacaagagt

SEQ ID NO: 331258 - DNA, 120 bp, Artificial Sequence
  ENSG00000136813_10 (sequence is synthesized)
caagttaaagattgtcccccatctcctccgctctagacaagctgctgaaacgttcccagccaacattcaggtggtgtatgatggactttttggtacaaatacaaattcaaagttaagaac

SEQ ID NO: 331259 - DNA, 120 bp, Artificial Sequence
  ENSG00000136813_11 (sequence is synthesized)
attatccctgcaatttgtgcatcatatttgtataacctgtccagaaatcaagattaagccattaggtccaatgcttttgaatggcctcaccaagctaatcaatgaatacaaagaggaccc

SEQ ID NO: 331260 - DNA, 120 bp, Artificial Sequence
  ENSG00000136813_12 (sequence is synthesized)
taaactactgtcaatggcatattcagctgttggaaaactctccagtcggatgccacatttattcactaaggatatagcgcttgtgcagcagctttttgaagccctttgcaaggaagagcc

SEQ ID NO: 331261 - DNA, 120 bp, Artificial Sequence
  ENSG00000136813_13 (sequence is synthesized)
tgagactcgacttgctattcaagaagctttatctatgatggttggagcgtatagtactttggaaggggcacagcgaactctcatggaggcacttgtggcttcgtacttaataaagcctga

SEQ ID NO: 331262 - DNA, 120 bp, Artificial Sequence
  ENSG00000136813_14 (sequence is synthesized)
agttcaagttcgacaagtggctgtgaaatttgccagtacggtgtttccctcagatcatatcccttccagatatttgctgctactggctgcaggagatccacgtgaagaagttcatggaga

SEQ ID NO: 331263 - DNA, 120 bp, Artificial Sequence
  ENSG00000136813_15 (sequence is synthesized)
agcacaacgcgtattaaggtgtcttccaggtagaaacagaaaagaaagtacttctgagcagatgccttccttcccagaaatggtttattacatccaagaaaaggcttctcatcgaatgaa

SEQ ID NO: 331264 - DNA, 120 bp, Artificial Sequence
  ENSG00000136813_16 (sequence is synthesized)
aactccagtcaagtacatgaccgggaccactgtccttccatttaacccagcagcctttggagagatcgttctgtacttgcgcatgtgccttgcgcacagtgcgggggtggtgcccacctc

SEQ ID NO: 331265 - DNA, 120 bp, Artificial Sequence
  ENSG00000136813_17 (sequence is synthesized)
tcagagtttggctgatatgcaggatcatgccccagccattgggcgctacatacggactttaatgtcaagcgggcagatggcaccctcatcatctaacaagagtggggagactaaccctgt

SEQ ID NO: 331266 - DNA, 120 bp, Artificial Sequence
  ENSG00000136813_18 (sequence is synthesized)
ccagatctacattggcctgcttcagcagctgttagcaggtgttggaggtttgccggttatgtactgtctattggaagctgtgtcagtgtatccagaaaagctggctaccaaatttgtaga

SEQ ID NO: 331267 - DNA, 120 bp, Artificial Sequence
  ENSG00000136813_19 (sequence is synthesized)
caaaacagaatggataaagagtctgatgaataacagtaaagaagaaatgcgcgaactggcagcgttgttttattctgtagtggtatcaacagtgtcggggaatgagttgaaatcaatgat

SEQ ID NO: 331268 - DNA, 120 bp, Artificial Sequence
  ENSG00000136813_20 (sequence is synthesized)
agaacagcttataaagactacaaaagacaatcacagcccggagatacagcatggatccttgcttgcattgggattcacggtgggaaggtatttggctaaaaagaaaatgagaatgtcaga

SEQ ID NO: 331269 - DNA, 120 bp, Artificial Sequence
  ENSG00000136813_21 (sequence is synthesized)
gcaacaagacctggagagaaatgctgacaccctccctgatcaagaggaactcattcagagtgctacagaaacaataggctcatttttggacagtacatcacccctcctggcaattgctgc

SEQ ID NO: 331270 - DNA, 120 bp, Artificial Sequence
  ENSG00000136813_22 (sequence is synthesized)
ctgcacagccctgggtgaaattggcagaaatggtccacttccaatccccagtgagggatctggctttaccaaattgcatcttgtagaaagcttactaagtagaataccttccagtaaaga

SEQ ID NO: 331271 - DNA, 120 bp, Artificial Sequence
  ENSG00000136813_23 (sequence is synthesized)
aacaaataagatgaaagaacgagcaatccaaacactgggatattttccagttggggatggagattttcctcaccagaaactcctcttgcaaggtctgatggattctgtggaggccaagca

SEQ ID NO: 331272 - DNA, 120 bp, Artificial Sequence
  ENSG00000136813_24 (sequence is synthesized)
gatagaacttcagttcactattggcgaagccattaccagtgctgcaataggaactagttctgtggctgcccgagatgcctggcaaatgactgaagaggaatatactccacctgctggagc

SEQ ID NO: 331273 - DNA, 120 bp, Artificial Sequence
  ENSG00000136813_25 (sequence is synthesized)
caaagtgaatgatgtggttccatgggtgttggatgtgattttaaataaacatatcatcagccccaacccacacgtgaggcaagcagcctgcatctggctcctttcccttgtcaggaagct

SEQ ID NO: 331274 - DNA, 120 bp, Artificial Sequence
  ENSG00000136813_26 (sequence is synthesized)
aagtacccacaaagaagtgaagtctcatcttaaagaaattcaaagtgcatttgtttcagttctatcagaaaatgatgaacttagccaagatgttgcatcaaagggccttgggttggttta

SEQ ID NO: 331275 - DNA, 120 bp, Artificial Sequence
  ENSG00000136813_27 (sequence is synthesized)
tgaactaggcaatgaacaagatcaacaggaattggtttctacacttgtggaaacacttatgactggcaaaagagttaaacatgaagtttctggagagacagtggtatttcaagggggagc

SEQ ID NO: 331276 - DNA, 120 bp, Artificial Sequence
  ENSG00000136813_28 (sequence is synthesized)
tcttggcaaaacaccagatggtcagggcctttctacttacaaggaactttgttctctggcaagtgatcttagccagccagatctggtgtataaatttatgaatttagccaaccatcatgc

SEQ ID NO: 331277 - DNA, 120 bp, Artificial Sequence
  ENSG00000136813_29 (sequence is synthesized)
gatcccaaccttggcattcgacaggccatgacaagtatttggaatgcgttggtcactgacaaatccatggtggataaatatttgaaagaaattcttcaagatttggttaagaaccttaca

SEQ ID NO: 331278 - DNA, 120 bp, Artificial Sequence
  ENSG00000136813_30 (sequence is synthesized)
agcaatatgtggcgagttcgagaatccagctgtttagctttgaatgatttattgagaggaagacccttagatgacatcattgataaacttccagaaatttgggaaacgctttttagagta

SEQ ID NO: 331279 - DNA, 120 bp, Artificial Sequence
  ENSG00000136813_31 (sequence is synthesized)
caagatgatatcaaggaatctgtacgaaaagcggcagaactagctctgaaaactctgagcaaggtctgtgtgaaaatgtgtgaccctgccaaaggagcagctggccagagaaccatcgct

SEQ ID NO: 331280 - DNA, 120 bp, Artificial Sequence
  ENSG00000136813_32 (sequence is synthesized)
gcccttctgccttgccttctggacaaaggaatgatgagcaccgtgacggaagttcgagccctcagcattaacacccttgtgaagatcagcaaaagtgcaggagccatgttgaaaccgcat

SEQ ID NO: 331281 - DNA, 120 bp, Artificial Sequence
  ENSG00000136813_33 (sequence is synthesized)
gcaccaaaactcattccagctctgctagagtccttaagtgtattggagccccaagttctcaattatttgagcctccgggcgacagagcaagaaaaggctgcgatggatagtgctcggctt

SEQ ID NO: 331282 - DNA, 120 bp, Artificial Sequence
  ENSG00000136813_34 (sequence is synthesized)
agtgctgccaaatcttctccaatgatggaaacaatcaacatgtgcctgcaataccttgatgtgtcagtgctgggcgagctagttcctaggttgtgtgaactgatcagaagtggtgtaggt

SEQ ID NO: 331283 - DNA, 120 bp, Artificial Sequence
  ENSG00000136813_35 (sequence is synthesized)
cttggaactaagggtggctgtgccagtgtcattgtgtcattaactactcagtgtcctcaggacctaacaccttactcaggtaaacttatgagtgctttgctgagtggcctgacagatcgg

SEQ ID NO: 331284 - DNA, 120 bp, Artificial Sequence
  ENSG00000136813_36 (sequence is synthesized)
aacagtgtgattcagaaatcttgtgcatttgctatgggccatttagttcggacctcacgggatagcagcactgaaaaactcctgcagaagctcaatgggtggtatatggagaaagaagaa

SEQ ID NO: 331285 - DNA, 120 bp, Artificial Sequence
  ENSG00000136813_37 (sequence is synthesized)
cctatctacaagacctcttgtgctttgactattcatgctattggacgatacagccctgatgtattaaagaatcatgcaaaagaagtcctgcctctggcatttttaggcatgcatgaaatt

SEQ ID NO: 331286 - DNA, 120 bp, Artificial Sequence
  ENSG00000136813_38 (sequence is synthesized)
gctgatgaggagaaatccgaaaaagaagaatgtaatttatggaccgaagtgtggcaggaaaacgtacctggatcctttggtggcattcgattatacctgcaggagttaattactattacc

SEQ ID NO: 331287 - DNA, 120 bp, Artificial Sequence
  ENSG00000136813_39 (sequence is synthesized)
cagaaggctttgcagtctcagtcctggaaaatgaaagcccagggtgcaattgccatggcatcaattgcaaaacagactagctctctagtacctccatatctcggaatgatactgaccgca

SEQ ID NO: 331288 - DNA, 120 bp, Artificial Sequence
  ENSG00000136813_40 (sequence is synthesized)
ttgctgcaaggcctggctggaagaacgtgggcaggaaaggaggagctattgaaagccattgcctgtgtggtgacagcttgcagtgcagagctggaaaagtctgtgcccaatcaacccagc

SEQ ID NO: 331289 - DNA, 120 bp, Artificial Sequence
  ENSG00000136813_41 (sequence is synthesized)
acaaatgaaattcttcaagctgttctgaaggaatgtagcaaagagaatgtcaaatacaagattgtagcaatcagctgtgcagctgatatcttgaaggccaccaaagaggacagattccag

SEQ ID NO: 331290 - DNA, 120 bp, Artificial Sequence
  ENSG00000136813_42 (sequence is synthesized)
gagttctctaacattgtcatacctctcatcaagaagaactcacttgaaagcagtggggtccggacaaccaaaaatgaagaggagaatgaaaaggaaaaggagctccagctggaatatctg

SEQ ID NO: 331291 - DNA, 120 bp, Artificial Sequence
  ENSG00000136813_43 (sequence is synthesized)
ctgggtgcctttgaaagcctgggcaaagcctggccgcgaaacgcggagacccaacgttgttatcgtcaggagctgtgcaaactgatgtgtgaacggctaaaactcagcacgtggaaagtg

SEQ ID NO: 331292 - DNA, 120 bp, Artificial Sequence
  ENSG00000136813_44 (sequence is synthesized)
cagctaggagtcctgcaatcaatgaatgccttttttcaggggttaatgcttttggaagaagaacatgccgatcctgaggctttggctgaaattctgcttgaaacttgtaaatcaatcaca

SEQ ID NO: 331293 - DNA, 120 bp, Artificial Sequence
  ENSG00000136813_45 (sequence is synthesized)
tattctttagaaaataagacctactcatctgtgagaacagaagctttatctgtgatagaattgctgcttaaaaaacttgaagaatctaaacagtgggaatgtttgacatctgaatgcaga

SEQ ID NO: 331294 - DNA, 120 bp, Artificial Sequence
  ENSG00000136813_46 (sequence is synthesized)
gtgctcctaattgagtctttagctactatggagccagacagcagacctgaactgcaggagaaagcagcgttactgaagaaaacacttgaaaatctggaataaattagaaggggaagaaac

SEQ ID NO: 331295 - DNA, 120 bp, Artificial Sequence
  ENSG00000136813_47 (sequence is synthesized)
aaacaagtgccatgttcattgggggttgaagtggtggtgttctttgaaaaaccaagtgggaaaaagtaaagattaatctgtagcatgcatcattccttggctgaaataaaaagaaaaagc

SEQ ID NO: 331296 - DNA, 120 bp, Artificial Sequence
  ENSG00000136813_48 (sequence is synthesized)
cttaaattttgttccttattagctttattttactttatgtttttaaagtatctgggctgagtgagcttaatggaaccttggatgtttgaggggtggttgtaaaggaaactggcagaaata

SEQ ID NO: 331297 - DNA, 120 bp, Artificial Sequence
  ENSG00000136813_49 (sequence is synthesized)
gttactaaaagagttcaagctgttattaaaggaattaatagacagagttgcagagcaagctggataaaaatcttagaactgcattcaaattagttatttcaggaaggggccctataaata

SEQ ID NO: 331298 - DNA, 120 bp, Artificial Sequence
  ENSG00000136813_50 (sequence is synthesized)
acttattttaacctccctcttacacctgaagaaataggaagctgtgtcatctcagaggctttctgaggcctgtgccaaagtcagaacccaggtgtttaatgtctggccctggatactttc

SEQ ID NO: 331299 - DNA, 120 bp, Artificial Sequence
  ENSG00000136813_51 (sequence is synthesized)
ttttatggccatctgccaaatcagtgctaaccccggcttacccaagaaacttccaagatgaggtacgtttagggtggcacacagcagtctttgtgccagaactaaactgacccttaccat

SEQ ID NO: 331300 - DNA, 120 bp, Artificial Sequence
  ENSG00000136813_52 (sequence is synthesized)
tgggtttctgaaagccagaagctaaacattgtcttgtcatgtgtttaggtggttgatttggagaaaatgattgtttagcatctttacagatggagaggacagagtcagtctccttcggat

SEQ ID NO: 331301 - DNA, 120 bp, Artificial Sequence
  ENSG00000136813_53 (sequence is synthesized)
aattccaatcgtcttccttttacaggtggataaagtagattaggacaagatcacacattctatctgtgtctgtggctgcatattttgcaaaaccagaaacaaaatcgcagactgccgtgg

SEQ ID NO: 331302 - DNA, 120 bp, Artificial Sequence
  ENSG00000136813_54 (sequence is synthesized)
tttagaccatttataatgtcaaaactgtaatgacaaatttctgttcacttttatgctaccagtatgactttataggggagaaggaaagccttttaattagccacctgggaattactcttt

SEQ ID NO: 331303 - DNA, 120 bp, Artificial Sequence
  ENSG00000136813_55 (sequence is synthesized)
taaaaaatgccttttctcaaaagaacatgataccactccaagtaaatcattgccactaggggttttcctccttccttctgttgcccatgcccctgcctgaaagtgtagggtaagaggaaa

SEQ ID NO: 331304 - DNA, 120 bp, Artificial Sequence
  ENSG00000136813_56 (sequence is synthesized)
aacaagtaaaaccttagtgttgatggtaaactgagaactctgtagcttaccttggattccagagcagaagactggtttacattcagtactcatccttattgacgttaacaccaggaatct

SEQ ID NO: 331305 - DNA, 120 bp, Artificial Sequence
  ENSG00000136813_57 (sequence is synthesized)
ccatgtttattatttttcgtggaaactccatgtttattatttttggtggtctctattgaccaatgtatttcaaacttttttgactgcaagtcataataaaaataactttttacatcacga

SEQ ID NO: 331306 - DNA, 120 bp, Artificial Sequence
  ENSG00000136813_58 (sequence is synthesized)
ggaactaaatttctgaaatagctactggactctgctacttattatactccatgtgtaccccttaactggaatatttaaatctggaactataacaggattttagcatctagtttagaaaaa

SEQ ID NO: 331307 - DNA, 120 bp, Artificial Sequence
  ENSG00000136813_59 (sequence is synthesized)
ccttcgtgacaagtatttttacaaaattgttacttgaaagtaatttcaaacttacagaatggttgcaacgacagtacatgtaatactctgcaatatgtatacactttatgcagaatcatt

SEQ ID NO: 331308 - DNA, 120 bp, Artificial Sequence
  ENSG00000136813_60 (sequence is synthesized)
tgttaacattttgtgccatttgctttgtcatttggacttctatatacatgtttttctcctgaaccatttgaaagtatgttgcttacttcaggcccccttgttcctcaattatttagtgtg

SEQ ID NO: 331309 - DNA, 120 bp, Artificial Sequence
  ENSG00000136813_61 (sequence is synthesized)
ccacggtacagttgtcaactttaggtagtaaacatggatgcagttttttaaatcaaatgtttatcgttcatattctagtttgttcagttgattcggtaatgttctttatttttattttta

SEQ ID NO: 331310 - DNA, 80 bp, Artificial Sequence
  ENSG00000136813_62 (sequence is synthesized)
ggcgggcctcggggcacagcgcggtccgcgccgagtgaacggaggcggctcgcggcccctgccgcaccgcgagccgcgag

SEQ ID NO: 331311 - DNA, 120 bp, Artificial Sequence
  ENSG00000136813_63 (sequence is synthesized)
aggccgggccgcccgcacaggccgccgcgtgtcgagtccgcgcggggagcgcacgcggggcgggcggcgacagattctttatacaattgcatatgtacgagtggatgaacgtaccattgg

SEQ ID NO: 331312 - DNA, 120 bp, Artificial Sequence
  ENSG00000136813_64 (sequence is synthesized)
atgacctcacggacaaagcgaaggcagaaagttaaaatcagcatatcgaaaataaatcactctagttaccgaaaagaacataggccgttttgggagcaccagccacctccacaccagaac

SEQ ID NO: 331313 - DNA, 120 bp, Artificial Sequence
  ENSG00000136813_65 (sequence is synthesized)
gaactgggctgtcgggggccgctgcggcgcaggggctcgtccgggactgagtcagcgccggggccgagaagttcggcgggaggcgcagggcggggcttcctcccgccgactccgagcccg

SEQ ID NO: 331314 - DNA, 120 bp, Artificial Sequence
  ENSG00000136816_0 (sequence is synthesized)
agtggcttctgcgggcttcgaggagcgggatgttgcgggctgggtggctccggggcgcggcggcgctggcgctgctgctggcggcccgagtggtggcggcgttcgagcccatcaccgtgg

SEQ ID NO: 331315 - DNA, 120 bp, Artificial Sequence
  ENSG00000136816_1 (sequence is synthesized)
gcctagccatcggggccgcgtcggccatcaccggctacctgtcctacaatgacatctactgccgcttcgccgagtgctgccgcgaggagcggccgctcaacgcttcggctctcaagctgg

SEQ ID NO: 331316 - DNA, 120 bp, Artificial Sequence
  ENSG00000136816_2 (sequence is synthesized)
atttggaggagaagctgtttggacagcatctagccacggaagtgattttcaaggcgctgactggcttcaggaacaacaaaaatcccaagaaaccactgaccctttccttacacggctggg

SEQ ID NO: 331317 - DNA, 120 bp, Artificial Sequence
  ENSG00000136816_3 (sequence is synthesized)
ctggcacaggcaagaattttgtcagtcaaattgtggctgaaaatcttcacccaaaaggtctgaagagtaactttgtccacctgtttgtatcgactctgcacttccctcatgagcagaaga

SEQ ID NO: 331318 - DNA, 120 bp, Artificial Sequence
  ENSG00000136816_4 (sequence is synthesized)
taaaactgtaccaggaccagttacagaagtggatccgcggtaatgtgagtgcatgtgcgaactctgttttcatatttgacgagatggataaattgcaccccgggatcattgacgcaatca

SEQ ID NO: 331319 - DNA, 120 bp, Artificial Sequence
  ENSG00000136816_5 (sequence is synthesized)
agccgtttctagactactacgagcaggttgacggagtgtcttaccgcaaagccatcttcatctttctcagcaatgcaggcggggaccttataactaagacggctcttgacttttggcggg

SEQ ID NO: 331320 - DNA, 120 bp, Artificial Sequence
  ENSG00000136816_6 (sequence is synthesized)
ccggaagaaagagggaagacattcagctgaaggacctggaacctgtactgtctgtcggagtcttcaataataaacacagtggcctgtggcacagtggactgatcgacaaaaacctcattg

SEQ ID NO: 331321 - DNA, 120 bp, Artificial Sequence
  ENSG00000136816_7 (sequence is synthesized)
attactttatccccttcctgcctttggagtacagacatgtgaaaatgtgtgtgagggccgagatgagggcccgtggttctgccatagatgaagacattgtcacaagagtggcagaggaaa

SEQ ID NO: 331322 - DNA, 120 bp, Artificial Sequence
  ENSG00000136816_8 (sequence is synthesized)
tgacgtttttccccagagacgagaaaatctactcagacaagggctgcaagactgtgcagtcgcggctggatttccactgagctcctatccagatggggtaggagacagctgggaggctcc

SEQ ID NO: 331323 - DNA, 120 bp, Artificial Sequence
  ENSG00000136816_9 (sequence is synthesized)
gcacgccagaggccttgcctttcagaagaaccctgaagaccgctttggggttttgcctgtttgcaccttagacttttgggtatagaatcttttttttgagaagaggtctcactccgtcat

SEQ ID NO: 331324 - DNA, 120 bp, Artificial Sequence
  ENSG00000136816_10 (sequence is synthesized)
gaatcttttttttgagaagaggtctcactccgtcatccaagctggagtgcagtggtgcaatcctcaactcactgcaacctccgctcccggtttgagtgattctcatgcctcagcctcccg

SEQ ID NO: 331325 - DNA, 120 bp, Artificial Sequence
  ENSG00000136816_11 (sequence is synthesized)
cagctggagatgaacttttaaaaatccccttcacacttaatgtactgaccgagacagaagtacctgaaaacagctgtgcatggcaggcccggcaatagcttctgacccacagcacccgcg

SEQ ID NO: 331326 - DNA, 120 bp, Artificial Sequence
  ENSG00000136816_12 (sequence is synthesized)
cctcagaagctacggtcacaactaaaggagtccagggacttgctgcaggctggggggcactgggtggttctcaccagcaggctgcggggcactgtgttctcattggccaaaaacatcctt

SEQ ID NO: 331327 - DNA, 120 bp, Artificial Sequence
  ENSG00000136816_13 (sequence is synthesized)
ttgctctgtctcgttctttacacagagttcactgacttgaagtatactcagttaaaatcggggctggaggtgcagacggtgtctgaccggaggatgtggccgtgcccgccgagcactctt

SEQ ID NO: 331328 - DNA, 120 bp, Artificial Sequence
  ENSG00000136816_14 (sequence is synthesized)
gatctgagctgacctgtgtgtgtgtgtgtgggggggtggggccttcacctaagacctctgcagcagacctggacagacaggcccctcccgcctgtccatcgctctagctgctaatacagc

SEQ ID NO: 331329 - DNA, 120 bp, Artificial Sequence
  ENSG00000136816_15 (sequence is synthesized)
cctggctgtggaatccttcaccgtctcagctggtatcagccccagcctgccttgtgccatatctcagcttggatctctgctagagtccccccaaccatatatcatagagttgaatcacaa

SEQ ID NO: 331330 - DNA, 120 bp, Artificial Sequence
  ENSG00000136816_16 (sequence is synthesized)
tgagaccgttggctttgaatttgagtcgttggttcccatggtgagatgcttgttaagactttatacttgggtcaatctctcactttattttgtagaaccatttgaaatcctaggatgtgc

SEQ ID NO: 331331 - DNA, 120 bp, Artificial Sequence
  ENSG00000136816_17 (sequence is synthesized)
ttgttctggaaggatgacatgggcccagactgaacaagtcagcttgatgatcttaaatgatggaagtataggacgttgcttattttaaaacaagggaaggacacaaaatggaatgactgc

SEQ ID NO: 331332 - DNA, 120 bp, Artificial Sequence
  ENSG00000136816_18 (sequence is synthesized)
ttagtcctttctcagatactcttaaaacaattttttattgttaaatttgtggtaatacatggtcacaaccgtggatcaaacaaggtcagtctaaagtggcaggtcctaggtgtgacctga

SEQ ID NO: 331333 - DNA, 120 bp, Artificial Sequence
  ENSG00000136816_19 (sequence is synthesized)
taccaccaccctttgtggcagcaccgggctggactgccctgatccctgggacgtgagacttagcttccagccagtgtgaatcattgtatctgtctcataatcacagcacagctgcagaca

SEQ ID NO: 331334 - DNA, 120 bp, Artificial Sequence
  ENSG00000136816_20 (sequence is synthesized)
caacaacgtgcagcattttttacataaaaatatggtagaattaatttatgacatggaaatgccttacgtggtatcacacttagtcttgaaaaaaacaccaaggtgacgtttaaaattttt

SEQ ID NO: 331335 - DNA, 120 bp, Artificial Sequence
  ENSG00000136816_21 (sequence is synthesized)
agtacatatcctcaaattggagctaagttatacttcttttataaccttttgggcatctggtcgagagaagacaagattttctctatttacagtgaggcaataaatatgtttgccaccttt

SEQ ID NO: 331336 - DNA, 120 bp, Artificial Sequence
  ENSG00000136816_22 (sequence is synthesized)
cgtctgcaggccagtcggactggtccgggtgacctgctcactaactctggcctctgcttctctttcctttgtgttgctgtagcccccggctccactgagttaaggcacacttagtccagg

SEQ ID NO: 331337 - DNA, 120 bp, Artificial Sequence
  ENSG00000136816_23 (sequence is synthesized)
tgtctgtcggagtcttcaataataaacacaagttcactgacttgaagtatactcagttaaaatcggggctggaggtgcagacggtgtctgaccggaggatgtggccgtgcccgccgagca

SEQ ID NO: 331338 - DNA, 120 bp, Artificial Sequence
  ENSG00000136819_0 (sequence is synthesized)
agcctgggccgctgcgcagaggcgcggcggctgtacaactcggccgttgtcaccatgccggtcgtccggaagattttccgtcgccgccggggcgactcggagtcagaggaagatgagcag

SEQ ID NO: 331339 - DNA, 120 bp, Artificial Sequence
  ENSG00000136819_1 (sequence is synthesized)
gactcagaggaggttcgattaaaactggaagagaccagagaggtacagaacttgaggaagaggcccaacggggtgagtgctgtggccttgctggtgggagagaaggtacaagaggagacc

SEQ ID NO: 331340 - DNA, 120 bp, Artificial Sequence
  ENSG00000136819_2 (sequence is synthesized)
actctagtggatgatccctttcagatgaagacaggtggtatggtggatatgaagaaactgaaggaaaggggcaaagataagatcagtgaggaggaggacctgcacctggggacatcgttt

SEQ ID NO: 331341 - DNA, 120 bp, Artificial Sequence
  ENSG00000136819_3 (sequence is synthesized)
tctgcagaaaccaaccgaagggatgaggatgcagacatgatgaagtacattgagacagagctaaagaagaggaaagggatcgtggaacatgaggaacagaaagttaagccaaagaatgca

SEQ ID NO: 331342 - DNA, 120 bp, Artificial Sequence
  ENSG00000136819_4 (sequence is synthesized)
gaggactgtctttatgaacttccagaaaacatccgtgtttcctcagcaaagaagaccgaggagatgctttccaaccagatgctgagtggcattcctgaggtggacctgggcatcgatgct

SEQ ID NO: 331343 - DNA, 120 bp, Artificial Sequence
  ENSG00000136819_5 (sequence is synthesized)
aaaataaaaaatatcatttccacggaggatgccaaggcccgtctgctggcagagcagcagaacaagaagaaagacagcgagacctccttcgtgcctaccaacatggctgtgaattatgtg

SEQ ID NO: 331344 - DNA, 120 bp, Artificial Sequence
  ENSG00000136819_6 (sequence is synthesized)
cagcacaacagattttatcatgaggagctcaacgcgcccatacggagaaacaaagaagagcccaaggcccggcccttgagagtaggtgacacggagaagccagagcctgagcggtcccct

SEQ ID NO: 331345 - DNA, 80 bp, Artificial Sequence
  ENSG00000136819_7 (sequence is synthesized)
cggtactgagttgtgcagagtgggatgtaaatatcgccttcctctccctatatccctcccatgaaaaatggcttcctggc

SEQ ID NO: 331346 - DNA, 67 bp, Artificial Sequence
  ENSG00000136819_8 (sequence is synthesized)
cggaggttgtggtgagccgagattgcacctttgtactccagcctgggcaacgagcacttccaggaca

SEQ ID NO: 331347 - DNA, 120 bp, Artificial Sequence
  ENSG00000136819_9 (sequence is synthesized)
gcttccaggacagagcatgctcatttgctggcggacagttccagaaacagaccctgttagtccttctacttacctgctggatttttcaagcactaaatttataactttttgaaacaaaat

SEQ ID NO: 331348 - DNA, 120 bp, Artificial Sequence
  ENSG00000136819_10 (sequence is synthesized)
aatgtgtaattttccatttgggggcaaactctattcttgtgagcattattaaatcttgtttgtaaatatattgtctttctcttaatatttgctctgggtcaggaagaagctgttcacggt

SEQ ID NO: 331349 - DNA, 120 bp, Artificial Sequence
  ENSG00000136819_11 (sequence is synthesized)
gtgataatactctttagattgtgctttcattattatagatgcatcatgtcttctgctttcacgtgtctgggatggggtcagaaatgcatcctccagctgacagaaaaatccaggatgaga

SEQ ID NO: 331350 - DNA, 120 bp, Artificial Sequence
  ENSG00000136819_12 (sequence is synthesized)
tcagaaggatactggtgttttctgacttttacaaaattacttgtttgttttcattaaaaaaaaagcataaactatgtttcttattactattagaattattaaatttcaaaatgaatccaa

SEQ ID NO: 331351 - DNA, 120 bp, Artificial Sequence
  ENSG00000136819_13 (sequence is synthesized)
taaccaggacatgccctgagctgtgtcgtctcggggtgtgctccagagatacagaaacagatcactaactcgcgttttttattaaaaccaattaattgtgaaatgcatatcgatcgttaa

SEQ ID NO: 331352 - DNA, 120 bp, Artificial Sequence
  ENSG00000136819_14 (sequence is synthesized)
gagtttgtataatttagaaaagtatagtcaagacgataaaaagcacccataattctcccatccggaaatgatcagtgttaacattttttttccttgcagagccacccaagaatgcactgg

SEQ ID NO: 331353 - DNA, 120 bp, Artificial Sequence
  ENSG00000136819_15 (sequence is synthesized)
tattaatattgaatactctttccaatctgttttttttcgtctctctctctcagattgtgaacaactttctatgtacttttattccctgttcttttcaactcattatgacattgtgggcat

SEQ ID NO: 331354 - DNA, 120 bp, Artificial Sequence
  ENSG00000136819_16 (sequence is synthesized)
tcacccatattgtggaatatttttcagaaagccttaatggctgcataatattccaccagatgtgtgtattgtaatttgttaacaaatcccctattttgggacatgtaggtgattttgtaa

SEQ ID NO: 331355 - DNA, 120 bp, Artificial Sequence
  ENSG00000136819_17 (sequence is synthesized)
atttttactatcaaataaggctgcagtggatattctcttaaatttatctttagctgcactttccatgatgagaatatcttagaaatgagatttccaggccaagataatgccaaatggctt

SEQ ID NO: 331356 - DNA, 120 bp, Artificial Sequence
  ENSG00000136819_18 (sequence is synthesized)
tacaggaaagtggcaaagtgtaccacttcaccaccagcgcacccttcttccagcatctgcggtgctcgttgagccctgtcttatgcttataggcttttccagccggcttgcctacccacc

SEQ ID NO: 331357 - DNA, 120 bp, Artificial Sequence
  ENSG00000136819_19 (sequence is synthesized)
cctcaaatcccacccttgcactaatgttgcaatccgcatacctgagagggttcctccttatctctgaattatgccatttctctctctccccctctcttttttttttggttttgctcagtg

SEQ ID NO: 331358 - DNA, 120 bp, Artificial Sequence
  ENSG00000136819_20 (sequence is synthesized)
ctgtggccttgctggtgggagagaaggtacaagaggagaccactctagtggtaagttatggggtcttccctgagtagttatggcagccctccctgcagtgctcttcagtgagtgagcgtg

SEQ ID NO: 331359 - DNA, 120 bp, Artificial Sequence
  ENSG00000136819_21 (sequence is synthesized)
ggaggcaggatgcagcgggggacagggtggagcctggcattggagccggggcatatgggttccagtccatgctctggaccatgactatgtgccttcccctttctaagcctcagtttcctc

SEQ ID NO: 331360 - DNA, 120 bp, Artificial Sequence
  ENSG00000136819_22 (sequence is synthesized)
attggaatcctaatagaacctacctgttaggattactctgagaattcatactctctcatattctcacgcacagtagagactcaagaagttagaaaatttcagtaaggacaaataaaagct

SEQ ID NO: 331361 - DNA, 120 bp, Artificial Sequence
  ENSG00000136819_23 (sequence is synthesized)
actcataaggttagctgggtgcagtgcctcacacttgtagtctcagctgctggggaagctgggacaggaggattgcttgagactaagagttcaaggctgcagtgagctatgattggacca

SEQ ID NO: 331362 - DNA, 120 bp, Artificial Sequence
  ENSG00000136819_24 (sequence is synthesized)
agtgagctatgattggaccactgcactctagcctgcgtgacagagtgagaccacatcttttttttaaagaaaagaaaaaggtattggccatgctcggtggcccatgcctgtaatcccagc

SEQ ID NO: 331363 - DNA, 120 bp, Artificial Sequence
  ENSG00000136819_25 (sequence is synthesized)
gagcaagactccatctcaaaaaaaaaggaaaaaaaaatttatgggggacaggtatggtggctgatgcctataagcctataatcccagtacttgggaggccaaggcaggaggatcacgtga

SEQ ID NO: 331364 - DNA, 120 bp, Artificial Sequence
  ENSG00000136819_26 (sequence is synthesized)
caggaggatcacgtgaggccaggagatcagcctgagaaatatagtcagactcctgtctctcaaaaaaatttaaaaaattagctgggctgtcacttgagctcaggagttgaggctacagtg

SEQ ID NO: 331365 - DNA, 120 bp, Artificial Sequence
  ENSG00000136819_27 (sequence is synthesized)
agccatgattgcaccactgcacaccagtctgggtgacagagtaagaccctttaaaaaaaaaaaaaaaaggccagacatggtgacttgtgcctgttatcctagctctttgggaggccaagg

SEQ ID NO: 331366 - DNA, 120 bp, Artificial Sequence
  ENSG00000136819_28 (sequence is synthesized)
aggagttcaagaccagcctgggcaatgtaatgagaccccatgttcttatctgtgtccttagaatcctacaaatacaaatgagattgtccctggcaggttgttgctagaagtttcgctgaa

SEQ ID NO: 331367 - DNA, 120 bp, Artificial Sequence
  ENSG00000136819_29 (sequence is synthesized)
ttgctagaagtttcgctgaaggcttgatcagagtagtaagggcccctgactgctggaagcaaaagtggttctttagcgtgttacagctgttcagctgtatcaggccctttattcttctgt

SEQ ID NO: 331368 - DNA, 120 bp, Artificial Sequence
  ENSG00000136819_30 (sequence is synthesized)
tttcttctagcaggagccatgttaaaggctcactcaccccttctccccatgatccttcttaaaatatccactttaaaagggaattgttatggaagaggtacaattgttagaataatcttc

SEQ ID NO: 331369 - DNA, 120 bp, Artificial Sequence
  ENSG00000136819_31 (sequence is synthesized)
tggtacagtagaaagctgggaggcttctgggctcttttctggcctttacaaactttgagccttaagcattttacttctctgaagctcaatttgctcttgatcagaagagcagagtaactg

SEQ ID NO: 331370 - DNA, 120 bp, Artificial Sequence
  ENSG00000136824_0 (sequence is synthesized)
cacaggaaataagcaatggaggtggggtcctttgctcgcgccgaaattcaaaggaataaatagttccggcgcgggtgttgagagcggtgtggcaggtgttgtagccgctatggtgaagtt

SEQ ID NO: 331371 - DNA, 120 bp, Artificial Sequence
  ENSG00000136824_1 (sequence is synthesized)
cgctttgtagcggccccggctagagagttgttctgttccctgcctttgtgacccggaggagcttttggggtgcgtcaagcccctggcctgaggcagcggtggtggtatttctgtttcgta

SEQ ID NO: 331372 - DNA, 120 bp, Artificial Sequence
  ENSG00000136824_2 (sequence is synthesized)
cagaactggtttgtggcctgtttgattcctgtcagaggtttgctgacccaagacagtatcgaaaatgcatattaagtcaattattctagagggattcaagtcctatgctcagaggaccga

SEQ ID NO: 331373 - DNA, 120 bp, Artificial Sequence
  ENSG00000136824_3 (sequence is synthesized)
agtcaatggttttgaccccctcttcaatgctatcactggcttaaatggtagtgggaaatccaacatattggactccatctgctttttgctgggcatctccaacctgtctcaggttcgggc

SEQ ID NO: 331374 - DNA, 120 bp, Artificial Sequence
  ENSG00000136824_4 (sequence is synthesized)
ttctaatttacaagatttagtttacaaaaatgggcaggctggtattaccaaagcctctgtgtcaatcacttttgataattctgacaaaaagcaaagtcctttaggatttgaggttcatga

SEQ ID NO: 331375 - DNA, 120 bp, Artificial Sequence
  ENSG00000136824_5 (sequence is synthesized)
tgaaatcacagtaacaaggcaggtggttattggtggtagaaataaatatttaatcaatggagtcaatgccaacaacaccagagtacaggatctcttctgttctgttggccttaatgttaa

SEQ ID NO: 331376 - DNA, 120 bp, Artificial Sequence
  ENSG00000136824_6 (sequence is synthesized)
caaccctcactttctcatcatgcagggccgaattacaaaagtattgaatatgaaacctccagagattttatccatgatagaagaagcagctggaaccaggatgtatgaatacaaaaaaat

SEQ ID NO: 331377 - DNA, 120 bp, Artificial Sequence
  ENSG00000136824_7 (sequence is synthesized)
agctgcacagaaaactatagaaaaaaaggaggctaagctgaaagaaattaagacgatacttgaagaagagattactccaaccattcaaaaattaaaagaggaaagatcgtcctacttgga

SEQ ID NO: 331378 - DNA, 120 bp, Artificial Sequence
  ENSG00000136824_8 (sequence is synthesized)
gtaccaaaaagtaatgagagaaatagaacatttgagtcgtttatatattgcttatcagtttttgctggctgaagataccaaagtacgctcagctgaggaattaaaagaaatgcaagataa

SEQ ID NO: 331379 - DNA, 120 bp, Artificial Sequence
  ENSG00000136824_9 (sequence is synthesized)
agttataaagcttcaggaagaattgtctgagaatgataaaaaaataaaagcacttaatcatgaaatagaagaattggaaaaaagaaaagataaggaaactggaggtatacttcgatcttt

SEQ ID NO: 331380 - DNA, 120 bp, Artificial Sequence
  ENSG00000136824_10 (sequence is synthesized)
agaagatgctcttgcagaggctcagcgagttaatactaaatctcaaagcgcatttgatctcaagaagaaaaatctggcatgtgaggaaagcaaacgcaaagagctggaaaaaaatatggt

SEQ ID NO: 331381 - DNA, 120 bp, Artificial Sequence
  ENSG00000136824_11 (sequence is synthesized)
tgaggactcaaaaactttagcagcaaaggaaaaagaggttaaaaagataacagatggactgcatgcccttcaagaagcaagtaataaagatgctgaagctctggcagctgcacagcagca

SEQ ID NO: 331382 - DNA, 120 bp, Artificial Sequence
  ENSG00000136824_12 (sequence is synthesized)
cttcaatgctgtttccgctggcctgtccagtaatgaagatggagcagaagcaactcttgctggtcaaatgatggcctgtaaaaatgatataagtaaagctcagacagaagccaaacaggc

SEQ ID NO: 331383 - DNA, 120 bp, Artificial Sequence
  ENSG00000136824_13 (sequence is synthesized)
tcagatgaagttgaagcatgctcaacaggaattaaagaataaacaagctgaagttaagaagatggatagtggctacaggaaggatcaagaagctctagaagctgtaaaaagacttaaaga

SEQ ID NO: 331384 - DNA, 120 bp, Artificial Sequence
  ENSG00000136824_14 (sequence is synthesized)
aaaacttgaagctgaaatgaaaaagctaaattatgaagaaaataaagaggaaagccttttggaaaagcgcaggcagctgtctcgtgatattggtagattgaaagaaacatatgaagctct

SEQ ID NO: 331385 - DNA, 120 bp, Artificial Sequence
  ENSG00000136824_15 (sequence is synthesized)
attagccagatttcccaatcttcgatttgcatacaaggatccagagaagaactggaatagaaattgtgtgaaaggacttgtggcttctctgattagtgtgaaagacacttctgcaaccac

SEQ ID NO: 331386 - DNA, 120 bp, Artificial Sequence
  ENSG00000136824_16 (sequence is synthesized)
agctttagaattagtggctggagaacgactctacaatgttgtagtagacacagaagttactggtaaaaagctactagaaaggggggaactgaaacgtcgatacactataattccactcaa

SEQ ID NO: 331387 - DNA, 120 bp, Artificial Sequence
  ENSG00000136824_17 (sequence is synthesized)
taaaatttcagccagatgtattgcaccagaaactctgagagttgctcagaatcttgttggccctgacaacgttcatgtggctctttccttggttgaatataaaccagaacttcagaaagc

SEQ ID NO: 331388 - DNA, 120 bp, Artificial Sequence
  ENSG00000136824_18 (sequence is synthesized)
aatggagtttgtctttggaacaacatttgtttgtgacaatatggataatgccaaaaaagtggcctttgataagaggataatgactagaactgtaactctcggaggtgatgtgtttgatcc

SEQ ID NO: 331389 - DNA, 120 bp, Artificial Sequence
  ENSG00000136824_19 (sequence is synthesized)
tcatgggacattgagtggaggtgctcgatcccaggcagcttccattttaaccaagtttcaagaactcaaagatgttcaggatgaactgagaatcaaagagaatgagctgcgggctctaga

SEQ ID NO: 331390 - DNA, 120 bp, Artificial Sequence
  ENSG00000136824_20 (sequence is synthesized)
agaggaattagcaggtcttaaaaacactgctgaaaagtatcgccaactaaaacagcagtgggagatgaaaactgaagaggcagatttattacaaaccaagctccagcaaagctcatatca

SEQ ID NO: 331391 - DNA, 120 bp, Artificial Sequence
  ENSG00000136824_21 (sequence is synthesized)
caagcaacaagaagaattagatgcccttaaaaaaaccattgaggaaagtgaggagactttgaaaaacactaaagaaatccaaagaaaagcagaagaaaaatatgaagtattggaaaataa

SEQ ID NO: 331392 - DNA, 120 bp, Artificial Sequence
  ENSG00000136824_22 (sequence is synthesized)
aatgaaaaatgcagaagctgaaagagagcgagaactgaaagatgctcagaaaaaactggattgtgccaaaacaaaggcagatgcatctagcaagaagatgaaagaaaaacaacaggaagt

SEQ ID NO: 331393 - DNA, 120 bp, Artificial Sequence
  ENSG00000136824_23 (sequence is synthesized)
tgaagctatcactctggaactggaagagctcaagagagagcatacatcttacaaacaacagcttgaagctgtaaatgaagctatcaaatcctatgaaagtcagattgaagtaatggcagc

SEQ ID NO: 331394 - DNA, 120 bp, Artificial Sequence
  ENSG00000136824_24 (sequence is synthesized)
gcaaaacacaaggagcaaaacaatgattctcagcttaaaattaaggaattagaccacaacatcagcaaacataaacgggaggctgaagatggtgctgcaaaggtatccaaaatgttgaaa

SEQ ID NO: 331395 - DNA, 120 bp, Artificial Sequence
  ENSG00000136824_25 (sequence is synthesized)
gattatgactggattaatgcagagagacacctctttggccaacccaatagtgcctatgatttcaaaactaacaaccctaaagaagctggtcagagacttcagaagttgcaagaaatgaag

SEQ ID NO: 331396 - DNA, 120 bp, Artificial Sequence
  ENSG00000136824_26 (sequence is synthesized)
gagaaactaggaagaaatgtcaatatgagagctatgaatgtattgacagaagctgaagagcgatacaatgacttgatgaagaagaagagaattgtagaaaatgacaaatccaaaattctt

SEQ ID NO: 331397 - DNA, 120 bp, Artificial Sequence
  ENSG00000136824_27 (sequence is synthesized)
acaactatagaagaccttgaccagaagaaaaaccaagccctaaatattgcatggcaaaaggtgaacaaggactttgggtctattttttctactcttttgcctggtgctaatgctatgctt

SEQ ID NO: 331398 - DNA, 120 bp, Artificial Sequence
  ENSG00000136824_28 (sequence is synthesized)
gcaccaccagagggtcaaactgttttggatggtctggagttcaaggttgccttgggaaatacctggaaagaaaacctaactgaacttagtggtggtcagaggtctttagtggccttgtca

SEQ ID NO: 331399 - DNA, 120 bp, Artificial Sequence
  ENSG00000136824_29 (sequence is synthesized)
ttaatactgtccatgcttctcttcaaacctgctccaatttatatccttgatgaggtagatgcagccttggatctttctcatacccaaaacattggacagatgctgcgtactcatttcaca

SEQ ID NO: 331400 - DNA, 120 bp, Artificial Sequence
  ENSG00000136824_30 (sequence is synthesized)
cattctcagttcattgtggtgtcactaaaagaaggtatgttcaacaatgcaaacgttcttttcaaaaccaagtttgtggatggtgtttctacagtagccagatttactcaatgtcaaaat

SEQ ID NO: 331401 - DNA, 120 bp, Artificial Sequence
  ENSG00000136824_31 (sequence is synthesized)
ggaaagatttcaaaggaagcaaaatccaaggcaaaaccacccaaaggagcacatgtggaagtttaaactacaaagttatttcttcatcttgacctgtttttttaaatgtaaacttttaag

SEQ ID NO: 331402 - DNA, 120 bp, Artificial Sequence
  ENSG00000136824_32 (sequence is synthesized)
gacttgagataactaatttgtttatatacaaaaattaatgttactgtgttacttaacccatgttttctctttatataatcacttatcgcttacaaatgagcatatattcctcatctctta

SEQ ID NO: 331403 - DNA, 120 bp, Artificial Sequence
  ENSG00000136824_33 (sequence is synthesized)
actagtctaattatggtccaattattgtggttgtgattttatgcatatcatcaaatgtttttttcttatgcgggtcttttatatattagggatcctgagatacccgattctatatgtaaa

SEQ ID NO: 331404 - DNA, 120 bp, Artificial Sequence
  ENSG00000136824_34 (sequence is synthesized)
agctaatatacaaaaaagcagattaaattacatgataaatgtagctgatcatcagtgtttaattgatttaattcctaaggcaatattaatgtgttttctaaagtcattcaggtaaggaag

SEQ ID NO: 331405 - DNA, 120 bp, Artificial Sequence
  ENSG00000136824_35 (sequence is synthesized)
aattataaatcaggtaactggaccaacaaagggaacacatataaagctattatgcatgcatggagccgtttgaggctagttttttaaggccacaactccagacccctgatttagactgag

SEQ ID NO: 331406 - DNA, 120 bp, Artificial Sequence
  ENSG00000136824_36 (sequence is synthesized)
ataggaaacagatcttgaaagaatccttattttaatgatacatgaatatcatgttcctatacgcttaataattggtctctacgttttaatgatacatgaatatcatgttcctatacgctt

SEQ ID NO: 331407 - DNA, 120 bp, Artificial Sequence
  ENSG00000136824_37 (sequence is synthesized)
aataattggtctctacgactttaatgtttttgtttttttaagctgtgtaagtatttttaaatcaaagcttaggaggtgtgttgcgtggtactatctgctgcaaatttatctgaagtttgt

SEQ ID NO: 331408 - DNA, 120 bp, Artificial Sequence
  ENSG00000136824_38 (sequence is synthesized)
taatattttccaagatttttgtcagccttttcataatccagtcattaacaacctattggtaaacaagaatgtaggtgccagtagactaaaccaaatttatttttccctgagtctgatata

SEQ ID NO: 331409 - DNA, 120 bp, Artificial Sequence
  ENSG00000136824_39 (sequence is synthesized)
tatatgtataaatataaataactcaatccatctgttccaccaaaataactcaaaagttggatgattatttgtcttccgctttccagttcaaagggatgaaattcctttagaacttgaaag

SEQ ID NO: 331410 - DNA, 120 bp, Artificial Sequence
  ENSG00000136824_40 (sequence is synthesized)
atgacactagcgaacaccatgagaatactgtctacagtttttggtacgtcatcactagaacagtgaccccaaactgaatcatgaaaggtctgacatgatgtaatctgatcttccatgtgt

SEQ ID NO: 331411 - DNA, 120 bp, Artificial Sequence
  ENSG00000136824_41 (sequence is synthesized)
tattttggccccacatctcttcttgattttttagtcttatttccttagtgttattatcatacttcccctgatatatggccgtacttcctggccctgggcttgacatttcccacccttcat

SEQ ID NO: 331412 - DNA, 120 bp, Artificial Sequence
  ENSG00000136824_42 (sequence is synthesized)
tctccatacatatgagatgtcagaaaacatgcagtaattgatattatgggacacattggaaaggattgaatctggaattagttctgtccactgtggaggggagaggaaataatgctgtaa

SEQ ID NO: 331413 - DNA, 120 bp, Artificial Sequence
  ENSG00000136824_43 (sequence is synthesized)
atgttgagttacagaaagtccaatgtcaaatatagtttttttgtttcctttcaaatgtattacagactgtgccaaaacagttaccaattcacactgtcaatattaaagtataccatagta

SEQ ID NO: 331414 - DNA, 120 bp, Artificial Sequence
  ENSG00000136824_44 (sequence is synthesized)
tacaaattagtcagtacttgctgttaattttaatatttctgatttaacagttagttattaagtggtacttcattgctgttttagccaacgttttaaaaataatttgggagtttgactatt

SEQ ID NO: 331415 - DNA, 120 bp, Artificial Sequence
  ENSG00000136824_45 (sequence is synthesized)
ttggcttacgtactcatttccttttctctgctaaaaatgttttgcttgtgtgcgttcctgatttttgtcttgtataatcttgatctttgaaaaccctcaaacatgtattaaattgttgta

SEQ ID NO: 331416 - DNA, 120 bp, Artificial Sequence
  ENSG00000136824_46 (sequence is synthesized)
actttttttcattagagggaagacattaaggggattggggacatttgtttcacacatctgcagtaatatgagttaactaatatttaacaagctctttctttacattagctgctgttctca

SEQ ID NO: 331417 - DNA, 120 bp, Artificial Sequence
  ENSG00000136824_47 (sequence is synthesized)
tttgtatgtattgtcatatttaatcctcagagtaacctagtgaggtaaatactgttgttgtcagcatggtgtaatcgaggaattgagtgagttgagcagaaaagttaggaaacttgctca

SEQ ID NO: 331418 - DNA, 120 bp, Artificial Sequence
  ENSG00000136824_48 (sequence is synthesized)
gggtgataatacagttaggagtgtcagggcccatggacaaatcttgtcagtctccagaacctaagatatactacgtcactgacagcttgaacatttgtatttattgtacagaataaattt

SEQ ID NO: 331419 - DNA, 120 bp, Artificial Sequence
  ENSG00000136824_49 (sequence is synthesized)
gggggctgtagggagggggaccagtggcagagggaccttaggtgatccttagaaataaaggctagcttctgttcgaccttggagtagggcgaagaggtgtagacaggcctggagaagcga

SEQ ID NO: 331420 - DNA, 120 bp, Artificial Sequence
  ENSG00000136824_50 (sequence is synthesized)
ggtaaaagcctgagtaaaagcaagaagttggagaatatgagatacatctcatctctagtaaatacttaaatgacttcccctcctcccggagtcaagcacaattcggggatgcaatgacgg

SEQ ID NO: 331421 - DNA, 120 bp, Artificial Sequence
  ENSG00000136826_0 (sequence is synthesized)
ggcagtttcccgaccagagagaacgaacgtgtctgcgggcgcgcggggagcagaggcggtggcgggcggcggcggcaccgggagccgccgagtgaccctcccccgcccctctggcccccc

SEQ ID NO: 331422 - DNA, 120 bp, Artificial Sequence
  ENSG00000136826_1 (sequence is synthesized)
accctcccacccgcccgtggcccgcgcccatggccgcgcgcgctccacacaactcaccggagtccgcgccttgcgccgccgaccagttcgcagctccgcgccacggcagccagtctcacc

SEQ ID NO: 331423 - DNA, 120 bp, Artificial Sequence
  ENSG00000136826_2 (sequence is synthesized)
cacctggcggcaccgcccgcccaccgccccggccacagcccctgcgcccacggcagcactcgaggcgaccgcgacagtggtgggggacgctgctgagtggaagagagcgcagcccggcca

SEQ ID NO: 331424 - DNA, 120 bp, Artificial Sequence
  ENSG00000136826_3 (sequence is synthesized)
acctacttactcgccttgctgattgtctatttttgcgtttacaacttttctaagaacttttgtatacaaaggaactttttaaaaaagacgcttccaagttatatttaatccaaagaagaa

SEQ ID NO: 331425 - DNA, 120 bp, Artificial Sequence
  ENSG00000136826_4 (sequence is synthesized)
ggatctcggccaatttggggttttgggttttggcttcgtttcttctcttcgttgactttggggttcaggtgccccagctgcttcgggctgccgaggaccttctgggcccccacattaatg

SEQ ID NO: 331426 - DNA, 120 bp, Artificial Sequence
  ENSG00000136826_5 (sequence is synthesized)
aggcagccacctggcgagtctgacatggctgtcagcgacgcgctgctcccatctttctccacgttcgcgtctggcccggcgggaagggagaagacactgcgtcaagcaggtgccccgaat

SEQ ID NO: 331427 - DNA, 120 bp, Artificial Sequence
  ENSG00000136826_6 (sequence is synthesized)
aaccgctggcgggaggagctctcccacatgaagcgacttcccccagtgcttcccggccgcccctatgacctggcggcggcgaccgtggccacagacctggagagcggcggagccggtgcg

SEQ ID NO: 331428 - DNA, 120 bp, Artificial Sequence
  ENSG00000136826_7 (sequence is synthesized)
gcttgcggcggtagcaacctggcgcccctacctcggagagagaccgaggagttcaacgatctcctggacctggactttattctctccaattcgctgacccatcctccggagtcagtggcc

SEQ ID NO: 331429 - DNA, 120 bp, Artificial Sequence
  ENSG00000136826_8 (sequence is synthesized)
gccaccgtgtcctcgtcagcgtcagcctcctcttcgtcgtcgccgtcgagcagcggccctgccagcgcgccctccacctgcagcttcacctatccgatccgggccgggaacgacccgggc

SEQ ID NO: 331430 - DNA, 120 bp, Artificial Sequence
  ENSG00000136826_9 (sequence is synthesized)
gtggcgccgggcggcacgggcggaggcctcctctatggcagggagtccgctccccctccgacggctcccttcaacctggcggacatcaacgacgtgagcccctcgggcggcttcgtggcc

SEQ ID NO: 331431 - DNA, 120 bp, Artificial Sequence
  ENSG00000136826_10 (sequence is synthesized)
gagctcctgcggccagaattggacccggtgtacattccgccgcagcagccgcagccgccaggtggcgggctgatgggcaagttcgtgctgaaggcgtcgctgagcgcccctggcagcgag

SEQ ID NO: 331432 - DNA, 120 bp, Artificial Sequence
  ENSG00000136826_11 (sequence is synthesized)
tacggcagcccgtcggtcatcagcgtcagcaaaggcagccctgacggcagccacccggtggtggtggcgccctacaacggcgggccgccgcgcacgtgccccaagatcaagcaggaggcg

SEQ ID NO: 331433 - DNA, 120 bp, Artificial Sequence
  ENSG00000136826_12 (sequence is synthesized)
ggctgcacacgacttccccctggggcggcagctccccagcaggactaccccgaccctgggtcttgaggaagtgctgagcagcagggactgtcaccctgccctgccgcttcctcccggctt

SEQ ID NO: 331434 - DNA, 120 bp, Artificial Sequence
  ENSG00000136826_13 (sequence is synthesized)
ccatccccacccggggcccaattacccatccttcctgcccgatcagatgcagccgcaagtcccgccgctccattaccaagagctcatgccacccggttcctgcatgccagaggagcccaa

SEQ ID NO: 331435 - DNA, 120 bp, Artificial Sequence
  ENSG00000136826_14 (sequence is synthesized)
gccaaagaggggaagacgatcgtggccccggaaaaggaccgccacccacacttgtgattacgcgggctgcggcaaaacctacacaaagagttcccatctcaaggcacacctgcgaaccca

SEQ ID NO: 331436 - DNA, 120 bp, Artificial Sequence
  ENSG00000136826_15 (sequence is synthesized)
cacaggtgagaaaccttaccactgtgactgggacggctgtggatggaaattcgcccgctcagatgaactgaccaggcactaccgtaaacacacggggcaccgcccgttccagtgccaaaa

SEQ ID NO: 331437 - DNA, 120 bp, Artificial Sequence
  ENSG00000136826_16 (sequence is synthesized)
atgcgaccgagcattttccaggtcggaccacctcgccttacacatgaagaggcatttttaaatcccagacagtggatatgacccacactgccagaagagaattcagtattttttactttt

SEQ ID NO: 331438 - DNA, 120 bp, Artificial Sequence
  ENSG00000136826_17 (sequence is synthesized)
cacactgtcttcccgatgagggaaggagcccagccagaaagcactacaatcatggtcaagttcccaactgagtcatcttgtgagtggataatcaggaaaaatgaggaatccaaaagacaa

SEQ ID NO: 331439 - DNA, 120 bp, Artificial Sequence
  ENSG00000136826_18 (sequence is synthesized)
aaatcaaagaacagatggggtctgtgactggatcttctatcattccaattctaaatccgacttgaatattcctggacttacaaaatgccaagggggtgactggaagttgtggatatcagg

SEQ ID NO: 331440 - DNA, 120 bp, Artificial Sequence
  ENSG00000136826_19 (sequence is synthesized)
gtataaattatatccgtgagttgggggagggaagaccagaattcccttgaattgtgtattgatgcaatataagcataaaagatcaccttgtattctctttaccttctaaaagccattatt

SEQ ID NO: 331441 - DNA, 120 bp, Artificial Sequence
  ENSG00000136826_20 (sequence is synthesized)
atgatgttagaagaagaggaagaaattcaggtacagaaaacatgtttaaatagcctaaatgatggtgcttggtgagtcttggttctaaaggtaccaaacaaggaagccaaagttttcaaa

SEQ ID NO: 331442 - DNA, 120 bp, Artificial Sequence
  ENSG00000136826_21 (sequence is synthesized)
ctgctgcatactttgacaaggaaaatctatatttgtcttccgatcaacatttatgacctaagtcaggtaatatacctggtttacttctttagcatttttatgcagacagtctgttatgca

SEQ ID NO: 331443 - DNA, 120 bp, Artificial Sequence
  ENSG00000136826_22 (sequence is synthesized)
ctgtggtttcagatgtgcaataatttgtacaatggtttattcccaagtatgccttaagcagaacaaatgtgtttttctatatagttccttgccttaataaatatgtaatataaatttaag

SEQ ID NO: 331444 - DNA, 120 bp, Artificial Sequence
  ENSG00000136826_23 (sequence is synthesized)
caaacgtctattttgtatatttgtaaactacaaagtaaaatgaacattttgtggagtttgtattttgcatactcaaggtgagaattaagttttaaataaacctataatattttatctgaa

SEQ ID NO: 331445 - DNA, 120 bp, Artificial Sequence
  ENSG00000136826_24 (sequence is synthesized)
actcctctggccttctcttgaggctcccagttcacgctgcacagtgctgggcactgcctcctctccacacccctagcgccccccacccctcagcagaagggcccgcgaggaaccgtgcga

SEQ ID NO: 331446 - DNA, 120 bp, Artificial Sequence
  ENSG00000136826_25 (sequence is synthesized)
ggtcaggccgagcgccggcaccgccaccggcactggcgctgagcgacgagagcggactcctgcgagcgcagagagggagggggagatggagggctggatgagtcacgcggataatcgcgc

SEQ ID NO: 331447 - DNA, 120 bp, Artificial Sequence
  ENSG00000136826_26 (sequence is synthesized)
tcttctccagcgcgcagacagcgcggcaagcgcgtatgctagcaggggtgcggacgcgtgaccgtgccgcccgctgaccccaccagtcttcgcgggcttcgaacccagggagccgacaat

SEQ ID NO: 331448 - DNA, 120 bp, Artificial Sequence
  ENSG00000136826_27 (sequence is synthesized)
tcgggctggggagccctgtgtgtgctggccccacttcgggacacacgggatgatgctcaccccaccttcttcacccctagagctcatgccacccggttcctgcatgccagaggagcccaa

SEQ ID NO: 331449 - DNA, 120 bp, Artificial Sequence
  ENSG00000136826_28 (sequence is synthesized)
ttcttcgacccgggagtgggccgagattgcagcgctggcgccctgggttcccgggtgcttcctgcctgaccagtccccatgtctgggcggtgcagtcgcgcgtggcccgccagcacgtca

SEQ ID NO: 331450 - DNA, 120 bp, Artificial Sequence
  ENSG00000136827_0 (sequence is synthesized)
gcaccggttcgcggtcggcgcgagaacaagcagggtggcgcgggtccgggcatgaagctgggccgggccgtgctgggcctgctgctgctggcgccgtccgtggtgcaggcggtggagccc

SEQ ID NO: 331451 - DNA, 120 bp, Artificial Sequence
  ENSG00000136827_1 (sequence is synthesized)
atcagcctgggactggccctggccggcgtcctcaccggctacatctacccgcgtctctactgcctcttcgccgagtgctgcgggcagaagcggagccttagccgggaggcactgcagaag

SEQ ID NO: 331452 - DNA, 120 bp, Artificial Sequence
  ENSG00000136827_2 (sequence is synthesized)
gatctggacgacaacctctttggacagcatcttgcaaagaaaatcatcttaaatgccgtgtttggtttcataaacaacccaaagcccaagaaacctctcacgctctccctgcacgggtgg

SEQ ID NO: 331453 - DNA, 120 bp, Artificial Sequence
  ENSG00000136827_3 (sequence is synthesized)
acaggcaccggcaaaaatttcgtcagcaagatcatcgcagagaatatttacgagggtggtctgaacagtgactatgtccacctgtttgtggccacattgcactttccacatgcttcaaac

SEQ ID NO: 331454 - DNA, 120 bp, Artificial Sequence
  ENSG00000136827_4 (sequence is synthesized)
atcaccttgtacaaggatcagttacagttgtggattcgaggcaacgtgagtgcctgtgcgaggtccatcttcatatttgatgaaatggataagatgcatgcaggcctcatagatgccatc

SEQ ID NO: 331455 - DNA, 120 bp, Artificial Sequence
  ENSG00000136827_5 (sequence is synthesized)
aagcctttcctcgactattatgacctggtggatggggtctcctaccagaaagccatgttcatatttctcagcaatgctggagcagaaaggatcacagatgtggctttggatttctggagg

SEQ ID NO: 331456 - DNA, 120 bp, Artificial Sequence
  ENSG00000136827_6 (sequence is synthesized)
agtggaaagcagagggaagacatcaagctcaaagacattgaacacgcgttgtctgtgtcggttttcaataacaagaacagtggcttctggcacagcagcttaattgaccggaacctcatt

SEQ ID NO: 331457 - DNA, 120 bp, Artificial Sequence
  ENSG00000136827_7 (sequence is synthesized)
gattattttgttcccttcctccccctggaatacaaacacctaaaaatgtgtatccgagtggaaatgcagtcccgaggctatgaaattgatgaagacattgtaagcagagtggctgaggag

SEQ ID NO: 331458 - DNA, 120 bp, Artificial Sequence
  ENSG00000136827_8 (sequence is synthesized)
aaggctgcaaaacggtgttcaccaagttagattattactacgatgattgacagtcatgattggcagccggagtcactgcctggagttggaaaagaaacaacactcagtccttccacactt

SEQ ID NO: 331459 - DNA, 120 bp, Artificial Sequence
  ENSG00000136827_9 (sequence is synthesized)
ccacccccagctcctttccctggaagaggaatccagtgaatgttcctgtttgatgtgacaggaattctccctggcattgtttccaccccctggtgcctgcaggccacccagggaccacgg

SEQ ID NO: 331460 - DNA, 120 bp, Artificial Sequence
  ENSG00000136827_10 (sequence is synthesized)
gcgaggacgtgaagcctcccgaacacgcacagaaggaaggagccagctcccagcccactcatcgcagggctcatgattttttacaaattatgttttaattccaagtgtttctgtttcaag

SEQ ID NO: 331461 - DNA, 120 bp, Artificial Sequence
  ENSG00000136827_11 (sequence is synthesized)
gaaggatgaataagttttattgaaaatgtggtaactttatttaaaatgatttttaacattatgagagactgctcagattctaagttgttggccttgtgtgtgtgtttttttttaagttct

SEQ ID NO: 331462 - DNA, 120 bp, Artificial Sequence
  ENSG00000136827_12 (sequence is synthesized)
catcattattacatagactgtgatgtatctttactggaaatgagcccaagcacacatgcatggcatttgttccacaggagggcatccctggggatgtggctggagcatgagccagctctg

SEQ ID NO: 331463 - DNA, 120 bp, Artificial Sequence
  ENSG00000136827_13 (sequence is synthesized)
tcccaggatggtcccagcggatgctgccaggggcagtgaagtgtttaggtgaaggacaagtaggtaagaggacgccttcaggcaccacagataagcctgaaacagcctctccaagggttt

SEQ ID NO: 331464 - DNA, 120 bp, Artificial Sequence
  ENSG00000136827_14 (sequence is synthesized)
tcaccttagcaacaatgggagctgtgggagtgattttggccacactgtcaacatttgttagaaccagtcttttgaaagaaaagtatttccaacttgtcacttgccagtcactccgttttg

SEQ ID NO: 331465 - DNA, 120 bp, Artificial Sequence
  ENSG00000136827_15 (sequence is synthesized)
caaaaggtggcccttcactgtccattccaaatagcccacacgtgctctctgctggattctaaattatgtgaattttgccatattaaatcttcctcatttatactattatttgttacgttc

SEQ ID NO: 331466 - DNA, 120 bp, Artificial Sequence
  ENSG00000136827_16 (sequence is synthesized)
aatcagaatccccgaaacctcctataaagcttagctgccccttctgaggatgctgagaacggtgtctttctttataaatgcaaatggctaccgttttacaataaaattttgcatgtgcca

SEQ ID NO: 331467 - DNA, 120 bp, Artificial Sequence
  ENSG00000136827_17 (sequence is synthesized)
ctgtcagcatcacctgggagctgggtagaaagaaatgcagattctcagtccccttccgagtcatgaggggaatctttgctgatgaactccaggtggcttctggcacagcagcttaattga

SEQ ID NO: 331468 - DNA, 120 bp, Artificial Sequence
  ENSG00000136827_18 (sequence is synthesized)
gaatcccttcctggatgtcatcgggtttggggtctctttgttgtgggatgagatttgggagttctatgttgaaatgagtgagcccggaaaacggttcatgtctcagttccccttggaaag

SEQ ID NO: 331469 - DNA, 120 bp, Artificial Sequence
  ENSG00000136827_19 (sequence is synthesized)
gtgtagaagttaagagtttgagatgcgtggagcagttaataccatcaaagctttgtggtgggttctgaaaatcggtccagtgagtatgtagggtcatgggattttagaggtggacatgat

SEQ ID NO: 331470 - DNA, 63 bp, Artificial Sequence
  ENSG00000136827_20 (sequence is synthesized)
gatctcaggtgatgtgcctctcactcattttgtgaaagaggaaacatgtagagtcctaagttt

SEQ ID NO: 331471 - DNA, 120 bp, Artificial Sequence
  ENSG00000136827_21 (sequence is synthesized)
acatctcactcattttgtgaaagaggaaacatgtagagtcctaagtttgttgaacctactgttgtaaactgcctttttttttttttctttgagtcagggtctcactctgttgtccaggct

SEQ ID NO: 331472 - DNA, 120 bp, Artificial Sequence
  ENSG00000136827_22 (sequence is synthesized)
agccgcaaacagcttttatggttgaactcactgatgagcagcttgggctttggcagcagacacatctggatttgagtcctaacactctcccagctccgtagtcttaggaaagttgcctga

SEQ ID NO: 331473 - DNA, 120 bp, Artificial Sequence
  ENSG00000136827_23 (sequence is synthesized)
cctgagactcagattctgacttacaaagtgttgcttgtaacaatccagggagctctgtctgtcaagtgcataacatgtacctggtgcatgttacaaataaatgttaactgttgcctttta

SEQ ID NO: 331474 - DNA, 120 bp, Artificial Sequence
  ENSG00000136827_24 (sequence is synthesized)
gaggctgggggatggcagtagggccgggctaggactggggctggagcggagtttgggggctggggctcaggagcgggggctggggctggggctggggctgggggatggcactagggccag

SEQ ID NO: 331475 - DNA, 120 bp, Artificial Sequence
  ENSG00000136827_25 (sequence is synthesized)
gccggggtaggggtcacatcccaggagggccgggcctgggcagagctgagtccgcgggggccggaccccggaagccaagcggccggcctgcaggatgaggcctggctcctcggccatgac

SEQ ID NO: 331476 - DNA, 80 bp, Artificial Sequence
  ENSG00000136828_0 (sequence is synthesized)
aggccctggagcggacggttcctactgcggctgggcaccggctccgctcccgcgtctgcccgcgctccagctgcgcctgg

SEQ ID NO: 331477 - DNA, 120 bp, Artificial Sequence
  ENSG00000136828_1 (sequence is synthesized)
cgaaggcgccgctgccgctgggccgctcccagggccatgaggaagcggcggcagccactgcggcccgcgtcaaggacttctccagacaggttatgttacctgcagaggctgccctgaagc

SEQ ID NO: 331478 - DNA, 120 bp, Artificial Sequence
  ENSG00000136828_2 (sequence is synthesized)
tccctgtggcctggagactatgtacaagaggaatggtctgatggctagcgtgttggtcacctctgccactccacagggcagcagcagctcggactctctggagggccagagctgcgacta

SEQ ID NO: 331479 - DNA, 120 bp, Artificial Sequence
  ENSG00000136828_3 (sequence is synthesized)
tgccagcaagagctatgatgccgttgtcttcgatgtcttgaaagtgaccccagaggagtttgctagccagattacattaatggatatacctgtgtttaaagctatccagccggaggaact

SEQ ID NO: 331480 - DNA, 120 bp, Artificial Sequence
  ENSG00000136828_4 (sequence is synthesized)
agccagctgtggatggagtaagaaggagaaacacagtcttgcccctaacgttgtggcctttacccggaggtttaaccaggtcagtttttgggttgtacgagaaattctaacagcacagac

SEQ ID NO: 331481 - DNA, 120 bp, Artificial Sequence
  ENSG00000136828_5 (sequence is synthesized)
tttaaaaataagggcagaaatcctcagccattttgtgaaaatagccaagaaacttctagaactcaacaaccttcattctctcatgtctgtggtatcagcattacaaagtgctcccatctt

SEQ ID NO: 331482 - DNA, 120 bp, Artificial Sequence
  ENSG00000136828_6 (sequence is synthesized)
caggctgacaaaaacctgggctcttttaaatcgaaaagacaagactacctttgagaaattggactacctgatgtcgaaagaagataattacaagcggacacgggaatatatccgaagcct

SEQ ID NO: 331483 - DNA, 120 bp, Artificial Sequence
  ENSG00000136828_7 (sequence is synthesized)
gaagatggttccaagtattccctatctaggaatctatcttctggatttaatctacattgattctgcatatcctgcctcaggcagtatcatggaaaatgaacaaagatccaatcagatgaa

SEQ ID NO: 331484 - DNA, 120 bp, Artificial Sequence
  ENSG00000136828_8 (sequence is synthesized)
caatattcttcgaataattgctgatttacaagtttcctgcagctatgatcacctcaccaccctgccccatgtgcagaagtacctgaagtccgtacgctacattgaagagctccagaagtt

SEQ ID NO: 331485 - DNA, 120 bp, Artificial Sequence
  ENSG00000136828_9 (sequence is synthesized)
tgtggaagacgacaactacaaactgtcgctcagaatcgaaccaggaagcagctctccaagactagtctcttccaaggaagatcttgcaggtccctctgctggctccggttctgcgaggtt

SEQ ID NO: 331486 - DNA, 120 bp, Artificial Sequence
  ENSG00000136828_10 (sequence is synthesized)
cagccggaggcccacctgtcctgacacatctgttgctggcagcctccccacacctccagtccccagacacaggaagagccacagcctaggcaacaatatgatgtgtcagttgagtgtagt

SEQ ID NO: 331487 - DNA, 120 bp, Artificial Sequence
  ENSG00000136828_11 (sequence is synthesized)
tgagagtaaaagtgcgacattcccatcggagaaagcaaggcacctactggacgacagtgtcctagagtcccgcagcccccgaaggggcctggctctgacctcctcctctgctgtcaccaa

SEQ ID NO: 331488 - DNA, 120 bp, Artificial Sequence
  ENSG00000136828_12 (sequence is synthesized)
tggactctccctaggcagtagtgagagctcagagtttagtgaagagatgtcttcagggctggaaagccccaccggcccgtgcatctgttctctggggaactccgcagctgtgcccaccat

SEQ ID NO: 331489 - DNA, 120 bp, Artificial Sequence
  ENSG00000136828_13 (sequence is synthesized)
ggaggggcctctgagaagaaaaaccctgctcaaggaagggcggaagcctgcgctgtcctcgtggaccaggtactgggtcatactctcaggatccaccctcctgtactacggagccaagtc

SEQ ID NO: 331490 - DNA, 120 bp, Artificial Sequence
  ENSG00000136828_14 (sequence is synthesized)
cttgcggggcacagacagaaaacactataaatccacacctggcaaaaaggtttccatcgtgggctggatggtgcagctgcccgatgaccccgagcacccagatatcttccagctgaacaa

SEQ ID NO: 331491 - DNA, 120 bp, Artificial Sequence
  ENSG00000136828_15 (sequence is synthesized)
ccctgacaaaggcaatgtttacaagtttcagactggttcccgatttcatgcaatactgtggcacaagcatttggatgatgcatgtaaaagcaacaggcctcaggtacctgcaaaccttat

SEQ ID NO: 331492 - DNA, 120 bp, Artificial Sequence
  ENSG00000136828_16 (sequence is synthesized)
gtcatttgagtaagtctctgcaggacgtggcatgacttcagaggcttctgggaacccaggctgggcctggtggtgaagagcagtcctgggcacaggctgtgagccagggtgctgggaaac

SEQ ID NO: 331493 - DNA, 120 bp, Artificial Sequence
  ENSG00000136828_17 (sequence is synthesized)
tcacagctggactcaggggacacggcctgtggcctcaccatcccagagggcttcaccagtgtgggatccacctgtcagtccccagcgactctcatgacactcattctgcagcaccgcctc

SEQ ID NO: 331494 - DNA, 120 bp, Artificial Sequence
  ENSG00000136828_18 (sequence is synthesized)
ttggggcagtggtcagaccccacacgccctctctgggcccaccacctgcatctgcgactagagagcacccggcccacgttgggttctcagtgctttctactgcacagagtggacagcgct

SEQ ID NO: 331495 - DNA, 120 bp, Artificial Sequence
  ENSG00000136828_19 (sequence is synthesized)
aactaacctgtgagaggggcccgagagaaggaacagctgtggaacaggctttttacaccccaagtgcatggggttgctcgcccacagggctgcctcagattttgtacaaccccgaagcgt

SEQ ID NO: 331496 - DNA, 120 bp, Artificial Sequence
  ENSG00000136828_20 (sequence is synthesized)
cctctgcgtgtgcgtgctgtacgtgtgtgtgtgtgtgtgagcgagtgtgaactcttcaagaaacatgcattttggcacaagactcgtgacatcacacacttcattcgctttgaggccctg

SEQ ID NO: 331497 - DNA, 120 bp, Artificial Sequence
  ENSG00000136828_21 (sequence is synthesized)
ctttaaccttaagttatagccctgtccaccgaggaaggtcagggtgagagcctagattcctcctgtgtcaagggtccctcgcattcttttactgtaaacaaacaatgccttaaattgtgt

SEQ ID NO: 331498 - DNA, 120 bp, Artificial Sequence
  ENSG00000136828_22 (sequence is synthesized)
cttgttttctgttcctatgggtgctattcatctggaaggcctgcttccaggcctctttgctgtcagcccttctgagacaggacctggcttcaggactgtggactgggctgctggcctgct

SEQ ID NO: 331499 - DNA, 120 bp, Artificial Sequence
  ENSG00000136828_23 (sequence is synthesized)
tgcttcctcccttccccattcctagcagggcctgaggccctcctcttctcgcccttcccaccatgccagaatgggaagttgtgacgttgcagctccaaccgacgtgctcatagtgatcag

SEQ ID NO: 331500 - DNA, 120 bp, Artificial Sequence
  ENSG00000136828_24 (sequence is synthesized)
ctgtgcaggagccatgaggcaccaacctctccccgcagggcaaagcctgtgcccccatcatctcactcctttgcctgcactgccagggtggggcccaccaagattcctgatcatgacggg

SEQ ID NO: 331501 - DNA, 120 bp, Artificial Sequence
  ENSG00000136828_25 (sequence is synthesized)
aagctgagtgaccctgaggccttaagcttccccagtcttggccccaaatgcagtcaccagcaagttttccattttccaagtccaagggcacaattgttgatgaccgtgtgacaatagagc

SEQ ID NO: 331502 - DNA, 120 bp, Artificial Sequence
  ENSG00000136828_26 (sequence is synthesized)
tttaaagtgacttttattttgcacaaataatttttattcagaataataaatcactctttatcatagtatcttctcttccctcttcccctttagtttggatagcctaactctgagaagtta

SEQ ID NO: 331503 - DNA, 120 bp, Artificial Sequence
  ENSG00000136828_27 (sequence is synthesized)
acccttaaacagttttctggaagagactgaatttctgggtccttgcagctgtgatggtttcagagctcagactgatcaggcatcaagctaccctcaagagtttctgggctggatgtttca

SEQ ID NO: 331504 - DNA, 120 bp, Artificial Sequence
  ENSG00000136828_28 (sequence is synthesized)
gaacaacatctacaccagtaaagtgtaataggtcagtttcaaaacgaccaaaagacccaccactgtattttgaccaaataatgacaacttctttagaaatttgaatggcttggtgaggaa

SEQ ID NO: 331505 - DNA, 120 bp, Artificial Sequence
  ENSG00000136828_29 (sequence is synthesized)
agtagttgtcaccagggcctcattttgtagttgagccttacaatgcttagtagttcatcttctttttgagcaaagactagaatactttcctcctaagagaaactcccaggtgataaaagt

SEQ ID NO: 331506 - DNA, 120 bp, Artificial Sequence
  ENSG00000136828_30 (sequence is synthesized)
tgatgccatcaaaccttgacaccgggtgctctgcacacccacgcggatgttgcacctcattctcccgatgactattcaaatcagcatctagaggctgaatgacaatgccaaacactccac

SEQ ID NO: 331507 - DNA, 120 bp, Artificial Sequence
  ENSG00000136828_31 (sequence is synthesized)
ctctgatcagaaccatgcagtgttaacactttaacctacattgaatctgattctacctgttaacttttaaaaagtcgtaagtttggatgaaagtgcaagatgtggaacatcaactaccta

SEQ ID NO: 331508 - DNA, 120 bp, Artificial Sequence
  ENSG00000136828_32 (sequence is synthesized)
ttttccttgggtttttccactctgcaaactgtcctggtttttcacaccaatgaagtattatagatgccaatccaaaacctcagaatttcaggcaccacaaaaacaggtaattttctatcc

SEQ ID NO: 331509 - DNA, 120 bp, Artificial Sequence
  ENSG00000136828_33 (sequence is synthesized)
cttataagtttgtcttttctttcagaaacatctcttagcctaatttgaaatagcacaatcacaattcaaaatgtttagtcttctcactaattgagtctgcttccacgtcctctcccagga

SEQ ID NO: 331510 - DNA, 120 bp, Artificial Sequence
  ENSG00000136828_34 (sequence is synthesized)
acattcttagctcggactcttgaagaatctctttagattttgttggcaaaagccttatagaagcagtaagaggcttgaccacgccggaagagtcctggagctaaagctggaagacactca

SEQ ID NO: 331511 - DNA, 120 bp, Artificial Sequence
  ENSG00000136828_35 (sequence is synthesized)
gctctctaagcaggggctcggccaaacatgggagttaagtgctgcttgtcttcccagtgttggtttgaaccctgtgagcctgagacagagagggccaggcaccaaccacaaggcgggaaa

SEQ ID NO: 331512 - DNA, 120 bp, Artificial Sequence
  ENSG00000136828_36 (sequence is synthesized)
gtccatgggtagaccctccccctggagggaagcatttctagtttttgctccttgactgtccagagtgtacaaatgttcataacgccattgaagggattatttcttgcatgcatatgctga

SEQ ID NO: 331513 - DNA, 120 bp, Artificial Sequence
  ENSG00000136828_37 (sequence is synthesized)
atttttttaagcaaatggatcatggcaccccaaaatgaaagttatagaaagctgtctacaactgtggagttggtagctggtaacattgttgtctcaagaacaactcacctctctccctag

SEQ ID NO: 331514 - DNA, 120 bp, Artificial Sequence
  ENSG00000136828_38 (sequence is synthesized)
gactaatttttgtctctctcagttgaacatgttttgtcattcaagatcagtcaggtgcattctggcaactgacatacttgatggaggattgattcggtagagagcagtagaaatcttgtt

SEQ ID NO: 331515 - DNA, 120 bp, Artificial Sequence
  ENSG00000136828_39 (sequence is synthesized)
ctaactgtgcctggtgagagactttggccccctccctccctataaggctgtggaacctgaggaagtagatacttgaagagattctgtttaggaagaaactcactctcttttgccagttga

SEQ ID NO: 331516 - DNA, 120 bp, Artificial Sequence
  ENSG00000136828_40 (sequence is synthesized)
atttatagagcattttttttcttaccaagatggccagtatcattttacccccacctcccaagccccaagaggtgtaccttttcagatgccattttacaggcggaaatgctccatgaaaca

SEQ ID NO: 331517 - DNA, 120 bp, Artificial Sequence
  ENSG00000136828_41 (sequence is synthesized)
ggaagccacttgcaagcaacatctgctctgttcctcaggtggggcccagagcccttccccgagactgctgatgtctgtaaccactggggagcactgccaaaaatacagctttctggtttg

SEQ ID NO: 331518 - DNA, 120 bp, Artificial Sequence
  ENSG00000136828_42 (sequence is synthesized)
tgagcccataaatgacttaaatcagctttacatcatttttacatatcaagtggtttcatgttaaaaaacaaactcctagtcctttagaaataacagattctctgcacaaaaccacccatt

SEQ ID NO: 331519 - DNA, 120 bp, Artificial Sequence
  ENSG00000136828_43 (sequence is synthesized)
cattcatttattcattcacagcactagcaagtgctgcctatgctgagaacaagtcagatctgatccctgccctcatggacctgaccactcaacaaacagtccccaccacacctatctcct

SEQ ID NO: 331520 - DNA, 120 bp, Artificial Sequence
  ENSG00000136828_44 (sequence is synthesized)
taggcaagactttgcctctctcctagtcctgagtataaatcctgtgcatagattcctctagaaaggcatcaaaaggctcaacagactgaatggcctcttggtctgcgaaaattcagttgc

SEQ ID NO: 331521 - DNA, 120 bp, Artificial Sequence
  ENSG00000136828_45 (sequence is synthesized)
aatgaggatgaagtcactatcctagaggctgcttggcccagaagagccaggcacagagctgcagttgggcacgccaaggattccaaaggtggaatgagagagtagggtcaaactgtcaca

SEQ ID NO: 331522 - DNA, 120 bp, Artificial Sequence
  ENSG00000136828_46 (sequence is synthesized)
gtatctgctccataggtttctgtttttaatttcaatgttaaatacaactacaatatgagcgagaactgcattttcttgggtgttgagaacttgtaccatggacttcagaccgccttgcag

SEQ ID NO: 331523 - DNA, 120 bp, Artificial Sequence
  ENSG00000136828_47 (sequence is synthesized)
ccgtatgctgcacaagcgtgtacaccccctgggcagcctcaaaaccccgcttacagcagcaacacaggagatcatctgtccattttagaaccattaatctctttatccattgctgaacga

SEQ ID NO: 331524 - DNA, 120 bp, Artificial Sequence
  ENSG00000136828_48 (sequence is synthesized)
ctgtgactattcagtaacgaagtaatagtaattaattagtatggtataatctttaataaatttcgtgccaaaatgcatggttttccacttagcattcaaaatgttgcatagagagtagtt

SEQ ID NO: 331525 - DNA, 120 bp, Artificial Sequence
  ENSG00000136828_49 (sequence is synthesized)
ttcaatttcttatgtactcttcgaagtaagttgaaaatcagtttctacattttaattcgtttcctgttaaatctgttgcactctcctgggctgtctttttctccagcagacccctgcatg

SEQ ID NO: 331526 - DNA, 120 bp, Artificial Sequence
  ENSG00000136828_50 (sequence is synthesized)
cagttgtgtaaggactttctctaattcttgtgaatcgtctcacccgcagtaaccactgaacgtcaatcagccctccatggggttctttcgatttttggtgaagtattttgttacctcagt

SEQ ID NO: 331527 - DNA, 120 bp, Artificial Sequence
  ENSG00000136828_51 (sequence is synthesized)
cttgtatcaagttgctgtatttttcagcttgttacattgataataattatttcactaattaaatactttaatgtacaaacatctttgtttactttgaaattaaatgtgttttccaatgaa

SEQ ID NO: 331528 - DNA, 120 bp, Artificial Sequence
  ENSG00000136828_52 (sequence is synthesized)
agagccacagcctaggcaacaacaggggacgtctctatgccaccctggggcccaactggcgggttccagttaggaattctcccagaacccggagctgtgtctacagccccaccggcccgt

SEQ ID NO: 331529 - DNA, 120 bp, Artificial Sequence
  ENSG00000136828_53 (sequence is synthesized)
cggggaaggaggcagggccctgtgcctgaagcctgggcaccatggtggccccagtcaggagcaacagtggtagccctgagtaaaacccattgtccctctttggaggagcggccagaggat

SEQ ID NO: 331530 - DNA, 120 bp, Artificial Sequence
  ENSG00000136828_54 (sequence is synthesized)
gacagcagccccagcaggcagcagtgcctgggcaggctgatccagcagagcactaatgggtcagtttcatgtattggcagatgtggtgtagcatggcaaggctacaagttttaaggattt

SEQ ID NO: 331531 - DNA, 120 bp, Artificial Sequence
  ENSG00000136828_55 (sequence is synthesized)
ttgtctgattttcagacctggaggaggggatttttcttcctactttcccccttttttatttctaatttactttcaaccaaatattcccactatgtgctatatgtaataataaaaagttga

SEQ ID NO: 331532 - DNA, 120 bp, Artificial Sequence
  ENSG00000136828_56 (sequence is synthesized)
caacaactgaaatattcaacagcagaggatgatttaagtgaatcacagtacatccgtgtgatggaatgccaggagggtgtaagaaagagtgtgacagaaatgcatctattcacaaggaaa

SEQ ID NO: 331533 - DNA, 120 bp, Artificial Sequence
  ENSG00000136828_57 (sequence is synthesized)
catcgcagtgactagagtgattttctgttctgtggaactgcatgtcctaaacttgtttttattaacactgaatacacttaaaccttatctataacatatgtataggtataaacaacagca

SEQ ID NO: 331534 - DNA, 120 bp, Artificial Sequence
  ENSG00000136828_58 (sequence is synthesized)
ataaaacaccttattgccaccatgagcctaacagcagagccaccagggccttggaatgctgtccctcaccatggcctcttcctaattcggtttctctccctcccacctgtgccccagcac

SEQ ID NO: 331535 - DNA, 120 bp, Artificial Sequence
  ENSG00000136828_59 (sequence is synthesized)
cactctcctgatttgtttgctgattattcctttagaattgcaggtcacgtacttgattccttcatgtgttgtctggggtgcatttttaaactttcttataaatagaaccataaagatgca

SEQ ID NO: 331536 - DNA, 120 bp, Artificial Sequence
  ENSG00000136828_60 (sequence is synthesized)
gtgccaaataagatgtttttacagtttctacctgaaaaatttccaggaagcgacatggcccgtagataaagaggcaattggttggctctttgggttggaacaggctgttggtacttccca

SEQ ID NO: 331537 - DNA, 120 bp, Artificial Sequence
  ENSG00000136828_61 (sequence is synthesized)
aggttggaaacctggattagggtgatatacaagtgatgttctgctttttatataaaagacctgtgggccccagggttccccaggctgcagcccagatgggtcacaatgagagtgataaga

SEQ ID NO: 331538 - DNA, 120 bp, Artificial Sequence
  ENSG00000136828_62 (sequence is synthesized)
ctcgtactggttcatccacatcctcctgaactggggcatgtcaggcacaaaccctctgttctggttctctgggcattattagtatatttcatatttgtacaaataaaattatagtaatgt

SEQ ID NO: 331539 - DNA, 120 bp, Artificial Sequence
  ENSG00000136828_63 (sequence is synthesized)
ttatttttctggttagaaaataatgcatgttaattgtaaggaattagagaaaaaagttaatatcttttgttatctcacctaaagatatttgcttcatatcttattgatttgggcatatct

SEQ ID NO: 331540 - DNA, 120 bp, Artificial Sequence
  ENSG00000136828_64 (sequence is synthesized)
aaaatatgtatgcttactctatcctaaaaatgttatttttatcttaaaaattttatctacttttcgatgctatgactcattcccatcagatggatttgtcaaactcgaatctgctctcca

SEQ ID NO: 331541 - DNA, 120 bp, Artificial Sequence
  ENSG00000136828_65 (sequence is synthesized)
agtttctctcttgcaggctctataaatgcatgttatccatttaaaccccattctattcttgatggtgctcatgtttttgagcccagtatttggattttccagagaatgtctcccgtctgg

SEQ ID NO: 331542 - DNA, 120 bp, Artificial Sequence
  ENSG00000136828_66 (sequence is synthesized)
cctactctggcagggctgggagcagttggtacccacaggactccacgcctgagagtcaggtcttaacaccctcattccttttcccaggctcctcctgctgaaaatgtttgctttcaagaa

SEQ ID NO: 331543 - DNA, 120 bp, Artificial Sequence
  ENSG00000136828_67 (sequence is synthesized)
gtgatgtgagggaacatttttctggaaagttctctttttgttcatcccaaattctggtggttgccttgtttctatttttgaaaccagttgccgaagcaaacatgtacatatttacattga

SEQ ID NO: 331544 - DNA, 74 bp, Artificial Sequence
  ENSG00000136828_68 (sequence is synthesized)
aagcatatatccctaggtgggaggatcgcttgagatcaggggtttgagaccagcctgagcaaaatagtgagtgt

SEQ ID NO: 331545 - DNA, 120 bp, Artificial Sequence
  ENSG00000136828_69 (sequence is synthesized)
ctgtgtttggcagtcgtgtgaagaggcccgtgtggcacgggattgagacctgccaacaaccatgtgagggagtttggaagaagattctgctaaaaaggcgagccttcagatgagactgca

SEQ ID NO: 331546 - DNA, 120 bp, Artificial Sequence
  ENSG00000136828_70 (sequence is synthesized)
gccccagccaatagcttgactgaagtctcatcacagaccttaaaccagagacacccagctaagacatgcccaaattcccaatccacagaaactgcaagacaataaatgtttattgtaaga

SEQ ID NO: 331547 - DNA, 120 bp, Artificial Sequence
  ENSG00000136828_71 (sequence is synthesized)
gatcttgcagtctcccatctcagcagcctgtcacatcaaggtcaagcagaagaggcaagactcaaacccacctctggccaacaccctgcctggatgtggcccagctcctcacgagtacca

SEQ ID NO: 331548 - DNA, 120 bp, Artificial Sequence
  ENSG00000136828_72 (sequence is synthesized)
ccagctcctcacgagtaccagcggctcccccagcatctgctgctccgcgctccccgtggcctaggaatctaagaaatgatcaaggtcaaccaggtgcagtggctctcacctgtaatccca

SEQ ID NO: 331549 - DNA, 90 bp, Artificial Sequence
  ENSG00000136828_73 (sequence is synthesized)
gtatataaatgatctgggcatggtggtgcgtgcctacagccccagctcctcagggcttaggcgagatcgcttgatcccaggagggggagg

SEQ ID NO: 331550 - DNA, 120 bp, Artificial Sequence
  ENSG00000136828_74 (sequence is synthesized)
cagggcttaggcgagatcgcttgatcccaggagggggaggctacagtgagccgtgatcgcgccaccgcgctccagcttgggtgacagagcaagaccttgtctcaggaaaaaaaaaaaaaa

SEQ ID NO: 331551 - DNA, 120 bp, Artificial Sequence
  ENSG00000136828_75 (sequence is synthesized)
ctgtgggtccaggaacctgaccctctggccttttgtctggatgccgtttgcctgctctgaagaagcgggcgttccagaaagccgaggtcaatgttggacgtcggacaaaccctgtgtgtc

SEQ ID NO: 331552 - DNA, 120 bp, Artificial Sequence
  ENSG00000136828_76 (sequence is synthesized)
tttgctgctccttggaatcagtgtttggccctcggagagggaagaatgtggccagcaggcagtcatttgtaaagtggagattggtttccctgacatcattaaaacccctctctcaggtca

SEQ ID NO: 331553 - DNA, 120 bp, Artificial Sequence
  ENSG00000136828_77 (sequence is synthesized)
ctggcaggggacagaatggaccccagatggttcacatgaagagactttaatgaacagaaccaataaagcatggcgaggcacccatgggccggcccagggtcctggggagggtggagccct

SEQ ID NO: 331554 - DNA, 120 bp, Artificial Sequence
  ENSG00000136828_78 (sequence is synthesized)
aggctaaagggcatggggaagaagtgttaccaatcccagggatggctgagttctggaggatgattggctgtgcagggtctgtgggcagggagggggaagcaggagcgagcagagaaaaat

SEQ ID NO: 331555 - DNA, 120 bp, Artificial Sequence
  ENSG00000136828_79 (sequence is synthesized)
ccctggcctccctttcctccagccctcagtctgccaccagagcctttcattggccaaatccaatagaaagctgggggcaaggggtccaggagatgcatctcaggggtcagcctcccccga

SEQ ID NO: 331556 - DNA, 120 bp, Artificial Sequence
  ENSG00000136828_80 (sequence is synthesized)
acagaagtggcaagtgggcagggcaaaaaatgcagctgaattgtgtgaacagactactcagcatactgccaagcctcagtgtctctatctgtaaagtgggcataaaatcttcctccttca

SEQ ID NO: 331557 - DNA, 120 bp, Artificial Sequence
  ENSG00000136828_81 (sequence is synthesized)
catacgcagtgtcatcatctgttcagtcttcctacttgtcctgggctgaccttgccctctggttcttagcttcctgccttggctccaacctcactccagcccttattgatggggcttcat

SEQ ID NO: 331558 - DNA, 120 bp, Artificial Sequence
  ENSG00000136828_82 (sequence is synthesized)
ggtttgtctttggttctcctaccttgaccccaccttttcaagaagtacaccttatatttcaatgtcacgtctttttacatcagttagagctgtgttgtcttaatatggtggctgcatgtg

SEQ ID NO: 331559 - DNA, 80 bp, Artificial Sequence
  ENSG00000136830_0 (sequence is synthesized)
gagcggcgggagcgggggaagcagggcgggccgggctccatggcgccagcggcgtccgcctgagcagcgcgggcaacagc

SEQ ID NO: 331560 - DNA, 120 bp, Artificial Sequence
  ENSG00000136830_1 (sequence is synthesized)
tggcgccagcggcgtccgcctgagcagcgcgggcaacagcggcggcgtcggccggatcgggccgcgacacctcctggccatgggggacgtgctgtccacgcacctggacgacgcccggcg

SEQ ID NO: 331561 - DNA, 120 bp, Artificial Sequence
  ENSG00000136830_2 (sequence is synthesized)
ccagcacatcgcagaaaaaaccgggaagatcctgacggagttcctccagttctatgaagaccagtatggcgtggctctcttcaacagcatgcgccatgagattgagggcacggggctgcc

SEQ ID NO: 331562 - DNA, 120 bp, Artificial Sequence
  ENSG00000136830_3 (sequence is synthesized)
gcaggcccagctgctctggcgcaaggtgccactggacgagcgcatcgtcttctcggggaacctcttccagcaccaggaggacagcaagaagtggagaaaccgcttcagcctcgtgcccca

SEQ ID NO: 331563 - DNA, 120 bp, Artificial Sequence
  ENSG00000136830_4 (sequence is synthesized)
caactacgggctggtgctctacgaaaacaaagcggcctatgagcggcaggtcccaccacgagccgtcatcaacagtgcaggctacaaaatcctcacgtccgtggaccaatacctggagct

SEQ ID NO: 331564 - DNA, 120 bp, Artificial Sequence
  ENSG00000136830_5 (sequence is synthesized)
cattggcaactccttaccagggaccacggcaaagtcgggcagtgcccccatcctcaagtgccccacacagttcccgctcatcctctggcatccttatgcgcgtcactactacttctgcat

SEQ ID NO: 331565 - DNA, 120 bp, Artificial Sequence
  ENSG00000136830_6 (sequence is synthesized)
gatgacagaagccgagcaggacaagtggcaggctgtgctgcaggactgcatccggcactgcaacaatggaatccctgaggactccaaggtagagggccctgcgttcacagatgccatccg

SEQ ID NO: 331566 - DNA, 120 bp, Artificial Sequence
  ENSG00000136830_7 (sequence is synthesized)
catgtaccgacagtccaaggagctgtacggcacctgggagatgctgtgtgggaacgaggtgcagatcctgagcaacctggtgatggaggagctgggccctgagctgaaggcagagctcgg

SEQ ID NO: 331567 - DNA, 120 bp, Artificial Sequence
  ENSG00000136830_8 (sequence is synthesized)
cccgcggctgaaggggaaaccgcaggagcggcagcggcagtggatccagatctcggacgccgtgtaccacatggtgtacgagcaggccaaggcgcgcttcgaggaggtgctgtccaaggt

SEQ ID NO: 331568 - DNA, 120 bp, Artificial Sequence
  ENSG00000136830_9 (sequence is synthesized)
gcagcaggtgcagccggccatgcaggccgtcatccgaactgacatggaccaaattatcacctccaaggagcaccttgccagcaagatccgagccttcatcctccccaaggcagaggtgtg

SEQ ID NO: 331569 - DNA, 120 bp, Artificial Sequence
  ENSG00000136830_10 (sequence is synthesized)
cgtgcggaaccatgtccagccctacatcccatccatcctggaggccctgatggtccccaccagccagggcttcactgaggtgcgagatgtcttcttcaaggaggtcacggacatgaacct

SEQ ID NO: 331570 - DNA, 120 bp, Artificial Sequence
  ENSG00000136830_11 (sequence is synthesized)
gaacgtcatcaacgagggcggcattgacaagctgggcgagtacatggagaagctgtcccggctggcgtaccaccccctgaagatgcagagctgctatgagaagatggagtcgctgcgact

SEQ ID NO: 331571 - DNA, 120 bp, Artificial Sequence
  ENSG00000136830_12 (sequence is synthesized)
ggacgggctgcagcagcgatttgatgtgtccagcacgtccgtgttcaagcagcgagcccagatccacatgcgggagcaaatggacaatgccgtgtatacgttcgagaccctcctgcacca

SEQ ID NO: 331572 - DNA, 120 bp, Artificial Sequence
  ENSG00000136830_13 (sequence is synthesized)
ggagctggggaaggggcccaccaaggaggagctgtgcaagtccatccagcgggtcctggagcgggtgctgaagaaatacgactacgacagcagctctgtgcggaagaggttcttccggga

SEQ ID NO: 331573 - DNA, 120 bp, Artificial Sequence
  ENSG00000136830_14 (sequence is synthesized)
ggcgctgctgcagatcagcatcccgttcctgctcaagaagctggcccctacctgcaagtcggagctgccccggttccaggagctgatcttcgaggactttgccaggttcatcctggtgga

SEQ ID NO: 331574 - DNA, 120 bp, Artificial Sequence
  ENSG00000136830_15 (sequence is synthesized)
aaacacgtacgaggaggtggtgctgcagaccgtcatgaaggacatcctgcaggctgtgaaggaggccgcggtgcagaggaagcacaacctctaccgggacagcatggtcatgcacaacag

SEQ ID NO: 331575 - DNA, 120 bp, Artificial Sequence
  ENSG00000136830_16 (sequence is synthesized)
gtcagccaccctctcggaaaagcgacggcgcgccaagcaggtggtctctgtggtccaggatgaggaggtggggctgccctttgaggctagccctgagtcaccaccacctgcgtccccgga

SEQ ID NO: 331576 - DNA, 120 bp, Artificial Sequence
  ENSG00000136830_17 (sequence is synthesized)
cggtgtcactgagatccgaggcctgctggcccaaggtctgcggcctgagagccccccaccagccggccccctgctcaacggggcccccgctggggagagtccccagcctaaggccgcccc

SEQ ID NO: 331577 - DNA, 120 bp, Artificial Sequence
  ENSG00000136830_18 (sequence is synthesized)
cgaggcctcctcgccgcctgcctcacccctccagcatctcctgcctggaaaggctgtggaccttgggccccccaagcccagcgaccaggagactggagagcaggtgtccagccccagcag

SEQ ID NO: 331578 - DNA, 120 bp, Artificial Sequence
  ENSG00000136830_19 (sequence is synthesized)
ccaccccgccctccacaccaccaccgaggacagtgcaggggtgcagactgagttctaggccagtgggtccctgactgctgcacatggcacaggccgttcccttccggacccaggcaggct

SEQ ID NO: 331579 - DNA, 120 bp, Artificial Sequence
  ENSG00000136830_20 (sequence is synthesized)
cagctctggggagggcaccctggtctgtgccttgtgggtggaggcggggcagggctgtgtggcaccgccagggagcgggcccacctgagtcactttattgggttcagtcaacactttctt

SEQ ID NO: 331580 - DNA, 120 bp, Artificial Sequence
  ENSG00000136830_21 (sequence is synthesized)
gctccctgttttctcttctgtgggatgatctcagatgcaggggctggttttggggttttcctgcttgtgccaagggctggacactgctggggggctggaaagcccctcccttcctgtcct

SEQ ID NO: 331581 - DNA, 120 bp, Artificial Sequence
  ENSG00000136830_22 (sequence is synthesized)
tctgtggcctccatcccctcatgggtgctgccatccttcctggagagagggaggtgaaagctggtgtgagcccagtgggttcccgcccactcacccaggagctggctgggccaggaccgg

SEQ ID NO: 331582 - DNA, 120 bp, Artificial Sequence
  ENSG00000136830_23 (sequence is synthesized)
gagagggagcactgctgccctcctggccctgctccttccgcagttaggggtggaccgagcctcgctttccccactgttctggagggaaggggaaggagggggtcttcaggctggagccag

SEQ ID NO: 331583 - DNA, 120 bp, Artificial Sequence
  ENSG00000136830_24 (sequence is synthesized)
gctgggggtgctgggtggagagatgagatttagggggtgcctcatggggtgggcaggcctggggtgaaatgagaaaggcccagaacgtgcaggtctgcggaggggaagtgtcctgagtga

SEQ ID NO: 331584 - DNA, 120 bp, Artificial Sequence
  ENSG00000136830_25 (sequence is synthesized)
aggaggggacccccatcctgggggatgctgggagtgagtgagtgagatggctgagtgagggttatggggagcctgaggttttatgggcctgtgtatccccttctcccggccccagcctgc

SEQ ID NO: 331585 - DNA, 120 bp, Artificial Sequence
  ENSG00000136830_26 (sequence is synthesized)
ctccctcctgcccgcctggcccacaggtctccctctggtccctgtccctctggtggttggggatggagcggcagcaaggggtgtaatggggctgggttctgtcttctacaggccaccccg

SEQ ID NO: 331586 - DNA, 120 bp, Artificial Sequence
  ENSG00000136830_27 (sequence is synthesized)
aggtcctcagtggttgcctggggagccggacggggctcctgaggggtacaggttgggtgggccctccctgagggtctggggtcaggctttggcctctgctgcctctcagtcaccaagtca

SEQ ID NO: 331587 - DNA, 120 bp, Artificial Sequence
  ENSG00000136830_28 (sequence is synthesized)
cctccctctgaaaatccagtcccttctttggatgtccttgtgagtcactctgggcctggctgtcgtccctcctcagcttcttgttcctgggacaagggtcaagccaggatgggcccaggc

SEQ ID NO: 331588 - DNA, 120 bp, Artificial Sequence
  ENSG00000136830_29 (sequence is synthesized)
ctgggatcccccaccccaggacccccaggccccctcccctgctgctttgcggggggcagggcagaaatggactccttttgggtccccgaggtggggtcccctcccagccctgcatcctcc

SEQ ID NO: 331589 - DNA, 120 bp, Artificial Sequence
  ENSG00000136830_30 (sequence is synthesized)
gtgccctagacctgctccccagaggaggggccttgacccacaggacgtgtggtggcgcctggcactcagggacccccagctgccgcagccctggtctctggcgcatctcttccctcttgt

SEQ ID NO: 331590 - DNA, 120 bp, Artificial Sequence
  ENSG00000136830_31 (sequence is synthesized)
cccgaagatctgcgcctctagtgccttttgaggggttcccatcatccctccctgatattgtattgaaaatattatgcacactgttcatgcttctactaatcaataaacgctttatttaaa

SEQ ID NO: 331591 - DNA, 120 bp, Artificial Sequence
  ENSG00000136830_32 (sequence is synthesized)
ctaggagggggtctcctgagagtaggtctggtctgtcccagagggccccggctgcgtgactccgggcagccgttcccctccaaggccgtccctgtagacggggaggggctgctggggact

SEQ ID NO: 331592 - DNA, 120 bp, Artificial Sequence
  ENSG00000136830_33 (sequence is synthesized)
aggggcagaggctgtgaggccagggctgttggagtcctcgtggggcctgcagtttgaggaaagagggaacattagctcccggccaccagcctttagaaaccaagagtggtgctaaaatag

SEQ ID NO: 331593 - DNA, 120 bp, Artificial Sequence
  ENSG00000136830_34 (sequence is synthesized)
acctcctggccatgggggacgtgctgtccacgcacctggacgacgcccggcgccagcacatcgcaggtcagaggagcaccagcctatggccctggacccctggggtattcagcgagttcc

SEQ ID NO: 331594 - DNA, 120 bp, Artificial Sequence
  ENSG00000136830_35 (sequence is synthesized)
gaggacggtgggatggggctgtggttccagcaagaaaaaaccgggaagatcctgacggagttcctccagttctatgaagaccagtatgccctggtctctggcgcatctcttccctcttgt

SEQ ID NO: 331595 - DNA, 120 bp, Artificial Sequence
  ENSG00000136830_36 (sequence is synthesized)
ccatcccaggccacaatgccctgcacaggcatctggagctggccaggggaggggtggccctgagcccattgctttcagccccatgtttgcggagagaccaactaggcttagagctgtgga

SEQ ID NO: 331596 - DNA, 120 bp, Artificial Sequence
  ENSG00000136830_37 (sequence is synthesized)
tggagacctcattgtttgcctttcgcatctccctaagtccttgagagcctcctggaagatgttcagtgaccttccctcgtaaacctgtgggtcagcactgtgttcgtcaggagttactct

SEQ ID NO: 331597 - DNA, 120 bp, Artificial Sequence
  ENSG00000136834_0 (sequence is synthesized)
atgagccctgagaaccagagcagcgtgtccgagttcctcctcctgggcctccccatccggccagagcagcaggccgtgttcttcgccctgttcctgggcatgtacctgaccacggtgctg

SEQ ID NO: 331598 - DNA, 120 bp, Artificial Sequence
  ENSG00000136834_1 (sequence is synthesized)
gggaacctgctcatcatgctgctcatccagctagactctcaccttcacacccccatgtacttcttccttagccacttggccctcactgacatctccttttcatctgtcactgtccctaag

SEQ ID NO: 331599 - DNA, 120 bp, Artificial Sequence
  ENSG00000136834_2 (sequence is synthesized)
atgctgatgaacatgcagactcagcacctagccgtcttttacaagggatgcatttcacagacatattttttcatattttttgctgacttagacagtttccttatcacttcaatggcatat

SEQ ID NO: 331600 - DNA, 120 bp, Artificial Sequence
  ENSG00000136834_3 (sequence is synthesized)
gacaggtatgtggccatctgtcatcctctacattatgccaccatcatgactcagagccagtgtgtcatgctggtggctgggtcctgggtcatcgcttgtgcgtgtgctcttttgcatacc

SEQ ID NO: 331601 - DNA, 120 bp, Artificial Sequence
  ENSG00000136834_4 (sequence is synthesized)
gcccagctttccttctgtgctgaccacatcatccctcactacttctgtgaccttggtgccctgctcaagttgtcctgctcagacacctccctcaatcagttagcaatctttacagcagca

SEQ ID NO: 331602 - DNA, 120 bp, Artificial Sequence
  ENSG00000136834_5 (sequence is synthesized)
ttgacagccattatgcttccattcctgtgcatcctggtttcttatggtcacattggggtcaccatcctccagattccctctaccaagggcatatgcaaagccttgtccacttgtggatcc

SEQ ID NO: 331603 - DNA, 120 bp, Artificial Sequence
  ENSG00000136834_6 (sequence is synthesized)
cacctctcagtggtgactatctattatcggacaattattggtctctattttcttcccccatccagcaacaccaatgacaagaacataattgcttcagtgatatacacagcagtcactccc

SEQ ID NO: 331604 - DNA, 120 bp, Artificial Sequence
  ENSG00000136834_7 (sequence is synthesized)
gtgatatacacagcagtcactcccatgttgaacccattcatttacagtctgagaaataaagacattaagggagccctaagaaaactcttgagtaggtcaggcgcagtggctcatgcctgt

SEQ ID NO: 331605 - DNA, 120 bp, Artificial Sequence
  ENSG00000136839_0 (sequence is synthesized)
atggaatgggaaaaccaaaccattctggtggaattttttctgaagggacattctgttcacccaaggcttgagttactcttttttgtgctaatcttcataatgtatgtggtcatccttctg

SEQ ID NO: 331606 - DNA, 120 bp, Artificial Sequence
  ENSG00000136839_1 (sequence is synthesized)
gggaatggtactctcattttaatcagcatcttggaccctcaccttcacacccctatgtacttctttctggggaacctctccttcttggacatctgctacaccaccacctctattccctcc

SEQ ID NO: 331607 - DNA, 120 bp, Artificial Sequence
  ENSG00000136839_2 (sequence is synthesized)
acactagtgagcttcctttcagaaagaaagaccatttccttttctggctgtgcagtgcagatgttccttggcttggccatggggacaacagagtgtgtgcttctgggcatgatggccttt

SEQ ID NO: 331608 - DNA, 120 bp, Artificial Sequence
  ENSG00000136839_3 (sequence is synthesized)
actacatttgtagtacaattgcctttctgcaggaagaatgtcatcaatcatttctcatgtgaaattctagctgtcatgaagttggcctgtgctgacatctcaggcaatgagttcctcatg

SEQ ID NO: 331609 - DNA, 120 bp, Artificial Sequence
  ENSG00000136839_4 (sequence is synthesized)
cttgtggccacaatattgttcacattgatgccactgctcttgatagttatctcttactcattaatcatttccagcatcctcaagattcactcctctgaggggagaagcaaagctttctct

SEQ ID NO: 331610 - DNA, 120 bp, Artificial Sequence
  ENSG00000136839_5 (sequence is synthesized)
acctgctcagcccatctgactgtggtcataatattctatgggaccatcctcttcatgtatatgaagcccaagtctaaagagacacttaattcagatgacttggatgctaccgacaaaatt

SEQ ID NO: 331611 - DNA, 120 bp, Artificial Sequence
  ENSG00000136839_6 (sequence is synthesized)
atatccatgttctatggggtgatgactcccatgatgaatcctttaatctacagtcttagaaacaaggatgtgaaagaggcagtaaaacacctaccgaacagaaggttctttagcaagtga

SEQ ID NO: 331612 - DNA, 120 bp, Artificial Sequence
  ENSG00000136840_0 (sequence is synthesized)
cccctgcctctggccgcgcggatcagcttccagcccagtcggcccggcccgggggccatggagctccgagcggcggatcgcgagcctcctgcgaaccccagcctgcacgcccggttagca

SEQ ID NO: 331613 - DNA, 120 bp, Artificial Sequence
  ENSG00000136840_1 (sequence is synthesized)
ttcggccgggagatgcggcagtggaatctggaagggcggtgaaaaacctacgtcctgccctcgcccggcctctccattcgtcccccgggtagagaggtgcccggctcccaccccttccca

SEQ ID NO: 331614 - DNA, 120 bp, Artificial Sequence
  ENSG00000136840_2 (sequence is synthesized)
gccccagccctggagacagcagcccctagactactgagggacagcgacagcatgaaggctccgggtcggctcgtgctcatcatcctgtgctccgtggtcttctctgccgtctacatcctc

SEQ ID NO: 331615 - DNA, 120 bp, Artificial Sequence
  ENSG00000136840_3 (sequence is synthesized)
ctgtgctgctgggccggcctgcccctctgcctggccacctgcctggaccaccacttccccacaggctccaggcccactgtgccgggacccctgcacttcagtggatatagcagtgtgcca

SEQ ID NO: 331616 - DNA, 120 bp, Artificial Sequence
  ENSG00000136840_4 (sequence is synthesized)
gatgggaagccgctggtccgcgagccctgccgcagctgtgccgtggtgtccagctccggccaaatgctgggctcaggcctgggtgctgagatcgacagtgccgagtgcgtgttccgcatg

SEQ ID NO: 331617 - DNA, 120 bp, Artificial Sequence
  ENSG00000136840_5 (sequence is synthesized)
aaccaggcgcccaccgtgggctttgaggcggatgtgggccagcgcagcaccctgcgtgtcgtctcacacacaagcgtgccgctgctgctgcgcaactattcacactacttccagaaggcc

SEQ ID NO: 331618 - DNA, 120 bp, Artificial Sequence
  ENSG00000136840_6 (sequence is synthesized)
cgagacacgctctacatggtgtggggccagggcaggcacatggaccgggtgctcggcggccgcacctaccgcacgctgctgcagctcaccaggatgtaccccggcctgcaggtgtacacc

SEQ ID NO: 331619 - DNA, 120 bp, Artificial Sequence
  ENSG00000136840_7 (sequence is synthesized)
cgaccagatcttccaggacgagacgggcaagaaccggaggcagtcgggctccttcctcagcaccggctggttcaccatgatcctcgcgctggagctgtgtgaggagatcgtggtctatgg

SEQ ID NO: 331620 - DNA, 120 bp, Artificial Sequence
  ENSG00000136840_8 (sequence is synthesized)
gatggtcagcgacagctactgcagggagaagagccacccctcagtgccttaccactactttgagaagggccggctagatgagtgtcagatgtacctggcacacgagcaggcgccccgaag

SEQ ID NO: 331621 - DNA, 120 bp, Artificial Sequence
  ENSG00000136840_9 (sequence is synthesized)
cgcccaccgcttcatcactgagaaggcggtcttctcccgctgggccaagaagaggcccatcgtgttcgcccatccgtcctggaggactgagtagcttccgtcgtcctgccagtcgccatg

SEQ ID NO: 331622 - DNA, 120 bp, Artificial Sequence
  ENSG00000136840_10 (sequence is synthesized)
ccgttgcgaggcctccgggatgtcccatcccaagccatcacactccacaaaaacatttaatttatggatcctgcctcctgccacgtgctgggtggacctaaggttccttcccgccccatt

SEQ ID NO: 331623 - DNA, 120 bp, Artificial Sequence
  ENSG00000136840_11 (sequence is synthesized)
ctggcgacacttggagccatctcaggcctcatgacttgaaggggagtggaggggggagccgtgtctcccccctccactccctgagtaattcacggcatttgggggctcaccccacctcca

SEQ ID NO: 331624 - DNA, 120 bp, Artificial Sequence
  ENSG00000136840_12 (sequence is synthesized)
ggtctgtcaagtggcctttgtccctggggctgatggcccccaactcaccagcatcatgaccttgtgccagtcctggtcctccctccccagccgctcctaccaccttttggtgccacactt

SEQ ID NO: 331625 - DNA, 120 bp, Artificial Sequence
  ENSG00000136840_13 (sequence is synthesized)
ctcaggctggccgccctggttggggcagccgagagcctggggttcattggtgaaggggccttggagttgtgactgccggggccgtatcaggaacgtacgggtaaacgtgtgttttctgga

SEQ ID NO: 331626 - DNA, 120 bp, Artificial Sequence
  ENSG00000136840_14 (sequence is synthesized)
accccaggacccactgccacttctgacctccctactgctgagcagagaagggcagaatggcctcaaagtccaaccctgttcttgcagaccgtgtggccccaggcaggtggcatccactct

SEQ ID NO: 331627 - DNA, 120 bp, Artificial Sequence
  ENSG00000136840_15 (sequence is synthesized)
gcagtgtcagtaccttgctatccctgtaaaacggaggtaacgctacgagctcaccaggcaaagcctacgtggaactggggttgtgaagttcagttcagccgctcttgtctttactgcaga

SEQ ID NO: 331628 - DNA, 120 bp, Artificial Sequence
  ENSG00000136840_16 (sequence is synthesized)
agccccgggctgtgagagagagagctggatgtggggggcagttcatctcgactgcctgagtcaaggtctctggttcctcatgggcaggggagcaggtgccaggcagaactccctcccctg

SEQ ID NO: 331629 - DNA, 120 bp, Artificial Sequence
  ENSG00000136840_17 (sequence is synthesized)
actgcgaccagatcttccaggacgagacgggcaagaaccgactggtcatgaggctcagagaggttcacgagcaaatgtgatgcccatagcagagccagggttcaagtggaagatccttgg

SEQ ID NO: 331630 - DNA, 120 bp, Artificial Sequence
  ENSG00000136840_18 (sequence is synthesized)
ctgcctcatgctgtctccccaggcctggtcccttagatgaggagaggacgtggccagagcccccacacccatcatccaggggtttgctcaaaccctgcaaagcgtagctgggcccgagcc

SEQ ID NO: 331631 - DNA, 120 bp, Artificial Sequence
  ENSG00000136840_19 (sequence is synthesized)
ccgctgggtgctgaggaggtgatcaggcctgggtttgtgtgccgctctgcctgtcacccactgctggccttgggctggctctgtcccctccccagcctcccccagagccccccgcaagag

SEQ ID NO: 331632 - DNA, 120 bp, Artificial Sequence
  ENSG00000136840_20 (sequence is synthesized)
gttgaggtgcatagccccgggctggcaaagtaccaagtgctgctggggcctggagctaccacatggcctcttgttgacagcgtccccctgtccccccgccacccccaggaggcagtcggg

SEQ ID NO: 331633 - DNA, 120 bp, Artificial Sequence
  ENSG00000136842_0 (sequence is synthesized)
cccgctgcccgccggagcaccgcggcctccgcccgcgtccatctgcccgccgcccgcgcctgttccgcagcccgcgtccgcgccggccccacagctctgcgtccgggtattactcagcac

SEQ ID NO: 331634 - DNA, 120 bp, Artificial Sequence
  ENSG00000136842_1 (sequence is synthesized)
ccacagctctgcgtccgggtattactcagcacagaaattcaggagacacagacaagttcttccacgatgtcgtacagacgagaactagagaaataccgtgacctggatgaagatgaaatc

SEQ ID NO: 331635 - DNA, 120 bp, Artificial Sequence
  ENSG00000136842_2 (sequence is synthesized)
cttggagccctaacagaggaagagctgaggaccctggaaaatgagctggatgagctggaccctgataatgcactgctgcctgcaggcctgaggcagaaggatcagaccaccaaggcgccc

SEQ ID NO: 331636 - DNA, 120 bp, Artificial Sequence
  ENSG00000136842_3 (sequence is synthesized)
acgggcccctttaaaagagaggagctcttggatcacttggaaaagcaagcaaaggagtttaaggaccgagaagatctggtcccctacacaggggaaaaacgaggaaaggtctgggttcct

SEQ ID NO: 331637 - DNA, 120 bp, Artificial Sequence
  ENSG00000136842_4 (sequence is synthesized)
aagcagaagccactggatcctgtgctggaaagtgtgacgctggaaccggagctggaggaagccttggcaaatgcttcagatgcagaactctgtgacattgcagcgatcctgggcatgcac

SEQ ID NO: 331638 - DNA, 120 bp, Artificial Sequence
  ENSG00000136842_5 (sequence is synthesized)
acgctcatgagtaaccagcagtactaccaggccctgagcagcagctccatcatgaacaaggaggggctcaacagcgtgattaaacccacacaatacaagcctgtgcccgacgaagaacca

SEQ ID NO: 331639 - DNA, 120 bp, Artificial Sequence
  ENSG00000136842_6 (sequence is synthesized)
aattcaacagacgtagaggaaacgctggaacggataaagaacaacgacccaaaacttgaagaagttaacctcaataatatccggaatatccccatccccaccctcaaggcatatgcagaa

SEQ ID NO: 331640 - DNA, 120 bp, Artificial Sequence
  ENSG00000136842_7 (sequence is synthesized)
gccctgaaagaaaactcatatgtgaagaagttcagcatcgtggggacacggagtaatgaccccgtggcgtatgcccttgctgagatgctcaaggagaacaaggtgttgaagacactgaat

SEQ ID NO: 331641 - DNA, 120 bp, Artificial Sequence
  ENSG00000136842_8 (sequence is synthesized)
gtggaatccaacttcatttctggagctgggattctgcgcctggtagaagccctcccatacaacacttctctggtggaaatgaaaattgacaaccagagccagcccctgggcaacaaagtg

SEQ ID NO: 331642 - DNA, 120 bp, Artificial Sequence
  ENSG00000136842_9 (sequence is synthesized)
gaaatggagattgtgagcatgttggaaaaaaacgcaacacttctcaaattcggctaccactttacccagcaaggaccccggcttcgggcatccaacgcaatgatgaacaacaatgacctt

SEQ ID NO: 331643 - DNA, 120 bp, Artificial Sequence
  ENSG00000136842_10 (sequence is synthesized)
gtgaggaagaggaggcttgcggacctgactgggcccatcattcccaagtgccggagtggtgtctagtgtgtggcggtggagtccatgcctttgaactggatgtgttctattgatgacctg

SEQ ID NO: 331644 - DNA, 120 bp, Artificial Sequence
  ENSG00000136842_11 (sequence is synthesized)
tgctctgcaggggaaaccagaaggcaaaatgctggcagcatgaaacccttttgtggttcagttctttatgcactaaggttttaggttgactagtggttgtagttgaaaattttataaaat

SEQ ID NO: 331645 - DNA, 120 bp, Artificial Sequence
  ENSG00000136842_12 (sequence is synthesized)
accgttaatgtgaagtttttctttagtcacagaagttgaatctggttattatttaaaaactagaagcccccaaaccagcagatcttactgaagatgatgttccagcagcagcgacttagc

SEQ ID NO: 331646 - DNA, 120 bp, Artificial Sequence
  ENSG00000136842_13 (sequence is synthesized)
ggcacactcttccacatgcttttgaagtattataaaacactttattacaaatttgtcttagctattagcaaataaaactgattatcattctttattaaccctccttggaattttgaaaac

SEQ ID NO: 331647 - DNA, 120 bp, Artificial Sequence
  ENSG00000136842_14 (sequence is synthesized)
ctcgattaaagttgccaaattgattactggatccagaacacaattttcccctcagaacagatagacagactgaagccactgaactctgccaggagtcaacatgagattccttttgctgga

SEQ ID NO: 331648 - DNA, 120 bp, Artificial Sequence
  ENSG00000136842_15 (sequence is synthesized)
tatgcagaaatgataggaaaaaaaccaatggtgaaatttcaagtttcaaaaaccaacctttcattaccaatcccaggcaacaaacatgtccctgagtgttctttaagaacatttgggatt

SEQ ID NO: 331649 - DNA, 120 bp, Artificial Sequence
  ENSG00000136842_16 (sequence is synthesized)
tatgtacaatttaatactggagttagaactttttccttattgaatgccaaccttatgatggatgtgaaaatctacggccaaatacttttgaaaacacctttctatattgcacagtgggca

SEQ ID NO: 331650 - DNA, 120 bp, Artificial Sequence
  ENSG00000136842_17 (sequence is synthesized)
aatggcttatgtgaggtaagacactagagggataaatttccagatcaacatggctatggtatttagtaatggcccagcttagagacttcagctactgatctcatcacttattagacaaat

SEQ ID NO: 331651 - DNA, 120 bp, Artificial Sequence
  ENSG00000136842_18 (sequence is synthesized)
tgctgctgaccttacgcctgtatattaagcctccgcaggatgccggacaatggtgaagaaactccagatatcaaggaattgggaaatcctggccaaaccaccccaagatgattacactga

SEQ ID NO: 331652 - DNA, 120 bp, Artificial Sequence
  ENSG00000136842_19 (sequence is synthesized)
aatgtagtattagtactgctgccagatctctttttaacatcatgtgcgtctcttgggatccagcaaaagtgttaagccacaatgcccttgtgccttttaatataccacagtgccagttaa

SEQ ID NO: 331653 - DNA, 120 bp, Artificial Sequence
  ENSG00000136842_20 (sequence is synthesized)
actaatatttttgtttgttgcttttgggagttattttcattagtgatttcagcaaatctcatgataaaggacaaggtcaagaactccagagcactgagcagagaggctggtgatgaaaag

SEQ ID NO: 331654 - DNA, 120 bp, Artificial Sequence
  ENSG00000136842_21 (sequence is synthesized)
gtgaaggcctgcgcactgaactgtaaggcagtgggcagtacagggtaactggaggcggggccagggcctcagcgctatggaagagtgtccactgaggctgcacatggcccaggagtggca

SEQ ID NO: 331655 - DNA, 120 bp, Artificial Sequence
  ENSG00000136842_22 (sequence is synthesized)
ccatgttgcagggacaaccatccccatttggcttctccttaaaacacaattgcagctgcattctgcatcgctgaaaactgcaatataatattaaatctgttggtctatgcatggctgcgt

SEQ ID NO: 331656 - DNA, 120 bp, Artificial Sequence
  ENSG00000136842_23 (sequence is synthesized)
atgtgtttcttggaacctgtgtgacagggacatgtgcctggcacactggccagaagactgggcagccaccatggcagtgctggatgacctcagtaagaatgtgtcatgtattccaggtgc

SEQ ID NO: 331657 - DNA, 120 bp, Artificial Sequence
  ENSG00000136842_24 (sequence is synthesized)
tgatctaaaaactgtggctcaaatgtcaccgagcttatatgaagctcccagagagaacatttaaaagctcagagagtaagtgctggggaaagcagagctatcagaggaaatctctcatag

SEQ ID NO: 331658 - DNA, 120 bp, Artificial Sequence
  ENSG00000136842_25 (sequence is synthesized)
aaacgaaaccaaaccaacagaaaatgaagaaggccacatctttaaggccacctctgcctctatcagatgagctgctggtctagatcaggggctggcaaacttttctgtaaaaggccagac

SEQ ID NO: 331659 - DNA, 120 bp, Artificial Sequence
  ENSG00000136842_26 (sequence is synthesized)
agtaaaaatttccgattttgcaggccacatagtgtctgttgcaactattcaactctgccatagatcatgtgtaaaggaatgggtgtggctgttcaataaactatacagttgacccttgaa

SEQ ID NO: 331660 - DNA, 120 bp, Artificial Sequence
  ENSG00000136842_27 (sequence is synthesized)
gtgccaggtcagagctgcaactctgtgctacgtttctgtgtggctttcttgaaactacttctctttatttttgttggcgtggctatttattgttatctgtaacgacgcaatatgctgccg

SEQ ID NO: 331661 - DNA, 120 bp, Artificial Sequence
  ENSG00000136842_28 (sequence is synthesized)
aagtctgggaaggagaggggagctgtaagtctacaccagtgttaactggctaaccttggatgcctgtcatttgatgttggacatttgaaagatggcagcatctctggggaaggagggact

SEQ ID NO: 331662 - DNA, 120 bp, Artificial Sequence
  ENSG00000136848_0 (sequence is synthesized)
ggaatacaaaaggaggaacccagacgctcatggagacagcctcggttcataaatcaggtggggccaggggctgggggcccacacgccatggagcccgactcccttctggaccaagacgac

SEQ ID NO: 331663 - DNA, 120 bp, Artificial Sequence
  ENSG00000136848_1 (sequence is synthesized)
tcctacgagtcgcctcaagaaaggccgggctctcggcgcagcctgcctggcagcctttccgagaagagccccagcatggagccctcggccgccacgccgttccgggtcacgggcttcctc

SEQ ID NO: 331664 - DNA, 120 bp, Artificial Sequence
  ENSG00000136848_2 (sequence is synthesized)
agccgccgcctcaagggctccatcaagcgcaccaagagccagcccaagctggaccgcaaccacagcttccgccacatcctgccggggttccggagcgccgccgccgccgccgcggacaat

SEQ ID NO: 331665 - DNA, 120 bp, Artificial Sequence
  ENSG00000136848_3 (sequence is synthesized)
gagaggtcccatctgatgccgaggctgaaggagtctcgctcccacgagtccctgctcagccccagcagtgcggtggaggcgctggacctcagcatggaggaagaggtggtcatcaagccc

SEQ ID NO: 331666 - DNA, 120 bp, Artificial Sequence
  ENSG00000136848_4 (sequence is synthesized)
gtgcacagcagcatccttggccaggactactgcttcgaggtgacgacgtcatcaggaagcaagtgcttttcctgccggtctgcagctgagcgggataagtggatggagaacctccggcga

SEQ ID NO: 331667 - DNA, 120 bp, Artificial Sequence
  ENSG00000136848_5 (sequence is synthesized)
gcggtgcatcccaacaaggacaacagccggcgtgtggagcacatcctgaagctgtgggtgatcgaggccaaggacctgccagccaagaagaagtacctgtgcgagctgtgcctggacgat

SEQ ID NO: 331668 - DNA, 120 bp, Artificial Sequence
  ENSG00000136848_6 (sequence is synthesized)
gtgctctatgcccgcaccacgggcaagctcaagacggacaatgttttctggggcgagcacttcgagttccacaacttgccgcctctgcgcacggtcactgtccacctgtaccgggagacc

SEQ ID NO: 331669 - DNA, 120 bp, Artificial Sequence
  ENSG00000136848_7 (sequence is synthesized)
gacaagaagaagaagaaggagcgcaacagttacctgggcctggtgagcctacctgctgcctcggtggccgggcggcagttcgtggagaagtggtacccggtggtgacgcccaaccccaag

SEQ ID NO: 331670 - DNA, 120 bp, Artificial Sequence
  ENSG00000136848_8 (sequence is synthesized)
ggcggcaagggccctggacccatgatccgcatcaaggcgcgctaccaaaccatcaccatcctgcccatggagatgtacaaagagttcgctgagcacatcaccaaccactacctggggctg

SEQ ID NO: 331671 - DNA, 120 bp, Artificial Sequence
  ENSG00000136848_9 (sequence is synthesized)
tgtgcagccctcgagcccatcctcagtgccaagaccaaggaggagatggcatctgccctggtgcacatcctgcagagcacgggcaaggtgaaggacttcctgacagacctgatgatgtca

SEQ ID NO: 331672 - DNA, 120 bp, Artificial Sequence
  ENSG00000136848_10 (sequence is synthesized)
gaggtggaccgctgcggggacaacgagcacctcatcttccgggagaacacactggccaccaaggccattgaggagtacctcaagctagtgggccagaagtacctgcaggacgccctaggt

SEQ ID NO: 331673 - DNA, 120 bp, Artificial Sequence
  ENSG00000136848_11 (sequence is synthesized)
gagttcatcaaagcgctgtatgagtcagatgagaactgcgaagtggatcccagcaagtgctcggccgctgacctcccagagcaccagggcaacctcaagatgtgctgcgagctggccttc

SEQ ID NO: 331674 - DNA, 120 bp, Artificial Sequence
  ENSG00000136848_12 (sequence is synthesized)
tgcaagatcatcaactcctactgtgtcttcccacgggagttgaaagaggtgtttgcctcgtggaggcaggagtgcagcagtcgcggccgcccggacatcagtgagcggctcatcagcgcc

SEQ ID NO: 331675 - DNA, 120 bp, Artificial Sequence
  ENSG00000136848_13 (sequence is synthesized)
tccctcttcctgcgcttcctctgcccagccatcatgtcgccctcactcttcaacctgctgcaggagtaccctgatgaccgcactgcccgcaccctcaccctcatcgccaaggtcacccag

SEQ ID NO: 331676 - DNA, 120 bp, Artificial Sequence
  ENSG00000136848_14 (sequence is synthesized)
aacctggccaactttgccaaatttggcagcaaggaggaatacatgtccttcatgaaccagttcctagagcatgagtggaccaacatgcagcgcttcctgctggagatctccaaccccgag

SEQ ID NO: 331677 - DNA, 120 bp, Artificial Sequence
  ENSG00000136848_15 (sequence is synthesized)
accctctccaatacagccggcttcgagggctacatcgacctgggccgcgagctctccagcctgcactcactgctctgggaggccgtcagccagctggagcagagcatagtatccaaactg

SEQ ID NO: 331678 - DNA, 120 bp, Artificial Sequence
  ENSG00000136848_16 (sequence is synthesized)
ggacccctgcctcggatcctgagggacgtccacacagcactgagcaccccaggtagcgggcagctcccagggaccaatgacctggcctccacaccgggctctggcagcagcagcatctca

SEQ ID NO: 331679 - DNA, 120 bp, Artificial Sequence
  ENSG00000136848_17 (sequence is synthesized)
gctgggctgcagaagatggtgattgagaacgatctttccggtctgatagatttcacccggttaccgtctccaacccccgaaaacaaggacttgttttttgtcacaaggtcctccggggtc

SEQ ID NO: 331680 - DNA, 120 bp, Artificial Sequence
  ENSG00000136848_18 (sequence is synthesized)
cagccctcacctgcccgcagctcgagttactcggaagccaacgagcctgatcttcagatggccaacggtggcaagagcctctccatggtggacctccaggacgcccgcacgctggatggg

SEQ ID NO: 331681 - DNA, 120 bp, Artificial Sequence
  ENSG00000136848_19 (sequence is synthesized)
gaggcaggctccccggcgggccccgacgtcctccccacagatgggcaggccgctgcagctcagctggtggccgggtggccggcccgggcaaccccagtgaacctggcagggctggccacg

SEQ ID NO: 331682 - DNA, 120 bp, Artificial Sequence
  ENSG00000136848_20 (sequence is synthesized)
gtgcggcgggcaggccagacaccaaccacaccaggcacctccgagggcgcgccaggccggccccagctgttggcaccgctctccttccagaaccctgtgtaccagatggcggctggcctg

SEQ ID NO: 331683 - DNA, 120 bp, Artificial Sequence
  ENSG00000136848_21 (sequence is synthesized)
ccgctgtcaccccgtggccttggcgactcaggctctgagggccacagctccctgagctcacacagcaacagcgaggagttggcggctgctgccaagctgggaagtttcagcactgccgcg

SEQ ID NO: 331684 - DNA, 120 bp, Artificial Sequence
  ENSG00000136848_22 (sequence is synthesized)
cccacggtgccacggcagaacagtgctggcccccagaggaggatcgaccagcctccgcccccacccccgccgccacctcctgccccccgcggccggacgccccccaacctgctgagcacc

SEQ ID NO: 331685 - DNA, 120 bp, Artificial Sequence
  ENSG00000136848_23 (sequence is synthesized)
ctgcagtacccaagaccctcaagcggaaccctggcgtcggcctcacctgattgggtgggccccagtacccgcctgaggcagcagtcctcttcctccaagggggacagcccagaactgaag

SEQ ID NO: 331686 - DNA, 120 bp, Artificial Sequence
  ENSG00000136848_24 (sequence is synthesized)
ccacgggcagtgcacaagcagggcccttcacctgtgagccccaatgccctggaccgcacagccgcttggctcttgaccatgaacgcgcagttgttagaagacgagggcctgggcccagac

SEQ ID NO: 331687 - DNA, 120 bp, Artificial Sequence
  ENSG00000136848_25 (sequence is synthesized)
cccccccacagggataggctaaggagtaaggacgagctcagccaagcagaaaaggacctggcggtgctgcaggacaagctgcgaatctccaccaagaagctggaggagtatgagaccctg

SEQ ID NO: 331688 - DNA, 120 bp, Artificial Sequence
  ENSG00000136848_26 (sequence is synthesized)
ttcaagtgccaggaggagacgacgcagaagctggtgctggagtaccaggcacggctggaggagggcgaggagcggctgcggcggcagcaggaggacaaggacatccagatgaagggcatc

SEQ ID NO: 331689 - DNA, 120 bp, Artificial Sequence
  ENSG00000136848_27 (sequence is synthesized)
atcagcaggttgatgtccgtggaggaagaactgaagaaggaccacgcagagatgcaagcggctgtggactccaaacagaagatcattgatgcccaggagaagcgcattgcctcgttggat

SEQ ID NO: 331690 - DNA, 120 bp, Artificial Sequence
  ENSG00000136848_28 (sequence is synthesized)
gccgccaatgcccgcctcatgagtgccctgacccagctgaaagagagtatgcattagaaacaaaagcccgcttgctcgcttgctggaacacaggggccttttaagttgagcgtgcgcact

SEQ ID NO: 331691 - DNA, 120 bp, Artificial Sequence
  ENSG00000136848_29 (sequence is synthesized)
gcatgggaaatagcggccctggaggatgttagacttgctccctctccaagacagcagcagcctgcacctgccccgtgtgtgtggccggcctcctcctcacccttcccggcccccggccaa

SEQ ID NO: 331692 - DNA, 120 bp, Artificial Sequence
  ENSG00000136848_30 (sequence is synthesized)
ggacccaggcgctgcatacaggggaggggcgcaccccacagctggggccggttttcctcagctctaggctgttctgtagcttatctgcccctcccccactttcaagacagatgagcagga

SEQ ID NO: 331693 - DNA, 120 bp, Artificial Sequence
  ENSG00000136848_31 (sequence is synthesized)
gcttgggtctctctcggcccctgtctgttcccagcccctgcagattctgagcaaaggccctgggtaagaagggtgggagtggggcctttgccagcagagccagggcagggcgagctgcag

SEQ ID NO: 331694 - DNA, 120 bp, Artificial Sequence
  ENSG00000136848_32 (sequence is synthesized)
gaatcacccctctgcccctgcagctggaatgtgccacagaggccccacctgaagggtggatgtgctggaggggtggcccagagccatactgcgtccaccctgagctcggggacaggtgac

SEQ ID NO: 331695 - DNA, 120 bp, Artificial Sequence
  ENSG00000136848_33 (sequence is synthesized)
agtggctgctctgggaaggggcttttagatgtaacctacaattcagttaggctagagacagatgctggtggaggaagggctgggccaccagggatcacagaccacaggaagatgggaggt

SEQ ID NO: 331696 - DNA, 120 bp, Artificial Sequence
  ENSG00000136848_34 (sequence is synthesized)
ggaagcagaggccctgcccccaccccttcctgtctcactcttctgtcttgtccccacccatgcgccttcgtgcctgagaccagggtggccacacaggcagggcctggctccagtctcatc

SEQ ID NO: 331697 - DNA, 120 bp, Artificial Sequence
  ENSG00000136848_35 (sequence is synthesized)
ctcccattgcccagtgagccctgctcttctctccccagccccctcccaccgctgcctcgtagagtgacctcggacagagcccccctagcaatacagggaggctcccggggcctggacagg

SEQ ID NO: 331698 - DNA, 120 bp, Artificial Sequence
  ENSG00000136848_36 (sequence is synthesized)
cgggctcggaggctacccgctgtggccggtgccagctgcccttgcagggtgggtgagctctcaggccgagagccttatttacctagtgcaaaaactgtaaaagtgtacagactcttcaca

SEQ ID NO: 331699 - DNA, 120 bp, Artificial Sequence
  ENSG00000136848_37 (sequence is synthesized)
gatttttatcttaattgcaagtctgccgattttgtaaatgttcttggtgtttgactgtaatgtaactatctcacctaatggttgtacatatcctttggtcctggtgctgccgagggctgg

SEQ ID NO: 331700 - DNA, 120 bp, Artificial Sequence
  ENSG00000136848_38 (sequence is synthesized)
ccgggactgctgctctcccaagggttttattttatttctgaatctagagaacagtattgggcaggaggaaaaggcttggtgtctgcggggggtgtcttccctgcctgtggcatttgtgtg

SEQ ID NO: 331701 - DNA, 120 bp, Artificial Sequence
  ENSG00000136848_39 (sequence is synthesized)
ttggctttgcagctgctgtctgagtagtggccactggggtgccttcactgggccagtcaacggggggctcctgcccaggccacagagaacctgagttcccgggagctgggccctgcctgc

SEQ ID NO: 331702 - DNA, 120 bp, Artificial Sequence
  ENSG00000136848_40 (sequence is synthesized)
agccagggctggggttgccagaggccctggagggaaggacagtccctgctggggaagaacagccccggggccccctggtcaccgagactcagcctctgctggagaaagccacgccctccc

SEQ ID NO: 331703 - DNA, 120 bp, Artificial Sequence
  ENSG00000136848_41 (sequence is synthesized)
tgctagcacagaggcctgactgacttttttgcttaacttccatgttctgggtgatggaaactgccaaacctcctgtcagtgaggactctttccgactgcccagaaagtgggggtggagga

SEQ ID NO: 331704 - DNA, 120 bp, Artificial Sequence
  ENSG00000136848_42 (sequence is synthesized)
ccgaggctacagctccacacgccccggtcccccagagcatctgccccaggtacacctccccctgcgccccgcacgactgcgggagccagactgtccagggaaacagcctctctcttttct

SEQ ID NO: 331705 - DNA, 120 bp, Artificial Sequence
  ENSG00000136848_43 (sequence is synthesized)
acacactcagccacaaagccccccagctcccacaccgcgtcccagctcccctcttttgtaagtatgtgaaaaggaaaaaatgcaaacgttggagtttgggctggagctcctccctccagc

SEQ ID NO: 331706 - DNA, 120 bp, Artificial Sequence
  ENSG00000136848_44 (sequence is synthesized)
tgcgacttttaactatgtaataatgtacagaggaagctgttggtgttctaagactctgtgtggctgtgcaatttctgtacatttgcaattagaaatattaaagatttatttagctatttt

SEQ ID NO: 331707 - DNA, 120 bp, Artificial Sequence
  ENSG00000136848_45 (sequence is synthesized)
tgttcctcttctttcgtgttgtgtcagaagccatgatttccagtcttctcatctggaagatgaaggaaaagatagacccgaccccacagggttctgaggctcaaactgaaagcctggtgg

SEQ ID NO: 331708 - DNA, 120 bp, Artificial Sequence
  ENSG00000136848_46 (sequence is synthesized)
agcccgtaacggcatctcccccaccaaccccaccaaattgcagattactgagaacggcgagttcagaaacagcagcaattgttaacctgcctgaggagggaggaagctacccaaggagag

SEQ ID NO: 331709 - DNA, 120 bp, Artificial Sequence
  ENSG00000136848_47 (sequence is synthesized)
ggggactatggtggccaagggcagggtctcggcctggggaggcacccacggttgcagccccagcgcgggtgtcaggaggccgagcctcccctccctgccgctgtccaggaggcggccgca

SEQ ID NO: 331710 - DNA, 120 bp, Artificial Sequence
  ENSG00000136848_48 (sequence is synthesized)
gggagcgggagggggcaggaggcggaggaggagtttgagcgactttgtggggcagccagggcctcggcggccgctcgggcgagcgcgggagaacgcgtgggcgcccgccgggctgtccgg

SEQ ID NO: 331711 - DNA, 120 bp, Artificial Sequence
  ENSG00000136848_49 (sequence is synthesized)
ccggagcggccgatggggcccgtgtgagcgcgcccaggcccggcccggtgcccggcgggcggcagcatgtccgcgggcggcagcgccaggaagagcaccgggaggtcctcctactactac

SEQ ID NO: 331712 - DNA, 120 bp, Artificial Sequence
  ENSG00000136848_50 (sequence is synthesized)
ctgccaaaaatatgtctgttggttcctgaatgtggtgtgtccttgtcctcctggatctggccgagtgcatgtgtccccccacacctgtgccagggagggggcttcctggaggggggattc

SEQ ID NO: 331713 - DNA, 120 bp, Artificial Sequence
  ENSG00000136848_51 (sequence is synthesized)
aagggctaggggcctacacctgtggcttcccctcgcctccttggggggcccgggactccctggcagccaggccctgtcatgtgggacctggcacttggcagatcagttggcaggcaggaa

SEQ ID NO: 331714 - DNA, 120 bp, Artificial Sequence
  ENSG00000136848_52 (sequence is synthesized)
gataggaggacacagagcaggaggtcagtgtcccctgcctgtctccatccgaagcacctgccactgcatgcagcctgttgggaccttcctggctgtgaggaactgaggattcctacccac

SEQ ID NO: 331715 - DNA, 120 bp, Artificial Sequence
  ENSG00000136848_53 (sequence is synthesized)
ccaccccctctgaacctgtccccagagcaccacctgctaccttcttccctgccttagttgtattgccagatagacccagtgagggccatggctttttcttgtgagctcttgtccctgtgg

SEQ ID NO: 331716 - DNA, 120 bp, Artificial Sequence
  ENSG00000136848_54 (sequence is synthesized)
ggaggacccacagcttcccacacctcccacacaggcccaggctgatgctctagggctcccagaagccagagatctgggcggatctggccagatggctctgagcactgtatctgccttctc

SEQ ID NO: 331717 - DNA, 120 bp, Artificial Sequence
  ENSG00000136848_55 (sequence is synthesized)
ctggggcccagcacacccagggcacagtggtcctgtagggagtgccacctggtgctcaccctgaaagaaaaggtgatccttcctctgagtgatggtttaaaaaaagattctaacgcctgc

SEQ ID NO: 331718 - DNA, 120 bp, Artificial Sequence
  ENSG00000136848_56 (sequence is synthesized)
tcctccctctttcttgacccagacctctgtgctctggcctgcaccctgcccagaggccccagagggcgacttgccatggctggaagcgatagtttgctttcaggagtgtttctcgtcttc

SEQ ID NO: 331719 - DNA, 120 bp, Artificial Sequence
  ENSG00000136848_57 (sequence is synthesized)
ttggacctggaggttgtgccatgtggttacctgcatggaagacggtaattttccacttgtttcctgaaggacacggaaacctttagatgttgtcatcactgtgtttatttaagtcatttt

SEQ ID NO: 331720 - DNA, 120 bp, Artificial Sequence
  ENSG00000136848_58 (sequence is synthesized)
tgaaatttcagcttggaagacacagattcagcacgtgcctttcgggaaggggaagccctcctaggctcacctcttagatgccggcccggccgagaggccccctaatctgtccagaagagc

SEQ ID NO: 331721 - DNA, 120 bp, Artificial Sequence
  ENSG00000136848_59 (sequence is synthesized)
tgcctgggtgagcaccacccttgggaatgggcctctgtggccttggacttcttagtgacaacttcggcaagatcctgggccgggccggaggggctgctcactggagacctggccatcttc

SEQ ID NO: 331722 - DNA, 120 bp, Artificial Sequence
  ENSG00000136848_60 (sequence is synthesized)
cgaattaactggttctgtctgtacgactgggagagcagctctcgctaaaaatagcgccctgcccagctcgacctgcgagccgccgttggattctgagccgggacggctcaaggagccggg

SEQ ID NO: 331723 - DNA, 120 bp, Artificial Sequence
  ENSG00000136848_61 (sequence is synthesized)
cgctggccgaggcactgccgaggccgtccgagatgggagctggcggtgcctccttccgcgccctcgcctgggcctccctgcccctgctggggcctccagcctgcgcgctctgcgaggaca

SEQ ID NO: 331724 - DNA, 120 bp, Artificial Sequence
  ENSG00000136848_62 (sequence is synthesized)
cgctctgctgcggagagtcgcctcaagaaaggccgggctctcggcgcagcctgcctggcagcctttccgagaagagccccagcatggagccctcggccgccacgccgttccgggtcacgg

SEQ ID NO: 331725 - DNA, 120 bp, Artificial Sequence
  ENSG00000136848_63 (sequence is synthesized)
tttcctgggccctgggcaggggctgccccatccctgtatcccccggtccttccttccccacctggagtgagtgggtcacagctagtgggttagctggctgtggacctttccctgctgccc

SEQ ID NO: 331726 - DNA, 120 bp, Artificial Sequence
  ENSG00000136848_64 (sequence is synthesized)
ggctgctgtggacctttccccctgcccggctgctgtggacctttccctgctgcccggctgctgtggacctttccccctgcccggctgctatggacctttccctgctgcccagctgctgtg

SEQ ID NO: 331727 - DNA, 120 bp, Artificial Sequence
  ENSG00000136848_65 (sequence is synthesized)
ggccacccctggacgatggaaaggccaagccaaggctggtgcagttagtcttgaactccgctgaactgggttcacatctgactcggccacttgctatgcatgtgatcttgggcaggtcac

SEQ ID NO: 331728 - DNA, 120 bp, Artificial Sequence
  ENSG00000136848_66 (sequence is synthesized)
ttgttcagtggagggtgctgctttggtctagacaggagaaggccagtggaactcccattcccctctgccctcccatgccctggccaagctcctctgtagcagcggagtccagggcaggtc

SEQ ID NO: 331729 - DNA, 120 bp, Artificial Sequence
  ENSG00000136848_67 (sequence is synthesized)
accctagccatggccttggctgtcccgtgtgtgacctggatgtcatggtgccacctccttcctgggagcagtaaggattccatgccatggaggacagatgaggaaatggacccaagaggt

SEQ ID NO: 331730 - DNA, 120 bp, Artificial Sequence
  ENSG00000136848_68 (sequence is synthesized)
ttgggtgtcgcagcaacactagatcaaagatgggatgctggggcacatctcttgccctccctggcaggcctcagtttctcccctgtaaagcggggtgaggtcagcatctgcctcttgggc

SEQ ID NO: 331731 - DNA, 120 bp, Artificial Sequence
  ENSG00000136848_69 (sequence is synthesized)
tcgtggagattctgtgaggtgacttgtgtggtggttcatgtgacgcatggcccaaggtcccatctgatgccgaggctgaaggagtctcgctcccacgagtccctgctcagccccagcagt

SEQ ID NO: 331732 - DNA, 120 bp, Artificial Sequence
  ENSG00000136848_70 (sequence is synthesized)
actagccatgattagtcccagcggacagggctggagtggcatgtctgggatcagggcggggctaggctggccggggccagccaggagcagcggacagcaggaaggctcgcccggccactc

SEQ ID NO: 331733 - DNA, 80 bp, Artificial Sequence
  ENSG00000136854_0 (sequence is synthesized)
cgccgcgcccccgcgcccagtccgcgcgtcagtcggtccctagcgcggctgcggggcggagagctgcggctggcccagcg

SEQ ID NO: 331734 - DNA, 120 bp, Artificial Sequence
  ENSG00000136854_1 (sequence is synthesized)
cgcccacctgaggaggcggcggggtccgcaggcgtcgcgggacgaggagatcggagccgggagactcgcgcagcgccatggcccccattggcctcaaagctgttgtcggagagaagatta

SEQ ID NO: 331735 - DNA, 120 bp, Artificial Sequence
  ENSG00000136854_2 (sequence is synthesized)
tgcatgatgtgataaagaaggtcaagaagaagggggaatggaaggtgctggtggtggatcagttaagcatgaggatgctgtcctcctgctgcaagatgacagacatcatgaccgagggca

SEQ ID NO: 331736 - DNA, 120 bp, Artificial Sequence
  ENSG00000136854_3 (sequence is synthesized)
taacgattgtggaagatatcaataagcgcagagagccgctccccagcctggaggctgtgtatctcatcactccatccgagaagtccgtccactctctcatcagtgactttaaggacccgc

SEQ ID NO: 331737 - DNA, 120 bp, Artificial Sequence
  ENSG00000136854_4 (sequence is synthesized)
cgactgctaaataccgggctgcacacgtcttcttcactgactcttgtccagatgccctgtttaatgaactggtaaaatcccgagcagccaaagtcatcaaaactctgacggaaatcaata

SEQ ID NO: 331738 - DNA, 120 bp, Artificial Sequence
  ENSG00000136854_5 (sequence is synthesized)
ttgcatttctcccgtatgaatcccaggtctattccttggactctgctgactctttccaaagcttctacagtccccacaaggctcagatgaagaatcctatactggagcgcctggcagagc

SEQ ID NO: 331739 - DNA, 120 bp, Artificial Sequence
  ENSG00000136854_6 (sequence is synthesized)
agatcgcgaccctttgtgccaccctgaaggagtacccggctgtgcggtatcggggggaatacaaggacaatgccctgctggctcagctaatccaggacaagctcgatgcctataaagctg

SEQ ID NO: 331740 - DNA, 120 bp, Artificial Sequence
  ENSG00000136854_7 (sequence is synthesized)
atgatccaacaatgggggagggcccagacaaggcacgctcccagctcctgatcctggatcgaggctttgaccccagctcccctgtgctccatgaattgacttttcaggctatgagttatg

SEQ ID NO: 331741 - DNA, 120 bp, Artificial Sequence
  ENSG00000136854_8 (sequence is synthesized)
atctgctgcctatcgaaaatgatgtatacaagtatgagaccagcggcatcggggaggcacgggtgaaggaggtgctcctggacgaggacgacgacctgtggatagcactgcgccacaagc

SEQ ID NO: 331742 - DNA, 120 bp, Artificial Sequence
  ENSG00000136854_9 (sequence is synthesized)
acatcgcagaggtgtcccaggaagtcacccggtctctgaaagatttttcttctagcaagagaatgaatactggagagaagaccaccatgcgggacctgtcccagatgctgaagaagatgc

SEQ ID NO: 331743 - DNA, 120 bp, Artificial Sequence
  ENSG00000136854_10 (sequence is synthesized)
ctcagtaccagaaagagctcagcaagtactccacccacctgcaccttgctgaggactgtatgaagcattaccaaggcaccgtagacaaactctgccgagtggagcaggacctggccatgg

SEQ ID NO: 331744 - DNA, 120 bp, Artificial Sequence
  ENSG00000136854_11 (sequence is synthesized)
gcacagatgctgagggagagaagatcaaggaccctatgcgagccatcgtccccattctgctggatgccaatgtcagcacttatgacaaaatccgcatcatccttctctacatctttttga

SEQ ID NO: 331745 - DNA, 120 bp, Artificial Sequence
  ENSG00000136854_12 (sequence is synthesized)
agaatggcatcacggaggaaaacctgaacaaactgatccagcacgcccagatacccccggaggatagtgagatcatcaccaacatggctcacctcggcgtgcccatcgtcaccgattcca

SEQ ID NO: 331746 - DNA, 120 bp, Artificial Sequence
  ENSG00000136854_13 (sequence is synthesized)
cgctgcgtcgccggagcaagccggagcggaaggaacgcatcagcgagcagacctaccagctctcacggtggactccgattatcaaggacatcatggaggacactattgaggacaaacttg

SEQ ID NO: 331747 - DNA, 120 bp, Artificial Sequence
  ENSG00000136854_14 (sequence is synthesized)
acaccaaacactacccttatatctctacccgttcctctgcctccttcagcaccaccgccgtcagcgcccgctatgggcactggcataagaacaaggccccaggcgagtaccgcagtggcc

SEQ ID NO: 331748 - DNA, 120 bp, Artificial Sequence
  ENSG00000136854_15 (sequence is synthesized)
cccgcctcatcattttcatccttgggggtgtgagcctgaatgagatgcgctgcgcctacgaggtgacccaggccaacggaaagtgggaggtgctgataggttctactcacattcttactc

SEQ ID NO: 331749 - DNA, 120 bp, Artificial Sequence
  ENSG00000136854_16 (sequence is synthesized)
atttctcatggacctgagacaccccgacttcagggagtcctctagggtatcttttgaggatcaggctccaacaatggagtgagagccaaagaaacaaagatccacacacatcctcacccc

SEQ ID NO: 331750 - DNA, 120 bp, Artificial Sequence
  ENSG00000136854_17 (sequence is synthesized)
acagaaactgctggacacactgaagaaactgaataaaacagatgaagaaataagcagttaaaaaaataagtcgcccctccaaaacacgcccccatcccacagcgctccgcagcttcccac

SEQ ID NO: 331751 - DNA, 120 bp, Artificial Sequence
  ENSG00000136854_18 (sequence is synthesized)
caccgcccgcctcagttcctttgcgtctgttgcctccccagccctgcacgccctggctggcactgttgccgctgcattctcgtgttcagtgatgccctcttcttgtttgaaacaaaagaa

SEQ ID NO: 331752 - DNA, 120 bp, Artificial Sequence
  ENSG00000136854_19 (sequence is synthesized)
aataatgcattgtgttttttaaaaagagtatcttatacatgtatcctaaaaagagaagctcatgtgcaattggtgcacagcaggagaaatttctggactgttaggatgaatggacgcctt

SEQ ID NO: 331753 - DNA, 120 bp, Artificial Sequence
  ENSG00000136854_20 (sequence is synthesized)
ctccccgttatttaagatttgtgaccttgtacataaccctgggtgacgtgcacattgcttgggtatggaacggtagaaatttgggtgtttttaaaaccttgtttggggttgttcctgtcc

SEQ ID NO: 331754 - DNA, 120 bp, Artificial Sequence
  ENSG00000136854_21 (sequence is synthesized)
ttgttgagaatcatagagatgtctgtgttcttggagtatttcacactgaggactaatctgctatcttcattccagtccctacccctcagtgcctgctctcatccaaataacctgggaggt

SEQ ID NO: 331755 - DNA, 120 bp, Artificial Sequence
  ENSG00000136854_22 (sequence is synthesized)
gacaatcaggatatctcaggaggtccaaggtggaacagacctctttgcctttcccagcgtctcatacccccggtagtgcagctgtgggtggaggctggggtgtctgcacgaagtcaggcc

SEQ ID NO: 331756 - DNA, 120 bp, Artificial Sequence
  ENSG00000136854_23 (sequence is synthesized)
agcgtcctcctccacagcctgtcactgccccctccccagcctgtgtccacagtgctgtgatcccgagggaagtcctccagtctaagtcacagtgccctgacaggtgagaagcaaactccc

SEQ ID NO: 331757 - DNA, 120 bp, Artificial Sequence
  ENSG00000136854_24 (sequence is synthesized)
gctggaagcctccatctctttggaaaaacagttagtctggagcctgtggcccaggcccttctgtccccaggcatcatcccaacagctcattttccctagtccgccttcgttcaagggtca

SEQ ID NO: 331758 - DNA, 120 bp, Artificial Sequence
  ENSG00000136854_25 (sequence is synthesized)
ggaatggaccagaacagatgggttctggaggcccctgaacagagggctatggctgtggagaaggttcttggcccgttggactcacacagaccctgtaccctctcggcaagcatcttcagt

SEQ ID NO: 331759 - DNA, 120 bp, Artificial Sequence
  ENSG00000136854_26 (sequence is synthesized)
cagattatcctcagtttcagatacttcataataccttgtgttgtgtggggtcatacatcatcgtgtttgtaagagaagatggtcattttattctctgtataaaacttagctctaaagcag

SEQ ID NO: 331760 - DNA, 120 bp, Artificial Sequence
  ENSG00000136854_27 (sequence is synthesized)
aaactaaagcagcaaatgcaggaaggctgtctcgccatcctcaagactcagcagctctcattctccagtggtgagcacaccatttgtgctgctgctgttgtcgtgaaatataataacagt

SEQ ID NO: 331761 - DNA, 120 bp, Artificial Sequence
  ENSG00000136854_28 (sequence is synthesized)
ggaagtcacaaaaatgtcccctgcccagccccctcgccgcccttgacctcctgcaggccatgtgtgtattacttgtctagtgatgtcctctcaaagtgctgtacgcgagctcggcgccac

SEQ ID NO: 331762 - DNA, 120 bp, Artificial Sequence
  ENSG00000136854_29 (sequence is synthesized)
ctccgcctccctttcagagcctgctccccgccctctctgctcgctgcattgtggtgttctcttctcaaggctttgaaatctccccttgcactgagattagtcgtcagatctctccccgtc

SEQ ID NO: 331763 - DNA, 120 bp, Artificial Sequence
  ENSG00000136854_30 (sequence is synthesized)
tccctcccaacttatacgacctgatttccttaggacggaaccgcaggcacctgcgccgggcgtcttactcccgctgcttgttctgtcccctccctcggaccaaacagtgctcatgcttca

SEQ ID NO: 331764 - DNA, 120 bp, Artificial Sequence
  ENSG00000136854_31 (sequence is synthesized)
ggaccttgtttgtcgaagatgttggtttccctttctctgttatttatataaaaataatttatcaaaaggatattttaaaaaagctagtctgtcttgaaacttgtttaccttaaaattatc

SEQ ID NO: 331765 - DNA, 120 bp, Artificial Sequence
  ENSG00000136854_32 (sequence is synthesized)
agaatctcagtgtttgaaagtactgaagcacaaacatatatcatctctgtaccattctgtactaaagcacttgagtctaataaataaagaaatcagcaccccttcccggtgtccaggggg

SEQ ID NO: 331766 - DNA, 120 bp, Artificial Sequence
  ENSG00000136854_33 (sequence is synthesized)
tggttatttgaggagctgccggcctgttttccacatcagctgtaccattttacattctcaccagcagtgcatgacggtccagtgcctttttatcttactgcgcttaaggtgtaattcctt

SEQ ID NO: 331767 - DNA, 120 bp, Artificial Sequence
  ENSG00000136854_34 (sequence is synthesized)
tgatgatgatggtgatgatgatgatgctgctgctgttgacgatgagtccaagccaagcctggggagaaaagaataaatagtctcataaatttaaaaaagcccaatgctcatcaagaagag

SEQ ID NO: 331768 - DNA, 120 bp, Artificial Sequence
  ENSG00000136854_35 (sequence is synthesized)
tgctcatcaagaagagaacagataaactgtgtattcacccaatggtgagtttaaagcagttaaaaatgcatgacacacagttgcatatgtcaacatgaatagatctcagacacttaacaa

SEQ ID NO: 331769 - DNA, 120 bp, Artificial Sequence
  ENSG00000136854_36 (sequence is synthesized)
tgagtgaaaagagcacattatgggaggacacagacaggatagtgcatttatataaagcttcaatgttgcaggctgaaagagtgagggtcgtgatcaactcagtatcctggaggctacatg

SEQ ID NO: 331770 - DNA, 120 bp, Artificial Sequence
  ENSG00000136854_37 (sequence is synthesized)
cagaatgttggcaaactgacaaactgcatctgccgcccagaaggaatgcggagggcagccactccctaagcgcagttttcttgtgattaggtacatctgaagcctgttagcaataatgtg

SEQ ID NO: 331771 - DNA, 120 bp, Artificial Sequence
  ENSG00000136854_38 (sequence is synthesized)
aacctgtgatcaattaagcagctgaccaatcattacctcctcttccctgctctttctacccagtaaatacaaagggctgtagaagctcagagctgctgcttttgctcagtagaagcaggg

SEQ ID NO: 331772 - DNA, 120 bp, Artificial Sequence
  ENSG00000136854_39 (sequence is synthesized)
ctgctgcttttgctcagtagaagcagggagtcctcttcttcttcccccgaccccttcttttaaaacagtttcttttaagttttcatttctgcgttcatcctccttcattcagtcccgtag

SEQ ID NO: 331773 - DNA, 120 bp, Artificial Sequence
  ENSG00000136854_40 (sequence is synthesized)
taaccgtggcaaaccacggcacttcaaaacctcataaaaagcaccacatattgcttatttggatacatatgttgtaaatgtgtgaaaacatgcatgggaatgacaaataccaaagtcagg

SEQ ID NO: 331774 - DNA, 120 bp, Artificial Sequence
  ENSG00000136854_41 (sequence is synthesized)
atagtgactggccatggggaagggatggttattattgtcgtcttatatcttcaattccaaatgagccacgggcttaaaagtacttcattgaataaaaaaaaaccaacaatgtattaatgc

SEQ ID NO: 331775 - DNA, 120 bp, Artificial Sequence
  ENSG00000136854_42 (sequence is synthesized)
gacccaggtccccgttgcttgcgttagatctgtagccgccttacactggggactagccatggagcttgtcttgggcccctagcagcaacagcgtgctgcctagagatgaggccattcttc

SEQ ID NO: 331776 - DNA, 120 bp, Artificial Sequence
  ENSG00000136854_43 (sequence is synthesized)
tcttacttcaaattactcttccagtggttttgttatcttctcaatgttatagtgaaatataataatacatgcagaaaaaagcataaatcaactattgaataacgaaaatgtgaacctcta

SEQ ID NO: 331777 - DNA, 120 bp, Artificial Sequence
  ENSG00000136854_44 (sequence is synthesized)
tgtaactgcaactcaggctgcctaccgtttttaatttctttctaatctttaaaaacaaatactatctttactaaagatgtttcagagtaagataaaatacaaagagagtaattctccaaa

SEQ ID NO: 331778 - DNA, 120 bp, Artificial Sequence
  ENSG00000136854_45 (sequence is synthesized)
gcggctgggagtgggcgctgctagtaagagatctcgcctccaagctccttccgtgggcaggaaaaaacggaagctcccagaaagaggaaagacaggacccgagcggggtttcaggcagat

SEQ ID NO: 331779 - DNA, 120 bp, Artificial Sequence
  ENSG00000136854_46 (sequence is synthesized)
atatttcctgagtacggtgagtgcccaggagatgggggctgagagctggctcctgcgctcctgagagcacagtttcctgggcaggagcagagagaaggcccagaggaagatgggagggag

SEQ ID NO: 331780 - DNA, 120 bp, Artificial Sequence
  ENSG00000136854_47 (sequence is synthesized)
tcctgagaggcgcaaggctatcttgttcatcactgaatccctagcaccaaatccagggctagatgctcattcaatgtctgttaaaggaatgccaaaagaagggttaaatcaagaaagaaa

SEQ ID NO: 331781 - DNA, 120 bp, Artificial Sequence
  ENSG00000136854_48 (sequence is synthesized)
aggcagcccacccaatagaaaaaagttctgagcaggcacttaacaaaagaagaaatccaaatggccaatcaatctatgaaaattgtccactgtcattagtggtcagggaaatgcaattca

SEQ ID NO: 331782 - DNA, 120 bp, Artificial Sequence
  ENSG00000136854_49 (sequence is synthesized)
aaccagagtgagatgccgatatagattcaaaatattagaatatttaatctctgataatgccaagtgacggtgaggaggtagaaaaatggaaactcctacgtgatggaatgtctgctggtg

SEQ ID NO: 331783 - DNA, 120 bp, Artificial Sequence
  ENSG00000136854_50 (sequence is synthesized)
tagcccctttgaaaaccacttggcagtgtctagtaaagttgaaggtatgcatgtcctgtgagccagcaagtctgtggtcaggtgtgtgtcctagacaacctcaggtatgtgtgcccagga

SEQ ID NO: 331784 - DNA, 120 bp, Artificial Sequence
  ENSG00000136854_51 (sequence is synthesized)
tacatgtgcaggaatacatgtgcagtgttgctcataggttccccaagtggaaaataaccaaaacgtccatcaagtgtagaatggttaaatcagttgcgtgcaattacacagtagaatact

SEQ ID NO: 331785 - DNA, 120 bp, Artificial Sequence
  ENSG00000136854_52 (sequence is synthesized)
ctacagggatgaaaatgggcgagccctgagcgctcacagtaacatgaatgcatctgatgaacaacggtgagcaaagacagcaagacacgaaagaccactgatagtgagccttcattccac

SEQ ID NO: 331786 - DNA, 120 bp, Artificial Sequence
  ENSG00000136854_53 (sequence is synthesized)
agagttcagaccgcagagctcagctgtgttgttttaaaatgcagatgtaaggggtaaaacctcaagagaagagctcaccattcaagggaggataatgattctgtttgcggggaagagagg

SEQ ID NO: 331787 - DNA, 120 bp, Artificial Sequence
  ENSG00000136854_54 (sequence is synthesized)
aaatggtgttgatagaggggaatgtgagctggagccagggcacttttgtggtgctgattgggtttcgtttcttaactggggtagcgcttatttagacatttgccttatggttatttgtat

SEQ ID NO: 331788 - DNA, 120 bp, Artificial Sequence
  ENSG00000136854_55 (sequence is synthesized)
ctctttttctttatttcttcctttttagtttattatttatttgattttgtttcaacaagaaaatgcttgcagttctcaacaccgattgaaaatgtgtccagtgctgccctcacagccctg

SEQ ID NO: 331789 - DNA, 120 bp, Artificial Sequence
  ENSG00000136854_56 (sequence is synthesized)
accatttcctgcaatcttgttgaacattaacttattccacctgggaaaatgcagttgtttatcaaggagacccttcagccccacacgagacattcagagaaacttggttgctgtctttgc

SEQ ID NO: 331790 - DNA, 120 bp, Artificial Sequence
  ENSG00000136854_57 (sequence is synthesized)
cagtgttcactcctgtcggccgactccttgaataaccactaagtagccaatcagaaacgagcttggaaggagagcgagggtggggagcagaagcatcccatctgctgcgaaggagactgt

SEQ ID NO: 331791 - DNA, 120 bp, Artificial Sequence
  ENSG00000136854_58 (sequence is synthesized)
tttttacgtggagataacctcagcttgtcatgtgctgagagagcagatggcagccttcgtcattagccgttaacacttcaggtgccaaatgccaggcccataaagcactcccttggaaac

SEQ ID NO: 331792 - DNA, 120 bp, Artificial Sequence
  ENSG00000136854_59 (sequence is synthesized)
tttgcagtagaagtatatctaattccattagcttaaatttttgcaagcatttctaatctcttacaatacgcggtctctgcaaggtaaggcctcaggtcccctggccctttccctctcaca

SEQ ID NO: 331793 - DNA, 120 bp, Artificial Sequence
  ENSG00000136854_60 (sequence is synthesized)
cctgaggtcccacccaccagggcagtaccaactggctggctcccagaggtcagtggattctcccagggggctttgcctatcaacttcctctcccaggcaccatgctttccacacatggtc

SEQ ID NO: 331794 - DNA, 120 bp, Artificial Sequence
  ENSG00000136854_61 (sequence is synthesized)
cccctaccaactctggccccattttcagcctttccctgccttgccatgtttggaatttctctccctggcttcacctggagtttaagagtgaattagaaacgcagctgcccatcacctgca

SEQ ID NO: 331795 - DNA, 120 bp, Artificial Sequence
  ENSG00000136854_62 (sequence is synthesized)
gatggctctgcaccctgatggtgaggcagctcgttccttggtgcagcctgggaccctgcctgagccagaggatgtgttttgtttatccacagcccccaaatatctcccaggcctattgcg

SEQ ID NO: 331796 - DNA, 120 bp, Artificial Sequence
  ENSG00000136854_63 (sequence is synthesized)
acgggaccccaaccccaattctgactcccctccctgcttccactatacccagaccagggttggggaggggggtgggtgcagatctgggaatcgagaagcgcaggaaaggaagtgttggaa

SEQ ID NO: 331797 - DNA, 120 bp, Artificial Sequence
  ENSG00000136854_64 (sequence is synthesized)
tcgcgggacgaggagatcggagccgggagactcgcgcagcgccatggcccccattggcctcaaagctgttgtcggagagaggcggggacttatcaggatcctgaacccctgaaatcactc

SEQ ID NO: 331798 - DNA, 120 bp, Artificial Sequence
  ENSG00000136854_65 (sequence is synthesized)
gggagatgaggagagcttcggtgtccgccgcccagcgccgcagtctgcaatctccctggttgcggggctctgccctgccgtggccgaacgcttcgggagctcagaccacggtggcaggga

SEQ ID NO: 331799 - DNA, 120 bp, Artificial Sequence
  ENSG00000136854_66 (sequence is synthesized)
agcgagggctgatggtgggtgacatttgcaaaacggcatccacagtgctaaataagattggtgatatgtgtggaaaaacagtgccttgtcaatattttgtccatttctttataacaaaaa

SEQ ID NO: 331800 - DNA, 120 bp, Artificial Sequence
  ENSG00000136854_67 (sequence is synthesized)
aaatgtgtaaggattgctgtggcttttgctatctctttggggattaagtgaagattaaaactgggcttttctctgtaggagaggataagaaaggaaaaagaataaaatggtggaaatcta

SEQ ID NO: 331801 - DNA, 120 bp, Artificial Sequence
  ENSG00000136856_0 (sequence is synthesized)
gcactcgcagggcccgtggcggttcaggcgccagagctggccgatcggcgttggccgccgacatgacgcccgaggacccagaggaaacccagccgcttctggggcctcctggcggcagcg

SEQ ID NO: 331802 - DNA, 120 bp, Artificial Sequence
  ENSG00000136856_1 (sequence is synthesized)
agcgcgccccgcggccgccgcgtcttcctcgccgccttcgccgctgccctgggcccactcagcttcggcttcgcgctcggctacagctccccggccatccctagcctgcagcgcgccgcg

SEQ ID NO: 331803 - DNA, 120 bp, Artificial Sequence
  ENSG00000136856_2 (sequence is synthesized)
cgcctggacgacgccgccgcctcctggttcggggctgtcgtgaccctgggtgccgcggcggggggagtgctgggcggctggctggtggaccgcgccgggcgcaagctgagcctcttgctg

SEQ ID NO: 331804 - DNA, 120 bp, Artificial Sequence
  ENSG00000136856_3 (sequence is synthesized)
tcttgctgtgctccgtgcccttcgtggccggctttgccgtcatcaccgcggcccaggacgtgtggatgctgctggggggccgcctcctcaccggcctggcctgcggtgttgcctccctag

SEQ ID NO: 331805 - DNA, 120 bp, Artificial Sequence
  ENSG00000136856_4 (sequence is synthesized)
tggccccggtctacatctccgaaatcgcctacccagcagtccgggggttgctcggctcctgtgtgcagctaatggtcgtcgtcggcatcctcctggcctacctggcaggctgggtgctgg

SEQ ID NO: 331806 - DNA, 120 bp, Artificial Sequence
  ENSG00000136856_5 (sequence is synthesized)
agtggcgctggctggctgtgctgggctgcgtgcccccctccctcatgctgcttctcatgtgcttcatgcccgagaccccgcgcttcctgctgactcagcacaggcgccaggaggccatgg

SEQ ID NO: 331807 - DNA, 120 bp, Artificial Sequence
  ENSG00000136856_6 (sequence is synthesized)
ccgccctgcggttcctgtggggctccgagcagggctgggaagacccccccatcggggctgagcagagctttcacctggccctgctgcggcagcccggcatctacaagcccttcatcatcg

SEQ ID NO: 331808 - DNA, 120 bp, Artificial Sequence
  ENSG00000136856_7 (sequence is synthesized)
gcgtctccctgatggccttccagcagctgtcgggggtcaacgccgtcatgttctatgcagagaccatctttgaagaggccaagttcaaggacagcagcctggcctcggtcgtcgtgggtg

SEQ ID NO: 331809 - DNA, 120 bp, Artificial Sequence
  ENSG00000136856_8 (sequence is synthesized)
ccttcggcgcctacttcaagctgacccagggtggccctggcaactcctcgcacgtggccatctcggcgcctgtctctgcacagcctgttgatgccagcgtggggctggcctggctggccg

SEQ ID NO: 331810 - DNA, 120 bp, Artificial Sequence
  ENSG00000136856_9 (sequence is synthesized)
tgggcagcatgtgcctcttcatcgccggctttgcggtgggctgggggcccatcccctggctcctcatgtcagagatcttccctctgcatgtcaagggcgtggcgacaggcatctgcgtcc

SEQ ID NO: 331811 - DNA, 120 bp, Artificial Sequence
  ENSG00000136856_10 (sequence is synthesized)
tcaccaactggctcatggcctttctcgtgaccaaggagttcagcagcctcatggaggtcctcaggccctatggagccttctggcttgcctccgctttctgcatcttcagtgtccttttca

SEQ ID NO: 331812 - DNA, 120 bp, Artificial Sequence
  ENSG00000136856_11 (sequence is synthesized)
ctttgttctgtgtccctgaaactaaaggaaagactctggaacaaatcacagcccattttgaggggcgatgacagccactcactaggggatggagcaagcctgtgactccaagctgggccc

SEQ ID NO: 331813 - DNA, 120 bp, Artificial Sequence
  ENSG00000136856_12 (sequence is synthesized)
aagcccagagcccctgcctgccccaggggagccagaatccagccccttggagccttggtctgcagggtccctccttcctgtcatgctccctccagcccatgacccggggctaggaggctc

SEQ ID NO: 331814 - DNA, 120 bp, Artificial Sequence
  ENSG00000136856_13 (sequence is synthesized)
actgcctcctgttccagctcctgctgctgctctgaggactcaggaacaccttcgagctttgcagacctgcggtcagccctccatgcgcaagactaaagcagcggaagaggaggtgggcct

SEQ ID NO: 331815 - DNA, 120 bp, Artificial Sequence
  ENSG00000136856_14 (sequence is synthesized)
ctaggatctttgtcttctggctggaggtgcttttggaggttgggtgctgggcattcagtcgctcctctcacgcggctgccttatcgggaaggaaatttgtttgccaaataaagactgaca

SEQ ID NO: 331816 - DNA, 120 bp, Artificial Sequence
  ENSG00000136856_15 (sequence is synthesized)
cagaaaatcaggtcagtgtctctgggctttgtgcaagctcagtttgaaaagggtttattcccatcactgcccaggacaccctgtggctttacttgctcatggtcagccaagcttaccctt

SEQ ID NO: 331817 - DNA, 120 bp, Artificial Sequence
  ENSG00000136856_16 (sequence is synthesized)
ccttcacactgagaagtcatttctggctacttccttgggctcagttccctgggtcatcagccatcaaatcttgttgagtttaaaaaataaacagcaaaaaaaaacaaaacaaaacaaaaa

SEQ ID NO: 331818 - DNA, 120 bp, Artificial Sequence
  ENSG00000136856_17 (sequence is synthesized)
gcccattggctgcgagaggccggtgcgggccgcactcgcagggcccgtggcggttcaggcgccagagctggccgatcggcgttggccgccgacatgacgcccgaggacccagaggaaacc

SEQ ID NO: 331819 - DNA, 120 bp, Artificial Sequence
  ENSG00000136856_18 (sequence is synthesized)
caggcctgggggcgcggctccccctggcgggaccttctgggtgccaggcttgaagtccctgcgttatctcgcggtccctcccgtcgaccctgggaaggatcctactgttctctccatttt

SEQ ID NO: 331820 - DNA, 120 bp, Artificial Sequence
  ENSG00000136856_19 (sequence is synthesized)
gctgaggcaggaggatctcttgagcccagaaattcgaggctgcacgcacctcggcatccgcattaccagtgcttgcgtggcagtccactaatcgggtgagaaccatattgctttttgcat

SEQ ID NO: 331821 - DNA, 120 bp, Artificial Sequence
  ENSG00000136856_20 (sequence is synthesized)
gcatctcaatgaagcaatagtagcaatttatcaagcacttttttttccagactggtataaaattgtatgtgcttttgtaaaccatttaacaataaaagtaaaatacaaaagggaacaggg

SEQ ID NO: 331822 - DNA, 120 bp, Artificial Sequence
  ENSG00000136856_21 (sequence is synthesized)
ctgctcctggtcttgtcaggtgagggttcacccctgtgcagcctccccgccatgcgggggagggccttcgccaaggccaccacactgcaggaggaggacagggagcatttgtgatgacaa

SEQ ID NO: 331823 - DNA, 120 bp, Artificial Sequence
  ENSG00000136856_22 (sequence is synthesized)
acatcatggactaatgcggccatgatttgacagcagcttgtcaccaagcactcactgcaggcctgtccatgccagtggcactcccacaccacgcctttaacctctgtggtgaacccacca

SEQ ID NO: 331824 - DNA, 120 bp, Artificial Sequence
  ENSG00000136856_23 (sequence is synthesized)
gaaggcactctcacagccccagcttatgacgggaaaactgagggccaggaaggtgaagtgactcaagagtttgtgggtccttttggacaagtgactttacctctctgagcctcagtctcc

SEQ ID NO: 331825 - DNA, 120 bp, Artificial Sequence
  ENSG00000136856_24 (sequence is synthesized)
ccctctgggaagtgggggtaatggcagtgcctccctcagcaccattttgaggagtgggaggtgatccacgtgaggccttcagcaagagctgcggcccacggacatttggtacccagcagc

SEQ ID NO: 331826 - DNA, 120 bp, Artificial Sequence
  ENSG00000136856_25 (sequence is synthesized)
cgaccgtcggggctgagggttactcgctgctgcttctgtgccggtacctcccatttcctcggcccagagggtctgctccgggaactttttgcagttcgctgaggtccaaggcggggtggc

SEQ ID NO: 331827 - DNA, 120 bp, Artificial Sequence
  ENSG00000136856_26 (sequence is synthesized)
tgccacccagtcagggcttctgcggccaaggtgccagaacaccaagctggccgttctctgggagccgggcctgcccctctcagaggcatccaggccatgctgctgcgccctgggccgttc

SEQ ID NO: 331828 - DNA, 120 bp, Artificial Sequence
  ENSG00000136856_27 (sequence is synthesized)
agcgaggaggatgggttcagtggggaggggagggtcagggctgtaggaggtgcttagctagggccaggcccagacctgaggcaggtgctggatgtgttggtggtggcagggatgagggca

SEQ ID NO: 331829 - DNA, 120 bp, Artificial Sequence
  ENSG00000136856_28 (sequence is synthesized)
gcagcttgctctttgcccagattacctctttgtggctcccccccacctatcaggaagtgccctgggcaggtgagggtcatctcacctgacacatggggaggctgggacttgtctgcacac

SEQ ID NO: 331830 - DNA, 120 bp, Artificial Sequence
  ENSG00000136856_29 (sequence is synthesized)
ctgaggacacagggggtgctgggatgaggagccaagacgtgggagtcagcgctccccaagccttaggacagtagacccccagaggggggccgcttgcgggaggggagagagaaatcctga

SEQ ID NO: 331831 - DNA, 120 bp, Artificial Sequence
  ENSG00000136856_30 (sequence is synthesized)
gcagctggtgtgattggcccgtgccatgtgccttcatgaacagttgtgataatggcaatgtcagtagcgaacatgagggcagatgtgcagaggcagcgaggccccatctctgaagctgag

SEQ ID NO: 331832 - DNA, 120 bp, Artificial Sequence
  ENSG00000136859_0 (sequence is synthesized)
caaatgaggctgctgcggacggcctgaggatggaccccaagccctggacctgccgagcgtggcactgaggcagcggctgacgctactgtgagggaaagaaggttgtgagcagccccgcag

SEQ ID NO: 331833 - DNA, 120 bp, Artificial Sequence
  ENSG00000136859_1 (sequence is synthesized)
gacccctggccagccctggccccagcctctgccggagccctctgtggaggcagagccagtggagcccagtgaggcagggctgcttggcagccaccggcctgcaactcaggaacccctcca

SEQ ID NO: 331834 - DNA, 120 bp, Artificial Sequence
  ENSG00000136859_2 (sequence is synthesized)
gaggccatggacaggctgccccgctgacggccagggtgaagcatgtgaggagccgccccggagccaagcaggagggaagaggctttcatagattctattcacaaagaataaccaccattt

SEQ ID NO: 331835 - DNA, 120 bp, Artificial Sequence
  ENSG00000136859_3 (sequence is synthesized)
tgcaaggaccatgaggccactgtgcgtgacatgctggtggctcggactgctggctgccatgggagctgttgcaggccaggaggacggttttgagggcactgaggagggctcgccaagaga

SEQ ID NO: 331836 - DNA, 120 bp, Artificial Sequence
  ENSG00000136859_4 (sequence is synthesized)
gttcatttacctaaacaggtacaagcgggcgggcgagtcccaggacaagtgcacctacaccttcattgtgccccagcagcgggtcacgggtgccatctgcgtcaactccaaggagcctga

SEQ ID NO: 331837 - DNA, 120 bp, Artificial Sequence
  ENSG00000136859_5 (sequence is synthesized)
ggtgcttctggagaaccgagtgcataagcaggagctagagctgctcaacaatgagctgctcaagcagaagcggcagatcgagacgctgcagcagctggtggaggtggacggcggcattgt

SEQ ID NO: 331838 - DNA, 120 bp, Artificial Sequence
  ENSG00000136859_6 (sequence is synthesized)
gagcgaggtgaagctgctgcgcaaggagagccgcaacatgaactcgcgggtcacgcagctctacatgcagctcctgcacgagatcatccgcaagcgggacaacgcgttggagctctccca

SEQ ID NO: 331839 - DNA, 120 bp, Artificial Sequence
  ENSG00000136859_7 (sequence is synthesized)
gctggagaacaggatcctgaaccagacagccgacatgctgcagctggccagcaagtacaaggacctggagcacaagtaccagcacctggccacactggcccacaaccaatcagagatcat

SEQ ID NO: 331840 - DNA, 120 bp, Artificial Sequence
  ENSG00000136859_8 (sequence is synthesized)
cgcgcagcttgaggagcactgccagagggtgccctcggccaggcccgtcccccagccaccccccgctgccccgccccgggtctaccaaccacccacctacaaccgcatcatcaaccagat

SEQ ID NO: 331841 - DNA, 120 bp, Artificial Sequence
  ENSG00000136859_9 (sequence is synthesized)
ctctaccaacgagatccagagtgaccagaacctgaaggtgctgccaccccctctgcccactatgcccactctcaccagcctcccatcttccaccgacaagccgtcgggcccatggagaga

SEQ ID NO: 331842 - DNA, 120 bp, Artificial Sequence
  ENSG00000136859_10 (sequence is synthesized)
ctgcctgcaggccctggaggatggccacgacaccagctccatctacctggtgaagccggagaacaccaaccgcctcatgcaggtgtggtgcgaccagagacacgaccccgggggctggac

SEQ ID NO: 331843 - DNA, 120 bp, Artificial Sequence
  ENSG00000136859_11 (sequence is synthesized)
cgtcatccagagacgcctggatggctctgttaacttcttcaggaactgggagacgtacaagcaagggtttgggaacattgacggcgaatactggctgggcctggagaacatttactggct

SEQ ID NO: 331844 - DNA, 120 bp, Artificial Sequence
  ENSG00000136859_12 (sequence is synthesized)
gacgaaccaaggcaactacaaactcctggtgaccatggaggactggtccggccgcaaagtctttgcagaatacgccagtttccgcctggaacctgagagcgagtattataagctgcggct

SEQ ID NO: 331845 - DNA, 120 bp, Artificial Sequence
  ENSG00000136859_13 (sequence is synthesized)
ggggcgctaccatggcaatgcgggtgactcctttacatggcacaacggcaagcagttcaccaccctggacagagatcatgatgtctacacaggaaactgtgcccactaccagaagggagg

SEQ ID NO: 331846 - DNA, 120 bp, Artificial Sequence
  ENSG00000136859_14 (sequence is synthesized)
gagtctactgggctgagttccgaggaggctcttactcactcaagaaagtggtgatgatgatccgaccgaaccccaacaccttccactaagccagctccccctcctgacctctcgtggcca

SEQ ID NO: 331847 - DNA, 120 bp, Artificial Sequence
  ENSG00000136859_15 (sequence is synthesized)
ttgccaggagcccaccctggtcacgctggccacagcacaaagaacaactcctcaccagttcatcctgaggctgggaggaccgggatgctggattctgttttccgaagtcactgcagcgga

SEQ ID NO: 331848 - DNA, 120 bp, Artificial Sequence
  ENSG00000136859_16 (sequence is synthesized)
tgatggaactgaatcgatacggtgttttctgtccctcctactttccttcacaccagacagcccctcatgtctccaggacaggacaggactacagacaactctttctttaaataaattaag

SEQ ID NO: 331849 - DNA, 120 bp, Artificial Sequence
  ENSG00000136859_17 (sequence is synthesized)
tctctacaataaaaacacaactgcaaagtaccttcataatatacatgtgtatgagcctcccttgtgcacgtatgtgtataccacatatatatgcatttagatatacatcacatgtgatat

SEQ ID NO: 331850 - DNA, 120 bp, Artificial Sequence
  ENSG00000136859_18 (sequence is synthesized)
atctagatccatatataggtttgccttagatacctaaatacacatatattcagttctcagatgttgaagctgtcaccagcagctttgctcttaggagaaaagcatttcattagtgttgta

SEQ ID NO: 331851 - DNA, 120 bp, Artificial Sequence
  ENSG00000136859_19 (sequence is synthesized)
ttacttgagtctaagggtagatcacagactgtgtggtctcaactgaaaggatcacccttggcatctgtgtgcctggattcttccagaatgtctacaatgctaatctctcacatagaggtt

SEQ ID NO: 331852 - DNA, 120 bp, Artificial Sequence
  ENSG00000136859_20 (sequence is synthesized)
cccagcttcttaagaaccccttttggcacctaatcaaatttcaaaatccctccccccacattttcatacttttccccattctcaggacttttcaccatccatcacccacttatcccttca

SEQ ID NO: 331853 - DNA, 120 bp, Artificial Sequence
  ENSG00000136859_21 (sequence is synthesized)
tttgacaccattcattaagtgccttctgtgtgtcagtccctggccactcactgcagttcaaggccccctttccgctctgctgtactcctcgcctacctactccttgccttttctgtcgca

SEQ ID NO: 331854 - DNA, 120 bp, Artificial Sequence
  ENSG00000136859_22 (sequence is synthesized)
cagccccttctttccaggcgagattcctcagcttctgagtaggaaacactccgggctccaggtttctggttgggaagggaaggccaggccaaaagctccaccggccgtatagataatgta

SEQ ID NO: 331855 - DNA, 120 bp, Artificial Sequence
  ENSG00000136859_23 (sequence is synthesized)
ctcgcagttttgtatcttccattcatactttaacctacaggtcatttgagtcttcacacaaataataacctatctggccaggagaattatctcagaacagaagtcatcagatcatcagag

SEQ ID NO: 331856 - DNA, 120 bp, Artificial Sequence
  ENSG00000136859_24 (sequence is synthesized)
cccccagatggctacagaccagagattccacgctctcaggctgactagagtccgcatctcatctccaaactacacttccctggagaacaagtgccacaaaaatgaaaacaggccacttct

SEQ ID NO: 331857 - DNA, 120 bp, Artificial Sequence
  ENSG00000136859_25 (sequence is synthesized)
caggagttgaataatcaggggtcaccggaccccttggttgatgcactgcagcatggtggctttctgagtcctgttggccaccaagtgtcagcctcagcactcccgggactattgccaaga

SEQ ID NO: 331858 - DNA, 120 bp, Artificial Sequence
  ENSG00000136859_26 (sequence is synthesized)
aggggcaagggatgagtcaagaaggtgagacccttcccggtgggcacgtgggccaggctgtgtgagatgttggatgtttggtactgtccatgtctgggtgtgtgcctattacctcagcat

SEQ ID NO: 331859 - DNA, 120 bp, Artificial Sequence
  ENSG00000136859_27 (sequence is synthesized)
ttctcacaaagtgtaccatgtagcatgttttgtgtatataaaagggagggtttttttaaaaatatattcccagattatccttgtaatgacacgaatctgcaataaaagccatcagtgcta

SEQ ID NO: 331860 - DNA, 120 bp, Artificial Sequence
  ENSG00000136859_28 (sequence is synthesized)
acacatccagtcccctgaagctcagccccttgttcatccagaacacctgagccttcccagtgggctgccatatgagaactatattcatctctgcataaatgaaccatgtatctactccaa

SEQ ID NO: 331861 - DNA, 120 bp, Artificial Sequence
  ENSG00000136861_0 (sequence is synthesized)
gtttccgtaggaagaagcgccgggaaagatggcggcgtctgtggtttgaattccagcggcgccgccagagtctgaacaagagctggggtggagggggcggggacctggggagcccggcgg

SEQ ID NO: 331862 - DNA, 120 bp, Artificial Sequence
  ENSG00000136861_1 (sequence is synthesized)
gtcgctatcgcggggggtactagtggcgccgccgccacagacaccaacgctgtcgccacctctgtagccatgatggacttggtgttggaagaggacgtcaccgtccctgggacgctcagc

SEQ ID NO: 331863 - DNA, 120 bp, Artificial Sequence
  ENSG00000136861_2 (sequence is synthesized)
ggctgcagtggccttgttcccagtgtaccagatgacctggatggcatcaaccccaatgctgggttgggaaatggtctgctcccaaatgtgtcagaagaaacagtgtctcccaccagagca

SEQ ID NO: 331864 - DNA, 120 bp, Artificial Sequence
  ENSG00000136861_3 (sequence is synthesized)
cggaacatgaaggactttgaaaatcaaatcactgaattgaagaaagaaaactttaacctaaagctccgcatctatttccttgaggaaagaatgcaacaggaatttcatggccccactgaa

SEQ ID NO: 331865 - DNA, 120 bp, Artificial Sequence
  ENSG00000136861_4 (sequence is synthesized)
catatctacaaaactaacattgagctcaaggtggaagtagaaagtctgaagcgggaactccaggagagagagcagctgctcatcaaagcctccaaagcagttgagagcttagctgaagca

SEQ ID NO: 331866 - DNA, 120 bp, Artificial Sequence
  ENSG00000136861_5 (sequence is synthesized)
ggtggctctgaaatccagcgggtgaaagaagatgctcgaaagaaggtgcagcaggtggaagatctcctaactaaaagaatactccttttggaaaaggatgtgacagccgcccaggcagaa

SEQ ID NO: 331867 - DNA, 120 bp, Artificial Sequence
  ENSG00000136861_6 (sequence is synthesized)
ctggaaaaggcctttgcagggacagagacggagaaggctcttcggttgcgtttggaaagcaagctttcagagatgaagaagatgcacgagggggacttggcgatggctctggtcctggat

SEQ ID NO: 331868 - DNA, 120 bp, Artificial Sequence
  ENSG00000136861_7 (sequence is synthesized)
gagaaagacagactgattgaggagttgaagctgtctttgaagagcaaagaagctttaattcagtgccttaaagaggagaaatctcagatggcatgtcctgatgagaatgtgtcatctgga

SEQ ID NO: 331869 - DNA, 120 bp, Artificial Sequence
  ENSG00000136861_8 (sequence is synthesized)
gagctccgaggactttgtgctgctccaagggaagaaaaggagagagaaactgaggctgcacaaatggagcatcagaaggagagaaacagctttgaagagaggatccaggcacttgaagag

SEQ ID NO: 331870 - DNA, 120 bp, Artificial Sequence
  ENSG00000136861_9 (sequence is synthesized)
gacctgagagagaaggaaagagaaattgctacagagaagaaaaatagtctaaagagggataaagccattcagggtttaaccatggcattaaaatcaaaggaaaaaaaggttgaagaactt

SEQ ID NO: 331871 - DNA, 120 bp, Artificial Sequence
  ENSG00000136861_10 (sequence is synthesized)
aactctgaaattgaaaagctcagtgctgcctttgctaaagccagagaggccctacagaaagcacagacccaggaatttcaggggtctgaagactatgagactgctctatcaggaaaggaa

SEQ ID NO: 331872 - DNA, 120 bp, Artificial Sequence
  ENSG00000136861_11 (sequence is synthesized)
gccctttcggctgcgctgcgctcacaaaacctcaccaagagtacagagaaccacagactgcgtagaagcattaagaagatcacccaggagctgagtgacttgcagcaggagagggagaga

SEQ ID NO: 331873 - DNA, 120 bp, Artificial Sequence
  ENSG00000136861_12 (sequence is synthesized)
ctggagaaggacctggaggaagcccatcgagagaagagcaaaggagactgcaccatccgtgatcttagaaatgaagttgaaaaattacgcaatgaagtgaatgaaagagagaaagcaatg

SEQ ID NO: 331874 - DNA, 120 bp, Artificial Sequence
  ENSG00000136861_13 (sequence is synthesized)
gaaaatcgttacaagagtcttctgagtgaaagcaataaaaaattgcacaatcaagagcaagtgatcaaacatctaacagaaagtaccaatcagaaggacgtgttgcttcagaaattcaat

SEQ ID NO: 331875 - DNA, 120 bp, Artificial Sequence
  ENSG00000136861_14 (sequence is synthesized)
gaaaaagatttggaagtaatacagcagaactgctatttaatggctgcagaggatcttgagctcaggagtgaaggcttaataacagaaaagtgctcttctcaacagccaccaggcagcaaa

SEQ ID NO: 331876 - DNA, 120 bp, Artificial Sequence
  ENSG00000136861_15 (sequence is synthesized)
accatcttctctaaggaaaagaaacaatcatcagactatgaagagctgattcaggtcttaaagaaagagcaggacatctatacccatctggtcaaatctctgcaggaatcagacagtatc

SEQ ID NO: 331877 - DNA, 120 bp, Artificial Sequence
  ENSG00000136861_16 (sequence is synthesized)
aacaacctgcaggctgagttaaacaagatttttgccctgcggaagcaactggagcaggatgtgctttcatatcagaatttgcggaagaccttggaggagcagatcagcgaaattcggagg

SEQ ID NO: 331878 - DNA, 120 bp, Artificial Sequence
  ENSG00000136861_17 (sequence is synthesized)
cgggaagaagaatcattttcactttatagtgatcaaacatcttatctaagtatttgccttgaagaaaacaatcggtttcaagtggaacatttttctcaagaagaacttaagaaaaaggtc

SEQ ID NO: 331879 - DNA, 120 bp, Artificial Sequence
  ENSG00000136861_18 (sequence is synthesized)
agtgaccttatacagctagtgaaggagctgtatacagacaaccagcacctgaagaaaaccatttttgatctctcctgcatgggtttccagggaaatgggtttccagatagacttgcgtct

SEQ ID NO: 331880 - DNA, 120 bp, Artificial Sequence
  ENSG00000136861_19 (sequence is synthesized)
acagaacaaacagagcttctggctagcaaggaggacgaggacacgatcaaaattggggaggatgacgagattaatttcctgagtgaccagcatttgcagcagagtaatgagattatgaaa

SEQ ID NO: 331881 - DNA, 120 bp, Artificial Sequence
  ENSG00000136861_20 (sequence is synthesized)
gacctttccaaaggaggctgcaaaaatggatacttaaggcacacggagtctaagatttcagattgtgatggggcccacgcacctggctgcctagaagaaggtgcattcataaacctgctt

SEQ ID NO: 331882 - DNA, 120 bp, Artificial Sequence
  ENSG00000136861_21 (sequence is synthesized)
gcccctttgttcaatgagaaggccacattattactggaatccaggccagaccttctgaaagtggtacgggaactgcttctgggacaactattcttgacagagcaggaagtttctggagaa

SEQ ID NO: 331883 - DNA, 120 bp, Artificial Sequence
  ENSG00000136861_22 (sequence is synthesized)
caccttgatggtaaaactgagaagacacctaagcaaaaaggtgaacttgtacattttgtccaaaccaactcattttccaagccacatgatgaactgaagttgtcttgtgaggcccagcta

SEQ ID NO: 331884 - DNA, 120 bp, Artificial Sequence
  ENSG00000136861_23 (sequence is synthesized)
gtaaaggcaggcgaagtgcccaaggtaggactgaaagatgcctcagtgcagactgtggccacggagggcgacctgctgagattcaagcatgaagcaacaagagaggcttgggaagagaaa

SEQ ID NO: 331885 - DNA, 120 bp, Artificial Sequence
  ENSG00000136861_24 (sequence is synthesized)
ccgatcaacactgcactcagcgcagagcatcggccagagaacctgcacggggtgcctgggtggcaggctgccctcctttccctccctggtattaccaacagagaggctaagaagtcccgc

SEQ ID NO: 331886 - DNA, 120 bp, Artificial Sequence
  ENSG00000136861_25 (sequence is synthesized)
tgaaggagtttaaaacttgtaataagcaacttcaccaaaagttaattctggctgaagcagtgatggaggggaggccaacgcccgacaaaacgttgctgaatgctcagccccctgtgggag

SEQ ID NO: 331887 - DNA, 120 bp, Artificial Sequence
  ENSG00000136861_26 (sequence is synthesized)
cagcctaccaggacagcccaggagagcagaaaggaattaaaaccacatcttctgtctggagagacaaggaaatggacagtgatcagcaaagaagctacgagattgactctgagatttgcc

SEQ ID NO: 331888 - DNA, 120 bp, Artificial Sequence
  ENSG00000136861_27 (sequence is synthesized)
cacctgatgaccttgccagcttgccatcatgcaaagaaaatcctgaagatgttctgagcccaacttcagtagctacttacctgagttccaagagtcagccttctgctaaagtcagtgtga

SEQ ID NO: 331889 - DNA, 120 bp, Artificial Sequence
  ENSG00000136861_28 (sequence is synthesized)
tggggactgatcagtcagagagcattaatacctcaaatgagacagaatacttaaaacagaaaatccatgacttggaaactgagctggaaggctaccagaatttcatatttcagcttcaaa

SEQ ID NO: 331890 - DNA, 120 bp, Artificial Sequence
  ENSG00000136861_29 (sequence is synthesized)
agcactcccagtgcagtgaggccataattacagttttgtgtgggacagaaggggcccaggatggcttgagcaagcccaagaatggttctgatggggaagaaatgaccttttcaagtttgc

SEQ ID NO: 331891 - DNA, 120 bp, Artificial Sequence
  ENSG00000136861_30 (sequence is synthesized)
accaagtgcgatacgtgaaacacgtgaaaatcctcggtccgctggccccagagatgattgacagcagggtgctggagaacctcaaacagcagctggaggaacaggaatacaagctgcaga

SEQ ID NO: 331892 - DNA, 120 bp, Artificial Sequence
  ENSG00000136861_31 (sequence is synthesized)
aggagcagaatttgaacatgcaacttttcagtgagatccataatctgcagaataagttcagagatctctcacctcccagatacgattcattagttcagtcccaagccagggagctctccc

SEQ ID NO: 331893 - DNA, 120 bp, Artificial Sequence
  ENSG00000136861_32 (sequence is synthesized)
ttcaacggcagcagattaaggatggccatggcatctgtgtcatctcccgtcaacacatgaacaccatgattaaggcatttgaggagttgctgcaggccagtgatgtggattactgtgtgg

SEQ ID NO: 331894 - DNA, 120 bp, Artificial Sequence
  ENSG00000136861_33 (sequence is synthesized)
ccgagggtttccaggaacagctgaatcaatgtgctgagctgctggagaaattggaaaagctatttctcaacggaaaatcagttggagtggaaatgaacacccagaatgaactgatggaga

SEQ ID NO: 331895 - DNA, 120 bp, Artificial Sequence
  ENSG00000136861_34 (sequence is synthesized)
ggattgaggaagacaacttaacctaccaacatcttctgcctgaatctcctgagccttcagcctctcatgcgctctctgattatgaaacatctgaaaagtccttcttctcacgagaccaga

SEQ ID NO: 331896 - DNA, 120 bp, Artificial Sequence
  ENSG00000136861_35 (sequence is synthesized)
agcaagataatgagacagagaagacttcagttatggtgaacagtttttctcaagacttactaatggaacacatacaggaaattcgaactttgagaaagcgtttagaagaatctattaaaa

SEQ ID NO: 331897 - DNA, 120 bp, Artificial Sequence
  ENSG00000136861_36 (sequence is synthesized)
caaatgagaagctacggaaacagttggaacggcaaggatctgaatttgttcaaggttctacaagcatttttgcttctggttcagagcttcatagttctctaacatcagaaattcatttct

SEQ ID NO: 331898 - DNA, 120 bp, Artificial Sequence
  ENSG00000136861_37 (sequence is synthesized)
tgaggaagcagaaccaggccctcaatgcaatgctcattaaaggatccagagataaacagaaggagaatgacaaattacgagagtccctctccaggaagaccgtgagcctggagcaccttc

SEQ ID NO: 331899 - DNA, 120 bp, Artificial Sequence
  ENSG00000136861_38 (sequence is synthesized)
agcgggagtatgccagcgtgaaggaagaaaatgaaaggctgcagaaagaaggcagcgagaaggagagacacaaccagcagctgatccaggaggtccgctgcagcggccaggagctgagca

SEQ ID NO: 331900 - DNA, 120 bp, Artificial Sequence
  ENSG00000136861_39 (sequence is synthesized)
gggtgcaggaggaggtgaagttgaggcagcagctgctctcacagaatgacaagctattgcagtctctccgagtggagctgaaggcgtatgagaagctggatgaagagcacaggagactga

SEQ ID NO: 331901 - DNA, 120 bp, Artificial Sequence
  ENSG00000136861_40 (sequence is synthesized)
gagaggcgtcgggagaaggctggaaggggcaggatcctttcagggacctgcacagcctcctgatggagatccaggctctgcgcttgcaactagaaaggagcatcgaaaccagcagcactc

SEQ ID NO: 331902 - DNA, 120 bp, Artificial Sequence
  ENSG00000136861_41 (sequence is synthesized)
tgcagagcaggctcaaggaacagctggcaaggggggcagagaaggcacaggaaggagccctcactctggctgtccaagccgtgtccatccctgaggtgccccttcagcctgacaaacacg

SEQ ID NO: 331903 - DNA, 120 bp, Artificial Sequence
  ENSG00000136861_42 (sequence is synthesized)
atggtgacaaatatcccatggaaagtgataattcatttgatctgtttgattcctcccaggcagtgacaccaaaatcagtttcagagactcctccactctctgggaatgacacggactccc

SEQ ID NO: 331904 - DNA, 120 bp, Artificial Sequence
  ENSG00000136861_43 (sequence is synthesized)
tctcctgcgacagtggcagttcggcaactagcactccgtgtgtgtcccgcctggtcactggccaccacctgtgggccagcaagaatggccgccatgtcctgggcctgattgaggactatg

SEQ ID NO: 331905 - DNA, 120 bp, Artificial Sequence
  ENSG00000136861_44 (sequence is synthesized)
aggccctgctcaaacagatcagccagggacagaggctccttgctgaaatggacattcaaacccaagaggctcccagctccacaagtcaagagctgggaacaaagggtccacacccagcac

SEQ ID NO: 331906 - DNA, 120 bp, Artificial Sequence
  ENSG00000136861_45 (sequence is synthesized)
cactgagcaagtttgtgagcagtgtgagcacggccaagctgaccctggaagaggcctacaggcggctgaagcttctctggagagtctcactccccgaggatggccagtgcccccttcact

SEQ ID NO: 331907 - DNA, 120 bp, Artificial Sequence
  ENSG00000136861_46 (sequence is synthesized)
gtgagcagattggagaaatgaaggcagaggtcaccaaactacataaaaaattgtttgaacaagaaaagaagttgcaaaacaccatgaagcttttgcagctgagcaagcgccaggaaaaag

SEQ ID NO: 331908 - DNA, 120 bp, Artificial Sequence
  ENSG00000136861_47 (sequence is synthesized)
tcatctttgatcaattggtcgtaacccacaaaatccttcggaaggccagaggaaacctggagcttaggcctgggggagcccatccaggaacatgcagtcccagcagaccaggctcctgag

SEQ ID NO: 331909 - DNA, 120 bp, Artificial Sequence
  ENSG00000136861_48 (sequence is synthesized)
aagaactttcagccaataaagcttgtgcttcccccaccgagctcacgctgtctctttgttccaagtgtggttcctatttattgaggaagaaagagctgtctggccaaaggaaatctattt

SEQ ID NO: 331910 - DNA, 120 bp, Artificial Sequence
  ENSG00000136861_49 (sequence is synthesized)
tttcccttcatgttttctctctgaaagttggcttgagagttgttgtcagaaaggtgcaggtgctccacaaacgggtggtaaaaaggcctcgagctcttggatgttgtatttcagatcagg

SEQ ID NO: 331911 - DNA, 120 bp, Artificial Sequence
  ENSG00000136861_50 (sequence is synthesized)
ggcaggcaccggagttgaggctgtgcgccttggtgggcttcacgtcttcccctggatttgcttagtactcagccagtgccacagtttgaagattctcattaaatgattcatttcatttca

SEQ ID NO: 331912 - DNA, 120 bp, Artificial Sequence
  ENSG00000136861_51 (sequence is synthesized)
aaaagcatggaggcatgacacagcacgcaatgtgcagggaatcatggttaattttgtaggaaatctccagagtggtgccagagatattcctggaaaggttgcctggaactagatcatgga

SEQ ID NO: 331913 - DNA, 120 bp, Artificial Sequence
  ENSG00000136861_52 (sequence is synthesized)
atgtggtaccaggctttcgctcagcgtgtgaaacagaagccctacagtctggagatttatactgcatgttaaggcttgcttgtctaaaatctttttcaagactgcacgtaacagccttca

SEQ ID NO: 331914 - DNA, 81 bp, Artificial Sequence
  ENSG00000136861_53 (sequence is synthesized)
gaaggacctggaggaagcccatcgagagaagagcaaaggagactgcaccatccgtggtctcactctgtttcctgggctgtt

SEQ ID NO: 331915 - DNA, 120 bp, Artificial Sequence
  ENSG00000136861_54 (sequence is synthesized)
ctgtaagaccacccgacagctggctgtaggcacaggagggcagagctcagccctctccactctggccttgtgggtagagtggatgggtgttgaagctagctctttgacccactcttcttc

SEQ ID NO: 331916 - DNA, 120 bp, Artificial Sequence
  ENSG00000136861_55 (sequence is synthesized)
tgaaggaacagcaggaaacatagaaggactgaggctcagcacccaggccagccgaggtccgggttcccactcacttgttcccagctatgtgaccctcagtaggccacttcaccctttgag

SEQ ID NO: 331917 - DNA, 120 bp, Artificial Sequence
  ENSG00000136861_56 (sequence is synthesized)
cccatacctatctctgtaaaacatgtctctcagcacctgttgtgtggagaattgtgttgaaaattgaatgagaccatttattaaaagcatcctagcaagatacctgacacatagtaggca

SEQ ID NO: 331918 - DNA, 120 bp, Artificial Sequence
  ENSG00000136861_57 (sequence is synthesized)
cccaggaaatgacctttattataatcgtcctgctagtatatgttactttttgcccactcattcagcaaacatttatggacacctctcacgtgctgggcattgctctggggatggttgttg

SEQ ID NO: 331919 - DNA, 120 bp, Artificial Sequence
  ENSG00000136861_58 (sequence is synthesized)
gcctcgttgctctctgtatcccaggagagataccagctcagagtgcttcaactataacgtctaatgtttcagaatcaattttgaggtgtggtgaggtgttttttttttttttttatttta

SEQ ID NO: 331920 - DNA, 120 bp, Artificial Sequence
  ENSG00000136861_59 (sequence is synthesized)
ctaattttccagatggtttctctctattgaaagtttatctagaaaggggtcatctcacagcttttattttctcctcaacttgctttttttattcttgctgttgtgtctttttaatatagt

SEQ ID NO: 331921 - DNA, 120 bp, Artificial Sequence
  ENSG00000136861_60 (sequence is synthesized)
gtggctcttaaaatcatcccctttcattctataattctagcccaaatagattttattactactagacataatttcggggtttggtgtgcaatttgctaggcttttatggccagaagcgaa

SEQ ID NO: 331922 - DNA, 120 bp, Artificial Sequence
  ENSG00000136861_61 (sequence is synthesized)
aattaatttccagctcttatttagcgtgtggaatagcagcaattaagtctgccaatatttttgtttctaaagtcaagttgttattttaaactgtacctagttcttaggaagggggagggc

SEQ ID NO: 331923 - DNA, 120 bp, Artificial Sequence
  ENSG00000136861_62 (sequence is synthesized)
ctgagaatgcagctctgagcatctgtgtgtgacatgtgaacttctgaatgatgcctttgccccacagaggtgtctttccattgatagctgacatgctgtaccctaggagccaggggacct

SEQ ID NO: 331924 - DNA, 120 bp, Artificial Sequence
  ENSG00000136861_63 (sequence is synthesized)
gactgctaattaattagcggtcaccttgggcaaagtggcgtaatctccatctgaggcatcttgattctcagggaagtggaatttggacttccagacaccctcagtgcctctggccttgct

SEQ ID NO: 331925 - DNA, 120 bp, Artificial Sequence
  ENSG00000136861_64 (sequence is synthesized)
ccctcctatccatttagtcctgcctgcatcactttgatgctgaaatttcttttagtttctcttactgcctttagaagggaacctaaacatcttaatctggctttcagtgtctttcaggat

SEQ ID NO: 331926 - DNA, 120 bp, Artificial Sequence
  ENSG00000136861_65 (sequence is synthesized)
ctgaaaatcatcctgataggtttaaaaagtggatctgttttgcatttgtgtgcaggttaattgcctagccctggagaggctgtggggggtacgagaaagaggaccagacacctctaccac

SEQ ID NO: 331927 - DNA, 120 bp, Artificial Sequence
  ENSG00000136861_66 (sequence is synthesized)
ccgcccacccagggtgtggagcaaaccagtaaatggttagactccaagcaatcaggcagcctgtcctctttgctctagagatgaaaaacaaaggcccagagagtggatggggcttgccca

SEQ ID NO: 331928 - DNA, 120 bp, Artificial Sequence
  ENSG00000136861_67 (sequence is synthesized)
aagtggcacagcaagtaggcagcagagctggagctagaaaccatttccagcttcgagtccagggctgttcctaaaccccactggactctctggagcgttgggtatcctgggattatcatc

SEQ ID NO: 331929 - DNA, 120 bp, Artificial Sequence
  ENSG00000136861_68 (sequence is synthesized)
ctgacacccatagggtaaatgtgtgtatccagtgggatgaggaatgccagcctgctttacaagcaagtattgtactaaagtttggactgacttttacttggatacctctagttaaaaaaa

SEQ ID NO: 331930 - DNA, 120 bp, Artificial Sequence
  ENSG00000136861_69 (sequence is synthesized)
ttttagaccccctttgtcccactctttgccggtagaagtcccgtttcctcaagactcatcatgaatacacatttctctgtgacatgcctttgctgctgtccttggtcagaatgactcatc

SEQ ID NO: 331931 - DNA, 120 bp, Artificial Sequence
  ENSG00000136861_70 (sequence is synthesized)
attcgtgtaattcttgctacttgctcaatccagttcaaatgctgctccttctcagaagccttccctgttctctccctccctgcacagataattgttttttctggctctggcccttcatca

SEQ ID NO: 331932 - DNA, 120 bp, Artificial Sequence
  ENSG00000136861_71 (sequence is synthesized)
ctctgctgttgcaccttctgcagtgtctgtgttctgatcagactgtgggctactggaatgcaggcaccagcttgagtcatccttgtgaatctggggtcttctgccgagtgggtggttgat

SEQ ID NO: 331933 - DNA, 120 bp, Artificial Sequence
  ENSG00000136861_72 (sequence is synthesized)
aagtgttggttgagttgacttgagcctctcctacaagatgactcataagcccagtgtggggtaatatacagaggtccaggagcgtgcctcttttcccctctgggcttgtgttgggtggca

SEQ ID NO: 331934 - DNA, 120 bp, Artificial Sequence
  ENSG00000136861_73 (sequence is synthesized)
tttgggcacgagggcctcttctagccctcctagctagcttcaacatcataagcgtcttgaacgcagagtgttacctgaaacagattttacatcctacttctcattttacagtttcagaga

SEQ ID NO: 331935 - DNA, 120 bp, Artificial Sequence
  ENSG00000136861_74 (sequence is synthesized)
tagaagaaggtgcattcataaacctgcttgcccctttgttcaatgagaaggccacattattactggaatccaggaggctaagaagtcccgcttgccaatcctaataaaaccatcccggtc

SEQ ID NO: 331936 - DNA, 120 bp, Artificial Sequence
  ENSG00000136861_75 (sequence is synthesized)
tggcttcgtagaacttggaccctcatatgtgggtctgcctgatcggggcacagtcccttcccacagctgcttcccagagggcctaggaaactaaagagtgctgggcaggcccaggcctct

SEQ ID NO: 331937 - DNA, 120 bp, Artificial Sequence
  ENSG00000136861_76 (sequence is synthesized)
accctccctgcgccattgccctccctggcccacagaagtgagcctgagggatacctggacagccaggtggccgtgcacagctgtagggtgttctctgaaccggcatagcatgctgtagcc

SEQ ID NO: 331938 - DNA, 120 bp, Artificial Sequence
  ENSG00000136861_77 (sequence is synthesized)
tcaaagaggtgttgttgatgcgttatttggccctggggtttgtgatgggtcaggtgggccctttgtacctccctctggtctggatgcttcagacctcgtgttgtctacatgtccgagccc

SEQ ID NO: 331939 - DNA, 120 bp, Artificial Sequence
  ENSG00000136861_78 (sequence is synthesized)
ttgggaaatggtcgtaagtacacaaaaccaggcattctcttgagtaaagaacaaggaaagtagacattggactgtgagcatcttgagctttcatatctctggggcccagaggcttccctg

SEQ ID NO: 331940 - DNA, 120 bp, Artificial Sequence
  ENSG00000136861_79 (sequence is synthesized)
aactggcacaccgtaggtgctcagtattttttgtatgtattgatttgctttccacctcctttcataaacactggactagaggaattgttgtccttttggccatacttcatgagtttcatt

SEQ ID NO: 331941 - DNA, 120 bp, Artificial Sequence
  ENSG00000136866_0 (sequence is synthesized)
atgtcggtctccagcggcgtccagattctgacaaagccagagaccgtggaccggaggagaagtgcggaaacgaccaaagaggccgggcgaccactggagatggctgtgtccgagcccgag

SEQ ID NO: 331942 - DNA, 120 bp, Artificial Sequence
  ENSG00000136866_1 (sequence is synthesized)
gccagcgccgcggtatcagtaacattcaaacatgtgactatggcctttacccagaaggaatggaagcaactggatcctgctcagagcaacctgtataatgatgtgatgctggagaactac

SEQ ID NO: 331943 - DNA, 120 bp, Artificial Sequence
  ENSG00000136866_2 (sequence is synthesized)
tgcaaccaagcctcaatggggtgtcaagctcccaaaccagacatgatctccaagttggaaaaaggagaagcaccatggttggggaaggggaaaagacccagtcaaggttgtccaagtaaa

SEQ ID NO: 331944 - DNA, 120 bp, Artificial Sequence
  ENSG00000136866_3 (sequence is synthesized)
atagcaagacccaagcaaaaagaaactgatggaaaagtccagaaagatgatgaccagcttgaaaatatccagaaatctcaaaacaaactcctcagggaagttgcagtcaagaagaaaact

SEQ ID NO: 331945 - DNA, 120 bp, Artificial Sequence
  ENSG00000136866_4 (sequence is synthesized)
caagctaagaagaatggcagtgactgtggttcactggggaaaaaaaataatttgcataaaaaacatgttccttcaaagaaaaggcttcttaaatttgagtcatgtggaaaaattttgaaa

SEQ ID NO: 331946 - DNA, 120 bp, Artificial Sequence
  ENSG00000136866_5 (sequence is synthesized)
cagaatttagatttacctgatcactcaagaaactgtgtaaaaaggaaatctgatgcagctaaagaacacaagaagtcattcaaccatagcttatctgatacaaggaaaggcaaaaagcaa

SEQ ID NO: 331947 - DNA, 120 bp, Artificial Sequence
  ENSG00000136866_6 (sequence is synthesized)
actggaaagaaacatgagaaattatccagccatagctcatctgataagtgtaacaaaactggcaaaaaacatgacaaattatgctgtcatagttcatcccatattaaacaggacaaaatt

SEQ ID NO: 331948 - DNA, 120 bp, Artificial Sequence
  ENSG00000136866_7 (sequence is synthesized)
caaactggagagaaacatgagaaatcacccagccttagctcatctactaagcatgaaaaacctcaagcttgtgtgaaaccctatgaatgtaatcaatgtggaaaggttctcagccataaa

SEQ ID NO: 331949 - DNA, 120 bp, Artificial Sequence
  ENSG00000136866_8 (sequence is synthesized)
aatgtaatgaatgtgggatagcctttagccaaaagtcacaccttgttgtacatcagagaactcacaccggagaaaaaccatatgaatgtattcagtgtggcaaagcccatggtcataaac

SEQ ID NO: 331950 - DNA, 120 bp, Artificial Sequence
  ENSG00000136866_9 (sequence is synthesized)
atgcactcactgaccatctaagaattcatactggagaaaagccctatgaatgtgctgaatgtgggaaaaccttcagacacagctcaaaccttattcaacatgtgagatctcacacaggtg

SEQ ID NO: 331951 - DNA, 120 bp, Artificial Sequence
  ENSG00000136866_10 (sequence is synthesized)
agaagccatatgaatgtaaggaatgtgggaagtcttttaggtataactcatctcttaccgaacatgtgagaacacatacaggtgaaataccatatgaatgcaatgaatgtggaaaagcct

SEQ ID NO: 331952 - DNA, 120 bp, Artificial Sequence
  ENSG00000136866_11 (sequence is synthesized)
ttaagtatagctcatcccttactaaacacatgagaattcatacaggtgagaaaccctttgaatgtaatgaatgtgggaaagctttcagcaagaagtcacacctcattatacatcaaagaa

SEQ ID NO: 331953 - DNA, 120 bp, Artificial Sequence
  ENSG00000136866_12 (sequence is synthesized)
ctcatactaaggagaaaccttataaatgtaatgagtgtggaaaagcctttggacatagctcatctcttacttaccatatgagaactcatacaggtgaaagtccctttgaatgtaatcaat

SEQ ID NO: 331954 - DNA, 120 bp, Artificial Sequence
  ENSG00000136866_13 (sequence is synthesized)
gtgggaaaggctttaaacaaattgaaggccttactcaacatcagagagttcatactggagagaaaccgtatgagtgtaatgaatgtgggaaagcctttagccaaaagtctcacctcattg

SEQ ID NO: 331955 - DNA, 120 bp, Artificial Sequence
  ENSG00000136866_14 (sequence is synthesized)
tacatcagagaactcatactggggagaaaccttatgaatgtaacgaatgtgaaaaagcctttaatgcaaaatcacagcttgttatacatcagcgatcccacactggagaaaaaccctatg

SEQ ID NO: 331956 - DNA, 120 bp, Artificial Sequence
  ENSG00000136866_15 (sequence is synthesized)
aatgtaatgaatgtgggaaaactttcaaacaaaatgcatccctaaccaaacatgtgaaaactcattcagaagataaatctcatgagtgaagttaatgtgggaaatttgttaactaaattt

SEQ ID NO: 331957 - DNA, 120 bp, Artificial Sequence
  ENSG00000136866_16 (sequence is synthesized)
actttgaaaatggatcttcatatagaatcagtggatggaaacaagggtttaaacttgatacaaaaccttttataaaaaatattgttttaactactcaattattataaatgatctacatgt

SEQ ID NO: 331958 - DNA, 120 bp, Artificial Sequence
  ENSG00000136866_17 (sequence is synthesized)
tcagattgaaattgaaagctttaaaaattgtgaattatttgaatattcaaagcaatggagaaacaagttatatatgctgacagttcctgtgtttcttcttgttttgtacttaagcaccat

SEQ ID NO: 331959 - DNA, 120 bp, Artificial Sequence
  ENSG00000136866_18 (sequence is synthesized)
atattagagttgaatttgcatatctgtttattgccttatgtaaatgagtgtggccatctgtataagcctctttgacattttcacccagctctttcttaatgtctgtgttggcttctgcat

SEQ ID NO: 331960 - DNA, 120 bp, Artificial Sequence
  ENSG00000136866_19 (sequence is synthesized)
cagcagaaatctttttaaaagggttgttatatatgtaaaaaatgttaacaggaaaatgagagaaaataaagcagctgaggatacaaatgtgctggtagggagcgatattcaagatatatt

SEQ ID NO: 331961 - DNA, 120 bp, Artificial Sequence
  ENSG00000136866_20 (sequence is synthesized)
gtgaagtgtgaaaaagtaggttgctgaaccatgtatatagtatgttcccctttgtgtacaaaagggtatgtttgtttaacctctgtctcttatctctgtatgtgtatgtatctttgtatg

SEQ ID NO: 331962 - DNA, 120 bp, Artificial Sequence
  ENSG00000136866_21 (sequence is synthesized)
catatatacatgtatctgtatgtgaatagactttgaaaaaatacagaataaacttcatggtggttgccattgggcagaggagtataggactggggtctaggataggagcaagacttcctt

SEQ ID NO: 331963 - DNA, 120 bp, Artificial Sequence
  ENSG00000136866_22 (sequence is synthesized)
gtatatttggatttttaaatcatgcacatgtattatttttataattaaaatattttaatatgcataaatcaacattatttaaggttgtcactgagcccctccacaacatgtgagatcaac

SEQ ID NO: 331964 - DNA, 120 bp, Artificial Sequence
  ENSG00000136866_23 (sequence is synthesized)
atgtgagatctcagattttgacagagttaaaatctttgtatgcttattcatgaatgatgatgaatctaaagtatatagtatgaaacttgatgttgaattcataaagactttttctatcac

SEQ ID NO: 331965 - DNA, 120 bp, Artificial Sequence
  ENSG00000136866_24 (sequence is synthesized)
acacaagttctttcattaacatagtgaattataacagcactgtttctacatttgccattttttgatgttgaattgtgattgcaggtgatgatgaattgtgattgcaggtgaatgaaagtg

SEQ ID NO: 331966 - DNA, 120 bp, Artificial Sequence
  ENSG00000136866_25 (sequence is synthesized)
tctcatattcaaagaactaacacacaaacacctcaatcagggaattcgaatgaaacaaatgtcacccctccctgttctcgctcaatattgggcattatttactggatcactgtactcttt

SEQ ID NO: 331967 - DNA, 120 bp, Artificial Sequence
  ENSG00000136866_26 (sequence is synthesized)
ctgagtgaacccagagttggcctcagaatcattgtgcagcgtgcattccagaaggtactatgcatcaacttggactgtcacaggagacctatttgccattgcacacctggatttttttta

SEQ ID NO: 331968 - DNA, 120 bp, Artificial Sequence
  ENSG00000136866_27 (sequence is synthesized)
ttgccattgcacacctggattttttttactcttgagccatagattaaaaatacttctggctgggcatggtgggtgcctgtaatctccagcactgtgggaggccaaggtgggtggatcact

SEQ ID NO: 331969 - DNA, 87 bp, Artificial Sequence
  ENSG00000136866_28 (sequence is synthesized)
attatctgggcatgctgtaatcagagagttgcttgcacccaggagatggaggttacagtgcactccagcctgggcagcagagtgagg

SEQ ID NO: 331970 - DNA, 120 bp, Artificial Sequence
  ENSG00000136866_29 (sequence is synthesized)
ggaggttacagtgcactccagcctgggcagcagagtgaggctctgtctcaaaaaaaagaaatacaaaaaatgcacaaaacttctgaactattttgaaatctaagttgttacactaaaagc

SEQ ID NO: 331971 - DNA, 120 bp, Artificial Sequence
  ENSG00000136866_30 (sequence is synthesized)
aatctaagttgttacactaaaagcagagacataagtacagaaatggttttcaaaaacatcatacctttattttaatacaatattaatttacataatataaaatattataatttggcatgt

SEQ ID NO: 331972 - DNA, 120 bp, Artificial Sequence
  ENSG00000136866_31 (sequence is synthesized)
aatccctacattatttcatttattcctcagaactaacatatgagcagtaatcgggacttgtctagtcatgttcaatcctgttgagtaaatatttcacctagacagtaatttagcataata

SEQ ID NO: 331973 - DNA, 120 bp, Artificial Sequence
  ENSG00000136866_32 (sequence is synthesized)
atgggccccaaagaaatatgtgcttaaatgccatctttacaaatatttatcattcaagctccttccttcctgacctcatttcagagaattataatgtgttaatataatatattgagaatg

SEQ ID NO: 331974 - DNA, 120 bp, Artificial Sequence
  ENSG00000136866_33 (sequence is synthesized)
gaatatgtgttcgtgtatgtgcatgtgcacacatgcatacacatgcacgggttgaaagctcaactcatgaatatatcccctcatttccaagtaacttatttatcacatgggaagaaaatg

SEQ ID NO: 331975 - DNA, 120 bp, Artificial Sequence
  ENSG00000136866_34 (sequence is synthesized)
caatatgaaagccatttctaccagtaatttcttaacaagtggaaatatagcactatgcacagaatgagtcatcactgtctagagctgtagaaagcctgcactttttagatggatgaaaca

SEQ ID NO: 331976 - DNA, 120 bp, Artificial Sequence
  ENSG00000136866_35 (sequence is synthesized)
gttgcaggttatggctatgttgaatttccacatgtcttggggaacccatagtattgccacatctgagacagtgagaattataggtatgcctgaatgatataaatgaatgctgaaagccac

SEQ ID NO: 331977 - DNA, 120 bp, Artificial Sequence
  ENSG00000136866_36 (sequence is synthesized)
tttgtgcagtaataaaatgaattaaaagttagcattgatgaatgaggaaaggatgtctaaatacaattggaggttagtataggaaaacagacacacagtggtaagtctgaatcgatacgt

SEQ ID NO: 331978 - DNA, 120 bp, Artificial Sequence
  ENSG00000136866_37 (sequence is synthesized)
aaactctagtgtgcataaaaattgcctgaatgatttgttaaaacacagacttgagaatgcaaattcttgggcctcgtcacagacatattggatcagaaaccctgtgggtgggccttgaga

SEQ ID NO: 331979 - DNA, 120 bp, Artificial Sequence
  ENSG00000136866_38 (sequence is synthesized)
atttgcattttaataagtttccagtggattcctgtgctgctggtctggggaccaccctttgagaaccactaatctaaatcatggtgtaagtaagtttaaaaaattatttttaaactgttt

SEQ ID NO: 331980 - DNA, 120 bp, Artificial Sequence
  ENSG00000136866_39 (sequence is synthesized)
ttcagatcctctttaagaaaatgaaggggcataaaagtaaattattattaacagttttgaaacatttatttattcaagtgatatgatcatctaagtgcctgagatacagcagtctacaaa

SEQ ID NO: 331981 - DNA, 120 bp, Artificial Sequence
  ENSG00000136866_40 (sequence is synthesized)
acaaaaagaaagcaaacaaacaaaacaaaaccctgttctcatagaccttaattctagaggaggacataggtaataaataaacaactacaatataaagtataacagatcactggatggcaa

SEQ ID NO: 331982 - DNA, 120 bp, Artificial Sequence
  ENSG00000136866_41 (sequence is synthesized)
aaagcaaaccaaggaaggggagggaagtgttggggaatgtaattttaaatatagtgatgggaagcaggcagtaagcttacttagatggtgacaaaagcaaagacccagagagggtaaaag

SEQ ID NO: 331983 - DNA, 120 bp, Artificial Sequence
  ENSG00000136866_42 (sequence is synthesized)
agcaaaccatgtatatatatatgacggaagagcattccagggatatatcttttagaatctgagggtgtgggaagagaaagatgttaaactcctctgacataaagaagaggaaaaaaagtg

SEQ ID NO: 331984 - DNA, 120 bp, Artificial Sequence
  ENSG00000136866_43 (sequence is synthesized)
gaaacatttttttaaatcaagatttaaaaaaaaattacatttgtgataggtagaaaacaatctgtcacacactgcttttggtagttgtgtaagtttgtacaacctaccaaaatgtaaatc

SEQ ID NO: 331985 - DNA, 120 bp, Artificial Sequence
  ENSG00000136866_44 (sequence is synthesized)
tgacagtatacatcaaagccttatgatggtcggcagtccatcgaggaatctattctatgttgtacaatcaaggcgtactatgatatttattgcagaacagagagaaatagcatatacatt

SEQ ID NO: 331986 - DNA, 120 bp, Artificial Sequence
  ENSG00000136866_45 (sequence is synthesized)
attgattaaataaagcatgattccttcaaaaattgagtaatatgacattaaaaaccacaatttcaaactatatttaagaagatacaaataattctttattattacttttactctcaggaa

SEQ ID NO: 331987 - DNA, 120 bp, Artificial Sequence
  ENSG00000136866_46 (sequence is synthesized)
ctcaggaatgtgtttgagtgatgcatctccaggcatcaagtgagtaatccaatattgaagaaaattaaaattttccacaaagtcccccttctagaagaatgtgctcatatcttttgacca

SEQ ID NO: 331988 - DNA, 120 bp, Artificial Sequence
  ENSG00000136866_47 (sequence is synthesized)
gaaatgagtcacatgaccacacctagtttcaggtggcttgaggaaattgaatctttctttttttgttttattttgttttgagacaaagtctctgtcacccagactggagtgtgcagtagt

SEQ ID NO: 331989 - DNA, 120 bp, Artificial Sequence
  ENSG00000136866_48 (sequence is synthesized)
tctctgtcacccagactggagtgtgcagtagtgcaatcttggctcattacaatctctacctcccaggcttaagcactcctcccaccttagccttcctagtagctgggactacaggtgcat

SEQ ID NO: 331990 - DNA, 70 bp, Artificial Sequence
  ENSG00000136866_49 (sequence is synthesized)
aactaaagtgtgagctaccacatttggccaaatctttaatttcttaaccttcatagtaaaggaaataaag

SEQ ID NO: 331991 - DNA, 120 bp, Artificial Sequence
  ENSG00000136866_50 (sequence is synthesized)
aatctttaatttcttaaccttcatagtaaaggaaataaagagacatgggcattgaaaaatggatgttgtacaaaccaacctgtagcatctaaaatactaaataaaaaacagtttacaaaa

SEQ ID NO: 331992 - DNA, 120 bp, Artificial Sequence
  ENSG00000136867_0 (sequence is synthesized)
gaactgactcggagcgaggagacccgagcgagcagacgcggccctggcgcccgccctgcgcactcaccatggcgatgcatttcatcttctcagatacagcggtgcttctgtttgatttct

SEQ ID NO: 331993 - DNA, 120 bp, Artificial Sequence
  ENSG00000136867_1 (sequence is synthesized)
ggagtgtccacagtcctgctggcatggccctttcggtgttggtgctcctgcttctggctgtactgtatgaaggcatcaaggttggcaaagccaagctgctcaaccaggtactggtgaacc

SEQ ID NO: 331994 - DNA, 120 bp, Artificial Sequence
  ENSG00000136867_2 (sequence is synthesized)
tgccaacctccatcagccagcagaccatcgcagagacagacggggactctgcaggctcagattcattccctgttggcagaacccaccacaggtggtatttgtgtcactttggccagtctc

SEQ ID NO: 331995 - DNA, 120 bp, Artificial Sequence
  ENSG00000136867_3 (sequence is synthesized)
taatccatgtcatccaggtggtcatcggctacttcatcatgctggccgtaatgtcctacaacacctggattttccttggtgtggtcttgggctctgctgtgggctactacctagcttacc

SEQ ID NO: 331996 - DNA, 120 bp, Artificial Sequence
  ENSG00000136867_4 (sequence is synthesized)
cacttctcagcacagcttagctggtgaggaacgtgcaggcactgaggctggagggacatggagccccctcttccagacactatacttccaactgccctttcttctgatggctattcctcc

SEQ ID NO: 331997 - DNA, 120 bp, Artificial Sequence
  ENSG00000136867_5 (sequence is synthesized)
accttattcccagcccctggaaactttgagctgaagccagcacttgctccctggagttcggaagccattgcagcaaccttccttctcagccagcctacgtagggcccaggcatggtcttg

SEQ ID NO: 331998 - DNA, 120 bp, Artificial Sequence
  ENSG00000136867_6 (sequence is synthesized)
tgtcttaagacagctgctgtgaccaaagggagaatggagataacaggggtggcagggttactgagcccatgacaatgcttctctgtgactcaaaccaggaatttccaaagatttcaagcc

SEQ ID NO: 331999 - DNA, 120 bp, Artificial Sequence
  ENSG00000136867_7 (sequence is synthesized)
ccctcagctctcctgctttgtgccttatctacaggagcatcgcccattggacttcctgacctcttctgtctttgagggacagagaccaagctagatcctttttctcacctttctgccttt

SEQ ID NO: 332000 - DNA, 120 bp, Artificial Sequence
  ENSG00000136867_8 (sequence is synthesized)
ggaacacatgaagatcatctcgtctatggatcatgttgacaaactaagttttttttatttttcccattgaactcctagttggcaattttgcacattcatacaaaaaaatttttaatgaaa

SEQ ID NO: 332001 - DNA, 120 bp, Artificial Sequence
  ENSG00000136867_9 (sequence is synthesized)
tgatttcattgattcatgatggatggcagaaactgctgagacctatttccctttcttggggagagaataagtgacagctgattaaaggcagagacacaggactgctttcaggctcctggt

SEQ ID NO: 332002 - DNA, 120 bp, Artificial Sequence
  ENSG00000136867_10 (sequence is synthesized)
ttattctctgatagactgagctccttccaccagaaggcactgcctgcaggaagaagatgatctgatggccgtgggtgtctgggaagctcttcgtggcctcaatgccctcctttatcctca

SEQ ID NO: 332003 - DNA, 120 bp, Artificial Sequence
  ENSG00000136867_11 (sequence is synthesized)
tctttcttctatgcagaacaaaaagctgcatctaataatgttcaatacttaatattctctatttattacttactgcttactcgtaatgatctagtggggaaacatgattcattcacttaa

SEQ ID NO: 332004 - DNA, 120 bp, Artificial Sequence
  ENSG00000136867_12 (sequence is synthesized)
aatactgattaagccatgggcaggtactgactgaagatgcaatccaaccaaagccattacattttttgagttagatgggactctctggatagttgaacctcttcactttataaaaaagga

SEQ ID NO: 332005 - DNA, 120 bp, Artificial Sequence
  ENSG00000136867_13 (sequence is synthesized)
aagagagaaaatcactgctgtatactaaatacctcacagattagatgaaaagatggttgtaagctttgggaattaaaaacaaacaaatacattttagtaaatatatatttttaaatagtc

SEQ ID NO: 332006 - DNA, 120 bp, Artificial Sequence
  ENSG00000136867_14 (sequence is synthesized)
ccgagcgagcagacgcggccctggcgcccgccctgcgcactcaccatggcgatgcatttcatcttctcagatacagcggtgcttctgtttgatttctggagtgtccacagtcctgctggg

SEQ ID NO: 332007 - DNA, 120 bp, Artificial Sequence
  ENSG00000136867_15 (sequence is synthesized)
agctatcgcggcggcggcggcggcggcggttgaactgactcggagcgaggagacccgagcgagcagacgcggccctggcgcccgccctgcgcactcaccatggcgggttcacctgggctg

SEQ ID NO: 332008 - DNA, 120 bp, Artificial Sequence
  ENSG00000136867_16 (sequence is synthesized)
gagagaacgacagcttgcaagactcgttcgtctttgaagaagtcatatcattttcttcatcccatgaagaatgtcatagaatttaagatacaggaagctcagcctgggcaacatagctag

SEQ ID NO: 332009 - DNA, 84 bp, Artificial Sequence
  ENSG00000136867_17 (sequence is synthesized)
tgaggaggattgcttgagcccagaagttccaggctgcagtgagccatgaccttcggcctgggcaacagaacaagacgtcctcaa

SEQ ID NO: 332010 - DNA, 120 bp, Artificial Sequence
  ENSG00000136867_18 (sequence is synthesized)
aaaaaaaaaaagatataggaagtgtatgtaggccatttagtgaaatgatcagccgtcctttaaaaagggaaatagatggaaagcacttgcaaaagttccccagccagtcagcctagcaac

SEQ ID NO: 332011 - DNA, 120 bp, Artificial Sequence
  ENSG00000136867_19 (sequence is synthesized)
tgggaccttcatctccttcccaacccttgtttacaaataaggaagcttttctcaaagtgtaagtaaccccaaatgaagaaatatagaagaaaacaagttccagggattgctccctccttc

SEQ ID NO: 332012 - DNA, 120 bp, Artificial Sequence
  ENSG00000136867_20 (sequence is synthesized)
accacagccccaccctgaaaaaagcacaaatcagttaaactttcagaggccaagattcatcccaagtaggaaaacaagattggggccctgccccttgcctatctgaccacaaagcccttt

SEQ ID NO: 332013 - DNA, 120 bp, Artificial Sequence
  ENSG00000136868_0 (sequence is synthesized)
aaatcctcggcctcggtggcggtggtggacacgtcgagccgggtagaagtggaggggccgttcgaagagtcgtgagggggtgacgggttaagattcggagagagaggtgctagtggctgg

SEQ ID NO: 332014 - DNA, 120 bp, Artificial Sequence
  ENSG00000136868_1 (sequence is synthesized)
acttgacctggaaagaatcttctgctgactctcaacttttcctggaaaaaatggatcattcccaccatatggggatgagctatatggactccaacagtaccatgcaaccttctcaccatc

SEQ ID NO: 332015 - DNA, 120 bp, Artificial Sequence
  ENSG00000136868_2 (sequence is synthesized)
acccaaccacttcagcctcacactcccatggtggaggagacagcagcatgatgatgatgcctatgaccttctactttggctttaagaatgtggaactactgttttccggtttggtgatca

SEQ ID NO: 332016 - DNA, 120 bp, Artificial Sequence
  ENSG00000136868_3 (sequence is synthesized)
atacagctggagaaatggctggagcttttgtggcagtgtttttactagcaatgttctatgaaggactcaagatagcccgagagagcctgctgcgtaagtcacaagtcagcattcgctaca

SEQ ID NO: 332017 - DNA, 120 bp, Artificial Sequence
  ENSG00000136868_4 (sequence is synthesized)
attccatgcctgtcccaggaccaaatggaaccatccttatggagacacacaaaactgttgggcaacagatgctgagctttcctcacctcctgcaaacagtgctgcacatcatccaggtgg

SEQ ID NO: 332018 - DNA, 120 bp, Artificial Sequence
  ENSG00000136868_5 (sequence is synthesized)
tcataagctacttcctcatgctcatcttcatgacctacaacgggtacctctgcattgcagtagcagcaggggccggtacaggatacttcctcttcagctggaagaaggcagtggtagtgg

SEQ ID NO: 332019 - DNA, 120 bp, Artificial Sequence
  ENSG00000136868_6 (sequence is synthesized)
atatcacagagcattgccattgacatcaaactctatggcgtggccttatcgattgcagtgggaagttgttgaagacttgaagacgtgattcctgctccaatcatcccttcttgctcctct

SEQ ID NO: 332020 - DNA, 120 bp, Artificial Sequence
  ENSG00000136868_7 (sequence is synthesized)
acacacacacacacacacacacccctgctcaacagaggtttagtttacagtctctgaactaaagtagtaacctcccaaattgttttttctaataagctgagattcccatttctcttaagg

SEQ ID NO: 332021 - DNA, 120 bp, Artificial Sequence
  ENSG00000136868_8 (sequence is synthesized)
gattcccatttctcttaaggagaagccacccatgagatgtcttttccttctccatcatcttagagccaagttatatgttcttgtctaatccatgtagctttttgttcaatgacttgatca

SEQ ID NO: 332022 - DNA, 120 bp, Artificial Sequence
  ENSG00000136868_9 (sequence is synthesized)
tctgcttcctttttgaatttttaacagatagtaagtaaatttggtggttttttcccctgggtcagtgatggaaaggggttaacttcagccaggattgatggcagctgagggaaattcttg

SEQ ID NO: 332023 - DNA, 120 bp, Artificial Sequence
  ENSG00000136868_10 (sequence is synthesized)
tcagccaggattgatggcagctgagggaaattcttgcccaactaaacccagaactcaaacttaacattagaaaataaggtccagggccggacacagtggcccatgcctgtaatcccagca

SEQ ID NO: 332024 - DNA, 120 bp, Artificial Sequence
  ENSG00000136868_11 (sequence is synthesized)
tggattcaatgagtgggaaatacattgtgcctttctctagatgtgatacgttataccaaaatctttgtagtgtgcagagcggtggtttgagactaaatacaggcttagaacttgcagagt

SEQ ID NO: 332025 - DNA, 120 bp, Artificial Sequence
  ENSG00000136868_12 (sequence is synthesized)
gtgtattcttggatggctgatgcatcgacttgcattcccacttaacactttgattagcatgaacttgccaatcaaaaaatgacaatcaatttgagaaaatagaaatagatatttttaaat

SEQ ID NO: 332026 - DNA, 120 bp, Artificial Sequence
  ENSG00000136868_13 (sequence is synthesized)
aaaaccattcacagtttactttgtcttgataccttggtttgtcccagctgaagtgaagcaagagagtttgaattaatttttccattataatgttttcgcatgtctgcctctaaaactgtg

SEQ ID NO: 332027 - DNA, 120 bp, Artificial Sequence
  ENSG00000136868_14 (sequence is synthesized)
attttcaagctttagcgtgcatcagaatcacctgtagggcttgttaaaacactaattgctgggcctcaacccaaaagcccccaaagtggcacttctgagttcctgctgatgttacaaggg

SEQ ID NO: 332028 - DNA, 120 bp, Artificial Sequence
  ENSG00000136868_15 (sequence is synthesized)
accacacttttgagaatctgtgctttaagctaaggaaatattgcctggtgggttggctgcctggtattgggcatggaaatttgaattgctgattggtagatggtgtgtctggacttaact

SEQ ID NO: 332029 - DNA, 120 bp, Artificial Sequence
  ENSG00000136868_16 (sequence is synthesized)
cacgtagtaaatactgctgatcaatacctaatcattccacatttattgagctccacctgtgtgtatgtgtacccaagcacacatgtgtgaagggctatagccaaagtatttttactagcc

SEQ ID NO: 332030 - DNA, 120 bp, Artificial Sequence
  ENSG00000136868_17 (sequence is synthesized)
cagtgtaaatctaccagtcatgggccagaagggcaaaagcccagctttctctttggaaagactcaggctgtggtttgttgatggccaggttttcctcaggctccaacaactgtgcttata

SEQ ID NO: 332031 - DNA, 120 bp, Artificial Sequence
  ENSG00000136868_18 (sequence is synthesized)
ccaagcagatcctcatcctccatataatcatctttgttattcgtgggggtttaattacattacaagtggccaaaacccctgttctcagtgaagaaccacattggatttgtattctgttca

SEQ ID NO: 332032 - DNA, 120 bp, Artificial Sequence
  ENSG00000136868_19 (sequence is synthesized)
gttgtagtctacactgcagtcttattcctggttcaaactacctctttaaattgatttgtcttgtgctggtctgttaaatcctgccctccttggtgctagatccagttgtgcctcagggca

SEQ ID NO: 332033 - DNA, 120 bp, Artificial Sequence
  ENSG00000136868_20 (sequence is synthesized)
gaggaaacaaaacacagctatcctgttggcctgtgttgtggttttgaagtttgtactttctctgtgggtgccagttaaatattggagagcaaggaatgtggacttgtatggctttgaacc

SEQ ID NO: 332034 - DNA, 120 bp, Artificial Sequence
  ENSG00000136868_21 (sequence is synthesized)
aagagagggttatgagcctactggattgaggttaaaatccaagaaccaacatttagagctttgtgcttttctctcattccatcactttgtaatgatgatacttaacatgagcagggtgaa

SEQ ID NO: 332035 - DNA, 120 bp, Artificial Sequence
  ENSG00000136868_22 (sequence is synthesized)
tgacaggtactgacgaagtccaacacaaaggtataatacagcctgttgtctaaagccaaggagtcataaaaccatgagaaataaataggaatcaatagttagtagtgacattggtgctct

SEQ ID NO: 332036 - DNA, 120 bp, Artificial Sequence
  ENSG00000136868_23 (sequence is synthesized)
agtagtgacattggtgctctctagaaatctcagcatgagctgctatagaataccctcccagcaacaaaacctaatcagtaaggccagctagacccaatggctcatgcctgtaatcccaac

SEQ ID NO: 332037 - DNA, 88 bp, Artificial Sequence
  ENSG00000136868_24 (sequence is synthesized)
aacatagtgagatcctatctctataaaaaatatagtcctggctatttgggaggctgaggcaggaggattgctttagccctggaggtcg

SEQ ID NO: 332038 - DNA, 120 bp, Artificial Sequence
  ENSG00000136868_25 (sequence is synthesized)
ggaggctgaggcaggaggattgctttagccctggaggtcgaggctgcagtaagccatgattgcgccactgcactcagcccgggtgacaaagcaagaccctgtctcagaaaaaaagaaaat

SEQ ID NO: 332039 - DNA, 120 bp, Artificial Sequence
  ENSG00000136868_26 (sequence is synthesized)
tcaaggccagttaagacaaaatgctatgactttgaaattcacagaaagaaataacagtttagattaggtcttcaggtattcaggatagagataatctcctgaaaaacctgaatttcagag

SEQ ID NO: 332040 - DNA, 120 bp, Artificial Sequence
  ENSG00000136868_27 (sequence is synthesized)
attcttagactggctgccaaaggatgaagctagtgaaggagaaaaagcttaaattccatcttgagctcttggattgtgataatacaatgatttcattaacttttcatttctgtatacctg

SEQ ID NO: 332041 - DNA, 120 bp, Artificial Sequence
  ENSG00000136868_28 (sequence is synthesized)
ttcatttggaatttaatgcttgacttctttgttcattttggatctaaacttctcttttcttccttccccattcacatctattagaagactgcatcaccatttctttggcccccttactct

SEQ ID NO: 332042 - DNA, 120 bp, Artificial Sequence
  ENSG00000136868_29 (sequence is synthesized)
gttgtcctttcccttttctttcagtttttttaatcgcatgtctagtatattaagtctccatagccctcctgatgcagtagacagtgctatgctgtggatataataccaaccagaaattgg

SEQ ID NO: 332043 - DNA, 120 bp, Artificial Sequence
  ENSG00000136868_30 (sequence is synthesized)
catttataaacctgttaagagactttaagcatgcttcaagaggcagttgacccactggaatttctataaggctggtacccttcccagagttacagaatcttaggtgccgtctctagtctg

SEQ ID NO: 332044 - DNA, 120 bp, Artificial Sequence
  ENSG00000136868_31 (sequence is synthesized)
tgagggaggaactcccagcatccccattgcccacaaatggaatcctcactgtatccactaggagattagaaattaaggtttcttcactacttctatggtagggttgtctgaaattccctt

SEQ ID NO: 332045 - DNA, 120 bp, Artificial Sequence
  ENSG00000136868_32 (sequence is synthesized)
tcaggctgtgggtactggtcttgggttctagtcataaggggttccttataaggagcaggcggaggggagtacactttcatgtgatttaattttgatcctgccctctccagctgctccttc

SEQ ID NO: 332046 - DNA, 120 bp, Artificial Sequence
  ENSG00000136868_33 (sequence is synthesized)
ccctctccagctgctccttcaaaagatacatcaaaagatagaaactctgggctgggcacagtggctcacacactttgggaggccaagcgggggtgcagatcacctgaggtcaggagtttg

SEQ ID NO: 332047 - DNA, 82 bp, Artificial Sequence
  ENSG00000136868_34 (sequence is synthesized)
tacaaagtctgcatttgatataatgccttaattactgggtctacaattaatgttgactgttttagattgtaagctcctggag

SEQ ID NO: 332048 - DNA, 120 bp, Artificial Sequence
  ENSG00000136868_35 (sequence is synthesized)
acaattaatgttgactgttttagattgtaagctcctggagagcagtattgctgtagtaggaatgttttaacagtgtcatatgaaaaagaacaaaataaatattttgattttgtgattcta

SEQ ID NO: 332049 - DNA, 120 bp, Artificial Sequence
  ENSG00000136868_36 (sequence is synthesized)
tagaagtggaggggccgttcgaagagtcgtgagggggtgacgggttaagattcggagagagaggtgctagtggctggacttgacctggaaaggatcttgctttgttgcccaggctggagt

SEQ ID NO: 332050 - DNA, 72 bp, Artificial Sequence
  ENSG00000136868_37 (sequence is synthesized)
tttttgtatttttgatagagtccagtctgcccaccttggcctcttagagtgctgggattacaggcatgagcc

SEQ ID NO: 332051 - DNA, 120 bp, Artificial Sequence
  ENSG00000136868_38 (sequence is synthesized)
accatgtccagcctcatttgcattcttgtactgcattttcattaaatcattcaagttccttttatcttgtgtaacatatttaattgcattttcctactgaataaaaaaaagggaacagtt

SEQ ID NO: 332052 - DNA, 120 bp, Artificial Sequence
  ENSG00000136869_0 (sequence is synthesized)
agacggtgatagcgagccacgcattcacagggccactgctgctcacagaagcagtgaggatgatgccaggatgatgtctgcctcgcgcctggctgggactctgatcccagccatggcctt

SEQ ID NO: 332053 - DNA, 120 bp, Artificial Sequence
  ENSG00000136869_1 (sequence is synthesized)
cctctcctgcgtgagaccagaaagctgggagccctgcgtggaggtggttcctaatattacttatcaatgcatggagctgaatttctacaaaatccccgacaacctccccttctcaaccaa

SEQ ID NO: 332054 - DNA, 120 bp, Artificial Sequence
  ENSG00000136869_2 (sequence is synthesized)
gaacctggacctgagctttaatcccctgaggcatttaggcagctatagcttcttcagtttcccagaactgcaggtgctggatttatccaggtgtgaaatccagacaattgaagatggggc

SEQ ID NO: 332055 - DNA, 120 bp, Artificial Sequence
  ENSG00000136869_3 (sequence is synthesized)
atatcagagcctaagccacctctctaccttaatattgacaggaaaccccatccagagtttagccctgggagccttttctggactatcaagtttacagaagctggtggctgtggagacaaa

SEQ ID NO: 332056 - DNA, 120 bp, Artificial Sequence
  ENSG00000136869_4 (sequence is synthesized)
tctagcatctctagagaacttccccattggacatctcaaaactttgaaagaacttaatgtggctcacaatcttatccaatctttcaaattacctgagtatttttctaatctgaccaatct

SEQ ID NO: 332057 - DNA, 120 bp, Artificial Sequence
  ENSG00000136869_5 (sequence is synthesized)
agagcacttggacctttccagcaacaagattcaaagtatttattgcacagacttgcgggttctacatcaaatgcccctactcaatctctctttagacctgtccctgaaccctatgaactt

SEQ ID NO: 332058 - DNA, 120 bp, Artificial Sequence
  ENSG00000136869_6 (sequence is synthesized)
tatccaaccaggtgcatttaaagaaattaggcttcataagctgactttaagaaataattttgatagtttaaatgtaatgaaaacttgtattcaaggtctggctggtttagaagtccatcg

SEQ ID NO: 332059 - DNA, 120 bp, Artificial Sequence
  ENSG00000136869_7 (sequence is synthesized)
tttggttctgggagaatttagaaatgaaggaaacttggaaaagtttgacaaatctgctctagagggcctgtgcaatttgaccattgaagaattccgattagcatacttagactactacct

SEQ ID NO: 332060 - DNA, 120 bp, Artificial Sequence
  ENSG00000136869_8 (sequence is synthesized)
cgatgatattattgacttatttaattgtttgacaaatgtttcttcattttccctggtgagtgtgactattgaaagggtaaaagacttttcttataatttcggatggcaacatttagaatt

SEQ ID NO: 332061 - DNA, 120 bp, Artificial Sequence
  ENSG00000136869_9 (sequence is synthesized)
agttaactgtaaatttggacagtttcccacattgaaactcaaatctctcaaaaggcttactttcacttccaacaaaggtgggaatgctttttcagaagttgatctaccaagccttgagtt

SEQ ID NO: 332062 - DNA, 120 bp, Artificial Sequence
  ENSG00000136869_10 (sequence is synthesized)
tctagatctcagtagaaatggcttgagtttcaaaggttgctgttctcaaagtgattttgggacaaccagcctaaagtatttagatctgagcttcaatggtgttattaccatgagttcaaa

SEQ ID NO: 332063 - DNA, 120 bp, Artificial Sequence
  ENSG00000136869_11 (sequence is synthesized)
cttcttgggcttagaacaactagaacatctggatttccagcattccaatttgaaacaaatgagtgagttttcagtattcctatcactcagaaacctcatttaccttgacatttctcatac

SEQ ID NO: 332064 - DNA, 120 bp, Artificial Sequence
  ENSG00000136869_12 (sequence is synthesized)
tcacaccagagttgctttcaatggcatcttcaatggcttgtccagtctcgaagtcttgaaaatggctggcaattctttccaggaaaacttccttccagatatcttcacagagctgagaaa

SEQ ID NO: 332065 - DNA, 120 bp, Artificial Sequence
  ENSG00000136869_13 (sequence is synthesized)
cttgaccttcctggacctctctcagtgtcaactggagcagttgtctccaacagcatttaactcactctccagtcttcaggtactaaatatgagccacaacaacttcttttcattggatac

SEQ ID NO: 332066 - DNA, 120 bp, Artificial Sequence
  ENSG00000136869_14 (sequence is synthesized)
gtttccttataagtgtctgaactccctccaggttcttgattacagtctcaatcacataatgacttccaaaaaacaggaactacagcattttccaagtagtctagctttcttaaatcttac

SEQ ID NO: 332067 - DNA, 120 bp, Artificial Sequence
  ENSG00000136869_15 (sequence is synthesized)
tcagaatgactttgcttgtacttgtgaacaccagagtttcctgcaatggatcaaggaccagaggcagctcttggtggaagttgaacgaatggaatgtgcaacaccttcagataagcaggg

SEQ ID NO: 332068 - DNA, 120 bp, Artificial Sequence
  ENSG00000136869_16 (sequence is synthesized)
catgcctgtgctgagtttgaatatcacctgtcagatgaataagaccatcattggtgtgtcggtcctcagtgtgcttgtagtatctgttgtagcagttctggtctataagttctattttca

SEQ ID NO: 332069 - DNA, 120 bp, Artificial Sequence
  ENSG00000136869_17 (sequence is synthesized)
cctgatgcttcttgctggctgcataaagtatggtagaggtgaaaacatctatgatgcctttgttatctactcaagccaggatgaggactgggtaaggaatgagctagtaaagaatttaga

SEQ ID NO: 332070 - DNA, 120 bp, Artificial Sequence
  ENSG00000136869_18 (sequence is synthesized)
agaaggggtgcctccatttcagctctgccttcactacagagactttattcccggtgtggccattgctgccaacatcatccatgaaggtttccataaaagccgaaaggtgattgttgtggt

SEQ ID NO: 332071 - DNA, 120 bp, Artificial Sequence
  ENSG00000136869_19 (sequence is synthesized)
gtcccagcacttcatccagagccgctggtgtatctttgaatatgagattgctcagacctggcagtttctgagcagtcgtgctggtatcatcttcattgtcctgcagaaggtggagaagac

SEQ ID NO: 332072 - DNA, 120 bp, Artificial Sequence
  ENSG00000136869_20 (sequence is synthesized)
cctgctcaggcagcaggtggagctgtaccgccttctcagcaggaacacttacctggagtgggaggacagtgtcctggggcggcacatcttctggagacgactcagaaaagccctgctgga

SEQ ID NO: 332073 - DNA, 120 bp, Artificial Sequence
  ENSG00000136869_21 (sequence is synthesized)
tggtaaatcatggaatccagaaggaacagtgggtacaggatgcaattggcaggaagcaacatctatctgaagaggaaaaataaaaacctcctgaggcatttcttgcccagctgggtccaa

SEQ ID NO: 332074 - DNA, 120 bp, Artificial Sequence
  ENSG00000136869_22 (sequence is synthesized)
cacttgttcagttaataagtattaaatgctgccacatgtcaggccttatgctaagggtgagtaattccatggtgcactagatatgcagggctgctaatctcaaggagcttccagtgcaga

SEQ ID NO: 332075 - DNA, 120 bp, Artificial Sequence
  ENSG00000136869_23 (sequence is synthesized)
gggaataaatgctagactaaaatacagagtcttccaggtgggcatttcaaccaactcagtcaaggaacccatgacaaagaaagtcatttcaactcttacctcatcaagttgaataaagac

SEQ ID NO: 332076 - DNA, 120 bp, Artificial Sequence
  ENSG00000136869_24 (sequence is synthesized)
agagaaaacagaaagagacattgttcttttcctgagtcttttgaatggaaattgtattatgttatagccatcataaaaccattttggtagttttgactgaactgggtgttcactttttcc

SEQ ID NO: 332077 - DNA, 120 bp, Artificial Sequence
  ENSG00000136869_25 (sequence is synthesized)
tttttgattgaatacaatttaaattctacttgatgactgcagtcgtcaaggggctcctgatgcaagatgccccttccattttaagtctgtctccttacagaggttaaagtctagtggcta

SEQ ID NO: 332078 - DNA, 120 bp, Artificial Sequence
  ENSG00000136869_26 (sequence is synthesized)
attcctaaggaaacctgattaacacatgctcacaaccatcctggtcattctcgagcatgttctattttttaactaatcacccctgatatatttttatttttatatatccagttttcattt

SEQ ID NO: 332079 - DNA, 120 bp, Artificial Sequence
  ENSG00000136869_27 (sequence is synthesized)
ttttacgtcttgcctataagctaatatcataaataaggttgtttaagacgtgcttcaaatatccatattaaccactatttttcaaggaagtatggaaaagtacactctgtcactttgtca

SEQ ID NO: 332080 - DNA, 120 bp, Artificial Sequence
  ENSG00000136869_28 (sequence is synthesized)
ctcgatgtcattccaaagttattgcctactaagtaatgactgtcatgaaagcagcattgaaataatttgtttaaagggggcactcttttaaacgggaagaaaatttccgcttcctggtct

SEQ ID NO: 332081 - DNA, 120 bp, Artificial Sequence
  ENSG00000136869_29 (sequence is synthesized)
tatcatggacaatttgggctagaggcaggaaggaagtgggatgacctcaggaggtcaccttttcttgattccagaaacatatgggctgataaacccggggtgacctcatgaaatgagttg

SEQ ID NO: 332082 - DNA, 120 bp, Artificial Sequence
  ENSG00000136869_30 (sequence is synthesized)
cagcagaagtttatttttttcagaacaagtgatgtttgatggacctctgaatctctttagggagacacagatggctgggatccctcccctgtacccttctcactgccaggagaactacgt

SEQ ID NO: 332083 - DNA, 120 bp, Artificial Sequence
  ENSG00000136869_31 (sequence is synthesized)
gtgaaggtattcaaggcagggagtatacattgctgtttcctgttgggcaatgctccttgaccacattttgggaagagtggatgttatcattgagaaaacaatgtgtctggaattaatggg

SEQ ID NO: 332084 - DNA, 120 bp, Artificial Sequence
  ENSG00000136869_32 (sequence is synthesized)
gttcttataaagaaggttcccagaaaagaatgttcatccagcctcctcagaaacagaacattcaagaaaaggacaatcaggatgtcatcagggaaatgaaaataaaaaccacaatgagat

SEQ ID NO: 332085 - DNA, 120 bp, Artificial Sequence
  ENSG00000136869_33 (sequence is synthesized)
atcaccttataccaggtagaatggctactataaaaaaatgaagtgtcatcaaggatatagagaaattggaacccttcttcactgctggagggaatggaaaatggtgtagccgttatgaaa

SEQ ID NO: 332086 - DNA, 120 bp, Artificial Sequence
  ENSG00000136869_34 (sequence is synthesized)
aacagtacggaggtttctcaaaaattaaaaatagaactgctatatgatccagcaatctcacttctgtatatatacccaaaataattgaaatcagaatttcaagaaaatatttacactccc

SEQ ID NO: 332087 - DNA, 120 bp, Artificial Sequence
  ENSG00000136869_35 (sequence is synthesized)
atgttcattgtggcactcttcacaatcactgtttccaaagttatggaaacaacccaaatttccattgaaaaataaatggacaaagaaaatgtgcatatacgtacaatgggatattattca

SEQ ID NO: 332088 - DNA, 120 bp, Artificial Sequence
  ENSG00000136869_36 (sequence is synthesized)
gcctaaaaaaagggggaatcctgttatttatgacaacatgaataaacccggaggccattatgctatgtaaaatgagcaagtaacagaaagacaaatactgcctgatttcatttatatgag

SEQ ID NO: 332089 - DNA, 120 bp, Artificial Sequence
  ENSG00000136869_37 (sequence is synthesized)
gttctaaaatagtcaaactcatagaagcagagaatagaacagtggttcctagggaaaaggaggaagggagaaatgaggaaatagggagttgtctaattggtataaaattatagtatgcaa

SEQ ID NO: 332090 - DNA, 120 bp, Artificial Sequence
  ENSG00000136869_38 (sequence is synthesized)
gatgaattagctctaaagatcagctgtatagcagagttcgtataatgaacaatactgtattatgcacttaacattttgttaagagggtacctctcatgttaagtgttcttaccatataca

SEQ ID NO: 332091 - DNA, 120 bp, Artificial Sequence
  ENSG00000136869_39 (sequence is synthesized)
tatacacaaggaagcttttggaggtgatggatatatttattaccttgattgtggtgatggtttgacaggtatgtgactatgtctaaactcatcaaattgtatacattaaatatatgcagt

SEQ ID NO: 332092 - DNA, 120 bp, Artificial Sequence
  ENSG00000136869_40 (sequence is synthesized)
tttataatatcaattatgtctgaatgaagctataaaaaagaaaagacaacaaaattcagttgtcaaaactggaaatatgaccacagtcagaagtgtttgttactgagtgtttcagagtgt

SEQ ID NO: 332093 - DNA, 120 bp, Artificial Sequence
  ENSG00000136869_41 (sequence is synthesized)
gtttggtttgagcaggtctagggtgattgaacatccctgggtgtgtttccatgtctcatgtactagtgaaagtagatgtgtgcatttgtgcacatatccctatgtatccctatcagggct

SEQ ID NO: 332094 - DNA, 120 bp, Artificial Sequence
  ENSG00000136869_42 (sequence is synthesized)
gtgtgtatttgaaagtgtgtgtgtccgcatgatcatatctgtatagaagagagtgtgattatatttcttgaagaatacatccatttgaaatggatgtctatggctgtttgagatgagttc

SEQ ID NO: 332095 - DNA, 120 bp, Artificial Sequence
  ENSG00000136869_43 (sequence is synthesized)
tctactcttgtgcttgtacagtagtctccccttatcccttatgcttggtggatacgttcttagaccccaagtggatctctgagaccgcagatggtaccaaacctcatatatgcaatattt

SEQ ID NO: 332096 - DNA, 120 bp, Artificial Sequence
  ENSG00000136869_44 (sequence is synthesized)
aaatacctaagataaagttcatcttctgaattaggcacagtaagagattaacaataactaacaataaaattgaatagttataataatatattgtaataaaagttatgtgaatgtgatctc

SEQ ID NO: 332097 - DNA, 120 bp, Artificial Sequence
  ENSG00000136869_45 (sequence is synthesized)
gaatgtgatctctttctttctctctctcaaaatatcttactgtactgtactcacctattttcagaccataactgaccatgaaacctgggaaagtgaaactgtggataagtgaggaactaa

SEQ ID NO: 332098 - DNA, 120 bp, Artificial Sequence
  ENSG00000136869_46 (sequence is synthesized)
catacatacatgattgtttatctacagatgtatgcctcagtttcttagtatgcttgaaaatgtatgattttgtgtatatccgtgctacatgtaagtgtggttctattcatatttgaatat

SEQ ID NO: 332099 - DNA, 120 bp, Artificial Sequence
  ENSG00000136869_47 (sequence is synthesized)
gaattctgcataagtgtgtttattcaagcaaatgtacaaggctctgagaaggaagatcaacatacaacttggaatatttcaaggccgaaatattcaaggctgacattggcctccttccta

SEQ ID NO: 332100 - DNA, 120 bp, Artificial Sequence
  ENSG00000136869_48 (sequence is synthesized)
tcagttccctctcccagatggaaattctagaaatggcaggtgaggtggacaagcagggaaagaaattatatgcatagaacagaaggagaagaaagagtaaagtcaggcctcagccagcct

SEQ ID NO: 332101 - DNA, 120 bp, Artificial Sequence
  ENSG00000136869_49 (sequence is synthesized)
ctttttagctctttaaatcctctggatttaagagggataaagggtggaataaggataaattaatgccaattgtaatgccttaaatttgtgtgataccttacaacttgaaacatattcaca

SEQ ID NO: 332102 - DNA, 120 bp, Artificial Sequence
  ENSG00000136869_50 (sequence is synthesized)
aaactatatatttgaatatctcattagctgagtaaggtagcaaatcataattaactttttccattttattgatgggaaagctgaagttcaatgaagtaaatttttcaatagcccacagag

SEQ ID NO: 332103 - DNA, 120 bp, Artificial Sequence
  ENSG00000136869_51 (sequence is synthesized)
taggaaagtgacaaaacctgagcctgggcctccaggtcactcaaggacactttctttcttccacacccaattgcttcatgcttaaagttggcaaaacaggaagtgaaactcctgcagttt

SEQ ID NO: 332104 - DNA, 120 bp, Artificial Sequence
  ENSG00000136869_52 (sequence is synthesized)
tacataccaaatgatttatttataaccctatctttccataaaggacttgaaggagcttcaaacaaaggatatgtgaacaatagggttaatcaataataagtagaaaatctggacatagaa

SEQ ID NO: 332105 - DNA, 120 bp, Artificial Sequence
  ENSG00000136869_53 (sequence is synthesized)
taaaaagaggagagaaagacaccgagaatgagcgttaatacagtgctttccatttttctggtgttttgagtagcgtggcttttggagaaagccaaaactcaaattcactccttatcaact

SEQ ID NO: 332106 - DNA, 120 bp, Artificial Sequence
  ENSG00000136869_54 (sequence is synthesized)
gtgtgccttgggctccatttctctgagagtctacttagctccaatgtaaaataagaatagaactatgactttgtaaggttgctctaaggattgaaaatcatgtattatgttcaatacggg

SEQ ID NO: 332107 - DNA, 120 bp, Artificial Sequence
  ENSG00000136869_55 (sequence is synthesized)
gacactgtccttatgggtgagtactcccctaagactttattaagagggcactaggagaagcactgggaggtcttctcagtaacaacactaaagtaattgctatttttccagcctgtggaa

SEQ ID NO: 332108 - DNA, 120 bp, Artificial Sequence
  ENSG00000136869_56 (sequence is synthesized)
ccacagaagtgactgtaactaaaattagacatttctttctgattcattctctactcacgggattgtcagaccccagtcttcttctggactctataaactttttagaaatcatcagcaggc

SEQ ID NO: 332109 - DNA, 120 bp, Artificial Sequence
  ENSG00000136869_57 (sequence is synthesized)
tcctggagaagcttaaatgaactcacacaatatgtgacagtgaactccctgggagagtgaaaaccaaagtctaagccagtgtctccatttacttgtgtgattgtgggcaagtcattcaag

SEQ ID NO: 332110 - DNA, 120 bp, Artificial Sequence
  ENSG00000136869_58 (sequence is synthesized)
tgctttgaggctcaggtcttaattcatgaaatggaggtaataataccttgttggcagacctcacttggttaaaatgataatgttgatagttacaatagttacatttaattgatcaattgt

SEQ ID NO: 332111 - DNA, 120 bp, Artificial Sequence
  ENSG00000136869_59 (sequence is synthesized)
tttatgcaagggctttatttgtgctatctcagtttgtcacatcaatgaattagaaagatacgaaagtatttccaatttacaaatgaggagtctgagtctgggagtcattctgtcatgtgt

SEQ ID NO: 332112 - DNA, 120 bp, Artificial Sequence
  ENSG00000136869_60 (sequence is synthesized)
ccactgtcacctgctcattggtggcagcactgagattaggatctaagtccacttcaccgcagaagcagggcttctaaatactgttctatggcaagagcaccctgctctcacaaaatgcat

SEQ ID NO: 332113 - DNA, 120 bp, Artificial Sequence
  ENSG00000136869_61 (sequence is synthesized)
aaaacttcctatctcaccattataattttgactgatattaaacaaagagaagtattattattattacttgtttttatttatattacagctgtaagagccaggaaaaatgtgatctaagtt

SEQ ID NO: 332114 - DNA, 120 bp, Artificial Sequence
  ENSG00000136869_62 (sequence is synthesized)
atgtgatcaaagattttttaacagtgaacaaatcaggcccactagatgatggcctttctttgaacaacatgcctagggttgctctatcatgtctacagttggtctgacttcctgacgggc

SEQ ID NO: 332115 - DNA, 120 bp, Artificial Sequence
  ENSG00000136869_63 (sequence is synthesized)
atcacagacttgtgattaaacacagaggttatgggggaagttccaaaagcttaggactttccagatggttggaataagatcacacactctggctgcccttatggagatcaccgaactttt

SEQ ID NO: 332116 - DNA, 120 bp, Artificial Sequence
  ENSG00000136869_64 (sequence is synthesized)
caactcaaagtaaaatctgtggagtaaatggtcgatcaaaaggaaccaactatattgagcaccatgcgtgatcatctgatcgttactgctaccttgtgagttaaaggctactcttctcat

SEQ ID NO: 332117 - DNA, 120 bp, Artificial Sequence
  ENSG00000136869_65 (sequence is synthesized)
tttagaaatgagaaaagagatgcccagagaggacgagtaacttgccttaggtcacacagcttatattaatcacaataacatttgccgcaccttctgtattttttttaagttgctaagctt

SEQ ID NO: 332118 - DNA, 120 bp, Artificial Sequence
  ENSG00000136869_66 (sequence is synthesized)
ttggtgcatgtctggcaccgttttagttgtatattatttcatttaattgttaaaatgaccttctgatgcaggtatttgtagctttgccattccacagatgaagaaacagatgaaaggact

SEQ ID NO: 332119 - DNA, 120 bp, Artificial Sequence
  ENSG00000136869_67 (sequence is synthesized)
gaattgttcaataggaaggagcagaatcaggatatgaacttgggttggcctgattcttggggctgcattctttccataacataattgcttgctgtgatgtcctgggctactctgccaggg

SEQ ID NO: 332120 - DNA, 120 bp, Artificial Sequence
  ENSG00000136869_68 (sequence is synthesized)
gtggttagtggagtgaatggagaataatttagacaaggtcagtaactcccatgccatctagaaattaaaagtttaaaaggcagagtctgcaactctccttgatttctacagaaataaaga

SEQ ID NO: 332121 - DNA, 120 bp, Artificial Sequence
  ENSG00000136869_69 (sequence is synthesized)
tgatccctcctgtgacagtgctaagtgacaattctgagtgtaaatgcgctttttggcacaaattgtcctgtcctaatagtcttgattataattataaaataatgggtttctgaaaggctg

SEQ ID NO: 332122 - DNA, 120 bp, Artificial Sequence
  ENSG00000136869_70 (sequence is synthesized)
caagcagttctgggaatggcaataaaggtttagaaatgacgtgatgtttatgagagaagtgttttgttgaaaattaaactcacgtttaggagaaaggattgtgttgtatgctcctaggaa

SEQ ID NO: 332123 - DNA, 120 bp, Artificial Sequence
  ENSG00000136869_71 (sequence is synthesized)
actatctcactatgtaattaaatcaaaaccagccagttaccaatttgagctcttgactcatactaacaacaccccatttcccatgggccaagcaaggcaggactgacctgaaataaccca

SEQ ID NO: 332124 - DNA, 120 bp, Artificial Sequence
  ENSG00000136869_72 (sequence is synthesized)
gcctgactctatccacagccaccccaggaccttgcccctccgtcttcctagggctcggccgtgagatgctagtgcatgacccttcctcttcctgggactgtccttgtctttccctttgga

SEQ ID NO: 332125 - DNA, 120 bp, Artificial Sequence
  ENSG00000136869_73 (sequence is synthesized)
ctctgggaggtctgttctcctcctcagaaaggaataaacactctttctatttgtgggattccctaggagacactatataaaaatatagagttaaaaaaactatttaaaaaaaagacaact

SEQ ID NO: 332126 - DNA, 120 bp, Artificial Sequence
  ENSG00000136869_74 (sequence is synthesized)
tcatgtctctactctgacttcattctttttaagatgggtaacaaagactctcttcaaggttagaaaattttattttaatttttatagatttagagagtgcaaatgcagttttgttacatg

SEQ ID NO: 332127 - DNA, 120 bp, Artificial Sequence
  ENSG00000136869_75 (sequence is synthesized)
aatatattgcataatggtttagtctgggctgttagcgtaaccatcaactgaacagtgtactttgtacctattaggtactttctcatcccttaaccccttcccacctttctgagtcctcaa

SEQ ID NO: 332128 - DNA, 120 bp, Artificial Sequence
  ENSG00000136869_76 (sequence is synthesized)
tgtctgttatttcattctccatgtccatgtctacaaattatttagtttccactcataagtgagagcatggatggaactggagaagagtattttctatcccaagatcggttccttgatctt

SEQ ID NO: 332129 - DNA, 120 bp, Artificial Sequence
  ENSG00000136869_77 (sequence is synthesized)
gtgtctccaaatcacttgctctctctcttacatcttttctatcttcttctagcctctttttgcaaacttcattttgacaaagaattccaggcagtctacagctgattttatttcaataca

SEQ ID NO: 332130 - DNA, 120 bp, Artificial Sequence
  ENSG00000136869_78 (sequence is synthesized)
acgattaaaatggaaaccatatatgaagatgacaaagttgagcaggtcccaaactctcacttttaaacaaatgcttggcttaagaatcacttaatgactttcattctgctatctatgtgt

SEQ ID NO: 332131 - DNA, 120 bp, Artificial Sequence
  ENSG00000136869_79 (sequence is synthesized)
ctgtgtatctaggtactaattatctatctttatgatctttattgctagaaattctggttcaatatcagaggttagtcctaaggaatttatattttaaaatattctcccagttttcgtgca

SEQ ID NO: 332132 - DNA, 120 bp, Artificial Sequence
  ENSG00000136869_80 (sequence is synthesized)
cagacagatttgggaattactgttataatggaaaatggagaataaccacccacatttaatatggttattggttttgttcttgagatttattgctaagattcatgatagcccaggcaaggt

SEQ ID NO: 332133 - DNA, 120 bp, Artificial Sequence
  ENSG00000136869_81 (sequence is synthesized)
cagataatgtatttttattttacactgtatagttgattcttctcaatcccactagatcagactctttgggatactaggattggcctatttgatggtgagctcactacatccatttagatg

SEQ ID NO: 332134 - DNA, 120 bp, Artificial Sequence
  ENSG00000136869_82 (sequence is synthesized)
ttgtgtccatgcaatcattttagttctcctagtttctacctatcacgttgtcattttcccttctttatcatcctgggtagctgagaccccacataaatatataccagaaaaatgttgtgg

SEQ ID NO: 332135 - DNA, 120 bp, Artificial Sequence
  ENSG00000136869_83 (sequence is synthesized)
tcttttctaaactctctgaggcatctgttgtcaatgtgatgttgttttttgtttccagtccaaaatatatcaaagtaaaatttaactccacttttgctaagtattcatcttgccttgagt

SEQ ID NO: 332136 - DNA, 120 bp, Artificial Sequence
  ENSG00000136869_84 (sequence is synthesized)
actaagattccaaaaatgactttcccctctgaaaaacacaggatttccttgcgaaaacttgctgggccactgccaatcttcccagaaactcctttttccttatcgttgaggggaattggg

SEQ ID NO: 332137 - DNA, 120 bp, Artificial Sequence
  ENSG00000136869_85 (sequence is synthesized)
gaagtgatcactgacggttgaaattcagtagttttggtctttaagctgagaccctgagtcttctgaggagtctactgctccccagtgggaaacacctgctgtcaaaattttcctgcttgc

SEQ ID NO: 332138 - DNA, 120 bp, Artificial Sequence
  ENSG00000136869_86 (sequence is synthesized)
aaagagcacttttgaaattaatggcaggggatgaatatctggctagtgctgtgctcagctgagttattaatagggccttctgagtcctctctacacatcatctttggctgaattagctgt

SEQ ID NO: 332139 - DNA, 120 bp, Artificial Sequence
  ENSG00000136869_87 (sequence is synthesized)
ggtttcagcacctgagagtctagcaccactaaaggcagggaatacctttgccagtttctggcatattaacagctgagatcagataagtgaacagcgatagaggtagtgaggtttaggatt

SEQ ID NO: 332140 - DNA, 120 bp, Artificial Sequence
  ENSG00000136869_88 (sequence is synthesized)
caggtctgccaccgggagcgcacctctgggctcaggtctctcatttgtaaaatgggacatttaggtcagatcagcattttcaaaagtgtgacatgttagtaaataagatgattttatgtg

SEQ ID NO: 332141 - DNA, 120 bp, Artificial Sequence
  ENSG00000136869_89 (sequence is synthesized)
tgtggttgacagatgaatgtattacctttagtggttatatgtttattttcatggttacttttatttataataaattttgtgactagctaagaatcaattatctctttaaaatatatttaa

SEQ ID NO: 332142 - DNA, 120 bp, Artificial Sequence
  ENSG00000136869_90 (sequence is synthesized)
aaaatgtgggccaacttaggaaaaaaacgggatgaaatgaattatataaaaggtatgcagatttggaaaaattttgaaggtgtcacaagaaagattggcagtcagaaaggaatgaaccaa

SEQ ID NO: 332143 - DNA, 120 bp, Artificial Sequence
  ENSG00000136869_91 (sequence is synthesized)
acggctgctgagggtcaggccagctctctgacattctagcatgttcacatctccagggctgtttccttacctataaattgtggcaattggagtaaatgtccattccaggaattctattct

SEQ ID NO: 332144 - DNA, 120 bp, Artificial Sequence
  ENSG00000136869_92 (sequence is synthesized)
atgattagaggtgtaacttcatcatccagattttccagcatccttaacatgtggttttagcgttctaaacctgatgatgctatatcaaaacgggagactcattcgtcaagtcatgatgta

SEQ ID NO: 332145 - DNA, 120 bp, Artificial Sequence
  ENSG00000136869_93 (sequence is synthesized)
tccatgtatttataatatttcccatgttccctcatttctgaaaaggattaagctatcaaccccattgagttataggtgaaaggctgtggaaacaagacattgatagtgaaatggctccac

SEQ ID NO: 332146 - DNA, 120 bp, Artificial Sequence
  ENSG00000136869_94 (sequence is synthesized)
cactaacaggctgttgaacaaaggcaaatctcttgatctctttgctctttggtctctgtttatctatgagataacgttatttttacgctgtcttctgtgaaagttttgagaatgaaatga

SEQ ID NO: 332147 - DNA, 120 bp, Artificial Sequence
  ENSG00000136869_95 (sequence is synthesized)
gacagagcctccaataaaatttagggaagtgctacataaatgcaaggagttattatgataacagattgaaaactcctccaaggaggagtttctcttttgccccatgttataaactcaaga

SEQ ID NO: 332148 - DNA, 120 bp, Artificial Sequence
  ENSG00000136869_96 (sequence is synthesized)
atatcttccattttgcctacatattccaaaagcttttaaattaagctatatgtcattcttacaggagtctcctctatttcagcaatgtgtatacttggtcagttttaattatcttaaagg

SEQ ID NO: 332149 - DNA, 120 bp, Artificial Sequence
  ENSG00000136869_97 (sequence is synthesized)
agaagaatacagtttctctaaactcaagcacttttgtggactaatccttgcaattattctttcttctttcccatacttgacatttaaagtgatatctcccaggctcctacactgttagtc

SEQ ID NO: 332150 - DNA, 120 bp, Artificial Sequence
  ENSG00000136869_98 (sequence is synthesized)
acagaggtaccattcgaccccttgtgcctcttaccatatgtgaatgcttgtcagttgagagtaaactttcttcataaatttcacagttgtggattgataaaaacagagaactctggttcc

SEQ ID NO: 332151 - DNA, 120 bp, Artificial Sequence
  ENSG00000136869_99 (sequence is synthesized)
tcattccttcctgctttctttcttgaaatgccattcatgatggtcccttatatcactatagggctgctatcatccttcatccttatgccactgcaaatagcaaccaacagtgtccttagt

SEQ ID NO: 332152 - DNA, 120 bp, Artificial Sequence
  ENSG00000136869_100 (sequence is synthesized)
gccagcactcccaggcatgcccctttccaagcagcagggtcaagccgctcccttcctgagctgtggcatctgtctctaaatcatgcttcctccttgcctgctgcaggcccttgtctctgc

SEQ ID NO: 332153 - DNA, 120 bp, Artificial Sequence
  ENSG00000136869_101 (sequence is synthesized)
cctttactttttctggctcttgccacggttttgaataaaactcttccaaatatctgaagctcaattctgttgccattctaagctctctaaatgtcaccacaatcttccttcctttgcatt

SEQ ID NO: 332154 - DNA, 120 bp, Artificial Sequence
  ENSG00000136869_102 (sequence is synthesized)
ttcttattgtgcactaagttagttcttgcttagtaagtcttgtctttctctctgctttgacctgtcagtattccaacttccttattttttgatgttcattttctccttgctctctttctt

SEQ ID NO: 332155 - DNA, 120 bp, Artificial Sequence
  ENSG00000136869_103 (sequence is synthesized)
cctttcttgtctgtgaactccattaaccgcttctgcatgtgaccattaatgtgcctgtctttcttctcatgtattagagagaacaaaagctttgggaatcagacagatctgtgttctgat

SEQ ID NO: 332156 - DNA, 120 bp, Artificial Sequence
  ENSG00000136869_104 (sequence is synthesized)
cctgtcttatggtatctgtcttgtttgtctcggcttaaaatggggataatatctacctctcagttttgttggcagttcagtacacggaaataaagttctcactttcttttttctccttga

SEQ ID NO: 332157 - DNA, 120 bp, Artificial Sequence
  ENSG00000136869_105 (sequence is synthesized)
ttctttagccactggtctgcaggcgttttcttcttctaacttcctctcctgtgacaaaagagataactattagagaaacaaaagtccagaatgctaaggttgccgctttcacttcctctc

SEQ ID NO: 332158 - DNA, 120 bp, Artificial Sequence
  ENSG00000136869_106 (sequence is synthesized)
agccctgcgtggagacttggccctaaaccacacagaagagctggcatgaaacccagagctttcagactccggagcctcagcccttcaccccgattccattgcttcttgctaaatgctgcc

SEQ ID NO: 332159 - DNA, 120 bp, Artificial Sequence
  ENSG00000136869_107 (sequence is synthesized)
cacttttacatactgcacaaggtgaggtgttcattgtcctgtcatttcattattggactggaaagcttggtttgtggagtctcatcttcattcacttattcattcatacaacagatgtct

SEQ ID NO: 332160 - DNA, 120 bp, Artificial Sequence
  ENSG00000136869_108 (sequence is synthesized)
tattaactatataaccttgagcaagctacctctattctccaggtctcagttttctaatctgtgaagtaggcagttggctgagacagcttctaagggcaattctaattttaggttttcttt

SEQ ID NO: 332161 - DNA, 120 bp, Artificial Sequence
  ENSG00000136870_0 (sequence is synthesized)
gcactggccagacccagccagggatcctcgtattcgtcgagcctaatttccagcagccgggtaggcctcaccagaggctcctttccgtgaggccgcccccaattcctgcccctattctct

SEQ ID NO: 332162 - DNA, 120 bp, Artificial Sequence
  ENSG00000136870_1 (sequence is synthesized)
gcctgggagatggcttccccgagccccccgccggagtcgaaggggttgctgacatttgaggatgtggctgtgttttttacccaggaggagtgggattatctggacccagctcagagaagc

SEQ ID NO: 332163 - DNA, 120 bp, Artificial Sequence
  ENSG00000136870_2 (sequence is synthesized)
ctgtataaagatgtcatgatggagaattatggaaacctggtctcactggatgttttgaacagagataaggatgaggagccaactgtaaaacaagagattgaagaaattgaggaagaagtg

SEQ ID NO: 332164 - DNA, 120 bp, Artificial Sequence
  ENSG00000136870_3 (sequence is synthesized)
gaaccacagggtgtaatagttacaagaatcaaaagtgaaattgaccaggatcctatgggtagagaaacatttgaacttgttggtaggttagataaacaaagagggatcttcctatgggaa

SEQ ID NO: 332165 - DNA, 120 bp, Artificial Sequence
  ENSG00000136870_4 (sequence is synthesized)
ataccaagggaatctttgacccaggaacagagaatgttcagagaaaacactaacattatccgtaaaagaccaaactcagaagagaaatgccataaatgtgaagaatgtggaaagggtttt

SEQ ID NO: 332166 - DNA, 120 bp, Artificial Sequence
  ENSG00000136870_5 (sequence is synthesized)
gtccgcaaggcccatttcattcaacatcaaagggtccatactggtgagaaaccttttcagtgcaatgaatgtgggaaaagttttagtcgcagttcatttgttattgaacatcagagaatt

SEQ ID NO: 332167 - DNA, 120 bp, Artificial Sequence
  ENSG00000136870_6 (sequence is synthesized)
cacactggggaaaggccctatgagtgtaattactgtggaaaaacctttagtgtgagctcaacccttattagacatcagagaatccacactggagaaagaccctatcagtgtaatcagtgt

SEQ ID NO: 332168 - DNA, 120 bp, Artificial Sequence
  ENSG00000136870_7 (sequence is synthesized)
aaacagagcttcagccagagaaggagccttgttaaacatcaaaggattcatacaggtgagaaaccccataaatgtagtgactgtgggaaagccttcagttggaaatcacaccttattgag

SEQ ID NO: 332169 - DNA, 120 bp, Artificial Sequence
  ENSG00000136870_8 (sequence is synthesized)
catcaaagaactcacactggtgagaaaccttatcactgtaccaaatgtaagaagagctttagtcgaaattcattgcttgttgagcatcaaagaattcacactggggaaagaccccataaa

SEQ ID NO: 332170 - DNA, 120 bp, Artificial Sequence
  ENSG00000136870_9 (sequence is synthesized)
tgtggtgaatgtgggaaagcctttcgattaagcacataccttatacaacaccaaaaaattcacactggcgagaagccttttctttgtattgagtgtggaaaaagtttcagtcggagctca

SEQ ID NO: 332171 - DNA, 120 bp, Artificial Sequence
  ENSG00000136870_10 (sequence is synthesized)
ttccttattgaacatcagaggatccatactggtgaaagaccttatcagtgcaaagagtgtgggaaaagtttcagtcagctttgcaaccttactcgtcatcagagaattcacacaggagac

SEQ ID NO: 332172 - DNA, 120 bp, Artificial Sequence
  ENSG00000136870_11 (sequence is synthesized)
aagccccataaatgtgaggaatgtggaaaagcctttagtagaagctcaggtcttattcagcatcagagaattcacaccagggagaagacttatccatacaatgaaactaaggaaagtttt

SEQ ID NO: 332173 - DNA, 120 bp, Artificial Sequence
  ENSG00000136870_12 (sequence is synthesized)
atacagcaggaagtctaccctaaggagaaatcttataaatgtgatgaatgtgggaaaacttttagtgttagtgctcatcttgtacaacatcaaagaatccacactggtgaaaagccctat

SEQ ID NO: 332174 - DNA, 120 bp, Artificial Sequence
  ENSG00000136870_13 (sequence is synthesized)
ctatgtactgtctgtgggaaaagcttcagccggagctcatttcttattgaacatcagagaatccacactggtgagagaccctatctgtgcagacagtgtggaaaaagctttagtcagctt

SEQ ID NO: 332175 - DNA, 120 bp, Artificial Sequence
  ENSG00000136870_14 (sequence is synthesized)
tgtaatcttattcgacatcagggtgttcacacaggtaataaaccccataaatgtgatgaatgtggaaaggcctttagccggaactcgggtcttattcagcatcagagaatacacacagga

SEQ ID NO: 332176 - DNA, 120 bp, Artificial Sequence
  ENSG00000136870_15 (sequence is synthesized)
gagaaaccttataagtgtgagaagtgcgacaaaagtttcagtcaacagcgcagtcttgtcaaccatcagaagatccatgcagaggtgaaaacccaagaaacccatgaatgtgacgcttgt

SEQ ID NO: 332177 - DNA, 120 bp, Artificial Sequence
  ENSG00000136870_16 (sequence is synthesized)
ggtgaagcctttaattgccgtatttctcttattcagcatcagaaattgcacacagcatggatgcaataaatgtagagcaatacataagctcaatttgatttgagactagtacccaagtgc

SEQ ID NO: 332178 - DNA, 120 bp, Artificial Sequence
  ENSG00000136870_17 (sequence is synthesized)
agttttagtatggctcaacatgggtcagatttagtgataaagcaaattctccttggcctcaggcaaatagtttctaaagattctgtgaatagtggacaactgcccatgagcatttgactt

SEQ ID NO: 332179 - DNA, 120 bp, Artificial Sequence
  ENSG00000136870_18 (sequence is synthesized)
cccttactctttgatgatcgtagagaaagacttggtaatttatctaagtatctttaataaatctttcagcagagagattaaacctaggttcagagcatgggtgctctgagggacaaagtt

SEQ ID NO: 332180 - DNA, 120 bp, Artificial Sequence
  ENSG00000136870_19 (sequence is synthesized)
ggattagtataagggagctggagcagctgatagtggaaaacagaataatgattcaaagagtcttctgtcaccatgtcatattgtggttctttcagttccatgatatgtttggctctgcat

SEQ ID NO: 332181 - DNA, 120 bp, Artificial Sequence
  ENSG00000136870_20 (sequence is synthesized)
gccaaagtccagtgattaagcatatataagttgtcaaggaaacaaagcccaaatgtttttaaaacaagtatacagtttttgtcattgtttaagaaagccagttgtttggcatgtgagtta

SEQ ID NO: 332182 - DNA, 120 bp, Artificial Sequence
  ENSG00000136870_21 (sequence is synthesized)
aaggcagttccaatgcctgatggttcccagatctatgaaatgagtggaccattaaccttacatgtaaagattatgttagtaattaagaaacctaacaaaggtgttaccaaggaacctttg

SEQ ID NO: 332183 - DNA, 120 bp, Artificial Sequence
  ENSG00000136870_22 (sequence is synthesized)
ggagtgccttttttgtttttcaagatggacccaaaaaagtggaggaagatattgttcttttgtgccctcctacctgtgagagatatttgtagtcctatgtgaatgagcttatccctccac

SEQ ID NO: 332184 - DNA, 120 bp, Artificial Sequence
  ENSG00000136870_23 (sequence is synthesized)
aaccaggtgcatatgaaagtgtacatattatgactgccaagtattggaaatgaaaagacctggagtctatgctaggaagctgagatattttggtattgcattggtttttatggtaactag

SEQ ID NO: 332185 - DNA, 120 bp, Artificial Sequence
  ENSG00000136870_24 (sequence is synthesized)
gttttgcatgcaattaaaaatccttatttcttgttctagggcttcccttagttaatggttattataaacctattaattcatctgttttaaccattaaaacctgttttgtttttagctttg

SEQ ID NO: 332186 - DNA, 120 bp, Artificial Sequence
  ENSG00000136870_25 (sequence is synthesized)
aaggaggaggaactggcagcggggaggaggctctagcgaggcctgaaaggctgcgtaaccaggcaggagtaggggttggggttcggggttgggggacagccagggatcgcgtctgatatg

SEQ ID NO: 332187 - DNA, 120 bp, Artificial Sequence
  ENSG00000136870_26 (sequence is synthesized)
gcctgggagatggcttccccgagccccccgccggagtcgaagagagacttgataaatcggcctgagaaaataagtaatgctccagactagctctctcatttgtgagttctccaggtgaag

SEQ ID NO: 332188 - DNA, 120 bp, Artificial Sequence
  ENSG00000136870_27 (sequence is synthesized)
acccagctcagagaagcctgtataaagatgtcatgatggagaattatggaaacctggtctcactgggtctcactctattgcctaggctggtgtgcagcgacgcaaacacagcttgctgca

SEQ ID NO: 332189 - DNA, 120 bp, Artificial Sequence
  ENSG00000136872_0 (sequence is synthesized)
cttatttggcagctgctgcctcacccacagcttttgatatctaggaggactcttctctcccaaactacctgtcaccatggcccaccgatttccagccctcacccaggagcagaagaagga

SEQ ID NO: 332190 - DNA, 120 bp, Artificial Sequence
  ENSG00000136872_1 (sequence is synthesized)
gctctcagaaattgcccagagcattgttgccaatggaaaggggatcctggctgcagatgaatctgtaggtaccatggggaaccgcctgcagaggatcaaggtggaaaacactgaagagaa

SEQ ID NO: 332191 - DNA, 120 bp, Artificial Sequence
  ENSG00000136872_2 (sequence is synthesized)
ccgccggcagttccgagaaatcctcttctctgtggacagttccatcaaccagagcatcgggggtgtgatccttttccacgagaccctctaccagaaggacagccagggaaagctgttcag

SEQ ID NO: 332192 - DNA, 120 bp, Artificial Sequence
  ENSG00000136872_3 (sequence is synthesized)
aaacatcctcaaggaaaaggggatcgtggtgggaatcaagttagaccaaggaggtgctcctcttgcaggaacaaacaaagaaaccaccattcaagggcttgatggcctctcagagcgctg

SEQ ID NO: 332193 - DNA, 120 bp, Artificial Sequence
  ENSG00000136872_4 (sequence is synthesized)
tgctcagtacaagaaagatggtgttgactttgggaagtggcgtgctgtgctgaggattgccgaccagtgtccatccagcctcgctatccaggaaaacgccaacgccctggctcgctacgc

SEQ ID NO: 332194 - DNA, 120 bp, Artificial Sequence
  ENSG00000136872_5 (sequence is synthesized)
cagcatctgtcagcagaatggactggtacctattgttgaaccagaggtaattcctgatggagaccatgacctggaacactgccagtatgttactgagaaggtcctggctgctgtctacaa

SEQ ID NO: 332195 - DNA, 120 bp, Artificial Sequence
  ENSG00000136872_6 (sequence is synthesized)
ggccctgaatgaccatcatgtttacctggagggcaccctgctaaagcccaacatggtgactgctggacatgcctgcaccaagaagtatactccagaacaagtagctatggccaccgtaac

SEQ ID NO: 332196 - DNA, 120 bp, Artificial Sequence
  ENSG00000136872_7 (sequence is synthesized)
agctctccaccgtactgttcctgcagctgttcctggcatctgctttttgtctggtggcatgagtgaagaggatgccactctcaacctcaatgctatcaacctttgccctctaccaaagcc

SEQ ID NO: 332197 - DNA, 120 bp, Artificial Sequence
  ENSG00000136872_8 (sequence is synthesized)
ctggaaactaagtttctcttatggacgggccctgcaggccagtgcactggctgcctggggtggcaaggctgcaaacaaggaggcaacccaggaggcttttatgaagcgggccatggctaa

SEQ ID NO: 332198 - DNA, 120 bp, Artificial Sequence
  ENSG00000136872_9 (sequence is synthesized)
ctgccaggcggccaaaggacagtatgttcacacgggttcttctggggctgcttccacccagtcgctcttcacagcctgctatacctactagggtccaatgcccgccagcctagctccagt

SEQ ID NO: 332199 - DNA, 120 bp, Artificial Sequence
  ENSG00000136872_10 (sequence is synthesized)
aagggagcaacttttcctccaatcctggaaattcgacacaattagatttgaactgctggaaatacaacacatgttaaatcttaagtacaagggggaaaaaataaatcagttattgaaaca

SEQ ID NO: 332200 - DNA, 120 bp, Artificial Sequence
  ENSG00000136872_11 (sequence is synthesized)
taaaaatgaataccaaggacctgatcaaatttcacacagcagtttccttgcaacactttcagctccccatgctccagaatacccacccaagaaaataataggctttaaaacaatatcggc

SEQ ID NO: 332201 - DNA, 120 bp, Artificial Sequence
  ENSG00000136872_12 (sequence is synthesized)
tcctcatccaaagaacaactgctgattgaaacacctcattagctgagtgtagagaagtgcatcttatgaaacagtcttagcagtggtaggttgggaaggagatagctgcaaccaaaaaag

SEQ ID NO: 332202 - DNA, 120 bp, Artificial Sequence
  ENSG00000136872_13 (sequence is synthesized)
aaataaatattctataaaccttcagctgctatcgggtttcacttttctgctcttgctgtccaaagactcagtgtatttcattacttttgactctactagacatgactgggtttcaacagt

SEQ ID NO: 332203 - DNA, 120 bp, Artificial Sequence
  ENSG00000136872_14 (sequence is synthesized)
aaaggtcttcaactcttgctagtcattggaatcaagccgcaaaattttaaaaactgagatgctcaggccacaccccagctcaattaaatcagaaaccctagacttgggatcctctaacta

SEQ ID NO: 332204 - DNA, 120 bp, Artificial Sequence
  ENSG00000136872_15 (sequence is synthesized)
ttagatttcttaaagctccctcagtaattccaatgtacagtcaagtttgagaactaccaatctaaatttcaagtttgagggtatttgaaaattaaagccattcacaatacgaagccagct

SEQ ID NO: 332205 - DNA, 120 bp, Artificial Sequence
  ENSG00000136872_16 (sequence is synthesized)
aaaaatgtagaatgattttgagcaacttgtggagtataataagagaattaatgtgacttcaatgcttggagcattcttgttcaagtggcccaggtttggtgaaacaggactaccttgtca

SEQ ID NO: 332206 - DNA, 120 bp, Artificial Sequence
  ENSG00000136872_17 (sequence is synthesized)
tctgcacgtccaggcatatttcgtagttttgcagtaaataatattcacataatgatactgtattgactttcaattttcagaattaacctatagttacagcacttaagacaaccagagtta

SEQ ID NO: 332207 - DNA, 120 bp, Artificial Sequence
  ENSG00000136872_18 (sequence is synthesized)
taaaagagaatttaaatattataactttggacaatataaaagtgatgatttaactgacagaagctaggaaatataagggggaggagaagtggaagaaagcaaagagagtcaggaatacta

SEQ ID NO: 332208 - DNA, 120 bp, Artificial Sequence
  ENSG00000136872_19 (sequence is synthesized)
aagcaaagagagtcaggaatactacttaaaactgatgggttaagaaatagtgctttaattctatttaagtaataaaagaaatggatgtaaatcataaaaatatatatctaaaattaaaat

SEQ ID NO: 332209 - DNA, 120 bp, Artificial Sequence
  ENSG00000136872_20 (sequence is synthesized)
gcacaggacaattgtgcttgctcttggaaggtcacatggatttgactgtggctctgctcactgatgcgcagcaagtgttggctcccaccgcctccagaatccaactcactggacaccgct

SEQ ID NO: 332210 - DNA, 120 bp, Artificial Sequence
  ENSG00000136872_21 (sequence is synthesized)
aggcttccaggaaagtgtagttctggatttggtcaggctggcattcttcattcctaaagggtgctgaagtgagatgcaggaaatccaaatagctggaggaaaagaggcaggatattagaa

SEQ ID NO: 332211 - DNA, 120 bp, Artificial Sequence
  ENSG00000136872_22 (sequence is synthesized)
atgggggaaaaacaaacctcatttgcttatccacctgtggaaatgggtcagaggtgtcacagaggtctgcacagcatgtctgcacccccaactgtcttggtcatgcatccatctgagcca

SEQ ID NO: 332212 - DNA, 120 bp, Artificial Sequence
  ENSG00000136872_23 (sequence is synthesized)
cacacctcacttctgctttgtcctaggcaaactccaagcacactggcaaggacagggccaacactctgaacattctcctcatcaaatttctcttctcacccttttccatcgtcatcttcc

SEQ ID NO: 332213 - DNA, 120 bp, Artificial Sequence
  ENSG00000136872_24 (sequence is synthesized)
cacagagaacaagatcctcttctagagttttcctccagtgccctcttctttcactcaaattttctacacgttcttaatctctttgcatctcaatctcatttcttaaaatgggaatctacc

SEQ ID NO: 332214 - DNA, 120 bp, Artificial Sequence
  ENSG00000136872_25 (sequence is synthesized)
atctcatttcttaaaatgggaatctacctcatgatgttcttacagggatgaaatgactaaaagtttctaggctggacgtggttgcttactgctgtaatcccagcactttggaaggcagag

SEQ ID NO: 332215 - DNA, 85 bp, Artificial Sequence
  ENSG00000136872_26 (sequence is synthesized)
atcgcttgagctcaggagtttgagaccagactgagcaacacagtgggaccttgtctctactaaaaatcaaaaacattagccagat

SEQ ID NO: 332216 - DNA, 120 bp, Artificial Sequence
  ENSG00000136872_27 (sequence is synthesized)
atcacctgagccctggaggtcgaagctggagtgagctatggtcataccactgcactccagcctggatgaccctgtctcaaaaaaaaaaagagtaagatcctgtctaaaaaaaaaaaaaaa

SEQ ID NO: 332217 - DNA, 120 bp, Artificial Sequence
  ENSG00000136872_28 (sequence is synthesized)
atgatgttcacatttggggcttgactttccaacacggagaagcattgttttctttgggccaagaaggtatctaccgatagtgtctattaggcatttgaaaatgtggcagtagaggtcagt

SEQ ID NO: 332218 - DNA, 120 bp, Artificial Sequence
  ENSG00000136872_29 (sequence is synthesized)
atgaggattgaggctagagagaattttgaattatccacactagagtatagttgatgacaggagactgaaggacaatttcaacagaaacacttcagagggaaggagataagaggaccaaga

SEQ ID NO: 332219 - DNA, 120 bp, Artificial Sequence
  ENSG00000136872_30 (sequence is synthesized)
actgaacctaggatactttttattttgggaagatgaagaagagaagcaaccaagaaaagcagcgattatattgtagggtgaaccaagcattctgggaataaagacagaagaatttctttc

SEQ ID NO: 332220 - DNA, 120 bp, Artificial Sequence
  ENSG00000136874_0 (sequence is synthesized)
gctcctgcgcctgcgccgtgcccaccgaccggcctcgagcgccccggcgggaggtttttctatatgagtggagaagacagctgttaccagggaggtcatacaacatttttttaggatgtc

SEQ ID NO: 332221 - DNA, 120 bp, Artificial Sequence
  ENSG00000136874_1 (sequence is synthesized)
tgaagatgaagaaaaagtgaaattacgccgtcttgaaccagctatccagaaattcattaagatagtaatcccaacagacctggaaaggttaagaaagcaccagataaatattgagaagta

SEQ ID NO: 332222 - DNA, 120 bp, Artificial Sequence
  ENSG00000136874_2 (sequence is synthesized)
tcaaaggtgcagaatctgggacaagttgcatgaagagcatatcaatgcaggacgtacagttcagcaactccgatccaatatccgagaaattgagaaactttgtttgaaagtccgaaagga

SEQ ID NO: 332223 - DNA, 120 bp, Artificial Sequence
  ENSG00000136874_3 (sequence is synthesized)
tgacctagtacttctgaagagaatgatagatcctgttaaagaagaagcatcagcagcaacagcagaatttctccaactccatttggaatctgtagaagaacttaagaagcaatttaatga

SEQ ID NO: 332224 - DNA, 120 bp, Artificial Sequence
  ENSG00000136874_4 (sequence is synthesized)
tgaagaaactttgctacagcctcctttgaccagatccatgactgttggtggagcatttcatactactgaagctgaagctagttctcagagtttgactcagatatatgccttacctgaaat

SEQ ID NO: 332225 - DNA, 120 bp, Artificial Sequence
  ENSG00000136874_5 (sequence is synthesized)
tcctcaagatcaaaatgctgcagaatcgtgggaaaccttagaagcggacttaattgaacttagccaactggtcactgacttctctctcctagtgaattctcagcaggagaagattgacag

SEQ ID NO: 332226 - DNA, 120 bp, Artificial Sequence
  ENSG00000136874_6 (sequence is synthesized)
cattgcagaccatgtcaacagtgctgctgtgaatgttgaagagggaaccaaaaacttagggaaggctgcaaaatacaagctggcagctctgcctgtggcaggtgcactcatcgggggaat

SEQ ID NO: 332227 - DNA, 120 bp, Artificial Sequence
  ENSG00000136874_7 (sequence is synthesized)
ggtagggggtcctattggcctccttgcaggcttcaaagtggcaggaattgcagctgcacttggtggtggggtgttgggcttcacaggtggaaaattgatacaaagaaagaaacagaaaat

SEQ ID NO: 332228 - DNA, 120 bp, Artificial Sequence
  ENSG00000136874_8 (sequence is synthesized)
gatggagaagctcacttccagctgtccagatcttcccagccaaactgacaagaaatgcagttaaaaaccaaatttcagtattattggtgccaacatgtctatcctgaggacctttgctgc

SEQ ID NO: 332229 - DNA, 120 bp, Artificial Sequence
  ENSG00000136874_9 (sequence is synthesized)
tgttggacactccgtcaccttttggaacacaagtatatcaagatagtggctactgatgttcaagtgggattgaagtgtgataaatggatatattttgttgtttgctggggtgttcatgga

SEQ ID NO: 332230 - DNA, 120 bp, Artificial Sequence
  ENSG00000136874_10 (sequence is synthesized)
gatgttaagagattgaggccctgggctgagggtatataatgtatgtcaggtaaagtttgaagactgccaaggagcagattttctccctggaaatgtgaaaactgaacctataactctgat

SEQ ID NO: 332231 - DNA, 120 bp, Artificial Sequence
  ENSG00000136874_11 (sequence is synthesized)
aaggacttgagatgtgtagaaacgttgggttatggaagactagtttcttccataaccctgaattggagaccttaatgctaagtgtagattattgaggtttgttagtgaggaaaagaataa

SEQ ID NO: 332232 - DNA, 120 bp, Artificial Sequence
  ENSG00000136874_12 (sequence is synthesized)
gagttcagaagcctttgttatcagatagcgaaatcagggcctagtgaggagcacaggtcgactacataatggagtccattggcgaaccctattgcaatttggtccaactatatcttctgg

SEQ ID NO: 332233 - DNA, 120 bp, Artificial Sequence
  ENSG00000136874_13 (sequence is synthesized)
tgaaggaaattaatgatgtaagaaaatgcaagaggctcaacttctcttccaaaaatcttctggcttctgaactcttcctctgcctctctttaaataaataacacagaatttcaagtggta

SEQ ID NO: 332234 - DNA, 120 bp, Artificial Sequence
  ENSG00000136874_14 (sequence is synthesized)
ggagacttattaagccagtcaccaagcttggtctgtcagcctgtcttctaacacctcaaagatcttgtgccctgtgctgtccctcccttgtaattatgaaaagttctttggtttctgggg

SEQ ID NO: 332235 - DNA, 120 bp, Artificial Sequence
  ENSG00000136874_15 (sequence is synthesized)
tgaattctacccatgtataatgaggaattctctcataaccttttttgtcttgtctgtcatctctgttcatcccttcctataacctctaggtaaaaagaaaagaaaaaaagaaatttcgag

SEQ ID NO: 332236 - DNA, 120 bp, Artificial Sequence
  ENSG00000136874_16 (sequence is synthesized)
atattttcaacattgttagagtttgggctaaaatgagcaaggagaaaaaaaccaccaagaacatttcctggggcatgttccagttttgaggggtgatatatctgccagatagggggtatc

SEQ ID NO: 332237 - DNA, 120 bp, Artificial Sequence
  ENSG00000136874_17 (sequence is synthesized)
tgacccagtcttcttttcagctggtctctggggggagctgagaactcgcttgctacctcacatccttttccccagactttttatctcctatgcatccctttgctttctatagctggtgtt

SEQ ID NO: 332238 - DNA, 120 bp, Artificial Sequence
  ENSG00000136874_18 (sequence is synthesized)
tcttccccaaaatggcgttcccatgcttacctttctcacattctagacaatgatggacaaagacgcatgcaagactcagacccggggaatggtgtggtgctaatctcaacacctgacatt

SEQ ID NO: 332239 - DNA, 120 bp, Artificial Sequence
  ENSG00000136874_19 (sequence is synthesized)
cacagcaagcatggcccagcccaactgcatgtctatctcaaaccgcagaaaggctttaatactggaaaaaaagaattcaagactacaggcagctcccctctgtaccccaactcatttaaa

SEQ ID NO: 332240 - DNA, 120 bp, Artificial Sequence
  ENSG00000136874_20 (sequence is synthesized)
ataggaggaatcactttttgccttacttaacgcttttttctgagcacagggatgggcacctgcaccccagaaggtgtgagctgtctctctgccaggagctaaggttcattaggggattgg

SEQ ID NO: 332241 - DNA, 120 bp, Artificial Sequence
  ENSG00000136874_21 (sequence is synthesized)
atggtttatcacttctttctttctgagtttacttttagtaacttttattgatggctacctttcatgtccctgtctaaagagactttctctttcatacgtcttaaatctcatcaatgaaat

SEQ ID NO: 332242 - DNA, 120 bp, Artificial Sequence
  ENSG00000136874_22 (sequence is synthesized)
ccagtgaaacagcaccatttcttagtatcattaaataactagaaagtatcaagtattgctctctgctgctttatatcattaacatattaataataccaagaaggaaatactttgaataag

SEQ ID NO: 332243 - DNA, 120 bp, Artificial Sequence
  ENSG00000136874_23 (sequence is synthesized)
tgtcagattctgatccagtattggacacctgtgatattggacacctgtgaggctgggataattacttttgaattacacctcttctctagtttctggaccttgctctgtcactttaacaca

SEQ ID NO: 332244 - DNA, 120 bp, Artificial Sequence
  ENSG00000136874_24 (sequence is synthesized)
gggtgatcaaacctgaatgaggatcagaactcacccaggcacatactaaagcaagattcctaaacctcagttccaggggtaattctgacatcacccgtccagcatagtcagctgaaatta

SEQ ID NO: 332245 - DNA, 120 bp, Artificial Sequence
  ENSG00000136874_25 (sequence is synthesized)
taaatctaagaaacagttacatcaagattctgctgtgtcatttaattctgaaactcccagtattctacccttcttcatcactgcatattaccccactcttccatcccaaattggctatcc

SEQ ID NO: 332246 - DNA, 120 bp, Artificial Sequence
  ENSG00000136874_26 (sequence is synthesized)
tttcagcccaccaacttagcggcagcactagggattcattataaggtaaatctggtttacataaagacctgaaggaggcctgtatttgaagctcacacttggtattggtatctctcattt

SEQ ID NO: 332247 - DNA, 120 bp, Artificial Sequence
  ENSG00000136874_27 (sequence is synthesized)
ttactgagccagtgtggaataccactgtatgtactcatataagcccttgacttttactgctcatcaggattggaatattactctagcagtcttcacacataggcaagttacagtcctttt

SEQ ID NO: 332248 - DNA, 120 bp, Artificial Sequence
  ENSG00000136874_28 (sequence is synthesized)
ttcatagaaattgctagaagagtttgatcaactataaatgataaagtgtttataagcatagtcagtgtgacacagaaaccaatcttaaaattgaatttaatgttttatcatatcagatta

SEQ ID NO: 332249 - DNA, 120 bp, Artificial Sequence
  ENSG00000136874_29 (sequence is synthesized)
aatattttctccatgtcttatttttactgcaacaagttagaaagtgggaacactttgattaatgtcttaaaatttgtgggccctcatttggataaaggcagcaatcctaaggactttttt

SEQ ID NO: 332250 - DNA, 120 bp, Artificial Sequence
  ENSG00000136874_30 (sequence is synthesized)
tttttttttaacataatctgagaatttctctgtagagcagagactttcaaaccttttggctgtaacccacagtaaaaaacgcatttatatcaaaccttagaatatgtttaatgaacaata

SEQ ID NO: 332251 - DNA, 120 bp, Artificial Sequence
  ENSG00000136874_31 (sequence is synthesized)
cttaccattctgatgctttttattgtttcagtttttaaaatatgccagttgcaacccactaaattgatatctaccaatgggttgcaacccttagcttgaaaaaaacaccctcacagagga

SEQ ID NO: 332252 - DNA, 120 bp, Artificial Sequence
  ENSG00000136874_32 (sequence is synthesized)
actggtatttcttgaataccttctgtttgccaggcacttcaccaggcattttacaagtaaggaaactgggcttcagagaaaataatttgcagaggtttactcaactacaaaggggtgaag

SEQ ID NO: 332253 - DNA, 120 bp, Artificial Sequence
  ENSG00000136874_33 (sequence is synthesized)
ccaggaatgttaactaggtctgttgagctacaaaaacttttatgtctctcagactatacagcctctatacaaaattgagatgggggttgggggcaggggctcatgcctgcaatcccagca

SEQ ID NO: 332254 - DNA, 85 bp, Artificial Sequence
  ENSG00000136874_34 (sequence is synthesized)
tgtctgtatgaaaaaaattaagaattagctgggtgtggcatagcacacacctgtggtcccagctacatgggaagctgaagtggga

SEQ ID NO: 332255 - DNA, 120 bp, Artificial Sequence
  ENSG00000136874_35 (sequence is synthesized)
cacacctgtggtcccagctacatgggaagctgaagtgggaggatcacttgaactcaggagcagccttggtgacagaacaagaccctctctcaaaaaaatatttaaaaaaaggtgggtcat

SEQ ID NO: 332256 - DNA, 120 bp, Artificial Sequence
  ENSG00000136874_36 (sequence is synthesized)
ccattctcctttaccaaacaggctttgaaatgacacattccattcatttgcatctttttaaaaaacttctgattccttactgagtgtccagcagcctcaaagtttttaatggtagctgat

SEQ ID NO: 332257 - DNA, 120 bp, Artificial Sequence
  ENSG00000136874_37 (sequence is synthesized)
gcagacataaacagtgctcaatttggcccttaaactataaaatcaagaaagagtatttcaatcccatccacctgcctgcaagatttcttaatgttcactagttataaccattgtttaaac

SEQ ID NO: 332258 - DNA, 120 bp, Artificial Sequence
  ENSG00000136874_38 (sequence is synthesized)
agtgctttttgtgtaatttaaaaataaactttaatgctttttaaaacaaatttatcataattcatagatcaaatgattatcctttaaaatgatacccttgggaaatcatgtacttactgt

SEQ ID NO: 332259 - DNA, 120 bp, Artificial Sequence
  ENSG00000136874_39 (sequence is synthesized)
agtgatgctagtattaatattacttagaccaattttgaaactgttctttcagaattgcctccaaagacattttgcagatcatcccagaaaagggggtatgatggtgctgtgtagaactga

SEQ ID NO: 332260 - DNA, 120 bp, Artificial Sequence
  ENSG00000136874_40 (sequence is synthesized)
ccagagttcctggaggattttgaggttatactgaaactgagtgctgtacagggagaattgcatgagtccagaaacttccttctgtgggctgcctgccttcctgccctcccttaagtgctc

SEQ ID NO: 332261 - DNA, 120 bp, Artificial Sequence
  ENSG00000136874_41 (sequence is synthesized)
taagatttttgtacaggagtaagaatcaaatactggtaacatcaatcacaagaagttgaggaaacctgtaatatagctagataatatacaacgtttgtcttccatcagagtgcagaaacc

SEQ ID NO: 332262 - DNA, 120 bp, Artificial Sequence
  ENSG00000136874_42 (sequence is synthesized)
aaaccatgctttgtgttaaccttaaatatgaaaggtgtttctcagggtcccctttgtccttcgttgctgccatatgaaatcttacaaggaaggatgaggaaaagcctggggggaggttct

SEQ ID NO: 332263 - DNA, 120 bp, Artificial Sequence
  ENSG00000136874_43 (sequence is synthesized)
cctcggaaatgaggtggttttttttgttattaagtagaacgtggctgtggttcacaggtacttaacgaatgttagatgatgttcttaagtaatcagaggcctaataaaaggcaggggagt

SEQ ID NO: 332264 - DNA, 120 bp, Artificial Sequence
  ENSG00000136874_44 (sequence is synthesized)
ttctcttctagcctaaattaatattaaaagttcaggggtattttttgtttttaaattaatactttattgtttttaacaggtggttctcataatttacattcattaatttgatgccctttt

SEQ ID NO: 332265 - DNA, 120 bp, Artificial Sequence
  ENSG00000136874_45 (sequence is synthesized)
acaaagaaacttcttaggtattataaaccatcaatgtaaaggatccacatggtatgtatccacattgctactctcaaatagaaatgggagataagaaatatatctgtgcaatattaaatt

SEQ ID NO: 332266 - DNA, 120 bp, Artificial Sequence
  ENSG00000136874_46 (sequence is synthesized)
gaaaaaaaaaaacccataaaaagtgtcaaaggcaaataatttgctctagatcacaaaactagttagcacaaggctaggattataaccagggtctaggaaaaaatcctgaaggtgatttaa

SEQ ID NO: 332267 - DNA, 120 bp, Artificial Sequence
  ENSG00000136874_47 (sequence is synthesized)
ctgagtgttaggccctgtcaagccacctgctaaggctcatggtctttcagactagcttcaacattccaaatcaggcaatagctacaacggaaagataattggacggggaatcctgagatc

SEQ ID NO: 332268 - DNA, 120 bp, Artificial Sequence
  ENSG00000136874_48 (sequence is synthesized)
agagtcctagtttggctttgtctcttgtagcaggattttttaaatcaggggcagctctcttctcccatcccagccatgaatctttcaaccttagtggtcaccaacttgactccattcctt

SEQ ID NO: 332269 - DNA, 120 bp, Artificial Sequence
  ENSG00000136874_49 (sequence is synthesized)
atatcaagacttgtcctgtcaattctcccttaaatgttagttgcatccatttctaaatatatccatggccatcaccctagtaaaaagactattacctcacaccccgcacttgatcttccc

SEQ ID NO: 332270 - DNA, 120 bp, Artificial Sequence
  ENSG00000136874_50 (sequence is synthesized)
ccaactttaagtgactcagttccttatatcactgccacaagaattaacaaccatgtccatctttcatttttctgctgaaagattttcagtggttcccactgaataccaaataaagttcga

SEQ ID NO: 332271 - DNA, 120 bp, Artificial Sequence
  ENSG00000136874_51 (sequence is synthesized)
atcccttagattggcattcacagccttctacgttctggccccagctttatctcttgaaactcactactcaccatctgacaatgccactaaaaatccacaagagtgattttaaggtttttc

SEQ ID NO: 332272 - DNA, 120 bp, Artificial Sequence
  ENSG00000136874_52 (sequence is synthesized)
tatggtgaaggttcaaactggtaataaaccatgtttacatttttctggtctaaaataatttctatattactttataatagtcagctgggggttatttaagctcttggacgagcctaaaac

SEQ ID NO: 332273 - DNA, 120 bp, Artificial Sequence
  ENSG00000136874_53 (sequence is synthesized)
ttgtatcctgaagaaaatatttttttccaccagaagaaattgctttcaatttcttaaccttcaaaacaatgtcagtgttgtcacctgtgcatttgatagccacagcacaagtattcttca

SEQ ID NO: 332274 - DNA, 120 bp, Artificial Sequence
  ENSG00000136874_54 (sequence is synthesized)
ggagcataaatcctccagccttgaatggaccattgtccagctcctgtgaaaaacttaatatttgagaaagacattcaatggtacatgttttctgtacacttcatgagtagttgagatttt

SEQ ID NO: 332275 - DNA, 120 bp, Artificial Sequence
  ENSG00000136874_55 (sequence is synthesized)
cttgtattaaggttaatcactaaaaaggtgtttacttgggtttcgttaactaaaccccctaaagatgttttccattttattgttaaacacttggtgttagcaagggtcagcacgagaaaa

SEQ ID NO: 332276 - DNA, 120 bp, Artificial Sequence
  ENSG00000136874_56 (sequence is synthesized)
ggcccaatggcaagaatttctgcaaactctgtaaagcttactgaattcatttgtcatttattacattgctgagtggtgcttgaataaggaaacatgcaataaatttacttatttaaccaa

SEQ ID NO: 332277 - DNA, 120 bp, Artificial Sequence
  ENSG00000136874_57 (sequence is synthesized)
aaggggctctctggaggccgcctttgggggcgtcgggccctcacaggcttggtgggcctggcgcccgtgtggcgcgcgcaagaggcgctgggcggcaagtagggcattggatccgaagtg

SEQ ID NO: 332278 - DNA, 120 bp, Artificial Sequence
  ENSG00000136874_58 (sequence is synthesized)
cgagcgccatggtggctcctcctgtttttcagaagtggcggagcctcgcttggtttcgtttttggaagctttattggaagctggtatagggaggccgcagacgatgcgagcaggacggcc

SEQ ID NO: 332279 - DNA, 120 bp, Artificial Sequence
  ENSG00000136874_59 (sequence is synthesized)
tcccggggtcgcggggtggaaaagtttccggcgcgcgtcctgtctctggcgcgctgtaggccccgggtcgccagggtcgctggcgtctgggtcccgggacagacccgcgcatccgttcgc

SEQ ID NO: 332280 - DNA, 120 bp, Artificial Sequence
  ENSG00000136874_60 (sequence is synthesized)
tggtgggggcgtttggtgtgtgtggcccaggtgtgctgtgggtgacactgcgaggaatgacgcgacgctcgatggtagtgaggctcggaggactgggagcgagaggccggaagcccctgc

SEQ ID NO: 332281 - DNA, 120 bp, Artificial Sequence
  ENSG00000136874_61 (sequence is synthesized)
tcgccaaacccagaggtggttggcagaaggtcccacaccttggctccctccttttagctaaccgaggttcagagaggagactttactttgacttttctctccaaattcggtatctcttcc

SEQ ID NO: 332282 - DNA, 120 bp, Artificial Sequence
  ENSG00000136874_62 (sequence is synthesized)
ataagtcagaaacattaagcggcgggccggaagaaatcgggcgccactagtatcctgaaaagtgggagctctgggccgatggaaggtttttctatatgagtggagaagacagctgttacc

SEQ ID NO: 332283 - DNA, 85 bp, Artificial Sequence
  ENSG00000136874_63 (sequence is synthesized)
accgaccggcctcgagcgccccggcgggagagatgggattttggcatgttgcccaggctggccatgaactcctgggctcaagtgg

SEQ ID NO: 332284 - DNA, 120 bp, Artificial Sequence
  ENSG00000136874_64 (sequence is synthesized)
cagacatgagccaccgtacccggccccttcattcacaatttttcataaagattcagtggctccacaaagtctgtttttctatatgagtggagaagacagctgttaccagggaggtcatac

SEQ ID NO: 332285 - DNA, 120 bp, Artificial Sequence
  ENSG00000136874_65 (sequence is synthesized)
agggtcttactcttatgattcattaggcttaactatagcgctgctcagtctgtggctaattatttctcatcatgggggcaaaacctttttgagtgcactactcaatgccctgtgaattaa

SEQ ID NO: 332286 - DNA, 120 bp, Artificial Sequence
  ENSG00000136874_66 (sequence is synthesized)
gtattttggggtttgattttgttgggttttttttttccatcaaacccaacatgacatgtaaatgcttatttggattttttttttctggaaagtagattcatttggagaataatatgtttg

SEQ ID NO: 332287 - DNA, 120 bp, Artificial Sequence
  ENSG00000136874_67 (sequence is synthesized)
tatgtttgagtgaattttagcgtgagatgctttttgctgtaaagttgccacccttttattacctaataattaagaccccccccttttttttatgaaagttaatttgtcctttcgacatgg

SEQ ID NO: 332288 - DNA, 120 bp, Artificial Sequence
  ENSG00000136874_68 (sequence is synthesized)
cttatcagatgctattaatgaaccactattaagatggcaaggctgcagtacccagggccctgattacaggaattaaaatagtgtgtgttggctccctgctgctccccagcaggaccgctc

SEQ ID NO: 332289 - DNA, 120 bp, Artificial Sequence
  ENSG00000136874_69 (sequence is synthesized)
tgaagagcatatcaatgcaggacgtacagttcaggtaaggctattatattttttctgctaaatcagtatgaaaaagacagtcttaagacaattttgctaaaatattacctttgcagctga

SEQ ID NO: 332290 - DNA, 120 bp, Artificial Sequence
  ENSG00000136874_70 (sequence is synthesized)
acccttttatacacatttgttactatttacttgaggatacatttttagcagaaattgctgaatcacatgccatacatattttcaaagttttgttttgttaccaaattttcctccagaaat

SEQ ID NO: 332291 - DNA, 120 bp, Artificial Sequence
  ENSG00000136874_71 (sequence is synthesized)
gatacacagacttatactctcacaagcaatacattttgtaaaatcctttaacattggtattacccatttcttaaatttttgctaattgataggttaaaattgtgccacttcgttgttcta

SEQ ID NO: 332292 - DNA, 84 bp, Artificial Sequence
  ENSG00000136874_72 (sequence is synthesized)
ttcagtttaggaactacatttgagccttctccaaggatttcatcaactgtggaacaaaaattttttttttttaaatggacagtt

SEQ ID NO: 332293 - DNA, 120 bp, Artificial Sequence
  ENSG00000136875_0 (sequence is synthesized)
acttcctgtcagtgacgcacttcccctctgctgggcgcgcggtggacggtctgaaagggagtgttcgggtttcgctggggcctcgcggctccagagcccagcatggcttcctcgcgagcc

SEQ ID NO: 332294 - DNA, 120 bp, Artificial Sequence
  ENSG00000136875_1 (sequence is synthesized)
tcttccacgcaggcaaccaaaactaaagcacccgacgacttagttgctccggtcgtgaagaaaccacacatctattatggaagtttggaagagaaggagagggagcgtctggccaaagga

SEQ ID NO: 332295 - DNA, 120 bp, Artificial Sequence
  ENSG00000136875_2 (sequence is synthesized)
gagtctgggattttggggaaagacggacttaaagcagggatcgaagctggaaatattaatataacctctggagaagtgtttgaaattgaagagcatatcagcgagcgacaggcagaagta

SEQ ID NO: 332296 - DNA, 120 bp, Artificial Sequence
  ENSG00000136875_3 (sequence is synthesized)
ttggctgagtttgagagaaggaagcgagcccggcagatcaatgtttccacagatgactcagaggtcaaagcttgccttagagccttgggggaacccatcacactttttggagagggtcct

SEQ ID NO: 332297 - DNA, 120 bp, Artificial Sequence
  ENSG00000136875_4 (sequence is synthesized)
gctgaaagaagagaaaggttaagaaatatcctctcagttgtcggtactgatgccttgaaaaagaccaaaaaggatgatgagaagtctaaaaagtccaaagaagagtatcagcaaacctgg

SEQ ID NO: 332298 - DNA, 120 bp, Artificial Sequence
  ENSG00000136875_5 (sequence is synthesized)
tatcatgaaggaccaaatagcttgaaggtggcaagactatggattgctaattattcgttgcccagggcaatgaaacgcttggaagaggcccgactccataaggagattcctgagacaaca

SEQ ID NO: 332299 - DNA, 120 bp, Artificial Sequence
  ENSG00000136875_6 (sequence is synthesized)
aggacctcccagatgcaagagctgcacaagtctctccggtctttgaataatttttgcagtcagattggggatgatcggcctatctcctactgtcactttagtcccaattccaagatgctg

SEQ ID NO: 332300 - DNA, 120 bp, Artificial Sequence
  ENSG00000136875_7 (sequence is synthesized)
gccacagcttgttggagtgggctttgcaagctctggtctgttcctgattgcaacctccttcacactcttcgagggcataacacaaatgtaggagcaattgtattccatcccaaatccact

SEQ ID NO: 332301 - DNA, 120 bp, Artificial Sequence
  ENSG00000136875_8 (sequence is synthesized)
gtctccttggacccaaaagatgtcaacctggcctcttgtgcggctgatggctctgtgaagctttggagtctcgacagtgatgaaccagtggcagatattgaaggccatacagtgcgtgtg

SEQ ID NO: 332302 - DNA, 120 bp, Artificial Sequence
  ENSG00000136875_9 (sequence is synthesized)
gcgcgggtaatgtggcatccttcaggacgtttcctgggcaccacctgctatgaccgttcatggcgcttatgggatttggaggctcaagaggagatcctgcatcaggaaggccatagcatg

SEQ ID NO: 332303 - DNA, 120 bp, Artificial Sequence
  ENSG00000136875_10 (sequence is synthesized)
ggtgtgtatgacattgccttccatcaagatggctctttggctggcactgggggactggatgcatttggtcgagtttgggacctacgcacaggacgttgtatcatgttcttagaaggccac

SEQ ID NO: 332304 - DNA, 120 bp, Artificial Sequence
  ENSG00000136875_11 (sequence is synthesized)
tcccccaatggctatcacattgcaaccggcagtggtgacaacacctgcaaagtgtgggacctccgacagcggcgttgcgtctacaccatccctgctcatcagaacttagtgactggtgtc

SEQ ID NO: 332305 - DNA, 120 bp, Artificial Sequence
  ENSG00000136875_12 (sequence is synthesized)
aagtttgagcctatccatgggaacttcttgcttactggtgcctatgataacacagccaagatctggacgcacccaggctggtccccgctgaagactctggctggccacgaaggcaaagtg

SEQ ID NO: 332306 - DNA, 120 bp, Artificial Sequence
  ENSG00000136875_13 (sequence is synthesized)
atgggcctagatatttcttccgatgggcagctcatagccacttgctcatatgacaggaccttcaagctgtggatggctgaatagatgacaatgggaaaaggacttgaacctcaagctctc

SEQ ID NO: 332307 - DNA, 120 bp, Artificial Sequence
  ENSG00000136875_14 (sequence is synthesized)
tctaaggagctgttttcctcaaacgagaagaattgaagtgtttagttctatcatgttttctgccaattaccatgcatagaccctcagtagaattggatttccatgtcagcccccactcca

SEQ ID NO: 332308 - DNA, 120 bp, Artificial Sequence
  ENSG00000136875_15 (sequence is synthesized)
ggaaggcagcccaatccctaggtgatggggaacccctctcacggttgaaaatttattacctttttacgccctgccacgaactgtgtagacattgtttttattaatcttttgtttggccgg

SEQ ID NO: 332309 - DNA, 120 bp, Artificial Sequence
  ENSG00000136875_16 (sequence is synthesized)
cactttgggaggccgaggtgggtagatcgcttgagctcaggagttcaagacgagcctgggcaacatggcaaatgccgtctctgcaaaaaaatactaaaattagctggtcgcggtggcttc

SEQ ID NO: 332310 - DNA, 120 bp, Artificial Sequence
  ENSG00000136875_17 (sequence is synthesized)
tgccgtctctgcaaaaaaatactaaaattagctggtcgcggtggcttctgcctgtgattccggctacttgggaggctgaggtgggagggattgcttaagcctgggaggcagaggttgcag

SEQ ID NO: 332311 - DNA, 120 bp, Artificial Sequence
  ENSG00000136875_18 (sequence is synthesized)
aagaccctgtctcaaaaaaaaaaaaaatttgttcgaatgccttatagccttcctcacagcacccaggattgtgactgactctgcatttttaattcttgaaacttggctttccataacatg

SEQ ID NO: 332312 - DNA, 120 bp, Artificial Sequence
  ENSG00000136875_19 (sequence is synthesized)
tgaaacttggctttccataacatggtacatgcttcaggactacatatgacccagagagcaaggtggctgaactatagtctggaagccctcaggtaaagaggcacatctcaccactcattg

SEQ ID NO: 332313 - DNA, 120 bp, Artificial Sequence
  ENSG00000136875_20 (sequence is synthesized)
gttaaacaatgcatcatagcgagcacttttcctttccctggagaatgggatgtgaagcagtagaccgcagccacgccgatggttatacagtgaagaagacttcacctcttcctattgagt

SEQ ID NO: 332314 - DNA, 120 bp, Artificial Sequence
  ENSG00000136875_21 (sequence is synthesized)
ttgcttggaatgctgacagcatcaggcaactctgaactgaacatttgctttgtcagaaaatatctttttttttactttgaagtttggcaaccttcatgttaccccaaagcaaaaccattg

SEQ ID NO: 332315 - DNA, 120 bp, Artificial Sequence
  ENSG00000136875_22 (sequence is synthesized)
tgtcaggagtcaaacaaatgtttagaaagcaaacatgacgtctctattgtacaacctcctttctcttggctgtttaaaggatgtacttcgtgtattaaagggtactttatgttgaagtaa

SEQ ID NO: 332316 - DNA, 120 bp, Artificial Sequence
  ENSG00000136875_23 (sequence is synthesized)
cagagttcagccccgagccgcgcgagtcgactcacctacctcttttcaagccggcctagccccttcccggaacctcggctcccccccaacgaaactactgctaagccaactggactacac

SEQ ID NO: 332317 - DNA, 120 bp, Artificial Sequence
  ENSG00000136875_24 (sequence is synthesized)
ttcccagactgcttggagcctctctctccgcagaacctcgtcttccgcgagcttttcctggaggttctaggagggatgcccctcaatgccacgacgccatttcctactacgacttccatc

SEQ ID NO: 332318 - DNA, 120 bp, Artificial Sequence
  ENSG00000136875_25 (sequence is synthesized)
cctaatgggtgttcctaaacctaaaccttttctttattccacatttgctacggtaaaatcctgttacaaaactaccctataaagaattattttctatagttaagcattttctgaatccta

SEQ ID NO: 332319 - DNA, 120 bp, Artificial Sequence
  ENSG00000136875_26 (sequence is synthesized)
agaggtagaacatgtctttaacttcacagtataaacatgaaggaaatgaggggataggtctctcgttttctgctttcaatggtttgttttgctgagatgttgggggaaatgtttttgaag

SEQ ID NO: 332320 - DNA, 120 bp, Artificial Sequence
  ENSG00000136875_27 (sequence is synthesized)
gaatcatggcattcctggtataaccatgtagttacatatcatagaaaaaaattcagtagaaagtcctctgcctgatttcatcctattaccgaatgaattcaccttccttctgggcagtta

SEQ ID NO: 332321 - DNA, 120 bp, Artificial Sequence
  ENSG00000136875_28 (sequence is synthesized)
aaatggagaaatgacagttataagaggagtagaatgcttcagatttgacctttctgctcttaatttgcctttcagtatcagcaaacctggtatcatgaaggaccaaatagcttgaaggtg

SEQ ID NO: 332322 - DNA, 120 bp, Artificial Sequence
  ENSG00000136877_0 (sequence is synthesized)
gtctcccgcccgggcctagagcgctgccgggggcgccgggactatgtcgcgggcgcggagccacctgcgcgccgctctattcctggcagcggcgtctgcgcgcggcataacgacccaggt

SEQ ID NO: 332323 - DNA, 120 bp, Artificial Sequence
  ENSG00000136877_1 (sequence is synthesized)
cgcggcgcggcggggcttgagcgcgtggccggtgccgcaggagccgagcatggagtaccaggatgccgtgcgcatgctcaataccctgcagaccaatgccggctacctggagcaggtgaa

SEQ ID NO: 332324 - DNA, 120 bp, Artificial Sequence
  ENSG00000136877_2 (sequence is synthesized)
gcgccagcggggtgaccctcagacacagttggaagccatggaactgtacctggcacggagtgggctgcaggtggaggacttggaccggctgaacatcatccacgtcactgggacgaaggg

SEQ ID NO: 332325 - DNA, 120 bp, Artificial Sequence
  ENSG00000136877_3 (sequence is synthesized)
gaagggctccacctgtgccttcacggaatgtatcctccgaagctatggcctgaagacgggattctttagctctccccacctggtgcaggttcgggagcggatccgcatcaatgggcagcc

SEQ ID NO: 332326 - DNA, 120 bp, Artificial Sequence
  ENSG00000136877_4 (sequence is synthesized)
catcagtcctgagctcttcaccaagtacttctggcgcctctaccaccggctggaggagaccaaggatggcagctgtgtctccatgcccccctacttccgcttcctgacactcatggcctt

SEQ ID NO: 332327 - DNA, 120 bp, Artificial Sequence
  ENSG00000136877_5 (sequence is synthesized)
ccacgtcttcctccaagagaaggtggacctggcagtggtggaggtgggcattggcggggcttatgactgcaccaacatcatcaggaagcctgtggtgtgcggagtctcctctcttggcat

SEQ ID NO: 332328 - DNA, 120 bp, Artificial Sequence
  ENSG00000136877_6 (sequence is synthesized)
cgaccacaccagcctcctgggggatacggtggagaagatcgcatggcagaaagggggcatctttaagcaaggtgtccctgccttcactgtgctccaacctgaaggtcccctggcagtgct

SEQ ID NO: 332329 - DNA, 120 bp, Artificial Sequence
  ENSG00000136877_7 (sequence is synthesized)
gagggaccgagcccagcagatctcatgtcctctatacctgtgtccgatgctggaggccctcgaggaaggggggccgccgctgaccctgggcctggagggggagcaccagcggtccaacgc

SEQ ID NO: 332330 - DNA, 120 bp, Artificial Sequence
  ENSG00000136877_8 (sequence is synthesized)
cgccttggccttgcagctggcccactgctggctgcagcggcaggaccgccatggtgctggggagccaaaggcatccaggccagggctcctgtggcagctgcccctggcacctgtgttcca

SEQ ID NO: 332331 - DNA, 120 bp, Artificial Sequence
  ENSG00000136877_9 (sequence is synthesized)
acatcccacatgcggctcgggcttcggaacacggagtggccgggccggacgcaggtgctgcggcgcgggcccctcacctggtacctggacggtgcgcacaccgccagcagcgcgcaggcc

SEQ ID NO: 332332 - DNA, 120 bp, Artificial Sequence
  ENSG00000136877_10 (sequence is synthesized)
tgcgtgcgctggttccgccaggcgctgcagggccgcgagaggccgagcggtggccccgaggttcgagtcttgctcttcaatgctaccggggaccgggacccggcggccctgctgaagctg

SEQ ID NO: 332333 - DNA, 120 bp, Artificial Sequence
  ENSG00000136877_11 (sequence is synthesized)
ctgcagccctgccagtttgactatgccgtcttctgccctaacctgacagaggtgtcatccacaggcaacgcagaccaacagaacttcacagtgacactggaccaggtcctgctccgctgc

SEQ ID NO: 332334 - DNA, 120 bp, Artificial Sequence
  ENSG00000136877_12 (sequence is synthesized)
ctggaacaccagcagcactggaaccacctggacgaagagcaggccagcccggacctctggagtgcccccagcccagagcccggtgggtccgcatccctgcttctggcgccccacccaccc

SEQ ID NO: 332335 - DNA, 120 bp, Artificial Sequence
  ENSG00000136877_13 (sequence is synthesized)
cacacctgcagtgccagctccctcgtcttcagctgcatttcacatgccttgcaatggatcagccaaggccgagaccccatcttccagccacctagtcccccaaagggcctcctcacccac

SEQ ID NO: 332336 - DNA, 120 bp, Artificial Sequence
  ENSG00000136877_14 (sequence is synthesized)
cctgtggctcacagtggggccagcatactccgtgaggctgctgccatccatgtgctagtcactggcagcctgcacctggtgggtggtgtcctgaagctgctggagcccgcactgtcccag

SEQ ID NO: 332337 - DNA, 120 bp, Artificial Sequence
  ENSG00000136877_15 (sequence is synthesized)
tagccaaggcccggggttggaggtgggagcttcccacacctgcctgcgttctccccatgaacttacatactaggtgccttttgtttttggctttcctggttctgtctagactggcctagg

SEQ ID NO: 332338 - DNA, 120 bp, Artificial Sequence
  ENSG00000136877_16 (sequence is synthesized)
ggccagggctttgggatgggaggccgggagaggatgtcttttttaaggctctgtgccttggtctctccttcctcttggctgagatagcagaggggctccccgggtctctcactgttgcag

SEQ ID NO: 332339 - DNA, 120 bp, Artificial Sequence
  ENSG00000136877_17 (sequence is synthesized)
tggcctggccgttcagcctgtctcccccaacaccccgcctgcctcctggctcaggcccagcttattgtgtgcgctgcctggccaggccctgggtcttgccatgtgctgggtggtagattt

SEQ ID NO: 332340 - DNA, 120 bp, Artificial Sequence
  ENSG00000136877_18 (sequence is synthesized)
cctcctcccagtgccttctgggaagggagagggcctctgcctgggacactgcgggacagagggtggctggagtgaattaaagcctttgttttttaaagaaatggcaaagccttcgactga

SEQ ID NO: 332341 - DNA, 120 bp, Artificial Sequence
  ENSG00000136877_19 (sequence is synthesized)
tgggggtggggacagggaccaggaagttgggcccgggccgccggggctgggaattcggagactatagcgtccccgccccgggttgggaagtgggaagtggcacaggagctaggatccaga

SEQ ID NO: 332342 - DNA, 120 bp, Artificial Sequence
  ENSG00000136877_20 (sequence is synthesized)
agcccagaggctcagcggtgcttctggagttccagtgatcccggagtctgaaccggcagtgagagtggggaaagagggatgccgtgcgcatgctcaataccctgcagaccaatgccggct

SEQ ID NO: 332343 - DNA, 120 bp, Artificial Sequence
  ENSG00000136877_21 (sequence is synthesized)
gcgtggccggtgccgcaggagccgagcatggagtaccaggtatcaggcgggccagcgggccagcgggcctgggcgcgacgacacgtgggcctgcgctgagccgcagaacatccgggctcc

SEQ ID NO: 332344 - DNA, 120 bp, Artificial Sequence
  ENSG00000136877_22 (sequence is synthesized)
gtggcctgtctgtgagatgagaagaagaccagactgaagcctgttcaccatatgccaggcagtgctttctgcagacccccttgcagagaccttgtgatggagaattatacacatttgaca

SEQ ID NO: 332345 - DNA, 120 bp, Artificial Sequence
  ENSG00000136877_23 (sequence is synthesized)
tgggagtctacgttttcatcctggcttcactgtgtgactggaacaagttgagtctcctctccagactatttccccattgaaacgtgagggatggctgggcatggtggcttatatgcttgc

SEQ ID NO: 332346 - DNA, 120 bp, Artificial Sequence
  ENSG00000136877_24 (sequence is synthesized)
caggaaaccaagggatgaaaggtgctgggtccctggctgcctccttgcccatggctgagaagttctggtgggaaggaaccatggagggcccatctggatatccttcctcagctaaaactg

SEQ ID NO: 332347 - DNA, 120 bp, Artificial Sequence
  ENSG00000136877_25 (sequence is synthesized)
atggaccctggggggctatggaaccagccagtgcttcaggaccagggtcacccccaggaggtcagctgcatgtctctctgcccagtgtttattcattcaataaacattcagttagcactt

SEQ ID NO: 332348 - DNA, 120 bp, Artificial Sequence
  ENSG00000136877_26 (sequence is synthesized)
gtgggcaggcaggtgggtggcacctgtggagcctgcctaggagggtcccggacacacttggtctcacacaccccgcaggtgctggggagccaaaggcatccaggccagggctcctgtggc

SEQ ID NO: 332349 - DNA, 120 bp, Artificial Sequence
  ENSG00000136877_27 (sequence is synthesized)
gtagcccagacccagggatgtgggggccagagataggagtgtggaggatgctaggtagccctttctctctccttcttccctccacagcaaggtgtccctgccttcactgtgctccaacct

SEQ ID NO: 332350 - DNA, 120 bp, Artificial Sequence
  ENSG00000136877_28 (sequence is synthesized)
ccctgtctcaaaaataaataaataaaaactacaatcatttttgggataaaaacctagccttcaacttgggcccacatggccttgagggccagcccagggctgcagcttgaacattggttg

SEQ ID NO: 332351 - DNA, 120 bp, Artificial Sequence
  ENSG00000136877_29 (sequence is synthesized)
tgggctttgtctctgagagctgtaagacagatgacattgtgggacagatgtcagcagagtgactgattggtatgggactgttggagcccatagaatgtgcaagaccagcctgggtgagga

SEQ ID NO: 332352 - DNA, 120 bp, Artificial Sequence
  ENSG00000136877_30 (sequence is synthesized)
ggctgtcttagttgagaccaacgtggtgaatagggtgagccaggtgcagaggcctggagatagaagatggggaggactggggggctacagatagtccggggggatggggcaccaggaaca

SEQ ID NO: 332353 - DNA, 120 bp, Artificial Sequence
  ENSG00000136877_31 (sequence is synthesized)
aaccgagggacacaggagagatgaggcacggaggccagtagcatcagtccctgcagggtgggggaaggccaggacgctcgggaagggagtcctgatgaccccagctgtcccggcagctct

SEQ ID NO: 332354 - DNA, 120 bp, Artificial Sequence
  ENSG00000136878_0 (sequence is synthesized)
gcgcttgactgacaggcggcggcggcgcagttgcgagtgcaggctccttgccagaggcctccactcactccagacccctatagcccgtcgctgtcagctgtcaacaaaggatgcgaatgc

SEQ ID NO: 332355 - DNA, 120 bp, Artificial Sequence
  ENSG00000136878_1 (sequence is synthesized)
tggccgcttcctgtgggcttcgtgtcacccagaggtgagcccaggccaggatgggggactccagggacctttgccctcaccttgactccataggagaggtgaccaaagaggacttgctgc

SEQ ID NO: 332356 - DNA, 120 bp, Artificial Sequence
  ENSG00000136878_2 (sequence is synthesized)
tcaaatctaagggaacctgtcagtcgtgtggggtcaccggaccaaacctatgggcctgtctgcaggttgcctgcccctatgttggctgcggagaatcctttgctgaccacagcaccattc

SEQ ID NO: 332357 - DNA, 120 bp, Artificial Sequence
  ENSG00000136878_3 (sequence is synthesized)
atgcacaggcaaaaaagcacaacttgaccgtgaacctgaccacgttccgactgtggtgttacgcctgtgagaaggaggtattcctggagcagcggctggcagcccctctgctgggctcct

SEQ ID NO: 332358 - DNA, 120 bp, Artificial Sequence
  ENSG00000136878_4 (sequence is synthesized)
cttccaagttctctgaacaggactccccgccaccctcccaccctctgaaagctgttcctattgctgtggctgatgaaggagagtctgagtcagaggacgatgacctgaaacctcgaggcc

SEQ ID NO: 332359 - DNA, 120 bp, Artificial Sequence
  ENSG00000136878_5 (sequence is synthesized)
tcacgggcatgaagaacctcgggaactcctgctacatgaacgctgccctgcaggccctgtccaattgcccgccgctgactcagttcttcttggagtgtggcggcctggtgcgcacagata

SEQ ID NO: 332360 - DNA, 120 bp, Artificial Sequence
  ENSG00000136878_6 (sequence is synthesized)
agaagccagccctgtgcaagagctaccagaagctggtctctgaggtctggcataagaaacggccaagctacgtggtccccaccagtctgtctcatgggatcaagttggtcaacccaatgt

SEQ ID NO: 332361 - DNA, 120 bp, Artificial Sequence
  ENSG00000136878_7 (sequence is synthesized)
tccgaggctatgcccagcaggacacccaagagttccttcgctgcctgatggaccagctgcacgaggagctcaaggagccggtggtggccacggtggcgctgacggaggctcgggactcag

SEQ ID NO: 332362 - DNA, 120 bp, Artificial Sequence
  ENSG00000136878_8 (sequence is synthesized)
attcgagtgacacggatgagaaacgggagggtgaccggagcccatcagaagatgagttcttgtcctgtgactcgagcagtgaccggggtgagggtgacgggcaggggcgtggcgggggca

SEQ ID NO: 332363 - DNA, 120 bp, Artificial Sequence
  ENSG00000136878_9 (sequence is synthesized)
gctcgcaggccgagacggagctgctgatcccagatgaggcgggccgagccatctctgagaaggagcggatgaaggaccgcaagttctcctggggccagcagcgtacaaactcggagcaag

SEQ ID NO: 332364 - DNA, 120 bp, Artificial Sequence
  ENSG00000136878_10 (sequence is synthesized)
tggacgaggacgctgatgtggacactgccatggctgcccttgacgaccagcccgcggaggcccagcccccgtcaccacggtcctccagcccctgccggacgccagagccggacaatgatg

SEQ ID NO: 332365 - DNA, 120 bp, Artificial Sequence
  ENSG00000136878_11 (sequence is synthesized)
ctcacctacgcagctcctctcgcccctgcagccccgtccaccaccacgagggccatgccaagctgtctagcagcccccctcgtgcaagccccgtgaggatggcaccgtcgtacgtgctca

SEQ ID NO: 332366 - DNA, 120 bp, Artificial Sequence
  ENSG00000136878_12 (sequence is synthesized)
agaaagcccaggtattgagtgctggcagccggaggcggaaggagcagcgctaccgcagcgtcatctcagacatctttgacggctccattctcagccttgtgcagtgtctcacctgtgacc

SEQ ID NO: 332367 - DNA, 120 bp, Artificial Sequence
  ENSG00000136878_13 (sequence is synthesized)
gggtatccaccacagtggaaacgttccaggacttatcactgcccattcctggaaaggaggacctggccaagctccattcagccatctaccagaatgtgccggccaagccaggcgcctgtg

SEQ ID NO: 332368 - DNA, 120 bp, Artificial Sequence
  ENSG00000136878_14 (sequence is synthesized)
gggacagctatgccgcccagggctggctggccttcattgtggagtacatccgacggtttgtggtatcctgtacccccagctggttttgggggcctgtcgtcaccctggaagactgccttg

SEQ ID NO: 332369 - DNA, 120 bp, Artificial Sequence
  ENSG00000136878_15 (sequence is synthesized)
ctgccttctttgccgctgatgagttaaagggtgacaacatgtacagctgtgagcggtgtaagaagctgcggaacggagtgaagtactgcaaagtcctgcggttgcccgagatcctgtgca

SEQ ID NO: 332370 - DNA, 120 bp, Artificial Sequence
  ENSG00000136878_16 (sequence is synthesized)
ttcacctaaagcgctttcggcacgaggtgatgtactcattcaagatcaacagccacgtctccttccccctcgaggggctcgacctgcgccccttccttgccaaggagtgcacatcccaga

SEQ ID NO: 332371 - DNA, 120 bp, Artificial Sequence
  ENSG00000136878_17 (sequence is synthesized)
tcaccacctacgacctcctctcggtcatctgccaccacggcacggcaggcagtgggcactacatcgcctactgccagaacgtgatcaatgggcagtggtacgagtttgatgaccagtacg

SEQ ID NO: 332372 - DNA, 120 bp, Artificial Sequence
  ENSG00000136878_18 (sequence is synthesized)
acgccgagggctacgtactcttctacaggaagagcagcgaggaggccatgcgggagcgacagcaggtggtgtccctggccgccatgcgggagcccagcctgctgcggttctacgtgtccc

SEQ ID NO: 332373 - DNA, 120 bp, Artificial Sequence
  ENSG00000136878_19 (sequence is synthesized)
gcgagtggctcaacaagttcaacaccttcgcggagccaggccccatcaccaaccagaccttcctctgctcccacggaggcatcccgccccacaaataccactacatcgacgacctggtgg

SEQ ID NO: 332374 - DNA, 120 bp, Artificial Sequence
  ENSG00000136878_20 (sequence is synthesized)
tcatcctgccccagaacgtctgggagcacctgtacaacagattcgggggtggccccgccgtgaaccacctgtacgtgtgctccatctgccaggtggagatcgaggcactggccaagcgca

SEQ ID NO: 332375 - DNA, 120 bp, Artificial Sequence
  ENSG00000136878_21 (sequence is synthesized)
ggaggatcgagatcgacaccttcatcaagttgaacaaggccttccaggccgaggagtcgccgggcgtcatctactgcatcagcatgcagtggttccgggagtgggaggcgttcgtcaagg

SEQ ID NO: 332376 - DNA, 120 bp, Artificial Sequence
  ENSG00000136878_22 (sequence is synthesized)
ggaaggacaacgagccccccgggcccattgacaacagcaggattgcacaggtcaaaggaagcggccatgtccagctgaagcagggagctgactacgggcagatttcggaggagacctgga

SEQ ID NO: 332377 - DNA, 120 bp, Artificial Sequence
  ENSG00000136878_23 (sequence is synthesized)
cctacctgaacagcctgtatggaggtggccccgagattgccatccgccagagtgtggcgcagccgctgggcccagagaacctgcacggggagcagaagatcgaagccgagacgcgggccg

SEQ ID NO: 332378 - DNA, 120 bp, Artificial Sequence
  ENSG00000136878_24 (sequence is synthesized)
tgtgatctgctgggctagtctgtaagtcgccccggctggtccctccatggcactctgggtcctctcctcactctccagagaccctcacatgtccttttgaacatccaaagagcaggtccc

SEQ ID NO: 332379 - DNA, 120 bp, Artificial Sequence
  ENSG00000136878_25 (sequence is synthesized)
tgaaagcaccttcctggaggatgtgggagggccctggacatggcccggccccactgctgagtgcccgtgtccccacagccccatgtgccccaccccgcggaaggcgtgtttgtgcccaga

SEQ ID NO: 332380 - DNA, 120 bp, Artificial Sequence
  ENSG00000136878_26 (sequence is synthesized)
agagaggccgggctgctgcagaaccccgccgtgtaaagaggcagaaaagttggtttggtttgcagtaacgctgcaactagaaaatatatgcacttcaggcttgttgaaacgaccaagact

SEQ ID NO: 332381 - DNA, 120 bp, Artificial Sequence
  ENSG00000136878_27 (sequence is synthesized)
ctgtgacgttaatttgggtctttgtcctggcagtgcctctgccagtcactgtcatcgttgtgtcccccacaactgtcctcttgctagctcggcccagctttgtccctggagcccgatgct

SEQ ID NO: 332382 - DNA, 120 bp, Artificial Sequence
  ENSG00000136878_28 (sequence is synthesized)
acccctgtcagacagaggctgcggcctgggccagagtcagggagtagctgctgcttcacggcgtctccactgtgcgattggcccggagccccgaagactcggagggagctgctcagggcc

SEQ ID NO: 332383 - DNA, 120 bp, Artificial Sequence
  ENSG00000136878_29 (sequence is synthesized)
ggtgagcgcagccagaagccctggccagtgaggagctcacaggtcctccctggtggtcccgccgcacctctgcatctcctgggcgtcaccaggaaggctctgaagtcccgggctgctctc

SEQ ID NO: 332384 - DNA, 120 bp, Artificial Sequence
  ENSG00000136878_30 (sequence is synthesized)
agcacttctcctgcagactgaagactctggactcattgctgattggaacaccaggaggaggttggatttctgccagtgggggatgtttctggaggcagctggtcccccacaccgcgtcct

SEQ ID NO: 332385 - DNA, 120 bp, Artificial Sequence
  ENSG00000136878_31 (sequence is synthesized)
gctgagcctgccccctggattggctgtaatttgcctcgaagttcagcagttcatcttcatgggaaatttgctgagcccccaccagggaaccggatgatgaaacagggatacctcacagct

SEQ ID NO: 332386 - DNA, 120 bp, Artificial Sequence
  ENSG00000136878_32 (sequence is synthesized)
tggccatttgaggcaaaggcagcttcccgagctgatgctaaagaagacagactttcccttcctcccagcagcagcagtgcagagcccacctggagggatgtgggggctgtgcagggtgca

SEQ ID NO: 332387 - DNA, 120 bp, Artificial Sequence
  ENSG00000136878_33 (sequence is synthesized)
gcgctcaggtggatcctgggaagcagcctctggatgctgagtggagggagccactgagcacagcaaggcaccaaagcccctggagaaaccgccagggcgaggtgcgaccatcatcaggat

SEQ ID NO: 332388 - DNA, 120 bp, Artificial Sequence
  ENSG00000136878_34 (sequence is synthesized)
caaagcagacggggcgtgggtggggaaggggctctgggaccagaccccccacactactgcgtctttgtttctatcagtctttgtagaagcaggtggtggtggaaattccagcaggtgggt

SEQ ID NO: 332389 - DNA, 120 bp, Artificial Sequence
  ENSG00000136878_35 (sequence is synthesized)
cccgcagaggccctgaggcctcacttttcggatcttctgtcccagatcctgctccctccctgctgagcctggggttcccctggcattggccccagccttctgaaagccggcgctgcagcc

SEQ ID NO: 332390 - DNA, 120 bp, Artificial Sequence
  ENSG00000136878_36 (sequence is synthesized)
agaggccgcacgctgcactgtcgcgacgcagagaggcttctgtgcaggctgggatcgggccccatgtctgtgctgtctagtttgtgttcaaaatgtcagaataaacacagaataaatgtt

SEQ ID NO: 332391 - DNA, 120 bp, Artificial Sequence
  ENSG00000136878_37 (sequence is synthesized)
ggcggcgcagttgcgagtgcaggtgagttccgggccgccaccggctgcttctgtgggccgggcctctgagcattggcgaccccagcccggctccgggctgacagggcctggcttcgccag

SEQ ID NO: 332392 - DNA, 120 bp, Artificial Sequence
  ENSG00000136878_38 (sequence is synthesized)
ccagacggccccacaaccctgcgcgtcgcctcagagggggcgcgcttgactgacaggcggcggcggcgcagttgcgagtgcaggttcatcccccaggctccttgccagaggcctccactc

SEQ ID NO: 332393 - DNA, 120 bp, Artificial Sequence
  ENSG00000136878_39 (sequence is synthesized)
ggtacccacctcaccccgttgggcctcttcctcaagttctgtacctctctggtctcttccagttttaatctttaaaaagaagaagaagcagcaatgcataagctgagtgattccccgcgg

SEQ ID NO: 332394 - DNA, 120 bp, Artificial Sequence
  ENSG00000136878_40 (sequence is synthesized)
aatccaaagctaacagagccaataaggcaccttcgagggcatcccagcccagctactgagccaccagcacagtggtccagaggacgaccttgtgcctagacccaccgggagtcagagcca

SEQ ID NO: 332395 - DNA, 120 bp, Artificial Sequence
  ENSG00000136878_41 (sequence is synthesized)
catctcgtgtgtcctggaaattccctctgctgggtcctcagactgccacagaggagcattgggtggctcaggcgcctcatccattagagacttcacgctgacccccaggcctggggcggc

SEQ ID NO: 332396 - DNA, 120 bp, Artificial Sequence
  ENSG00000136878_42 (sequence is synthesized)
acagctatgccgcccagggctggctggccttcattgtggagtacatccgacggtgcgcccaccttgccactactgggcgacatgggctgggcctgtcctggttttcctgggcgggagaca

SEQ ID NO: 332397 - DNA, 120 bp, Artificial Sequence
  ENSG00000136878_43 (sequence is synthesized)
gtacacagtgaagtccatgcatttggggaaccagggaggtcctgggaggagctgggggccgaagcctgcagaggagttggcttaatatgcaggggatttcttggctactttgaagtggcc

SEQ ID NO: 332398 - DNA, 120 bp, Artificial Sequence
  ENSG00000136878_44 (sequence is synthesized)
aggattggatagtcccttggagctggagggcgatggacagcagggaggtgaccacatggcaggttgaagggagggcagcagcaggacacaggcctggttggcgggaagggcagcagcttt

SEQ ID NO: 332399 - DNA, 120 bp, Artificial Sequence
  ENSG00000136881_0 (sequence is synthesized)
gtcattttccctctactgctggaaaagaaggctcaagaggaagaatccaggttttgaggttttgctgaagatattcctgaagaatcatcccaggtgccacactaaaaaaatgatccagtt

SEQ ID NO: 332400 - DNA, 120 bp, Artificial Sequence
  ENSG00000136881_1 (sequence is synthesized)
gacagctacccctgtgagtgcacttgttgatgagccagtgcatatccgagctacaggcctgattccctttcagatggtgagttttcaggcatcactggaagatgaaaacggagacatgtt

SEQ ID NO: 332401 - DNA, 120 bp, Artificial Sequence
  ENSG00000136881_2 (sequence is synthesized)
ttattctcaagcccactatagggccaatgaattcggtgaggtggacctgaatcatgcttcttcacttggaggggattatatgggagtccaccccatgggtctcttctggtctctgaaacc

SEQ ID NO: 332402 - DNA, 120 bp, Artificial Sequence
  ENSG00000136881_3 (sequence is synthesized)
tgaaaagctattaacaagactgttgaaaagagatgtgatgaataggcctttccaggtccaagtaaaactttatgacttagagttaatagtgaacaataaagttgccagtgctccaaaggc

SEQ ID NO: 332403 - DNA, 120 bp, Artificial Sequence
  ENSG00000136881_4 (sequence is synthesized)
cagcctgactttggagaggtggtatgtggcacctggtgtcacacgaattaaggttcgagaaggccgccttcgaggagctctctttctccctccaggagagggtctcttcccaggggtaat

SEQ ID NO: 332404 - DNA, 120 bp, Artificial Sequence
  ENSG00000136881_5 (sequence is synthesized)
tgatttgtttggtggtttgggtgggctgcttgaatttcgggccagcctcctagccagtcgtggcttcgcctccttggccttggcttaccataactatgaagacctgccccgcaaaccaga

SEQ ID NO: 332405 - DNA, 120 bp, Artificial Sequence
  ENSG00000136881_6 (sequence is synthesized)
agtaacagatttggaatattttgaggaggctgccaactttctcctgagacatccaaaggtctttggctcaggcgttggggtagtctctgtatgtcaaggagtacagattggactatctat

SEQ ID NO: 332406 - DNA, 120 bp, Artificial Sequence
  ENSG00000136881_7 (sequence is synthesized)
ggctatttacctaaagcaagtcacagccacggtacttattaatgggaccaactttccttttggcattccacaggtatatcatggtcagatccatcagccccttccccattctgcacaatt

SEQ ID NO: 332407 - DNA, 120 bp, Artificial Sequence
  ENSG00000136881_8 (sequence is synthesized)
aatatccaccaatgccttggggttactagagctctatcgcacttttgagacaactcaagttggggccagtcaatatttgtttcctattgaagaggcccaggggcaattcctcttcattgt

SEQ ID NO: 332408 - DNA, 120 bp, Artificial Sequence
  ENSG00000136881_9 (sequence is synthesized)
aggagaaggtgataagactatcaacagcaaagcacacgctgaacaagccataggacagctgaagagacatgggaagaacaactggaccctgctatcttaccctggggcaggccacctgat

SEQ ID NO: 332409 - DNA, 120 bp, Artificial Sequence
  ENSG00000136881_10 (sequence is synthesized)
agaacctccctattctcctctgtgctgtgcctcaacgacccacgatttgaggttacactggggaggagaggtgatcccacacgcagctgcacaggaacatgcttggaaggagatccagag

SEQ ID NO: 332410 - DNA, 120 bp, Artificial Sequence
  ENSG00000136881_11 (sequence is synthesized)
atttctcaggaagcacctcattccagatgtgaccagtcaactctaagaagactagatattcctagaaaataaagaagcaaatctctttaccgggaccttctctcaattttcatggcggaa

SEQ ID NO: 332411 - DNA, 120 bp, Artificial Sequence
  ENSG00000136881_12 (sequence is synthesized)
tgtctcccccagctgccacacacacattttgtattaattttaatgattaaaaagagcatagggtaaaaacctgatatttcacttatactgcataacaagctaaccaaactggacatggtg

SEQ ID NO: 332412 - DNA, 120 bp, Artificial Sequence
  ENSG00000136881_13 (sequence is synthesized)
aataaatcataaaacaaatcattttacttattatttacatgacttttctttccatcaggtcttctaaataggactgaggtatagtacactggcaaaaataagaaaaggcaaacaagaata

SEQ ID NO: 332413 - DNA, 120 bp, Artificial Sequence
  ENSG00000136881_14 (sequence is synthesized)
ataaaaccaaataccatgtcagaaaacactatatagtaagaatttatcagattagagcagcaggagaaaattaatactaaattataatcattttagtgatatttttcaacttcaccacag

SEQ ID NO: 332414 - DNA, 120 bp, Artificial Sequence
  ENSG00000136881_15 (sequence is synthesized)
taactttgcaacatcatttttcatttgtggggtagtaaaattcatgtcaaaaaggaaagaaggaatggaggaggtcagttagttcattgcaataaattacctcttcagttcttaaaaaca

SEQ ID NO: 332415 - DNA, 120 bp, Artificial Sequence
  ENSG00000136881_16 (sequence is synthesized)
tgcccattggcacataactgagacataataactaagactggaagagccttggtttaagttatgaagcaaattaaaatggaaaatacaagaaaatagaaccaattaggttgaaaatgcccc

SEQ ID NO: 332416 - DNA, 120 bp, Artificial Sequence
  ENSG00000136881_17 (sequence is synthesized)
ttactgaaaatctgtattaaaaataaaattaataaaagtaaaaaataaaaatagaaacacaactctactagtacaggctagcctggggagtttgataaactgagtgattgggtcaactat

SEQ ID NO: 332417 - DNA, 120 bp, Artificial Sequence
  ENSG00000136881_18 (sequence is synthesized)
cactgtacttccataatgaatttcttcagtcatgttagagtagcacatgaatgtgagctctataaggacaggtactatatttccgtaagacccaatagttactgtacatcccataaataa

SEQ ID NO: 332418 - DNA, 120 bp, Artificial Sequence
  ENSG00000136881_19 (sequence is synthesized)
aaaatactttagtttgctaaccaactgaatatatgaggactgcatgtaattcaaccacatggttgtttgctgtacagtcctttgcaaatattaaaaaattttttttgctataaggctttg

SEQ ID NO: 332419 - DNA, 120 bp, Artificial Sequence
  ENSG00000136881_20 (sequence is synthesized)
atcatatagtcctcatagcaacataactaccatctagcatgtaccacattttgcaagactttaagttcaacattccaaactgccaatttgtattatgtccaaatgcagtatccttgagga

SEQ ID NO: 332420 - DNA, 120 bp, Artificial Sequence
  ENSG00000136881_21 (sequence is synthesized)
atatagtgggtcagttaaatatctagagacatacaaacatctgctaattcatctcattgagatggatcattctgatctccatcatccacccacttttcatcagcttctcctacttcattc

SEQ ID NO: 332421 - DNA, 120 bp, Artificial Sequence
  ENSG00000136881_22 (sequence is synthesized)
tcctcatagtctttatcatgagggattctgtatcctgtctctcatctacacttgctggccttcctggttgtgatttattggaacagtctacacaaaaaccatagggtcaagatccatgtc

SEQ ID NO: 332422 - DNA, 120 bp, Artificial Sequence
  ENSG00000136881_23 (sequence is synthesized)
ttactccaacactggctgctaacatgatcttacataccatacatttgcatttttatccttcttgtgcaccaagaaatgttttcttacatgttttctccaagtgtaaaaagtcacagctaa

SEQ ID NO: 332423 - DNA, 120 bp, Artificial Sequence
  ENSG00000136881_24 (sequence is synthesized)
atgatctcactcctgtatgaataagcaagtgcttttttagtgtttgtttgcatttggctgcatagctacaatgatggcattttaacttattcatgattagagatgatgatatggtttgga

SEQ ID NO: 332424 - DNA, 120 bp, Artificial Sequence
  ENSG00000136881_25 (sequence is synthesized)
tatttgttgtgcccaaatttcatgctgaaatgtaatccctagtgttggaggtgaggcctggtgggagttgtttgggtcatgggggtggaccctcatggcttggtactgtcctcatgagag

SEQ ID NO: 332425 - DNA, 120 bp, Artificial Sequence
  ENSG00000136881_26 (sequence is synthesized)
tatgatagtgagtgagttctcaagagatatgactgtttaaaagtgtgtggcacctcctccccatcctcacactctttcttgcctcctctctcgccatgtgagatgcctcctcgctgttca

SEQ ID NO: 332426 - DNA, 120 bp, Artificial Sequence
  ENSG00000136881_27 (sequence is synthesized)
cctgctgccatgattgtaaacttcctgaggcctccccagaagccaagtagatgcaagcattatgcttctgtaaagcctgcaggaccatgatccaattaaatctcttttctttataaatta

SEQ ID NO: 332427 - DNA, 120 bp, Artificial Sequence
  ENSG00000136883_0 (sequence is synthesized)
tgtgcagagcaggacatggaagaacgcgggtcacccgacggggatctcgcgcggagcctggagcaagggccagaggggccggaaacgcccatccaggtggtgctcagggtacgtcccatg

SEQ ID NO: 332428 - DNA, 120 bp, Artificial Sequence
  ENSG00000136883_1 (sequence is synthesized)
agcgcggccgagctgcgtcgagggcagcagagcgtgctgcactgctcagggacccggactctgcaggtgagtcctccaggcgggggtccagaagtggcgttccgcttcggtgcggtgcta

SEQ ID NO: 332429 - DNA, 120 bp, Artificial Sequence
  ENSG00000136883_2 (sequence is synthesized)
gacgcggcgcgcacgcaggaggacgtgttccgggcgtgcggcgtgcggcgcctgggggagctggcgctgcgcggtttctcctgcactgttttcacctttggccagacgggctctgggaag

SEQ ID NO: 332430 - DNA, 120 bp, Artificial Sequence
  ENSG00000136883_3 (sequence is synthesized)
acctacaccctgactggaccccctccccagggggagggggtgcctgtaccccccagcctggctggcatcatgcagaggaccttcgcctggctgttggaccgcgtgcagcacctgggtgcc

SEQ ID NO: 332431 - DNA, 120 bp, Artificial Sequence
  ENSG00000136883_4 (sequence is synthesized)
cctgtcacccttcgcgcctcttatctggagatctacaatgagcaggttcgggacttgctgagcctggggtctccccggcccctccctgttcgctggaacaagactcggggcttctatgtg

SEQ ID NO: 332432 - DNA, 120 bp, Artificial Sequence
  ENSG00000136883_5 (sequence is synthesized)
gagcagctgcgggtggtggaatttgggagtctggaggccctgatggaacttttgcaaacgggtctcagccgtcgaaggaactcagcccacaccctgaaccaggcctccagccgaagccat

SEQ ID NO: 332433 - DNA, 120 bp, Artificial Sequence
  ENSG00000136883_6 (sequence is synthesized)
gccctgctcaccctttacatcagccgtcaaactgcccagcagatgccttctgtggaccctggggagccccctgttggtgggaagctgtgctttgtggacctggcaggcagtgagaaggta

SEQ ID NO: 332434 - DNA, 120 bp, Artificial Sequence
  ENSG00000136883_7 (sequence is synthesized)
gcagccacgggatcccgtggggagctgatgcttgaggctaacagcatcaaccgaagcctgctggccctgggtcactgcatctccctgctgctggacccacagcggaagcagagccacatc

SEQ ID NO: 332435 - DNA, 120 bp, Artificial Sequence
  ENSG00000136883_8 (sequence is synthesized)
cctttccgggacagcaagctcaccaagttgctggcagactcactgggagggcgcggggtcaccctcatggtggcctgcgtgtccccctcagcccagtgccttcctgagactctcagcacc

SEQ ID NO: 332436 - DNA, 120 bp, Artificial Sequence
  ENSG00000136883_9 (sequence is synthesized)
cccgaccacaggcccccaagtctcctgtggcaaagcagccccagcgtttggagacagagatgctgcagctccaggaggagaaccgtcgcctgcagttccagctggaccaaatggactgca

SEQ ID NO: 332437 - DNA, 120 bp, Artificial Sequence
  ENSG00000136883_10 (sequence is synthesized)
aggcctcagggctcagtggagcccgggtggcctgggcccagcggaacctgtacgggatgctacaggagttcatgctagagaatgagaggctcaggaaagaaaagagccagctgcagaata

SEQ ID NO: 332438 - DNA, 120 bp, Artificial Sequence
  ENSG00000136883_11 (sequence is synthesized)
gccgagacctggcccagaatgagcagcgcatcctggcccagcaggtccatgcactagagaggcgtctcctctctgcctgctaccatcaccagcagggtcctggcctgaccccaccgtgtc

SEQ ID NO: 332439 - DNA, 120 bp, Artificial Sequence
  ENSG00000136883_12 (sequence is synthesized)
cctgcttgatggccccagctcccccttgccatgcactgccacccctctactcctgcccctgctgccacatctgcccactgtgtcgagtgcccctggcccactgggcctgcctgccagggg

SEQ ID NO: 332440 - DNA, 120 bp, Artificial Sequence
  ENSG00000136883_13 (sequence is synthesized)
agcaccacctgccccaggtgttggaccctgaggcctcaggtggcaggcccccatctgcccggcccccaccctgggcacccccatgcagccctggctctgccaagtgcccaagagagagga

SEQ ID NO: 332441 - DNA, 120 bp, Artificial Sequence
  ENSG00000136883_14 (sequence is synthesized)
gtcacagtgactggactcagacccgagtcctggcagagatgttgacggaggaggaggtggtaccttctgcacctcccctgcctgtgaggcccccgaagacatcaccagggctcagaggtg

SEQ ID NO: 332442 - DNA, 120 bp, Artificial Sequence
  ENSG00000136883_15 (sequence is synthesized)
gggccggggttccaaacctggcccagagactggaggccctcagagaccagattggcagctccctgcgacgtggccgcagccagccaccctgcagtgagggcgcacggagcccaggccaag

SEQ ID NO: 332443 - DNA, 120 bp, Artificial Sequence
  ENSG00000136883_16 (sequence is synthesized)
tcctccctccccattgaaggccaagtgggaacccaggagactgctgtgtgacctcagactgggctccacactcttgggcttcagtctgcccatctgctgaatggagacagcagctgctac

SEQ ID NO: 332444 - DNA, 120 bp, Artificial Sequence
  ENSG00000136883_17 (sequence is synthesized)
tccacctgcagctgggctaggggcggggactgggggtgctatttaggggaacaaggggattcaggagaaaccaggcagcaggggatgaaatacatgaataaagagaggcatcagctccaa

SEQ ID NO: 332445 - DNA, 120 bp, Artificial Sequence
  ENSG00000136883_18 (sequence is synthesized)
ggaagacatcaggatgtaccatctgcccttctgtcggaccccagggtacgtcccatgagcgcggccgagctgcgtcgagggcagcagagcgtgctgcactgctcagggacccggactctg

SEQ ID NO: 332446 - DNA, 120 bp, Artificial Sequence
  ENSG00000136883_19 (sequence is synthesized)
gggatgtcatggagcctctgacgcacctttttgcaggcactgccacccctctactcctgcccctgctgccacatctgcccactgtgtcgagtgcccctggcccactgggcctgcctgcca

SEQ ID NO: 332447 - DNA, 120 bp, Artificial Sequence
  ENSG00000136883_20 (sequence is synthesized)
ggggagcaccacctgccccagacaagtccctggctgtcactggcatctacacgggccggcaaagaagacctttgagaggacttttttgaaagttgggcagacgtgtctttctcaagaacc

SEQ ID NO: 332448 - DNA, 120 bp, Artificial Sequence
  ENSG00000136883_21 (sequence is synthesized)
gcctggctggcatcatgcagaggaccttcgcctggctgttggaccgcgtgcagcacctgggtgcccctgtcacccttcgcgcctcttatctggagatctacaatgagcaggtctcagccg

SEQ ID NO: 332449 - DNA, 120 bp, Artificial Sequence
  ENSG00000136883_22 (sequence is synthesized)
tcgaaggaactcagcccacaccctgaaccaggcctccagccgaagccatgccctgctcaccctttacatcagccgtcaaactgtcactgcatctccctgctgctggacccacagcggaag

SEQ ID NO: 332450 - DNA, 120 bp, Artificial Sequence
  ENSG00000136883_23 (sequence is synthesized)
cgggcctggcggggccccgaagcacccccagcccccaccccgggtagccgccggagtccagccacgcccttgccgcccgcagtttctcctgcactgttttcacctttggccagacgggct

SEQ ID NO: 332451 - DNA, 120 bp, Artificial Sequence
  ENSG00000136883_24 (sequence is synthesized)
gaggagtcagaaatagaccagacgtggttcctgctctcaggaggcttctagtctcaggagaggacggtagaagaaccatctgctgcacacagaaggcgaccaagaccccacccctttatg

SEQ ID NO: 332452 - DNA, 120 bp, Artificial Sequence
  ENSG00000136883_25 (sequence is synthesized)
ttgggcttcaactttggccccttcctagctctcagttttctcatctgtaaaatggaagtgacagtaccgactatgaattaaatgagccattgtttgggaacttggcacgtttcccggcgc

SEQ ID NO: 332453 - DNA, 120 bp, Artificial Sequence
  ENSG00000136888_0 (sequence is synthesized)
gtgtcagctgacccaaggggccttcgaggtgccttaggccgcttgccttgctctcagaatcgctgccgccatggctagtcagtctcaggggattcagcagctgctgcaggccgagaagcg

SEQ ID NO: 332454 - DNA, 120 bp, Artificial Sequence
  ENSG00000136888_1 (sequence is synthesized)
ggcagccgagaaggtgtccgaggcccgcaaaagaaagaaccggaggctgaagcaggccaaagaagaagctcaggctgaaattgaacagtaccgcctgcagagggagaaagaattcaaggc

SEQ ID NO: 332455 - DNA, 120 bp, Artificial Sequence
  ENSG00000136888_2 (sequence is synthesized)
caaggaagctgcggcattgggatcccgtggcagttgcagcactgaagtggagaaggagacccaggagaagatgaccatcctccagacatacttccggcagaacagggatgaagtcttgga

SEQ ID NO: 332456 - DNA, 120 bp, Artificial Sequence
  ENSG00000136888_3 (sequence is synthesized)
caacctcttggcttttgtctgtgacattcggccagaaatccatgaaaactaccgcataaatggatagaagagagaagcacctgtgctgtggagtggcattttagatgccctcacgaatat

SEQ ID NO: 332457 - DNA, 120 bp, Artificial Sequence
  ENSG00000136888_4 (sequence is synthesized)
gaagcttagcacagctctagttacattcttatgatatggcattaaattatttccatatattatataataggtccttccactttttggagagtagcaaatctagcttttttgtacagactt

SEQ ID NO: 332458 - DNA, 120 bp, Artificial Sequence
  ENSG00000136888_5 (sequence is synthesized)
agaaattatctaaagatttcatctttttacctcatatttcttaggaatttaatggttatatgttgtctttttttcctatgtcttttggctcaagcaacatgtatatcagtgttgactttt

SEQ ID NO: 332459 - DNA, 120 bp, Artificial Sequence
  ENSG00000136888_6 (sequence is synthesized)
ttcttagatctagtttaaaaaaaaaaaaaaccacataacaattctttgaagaaaggaagggattaaataatttttttccctaacactttcttgaaggtcaggggctttatctatgaaaaa

SEQ ID NO: 332460 - DNA, 120 bp, Artificial Sequence
  ENSG00000136888_7 (sequence is synthesized)
gtagtaaatagttctttgtaacctgtgtgaagcagcagccagccttaaagtagtccattcttgctaatggttagaacagtgaatactagtggaattgtttgggctgcttttagtttctct

SEQ ID NO: 332461 - DNA, 120 bp, Artificial Sequence
  ENSG00000136888_8 (sequence is synthesized)
taatcaaaattactagatgatagaattcaagaacttgttacatgtattacttggtgtatcgataatcatttaaaagtaaagactctgtcatgcatttttccccattcttttttttttccc

SEQ ID NO: 332462 - DNA, 120 bp, Artificial Sequence
  ENSG00000136888_9 (sequence is synthesized)
tgtctccgtgacaaccagtggttcttcatttttgatcatgcgaaatgcattttgacccagatggtctgcagaacttcacttaggacattagcacacaaatagcacacatatcacataccc

SEQ ID NO: 332463 - DNA, 120 bp, Artificial Sequence
  ENSG00000136888_10 (sequence is synthesized)
atttatatacataattagaaaatgttcctgatacatgtgtcatgtgatttcttccaacaaatgttttggaaaacagcaagcaactagtctgtaggttgtcttttctctagagatccttgt

SEQ ID NO: 332464 - DNA, 120 bp, Artificial Sequence
  ENSG00000136888_11 (sequence is synthesized)
cctgggacagcctggggcaagttattaagcatatttccttcctggtgggctagatgatgtgcattatacctgtagtaccttcatactagcccttacaagttaaatgtcctgtggccatct

SEQ ID NO: 332465 - DNA, 120 bp, Artificial Sequence
  ENSG00000136888_12 (sequence is synthesized)
tagccgaaagtctttggttgcaaaatcttataggtaaaaacagttgaaagaacattatgggatttccttgcttgttctgatacaatacaactagatgaccttaaaaaccctcatatttaa

SEQ ID NO: 332466 - DNA, 120 bp, Artificial Sequence
  ENSG00000136888_13 (sequence is synthesized)
aactgcggggtgcgggcgtgcgtatagtcgcggaaggttgtgtgtttcgaagctttgaggagctgaggctctggaaggcttgcggatcgcctggaagccacgatgtgagatggaaagaac

SEQ ID NO: 332467 - DNA, 120 bp, Artificial Sequence
  ENSG00000136888_14 (sequence is synthesized)
cggaggctgaagcaggccaaagaagaagctcaggctgaaattgaacagtaccgcctgcagagggagaaagaattcaaggccaaggaagctgcggtggggcaccatttgtttttgttactg

SEQ ID NO: 332468 - DNA, 120 bp, Artificial Sequence
  ENSG00000136891_0 (sequence is synthesized)
cctgatttccgggcggcggaaggagacgcggccgcgtgaggacgaggctatttgaaaacacgctccgggagctagagcctgaggtcggcggcgcacgctgttgccccgtgggcttctgct

SEQ ID NO: 332469 - DNA, 120 bp, Artificial Sequence
  ENSG00000136891_1 (sequence is synthesized)
ccctcgcttgtcttctcgggcttctcgccccggccgcggccgggtcctcagtagtcgagaatgactaaaaaaagaaaacgccaacatgattttcaaaaagtaaaattgaaagttggtaaa

SEQ ID NO: 332470 - DNA, 120 bp, Artificial Sequence
  ENSG00000136891_2 (sequence is synthesized)
aagaagcccaagttacaaaatgctactcctacaaactttaaaacaaagactatacatctgcctgagcaactcaaagaggatggaacacttccaacaaacaatagaaaacttaacataaag

SEQ ID NO: 332471 - DNA, 120 bp, Artificial Sequence
  ENSG00000136891_3 (sequence is synthesized)
gatttgctgtcacagatgcatcactacaatgctggggttaaacaaagtgctcttcttggacttaaagaccttttgtctcaatacccatttataattgatgcacacctttcaaacatatta

SEQ ID NO: 332472 - DNA, 120 bp, Artificial Sequence
  ENSG00000136891_4 (sequence is synthesized)
agtgaagtgactgctgtgtttacagataaagatgctaatgtacgattagcagcagttcaacttcttcaattcctggcccccaaaatacgagctgaacaaatttctccattttttcctttg

SEQ ID NO: 332473 - DNA, 120 bp, Artificial Sequence
  ENSG00000136891_5 (sequence is synthesized)
gtaagtgcccatctctctagtgccatgactcacattactgaaggaattcaggaggactctttaaaagttttggacattctgctggaacagtacccagctctaattactggccgtagcagc

SEQ ID NO: 332474 - DNA, 120 bp, Artificial Sequence
  ENSG00000136891_6 (sequence is synthesized)
atattgcttaagaattttgtagaacttatttctcatcagcagctgtccaaaggactgataaatagagacagatcccagtcctggatactttctgtaaatcctaatcggagactcacttct

SEQ ID NO: 332475 - DNA, 120 bp, Artificial Sequence
  ENSG00000136891_7 (sequence is synthesized)
cagcaatggaggctgaaagtcttagtgagactcagtaaattccttcaggccttggcagatggatccagtaggttgagagaaagtgaaggacttcaggaacagaaagaaaatccccatgcc

SEQ ID NO: 332476 - DNA, 120 bp, Artificial Sequence
  ENSG00000136891_8 (sequence is synthesized)
actagcaactccatttttatcaactggaaggaacatgccaacgaccagcaacacatccaggtttatgaaaatgggggttcacagccaaatgtcagttcacagttcaggctacggtatctg

SEQ ID NO: 332477 - DNA, 120 bp, Artificial Sequence
  ENSG00000136891_9 (sequence is synthesized)
gttggaggactgagtggtgtggatgaaggcctgtcatctactgaaaacctgaaaggatttattgagataataattccattgctaattgaatgctgggttgaagctgtacctccacaacta

SEQ ID NO: 332478 - DNA, 120 bp, Artificial Sequence
  ENSG00000136891_10 (sequence is synthesized)
gctactcctgttgggaatggtatagaacgagaacctctacaggttatgcagcaagttcttaatattatttcccttctgtggaaactctctaaacaacaggatgaaacccataaattggag

SEQ ID NO: 332479 - DNA, 120 bp, Artificial Sequence
  ENSG00000136891_11 (sequence is synthesized)
tcatggcttcgaaagaactaccttattgattttaaacaccattttatgagtcgttttccatatgtcttaaaagaaataaccaagcacaaaaggaaagagccaaataaaagcatcaagcat

SEQ ID NO: 332480 - DNA, 120 bp, Artificial Sequence
  ENSG00000136891_12 (sequence is synthesized)
tgcgtcaactttgcagaaggattgcagttggatagaaatgataaggaaatttgtaacagagacccttgaagatggctctaggctaaatagtaagcaactgaacagattgctgggagtatc

SEQ ID NO: 332481 - DNA, 120 bp, Artificial Sequence
  ENSG00000136891_13 (sequence is synthesized)
ctggaggttaatgcaaatacagccaaacagagaggacacagagactcttattaaggcagtttatacattatatcagcagaggggccttatccttccagttcggactttgttattgaagtt

SEQ ID NO: 332482 - DNA, 120 bp, Artificial Sequence
  ENSG00000136891_14 (sequence is synthesized)
tttcagtaaaatctatcagacagaagaactgagatcttgtagattcagatatcgtagtaaagtgttatcccgttggctggctggcttaccattgcaacttgctcatcttggctcccgaaa

SEQ ID NO: 332483 - DNA, 120 bp, Artificial Sequence
  ENSG00000136891_15 (sequence is synthesized)
tcctgagctctctacacagcttatcgatatcattcataccgctgcagcacgagcaaataaagaattactaaaaagtttacaagctactgccctccgaatttatgatccacaagaaggtgc

SEQ ID NO: 332484 - DNA, 120 bp, Artificial Sequence
  ENSG00000136891_16 (sequence is synthesized)
tgtggtggttctccctgcagactctcagcagcgtttggttcagcttgtatatttcctacccagtctgccggctgatttgctttctcggttaagtcgttgctgtattatgggaagactcag

SEQ ID NO: 332485 - DNA, 120 bp, Artificial Sequence
  ENSG00000136891_17 (sequence is synthesized)
ttcaagtttggctgccatgcttatcgggatactgcacatgagatcatcattttctgggtggaagtattcagctaaagactggttgatgagtgatgtagactatttcagcttcttattttc

SEQ ID NO: 332486 - DNA, 120 bp, Artificial Sequence
  ENSG00000136891_18 (sequence is synthesized)
cacacttacagggttttcgaaagaggagttgacttggcttcagagccttcgaggagttcctcatgtcatccagacacagctttcccctgtgcttctctaccttacagatttggatcaatt

SEQ ID NO: 332487 - DNA, 120 bp, Artificial Sequence
  ENSG00000136891_19 (sequence is synthesized)
tttacaccactgggatgtaacagaggcagtttttcacagtttattggttattcctgcccgaagtcagaactttgacatcttgcaaagtgccatcagtaagcatttggttgggttgactgt

SEQ ID NO: 332488 - DNA, 120 bp, Artificial Sequence
  ENSG00000136891_20 (sequence is synthesized)
aattcctgacagcacggctggctgtgtttttggtgttatctgtaagctcctggatcatacttgtgtagttagtgagactctactgccatttctggcttcttgttgctacagtcttcttta

SEQ ID NO: 332489 - DNA, 120 bp, Artificial Sequence
  ENSG00000136891_21 (sequence is synthesized)
ttttctgctcactatagagaaaggggaagcagaacatctaagaaagagggacaagctgtggggggtctgtgtctccatcctggctctcttgcctcgagtcctcaggttgatgctgcagag

SEQ ID NO: 332490 - DNA, 120 bp, Artificial Sequence
  ENSG00000136891_22 (sequence is synthesized)
cctgcgggtgaacagagttgggcctgaggagctgcctgttgtgggccagctgcttcgactgctgcttcagcatgcacccctcaggactcatatgttgaccaatgcgatcttggtgcagca

SEQ ID NO: 332491 - DNA, 120 bp, Artificial Sequence
  ENSG00000136891_23 (sequence is synthesized)
gatcatcaagaatatcacgacattgaagagtggaagtgttcaggaacagtggctcacagacttacattactgcttcaacgtgtatatcactgggcatccccaagggcccagtgcactggc

SEQ ID NO: 332492 - DNA, 120 bp, Artificial Sequence
  ENSG00000136891_24 (sequence is synthesized)
tacagtgtattgaagaggccatagtacctcctgtttgaagttgtttattcacatctatcttatttgaagaaaaagactgatgtaatagatctttgtcattaaagctgaacttttaaagaa

SEQ ID NO: 332493 - DNA, 120 bp, Artificial Sequence
  ENSG00000136891_25 (sequence is synthesized)
atgtgcctttttggtcttttttgaacttttaaatgacatgaaaatacatatactgaatgtataaaaaaacatttatgtagtttaaaaggtaattataaactgaacctccatttaaccaac

SEQ ID NO: 332494 - DNA, 120 bp, Artificial Sequence
  ENSG00000136891_26 (sequence is synthesized)
cccaggttcggatatagaatatcatcagcacatatactgttaatgtaccctgcacagttaaatgtcttctacgtacccctctgccccagatcacttggtgttgatcaacttcattacctt

SEQ ID NO: 332495 - DNA, 120 bp, Artificial Sequence
  ENSG00000136891_27 (sequence is synthesized)
aaaaaaaaaaatggttttatgtgcatttgtgaacagtatcaggtttgttttgcatatttgtggattttttgtaatgggaattatactgcatgtattttttgtgatttgattctctcagca

SEQ ID NO: 332496 - DNA, 120 bp, Artificial Sequence
  ENSG00000136891_28 (sequence is synthesized)
ttgcttttgagattgattgaagttgactcattcagctgtatttcattcgtttttatttctccataccagggttcagcaaagttctttctataaagggttagttagtaaatattttaggtt

SEQ ID NO: 332497 - DNA, 120 bp, Artificial Sequence
  ENSG00000136891_29 (sequence is synthesized)
ttgcagaccattaggtctctgtcatggctactcagcactaccacggtagtgtgaaagcatcaatagataatatgtaaataaatgagtataattgtgttccagtaaaactatttacaaata

SEQ ID NO: 332498 - DNA, 120 bp, Artificial Sequence
  ENSG00000136891_30 (sequence is synthesized)
cttaccatgggctggatttggcctgtggccatagtttgctcagtctgctctatagtattctgttacatgcatgtaccataacttagccattttattgtcagcattcaaattttttccagt

SEQ ID NO: 332499 - DNA, 120 bp, Artificial Sequence
  ENSG00000136891_31 (sequence is synthesized)
aagagtatgtgcatagaaaaaaattgtgtatttcactttaaatatactataaaatttatgcataacataaattcgacgatagttttcttatacatcatcaaacattaggtctgacaggtc

SEQ ID NO: 332500 - DNA, 120 bp, Artificial Sequence
  ENSG00000136891_32 (sequence is synthesized)
aagaaaaggctttataagtagcaaggaacttctcagggttctagagattttataagatccccacttaatgaaatgtgtgtgtattgctatttgttatttcctgtcacttgaagtatggcc

SEQ ID NO: 332501 - DNA, 120 bp, Artificial Sequence
  ENSG00000136891_33 (sequence is synthesized)
cctaaaacaacttcatgcaaagtttcaaagatctattgtagtttcttatagagaaacatcctttgacttcatgtggctggaatgaacaaaattaagtgtgtgtaatacttgtttgcctgt

SEQ ID NO: 332502 - DNA, 120 bp, Artificial Sequence
  ENSG00000136891_34 (sequence is synthesized)
ttaaaatgcccagttgtaggggtattctatactgggtactggaaaggttaacattactaggatattaggcacagttggcagccgaagtcttaggtacctaaaattcccatttgggctatt

SEQ ID NO: 332503 - DNA, 120 bp, Artificial Sequence
  ENSG00000136891_35 (sequence is synthesized)
tcttccccactggagaaggtgtttataagattacaaaatgatgaaaatgctaatcaaattactggggagcctttgatttcacaagtgctggccagaaagttaggtttgaccgagttgagt

SEQ ID NO: 332504 - DNA, 120 bp, Artificial Sequence
  ENSG00000136891_36 (sequence is synthesized)
tgtttagtactgtctgctgtgccttgaagatactgttctattgtctccttgcctcagtgttaactaatgaaaaaatctgctgttagtctgagccctcttagtttgtaggtagtaatctta

SEQ ID NO: 332505 - DNA, 120 bp, Artificial Sequence
  ENSG00000136891_37 (sequence is synthesized)
caggtagtaatctatatttttactgttctctctttatcttcagtgtgttgcagatcaggatgtgtcctagtgtagatttgttatttatcctgccctagacatagtgtgcttctgtaatgt

SEQ ID NO: 332506 - DNA, 120 bp, Artificial Sequence
  ENSG00000136891_38 (sequence is synthesized)
gaagattcagttttttttcttcaagtctggaaagttattattaatttttaaccatcttcccccattgtttctattttcttctaaaaactccttttaaacatagggagctttttattctgt

SEQ ID NO: 332507 - DNA, 120 bp, Artificial Sequence
  ENSG00000136891_39 (sequence is synthesized)
cttcgtctcttaaaaatctttcaatttgctaattcttttacttaatcctcctactgagattttatttcatcaacttttgttttcttttggatttgtttctattttggatttttatttggt

SEQ ID NO: 332508 - DNA, 120 bp, Artificial Sequence
  ENSG00000136891_40 (sequence is synthesized)
attttgtcattttcgcgtgttcttggtttattggtgtttctttaaagttcttgttagttccattagctcctttttcctgcggtgtcggcattctcccttattttagggagcaagttgaac

SEQ ID NO: 332509 - DNA, 120 bp, Artificial Sequence
  ENSG00000136891_41 (sequence is synthesized)
agacttgtatattttgggctgcataccttttccctaagtgtgtcttttgtgggagttctgtggaggtttatagagacttccctgtaggatagtttgacatttgcattttcctggcttccc

SEQ ID NO: 332510 - DNA, 120 bp, Artificial Sequence
  ENSG00000136891_42 (sequence is synthesized)
attctgtgcaaggagcatagttcaaactccctgccttccatacctgggttctgaagcctcagcttccagtactgttgactgttgaaaatccttgccctaaaatcccacatacagttttta

SEQ ID NO: 332511 - DNA, 120 bp, Artificial Sequence
  ENSG00000136891_43 (sequence is synthesized)
tatatgaatttcattatagtttctttcacctagaggttttacccatctggccttgagcttggctgtcttttttttttaaggtctgtggttatttgaaatccactcaaattaagaaaagta

SEQ ID NO: 332512 - DNA, 120 bp, Artificial Sequence
  ENSG00000136891_44 (sequence is synthesized)
gaaaatgaaaatatttgattattacaggagtaacttgtaaaacccaagggctaggaattagaaatttagcaagagacaaagcagcttactctacgtttcttctagtttgtgtagtctgta

SEQ ID NO: 332513 - DNA, 120 bp, Artificial Sequence
  ENSG00000136891_45 (sequence is synthesized)
tctccgtgcctttgcattagctatgtctgcagtctggctttctcttttctccttgcacgtgactgtcccagctgggctctgcataagagtatctatttggcctagaatggattcattatt

SEQ ID NO: 332514 - DNA, 120 bp, Artificial Sequence
  ENSG00000136891_46 (sequence is synthesized)
caccatagatggaattaccatatgtgcagtcagggaaattggttatatagtgaaggggctgctccctctagacctggaggtagtcaggttctcttagaaagatttaggaactaggaagat

SEQ ID NO: 332515 - DNA, 120 bp, Artificial Sequence
  ENSG00000136891_47 (sequence is synthesized)
tatacactcctggtaaagaagctgcaaaaaggtcagagcctttcatagtcagtggactctaggtctatgtgaatattgcaccatctaattaacacttggagaatgtggttaggctagctg

SEQ ID NO: 332516 - DNA, 120 bp, Artificial Sequence
  ENSG00000136891_48 (sequence is synthesized)
caaggtcacctgtctctaccataaacattttgctccataaagataccgagagaatgatgttcttgatttggctcttagcctaaatgttagtgaaaaacaccatgtttattgaaatgtgga

SEQ ID NO: 332517 - DNA, 120 bp, Artificial Sequence
  ENSG00000136891_49 (sequence is synthesized)
tagtttctcttgttcttaagtttaattagggcccacttgtcattttttgtttttgcaattgcttttgaggacttagtaatgaattcttaatctatcttgagttaatttttttttttgaga

SEQ ID NO: 332518 - DNA, 66 bp, Artificial Sequence
  ENSG00000136891_50 (sequence is synthesized)
gaattcttaatctatcttgagttaatttttttttttgagacggagtctcattcttttgattcaagc

SEQ ID NO: 332519 - DNA, 120 bp, Artificial Sequence
  ENSG00000136891_51 (sequence is synthesized)
acaggcgtgagccaccgcgcctggccgagttaattttttgtatatgatgaaagatagggatccatttttattcttctacaaaaggatagccaattgtcccagcaccatttattgaatagg

SEQ ID NO: 332520 - DNA, 120 bp, Artificial Sequence
  ENSG00000136891_52 (sequence is synthesized)
tgaatagggaatccttgccctgttgcttgtttttgtcaccttagttgaagatgagatagttgtaggtatgtggctttatttctgggttctcttttctgttccattggtttatctgtctgt

SEQ ID NO: 332521 - DNA, 120 bp, Artificial Sequence
  ENSG00000136891_53 (sequence is synthesized)
tgttctctatcattaccatgctgttttggctactgtagccttgtagtgtactgtgaagtcaggttgtttttgcttaggattgctttggccattctggcttttttggttccatgtgaattt

SEQ ID NO: 332522 - DNA, 120 bp, Artificial Sequence
  ENSG00000136891_54 (sequence is synthesized)
tagaatatttttttttaattgtgtgaagaatgatgttggtagtttgataggaatacagttgaatctgtaggttgctttgagcagtgtggccattttaacaatactgattattccaattca

SEQ ID NO: 332523 - DNA, 120 bp, Artificial Sequence
  ENSG00000136891_55 (sequence is synthesized)
aacaatactgattattccaattcatgagcatggaatgtttttccatttatctgtgtcatctgtgatttctctcagcagtgttctgtagtttttcttgtagagatctttcacctccttggt

SEQ ID NO: 332524 - DNA, 120 bp, Artificial Sequence
  ENSG00000136891_56 (sequence is synthesized)
gtgtgtgtgtggctattgtaagtgagattgcgttcttgatttggctctcagtttaaatgttattggaaaacatgttccttaaaaggacatttcactttgggggaatatagaaggggggct

SEQ ID NO: 332525 - DNA, 120 bp, Artificial Sequence
  ENSG00000136891_57 (sequence is synthesized)
tttgcggagcttcaggtgactgggcgggttcgcctggtttcgggtccgagagagttttagcccggagtgtgtgaatcgggccccacttccccgactctggtcctggccggcgtcccttgg

SEQ ID NO: 332526 - DNA, 120 bp, Artificial Sequence
  ENSG00000136895_0 (sequence is synthesized)
actagaagcaagaatgtagcctgggtaatatctggaacactttcaaactgcatgcattgatgtgttgcccattttcagctaagagagggaggactacaaaaggttaaatttctcatataa

SEQ ID NO: 332527 - DNA, 120 bp, Artificial Sequence
  ENSG00000136895_1 (sequence is synthesized)
gattaattcagccatctctgtgaaatggtggaagcagaatgccattagactctctaatctcatttctctcatgctgtctttcttggagcctgtcaaacagtgtcctggcagagagtcagt

SEQ ID NO: 332528 - DNA, 120 bp, Artificial Sequence
  ENSG00000136895_2 (sequence is synthesized)
tctctggttgctaaacatcagagtcagtctctttctgcatgtgccaagagggctgtaatttagaaaatgcaacctaccttttaaggaaggatgaaaagctctgtctcggaagacctaggc

SEQ ID NO: 332529 - DNA, 120 bp, Artificial Sequence
  ENSG00000136895_3 (sequence is synthesized)
tgtagacgtggggatttcagtaggaaacattatggatctgtggagctgcttatttccagtgatgctgatggagccatccaaagggctggaagattcagagtggaaaatggctcttcagat

SEQ ID NO: 332530 - DNA, 120 bp, Artificial Sequence
  ENSG00000136895_4 (sequence is synthesized)
gagaatgcaactgccctgcctggtacttggcgaagaacagacgtgcacttagagaacccagaataccacaccagatggtatttcaaatattttttaggacaagtccatcagaactacatt

SEQ ID NO: 332531 - DNA, 120 bp, Artificial Sequence
  ENSG00000136895_5 (sequence is synthesized)
ggaaacgatgccgagaagagccctttcttcttgtccgtgaccctttctgaccaaaacaatcaacgtgtccctcaataccgtgcaattctttggagaaaaacaggtacccagaaaatatgc

SEQ ID NO: 332532 - DNA, 120 bp, Artificial Sequence
  ENSG00000136895_6 (sequence is synthesized)
cttccctacagtcccacaaaaactctttctgtgaagtccatcttaagtgccatgaatctggacaaatttgagaaaggccccagggaaatttttcatcctgaaatacaaaaggacttgctg

SEQ ID NO: 332533 - DNA, 120 bp, Artificial Sequence
  ENSG00000136895_7 (sequence is synthesized)
gttcttgaagaacaagagggctctgtgaatttcaagtttggggttctttttgccaaagatgggcagctcactgatgatgagatgttcagcaatgaaattggaagcgagccttttcaaaaa

SEQ ID NO: 332534 - DNA, 120 bp, Artificial Sequence
  ENSG00000136895_8 (sequence is synthesized)
tttttaaatcttctgggtgacacaatcactctaaagggctggacgggctaccgtggcggtctggataccaaaaatgataccacagggatacattcagtttatactgtgtaccaagggcat

SEQ ID NO: 332535 - DNA, 120 bp, Artificial Sequence
  ENSG00000136895_9 (sequence is synthesized)
gagatcatgtttcatgtttccaccatgttgccatattccaaagagaacaaacagcaggtggaaaggaaacgccacattggaaacgatatcgtcaccattgtgttccaagaaggagaggaa

SEQ ID NO: 332536 - DNA, 120 bp, Artificial Sequence
  ENSG00000136895_10 (sequence is synthesized)
tcttctcctgcctttaagccttccatgatccgctcccactttacacatatttttgccttagtgagatacaatcaacaaaatgacaattacaggctgaaaatattttcagaagagagcgta

SEQ ID NO: 332537 - DNA, 120 bp, Artificial Sequence
  ENSG00000136895_11 (sequence is synthesized)
ccactctttggccctcccttgccaactccaccagtgtttacagaccaccaggaattcagggactttttgctagtgaaattaattaatggtgaaaaagccactttggaaaccccaacattt

SEQ ID NO: 332538 - DNA, 120 bp, Artificial Sequence
  ENSG00000136895_12 (sequence is synthesized)
gcccagaaacgtcggcgtaccctggatatgttgattagatctttacaccaggatttgatgccagatttgcataagaacatgcttaatagacgatcttttagtgatgtcttaccagagtca

SEQ ID NO: 332539 - DNA, 120 bp, Artificial Sequence
  ENSG00000136895_13 (sequence is synthesized)
cccaagtcagcgcggaagaaagaggaggcccgccaggcggagtttgttagaatagggcaggcactaaaactgaaatccattgtgagaggggatgctccatcaagcttggcagcttcaggg

SEQ ID NO: 332540 - DNA, 120 bp, Artificial Sequence
  ENSG00000136895_14 (sequence is synthesized)
agtggatgatgaccttccatcagtgcccgtgtttgacagaactctgccagtgaagcaaatgcatgtgcttgagaccctggaccttctggttctcagagcagacaaaggaaaagatgctcg

SEQ ID NO: 332541 - DNA, 120 bp, Artificial Sequence
  ENSG00000136895_15 (sequence is synthesized)
cctctttgtcttcaggctaagtgctctgcaaaagggccttgaggggaagcaggctgggaagagcaggtctgactgcagagaaaacaagttggagaaaacaaaaggctgccacctgtatgc

SEQ ID NO: 332542 - DNA, 120 bp, Artificial Sequence
  ENSG00000136895_16 (sequence is synthesized)
tattaacactcaccacagcagagagctgaggattgtggttgcaattcggaataaactgcttctgatcacaagaaaacacaacaagccaagcggggtcaccagcacctcattgttatctcc

SEQ ID NO: 332543 - DNA, 120 bp, Artificial Sequence
  ENSG00000136895_17 (sequence is synthesized)
cctgtctgagtcacctgttgaagaattccagtacatcagggagatctgtctgtctgactctcccatggtgatgaccttagtggatgggccagctgaagagagtgacaatctcatctgtgt

SEQ ID NO: 332544 - DNA, 120 bp, Artificial Sequence
  ENSG00000136895_18 (sequence is synthesized)
ggcttatcgacaccaatttgatgtggtgaatgagagcacaggagaagccttcaggctgcaccacgtggaggccaacagggttaattttgttgcagctattgatgtgtacgaagatggaga

SEQ ID NO: 332545 - DNA, 120 bp, Artificial Sequence
  ENSG00000136895_19 (sequence is synthesized)
agctggtttgctgttgtgttacaactacagttgcatctataaaaaggtttgcccctttaatggtggctcttttttggttcaaccttctgcgtcagatttccagttctgttggaaccaggc

SEQ ID NO: 332546 - DNA, 120 bp, Artificial Sequence
  ENSG00000136895_20 (sequence is synthesized)
tccctatgcaattgtctgtgctttcccgtatctcctggccttcaccaccgactccatggagatccgcctggtggtgaacgggaacctggtccacactgcagtcgtgccgcagctgcagct

SEQ ID NO: 332547 - DNA, 120 bp, Artificial Sequence
  ENSG00000136895_21 (sequence is synthesized)
ggtggcctccaggtcggatatatacttcacagcaactgcagctgtgaatgaggtctcatctggaggcagctccaagggggccagtgcccgaaattctcctcagacacccccgggccgaga

SEQ ID NO: 332548 - DNA, 120 bp, Artificial Sequence
  ENSG00000136895_22 (sequence is synthesized)
tactccagtatttccttcttccctgggggaaggtgaaattcaatcaaaaaatctgtacaagattccacttagaaacctcgtgggcagaagcatcgaacgacctctgaagtcacccttagt

SEQ ID NO: 332549 - DNA, 120 bp, Artificial Sequence
  ENSG00000136895_23 (sequence is synthesized)
ctccaaggtcatcaccccacccactcccatcagtgtgggccttgctgccattccagtcacgcactccttgtccctgtctcgcatggagatcaaagaaatagcaagcaggacccgcaggga

SEQ ID NO: 332550 - DNA, 120 bp, Artificial Sequence
  ENSG00000136895_24 (sequence is synthesized)
actactgggcctctcggatgaaggtggacccaagtcagaaggagcgccaaaggccaaatcaaaaccccggaagcggttagaagaaagccaaggaggccccaagccaggggcagtgaggtc

SEQ ID NO: 332551 - DNA, 120 bp, Artificial Sequence
  ENSG00000136895_25 (sequence is synthesized)
atctagcagtgacaggatcccatcaggctccttggaaagtgcttctacttccgaagccaaccctgaggggcactcagccagctctgaccaggaccctgtggcagacagagagggcagccc

SEQ ID NO: 332552 - DNA, 120 bp, Artificial Sequence
  ENSG00000136895_26 (sequence is synthesized)
ggtctccggcagcagccccttccagctcacggctttctccgatgaagacattatagacttgaagtaacagagttgaatctcatttgccatctttagttttcttatggaggtttatactct

SEQ ID NO: 332553 - DNA, 120 bp, Artificial Sequence
  ENSG00000136895_27 (sequence is synthesized)
ttaaacagttctgatgtaatttctcaacaaaatgtggcttttagcctgtcagtgatctattggaccaaaccttctgcacactcggccagttccctctccaatgtccggtgccatctttcc

SEQ ID NO: 332554 - DNA, 120 bp, Artificial Sequence
  ENSG00000136895_28 (sequence is synthesized)
tgacctttgtttctttctgttcaggaaccatcagtccccttgtaataaaggtggtagatttcattgaggttttagattgaaactttgaataaatcaaaaatactcattcttatttactgc

SEQ ID NO: 332555 - DNA, 120 bp, Artificial Sequence
  ENSG00000136895_29 (sequence is synthesized)
attgccacgtctgtctgcctgtcagcacagcgttggagccccttggtagacttacttgatgccaagtacccccctggtgtctgtggtcattgtgcatagatcttggtctaaaaggctgcc

SEQ ID NO: 332556 - DNA, 120 bp, Artificial Sequence
  ENSG00000136895_30 (sequence is synthesized)
tgaacttcctccatacgtgtcaccactgccaccctccctcaccccaccccaaacacacacacaggccttatctctaaactaaaagcctgtctagttccacctttcccactgcagtcaacc

SEQ ID NO: 332557 - DNA, 120 bp, Artificial Sequence
  ENSG00000136895_31 (sequence is synthesized)
ctcccataattataataattgtggccatcactgaatggccacctctgtgtaccaggccctgggtcagagcatgtcataagcgttatgtcttggaaggggctcttcatttctccttttttt

SEQ ID NO: 332558 - DNA, 68 bp, Artificial Sequence
  ENSG00000136895_32 (sequence is synthesized)
cgttatgtcttggaaggggctcaccccaggctggagtgcaaggcacgatcttggctcactgcaacctc

SEQ ID NO: 332559 - DNA, 69 bp, Artificial Sequence
  ENSG00000136895_33 (sequence is synthesized)
caccacacccgctagccaggcttgtcctgaactcctgacttcaggcccacctcggcctcccaaagtgct

SEQ ID NO: 332560 - DNA, 120 bp, Artificial Sequence
  ENSG00000136895_34 (sequence is synthesized)
ttacaggcatgagccaccatgcctggcacatttctccatttttattgaaaaggatactgaagtcagaaagaagaagtcacttacttaccccagagcacacagctagtaagtggcagaggc

SEQ ID NO: 332561 - DNA, 120 bp, Artificial Sequence
  ENSG00000136895_35 (sequence is synthesized)
gagcacacagctagtaagtggcagaggcaggacttggaccccagctggctgactccagagaccatgttcccacagctggtggggatagcaggtccagccacaaagctggtagcactcggc

SEQ ID NO: 332562 - DNA, 120 bp, Artificial Sequence
  ENSG00000136895_36 (sequence is synthesized)
ccctcccgtggagaagctcccagtctggcagagcagacacggtgcagcacaaagcctctagctgagatagtgaagtaaaactaacatgtacagggacatctgaggaggaagggattttaa

SEQ ID NO: 332563 - DNA, 120 bp, Artificial Sequence
  ENSG00000136895_37 (sequence is synthesized)
gtcaaagtggtggggccaggaaggctcctttctggggtcagaggagactccaggaccatccttcatgtaatatacccattggtgctggttccttatctaaataaaggtatcagccaacat

SEQ ID NO: 332564 - DNA, 120 bp, Artificial Sequence
  ENSG00000136895_38 (sequence is synthesized)
tgagcatttaccgagctccaggccctgtgctaggtgcttagataagttacctcctggagtcctcaagccagtaggcctagatactcttattttctaccatcttacaaacgaagaaactga

SEQ ID NO: 332565 - DNA, 120 bp, Artificial Sequence
  ENSG00000136895_39 (sequence is synthesized)
aggtccgagaggggaaacaactggcgtgagtgcgcatgcctctgaagtgatggagctgggatttcatttactcacttgcccatccgatgagtttattctatccctgccacccgccaggcc

SEQ ID NO: 332566 - DNA, 120 bp, Artificial Sequence
  ENSG00000136895_40 (sequence is synthesized)
ctgatctggatgatgaggggccagcagtgagcagcacagacaggcctttgcgtcatgagccttagatctcatggggaggggagccacagggaacaaacagacaagagagcaccagagggt

SEQ ID NO: 332567 - DNA, 120 bp, Artificial Sequence
  ENSG00000136895_41 (sequence is synthesized)
gagggacactctgcagagagcctaaaacacagggcatgataggagccatggggattattttggatttgacaacccccgggtctgtccaatgccagtgctggagctcttggccactggtcc

SEQ ID NO: 332568 - DNA, 120 bp, Artificial Sequence
  ENSG00000136895_42 (sequence is synthesized)
tcactgtcactccctgctgagctcctgcaacttttggttgaggcatttgccccattataccttgttttatgtacttatgtgcttttctggttttttttcttaaggggtcaacctcacctt

SEQ ID NO: 332569 - DNA, 120 bp, Artificial Sequence
  ENSG00000136895_43 (sequence is synthesized)
attcttttctgtatcctagtggcactgaatacagtgctagataatgacagatgggagagagctggggattccattggaaggggcacccaagcccaggcagtggcactggctgaggatggc

SEQ ID NO: 332570 - DNA, 120 bp, Artificial Sequence
  ENSG00000136895_44 (sequence is synthesized)
cagttggggccttggcaccataatgagaccttttagaggtgaaggctgtgttctggtgacaccagtgaagagaagggtcagccagtgcagggccagtgggaggagcacagtgtggacgga

SEQ ID NO: 332571 - DNA, 120 bp, Artificial Sequence
  ENSG00000136895_45 (sequence is synthesized)
agggctgggacagaggagccagcaggagcccacaacatggtgctcctgtgaggaggtcagggcttagcctagaacagcagcaggggcacaaaaaaacacctgagaaactgtatgaagagg

SEQ ID NO: 332572 - DNA, 120 bp, Artificial Sequence
  ENSG00000136895_46 (sequence is synthesized)
ctgctgctggacttgggttggaggtggccctgagactttgagaatagttatgctaacaaaaaggaggagttttagaaggaaagctggttgtgtgggagataaaaagccaatagccttcac

SEQ ID NO: 332573 - DNA, 120 bp, Artificial Sequence
  ENSG00000136895_47 (sequence is synthesized)
tgagtgctcatcatgcatgaggccctgtgctaaaatctctgccttgtctcactgaattcccattacaatccagcagggtcagtgttctcatgatgcctgctttacagacgaagacctaag

SEQ ID NO: 332574 - DNA, 120 bp, Artificial Sequence
  ENSG00000136895_48 (sequence is synthesized)
gccagaggctaagccatttgccacacaccacagaggcagtaagtggcctagacagggcttgatctcccatctgtctgcccagtctgtgcccctccaaccaccccacccccaatccactac

SEQ ID NO: 332575 - DNA, 120 bp, Artificial Sequence
  ENSG00000136895_49 (sequence is synthesized)
cttggatgtggaatcagttacatctgagaacaaacgacatagtctaggggctgcagccctggggagaatgtgtgcctgagcccgtgaatttagggttttgggcacaaagcaaaatttgga

SEQ ID NO: 332576 - DNA, 120 bp, Artificial Sequence
  ENSG00000136895_50 (sequence is synthesized)
gctatagaagtggggttttactaaggagagaagagccaagaaattgaagaataatctgaggtgggagagagggcaggaggcagaagatgtcacccatcagaggctgcagagggcaggatg

SEQ ID NO: 332577 - DNA, 120 bp, Artificial Sequence
  ENSG00000136895_51 (sequence is synthesized)
gatagatgagcagaggccaaggccttcggttggggagaaggagatcttggctgagctcaaagggtggttttcctggaagcacaggaggccaggctctaagggttgagaatacaagtgagg

SEQ ID NO: 332578 - DNA, 120 bp, Artificial Sequence
  ENSG00000136895_52 (sequence is synthesized)
aagtgaaaggagcaggaggctcttagagggctggagttttgaaaatcaagaaggaccaaggacaccatcaggttgagtgccctcctctcaaatgcagaaactgaggcccagagagaggag

SEQ ID NO: 332579 - DNA, 120 bp, Artificial Sequence
  ENSG00000136895_53 (sequence is synthesized)
tttgccccagaccacggaactaggtgttctgacacccttttcattgcaccatgctgcctctcttgacatgaagaacagagaaagaataaagtgtgaagacatgccgtggcgattttaagg

SEQ ID NO: 332580 - DNA, 120 bp, Artificial Sequence
  ENSG00000136895_54 (sequence is synthesized)
tgcacagactttatctgttggaggcagaaggatgcctcgctggaggtacgagagcggtaaggttgaaagagaaccagaacattagttcagatgttggctgtggcgtgtaccagtcaaggg

SEQ ID NO: 332581 - DNA, 120 bp, Artificial Sequence
  ENSG00000136895_55 (sequence is synthesized)
acttaagtgacttcaccctgagcctcactttcatcttctgtaaaatgataattataccataatgtcaataatattaggttgatgcaaaagtaattgcagtttttgccattggaaataatg

SEQ ID NO: 332582 - DNA, 120 bp, Artificial Sequence
  ENSG00000136895_56 (sequence is synthesized)
gcatataaacctgaggcatttcaatagagagaggagacataccaaacacagagcttctcaacggctatgaaaagatgatgagaaagtcccagagaagaaagaatggagagacttttcttt

SEQ ID NO: 332583 - DNA, 120 bp, Artificial Sequence
  ENSG00000136895_57 (sequence is synthesized)
cttttttttcttttcttttctttctcacttccattgtattataatcccagcccccaatgtgcattgtgggtgctggtggggcagacatgaccctatggcacctgcatgacagagggcctc

SEQ ID NO: 332584 - DNA, 120 bp, Artificial Sequence
  ENSG00000136895_58 (sequence is synthesized)
ggcctccacaaatgctcacaacttgtaaaagtcttttcacagggtcagcatccagcctgcccactaccgttgcccgttatcattgcaggttaattttgttgcagctattgatgtgtacga

SEQ ID NO: 332585 - DNA, 120 bp, Artificial Sequence
  ENSG00000136895_59 (sequence is synthesized)
agagcagaactgagcaggcggtggagctgggtctggtccgggcacggagtgggggcttcgaagggaaaaggcggggctcctgggggcggagccatacctgtgggcgggacatgggaaagg

SEQ ID NO: 332586 - DNA, 120 bp, Artificial Sequence
  ENSG00000136895_60 (sequence is synthesized)
agggcccgaggggcggagctacaatagaaagggccaggaggtgctgaggcgaggagaggccgaactccaagggacgacgctcgcggaagcagaggtttggggacagctgcccagcctcca

SEQ ID NO: 332587 - DNA, 120 bp, Artificial Sequence
  ENSG00000136895_61 (sequence is synthesized)
ggtacaaccctagtaaaaattggtattgagagatgttgctttttctttgatgaacaaaaatagcgttttcatgcctctgctgctacgccccctatatagagttcgggatatagaattgcc

SEQ ID NO: 332588 - DNA, 120 bp, Artificial Sequence
  ENSG00000136895_62 (sequence is synthesized)
tatgggaagaaagcatcagtacttcttcctgagctaggaggagaatagtgcttgaatgtattttgtagagcttatgaaagccctagaagctgacttccttccttgcctagagataacttg

SEQ ID NO: 332589 - DNA, 80 bp, Artificial Sequence
  ENSG00000136895_63 (sequence is synthesized)
cccggggcgatggaaccggagcccggcggggtggccgctgcgctcctgcggcagaagagggcggcgctgcggcgcagggg

SEQ ID NO: 332590 - DNA, 120 bp, Artificial Sequence
  ENSG00000136895_64 (sequence is synthesized)
gagggcggcgctgcggcgcagggggtgcagcttcgagagcccaaggacagctgcccagcctccaggcccactgatggacccgttaacgaaggtgccttgtgggagtcagatagcacaaac

SEQ ID NO: 332591 - DNA, 120 bp, Artificial Sequence
  ENSG00000136895_65 (sequence is synthesized)
aggcggggctcctgggggcggagccatacctgtgggcgggacatgggaaaggagggcccgaggggcggagctacaatagaaagggccaggaggtgctgaggacagctgcccagcctccag

SEQ ID NO: 332592 - DNA, 120 bp, Artificial Sequence
  ENSG00000136895_66 (sequence is synthesized)
aggctctgcaatggctgctggggactgtgtctgttgcaaggaggctcccctgcagtgaggagccggggcactgcaagtctgttccatagcagccctttttgcaaatggtagttgattttt

SEQ ID NO: 332593 - DNA, 120 bp, Artificial Sequence
  ENSG00000136895_67 (sequence is synthesized)
tggtttgctgttgtgttacaactcttcccagcagcaagcaccagccttccacggcaacacggtatcttcgtgcagctttcctgtttacactactgcttttttattaaatggtgttcagtt

SEQ ID NO: 332594 - DNA, 120 bp, Artificial Sequence
  ENSG00000136895_68 (sequence is synthesized)
attcggaataaactgcttctgatcacaagaaaacacaacaagccaagcggggtcaccagcacctcattgttatctcccctgtctgagtcacctgttgaagaattccagtacatcaggact

SEQ ID NO: 332595 - DNA, 120 bp, Artificial Sequence
  ENSG00000136895_69 (sequence is synthesized)
atttttatgttgcatatttgggacaaagagctctcttaaatgaaagataattgcaagatccggttcagcagctttgtcccttgcctcaagtttactgcagggcttctctcctctctggtt

SEQ ID NO: 332596 - DNA, 120 bp, Artificial Sequence
  ENSG00000136895_70 (sequence is synthesized)
atacagaaatgaaattataaaccaccagtaaccttggaaatttcaatcgattccaaatgactaaatatttaattgaatcattgcctatacttccagggatgactctggcgtttgcttttt

SEQ ID NO: 332597 - DNA, 120 bp, Artificial Sequence
  ENSG00000136895_71 (sequence is synthesized)
aacagtagtgggttttgaaagctaaaagaatagagtcatcaagcctagacattccccagcacatgcagtctttcactctatctggctttgcccgcaaaccccagaggcctctgctgtggt

SEQ ID NO: 332598 - DNA, 120 bp, Artificial Sequence
  ENSG00000136895_72 (sequence is synthesized)
tacctcatcgctttgaacacagcgcttttcataaattcttaccacatcactcatctttattgcacgcagttaagataaagcacagaattccccaagcagggcagctttttgcttttcttg

SEQ ID NO: 332599 - DNA, 120 bp, Artificial Sequence
  ENSG00000136895_73 (sequence is synthesized)
tctagtcttttttcctgtgcagtcacgagtgcattttacctaatttacacatgaaaatgctcttagaaaacgcaaagccatcaggcaccctcaaatcagtgctcctggccagccctccca

SEQ ID NO: 332600 - DNA, 120 bp, Artificial Sequence
  ENSG00000136897_0 (sequence is synthesized)
gctcaggcccgtggatctcatcgaagatggcggcgcgatctgtgtcgggcattaccagaagagtcttcatgtggacagtctcagggacaccatgtagagaattttggtctcgattcagaa

SEQ ID NO: 332601 - DNA, 120 bp, Artificial Sequence
  ENSG00000136897_1 (sequence is synthesized)
aagagaaagagccagtggttgttgagacagtagaagagaaaaaggaacctatcctagtgtgtccacctttacgaagccgagcatacacaccacctgaagatctccagagtcgtttggaat

SEQ ID NO: 332602 - DNA, 120 bp, Artificial Sequence
  ENSG00000136897_2 (sequence is synthesized)
cttacgttaaagaagtttttggttcatctcttcctagtaattggcaagacatctccctggaagatagtcgtctaaagttcaatcttctggctcatttagctgatgacttgggtcatgtag

SEQ ID NO: 332603 - DNA, 120 bp, Artificial Sequence
  ENSG00000136897_3 (sequence is synthesized)
tccctaactccagactccaccagatgtgcagggttagagatgttcttgatttctataatgtccctattcaagatagatctaaatttgatgaactcagtgccagtaatctgccccccaatt

SEQ ID NO: 332604 - DNA, 120 bp, Artificial Sequence
  ENSG00000136897_4 (sequence is synthesized)
tgaaaatcacttggagttactaagcaattcggaagagaaacacattgaaatcactgtctttccctgagcaagggggctgctcattagatcttttgatactttaccatgtgaaatactacc

SEQ ID NO: 332605 - DNA, 120 bp, Artificial Sequence
  ENSG00000136897_5 (sequence is synthesized)
agaactgttctctaaacccactttttctgtagaggaatgtatcatctttttttttctcatattacaaatggacaaataacggactttctattttcatatttgctgaaaccattttttaaa

SEQ ID NO: 332606 - DNA, 120 bp, Artificial Sequence
  ENSG00000136897_6 (sequence is synthesized)
tgaaattaggtcattatttatgaaaagttttgagagggcactgtcaacttgggtttaagacaggaggacattgcaagttcacacctttcataagcataaagtagttgcaagaaagtattt

SEQ ID NO: 332607 - DNA, 120 bp, Artificial Sequence
  ENSG00000136897_7 (sequence is synthesized)
tcatcctgttaggattcatatctaagatagagttatgcattgcacatacacaaataaacttttattagatagatacctataaaagaaacataaaagtatgttgtgtattactgacagttc

SEQ ID NO: 332608 - DNA, 120 bp, Artificial Sequence
  ENSG00000136897_8 (sequence is synthesized)
tagattaatttcttttagaattaaagtagatttgttaaagtgtattgtgtgttgtaaattttttaagtgaaatttgcttgcgctctgccttgccatttctttccagtaagtataattttg

SEQ ID NO: 332609 - DNA, 120 bp, Artificial Sequence
  ENSG00000136897_9 (sequence is synthesized)
aaaaaattagaatatatgccaaatattgagtgctgtgactcttcctcataagagatgtgccagattctatgtctaattgcatattctcttcagaggagatgatgcttattttaaaccttt

SEQ ID NO: 332610 - DNA, 120 bp, Artificial Sequence
  ENSG00000136897_10 (sequence is synthesized)
ttctctataacttttaaaaagtggtgctgagtattcactagagtggcaagtctttgtgctttaatgcactcaatttgtggaaattacttaaatagcaggttatcagatggttctgaatga

SEQ ID NO: 332611 - DNA, 120 bp, Artificial Sequence
  ENSG00000136897_11 (sequence is synthesized)
caaaggtgttaaatttgggatttttttttcaagctttagatatggctggagagtaatgagacagaaggaatgtcttatattgttctgactgctgacaattcctaaagaaaagtgatagaa

SEQ ID NO: 332612 - DNA, 120 bp, Artificial Sequence
  ENSG00000136897_12 (sequence is synthesized)
gggtttttaacaaaataagttgcatttattctctttcccagggttactcctttgaagagggcaaaattcagttgggaatataaattctggaatcttcatgaagaaaattagttaacagta

SEQ ID NO: 332613 - DNA, 120 bp, Artificial Sequence
  ENSG00000136897_13 (sequence is synthesized)
tccttggggattggttccaggacacctacttggataccaaagtccacagatgcccaagccccttttataaaatgatgtagtatttgcatattatgtatgcacatcctcccatatacttta

SEQ ID NO: 332614 - DNA, 120 bp, Artificial Sequence
  ENSG00000136897_14 (sequence is synthesized)
atttacaattgtgaatagtatgtaaatagttgtgaacataactattgtgaataatatgttatatgttatagttgtgaatgtaaatagtattcacaattgtgaatacaatgtaaatagctt

SEQ ID NO: 332615 - DNA, 120 bp, Artificial Sequence
  ENSG00000136897_15 (sequence is synthesized)
acaatgtaaatagctttcacaattgtgaatacaatgtaagtagctatgtaaatagtgaatacaatgtaaatagctatgtaaatagttgttatgctgattagggaataatgagaaggaaaa

SEQ ID NO: 332616 - DNA, 120 bp, Artificial Sequence
  ENSG00000136897_16 (sequence is synthesized)
aaagtatacatattcagtacagatgcagtcatctttttttcccctcgaacatttttgatccacaattggttgaatccacagatggggaacacacagtcttggtaaatttaaccaacaagg

SEQ ID NO: 332617 - DNA, 120 bp, Artificial Sequence
  ENSG00000136897_17 (sequence is synthesized)
agggtaaacgcatcccaacagggaaggtaaactgcacatccatcagtacctctagagggcatcactggtttatagctcaatacagtgactatatcagaataatggcctttagttttcctg

SEQ ID NO: 332618 - DNA, 120 bp, Artificial Sequence
  ENSG00000136897_18 (sequence is synthesized)
aaagattaaattaggcttgctgttgttgaatgagataatcaaacatatgatgtaattttaaagggtttacatacagaaggcctgctgtatgtcctgcttctgctgtgtaaaagattcagc

SEQ ID NO: 332619 - DNA, 120 bp, Artificial Sequence
  ENSG00000136897_19 (sequence is synthesized)
atggaatcattggaattttatgtacaggatttcattatctcattttctatacaatttttccttctgatccagagacacggaaaaacaaagggcaagatggaaataagggatgagaaggtc

SEQ ID NO: 332620 - DNA, 120 bp, Artificial Sequence
  ENSG00000136897_20 (sequence is synthesized)
tatgtggaaaaacagttacaactggagtggtaactgcaaaaaccaagcagcttcatgtgatcgttaggacagaagaaatttctcctttgtagcctagagcaatattctcaaaatttaatg

SEQ ID NO: 332621 - DNA, 120 bp, Artificial Sequence
  ENSG00000136897_21 (sequence is synthesized)
cgcatgttaatcatttggggatcttttattcattttttcatgtggggatcttttaaaaatgcaaattctgatttggtaagtctggagtaggtcctgagcttctgcatgcttcaaaagctg

SEQ ID NO: 332622 - DNA, 120 bp, Artificial Sequence
  ENSG00000136897_22 (sequence is synthesized)
attatgttttgagaacatggatctagatgctggtattgaggtgggagacaagtactgccacctgaaacaacagtcttggtaaatttagccgacgagggtaaacacatcctaacagggaag

SEQ ID NO: 332623 - DNA, 120 bp, Artificial Sequence
  ENSG00000136897_23 (sequence is synthesized)
gtaaactgtacgtccatcagtaccactagagggcatcactggtttatagttcaatacagtgaatatatcagaataatggcctttagttttcctgaaagattaaattaggcttgctaactt

SEQ ID NO: 332624 - DNA, 120 bp, Artificial Sequence
  ENSG00000136897_24 (sequence is synthesized)
gtttaatgagataatcagacatatgatgtaattttaaagggtttacatttttaaaaatttaatgattgctacataaaaagggtatcagttaactaattttacttagatggaacttctgta

SEQ ID NO: 332625 - DNA, 120 bp, Artificial Sequence
  ENSG00000136897_25 (sequence is synthesized)
agcttagtaggtatgcttaaataaagcctgctaataaaatagagattcagactcaatagaatggttttacatatgtaatatatgttttaaactgcataaaataaactcctccctcctttc

SEQ ID NO: 332626 - DNA, 120 bp, Artificial Sequence
  ENSG00000136908_0 (sequence is synthesized)
gtcccggtccgaaacgtgtctgggctgctgcgagagacagtcggtgaaggaagggaggggacatccgaagggtggcccgggaggccgggcgatggtgaggagggcgcctcctctccacca

SEQ ID NO: 332627 - DNA, 120 bp, Artificial Sequence
  ENSG00000136908_1 (sequence is synthesized)
aatcctccccatccatgcgggctagggacagaccctcccccgcccaccctaggctggaaagtgaacgttctctgcacctctcccacctacagactaagtagggcacccggtttccgtgtc

SEQ ID NO: 332628 - DNA, 120 bp, Artificial Sequence
  ENSG00000136908_2 (sequence is synthesized)
ggcttcaccactgactcggaatgggatctacctttctctgagcctcacttttcccatctgaaaaatggaacttccgatcccgcactcccatcccactctggccccgggactctgggatac

SEQ ID NO: 332629 - DNA, 120 bp, Artificial Sequence
  ENSG00000136908_3 (sequence is synthesized)
ttagagattggcttttggtggggcggcgacaggactgtggccatgaaggccagggagtctgggtccccaactcggtcccattccctagagagattcgggcagcaaccggccccacaatgc

SEQ ID NO: 332630 - DNA, 120 bp, Artificial Sequence
  ENSG00000136908_4 (sequence is synthesized)
tcttgagaactacacttcgccgatatgcaaagaagaggaggcggttcctgctcgtctccgacgaggtgggcccgagcaggcctggggactacgactcccggcgtgctccgcagtccaaag

SEQ ID NO: 332631 - DNA, 120 bp, Artificial Sequence
  ENSG00000136908_5 (sequence is synthesized)
ccggaagagcgtggacccggaaccggatgtggcttgcggctcgggtggctgagcgcgcggggaaatggccacggggacagaccaggtggtgggactcggcctcgtcgccgttagcctgat

SEQ ID NO: 332632 - DNA, 120 bp, Artificial Sequence
  ENSG00000136908_6 (sequence is synthesized)
cccactggctgcaggcctcctgctgctcctgtttgtgggactgttcatctcctatgtgatgctgaagaccaagagagtgaccaagaaggctcagtgaaggtcccgcagggatgaggctgc

SEQ ID NO: 332633 - DNA, 120 bp, Artificial Sequence
  ENSG00000136908_7 (sequence is synthesized)
cagccccttctctgcttcccctccagcacagggaccaagtgggggagcctgcagaacctgtccaggcacagtggctcctcaagcctgcctgtcctgcagagtccccatggcatggagctt

SEQ ID NO: 332634 - DNA, 120 bp, Artificial Sequence
  ENSG00000136908_8 (sequence is synthesized)
acacctgactgactggagccccctccccgactcccacttccagaagctaggagggagggatacctggaagactccggtcacctccttcttgctcagggcctaaaagatgctggtcctccc

SEQ ID NO: 332635 - DNA, 120 bp, Artificial Sequence
  ENSG00000136908_9 (sequence is synthesized)
aacctcactctcagactccctgccaccttttcccctgggttctgccgtcttgcctcacttcccctcctgtcacatgctgacgttggacttagcaggttctaaggccacatgtgtgacctc

SEQ ID NO: 332636 - DNA, 120 bp, Artificial Sequence
  ENSG00000136908_10 (sequence is synthesized)
tctgacttctcttcctccaccaaggcagctttccttaccctgacacagccccagaccccacaaagccttctggacctggaaagcctggggaaggactgacagaccccaggaccagccctg

SEQ ID NO: 332637 - DNA, 120 bp, Artificial Sequence
  ENSG00000136908_11 (sequence is synthesized)
gggctcagggcagccaccccgggccgctgaccgactgacctctcctcacggaggcccagccccaaagccccagggctggcccgtttgggacagctgaccaataaacactgatggtgtgtt

SEQ ID NO: 332638 - DNA, 120 bp, Artificial Sequence
  ENSG00000136908_12 (sequence is synthesized)
ggtgagattggcaccgtgtgccggagataggggcgtctgggggtggggtcccgggtctgctcaggagctggggcatgggcacttggaacggggattgctctcccgcccccactattgtac

SEQ ID NO: 332639 - DNA, 120 bp, Artificial Sequence
  ENSG00000136908_13 (sequence is synthesized)
ggacgacaacgcggaggcctagcattctctcccagcctagaaactgatccctagtcagccctctaccatctgttgaatgggaagcttagaccgtgatcgggccgcgacgccccgcttcca

SEQ ID NO: 332640 - DNA, 120 bp, Artificial Sequence
  ENSG00000136908_14 (sequence is synthesized)
ttagtgcgccgaaatagagggtcacttcgtcagctgagacctcccttttctccaggccacggggacagaccaggtggtgggactcggcctcgtcgccgttagcctgatcatcttcaccta

SEQ ID NO: 332641 - DNA, 120 bp, Artificial Sequence
  ENSG00000136908_15 (sequence is synthesized)
ggggaaatggccacggggacagaccaggtggtgggactcggcctcgtcgccgttagcctgatcatcttcacctactacaccgcctgggtgattctcttggtatgtcattctccccgtccg

SEQ ID NO: 332642 - DNA, 120 bp, Artificial Sequence
  ENSG00000136908_16 (sequence is synthesized)
ctgctcaccttccccgagccctggcaccgccagagcaactactatataggctctaggcacggcgctggcttcattgcctgcctcatctcttgaactctccagaacaactctatgaggaag

SEQ ID NO: 332643 - DNA, 120 bp, Artificial Sequence
  ENSG00000136908_17 (sequence is synthesized)
atgccagtggtaccgcattttatagatgagatagctgaggctaggggagaaggatctggcccaagattgcatccttagccgctacacttataactctgtttccggcttgctttgactttt

SEQ ID NO: 332644 - DNA, 120 bp, Artificial Sequence
  ENSG00000136908_18 (sequence is synthesized)
gggggagttctgttccttctgggttagcctgctgactcttaggcatggcaaacgccagtgatatttgtgaaggcctttaggatatttttttcttgtgggaaaacttgttggttattgctt

SEQ ID NO: 332645 - DNA, 120 bp, Artificial Sequence
  ENSG00000136908_19 (sequence is synthesized)
aagaagtgcagtgtgtctggaagtgcagaacttggtatcctttagagaaaaaatattagtgaagaagccctggaggcccaggttgggagtcagtcgaggattcctcaagtaccatttgct

SEQ ID NO: 332646 - DNA, 120 bp, Artificial Sequence
  ENSG00000136908_20 (sequence is synthesized)
aggctgtgaggtgccttagggcaggtctcttgtgccctgttctcttgtccccaccaccaacctatagcaggcaccaaagcaagtgcccggtaaataccaataagaaattaaggaaagaaa

SEQ ID NO: 332647 - DNA, 120 bp, Artificial Sequence
  ENSG00000136908_21 (sequence is synthesized)
cttgggggctcggcaaggcaagcaagacacaccagagctcttccctcgatgccagccattcatcgacagtcagcatgtcatccacaagtatttcctgccccgagcctatgctgtcgccat

SEQ ID NO: 332648 - DNA, 120 bp, Artificial Sequence
  ENSG00000136908_22 (sequence is synthesized)
ttgaccctgggcagggtttcgggaagaccccacctctgaacatgcttccacactttggcggtgctggaagctgcttgccccgaactcacccgtggggttttcctgttcatccttcgaggc

SEQ ID NO: 332649 - DNA, 120 bp, Artificial Sequence
  ENSG00000136908_23 (sequence is synthesized)
gggtttcctggtgccccaggctttttggactccaatgacctgtctacctctttcctgccccaaccccatcatcactctgctcacacctcagtcaccctcttgtcaccctggcttctaatt

SEQ ID NO: 332650 - DNA, 120 bp, Artificial Sequence
  ENSG00000136908_24 (sequence is synthesized)
cctgcacctctctctctcatggcttcctagggatggggactgtgtctccatcattactgcacatctagaacaggctgtggcactgaggctgtgctcagaaagtcatttggatgagtcagt

SEQ ID NO: 332651 - DNA, 120 bp, Artificial Sequence
  ENSG00000136908_25 (sequence is synthesized)
caacagccgggtgcctggatgatgggtggatggatgggtgggtgggtgaggtgtaggaggaggtgggtaggtatgtaggtggacagacaagtggttgaccgggtgatcgatagatgggtg

SEQ ID NO: 332652 - DNA, 120 bp, Artificial Sequence
  ENSG00000136918_0 (sequence is synthesized)
gggtcccgcggccgcctaggagggagcccgccggggcggggcggggccgggtgcccatgaacagcggggtcccggccacgctggccgtgcggagagtgaaattcttcggccagcacggcg

SEQ ID NO: 332653 - DNA, 120 bp, Artificial Sequence
  ENSG00000136918_1 (sequence is synthesized)
gggaggtcaactcttctgccttctcccctgatggccagatgctgctcacaggctcagaagatggctgcgtgtatggctgggagacccggagtgggcagctgctgtggaggctgggtggcc

SEQ ID NO: 332654 - DNA, 120 bp, Artificial Sequence
  ENSG00000136918_2 (sequence is synthesized)
acacaggccccgtgaagttctgccgcttctcccctgatggccacctcttcgccagcgcctcctgtgactgcactgtccgcctgtgggatgtggcaagagcgaagtgtctgcgggtcctga

SEQ ID NO: 332655 - DNA, 120 bp, Artificial Sequence
  ENSG00000136918_3 (sequence is synthesized)
agggtcaccaacggagtgtggagacggtcagcttcagccctgactcgagacagctggcatcaggtggctgggacaagcgggtgatgctctgggatgtgcagtccggccagatgctgcgcc

SEQ ID NO: 332656 - DNA, 120 bp, Artificial Sequence
  ENSG00000136918_4 (sequence is synthesized)
tcttagttgggcaccgtgactccatccagagcagcgacttctcacccacggtgaactgcctggccaccggctcctgggactccaccgtacacatctgggacctgcggatggtgaccccag

SEQ ID NO: 332657 - DNA, 120 bp, Artificial Sequence
  ENSG00000136918_5 (sequence is synthesized)
ctattcagcatccggcctcctggcatccggctcctgggacaagaccatccacatctggaagcccacaaccagcagcctgcttatccaactgaagggccatgtcacctgggtgaagagcat

SEQ ID NO: 332658 - DNA, 120 bp, Artificial Sequence
  ENSG00000136918_6 (sequence is synthesized)
agccttctctcccgacgagctgtggctggccagcgccggctattcccgcatggtcaaagtctgggactgcaacacaggaaagtgccttgagaccctgaagggagtcctggatgtggccca

SEQ ID NO: 332659 - DNA, 120 bp, Artificial Sequence
  ENSG00000136918_7 (sequence is synthesized)
cacctgtgccttcaccccagatgggaaaatcttagtgtctggagctgccgatcagactagacgtcaaatatcccgcacgtccaaatcacccagggaccctcaaacctaacaccaaccacc

SEQ ID NO: 332660 - DNA, 120 bp, Artificial Sequence
  ENSG00000136918_8 (sequence is synthesized)
ttagatggtgccgacctcacccgctcccctcagtggcgcacaggcatgccgcttctccccacagacgcaaagtgactgtgctggcatccagcagatccccatggccaggactctccaggc

SEQ ID NO: 332661 - DNA, 120 bp, Artificial Sequence
  ENSG00000136918_9 (sequence is synthesized)
cccaccagagcagacaactgtggtgggcaggacgcttgctggaacccatcagacacctggtccccaaaaccagacccacccacctccacccaatcagtggaagtgccaggaaacaaagca

SEQ ID NO: 332662 - DNA, 120 bp, Artificial Sequence
  ENSG00000136925_0 (sequence is synthesized)
gtcacgagcgagcttttctacccaaatacgcggcgggggaataggctcgagggcggtgagcagtgacaattgctaggcggagacagtgcagggaagagagaccttagaaaggatcaggac

SEQ ID NO: 332663 - DNA, 120 bp, Artificial Sequence
  ENSG00000136925_1 (sequence is synthesized)
tggcgggaggtatttaactgaaaggaatatctgcttcactgttgcaaccaaaccagatgccttcttccacttcaccagaccaaggagatgacctggagaactgcattttaagattttctg

SEQ ID NO: 332664 - DNA, 120 bp, Artificial Sequence
  ENSG00000136925_2 (sequence is synthesized)
acctggatttaaaagatatgagtcttattaatcccagcagcagtcttaaagcagaattagatggcagtacaaaaaagaaatactcgtttgcaaagaaaaaggcctttgccctttttgtca

SEQ ID NO: 332665 - DNA, 120 bp, Artificial Sequence
  ENSG00000136925_3 (sequence is synthesized)
aaaccaaagaagttccaacaaaaaggagttttgaatgtaaagaaaaattgtggaaatgctgtcggcagctattcacagaccaaaccagcatccatagacatgtggcaacacaacatgctg

SEQ ID NO: 332666 - DNA, 120 bp, Artificial Sequence
  ENSG00000136925_4 (sequence is synthesized)
atgaaatttatcaccagacagcttctattttaaagcaactggctgtgacattgagcacctcaaagagtctttcgtctgcagatgaaaagaaccctttaaaagagtgccttccacatagcc

SEQ ID NO: 332667 - DNA, 120 bp, Artificial Sequence
  ENSG00000136925_5 (sequence is synthesized)
atgacgtgtctgcttggctccctgatataagctgctttaaccctgatgagctgataagtggccagggcagtgaagaaggggaggtgctcctttattactgctaccatgacctggaggatc

SEQ ID NO: 332668 - DNA, 120 bp, Artificial Sequence
  ENSG00000136925_6 (sequence is synthesized)
cccaatggatctgtgcctggcagacagctctgtgtcagcacctgcacctcacaggcaagattcgaattgctgcagaaggaatcaatgggacagttggtggaagcaaattggctaccagac

SEQ ID NO: 332669 - DNA, 120 bp, Artificial Sequence
  ENSG00000136925_7 (sequence is synthesized)
tttatgtggaagtcatgctttccttcccattgtttaaggatgacctgtgtaaagatgattttaagaccagcaaaggaggagctcactgttttccagaattgcgtgttggtgtatttgaag

SEQ ID NO: 332670 - DNA, 120 bp, Artificial Sequence
  ENSG00000136925_8 (sequence is synthesized)
aaatcgtgcccatggggatcagccccaaaaagatctcctacaagaagcctggaatccatttatccccaggtgaatttcataaagaagtagaaaagtttttatctcaggcaaatcaagaac

SEQ ID NO: 332671 - DNA, 120 bp, Artificial Sequence
  ENSG00000136925_9 (sequence is synthesized)
aaagtgatactatccttcttgattgcagaaacttctatgaaagcaaaataggacgattccaaggctgcttagccccagacatcaggaaattcagttacttccctagctacgttgacaaaa

SEQ ID NO: 332672 - DNA, 120 bp, Artificial Sequence
  ENSG00000136925_10 (sequence is synthesized)
atctagaacttttcagagagaagagagtgctgatgtactgtaccgggggcatccgctgtgagcggggttcagcctacctcaaagccaagggagtgtgcaaggaggtgttccagctcaagg

SEQ ID NO: 332673 - DNA, 120 bp, Artificial Sequence
  ENSG00000136925_11 (sequence is synthesized)
gtggcatccacaagtacctggaagagtttcctgatggcttttacaaagggaagttgtttgtttttgatgaacgctatgctctgtcctacaacagtgatgtggtgtcagagtgttcatact

SEQ ID NO: 332674 - DNA, 120 bp, Artificial Sequence
  ENSG00000136925_12 (sequence is synthesized)
gtggagcccgctgggaccagtataaactctgctctactccccagtgccgccagctcgttttgacctgccctgcctgtcaaggacaaggattcacagcctgttgtgtcacatgtcaagaca

SEQ ID NO: 332675 - DNA, 120 bp, Artificial Sequence
  ENSG00000136925_13 (sequence is synthesized)
aggggagcaggaaagtttcaggccctatgcaagacagctttaaagaggaatgcgagtgcacagcccgacggccacgcatacctagggaactcttgcagcatgtgcgacagcctgtgagcc

SEQ ID NO: 332676 - DNA, 120 bp, Artificial Sequence
  ENSG00000136925_14 (sequence is synthesized)
cagagccagggcctgatgctgatgaggatgggccagtgcttatgtgagcagcacctttggcattttcccaggccctcggtaaaagtaggtttggggtgactatacagagaaagcatggca

SEQ ID NO: 332677 - DNA, 120 bp, Artificial Sequence
  ENSG00000136925_15 (sequence is synthesized)
agactgcagaaacagagaaatcgggaacttcagttctggccgctgccaccgtggcagccgtctacacttcacagcgggaggggaggagtcacgttgtctaccacttacctgagacattct

SEQ ID NO: 332678 - DNA, 120 bp, Artificial Sequence
  ENSG00000136925_16 (sequence is synthesized)
gatttggatgatgctagagcacagaaaataggtgagctgcatgggatcccaaagctgctgagggatagagcctgagcctggtggccacagcatatgccctttctgttccatgcagctggg

SEQ ID NO: 332679 - DNA, 120 bp, Artificial Sequence
  ENSG00000136925_17 (sequence is synthesized)
taccctggtggcaaacacatgaaagctgtggccctgggagtggcctcctaaaacaagccacttaggtcatctgccatctacccttaacctctgtctctcgcctgaggggaatctgcaagc

SEQ ID NO: 332680 - DNA, 120 bp, Artificial Sequence
  ENSG00000136925_18 (sequence is synthesized)
tgtgcattgggcttacctcctgcttttgtagaaataaccatcctttggtatacatggaggatagttccagaacgcctgagtatacaaaaacccaatgcatactcaagtcccacagtgggc

SEQ ID NO: 332681 - DNA, 120 bp, Artificial Sequence
  ENSG00000136925_19 (sequence is synthesized)
cctacagaacccacgtatgtgataaatcagccctccatgtacgcaggtttcgccccctgccaatactgtattttcaacctgtatggttgaaaaaaatccatatataagtgcagccatgca

SEQ ID NO: 332682 - DNA, 120 bp, Artificial Sequence
  ENSG00000136925_20 (sequence is synthesized)
gttcaaacccatattgttcaagggtcaactgtatagtttattgaacagccacacccattcctttacacatgatctatggcagagttgaatagttgcaacagacactatgtggcctgcaaa

SEQ ID NO: 332683 - DNA, 120 bp, Artificial Sequence
  ENSG00000136925_21 (sequence is synthesized)
atcggaaatttttactgtctggccttttacagaaaagtttgccagcccctgatctagaccagcagctcatctgatagaggcagaggtggccttaaagatgtggccttcttcattttctgt

SEQ ID NO: 332684 - DNA, 120 bp, Artificial Sequence
  ENSG00000136925_22 (sequence is synthesized)
tggtttggtttcgtttctatgagagatttcctctgatagctctgctttccccagcacttactctctgagcttttaaatgttctctctgggagcttcatataagctcggtgacatttgagc

SEQ ID NO: 332685 - DNA, 120 bp, Artificial Sequence
  ENSG00000136925_23 (sequence is synthesized)
cacagtttttagatcagcacctggaatacatgacacattcttactgaggtcatccagcactgccatggtggctgcccagtcttctggccagtgtgccaggcacatgtccctgtcacacag

SEQ ID NO: 332686 - DNA, 120 bp, Artificial Sequence
  ENSG00000136925_24 (sequence is synthesized)
gttccaagaaacacatacgcagccatgcatagaccaacagatttaatattatattgcagttttcagcgatgcagaatgcagctgcaattgtgttttaaggagaagccaaatggggatggt

SEQ ID NO: 332687 - DNA, 120 bp, Artificial Sequence
  ENSG00000136925_25 (sequence is synthesized)
tgtccctgcaacatggtgccactcctgggccatgtgcagcctcagtggacactcttccatagcgctgaggccctggccccgcctccagttaccctgtactgcccactgccttacagttca

SEQ ID NO: 332688 - DNA, 120 bp, Artificial Sequence
  ENSG00000136925_26 (sequence is synthesized)
gtgcgcaggccttcaccttttcatcaccagcctctctgctcagtgctctggagttcttgaccttgtcctttatcatgagatttgctgaaatcactaatgaaaataactcccaaaagcaac

SEQ ID NO: 332689 - DNA, 120 bp, Artificial Sequence
  ENSG00000136925_27 (sequence is synthesized)
aaacaaaaatattagtttaactggcactgtggtatattaaaaggcacaagggcattgtggcttaacacttttgctggatcccaagagacgcacatgatgttaaaaagagatctggcagca

SEQ ID NO: 332690 - DNA, 120 bp, Artificial Sequence
  ENSG00000136925_28 (sequence is synthesized)
gtactaatactacatttcagtgtaatcatcttggggtggtttggccaggatttcccaattccttgatatctggagtttcttcaccattgtccggcatcctgcggaggcttaatatacagg

SEQ ID NO: 332691 - DNA, 120 bp, Artificial Sequence
  ENSG00000136925_29 (sequence is synthesized)
cgtaaggtcagcagcaatttgtctaataagtgatgagatcagtagctgaagtctctaagctgggccattactaaataccatagccatgttgatctggaaatttatccctctagtgtctta

SEQ ID NO: 332692 - DNA, 120 bp, Artificial Sequence
  ENSG00000136925_30 (sequence is synthesized)
cctcacataagccatttgcccactgtgcaatatagaaaggtgttttcaaaagtatttggccgtagattttcacatccatcataaggttggcattcaataaggaaaaagttctaactccag

SEQ ID NO: 332693 - DNA, 120 bp, Artificial Sequence
  ENSG00000136925_31 (sequence is synthesized)
tattaaattgtacataaatcccaaatgttcttaaagaacactcagggacatgtttgttgcctgggattggtaatgaaaggttggtttttgaaacttgaaatttcaccattggtttttttc

SEQ ID NO: 332694 - DNA, 120 bp, Artificial Sequence
  ENSG00000136925_32 (sequence is synthesized)
ctatcatttctgcatatccagcaaaaggaatctcatgttgactcctggcagagttcagtggcttcagtctgtctatctgttctgaggggaaaattgtgttctggatccagtaatcaattt

SEQ ID NO: 332695 - DNA, 120 bp, Artificial Sequence
  ENSG00000136925_33 (sequence is synthesized)
ggcaactttaatcgaggttttcaaaattccaaggagggttaataaagaatgataatcagttttatttgctaatagctaagacaaatttgtaataaagtgttttataatacttcaaaagca

SEQ ID NO: 332696 - DNA, 120 bp, Artificial Sequence
  ENSG00000136925_34 (sequence is synthesized)
tctagaaaaatgacacagggaagacaggccagtgctcattactgagcactgaataagcagggaaaataagtacattgtgccaccattttcccagctgtggagctgagagaaccctagccc

SEQ ID NO: 332697 - DNA, 120 bp, Artificial Sequence
  ENSG00000136925_35 (sequence is synthesized)
aggagtcaggaggcctgggttgggatcctggcttcaccattgctagctggacaagcccattaacatggggatcatctcacctgccctgcctgcctgtctacctgccaagagctgtactac

SEQ ID NO: 332698 - DNA, 120 bp, Artificial Sequence
  ENSG00000136925_36 (sequence is synthesized)
tgggctaattcagggctcttaacctggaattggtacatagatttcagggattctgtgaatttggatggaaaaataattgtatctttgttttcaataacacctcactaaaatgaagcattt

SEQ ID NO: 332699 - DNA, 120 bp, Artificial Sequence
  ENSG00000136925_37 (sequence is synthesized)
cctttagttatgaatgtaggcaacaaagtaccagttgtattaatgtacctgtgactttgtcttcagtaggattcacaatactttcatatcatgttctagttgcctcagatatctcaaaat

SEQ ID NO: 332700 - DNA, 120 bp, Artificial Sequence
  ENSG00000136925_38 (sequence is synthesized)
agtatttatactcatcactgcttcaaaatgaaaatagttattaggcccaccactaagagttgatatataatgtgttaataaatggcacgtcttattatatattacagattttgaaaaaga

SEQ ID NO: 332701 - DNA, 120 bp, Artificial Sequence
  ENSG00000136925_39 (sequence is synthesized)
gtcccccctggaaaagggaacaatcaaagaggaaaagaccacttaacaagggggttgggaggtagttggccagctttggaatagctggtgagagagagaaactttcattaccatctagtt

SEQ ID NO: 332702 - DNA, 120 bp, Artificial Sequence
  ENSG00000136925_40 (sequence is synthesized)
accacctgttctctagatgggaaaaagaaaaaaaaagtcagtaaatactggaagcagacagttaccagaagtcacccccacaaaaaaataagctgggtggtgggggtggtggttagttgt

SEQ ID NO: 332703 - DNA, 120 bp, Artificial Sequence
  ENSG00000136925_41 (sequence is synthesized)
tgttgctagaagacagaagacttactatttggaaaccttccccgggttccacaggatctacgagattctagtcagcaaagggagcaatgcctgtccacgtgtgtgtgaatgtatgtgttt

SEQ ID NO: 332704 - DNA, 120 bp, Artificial Sequence
  ENSG00000136925_42 (sequence is synthesized)
aagattgtgctttaattcacagggacaaaacttaatagacaaataagaaagctaggcactgtgatcagcagcagtcatgagtcctctctaaagcagctgtggggtggctaacacttggct

SEQ ID NO: 332705 - DNA, 120 bp, Artificial Sequence
  ENSG00000136925_43 (sequence is synthesized)
cattctttcactgagtcaccatatgattttggaccagctagtgctctagacctcagtatcccttcttataaaataagaatgttacagctcatgcaatctgggactccaaatcttggacat

SEQ ID NO: 332706 - DNA, 120 bp, Artificial Sequence
  ENSG00000136925_44 (sequence is synthesized)
attagctcacttgagagaccaccagcctggtcagcagatcactgtgtttttagtaaatctggaattgtaagattaacacttcataccacatgggggaataaagttgttgctctcacaggt

SEQ ID NO: 332707 - DNA, 80 bp, Artificial Sequence
  ENSG00000136928_0 (sequence is synthesized)
gatccgtcacgggcgccgccgctgccgccgccgccgccgcggccgttctgagccgagccggaaccctagcccgagacgga

SEQ ID NO: 332708 - DNA, 80 bp, Artificial Sequence
  ENSG00000136928_1 (sequence is synthesized)
ccgccgccaccgccgcccgcgcgcctgctactgctactgctgctgccgctgctgctgcctctggcgcccggggcctgggg

SEQ ID NO: 332709 - DNA, 120 bp, Artificial Sequence
  ENSG00000136928_2 (sequence is synthesized)
ccgctctccatcatgggcctcatgccgctcaccaaggaggtggccaagggcagcatcgggcgcggtgtgctccccgccgtggaactggccatcgagcagatccgcaacgagtcactcctg

SEQ ID NO: 332710 - DNA, 120 bp, Artificial Sequence
  ENSG00000136928_3 (sequence is synthesized)
cgcccctacttcctcgacctgcggctctatgacacggagtgcgacaacgcaaaagggttgaaagccttctacgatgcaataaaatacgggcctaaccacttgatggtgtttggaggcgtc

SEQ ID NO: 332711 - DNA, 120 bp, Artificial Sequence
  ENSG00000136928_4 (sequence is synthesized)
tgtccatccgtcacatccatcattgcagagtccctccaaggctggaatctggtgcagctttcttttgctgcaaccacgcctgttctagccgataagaaaaaatacccttatttctttcgg

SEQ ID NO: 332712 - DNA, 120 bp, Artificial Sequence
  ENSG00000136928_5 (sequence is synthesized)
accgtcccatcagacaatgcggtgaatccagccattctgaagttgctcaagcactaccagtggaagcgcgtgggcacgctgacgcaagacgttcagaggttctctgaggtgcggaatgac

SEQ ID NO: 332713 - DNA, 120 bp, Artificial Sequence
  ENSG00000136928_6 (sequence is synthesized)
ctgactggagttctgtatggcgaggacattgagatttcagacaccgagagcttctccaacgatccctgtaccagtgtcaaaaagctgaaggggaatgatgtgcggatcatccttggccag

SEQ ID NO: 332714 - DNA, 120 bp, Artificial Sequence
  ENSG00000136928_7 (sequence is synthesized)
tttgaccagaatatggcagcaaaagtgttctgttgtgcatacgaggagaacatgtatggtagtaaatatcagtggatcattccgggctggtacgagccttcttggtgggagcaggtgcac

SEQ ID NO: 332715 - DNA, 120 bp, Artificial Sequence
  ENSG00000136928_8 (sequence is synthesized)
acggaagccaactcatcccgctgcctccggaagaatctgcttgctgccatggagggctacattggcgtggatttcgagcccctgagctccaagcagatcaagaccatctcaggaaagact

SEQ ID NO: 332716 - DNA, 120 bp, Artificial Sequence
  ENSG00000136928_9 (sequence is synthesized)
ccacagcagtatgagagagagtacaacaacaagcggtcaggcgtggggcccagcaagttccacgggtacgcctacgatggcatctgggtcatcgccaagacactgcagagggccatggag

SEQ ID NO: 332717 - DNA, 120 bp, Artificial Sequence
  ENSG00000136928_10 (sequence is synthesized)
acactgcatgccagcagccggcaccagcggatccaggacttcaactacacggaccacacgctgggcaggatcatcctcaatgccatgaacgagaccaacttcttcggggtcacgggtcaa

SEQ ID NO: 332718 - DNA, 120 bp, Artificial Sequence
  ENSG00000136928_11 (sequence is synthesized)
gttgtattccggaatggggagagaatggggaccattaaatttactcaatttcaagacagcagggaggtgaaggtgggagagtacaacgctgtggccgacacactggagatcatcaatgac

SEQ ID NO: 332719 - DNA, 120 bp, Artificial Sequence
  ENSG00000136928_12 (sequence is synthesized)
accatcaggttccaaggatccgaaccaccaaaagacaagaccatcatcctggagcagctgcggaagatctccctacctctctacagcatcctctctgccctcaccatcctcgggatgatc

SEQ ID NO: 332720 - DNA, 120 bp, Artificial Sequence
  ENSG00000136928_13 (sequence is synthesized)
atggccagtgcttttctcttcttcaacatcaagaaccggaatcagaagctcataaagatgtcgagtccatacatgaacaaccttatcatccttggagggatgctctcctatgcttccata

SEQ ID NO: 332721 - DNA, 120 bp, Artificial Sequence
  ENSG00000136928_14 (sequence is synthesized)
tttctctttggccttgatggatcctttgtctctgaaaagacctttgaaacactttgcaccgtcaggacctggattctcaccgtgggctacacgaccgcttttggggccatgtttgcaaag

SEQ ID NO: 332722 - DNA, 120 bp, Artificial Sequence
  ENSG00000136928_15 (sequence is synthesized)
acctggagagtccacgccatcttcaaaaatgtgaaaatgaagaagaagatcatcaaggaccagaaactgcttgtgatcgtggggggcatgctgctgatcgacctgtgtatcctgatctgc

SEQ ID NO: 332723 - DNA, 120 bp, Artificial Sequence
  ENSG00000136928_16 (sequence is synthesized)
tggcaggctgtggaccccctgcgaaggacagtggagaagtacagcatggagccggacccagcaggacgggatatctccatccgccctctcctggagcactgtgagaacacccatatgacc

SEQ ID NO: 332724 - DNA, 120 bp, Artificial Sequence
  ENSG00000136928_17 (sequence is synthesized)
atctggcttggcatcgtctatgcctacaagggacttctcatgttgttcggttgtttcttagcttgggagacccgcaacgtcagcatccccgcactcaacgacagcaagtacatcgggatg

SEQ ID NO: 332725 - DNA, 120 bp, Artificial Sequence
  ENSG00000136928_18 (sequence is synthesized)
agtgtctacaacgtggggatcatgtgcatcatcggggccgctgtctccttcctgacccgggaccagcccaatgtgcagttctgcatcgtggctctggtcatcatcttctgcagcaccatc

SEQ ID NO: 332726 - DNA, 120 bp, Artificial Sequence
  ENSG00000136928_19 (sequence is synthesized)
accctctgcctggtattcgtgccgaagctcatcaccctgagaacaaacccagatgcagcaacgcagaacaggcgattccagttcactcagaatcagaagaaagaagattctaaaacgtcc

SEQ ID NO: 332727 - DNA, 120 bp, Artificial Sequence
  ENSG00000136928_20 (sequence is synthesized)
acctcggtcaccagtgtgaaccaagccagcacatcccgcctggagggcctacagtcagaaaaccatcgcctgcgaatgaagatcacagagctggataaagacttggaagaggtcaccatg

SEQ ID NO: 332728 - DNA, 120 bp, Artificial Sequence
  ENSG00000136928_21 (sequence is synthesized)
gatggaggaaaggccattttaaaaaatcacctcgatcaaaatccccagctacagtggaacacaacagagccctctcgaacatgcaaagatcctatagaagatataaactctccagaacac

SEQ ID NO: 332729 - DNA, 120 bp, Artificial Sequence
  ENSG00000136928_22 (sequence is synthesized)
atccagcgtcggctgtccctccagctccccatcctccaccacgcctacctcccatccatcggaggcgtggacgccagctgtgtcagcccctgcgtcagccccaccgccagcccccgccac

SEQ ID NO: 332730 - DNA, 120 bp, Artificial Sequence
  ENSG00000136928_23 (sequence is synthesized)
agacatgtgccaccctccttccgagtcatggtctcgggcctgtaagggtgggaggcctgggcccggggcctcccccgtgacagaaccacactgggcagaggggtctgctgcagaaacact

SEQ ID NO: 332731 - DNA, 120 bp, Artificial Sequence
  ENSG00000136928_24 (sequence is synthesized)
gtcggctctggctgcggagaagctgggcaccatggctggcctctcaggaccactcggatggcactcaggtggacaggacggggcagggggagacttggcacctgacctcgagccttattt

SEQ ID NO: 332732 - DNA, 120 bp, Artificial Sequence
  ENSG00000136928_25 (sequence is synthesized)
ccttatttgtgaagtccttatttcttcacaaagaagaggaacggaaatgggacgtcttccttaacatctgcaaacaaggaggcgctgggatatcaaacttgcaaaaaaaaaaaaaaaaaa

SEQ ID NO: 332733 - DNA, 120 bp, Artificial Sequence
  ENSG00000136928_26 (sequence is synthesized)
aaaaaaactagacaaggagagaggcactagaactccagctggaagtcacggagtggctcgagcagccttgggaagaggcaaggagcttctgaagaaactgcctctgcacacacatcactg

SEQ ID NO: 332734 - DNA, 120 bp, Artificial Sequence
  ENSG00000136928_27 (sequence is synthesized)
gctgtgacccctcaggctagcccttctccactctgggggaggaggtgggaagggccaccaggcccccagctgccaggccagctgaccccagccttcctggaacagggagtctgcaggagc

SEQ ID NO: 332735 - DNA, 120 bp, Artificial Sequence
  ENSG00000136928_28 (sequence is synthesized)
gcagacaggcacagccctggagcaggcaggccgagggctgcggcactggagcaggctgacttacatgctccacatgggacctgtgtcacccaatgagatgtttgttactctggtaaatgc

SEQ ID NO: 332736 - DNA, 120 bp, Artificial Sequence
  ENSG00000136928_29 (sequence is synthesized)
cacacgttaacacaataacacccattcctgggaccgtggggatttagggcacgtcactgcagacacgctctgcagcattcaccgacagtctgtcatgcacccaccacgttggccatgtcc

SEQ ID NO: 332737 - DNA, 120 bp, Artificial Sequence
  ENSG00000136928_30 (sequence is synthesized)
ttgtgttcctatcggatgctcccagtaaccagggggaccacccgagctaatcatggaatgtctgttcccagcaaacacgataaagaaagattgtgcactttaacctctctcatcagggcc

SEQ ID NO: 332738 - DNA, 120 bp, Artificial Sequence
  ENSG00000136928_31 (sequence is synthesized)
caagggctggctgggattttttttttttttttcccactaactttgtttctgaccaaagtgaattggaggcactctgctaaaagacatccccgtagacataggggagagagttgctggctg

SEQ ID NO: 332739 - DNA, 120 bp, Artificial Sequence
  ENSG00000136928_32 (sequence is synthesized)
agggcttcccttggcttccagaaggcagccttccatccagacaagccagtgagctctccccttgggatcactggggtgatcagtcagcagattgattctcattcataagatcattcctcc

SEQ ID NO: 332740 - DNA, 120 bp, Artificial Sequence
  ENSG00000136928_33 (sequence is synthesized)
ctttaaattgagcccctaagagcactggcctgggagtcagacagacctgggttcaagtcctcagtcccctgcccactccctacgtgactttgatcaggtcactagtgtctctctgagcct

SEQ ID NO: 332741 - DNA, 120 bp, Artificial Sequence
  ENSG00000136928_34 (sequence is synthesized)
cagtttcccctctgtaacttggggttgaactaaaacacctgtcctgcctacctcacaaggtcactctgaggattgaaacttgatcttgtccaggaaagctttgtaccaaacagtgaagcc

SEQ ID NO: 332742 - DNA, 120 bp, Artificial Sequence
  ENSG00000136928_35 (sequence is synthesized)
gccctgatccgtgaggtatgagtatgactctgaccttcagccctccctacagccgggggtgtggcccagagaagcttccagcacagccctctacccagaacatccgggctggagggaggc

SEQ ID NO: 332743 - DNA, 120 bp, Artificial Sequence
  ENSG00000136928_36 (sequence is synthesized)
tcccagtgacttttctgacattcctagacaggttcattctttgctcaagaaaggcctgaatgacaatgtccaggatgtctgcacaactgagcagctcgctcactccctaaagaaacctat

SEQ ID NO: 332744 - DNA, 120 bp, Artificial Sequence
  ENSG00000136928_37 (sequence is synthesized)
tggcagcttcaacaggcaggcaataatctcttcccagaaccactgcagtcaggaataaactgttttctccaccaggctttgacaaaagggcccacaggaatcttaccaatgccaacattt

SEQ ID NO: 332745 - DNA, 120 bp, Artificial Sequence
  ENSG00000136928_38 (sequence is synthesized)
caaagcaccctatttcacgtagcatagctttctgctccccttccccaaagagaggttatggaggtactgtagcttttagggaaaaaaaaatgttaacacatcacaggtcaagttgaagtc

SEQ ID NO: 332746 - DNA, 120 bp, Artificial Sequence
  ENSG00000136928_39 (sequence is synthesized)
attctctgtttaggcactaaaaatcggtgttgtcactcactgtgtattaccagtatttacttgctttcttgatttcaccaaaaccaaatttaatttaaaggaccacattaatttttcaaa

SEQ ID NO: 332747 - DNA, 120 bp, Artificial Sequence
  ENSG00000136928_40 (sequence is synthesized)
gggaaagagacaattaattgtacataatgtatacacacacacaaaaaaaaatacctgtagaaatattattccagcatagcaggaaaacaaacaaaagtattggactgtcggaggtgagcc

SEQ ID NO: 332748 - DNA, 120 bp, Artificial Sequence
  ENSG00000136928_41 (sequence is synthesized)
tgtgcgtctgtaaccctttgtgactcctgagcgtgcgctgtcttctaggttaactcacgaagtacattctctgtcttactgatactgtaggttcacccatttttttttaatttcctcgca

SEQ ID NO: 332749 - DNA, 120 bp, Artificial Sequence
  ENSG00000136928_42 (sequence is synthesized)
aataacaagacccacagaagtgactctagctacttaatggttctgttcttttatatgcagcaaacacaccgtccatttctgaagaggcttcggcctgaaggcattttccaatgatgttag

SEQ ID NO: 332750 - DNA, 120 bp, Artificial Sequence
  ENSG00000136928_43 (sequence is synthesized)
tgcacaaaacgctttaaattagactggaactgccagaatcaaatgtaaatgaggaatttctcgtacccctactgcatggtatcgatttttaataaattgttgcaaatttgtttttatgaa

SEQ ID NO: 332751 - DNA, 120 bp, Artificial Sequence
  ENSG00000136928_44 (sequence is synthesized)
gcagtgcccacagcctggatctgcctctgtcccacagcaccagccaccatcccccacgggaggtgactgcgtgccccggcctcactgcctccaccatcgtgcgacaacgcaaaagggttg

SEQ ID NO: 332752 - DNA, 120 bp, Artificial Sequence
  ENSG00000136928_45 (sequence is synthesized)
aagtttggatttcagaggatgcatgagaagttgtgaagaacaaggaatggcattttgggtggaggaaacagcgcgtgtcagacccggcagcatgagccagtgtgatgtgaggggaaagac

SEQ ID NO: 332753 - DNA, 120 bp, Artificial Sequence
  ENSG00000136928_46 (sequence is synthesized)
agcgatcgctggccgcgcaaggtcgggtttgcgagtttttccggaccgagcgagcccctgtgctccgaccgcagcgtctgagacgcggcctgaagggggcagtgatttcctgtgcagtac

SEQ ID NO: 332754 - DNA, 120 bp, Artificial Sequence
  ENSG00000136928_47 (sequence is synthesized)
gctcggttggcgcctcttccatcgcgcggaacggggccgaggcgctgggcttgatcctggcttcctgggactctccgggcgcttctgctggagtccagtgcgacaacgcaaaagggttga

SEQ ID NO: 332755 - DNA, 120 bp, Artificial Sequence
  ENSG00000136928_48 (sequence is synthesized)
agggaagaaacagtgctgggagaactgagggagagcagggaaggctccctggaggaggtgtctgtgagtaggcctggacaaatgagtaggaagtatgatcccagaagtaagaaatgctgc

SEQ ID NO: 332756 - DNA, 120 bp, Artificial Sequence
  ENSG00000136928_49 (sequence is synthesized)
atcctctcccactcaaagactcgagctggggccccagcacccccgacccctgacagatgtgatttcaacttgtggactgatcagaggtgccatattgacatgaggagacatgatttctgc

SEQ ID NO: 332757 - DNA, 120 bp, Artificial Sequence
  ENSG00000136928_50 (sequence is synthesized)
agcccctggcacatgaggacagtgaggctgcacagctcccagactgcccagtaccccactgggaacacttcatcagttccatttccttccatttgagacatgtaattccagggaggccaa

SEQ ID NO: 332758 - DNA, 120 bp, Artificial Sequence
  ENSG00000136928_51 (sequence is synthesized)
gccagcacatcccgcctggagggcctacagtcagaaaaccatcgcctgcgaatgaagatcacagagtttttcactctcccagcacaacccagcaaccaccacatctatgtgatgtacaag

SEQ ID NO: 332759 - DNA, 120 bp, Artificial Sequence
  ENSG00000136928_52 (sequence is synthesized)
gacagctgtcacatccccagtctgcatttgctcagcaggactcagcagggccacaagtggggacagatggtgacatccagaagacccggctgacagcaaggcccccgaccctccctccct

SEQ ID NO: 332760 - DNA, 120 bp, Artificial Sequence
  ENSG00000136928_53 (sequence is synthesized)
gcagcccacctcctgagtaaccctccactccacagcttctcagagcagcctgtgtgtgccaccccttggtaacgatcatctctcccctttctgttcaccatttcagttgttcggttgttt

SEQ ID NO: 332761 - DNA, 120 bp, Artificial Sequence
  ENSG00000136928_54 (sequence is synthesized)
tgccgaaggcctccctgcgttgccagacaccagttcttcccttggagttcccttccccccaccatccctccagaccgccctcaaagcccagcaggccatggcactgtggtaggctgtccc

SEQ ID NO: 332762 - DNA, 120 bp, Artificial Sequence
  ENSG00000136928_55 (sequence is synthesized)
attttcaacttcagcaataccccaaggatgctgctttcctctgatcattttgccattaactttgatgatagtattactacctaccacaccaacagtgcgacaacgcaaaagggttgaaag

SEQ ID NO: 332763 - DNA, 120 bp, Artificial Sequence
  ENSG00000136928_56 (sequence is synthesized)
agggctccctttgcagaccttggggccaggaggtgaaggtggagtgcatcctcagtgttcttgtctccttcttttattaccattctctgattgtgatgcccttgcttcctggatatgtcc

SEQ ID NO: 332764 - DNA, 120 bp, Artificial Sequence
  ENSG00000136928_57 (sequence is synthesized)
agttctgccatgcttctctttcccgtgtgtcctaatcgcttgctttttgccaggctttatatccagcatggatacacagagaggccccaacacagtctcaactccccagggcctgccagt

SEQ ID NO: 332765 - DNA, 120 bp, Artificial Sequence
  ENSG00000136928_58 (sequence is synthesized)
ctagagagggatgctcaaggaggaaagccactcactgggtcctctccctgcaggaaccacctaggggtgcggaatgacctgactggagttctgtatggcgaggacattgagatttcagac

SEQ ID NO: 332766 - DNA, 120 bp, Artificial Sequence
  ENSG00000136929_0 (sequence is synthesized)
cggcagacatatgacagaagactgaacaaccagaagttatgaagataggtactgtgggtgttagaaagattcacggcaaaacagggaagcatctaggctgcttgtggaagtcagaccaaa

SEQ ID NO: 332767 - DNA, 120 bp, Artificial Sequence
  ENSG00000136929_1 (sequence is synthesized)
atagcaggaaggtattgcagcaagatggatttgggaaaggaccaatctcatttgaagcaccatcagacacctgaccctcatcaagaagagaaccattctccagaagtcattggaacctgg

SEQ ID NO: 332768 - DNA, 120 bp, Artificial Sequence
  ENSG00000136929_2 (sequence is synthesized)
agtttgagaaacagagaactacttagaaaaagaaaagctgaagtgcatgaaaaggaaacatcacaatggctatttggagaacagaaaaaacgcaagcagcagagaacaggaaaaggaaat

SEQ ID NO: 332769 - DNA, 120 bp, Artificial Sequence
  ENSG00000136929_3 (sequence is synthesized)
cgaagaggcagaaagagacaacaaaacacagaattgaaggtggagcctcagccacagatagaaaaggaaatagtggagaaagcactggcacctatagagaaaaaaactgagccacctggg

SEQ ID NO: 332770 - DNA, 120 bp, Artificial Sequence
  ENSG00000136929_4 (sequence is synthesized)
agcataaccaaagtatttccttcagtagcctccccgcaaaaagttgtgcctgaggaacacttttctgaaatatgtcaagaaagtaacatatatcaggagaatttttctgagtaccaagaa

SEQ ID NO: 332771 - DNA, 120 bp, Artificial Sequence
  ENSG00000136929_5 (sequence is synthesized)
atagcagtacaaaaccattcttctgaaacatgccaacatgtgtctgaacctgaagacctctctcctaaaatgtaccaagaaatatctgtacttcaagacaattcttccaaaatatgccaa

SEQ ID NO: 332772 - DNA, 120 bp, Artificial Sequence
  ENSG00000136929_6 (sequence is synthesized)
gacatgaaggaacctgaagacaactctcctaacacatgccaagtaatatctgtaattcaagaccatcctttcaaaatgtaccaagatatggctaaacgagaagatctggctcctaaaatg

SEQ ID NO: 332773 - DNA, 120 bp, Artificial Sequence
  ENSG00000136929_7 (sequence is synthesized)
tgccaagaagctgctgtacccaaaatccttccttgtccaacatctgaagacacagctgatctggcaggatgctctcttcaagcatatccaaaaccagatgtgcctaaaggctatattctt

SEQ ID NO: 332774 - DNA, 120 bp, Artificial Sequence
  ENSG00000136929_8 (sequence is synthesized)
gacacagaccaaaatccagcagaaccagaggaatacaatgaaacagatcaaggaatagctgagacagaaggcctttttcctaaaatacaagaaatagctgagcctaaagacctttctaca

SEQ ID NO: 332775 - DNA, 120 bp, Artificial Sequence
  ENSG00000136929_9 (sequence is synthesized)
ccttcctcataaaacatgtaacgaaattattgtgcctaaagccccctctcataaaacaatccaagaaacacctcattctgaagactattcaattgaaataaaccaagaaactcctgggtc

SEQ ID NO: 332776 - DNA, 120 bp, Artificial Sequence
  ENSG00000136929_10 (sequence is synthesized)
tgaaaaatattcacctgaaacgtatcaagaaatacctgggcttgaagaatattcacctgaaatataccaagaaacatcccagcttgaagaatattcacctgaaatataccaagaaacacc

SEQ ID NO: 332777 - DNA, 120 bp, Artificial Sequence
  ENSG00000136929_11 (sequence is synthesized)
ggggcctgaagacctctctactgagacatataaaaataaggatgtgcctaaagaatgctttccagaaccacaccaagaaacaggtgggccccaaggccaggatcctaaagcacaccagga

SEQ ID NO: 332778 - DNA, 120 bp, Artificial Sequence
  ENSG00000136929_12 (sequence is synthesized)
agatgctaaagatgcttatacttttcctcaagaaatgaaagaaaaacccaaagaagagccaggaataccagcaattctgaatgagagtcatccagaaaatgatgtctatagttatgtttt

SEQ ID NO: 332779 - DNA, 120 bp, Artificial Sequence
  ENSG00000136929_13 (sequence is synthesized)
gttttaacaatgctcaaccataaagttgtggtccaatggaacatacagcttaatagtttatgcgtgattttctcaaaatattgtaaaacttttgacaatgctcattaatattattttttc

SEQ ID NO: 332780 - DNA, 120 bp, Artificial Sequence
  ENSG00000136929_14 (sequence is synthesized)
aatgctcattaatattattttttctatttgtagaccatatctgaaagaaataacattttttaaggctctaccacatagacaatatcatgctagaatgtgtgtgtgtgtgtgtgtgtgtgt

SEQ ID NO: 332781 - DNA, 120 bp, Artificial Sequence
  ENSG00000136929_15 (sequence is synthesized)
gagaggatagtggtgggaacagacaaataaggaagcggggaggactggataattggttttcccccctaagaacatttatttacgtcttaagagcagataagtgactaagactgaacacat

SEQ ID NO: 332782 - DNA, 120 bp, Artificial Sequence
  ENSG00000136929_16 (sequence is synthesized)
acattttgtggagtatatagttttcttgtaaatgctgttcaattattaatgtaacagtagcatcaaaattttattcaggctttagttgactcttttggtcagttttaacaattctcctta

SEQ ID NO: 332783 - DNA, 120 bp, Artificial Sequence
  ENSG00000136929_17 (sequence is synthesized)
aaagatattttggagtgatgaatgtagtttacttttgtatttgaattttgattttctatttttattttttaaatattgtatttgtgcacaatgtacattaaatcattattacatgcttaa

SEQ ID NO: 332784 - DNA, 120 bp, Artificial Sequence
  ENSG00000136930_0 (sequence is synthesized)
actgctttcttgggaagatggcggctgtgtcggtgtatgctccaccagttggaggcttctcttttgataactgccgcaggaatgccgtcttggaagccgattttgcaaagaggggataca

SEQ ID NO: 332785 - DNA, 120 bp, Artificial Sequence
  ENSG00000136930_1 (sequence is synthesized)
agcttccaaaggtccggaaaactggcacgaccatcgctggggtggtctataaggatggcatagttcttggagcagatacaagagcaactgaagggatggttgttgctgacaagaactgtt

SEQ ID NO: 332786 - DNA, 120 bp, Artificial Sequence
  ENSG00000136930_2 (sequence is synthesized)
caaaaatacacttcatatctcctaatatttattgttgtggtgctgggacagctgcagacacagacatgacaacccagctcatttcttccaacctggagctccactccctctccactggcc

SEQ ID NO: 332787 - DNA, 120 bp, Artificial Sequence
  ENSG00000136930_3 (sequence is synthesized)
gtcttcccagagttgtgacagccaatcggatgctgaagcagatgcttttcaggtatcaaggttacattggtgcagccctagttttagggggagtagatgttactggacctcacctctaca

SEQ ID NO: 332788 - DNA, 120 bp, Artificial Sequence
  ENSG00000136930_4 (sequence is synthesized)
ataagttgccttatgtcaccatgggttctggctccttggcagcaatggctgtatttgaagataagtttaggccagacatggaggaggaggaagccaagaatctggtgagcgaagccatcg

SEQ ID NO: 332789 - DNA, 120 bp, Artificial Sequence
  ENSG00000136930_5 (sequence is synthesized)
cagctggcatcttcaacgacctgggctccggaagcaacattgacctctgcgtcatcagcaagaacaagctggattttctccgcccatacacagtgcccaacaagaaggggaccaggcttg

SEQ ID NO: 332790 - DNA, 120 bp, Artificial Sequence
  ENSG00000136930_6 (sequence is synthesized)
gccggtacaggtgtgagaaagggactactgcagtcctcactgagaaaatcactcctctggagattgaggtgctggaagaaacagtccaaacaatggacacttcctgaatggcatcagtgg

SEQ ID NO: 332791 - DNA, 120 bp, Artificial Sequence
  ENSG00000136930_7 (sequence is synthesized)
gtggctggccgcggttctggaaggtggtgagcattgaggcccagtaagacactcatgtggctagtgtttgccgaatgaaactcaactcaataaaaaacaaaaaccaaattgggcagctga

SEQ ID NO: 332792 - DNA, 120 bp, Artificial Sequence
  ENSG00000136930_8 (sequence is synthesized)
gtgatacgagaattctgagggaagaattcatggcggggcctgtggcccgcggctagtgtgactcaggggaatcagggcctgggcgtgggtttctcctgaagccgggtctgctctcccacc

SEQ ID NO: 332793 - DNA, 120 bp, Artificial Sequence
  ENSG00000136930_9 (sequence is synthesized)
gttctggctccttggcagcaatggctgtatttgaagataagtttaggccagacatggaggacaaatgcacagctcttccatggtcactgtcgcaggaatgttgaatatgcctggatccat

SEQ ID NO: 332794 - DNA, 120 bp, Artificial Sequence
  ENSG00000136930_10 (sequence is synthesized)
ctacatctggccgctaaaccagcattcggcacataagcttttttgatggttgttaattttttgatggggagtatcaacttcttttcaacaattaataggtagtttatgagtggtttaccc

SEQ ID NO: 332795 - DNA, 120 bp, Artificial Sequence
  ENSG00000136930_11 (sequence is synthesized)
tatttcttagtatgtaggtttttgccatttctgacttcgcagtattgtttagggaccagagggtgtctctgggaattgctttttgacagtgccttatgtccagtcatctttggaaaagat

SEQ ID NO: 332796 - DNA, 120 bp, Artificial Sequence
  ENSG00000136930_12 (sequence is synthesized)
tccattgtgaagaggagctctttacagagaatcttttctttattaggcaagctgaagtagtgtcagaagaagcttggggaccatcttttgctattagcttggcagtgttccttgtagcag

SEQ ID NO: 332797 - DNA, 120 bp, Artificial Sequence
  ENSG00000136930_13 (sequence is synthesized)
gttctggctccttggcagcaatggctgtatttgaagataagtttaggccagacatggagagacgtgacctgaaaatggaggcagttttaaaaatccctgtagatgattctgcatctggca

SEQ ID NO: 332798 - DNA, 120 bp, Artificial Sequence
  ENSG00000136930_14 (sequence is synthesized)
gaagatggggacaagaccacacatgtgggggattcatctcagagcgtaatgatctagtgtctcagatacatgacaaatgcacagctcttccatggtcactgtcgcaggaatgttgaatat

SEQ ID NO: 332799 - DNA, 120 bp, Artificial Sequence
  ENSG00000136931_0 (sequence is synthesized)
agcctgctgtccggctgccgcccgccgtggtgtgagggggtttctgcgcacccacagtcgccaccgtcccacctgggctgccggagcctccccctggacccctggtgcccactgccaccc

SEQ ID NO: 332800 - DNA, 120 bp, Artificial Sequence
  ENSG00000136931_1 (sequence is synthesized)
tcatccggtgtgagagcgctgcttccgcttcgcggacgccgcgggcatggactattcgtacgacgaggacctggacgagctgtgccccgtgtgcggggacaaggtgtccggctaccacta

SEQ ID NO: 332801 - DNA, 120 bp, Artificial Sequence
  ENSG00000136931_2 (sequence is synthesized)
cggactgctcacgtgtgagagctgcaagggcttcttcaagcgcacggtgcagaacaacaagcactacacgtgcaccgagagccagagctgcaagatcgacaagacgcagcgcaagcgctg

SEQ ID NO: 332802 - DNA, 120 bp, Artificial Sequence
  ENSG00000136931_3 (sequence is synthesized)
tcccttctgccgcttccagaaatgcctgacggtggggatgcgcctggaagccgtgcgcgctgaccgtatgaggggtggccggaacaagtttgggccgatgtacaagcgggaccgggccct

SEQ ID NO: 332803 - DNA, 120 bp, Artificial Sequence
  ENSG00000136931_4 (sequence is synthesized)
gaaacagcagaagaaggcacagattcgggccaatggcttcaagctggagacagggcccccgatgggggtgcccccgccgccccctcccgcaccggactacgtgctgcctcccagcctgca

SEQ ID NO: 332804 - DNA, 120 bp, Artificial Sequence
  ENSG00000136931_5 (sequence is synthesized)
tgggcctgagcccaagggcctggccgccggtccacctgctgggccactgggcgactttggggccccagcactgcccatggccgtgcccggtgcccacgggccactggctggctacctcta

SEQ ID NO: 332805 - DNA, 120 bp, Artificial Sequence
  ENSG00000136931_6 (sequence is synthesized)
ccctgcctttcctggccgtgccatcaagtctgagtacccggagccttatgccagccccccacagcctgggctgccgtacggctacccagagcccttctctggagggcccaacgtgcctga

SEQ ID NO: 332806 - DNA, 120 bp, Artificial Sequence
  ENSG00000136931_7 (sequence is synthesized)
gctcatcctgcagctgctgcagctggagccggatgaggaccaggtgcgggcccgcatcttgggctgcctgcaggagcccaccaaaagccgccccgaccagccggcggccttcggcctcct

SEQ ID NO: 332807 - DNA, 120 bp, Artificial Sequence
  ENSG00000136931_8 (sequence is synthesized)
gtgcagaatggccgaccagaccttcatctccatcgtggactgggcacgcaggtgcatggtcttcaaggagctggaggtggccgaccagatgacgctgctgcagaactgctggagcgagct

SEQ ID NO: 332808 - DNA, 120 bp, Artificial Sequence
  ENSG00000136931_9 (sequence is synthesized)
gctggtgttcgaccacatctaccgccaggtccagcacggcaaggagggcagcatcctgctggtcaccgggcaggaggtggagctgaccacagtggccacccaggcgggctcgctgctgca

SEQ ID NO: 332809 - DNA, 120 bp, Artificial Sequence
  ENSG00000136931_10 (sequence is synthesized)
cagcctggtgttgcgggcgcaggagctggtgctgcagctgcttgcgctgcagctggaccggcaggagtttgtctgcctcaagttcatcatcctcttcagcctggatttgaagttcctgaa

SEQ ID NO: 332810 - DNA, 120 bp, Artificial Sequence
  ENSG00000136931_11 (sequence is synthesized)
taaccacatcctggtgaaagacgctcaggagaaggccaacgccgccctgcttgactacaccctgtgccactacccgcactgcggggacaaattccagcagctgctgctgtgcctggtgga

SEQ ID NO: 332811 - DNA, 120 bp, Artificial Sequence
  ENSG00000136931_12 (sequence is synthesized)
acctgctcatcgaaatgctgcaagccaagcagacttgagcctgggccgggggcggggccgggactgggggcgggactgggggcggggcctgggcggggccgcagccacaccgctggctcc

SEQ ID NO: 332812 - DNA, 120 bp, Artificial Sequence
  ENSG00000136931_13 (sequence is synthesized)
gcatggttcattttctgatgcccaccgaggagccccagccccgtcccagaggccgctgcccctgagttctgacactgtgtgtttgggaaggtgggtgaggctgggcagggcctggcggag

SEQ ID NO: 332813 - DNA, 120 bp, Artificial Sequence
  ENSG00000136931_14 (sequence is synthesized)
gtggagtggccactggcacttgcctgctgcttggagtgccccaaggaggtggctgttaaccacccgccccgccccctccctgctcccagctctctctcctggagtctgaagcctgcaggt

SEQ ID NO: 332814 - DNA, 120 bp, Artificial Sequence
  ENSG00000136931_15 (sequence is synthesized)
ccggggaggaggttcgggattccctggtgggcctcgacgtcccttggatcagaggtcatcccttcctcctctcctggaaacagacagggagaagttgagcaggtatcaactaggggagga

SEQ ID NO: 332815 - DNA, 120 bp, Artificial Sequence
  ENSG00000136931_16 (sequence is synthesized)
gagagggtctccagtgttccccccatagagaccaggagggagagcctctgttttgtaaactaaggataaccgagtttgctaaattgagaggggctattgggccctagaggacactaggag

SEQ ID NO: 332816 - DNA, 120 bp, Artificial Sequence
  ENSG00000136931_17 (sequence is synthesized)
actggttaggacaaaaagaccttctccctagcccttctaccccacctgacctctgcaagagggggcattgatacatcatcgggaaaaaactttgctccaggcatcactgattccctctcc

SEQ ID NO: 332817 - DNA, 120 bp, Artificial Sequence
  ENSG00000136931_18 (sequence is synthesized)
cacccaaggagaacgtttggtacaatcgacatcctagccccacccagaggtggccctcccaggctggtatttatctgcaaggttgtagtcaagaggtttttctccccgctttttgttttt

SEQ ID NO: 332818 - DNA, 120 bp, Artificial Sequence
  ENSG00000136931_19 (sequence is synthesized)
aagcttctagacactccttgaaatgtgtgtgtgatggagggaaggggacagatttgaggactgaagctggggcttggggattgccactaagtacagctgacggtttctccccggacactc

SEQ ID NO: 332819 - DNA, 120 bp, Artificial Sequence
  ENSG00000136931_20 (sequence is synthesized)
gcctactaagtacccttggggtggtgctgggtcattacttctgagccccagccccaatccagagaagcgctgttgcccgccctccacccactaggtgaacagcaggatgccctgttgggg

SEQ ID NO: 332820 - DNA, 120 bp, Artificial Sequence
  ENSG00000136931_21 (sequence is synthesized)
gcttcaggtctctgtgggtgggaatgcaagtgaacttgggagggggcacgggcctgtagatcagggatagcgctgttgatcccctctctgtggctccaacccgttgggtcccttgctgca

SEQ ID NO: 332821 - DNA, 120 bp, Artificial Sequence
  ENSG00000136931_22 (sequence is synthesized)
aacccatgaagctggccctcagctccctgaccccctgtcctaggtcatgaaggacactctgcagggtgaagcaccagggagaggcctcggctgtctcctgtccccggcggggtgcctgct

SEQ ID NO: 332822 - DNA, 120 bp, Artificial Sequence
  ENSG00000136931_23 (sequence is synthesized)
gtccgtcccgctttcatgttactgttgcagcttgtgctgagcctgcccagttggaggagactgggcacccctgcctcctgcctcccgcctcccgccaccctgtctcagtacctcccctcc

SEQ ID NO: 332823 - DNA, 120 bp, Artificial Sequence
  ENSG00000136931_24 (sequence is synthesized)
ccgccccctgaaacatgtgcccctgccaaggccggagacccacagccctgaaacgagaagtgcccttaaggatcaccccagcccccacagccctggaataaatttcgcaattagtttcca

SEQ ID NO: 332824 - DNA, 120 bp, Artificial Sequence
  ENSG00000136931_25 (sequence is synthesized)
ttggcccaggcctctaatggccagcctccttctgcagtgcctccctgcagcctgggccggccactgcctgctccacttagtgaccggtgccccctgctctgggcagggaaggtgccaggg

SEQ ID NO: 332825 - DNA, 120 bp, Artificial Sequence
  ENSG00000136931_26 (sequence is synthesized)
gtctcccagactcaccctcccaccatgctaccccctcttcttccctgggctgccgatgggaggagccaggcctgtgaccacaagccccatggaggtccgctggtgtcccgctgtctctgg

SEQ ID NO: 332826 - DNA, 120 bp, Artificial Sequence
  ENSG00000136932_0 (sequence is synthesized)
actgcgcatgcgtcaggcatggagagcggaagcggaaggttgaatgcgtcgggtgggcacctcagcaaccagtagccatgcgcggcttggaggagtcggggcctcggcctacagcgaccc

SEQ ID NO: 332827 - DNA, 120 bp, Artificial Sequence
  ENSG00000136932_1 (sequence is synthesized)
cgtgcggctgcgttaagccggctctggagacagggaatcttttaactgagccagtcggctacttggaatcttgtttctcggccaagaatggtactccaagacagccatccatttgtagct

SEQ ID NO: 332828 - DNA, 120 bp, Artificial Sequence
  ENSG00000136932_2 (sequence is synthesized)
attctcgagcctgtttgaggattagaaagaggatctttaataatcctgaacattccttgatgggcctagaacagttttctcatgtttggattttgtttgtttttcacaaaaatggtcatt

SEQ ID NO: 332829 - DNA, 120 bp, Artificial Sequence
  ENSG00000136932_3 (sequence is synthesized)
tgagctgtaaggcaaaagtgcagcctcctaggctgaatggtgcaaagactggagttttttccacaaggagccctcatcgtcccaatgcaataggactgaccctggccaagctggaaaagg

SEQ ID NO: 332830 - DNA, 120 bp, Artificial Sequence
  ENSG00000136932_4 (sequence is synthesized)
tagaaggtggagctatatacctttctggaattgacatgatacatggcacacccgtactagacatcaagccctacatagctgagtatgactcaccgcaaaatgtgatggagcctttagcag

SEQ ID NO: 332831 - DNA, 120 bp, Artificial Sequence
  ENSG00000136932_5 (sequence is synthesized)
actttaatttacagaataaccaacatacaccaaacactgtgtcccagtctgacagcaagactgacagctgtgaccagcgacagctctcagggtgtgatgagccacaaccccaccatagca

SEQ ID NO: 332832 - DNA, 120 bp, Artificial Sequence
  ENSG00000136932_6 (sequence is synthesized)
ttcctatgcacagggagatagcagtggattttggtttggaatcaagacgtgatcagagttccagcgtggcagaagaacaaattggcccatattgcccagagaagagcttttcagagaaag

SEQ ID NO: 332833 - DNA, 120 bp, Artificial Sequence
  ENSG00000136932_7 (sequence is synthesized)
gtacagacaagaagctagaaagagtggaaggagcagcagtcttgcaaggaagcagggcagagacacagcccatggcccctcactgccctgctggaagggctgatggagctccccgcagcg

SEQ ID NO: 332834 - DNA, 120 bp, Artificial Sequence
  ENSG00000136932_8 (sequence is synthesized)
tggttcctgcctgggtgacagaggctcctgtggccactttagaagtgcggtttactcctcatgccgagatggaccttgggcagctcagttcacaagatgttggtcaggcgtcatttaaat

SEQ ID NO: 332835 - DNA, 120 bp, Artificial Sequence
  ENSG00000136932_9 (sequence is synthesized)
attttcagtcagcagaggaagcaaagcgtgccattgaggctgtgctgtcagcggatcctcggtctgtgtaccgccggaagctttgccaggaccgccttttctactttactgtagacatag

SEQ ID NO: 332836 - DNA, 120 bp, Artificial Sequence
  ENSG00000136932_10 (sequence is synthesized)
cgcatgtcacttgctggtttggtgatggctttgcagaggtgctgaggatcaagccggcttctgagcctgttcatatgactggccctgtggggtccttggtgtctctagggtcttaaggag

SEQ ID NO: 332837 - DNA, 120 bp, Artificial Sequence
  ENSG00000136932_11 (sequence is synthesized)
cctccctcatgtctttaaggtagcatcattgatctttggatgtggcttttggattttctgaacaagctaatgttgtgtcgagaagcaacactttgtgatctcatggctttgattgatttg

SEQ ID NO: 332838 - DNA, 120 bp, Artificial Sequence
  ENSG00000136932_12 (sequence is synthesized)
ggctgttcaaaatgtttatttgaaaaacgtatacattaataaacttaacaaagagatataaaatacagagaaatcaccaaatgctttttgatctgttgatattaaagaatcaaaaggtga

SEQ ID NO: 332839 - DNA, 120 bp, Artificial Sequence
  ENSG00000136932_13 (sequence is synthesized)
tttcctcacccaaaaaagccttataaaataaacagcattcaccactggctgtttattcagacgagtaccaatgatgttaactcctgagaaccaccagacattgaagaaaatacaatgatt

SEQ ID NO: 332840 - DNA, 120 bp, Artificial Sequence
  ENSG00000136932_14 (sequence is synthesized)
attttatcaatttgtaatggctaacaaacttggatagcaagtactagaagattttatgattattcagggacatattttctagcactgaatatgtgccagacattgtcctaggtgctagag

SEQ ID NO: 332841 - DNA, 120 bp, Artificial Sequence
  ENSG00000136932_15 (sequence is synthesized)
ctatagtgataaacaaatcagatgaaagtagaaatccatgccctaaagaacttaatgtttcaattgggaaggtcaagtcagataggttaaaaggcaaacacagtagcactgtagacatta

SEQ ID NO: 332842 - DNA, 120 bp, Artificial Sequence
  ENSG00000136932_16 (sequence is synthesized)
ctatataagctttatggcaactagtgtttgtgcagtgctttacagttagtaaacagtgttcacgtaccttatctcacagtggctttgtgggtttgacaaagtagcaatcctcatctcata

SEQ ID NO: 332843 - DNA, 120 bp, Artificial Sequence
  ENSG00000136932_17 (sequence is synthesized)
ggtgaggaaactagggctctttaagattagataatctgtctaatagcatccagccaggtggtcatctgactctaaatcctttgaagtcttacttatgctacagtgcctttctttttccta

SEQ ID NO: 332844 - DNA, 120 bp, Artificial Sequence
  ENSG00000136932_18 (sequence is synthesized)
cagatattgttaggcataattcatcatctagcaagtccagaatcatctttccagagttccagctcattcataataacatgtttcagaaatcagggtcctgtattagttacgtttttctta

SEQ ID NO: 332845 - DNA, 120 bp, Artificial Sequence
  ENSG00000136932_19 (sequence is synthesized)
aatggagacggaatcaaatgtgactgcatgtagtttttctgttctcatttggcctattttccaagagtaaggttagtagatggctatttgtagcagtaactggacagcatctgtccagtg

SEQ ID NO: 332846 - DNA, 120 bp, Artificial Sequence
  ENSG00000136932_20 (sequence is synthesized)
ggacagctggagacttgtctttagtatttggtaatgctgacttatgtgctgcttaatcttttgagtcttgatggatgtattagatttctattgttgtgtaacaaattaccacagaatcat

SEQ ID NO: 332847 - DNA, 120 bp, Artificial Sequence
  ENSG00000136932_21 (sequence is synthesized)
cagtttaaacaacacacatgtattatgtgtttgaaacattattatgtatctgtgggtcagaaggatgggcacagcttaactaggtcatctgcttaggtctcactagactgcaattaaatt

SEQ ID NO: 332848 - DNA, 120 bp, Artificial Sequence
  ENSG00000136932_22 (sequence is synthesized)
gtcagctgatatgagttcttatctggaggcttgaccatggaagaatctgcttaagctcactcagactgttggccacattgatttccttgccatcgtagtaggactgggggccccagattc

SEQ ID NO: 332849 - DNA, 120 bp, Artificial Sequence
  ENSG00000136932_23 (sequence is synthesized)
ttgctggttgttggctggaggctgccctcagtgtctaaaggctgtttgcagttccttgctatgtgggcttcctagcacgcctgcctacttcagcaagccttcaaggagagtctctcgagt

SEQ ID NO: 332850 - DNA, 120 bp, Artificial Sequence
  ENSG00000136932_24 (sequence is synthesized)
gagtcttccagccagcagcagtgctaatgaaaagcatagtcactggagggacatcatacctcttttgccatattctgttggttagaagccagtcacactcaaggggaaggattatataag

SEQ ID NO: 332851 - DNA, 120 bp, Artificial Sequence
  ENSG00000136932_25 (sequence is synthesized)
ggcatgaacttcaggaggtgcgggtcacagggccacttttggatctgtttgccacagtaagaaccttcattggtcccacagagatatactgaggactactatatccctggaacagaagca

SEQ ID NO: 332852 - DNA, 120 bp, Artificial Sequence
  ENSG00000136932_26 (sequence is synthesized)
gtggggaaagcgctctagcagaggtttgtgcacaggcttctctatggggactgtaggaaagaatgcttttgtctggaggagccagaaaggctttgtaaaaggtgtgcttttgagggcctc

SEQ ID NO: 332853 - DNA, 120 bp, Artificial Sequence
  ENSG00000136932_27 (sequence is synthesized)
aaagagcaagtaggagtttgataggtagagaagaggatgggctaccaggtagcaagaagggtgtgtgttggtactaggtctgtgtgagagaattatgagtaagtgcagtgaggcgtaagc

SEQ ID NO: 332854 - DNA, 120 bp, Artificial Sequence
  ENSG00000136932_28 (sequence is synthesized)
ccttggggaaatggacagatatcatggctgcagtgctgatgtcaactgtgctgtgtggcaggagtctgggatgaatcacactacaaggacaaacattggtcaggttgtagaagttttaaa

SEQ ID NO: 332855 - DNA, 120 bp, Artificial Sequence
  ENSG00000136932_29 (sequence is synthesized)
ctagttttaactgtgtgttcgtatataacctagttacgcatttatggaaagcattccattctgacctaacagatgcatttgttatagaggcagcagatgaaatggcaggtaaactaggag

SEQ ID NO: 332856 - DNA, 120 bp, Artificial Sequence
  ENSG00000136932_30 (sequence is synthesized)
tcaagagaccattccaggcttcagcctgctggttgtgaagtgggcaaaggagaaggacctgcttcctctgtgattccacagaatattttgagaatcttgtaagagagaagttctaaaact

SEQ ID NO: 332857 - DNA, 120 bp, Artificial Sequence
  ENSG00000136932_31 (sequence is synthesized)
actttttcaggctattggacactaaatagatgagagcagttattttgcttgttctttcccagaacttgaactctcccactggattgtactcaactgggccttaggtagttttctcagaaa

SEQ ID NO: 332858 - DNA, 120 bp, Artificial Sequence
  ENSG00000136933_0 (sequence is synthesized)
ggagtcacggctcgcgactggcctaagtcgccgcaggtattgcagtccggggctggagggtaggggcgagggtccccggataccgggtctatcacggtctcgggcagggagtctgaatct

SEQ ID NO: 332859 - DNA, 120 bp, Artificial Sequence
  ENSG00000136933_1 (sequence is synthesized)
tttaggggagtgggcccaagccgggtgcaaagaacggggaagggccttccctggctccgtcccggccactttgaccgaatcagcctgttctttcccgaccccgtctcctatcccctagaa

SEQ ID NO: 332860 - DNA, 120 bp, Artificial Sequence
  ENSG00000136933_2 (sequence is synthesized)
ctgccacgtggggatgagatttgctgggctggtagcggcggctgctgcgggaggtcccgcccacgtgaagccagcctaactgagctctggactttggggacagctgtcagtggcctaggc

SEQ ID NO: 332861 - DNA, 120 bp, Artificial Sequence
  ENSG00000136933_3 (sequence is synthesized)
cgcaggacaccatgaagcaactgccagtcttggaacctggagacaagcccaggaaagcaacatggtacaccttgactgtccctggagacagcccctgtgctcgagttggccacagctgtt

SEQ ID NO: 332862 - DNA, 120 bp, Artificial Sequence
  ENSG00000136933_4 (sequence is synthesized)
catatttacccccagttggtaatgccaagagagggaaggtcttcattgttgggggagcaaatccaaacagaagcttctcagacgtgcacaccatggatctgggaaaacaccagtgggact

SEQ ID NO: 332863 - DNA, 120 bp, Artificial Sequence
  ENSG00000136933_5 (sequence is synthesized)
tagatacctgcaagggcctcttgccccggtatgaacatgctagcttcattccctcctgcacacctgaccgtatctgggtatttggaggtgccaaccaatcaggaaatcgaaattgtctac

SEQ ID NO: 332864 - DNA, 120 bp, Artificial Sequence
  ENSG00000136933_6 (sequence is synthesized)
tctttgggggcggagagagaggtgcccagcccgtgcaggacacgaagctgcatgtgtttgacgcaaacactctgacctggtcacagccagagacacttggaaatcctccatctccccggc

SEQ ID NO: 332865 - DNA, 120 bp, Artificial Sequence
  ENSG00000136933_7 (sequence is synthesized)
atggtcatgtgatggtggcagcagggacaaagctcttcatccacggaggcttggcgggggacagattctatgatgacctccactgcattgatataagtgacatgaaatggcagaagctaa

SEQ ID NO: 332866 - DNA, 120 bp, Artificial Sequence
  ENSG00000136933_8 (sequence is synthesized)
atcccactggggctgctccagcaggctgtgctgcccactcagctgtggccatgggaaaacatgtgtacatctttggtggaatgactcctgcaggagcactggacacaatgtaccagtatc

SEQ ID NO: 332867 - DNA, 120 bp, Artificial Sequence
  ENSG00000136933_9 (sequence is synthesized)
acacagaagagcagcattggaccttgcttaaatttgatactcttctaccccctggacgattggaccattccatgtgtatcattccatggccagtgacgtgtgcttctgagaaagaagatt

SEQ ID NO: 332868 - DNA, 120 bp, Artificial Sequence
  ENSG00000136933_10 (sequence is synthesized)
ccaactctctcactctgaaccatgaagctgagaaagaggattcagctgacaaagtaatgagccacagtggtgactcacatgaggaaagccagactgctacactgctctgtttggtgtttg

SEQ ID NO: 332869 - DNA, 120 bp, Artificial Sequence
  ENSG00000136933_11 (sequence is synthesized)
gtgggatgaatacagaaggggaaatctatgacgattgtattgtgactgtagtggactaataaaacccacatttttattacctgtcagttactttcagaatagttaagtaaaacattagct

SEQ ID NO: 332870 - DNA, 120 bp, Artificial Sequence
  ENSG00000136933_12 (sequence is synthesized)
gttttatacctccaaaatatcttctgcattatatatctgtttttctcctactttggtaggtgaagaaactaatgcaaataattcttatgtgcactaaaccttgctatattgcctctcaga

SEQ ID NO: 332871 - DNA, 120 bp, Artificial Sequence
  ENSG00000136933_13 (sequence is synthesized)
gcccagcccgtgcaggacacgaagctgcatgtgtttgacgcaagtatggactggtgggcaccttggggctggtcagggccatcccagtttacacattacctaatataggaagcagaagtt

SEQ ID NO: 332872 - DNA, 120 bp, Artificial Sequence
  ENSG00000136933_14 (sequence is synthesized)
agaaaaggaaagcctgactaagtgtctcacttctagacttctttgttatatctcttagctgatatctttttcccacagcaaaattggcatttaaaaagggatagtgaggcctggcatggt

SEQ ID NO: 332873 - DNA, 87 bp, Artificial Sequence
  ENSG00000136933_15 (sequence is synthesized)
aggtggaccgcttaaccttttctctactaaaaacacaaaaattatccgggcatgatggtatgcacctgtaatcccagttactcagga

SEQ ID NO: 332874 - DNA, 66 bp, Artificial Sequence
  ENSG00000136933_16 (sequence is synthesized)
aggaagtttcagtgagccaagattgggccactgcactcagcctgggcaacagagcaatactccatc

SEQ ID NO: 332875 - DNA, 120 bp, Artificial Sequence
  ENSG00000136933_17 (sequence is synthesized)
cggaggtggcaatgaaccaagatcgtgccattgcactccagccttggcaacagagcgagactctctcaaaaactaaataaaaaaataaaaaggtataatgatcaagttaaaaagtttaaa

SEQ ID NO: 332876 - DNA, 120 bp, Artificial Sequence
  ENSG00000136933_18 (sequence is synthesized)
ccatacaatttataaagtaaaaaagtaaaagaaagaataagaaagacaaaaaacaaacagaagtaaaagattccccttcagcctttcctttccccgcctcaggtacatgcctgggtgatt

SEQ ID NO: 332877 - DNA, 73 bp, Artificial Sequence
  ENSG00000136933_19 (sequence is synthesized)
agcgattctcctgcctcggcctcccaactagctgggattaccagcatgcaccaacatgtccatctaatttttt

SEQ ID NO: 332878 - DNA, 62 bp, Artificial Sequence
  ENSG00000136933_20 (sequence is synthesized)
ttacaggcttgagccactgcacccggccagatttttgtatttttataatctgcctgcctctg

SEQ ID NO: 332879 - DNA, 120 bp, Artificial Sequence
  ENSG00000136933_21 (sequence is synthesized)
ggtctcaaactcatgagctcaagcaatctgcctgcctctgcctgcccacctctgccaccacactcagccaaaatttttaccttgcaaagtaaaattgggaaaattaagagatagcacatt

SEQ ID NO: 332880 - DNA, 120 bp, Artificial Sequence
  ENSG00000136933_22 (sequence is synthesized)
cccaagccagagtatttgggaaaaaaaaaaaaaaagacacatcacagtgtgacttttctctttccagaaagaatgggctttgtgattcttttaaagcagttttaaaagtttaaataatat

SEQ ID NO: 332881 - DNA, 120 bp, Artificial Sequence
  ENSG00000136933_23 (sequence is synthesized)
tggttttgaatatataaaactataaggaacaagaaaaaaaacatatgtatgtgtatatgtgtgtgtgtgtgtacatgtgtatgtactatcaccccaaaattaaattactgttaacatctc

SEQ ID NO: 332882 - DNA, 120 bp, Artificial Sequence
  ENSG00000136935_0 (sequence is synthesized)
ggttccgggtcgctgctcggctcgccggctgggcggtgggggttggtgacgcgggccggggctcacgagaggcccgggaggcggggctttgctggcttcccagagagaggcaggacagaa

SEQ ID NO: 332883 - DNA, 120 bp, Artificial Sequence
  ENSG00000136935_1 (sequence is synthesized)
tgctttgacctccaagctgttttaaatctagtagataagccagatcctgtgttgccataagcccttggcccacatttaagtgggaatgcagctagcttggatgtctgaaactttgtaggc

SEQ ID NO: 332884 - DNA, 120 bp, Artificial Sequence
  ENSG00000136935_2 (sequence is synthesized)
gcctctgtctgaatcctgaacacaggcaccaggactactgagagctcgtcatctgtgcaggatagccacacagcaaacatgtttgcaaaactgaagaagaaaattgcagaagagactgct

SEQ ID NO: 332885 - DNA, 120 bp, Artificial Sequence
  ENSG00000136935_3 (sequence is synthesized)
gttgctcagaggccaggaggtgctactaggatcccacggtctgtgagcaaggaatcagttgcctcaatgggagctgactcaggagatgactttgcttccgatggaagcagctccagagaa

SEQ ID NO: 332886 - DNA, 120 bp, Artificial Sequence
  ENSG00000136935_4 (sequence is synthesized)
gatctttcatcccagcttctgagaaggaatgaacagatacggaagttagaggccagactttctgactatgctgaacaggtccgaaacttgcagaagataaaagagaagcttgaaattgca

SEQ ID NO: 332887 - DNA, 120 bp, Artificial Sequence
  ENSG00000136935_5 (sequence is synthesized)
ttagaaaaacaccaggattcttccatgcggaaatttcaagagcagaatgagacattccaagccaacagagccaaaatggcagaaggactggctttggcattagccagaaaggaccaggaa

SEQ ID NO: 332888 - DNA, 120 bp, Artificial Sequence
  ENSG00000136935_6 (sequence is synthesized)
tggtcagaaaagatggatcagcttgaaaaggagaaaaatattctgacagcccagttacaggaaatgaagaaccagagtatgaatcttttccaaaggagagatgaaatggatgaattagag

SEQ ID NO: 332889 - DNA, 120 bp, Artificial Sequence
  ENSG00000136935_7 (sequence is synthesized)
gggttccagcagcaggaactaagtaaaataaagcacatgcttttaaaaaaagaagaaagtctagggaaaatggaacaagaattggaggcacgaaccagagaacttagtcgtacccaggag

SEQ ID NO: 332890 - DNA, 120 bp, Artificial Sequence
  ENSG00000136935_8 (sequence is synthesized)
gagttgatgaactccaatcagatgtcatcagacttaagccagaagctagaagaattgcagagacactactcaacgctggaagagcagagagatcatgtgatagcttcaaaaacaggtgca

SEQ ID NO: 332891 - DNA, 120 bp, Artificial Sequence
  ENSG00000136935_9 (sequence is synthesized)
gaaagtaagatcacagccctggaacaaaaggaacaagagctccaagcactcattcagcagctttccattgatttgcaaaaggtcactgctgaaactcaagagaaagaagacgttatcaca

SEQ ID NO: 332892 - DNA, 120 bp, Artificial Sequence
  ENSG00000136935_10 (sequence is synthesized)
catttgcaagagaaggttgcatccttggagaagagactagaacagaacttatcaggagaagaacacttgcaagaactcctgaaagagaaaacacttgctgagcagaatttggaggatacc

SEQ ID NO: 332893 - DNA, 120 bp, Artificial Sequence
  ENSG00000136935_11 (sequence is synthesized)
agacaacagctcttggcagccagaagcagccaggctaaggccattaacaccctggagactcgggtgagagaactggagcagaccttgcaggcctctgaggagcagctccaacagagcaag

SEQ ID NO: 332894 - DNA, 120 bp, Artificial Sequence
  ENSG00000136935_12 (sequence is synthesized)
ggcattgtggctgcccaggaaactcagatacaggagctcgctgccgccaaccaggagagcagccatgtgcagcagcaggcccttgctctggagcagcagttcttggagcgcacccaggcg

SEQ ID NO: 332895 - DNA, 120 bp, Artificial Sequence
  ENSG00000136935_13 (sequence is synthesized)
ctagaagcccagatagtggccctggagagaacgcgggcagctgaccagaccaccgcagagcaagggatgagacaactggagcaagaaaatgcagcccttaaagaatgcaggaatgaatat

SEQ ID NO: 332896 - DNA, 120 bp, Artificial Sequence
  ENSG00000136935_14 (sequence is synthesized)
gaacgttctttacaaaatcaccaatttgaactaaagaagctgaaggaagaatggagccaaagagaaattgtgagcgtggccatggctcaagccctggaggaggtgcggaagcaaagggaa

SEQ ID NO: 332897 - DNA, 120 bp, Artificial Sequence
  ENSG00000136935_15 (sequence is synthesized)
gagttccagcaacaggcagctaacctgacagccataatagacgagaaggaacagaatctgcgggaaaaaaccgaagtgcttctccagaaagagcaggagattctccagctggagcgaggt

SEQ ID NO: 332898 - DNA, 120 bp, Artificial Sequence
  ENSG00000136935_16 (sequence is synthesized)
cacaactctgccctgctgcagatacaccagctgcaggccgagctggaggccctgaggaccctcaaggcggaggaggctgcagtggtcgcggagcaggaggacctgctgaggctgcggggc

SEQ ID NO: 332899 - DNA, 120 bp, Artificial Sequence
  ENSG00000136935_17 (sequence is synthesized)
ccattgcaggccgaagcactctcagtcaatgagtcgcacgtgacctcgagggccatgcaggaccctgtgttccagcttccaactgcaggaagaacaccaaatggtgaggttggggccatg

SEQ ID NO: 332900 - DNA, 120 bp, Artificial Sequence
  ENSG00000136935_18 (sequence is synthesized)
gatctcacacagctacagaaggagaaacaggacttggagcagcaacttctggagaaaaataagaccataaagcagatgcagcagcggatgctggagctccggaagactctgcagaaggag

SEQ ID NO: 332901 - DNA, 120 bp, Artificial Sequence
  ENSG00000136935_19 (sequence is synthesized)
ctgaaaatcagacccgataatgagctcttcgaagtccgggagaaacctggacctgagatggcaaacatggcgccttccgtcacgaataacactgacctgacagatgcccgcgagatcaac

SEQ ID NO: 332902 - DNA, 120 bp, Artificial Sequence
  ENSG00000136935_20 (sequence is synthesized)
gtcagtgttgctgaacttttcccaagaggaggagaacatgctcaaggaaactctggaatataagatgtcatggtttgggtccaaaccagctcccaagggcagcatccggccgtctatctc

SEQ ID NO: 332903 - DNA, 120 bp, Artificial Sequence
  ENSG00000136935_21 (sequence is synthesized)
aaaccctcggataccatggtcctagaggggactacccaaggatggagctccgtgggttgacactttttctgtgaaaagaacactgacacaccagtctgggtgggtttttaatcactgtaa

SEQ ID NO: 332904 - DNA, 120 bp, Artificial Sequence
  ENSG00000136935_22 (sequence is synthesized)
ctgcagtattttgtacaagtgtctaaacattgtttacaagactaaggcccacttccctgcaggctgacctgaacctcagggggtagctgatcctgtcattctggtcaccaaacaggaggg

SEQ ID NO: 332905 - DNA, 120 bp, Artificial Sequence
  ENSG00000136935_23 (sequence is synthesized)
tcctggcactacccagatttccacagtgctgctaatatcccagctccagccagcaccccatctgcacctgaatcctctaacttcacggtagcacttacagctgaagccatcagcatctgg

SEQ ID NO: 332906 - DNA, 120 bp, Artificial Sequence
  ENSG00000136935_24 (sequence is synthesized)
caggcacacctgagtcaccatgtagcgctgctactggaggtagagacggccctttgagatggtgcccagcaggccaaacccacctgcctctgccaggaacagccaactccatgggaactc

SEQ ID NO: 332907 - DNA, 120 bp, Artificial Sequence
  ENSG00000136935_25 (sequence is synthesized)
tatgggagtggcttttaaaaattcagatgagttagaagctttttatcccttcctctcaagaaaatattctttcaccctgtctctcaaaccacctagaactttagaggatccatctttaag

SEQ ID NO: 332908 - DNA, 120 bp, Artificial Sequence
  ENSG00000136935_26 (sequence is synthesized)
ggtcggtgtggatgaatgagaaaatgcacctttctgacagtatctccactttacttaagaaaactagcaaatatatgaaaagacccttagtaccaaatacactcaattgcctttttaatg

SEQ ID NO: 332909 - DNA, 120 bp, Artificial Sequence
  ENSG00000136935_27 (sequence is synthesized)
aatgtacttgtcttggataggttgctggtaaaccattttaaactattttttatagctgaagttcttcactactataaacatgtcttctgtactataaaatccatttaactggtgttctta

SEQ ID NO: 332910 - DNA, 120 bp, Artificial Sequence
  ENSG00000136935_28 (sequence is synthesized)
aaatcagagcgtccagaggaaattcttcctaaaactaggattcctgttcctttgtcttctcactcgcactctggcactgctccctctgaagtgcagtgggatctcgtgtgctttgtcttg

SEQ ID NO: 332911 - DNA, 120 bp, Artificial Sequence
  ENSG00000136935_29 (sequence is synthesized)
attctgtgctgcgctgccgctgggcgatgcagaccacctgtcttctactgaaggacagtccgctgtctccagtgggggcagcagctgtcccccagcctcgatggagacactggggcagtc

SEQ ID NO: 332912 - DNA, 120 bp, Artificial Sequence
  ENSG00000136935_30 (sequence is synthesized)
tgccttgtctgtggagctgctctctctccctcatcccaccccaaatacttaaaatgacactacacccagacggcgcccagctggctgcagcacttgtagcatgcacatgactctggtagt

SEQ ID NO: 332913 - DNA, 120 bp, Artificial Sequence
  ENSG00000136935_31 (sequence is synthesized)
aaccaacaaaaacttgttttatggattcctcgtttactgaggaaagggaacatgctggttctggaaaagccacaatattgaatctaaaaggaaaccgtttattgtttgatgaaagtttca

SEQ ID NO: 332914 - DNA, 120 bp, Artificial Sequence
  ENSG00000136935_32 (sequence is synthesized)
ctggttaaataaaaaactaaattaataactggagcctctaaatttattatccattatccagtgatggaaagttgtatttctcaatcatgcttagggccaaaataggtatataaaatgtgt

SEQ ID NO: 332915 - DNA, 120 bp, Artificial Sequence
  ENSG00000136935_33 (sequence is synthesized)
cacagaaaaacacgcatttgcaacgttaacctaacgaaatttccatgaagaaccaagtcagggcagcatctccttagtcccagctcaggctctctgccttccagaggccgcttctccagt

SEQ ID NO: 332916 - DNA, 120 bp, Artificial Sequence
  ENSG00000136935_34 (sequence is synthesized)
gactaacctcctcctctggctcctccttgcagacagttatcccttgtttagaacacgaatttccatttacctggtgggaacacgaaacaggagtctcttctgttctgcaagtttgatggg

SEQ ID NO: 332917 - DNA, 120 bp, Artificial Sequence
  ENSG00000136935_35 (sequence is synthesized)
taagaggtagccttttttcaaagtaggatttcctttttcaactgttccaggaaagaatctctaagactgggtagctcacagccagccaaaggcagctacatttccacagaagcccatccg

SEQ ID NO: 332918 - DNA, 120 bp, Artificial Sequence
  ENSG00000136935_36 (sequence is synthesized)
ctgcctccgtggcttctccagccattgaactggtcccacacgcaccccaggccccactcctcggcagtttcaggtgtagctgtggggcccgttcctaggtctgtactcactttagggagg

SEQ ID NO: 332919 - DNA, 120 bp, Artificial Sequence
  ENSG00000136935_37 (sequence is synthesized)
cttcactgactaggctttcctcctgcatgttgaatttccttcagctttaagaggaagagtggaataaatattctaagtgatttaatgcactttgacttgtataaaactttctgtgttagc

SEQ ID NO: 332920 - DNA, 120 bp, Artificial Sequence
  ENSG00000136935_38 (sequence is synthesized)
gacggtatctatagccctttatacgagcgatggatcttgagctctccttccatgttgtaaatagggattgtattcttgaaaactgctgtagcaaattcatctgtggtgcaatacactttt

SEQ ID NO: 332921 - DNA, 120 bp, Artificial Sequence
  ENSG00000136935_39 (sequence is synthesized)
tgattaaagctcttcaatccagatgcaactacaatggattttactagtttggtgtgtcagtatttctttgactcattaaatctggtattttgtgtctcatatttaacactccaaggccaa

SEQ ID NO: 332922 - DNA, 120 bp, Artificial Sequence
  ENSG00000136935_40 (sequence is synthesized)
tgagaagcagtttggacccagctgaaaaattttatttatggagacttgtaatcagcctgatatacagagaacactctggactggaaatatagtcagatcctgtgttgccataagcccttg

SEQ ID NO: 332923 - DNA, 120 bp, Artificial Sequence
  ENSG00000136935_41 (sequence is synthesized)
ataattagggatttgtattttggcacaaaacagtatcaaatttttattgtaaaaatccacaaatctgacattttatcttttattctagccaggatgtattcttcatttgcatgtgtgtgt

SEQ ID NO: 332924 - DNA, 120 bp, Artificial Sequence
  ENSG00000136935_42 (sequence is synthesized)
ttctcttagaaagtggtgctctcaaacctttcaaagcacagaatttattgtaccctctttatttttaccaaattgaaacgtttcaggatttcagaagcaaagtgcaatccaattgtggct

SEQ ID NO: 332925 - DNA, 120 bp, Artificial Sequence
  ENSG00000136935_43 (sequence is synthesized)
ggagttttcctgatagaggatccgggtggttccctcccctccaacttctggctactgccctttatttcctttgtgcaatagaattccctgaaacagattatgtcgtaattatactgattt

SEQ ID NO: 332926 - DNA, 120 bp, Artificial Sequence
  ENSG00000136935_44 (sequence is synthesized)
attatggagctttctttagcactctcctccaagtttaatctctgacatgtgtgatatagtaactttctgtctctgagaagcagtttggacccagctgaaaaattttatttatggagactt

SEQ ID NO: 332927 - DNA, 120 bp, Artificial Sequence
  ENSG00000136935_45 (sequence is synthesized)
gtaatcagcctgatatacagagaacactctggactggaaatatagtcaggtaccaaggtctgctaatttggccattgccagtgattcaaaaccacctccccaccctgagtaaaagatttg

SEQ ID NO: 332928 - DNA, 120 bp, Artificial Sequence
  ENSG00000136935_46 (sequence is synthesized)
atatgaatatgaatgctatgagtctcctggtgatgttttgggtgtatatgttcctgtgtgtgtttggaaatcatagagggtatttaccttgagggctcttttgttgaccttatttatttg

SEQ ID NO: 332929 - DNA, 120 bp, Artificial Sequence
  ENSG00000136935_47 (sequence is synthesized)
aaattcttattttatttgtaatggcatatgtatatttttgtgatgctacatgcaatctctgtgtatactttttgtatatatgtatacatatttgtaaatatattggtatgcagtgataca

SEQ ID NO: 332930 - DNA, 120 bp, Artificial Sequence
  ENSG00000136935_48 (sequence is synthesized)
aactcattccgaacttcggcaacggtacctggacctgcccatagatacagttcttgtgctggatgtgagcaggccagcagcagggggtggagggagtcaggacctaatggtgggcctgag

SEQ ID NO: 332931 - DNA, 120 bp, Artificial Sequence
  ENSG00000136935_49 (sequence is synthesized)
ttacctgggaggtgcaccagcagctcctttccaccttacatcccaccttctggtccagcctggtcctggggctgtcagaggtggcagctccgctaggagtcaagcctcaacttgcaatca

SEQ ID NO: 332932 - DNA, 120 bp, Artificial Sequence
  ENSG00000136936_0 (sequence is synthesized)
ggctcgcctcggcgtgcagtgcgcgtgcgtggagctgggagctaggtcctcggagtgggccagagatggcggcggccgacggggctttgccggaggcggcggctttagagcaacccgcgg

SEQ ID NO: 332933 - DNA, 120 bp, Artificial Sequence
  ENSG00000136936_1 (sequence is synthesized)
agctgcctgcctcggtgcgggcgagtatcgagcggaagcggcagcgggcactgatgctgcgccaggcccggctggctgcccggccctactcggcgacggcggctgcggctactggaggca

SEQ ID NO: 332934 - DNA, 120 bp, Artificial Sequence
  ENSG00000136936_2 (sequence is synthesized)
tggctaatgtaaaagcagccccaaagataattgacacaggaggaggcttcattttagaagaggaagaagaagaagaacagaaaattggaaaagttgttcatcaaccaggacctgttatgg

SEQ ID NO: 332935 - DNA, 120 bp, Artificial Sequence
  ENSG00000136936_3 (sequence is synthesized)
aatttgattatgtaatatgcgaagaatgtgggaaagaatttatggattcttatcttatgaaccactttgatttgccaacttgtgataactgcagagatgctgatgataaacacaagctta

SEQ ID NO: 332936 - DNA, 120 bp, Artificial Sequence
  ENSG00000136936_4 (sequence is synthesized)
taaccaaaacagaggcaaaacaagaatatcttctgaaagactgtgatttagaaaaaagagagccacctcttaaatttattgtgaagaagaatccacatcattcacaatggggtgatatga

SEQ ID NO: 332937 - DNA, 120 bp, Artificial Sequence
  ENSG00000136936_5 (sequence is synthesized)
agaaaaaatgaaacagaagaaatttgataaaaaagtaaaagaattgcggcgagcagtaagaagcagcgtgtggaaaagggagacgattgttcatcaacatgagtatggaccagaagaaaa

SEQ ID NO: 332938 - DNA, 120 bp, Artificial Sequence
  ENSG00000136936_6 (sequence is synthesized)
cctagaagatgacatgtaccgtaagacttgtactatgtgtggccatgaactgacatatgaaaaaatgtgattttttagttcagtgacctgttttatagaattttatatttaaataaagga

SEQ ID NO: 332939 - DNA, 120 bp, Artificial Sequence
  ENSG00000136936_7 (sequence is synthesized)
aatttagattggtccttttcaaaattcaaaaaaaaaagcaacatcttcatagatgaatgaaacccttgtataagtaatacttcagtaataattatgtatgttatggcttaaaagcaagtt

SEQ ID NO: 332940 - DNA, 120 bp, Artificial Sequence
  ENSG00000136936_8 (sequence is synthesized)
tcagtgaaggtcacctggcctggttgtgtgcacaatgtcatgtctgtgattgccttcttacaacagagatgggagctgagtgctagagtaggtgcagaagtggtaggtcagctacaaatt

SEQ ID NO: 332941 - DNA, 120 bp, Artificial Sequence
  ENSG00000136936_9 (sequence is synthesized)
tgaggacaagataccaaggcaaaccctagattggggtagagggaaaagggttcaacaaaggctgaactggattcttaaccaagaaacaaataatagcaatggtggtgcaccactgtaccc

SEQ ID NO: 332942 - DNA, 120 bp, Artificial Sequence
  ENSG00000136936_10 (sequence is synthesized)
caggttctagtcatgtgttttttaggacgatttctgtctccacgatggtggaaacagtggggaactactgctggaaaaagccctaatagcagaaataaacattgagttgtacgagtctga

SEQ ID NO: 332943 - DNA, 120 bp, Artificial Sequence
  ENSG00000136936_11 (sequence is synthesized)
agaagaagcaaaggaagtccgacaggaaaaccgagaaaaaatgaaacagaagaaatttgataaaaaagtaaaagaggttgttcccgccttcctgaataggccacaaagggctgagactgg

SEQ ID NO: 332944 - DNA, 120 bp, Artificial Sequence
  ENSG00000136936_12 (sequence is synthesized)
caaggagcttactgtgcagttttctcagaaggctcagaacagagaggaataaaagcaagtctaaaagtattttagttgaaaagaaattggaacctggttcctcttggtcttctgattttg

SEQ ID NO: 332945 - DNA, 120 bp, Artificial Sequence
  ENSG00000136936_13 (sequence is synthesized)
gagatggcggcggccgacggggctttgccggaggcggcggctttagagcaacccgcggagctgcctgcctcggcatggctaatgtaaaagcagccccaaagataattgacacaggaggag

SEQ ID NO: 332946 - DNA, 120 bp, Artificial Sequence
  ENSG00000136936_14 (sequence is synthesized)
ctccttttcctactgtggcattctgttatctgaagtcaaacgtacctgaatgtgtcctattgtgttactcaactcacttctgaatatggttctgttttgcataccaccaacccacataac

SEQ ID NO: 332947 - DNA, 120 bp, Artificial Sequence
  ENSG00000136937_0 (sequence is synthesized)
agacagttcctgcagcgcttaccgcctggcctctcggttccgcggcgcaccggagggcagcatgtcgcggcggcggcacagcgacgagaacgacggtgggcagcctcacaaaaggagaaa

SEQ ID NO: 332948 - DNA, 120 bp, Artificial Sequence
  ENSG00000136937_1 (sequence is synthesized)
gacctctgatgcaaatgaaactgaagatcatttggaatctttaatatgtaaagtaggagaaaagagtgcctgctctttggagagcaacctagaaggcttggctggtgttttggaagctga

SEQ ID NO: 332949 - DNA, 120 bp, Artificial Sequence
  ENSG00000136937_2 (sequence is synthesized)
tcttcctaactacaagagcaagatcttaaggcttctttgtacagttgcacgcctattacctgagaagctgacaatttatacaacattagttggactactgaatgccaggaattacaattt

SEQ ID NO: 332950 - DNA, 120 bp, Artificial Sequence
  ENSG00000136937_3 (sequence is synthesized)
tggtggagaatttgtagaagccatgattcgtcaacttaaagaatcattgaaagcaaacaattataatgaagccgtgtatttggtccgttttttatctgatcttgtgaattgtcatgtgat

SEQ ID NO: 332951 - DNA, 120 bp, Artificial Sequence
  ENSG00000136937_4 (sequence is synthesized)
tgccgccccatcaatggttgctatgtttgaaaattttgtaagcgtaactcaggaagaagatgtacctcaggtgcgacgagattggtatgtgtatgcatttctgtcatctttgccctgggt

SEQ ID NO: 332952 - DNA, 120 bp, Artificial Sequence
  ENSG00000136937_5 (sequence is synthesized)
tggaaaggagttgtacgaaaagaaagatgcagagatggaccgcatctttgccaacactgaaagctatcttaaaagacgccaaaagactcatgtacccatgttacaggtatggactgctga

SEQ ID NO: 332953 - DNA, 120 bp, Artificial Sequence
  ENSG00000136937_6 (sequence is synthesized)
taaaccacatccacaagaagagtatttagattgcctgtgggcccagattcagaaattgaaaaaggatcgctggcaggaacggcacatcctaagaccttatcttgcctttgacagcatcct

SEQ ID NO: 332954 - DNA, 120 bp, Artificial Sequence
  ENSG00000136937_7 (sequence is synthesized)
gtgtgaagcactgcagcacaatctgcctccttttacaccacctcctcacactgaagattcagtgtacccaatgccaagggtcatcttcagaatgtttgattacacagatgatcccgaggg

SEQ ID NO: 332955 - DNA, 120 bp, Artificial Sequence
  ENSG00000136937_8 (sequence is synthesized)
tcctgtcatgccagggagtcattcagtggaaagatttgtaatagaagagaatcttcactgcatcattaagtcccactggaaggaaaggaagacttgtgctgcacagttagtgagctatcc

SEQ ID NO: 332956 - DNA, 120 bp, Artificial Sequence
  ENSG00000136937_9 (sequence is synthesized)
agggaagaacaagatccccttgaactaccacatagttgaggtgatctttgcagagctgtttcaacttccagcaccccctcacattgatgtgatgtacacaacactcctcattgaactgtg

SEQ ID NO: 332957 - DNA, 120 bp, Artificial Sequence
  ENSG00000136937_10 (sequence is synthesized)
caaacttcaacctggctctctaccccaagttcttgcacaggcaactgaaatgctatacatgcgtttggacacaatgaacactacctgtgtagacaggtttattaattggttttctcatca

SEQ ID NO: 332958 - DNA, 120 bp, Artificial Sequence
  ENSG00000136937_11 (sequence is synthesized)
tctaagtaacttccagttccgttggagctgggaagattggtcagattgtcttagtcaagatcctgaaagtcccaaaccgaagtttgtaagagaagttctagaaaaatgtatgaggttgtc

SEQ ID NO: 332959 - DNA, 120 bp, Artificial Sequence
  ENSG00000136937_12 (sequence is synthesized)
ttaccatcagcgtatattagatattgttcctcctaccttctcagctctgtgtcctgcaaacccaacctgcatttacaagtatggagatgaaagtagcaattctcttcctggacattctgt

SEQ ID NO: 332960 - DNA, 120 bp, Artificial Sequence
  ENSG00000136937_13 (sequence is synthesized)
tgccctctgtttagctgttgcctttaaaagtaaggcaaccaatgatgaaatcttcagcattctgaaagatgtaccaaatcctaaccaggatgatgacgacgatgaaggattcagttttaa

SEQ ID NO: 332961 - DNA, 120 bp, Artificial Sequence
  ENSG00000136937_14 (sequence is synthesized)
cccattgaaaatagaagtctttgtacagactctgctacacttggcagccaaatcattcagccactccttcagtgctcttgcaaagtttcatgaagtcttcaaaaccctagctgaaagtga

SEQ ID NO: 332962 - DNA, 120 bp, Artificial Sequence
  ENSG00000136937_15 (sequence is synthesized)
tgaaggaaagttacatgtgctaagagttatgtttgaggtctggaggaaccatccacagatgattgctgtactagtggataagatgattcgtacacaaatagttgattgtgctgccgtagc

SEQ ID NO: 332963 - DNA, 120 bp, Artificial Sequence
  ENSG00000136937_16 (sequence is synthesized)
aaattggatcttctcttcagaactatctcgtgactttaccagattgtttgtttgggaaattttgcactctacaattcgtaagatgaacaaacatgtcctgaagatccagaaagagctgga

SEQ ID NO: 332964 - DNA, 120 bp, Artificial Sequence
  ENSG00000136937_17 (sequence is synthesized)
agaagctaaagagaaacttgctaggcaacacaaacggcgaagtgatgatgacgacagaagcagtgacaggaaagacggggttcttgaggaacaaatagaacgacttcaggaaaaagtgga

SEQ ID NO: 332965 - DNA, 120 bp, Artificial Sequence
  ENSG00000136937_18 (sequence is synthesized)
atctgctcagagtgaacaaaagaatcttttcctcgttatatttcagcggtttatcatgatcttgaccgagcacctagtacgatgcgaaactgatgggaccagtgtattaacaccatggta

SEQ ID NO: 332966 - DNA, 120 bp, Artificial Sequence
  ENSG00000136937_19 (sequence is synthesized)
taagaactgtatagagaggctgcagcagatcttcctacagcatcaccaaataatccagcagtacatggtgaccctggagaaccttctcttcactgctgaattagaccctcatatcttggc

SEQ ID NO: 332967 - DNA, 120 bp, Artificial Sequence
  ENSG00000136937_20 (sequence is synthesized)
ttttgatatcttaaaataatttgtcttattttttgatggtttgaatgcttgctttcttgtagtatcctttcacttcttaaaggaaacaaaggggaagaggacagtgaatgaacatggcat

SEQ ID NO: 332968 - DNA, 120 bp, Artificial Sequence
  ENSG00000136937_21 (sequence is synthesized)
tacttttaattgccctgaaaagcaaatacttcctaacggcagtaatgtgactatgaccatgatatattatatatgtgacagatacaaattctctgtgatcagtttgttattttttttctc

SEQ ID NO: 332969 - DNA, 120 bp, Artificial Sequence
  ENSG00000136937_22 (sequence is synthesized)
cttaaggcacaaaataattggtttgaggtatgtgaaacactagaggtcaaccttacatagtatatagaactgatgggtttacccagctacccagtagcataacttttcacagctcgggga

SEQ ID NO: 332970 - DNA, 120 bp, Artificial Sequence
  ENSG00000136937_23 (sequence is synthesized)
tgaattaacatggctgaaataaaactaaaagtatggtttttaaactttggcatttcatgatttatcatctcactctactctaaaactggtggtttcttactgaaggtgttctccatttga

SEQ ID NO: 332971 - DNA, 120 bp, Artificial Sequence
  ENSG00000136937_24 (sequence is synthesized)
aattttatcttcaaagtatttttaagtagtatctttaagacatgacttgttagtaataaaagtgttactagttggaagagtagctctcaaatttgtcttaatgtaaatcacctgggaatc

SEQ ID NO: 332972 - DNA, 120 bp, Artificial Sequence
  ENSG00000136937_25 (sequence is synthesized)
tttcaagttattttgaaatttaaaccaccgtctgggggtggaacgcagacatcctcagtaatccttaaagtttccccaggtgattccaggtttggtcaccattatcttagagcatctact

SEQ ID NO: 332973 - DNA, 120 bp, Artificial Sequence
  ENSG00000136937_26 (sequence is synthesized)
cacttcctctagccttggggttatttgtccaaggtcttgtagtgagttacagaatactaaagtggatgtagaagtggtcagattgactgaaactataccctgaattagatgtgagtttag

SEQ ID NO: 332974 - DNA, 120 bp, Artificial Sequence
  ENSG00000136937_27 (sequence is synthesized)
attttgtttatatggaacctgatccaaaaaactacgaagtcctgagcttgtttcctgtatagtactgatgctgaaataagatgacagcagtttgtaaaataatacacaaatatgaggaat

SEQ ID NO: 332975 - DNA, 120 bp, Artificial Sequence
  ENSG00000136937_28 (sequence is synthesized)
tgtctgacattccaaatttcgaggatttttagacttttttcattaaaccttagaaaaaaattaccagtaatcctacaactactggtagtgttgttgtgcatttgcacaaaataggtataa

SEQ ID NO: 332976 - DNA, 120 bp, Artificial Sequence
  ENSG00000136937_29 (sequence is synthesized)
ttttttcttattacatcccaagtttatgatgcattaagcgttttgcatattttgatatatttttgctttggtttaccatacattttagtggctacagaatgtagtctgcttaataaatgg

SEQ ID NO: 332977 - DNA, 120 bp, Artificial Sequence
  ENSG00000136937_30 (sequence is synthesized)
gaattcctagaatgtttaaataccatactatttaagacaaaatacaaaatatccagaaaaatccaggttgcgtggctggttagtaaaggactaaaacccaggttcttggctaaatgtttt

SEQ ID NO: 332978 - DNA, 120 bp, Artificial Sequence
  ENSG00000136937_31 (sequence is synthesized)
cgtttatactgtttatctttcccattgcttaagcacagcacaaactatgtaattatatataattacagttgacccttgaacaacatgggtttgaactgtgtgagtctccttacacacagg

SEQ ID NO: 332979 - DNA, 120 bp, Artificial Sequence
  ENSG00000136937_32 (sequence is synthesized)
gaactgtgtgagtctccttacacacaggttttcttccacccctgagatggcaagaccagccccttgtcttcctcagcctgctcaacgtgaagatgatgaggatgaagacctttatgatga

SEQ ID NO: 332980 - DNA, 120 bp, Artificial Sequence
  ENSG00000136937_33 (sequence is synthesized)
cctttatgatgatccacttctacttattaaatagtaaatatatttttttcttatgattttattttcttttctctagcttcataagaatatagcatatgggctgggcgcagtggctcacgc

SEQ ID NO: 332981 - DNA, 120 bp, Artificial Sequence
  ENSG00000136937_34 (sequence is synthesized)
gcatataacatacaaaatgagtttatcaactgtttgttattggtaagtcagcagtgggctattggtggttaagttttgggggagtcaaaagttacatgcaaattttttactgtgcggggt

SEQ ID NO: 332982 - DNA, 120 bp, Artificial Sequence
  ENSG00000136937_35 (sequence is synthesized)
gtcagcatccctaaccccatgttgttcaagggtcaactgtagtttaaaatgactcctgtctcaaaaaaccaaaggataacctttaagggattggtaactttgactcaaaactgctttgta

SEQ ID NO: 332983 - DNA, 120 bp, Artificial Sequence
  ENSG00000136937_36 (sequence is synthesized)
atcttttcacaatgtactgaaaagtgtggctagttatgtttgatccacattctagagaaatttgtaggttttaatttcttttctcttggtcctctcttcatgtataatggttgcttttaa

SEQ ID NO: 332984 - DNA, 120 bp, Artificial Sequence
  ENSG00000136937_37 (sequence is synthesized)
cagctgttcgctgatgtggtcctgctctgtcccagtctagcagctttagtgtatggaaaaattgaactaggaattgagttttgaagaaataaaggtgtaagagcaaacattcaacagttg

SEQ ID NO: 332985 - DNA, 120 bp, Artificial Sequence
  ENSG00000136937_38 (sequence is synthesized)
ctgtccccagtaatgaagttcatacagacaaaagatggcatgtcactgtacatcataccttgcaataaatattctgttaaattgtgctggtgcaatttaacatgcttttgtcaaagtaaa

SEQ ID NO: 332986 - DNA, 120 bp, Artificial Sequence
  ENSG00000136937_39 (sequence is synthesized)
ttcgtagcccactgagcttcctcacgccggctgtcgcagcgcctagccccacccggcggcctctcctgcgcttccggggccgtggcgagctagtgcgcctgcgtgccggcccatccgcgc

SEQ ID NO: 332987 - DNA, 120 bp, Artificial Sequence
  ENSG00000136937_40 (sequence is synthesized)
aagatcttaaggcttctttgtacagtgtccgttttttatctgatcttgtgaattgtcatgtgattgccgccccatcaatggttgctatgtttgaaaattttgtaagcgtaactcaggaag

SEQ ID NO: 332988 - DNA, 120 bp, Artificial Sequence
  ENSG00000136937_41 (sequence is synthesized)
aacttcgattaggtaataacactattctcagccacaaagatttttcattaaaaaaaatccttgtcaaatttgttaggaggttatatagtacctgttagaccctttagttcatgtccattt

SEQ ID NO: 332989 - DNA, 120 bp, Artificial Sequence
  ENSG00000136937_42 (sequence is synthesized)
gctgctaccattgctcatcagaatatttaggcttaaactgattctgtaccacttagattcctaattgccacccccccaacaaccccccgccccaccttttttttgagatggcatctcact

SEQ ID NO: 332990 - DNA, 75 bp, Artificial Sequence
  ENSG00000136937_43 (sequence is synthesized)
ctgttgcccaggctggagttaagcaattcttctgcctcagcctcccatattgctgggattacaggcacccgtcac

SEQ ID NO: 332991 - DNA, 120 bp, Artificial Sequence
  ENSG00000136938_0 (sequence is synthesized)
cttttccctccatggtttctctccgctcccgtgagtaacttggctccgggggctccgctcgcctgcccgcacgccgcccgccacccaggaccgcgccgccggcctccgccgctagcaaac

SEQ ID NO: 332992 - DNA, 120 bp, Artificial Sequence
  ENSG00000136938_1 (sequence is synthesized)
ccttccgacggccctcgctgcgcaagccgggacgcctctcccccctccgcccccgccgcggaaagttaagtttgaagaggggggaagaggggaacatggacatgaagaggaggatccacc

SEQ ID NO: 332993 - DNA, 120 bp, Artificial Sequence
  ENSG00000136938_2 (sequence is synthesized)
tggagctgaggaaccggaccccggcagctgttcgagaacttgtcttggacaattgcaaatcaaatgatggaaaaattgagggcttaacagctgaatttgtgaacttagagttcctcagtt

SEQ ID NO: 332994 - DNA, 120 bp, Artificial Sequence
  ENSG00000136938_3 (sequence is synthesized)
taataaatgtaggcttgatctcagtttcaaatctccccaagctgcctaaattgaaaaagcttgaactcagtgaaaatagaatctttggaggtctggacatgttagctgaaaaacttccaa

SEQ ID NO: 332995 - DNA, 120 bp, Artificial Sequence
  ENSG00000136938_4 (sequence is synthesized)
atctcacacatctaaacttaagtggaaataaactgaaagatatcagcaccttggaacctttgaaaaagttagaatgtctgaaaagcctggacctctttaactgtgaggttaccaacctga

SEQ ID NO: 332996 - DNA, 120 bp, Artificial Sequence
  ENSG00000136938_5 (sequence is synthesized)
atgactaccgagagagtgtcttcaagctcctgccccagcttacctacttggatggctatgaccgagaggaccaggaagcacctgactcagatgccgaggtggatggtgtggatgaagagg

SEQ ID NO: 332997 - DNA, 120 bp, Artificial Sequence
  ENSG00000136938_6 (sequence is synthesized)
ggatggtgaagaagaggagtttgatgaagaagatgatgaagatgaagatgtagaaggggatgaggacgacgatgaagtcagtgaggaggaagaagaatttggacttgatgaagaagatga

SEQ ID NO: 332998 - DNA, 120 bp, Artificial Sequence
  ENSG00000136938_7 (sequence is synthesized)
agatgaggatgaggatgaagaggaggaagaaggtgggaaaggtgaaaagaggaagagagaaacagatgatgaaggagaagatgattaagaccccagatgacctgcagaaacagaactgtt

SEQ ID NO: 332999 - DNA, 120 bp, Artificial Sequence
  ENSG00000136938_8 (sequence is synthesized)
cagtattggttggactgctcatggattttgtagctgtttaaaaaaaaaaaaaaggtagctgtgatacaaaccccaggacacccacccacccaaagagccaaagaatagttcctgtgacat

SEQ ID NO: 333000 - DNA, 120 bp, Artificial Sequence
  ENSG00000136938_9 (sequence is synthesized)
tccgccttccttccatgtagtccctcttggtaatctaccaccaagcttgtggacttcaccccaacaaaattgtaagcgttgttaggtttttgtgtaagattcttgctgtagcgtggatag

SEQ ID NO: 333001 - DNA, 120 bp, Artificial Sequence
  ENSG00000136938_10 (sequence is synthesized)
ctgtgattggtgagtcaaccgtctgtggctaccagttacactgagattgtaacagcatttttactttctgtacaacaaaaaagctttgtaaataaaatcttaacattttgggtctgtttt

SEQ ID NO: 333002 - DNA, 120 bp, Artificial Sequence
  ENSG00000136938_11 (sequence is synthesized)
ttcatgctttgctttttaattattattattattttttttacattaggacattttatgtgacaactgccaaaaaagtatttttaagaatttaagcgaaataaacagttactctttggtaaa

SEQ ID NO: 333003 - DNA, 120 bp, Artificial Sequence
  ENSG00000136938_12 (sequence is synthesized)
tgcccgtctccctgcgcctggtgagccggcccacgagcttggccttgcccgcccgccctcggcgctggctggcggccgcctcttcccgcgccgagccctcggttcgagaacttgtcttgg

SEQ ID NO: 333004 - DNA, 120 bp, Artificial Sequence
  ENSG00000136938_13 (sequence is synthesized)
acttaagtggaaataaactgaaagatatcagcaccttggaacctttgggacattaatcgagagacaaagaaggcatcaattcaaacttccttggacaccttttttaagagacctgggcca

SEQ ID NO: 333005 - DNA, 120 bp, Artificial Sequence
  ENSG00000136938_14 (sequence is synthesized)
tccaaaccatcccccaaagcccttctaaattctaagaaggagttgtggtttttgatccttttcttcagaaaaagttagaatgtctgaaaagcctggacctctttaactgtgaggttacca

SEQ ID NO: 333006 - DNA, 120 bp, Artificial Sequence
  ENSG00000136938_15 (sequence is synthesized)
tgagtaggctcagcatctggtgaacctgatgtctgcctttcaaagcctctgataaaagctattggatgttggccgggcgcagtggcacacaaccgtaatcccagcactttgggtggccga

SEQ ID NO: 333007 - DNA, 120 bp, Artificial Sequence
  ENSG00000136939_0 (sequence is synthesized)
atggagacaaagaattatagcagcagcacctcaggcttcatcctcctgggcctctcttccaaccctaagctgcagaaacctctctttgccatcttcctcatcatgtacctactcactgcg

SEQ ID NO: 333008 - DNA, 120 bp, Artificial Sequence
  ENSG00000136939_1 (sequence is synthesized)
gtggggaatgtgctcatcatcctggccatctactctgaccccaggctccacacccctatgtacttttttctcagcaacttgtctttcatggatatctgcttcacaacagtcatagtgcct

SEQ ID NO: 333009 - DNA, 120 bp, Artificial Sequence
  ENSG00000136939_2 (sequence is synthesized)
aagatgctggtgaattttctatcagagacaaagattatctcttatgtgggctgcctgatccagatgtacttcttcatggcatttgggaacactgacagctacctgctggcctctatggcc

SEQ ID NO: 333010 - DNA, 120 bp, Artificial Sequence
  ENSG00000136939_3 (sequence is synthesized)
tcccacctacattccctgttccgcgtgctacttatgtctcgcttgtctttctgtgcctctcacatcattaagcactttttctgtgacacccagcctgtgctaaagctctcctgctctgac

SEQ ID NO: 333011 - DNA, 120 bp, Artificial Sequence
  ENSG00000136939_4 (sequence is synthesized)
acatcctccagccagatggtggtgatgactgagaccttagctgtcattgtgacccccttcctgtgtaccatcttctcctacctgcaaatcatcgtcactgtgctcagaatcccctctgca

SEQ ID NO: 333012 - DNA, 120 bp, Artificial Sequence
  ENSG00000136939_5 (sequence is synthesized)
gccgggaagtggaaggccttctctacctgtggctcccacctcactgtagtggtcctgttctatgggagtgtcatctatgtctattttaggcctctgtccatgtactcagtgatgaagggc

SEQ ID NO: 333013 - DNA, 120 bp, Artificial Sequence
  ENSG00000136939_6 (sequence is synthesized)
cgggtagccacagttatgtacacagtagtgacacccatgctgaaccctttcatctacagcctgaggaacaaagatatgaaaaggggtttgaagaaattaagacacagaatttactcatag

SEQ ID NO: 333014 - DNA, 120 bp, Artificial Sequence
  ENSG00000136940_0 (sequence is synthesized)
ggcttttctctttagcgctcagggcgctgacccactgctcttcctcttaagaaagtgctccattccttccggcgcccggagctgctggcccaaagggatccggagcgagctagggcagac

SEQ ID NO: 333015 - DNA, 120 bp, Artificial Sequence
  ENSG00000136940_1 (sequence is synthesized)
accatgaccacccttgatgataagttgctgggggagaaactgcagtactactatagcagcagtgaggatgaggacagtgaccacgaggacaaggaccgaggcagatgtgccccagccagc

SEQ ID NO: 333016 - DNA, 120 bp, Artificial Sequence
  ENSG00000136940_2 (sequence is synthesized)
agttctgtgcctgcagaggctgagctggcaggcgaaggcatctcagttaacacaggcccaaaaggtgtgatcaatgactggcgccgcttcaagcagttggagacagagcagagggaggag

SEQ ID NO: 333017 - DNA, 120 bp, Artificial Sequence
  ENSG00000136940_3 (sequence is synthesized)
cagtgccgggagatggaaaggctgatcaagaagctgtcaatgacttgcaggtcccatctggatgaagaggaggagcaacagaaacagaaagacctccaggagaagatcagtgggaagatg

SEQ ID NO: 333018 - DNA, 120 bp, Artificial Sequence
  ENSG00000136940_4 (sequence is synthesized)
actctgaaggagtttgccataatgaatgaggaccaagatgatgaagagtttctgcagcagtaccggaagcagcgaatggaagagatgcggcagcagcttcacaaggggccccaattcaag

SEQ ID NO: 333019 - DNA, 120 bp, Artificial Sequence
  ENSG00000136940_5 (sequence is synthesized)
caggtttttgagatctccagtggagaagggtttttagacatgattgataaagaacagaaaagcattgtcatcatggttcatatttatgaggatggcattccagggaccgaagccatgaat

SEQ ID NO: 333020 - DNA, 120 bp, Artificial Sequence
  ENSG00000136940_6 (sequence is synthesized)
ggttgcatgatctgccttgccgcagagtacccagctgtcaagttctgcaaggtgaagagctcagttattggcgccagcagtcagttcaccaggaatgcccttcctgccctgctgatctat

SEQ ID NO: 333021 - DNA, 120 bp, Artificial Sequence
  ENSG00000136940_7 (sequence is synthesized)
aaggggggtgaattgatcggcaattttgttcgtgttactgaccagctgggggatgatttctttgctgtggaccttgaagcttttctccaggaatttggattactcccagaaaaggaagtc

SEQ ID NO: 333022 - DNA, 120 bp, Artificial Sequence
  ENSG00000136940_8 (sequence is synthesized)
ttggtgctgacatctgtgcgtaactctgccacgtgtcacagtgaggatagcgacctggaaatagattgaactgatagtctagttgcatagatttctcattgtttgggttggaatacacgt

SEQ ID NO: 333023 - DNA, 120 bp, Artificial Sequence
  ENSG00000136940_9 (sequence is synthesized)
cattgtttatttttgttcctttgtcttctggcttttcagctgttctttgtagtcccttttattatgcataaaataaagaaattcttagattaaatcagaatgctgaataaccttgtagct

SEQ ID NO: 333024 - DNA, 120 bp, Artificial Sequence
  ENSG00000136940_10 (sequence is synthesized)
agcaataaggtgacttacagttgtataaacaggaagccaggcttttgaactgtttacttaagattctgtggtgtgacatctctgttattgtttccagtcaatatttacaaagcatcctaa

SEQ ID NO: 333025 - DNA, 120 bp, Artificial Sequence
  ENSG00000136940_11 (sequence is synthesized)
agacagggtcttggaaattgtcttcagatgatcttagaggtctctgccaagtctgagagtataattctgtaggtattgtgttatttgcaacgtaaatagtgcattttcttaatcaaatga

SEQ ID NO: 333026 - DNA, 120 bp, Artificial Sequence
  ENSG00000136940_12 (sequence is synthesized)
ttgtaatcagttccatagctttagacggtggttagattttttttttccccaccagggtcttgtttaaaggggtgagccaccgcacccagtcctgaggggtggcctctgctgctggatttc

SEQ ID NO: 333027 - DNA, 120 bp, Artificial Sequence
  ENSG00000136940_13 (sequence is synthesized)
atgtcttcctccagcatgactaagtctggaacagcaggaagggttgatgcttactgacctggtgatgttagaagacaagtagtttatggatttaaacattagagctggagtggggctgga

SEQ ID NO: 333028 - DNA, 120 bp, Artificial Sequence
  ENSG00000136940_14 (sequence is synthesized)
aatctttgtaaaggaagttctttcagtaagatgcccctgcttgtctttgtctcttttttgtttaacaaggtaactttttgtttaacaaggtaactttttgtttaacctagatttttttta

SEQ ID NO: 333029 - DNA, 120 bp, Artificial Sequence
  ENSG00000136940_15 (sequence is synthesized)
aaactttttttttttttcatattggaaaagtaattcatattcagtagaggaaaactgaccaaaacagaagcaaaaataagaaaattaaaataatctctaatcctactacctagaataaaa

SEQ ID NO: 333030 - DNA, 120 bp, Artificial Sequence
  ENSG00000136940_16 (sequence is synthesized)
cactattaatattttggtctgtttcctgccaaggtgttttctgtgtatacatggatattttgtttgtttttaaacaaaacgatgggatcattctgaacatactgttctatagtatggtca

SEQ ID NO: 333031 - DNA, 120 bp, Artificial Sequence
  ENSG00000136940_17 (sequence is synthesized)
gtcagctaataatatatcagacctttttttatattattaaatattctacaactttttaaaaatgtctattaatattccatcgtatagatgtgatataatttgcttgatggttgtctctta

SEQ ID NO: 333032 - DNA, 120 bp, Artificial Sequence
  ENSG00000136940_18 (sequence is synthesized)
gaaagatagcaaatactttttttaaattacaaaagtgatagatgttcattgtagaaaatgtaataaacactgttaagacttaaaagccatataattccaccaaccaaaattaatcccttt

SEQ ID NO: 333033 - DNA, 120 bp, Artificial Sequence
  ENSG00000136940_19 (sequence is synthesized)
tgtcatatttctagtcatttttatagcctttttttctatgtatttataataattatcatttgcgtttttttcctttttttaactttaaaaatgtatattctagggtcaggggaaatgtaa

SEQ ID NO: 333034 - DNA, 120 bp, Artificial Sequence
  ENSG00000136940_20 (sequence is synthesized)
tctggaattaaatattagccttaaaattcacaattttgattttcctggcttttcaggaattgactaactgtaaaagagtcttgaaagtatttagtcaacaaacagagtgcattttttttt

SEQ ID NO: 333035 - DNA, 120 bp, Artificial Sequence
  ENSG00000136940_21 (sequence is synthesized)
tttttgactaagaaagctcgttgtagtagaaagggtggaatgtattgaaaattattagaagcagggaagtattgttagtctagcttatttcctttcagtcttttttcaatatttttataa

SEQ ID NO: 333036 - DNA, 120 bp, Artificial Sequence
  ENSG00000136940_22 (sequence is synthesized)
acattgagtacttactgaatttagttctgtgctcttccttatttagtgttgtatcataaatactttgatgtttcaaacattctaaataaataattttcagtggcttcataatatttcatc

SEQ ID NO: 333037 - DNA, 120 bp, Artificial Sequence
  ENSG00000136940_23 (sequence is synthesized)
aataattttcagtggcttcataatatttcatcatttggatatataataatttatttaaccagtctctttatttttatttatttattttgtttgttttctttgagatggagtctcgctctg

SEQ ID NO: 333038 - DNA, 74 bp, Artificial Sequence
  ENSG00000136940_24 (sequence is synthesized)
ttaactgttatcacgagtgttcagttttcatatttatgctcacttgctggtccgcctgcagatgactctgaagg

SEQ ID NO: 333039 - DNA, 120 bp, Artificial Sequence
  ENSG00000136940_25 (sequence is synthesized)
tatgctcacttgctggtccgcctgcagatgactctgaaggagtttgccataatgaatgaggaccaagatgatgaagagtttctgcagcagtaccggaagcagcgaatggaagagatgcgg

SEQ ID NO: 333040 - DNA, 120 bp, Artificial Sequence
  ENSG00000136940_26 (sequence is synthesized)
gaagtaactgagaggaattttagggcacaggtttgctgaagactgtgctgaaaccacctttacagggaaatgatcttttaatttatttccacatctttctctattaaaaaaaaatcaatg

SEQ ID NO: 333041 - DNA, 120 bp, Artificial Sequence
  ENSG00000136942_0 (sequence is synthesized)
ctctttccctcggagcgggcggcggcgttggcggcttgtgcagcaatggccaagatcaaggctcgagatcttcgcgggaagaagaaggaggagctgctgaaacagctggacgacctgaag

SEQ ID NO: 333042 - DNA, 120 bp, Artificial Sequence
  ENSG00000136942_1 (sequence is synthesized)
tgttctcacagttattaaccagactcagaaagaaaacctcaggaaattctacaagggcaagaagtacaagcccctggacctgcggcctaagaagacacgtgccatgcgccgccggctcaa

SEQ ID NO: 333043 - DNA, 120 bp, Artificial Sequence
  ENSG00000136942_2 (sequence is synthesized)
caagcacgaggagaacctgaagaccaagaagcagcagcggaaggagcggctgtacccgctgcggaagtacgcggtcaaggcctgaggggcgcattgtcaataaagcacagctggctgaga

SEQ ID NO: 333044 - DNA, 120 bp, Artificial Sequence
  ENSG00000136942_3 (sequence is synthesized)
gcggcgttggcggcttgtgcagcaatggtgagagctgcggaatcgggcgccatccgagcgctgtgaggcgcgggggttggggaaggcggtgcgggctgagcccgcggattctatctgcca

SEQ ID NO: 333045 - DNA, 120 bp, Artificial Sequence
  ENSG00000136942_4 (sequence is synthesized)
cctaggcctgtggggcgccgcgcagaatggtctggcgccaccacaacccgcctcttcgcttggcgccgggagaggcgcgcggcccgggcctgggttactctgcccaaggcacggccggcg

SEQ ID NO: 333046 - DNA, 120 bp, Artificial Sequence
  ENSG00000136942_5 (sequence is synthesized)
agggagactgtcctgagccctggttggggctccggcgcactcgtagtcgatggcgagtcgcgcgcctttgggggctggccacgcaggtgaaggggatatggccccgcggcctggctgagg

SEQ ID NO: 333047 - DNA, 120 bp, Artificial Sequence
  ENSG00000136942_6 (sequence is synthesized)
cttaaggagctggccgcttagatgcccactccgtgcatcctggcgcgcatgggagacccgttgtgtgcttagcctcttacctgccttgaccttgcggtccttgtgcctggaatgcatccc

SEQ ID NO: 333048 - DNA, 120 bp, Artificial Sequence
  ENSG00000136942_7 (sequence is synthesized)
cggagacccatcttaatgctgccttcaaagcctacccggaccccttccttccgcttcccaccaacacttgagtttttaacccccttggcaggtgggtggcttgcaccctggagtggcagc

SEQ ID NO: 333049 - DNA, 120 bp, Artificial Sequence
  ENSG00000136942_8 (sequence is synthesized)
gtaagttattttacatggctaagagtgcgggagacttgtgaaaggaacatgggtttggagttcatcaacctgggtacaaagtccacttctcaaaaaaaaattagatgggtgtggtggtac

SEQ ID NO: 333050 - DNA, 120 bp, Artificial Sequence
  ENSG00000136942_9 (sequence is synthesized)
ctcacagttattaaccagactcagaaagaaaacctcaggaaattctacaaggcagcagctggtgggccctgcatacagatggacagagtactgcctcagcccccagcatgctcttgctaa

SEQ ID NO: 333051 - DNA, 120 bp, Artificial Sequence
  ENSG00000136942_10 (sequence is synthesized)
taactacccccggggcttggtgggtgctgcgtgccctgtactaggttgtcatgtgactgtcctcgtgactgggaatcgggcagtggaaggagcactgagttgggagtcacttgactgaga

SEQ ID NO: 333052 - DNA, 120 bp, Artificial Sequence
  ENSG00000136943_0 (sequence is synthesized)
accagaccgcggacgtctgtaatctcagaggcttgtttgctgagggtgcctgcgcagctgcgacggctgctggttttgaaacatgaatctttcgctcgtcctggctgccttttgcttggg

SEQ ID NO: 333053 - DNA, 120 bp, Artificial Sequence
  ENSG00000136943_1 (sequence is synthesized)
aatagcctccgctgttccaaaatttgaccaaaatttggatacaaagtggtaccagtggaaggcaacacacagaagattatatggcgcgaatgaagaaggatggaggagagcagtgtggga

SEQ ID NO: 333054 - DNA, 120 bp, Artificial Sequence
  ENSG00000136943_2 (sequence is synthesized)
aaagaatatgaaaatgattgaactgcacaatggggaatacagccaagggaaacatggcttcacaatggccatgaatgcttttggtgacatgaccaatgaagaattcaggcagatgatggg

SEQ ID NO: 333055 - DNA, 120 bp, Artificial Sequence
  ENSG00000136943_3 (sequence is synthesized)
ttgctttcgaaaccagaaattcaggaaggggaaagtgttccgtgagcctctgtttcttgatcttcccaaatctgtggattggagaaagaaaggctacgtgacgccagtgaagaatcagaa

SEQ ID NO: 333056 - DNA, 120 bp, Artificial Sequence
  ENSG00000136943_4 (sequence is synthesized)
acagtgtggttcttgttgggcttttagtgcgactggtgctcttgaaggacagatgttccggaaaactgggaaacttgtctcactgagcgagcagaatctggtggactgttcgcgtcctca

SEQ ID NO: 333057 - DNA, 120 bp, Artificial Sequence
  ENSG00000136943_5 (sequence is synthesized)
aggcaatcagggctgcaatggtggcttcatggctagggccttccagtatgtcaaggagaacggaggcctggactctgaggaatcctatccatatgtagcagtggatgaaatctgtaagta

SEQ ID NO: 333058 - DNA, 120 bp, Artificial Sequence
  ENSG00000136943_6 (sequence is synthesized)
cagacctgagaattctgttgctaatgacactggcttcacagtggtcgcacctggaaaggagaaggccctgatgaaagcagtcgcaactgtggggcccatctccgttgctatggatgcagg

SEQ ID NO: 333059 - DNA, 120 bp, Artificial Sequence
  ENSG00000136943_7 (sequence is synthesized)
ccattcgtccttccagttctacaaatcaggcatttattttgaaccagactgcagcagcaaaaacctggatcatggtgttctggtggttggctacggctttgaaggagcaaattcgaataa

SEQ ID NO: 333060 - DNA, 120 bp, Artificial Sequence
  ENSG00000136943_8 (sequence is synthesized)
cagcaagtattggctcgtcaaaaacagctggggtccagaatggggctcgaatggctatgtaaaaatagccaaagacaagaacaaccactgtggaatcgccacagcagccagctaccccaa

SEQ ID NO: 333061 - DNA, 120 bp, Artificial Sequence
  ENSG00000136943_9 (sequence is synthesized)
tgtgtgagctgatggatggtgaggaggaaggacttaaggacagcatgtctggggaaattttatcttgaaactgaccaaacgcttattgtgtaagataaaccagttgaatcattgaggatc

SEQ ID NO: 333062 - DNA, 120 bp, Artificial Sequence
  ENSG00000136943_10 (sequence is synthesized)
caagttgagattttaattctgtgacatttttacaagggtaaaatgttaccactactttaattattgttatacacagctttatgatatcaaagactcattgcttaattctaagacttttga

SEQ ID NO: 333063 - DNA, 120 bp, Artificial Sequence
  ENSG00000136943_11 (sequence is synthesized)
attttcattttttaaaaagatgtacaaaacagtttgaaataaattttaattcgtatataaaggtgggcctttttttaatgcattggctttttgtgtagtcaggaaatataattaagctct

SEQ ID NO: 333064 - DNA, 120 bp, Artificial Sequence
  ENSG00000136943_12 (sequence is synthesized)
gaaataataacttcatgtgccaatggtatgttaggagaaagatgctagcagaaagctggcttcctggctcttgagtagttataaaaatacagactttatatcagctgcccagttactgtg

SEQ ID NO: 333065 - DNA, 120 bp, Artificial Sequence
  ENSG00000136943_13 (sequence is synthesized)
tgtgtgttacccaactcctgaatctaccaaaatttgataaacaatttggaaggacaaacctacattttttttttttatgagacggagtctctctcactctgtcaccaaggctggagtgca

SEQ ID NO: 333066 - DNA, 120 bp, Artificial Sequence
  ENSG00000136943_14 (sequence is synthesized)
ttagtaaagaagaaagcagttgactttttagaaaaggaaatgtcttcttcctttgacacataacctcaagatggttaggttacgtgataaaaagtgaagctgcttgttactggagcctct

SEQ ID NO: 333067 - DNA, 120 bp, Artificial Sequence
  ENSG00000136943_15 (sequence is synthesized)
ctgaattgctggtgaccactttgcagtctgaggaagacgcaggtgcaagtaagttaccaagggtattttgttttcattccaagtctctgatgacatattccacctagctcttctagaaaa

SEQ ID NO: 333068 - DNA, 120 bp, Artificial Sequence
  ENSG00000136943_16 (sequence is synthesized)
ggttaacaaatctcaggcatttgacagtagctggagaaatttgttcaaggtccacaagagatgaggctgggctacaaaaagaggcctctggccgaagatggataagagatcacaagtgaa

SEQ ID NO: 333069 - DNA, 120 bp, Artificial Sequence
  ENSG00000136943_17 (sequence is synthesized)
aggtcagaagtcactaggccagactctggctacctaatccctgaattaaaaataaactcaaaatggggggaaaaaggctaagcatatagttacacaggtagtaaatacaaataaaacgat

SEQ ID NO: 333070 - DNA, 120 bp, Artificial Sequence
  ENSG00000136943_18 (sequence is synthesized)
atttttgcatatttaaaatactggaagaaagtacaccaaacttgtgggtgaattatgggtggttatttaactcgtttagtgaaaagcatgtatttttatgagcaggagaaaatagtaaag

SEQ ID NO: 333071 - DNA, 120 bp, Artificial Sequence
  ENSG00000136943_19 (sequence is synthesized)
atatacccacattctgcaggctaaaggagagccctgtgtgtgttttaaaagcccatgtttccagtcaaataaaaaattaccggggatgagctggtgaaatttaatcgaaaggtgatccat

SEQ ID NO: 333072 - DNA, 120 bp, Artificial Sequence
  ENSG00000136943_20 (sequence is synthesized)
tgtgaatgcaatgggagggaaggggcatgtgggactgtgtatcccaaaaaccctttgatagcctatgtccacagccatctctggaaaatccagtctaccatattcagtcttgagttttct

SEQ ID NO: 333073 - DNA, 120 bp, Artificial Sequence
  ENSG00000136943_21 (sequence is synthesized)
ctgagaaaggattccttcgtctttgcagcagcaggctaagttggtactctccacagattcttggaacaacaacccaggctctaaggaaacatctaggcactaaattgaatgaaagagtga

SEQ ID NO: 333074 - DNA, 120 bp, Artificial Sequence
  ENSG00000136943_22 (sequence is synthesized)
tggctttttattcaaataaaaaaatttcaaatctgtcaaaacagcacccctcggaaaactaaaatagagatatttcaagattttataattttcaaagacctttgaaatattttaaacttg

SEQ ID NO: 333075 - DNA, 120 bp, Artificial Sequence
  ENSG00000136943_23 (sequence is synthesized)
tgaaaagttacaaacctgatgtgttgtctaaaagcgtttttcaaacaagccagtagacttgaaaaatctagtctgaagcacagacttaaccaatatttgctggggatatgcccccaaatc

SEQ ID NO: 333076 - DNA, 120 bp, Artificial Sequence
  ENSG00000136943_24 (sequence is synthesized)
tggccataaacaaaatctctgcagtactgtgacaggttcatgatggccatgacgccatgctgaaggtttaccggaatgagagcaaggaacacctggaccacccagggcgggaaaacggct

SEQ ID NO: 333077 - DNA, 85 bp, Artificial Sequence
  ENSG00000136943_25 (sequence is synthesized)
tgctgtcaataaacaagctgtgagtcccctgatttcccactctgcatgctatatttctgggtgtgtgtctttaatttctctagcg

SEQ ID NO: 333078 - DNA, 120 bp, Artificial Sequence
  ENSG00000136943_26 (sequence is synthesized)
atgctatatttctgggtgtgtgtctttaatttctctagcgcctctgggttagggtctccatgaccaagctggtctcggcaaatatttcctatactcgaacatctaaattgtttgttttct

SEQ ID NO: 333079 - DNA, 120 bp, Artificial Sequence
  ENSG00000136943_27 (sequence is synthesized)
tacttgaattgcaaaggaagtaaggaagggtgagatagaaatcactgagcatattaagagggaggagtttgctgatgtgggagtgtagttatgacacttgggcatcatactagaggctat

SEQ ID NO: 333080 - DNA, 120 bp, Artificial Sequence
  ENSG00000136943_28 (sequence is synthesized)
ggacttagcaataaggaaacatccactcagccctatgtgtggttcatgtgtatgttttgcctatgaaagttgaaactgttttctaaatgttatttccttttgtaactgataaaatttcta

SEQ ID NO: 333081 - DNA, 120 bp, Artificial Sequence
  ENSG00000136943_29 (sequence is synthesized)
aaaagcaaagaagaaacttttctgtattaaaaataacaaacattagtaaatgtatatatacagtcatgtgttgcttaatgatggggatacattctgagaaatgtgtcttgggtgatttca

SEQ ID NO: 333082 - DNA, 120 bp, Artificial Sequence
  ENSG00000136943_30 (sequence is synthesized)
tcgtgacgtgaacatcatagagtacactgacacaaacctagatggtatagcctattacacacctaggctatatggtacagcctgttgctcctaagctacgcacctgtgcaacacatcact

SEQ ID NO: 333083 - DNA, 120 bp, Artificial Sequence
  ENSG00000136943_31 (sequence is synthesized)
gtgctgagtactgtacacagttgtaacacagtggtaagtattcgtgtatctgaacagaaaagtacagtaaaaatataggatcataattttatgggaccactatcatatatgcagtcactg

SEQ ID NO: 333084 - DNA, 120 bp, Artificial Sequence
  ENSG00000136943_32 (sequence is synthesized)
accaaaacatcacacagcacatgacttgtgtgtatggatatctcaattgtaaacaatttcacaaatgttcattatctctttttaagtaagttaataagtaaaactattactaagctgcaa

SEQ ID NO: 333085 - DNA, 120 bp, Artificial Sequence
  ENSG00000136943_33 (sequence is synthesized)
accagaccgcggacgtctgtaatctcagaggcttgtttgctgagggtgcctgcgcagctgcgacggctgctgtgtctcctggaaagggattcccgaaaggttttattccaaaaggagagg

SEQ ID NO: 333086 - DNA, 120 bp, Artificial Sequence
  ENSG00000136943_34 (sequence is synthesized)
ttggaagacatagctcatctcctgctgtgtatcagccaagaaggtgtgaggtggtgttccttggggatccgcttgcatctacttgggatggttttgaaacatgaatctttcgctcgtcct

SEQ ID NO: 333087 - DNA, 120 bp, Artificial Sequence
  ENSG00000136944_0 (sequence is synthesized)
gcgtcccatggatatagcaacaggtcccgagtcgctggagaggtgcttccctcgcgggcagacggactgcgccaagatgttggacggcatcaagatggaggagcacgccctgcgccccgg

SEQ ID NO: 333088 - DNA, 120 bp, Artificial Sequence
  ENSG00000136944_1 (sequence is synthesized)
gcccgccactctgggggtgctgctgggctccgactgcccgcatcccgccgtctgcgagggctgccagcggcccatctccgaccgcttcctgatgcgagtcaacgagtcgtcctggcacga

SEQ ID NO: 333089 - DNA, 120 bp, Artificial Sequence
  ENSG00000136944_2 (sequence is synthesized)
ggagtgtttgcagtgcgcggcgtgtcagcaagccctcaccaccagctgctacttccgggatcggaaactgtactgcaaacaagactaccaacagctcttcgcggccaagtgcagcggctg

SEQ ID NO: 333090 - DNA, 120 bp, Artificial Sequence
  ENSG00000136944_3 (sequence is synthesized)
catggagaagatcgcccccaccgagttcgtgatgcgggcgctggagtgcgtgtaccacctgggctgcttctgctgctgcgtgtgtgaacggcagctacgcaagggcgacgaattcgtgct

SEQ ID NO: 333091 - DNA, 120 bp, Artificial Sequence
  ENSG00000136944_4 (sequence is synthesized)
aagccggccaaggggcagggcagtcagagcaagggcagcggggatgacgggaaggacccgcggaggcccaagcgaccccggaccatcctcaccacgcagcagcgaagagccttcaaggcc

SEQ ID NO: 333092 - DNA, 120 bp, Artificial Sequence
  ENSG00000136944_5 (sequence is synthesized)
tccttcgaggtctcgtcgaagccttgccgaaaggtccgagagacactggcagctgagacgggcctcagtgtgcgcgtggtccaggtctggtttcagaaccaaagagcaaagatgaagaag

SEQ ID NO: 333093 - DNA, 120 bp, Artificial Sequence
  ENSG00000136944_6 (sequence is synthesized)
ctggcgcggcggcaccagcagcagcaggagcagcagaactcccagcggctgggccaggaggtcctgtccagccgcatggagggcatgatggcttcctacacgccgctggccccaccacag

SEQ ID NO: 333094 - DNA, 120 bp, Artificial Sequence
  ENSG00000136944_7 (sequence is synthesized)
cagcagatcgtggccatggaacagagcccctacggcagcagcgaccccttccagcagggcctcacgccgccccaaatgccagggaacgactccatcttccatgacatcgacagcgatacc

SEQ ID NO: 333095 - DNA, 120 bp, Artificial Sequence
  ENSG00000136944_8 (sequence is synthesized)
tccttaaccagcctcagcgactgcttcctcggctcctcagacgtgggctccctgcaggcccgcgtggggaaccccatcgaccggctctactccatgcagagttcctacttcgcctcctga

SEQ ID NO: 333096 - DNA, 120 bp, Artificial Sequence
  ENSG00000136944_9 (sequence is synthesized)
cagccatacggtgccctcccctcggccagctgggcctgaccactgtgcccgttgggtacagccagaccggtagatgggcacagcctgggcaggggctgtgtcctgcccacagagaccttg

SEQ ID NO: 333097 - DNA, 120 bp, Artificial Sequence
  ENSG00000136944_10 (sequence is synthesized)
tcatccccagggacccagagctctcggacggccactcgcctcccagccccacctcggcctccatcgcctcctccccatctcttttttgggaagcttaaattctctctatttttttaaatg

SEQ ID NO: 333098 - DNA, 120 bp, Artificial Sequence
  ENSG00000136944_11 (sequence is synthesized)
tcctctctgtgtccatggccctccatgcaagccccaggacaatggtgtcatgaggcggtgacctgagaagcgtgtgtacctgtgccccagcaagggcaggggtggcctctgggggcaggc

SEQ ID NO: 333099 - DNA, 120 bp, Artificial Sequence
  ENSG00000136944_12 (sequence is synthesized)
ccactgcctggaaccgcacacccctcagcctgagtctggagcagcagtggagaggggcctgaggggaggcactgtcaggaggcgggctcggagcctgagcctgggcaggcgcaaagggac

SEQ ID NO: 333100 - DNA, 120 bp, Artificial Sequence
  ENSG00000136944_13 (sequence is synthesized)
agagaggcacgtgcagacacatgcacacttgcagacaaacccacgcaaacacacacacagctgtatggggacaccagaagggacagggatgctcagcgggtctgtcctgccttgtcagaa

SEQ ID NO: 333101 - DNA, 120 bp, Artificial Sequence
  ENSG00000136944_14 (sequence is synthesized)
agagaaaaggaggccaggcaggggaccccccagttcttaagagcgattggaaagggaggaaggggagaggaagaggcgaacttgaagcatcggacccagttgtatcccagcctgggccca

SEQ ID NO: 333102 - DNA, 120 bp, Artificial Sequence
  ENSG00000136944_15 (sequence is synthesized)
aatgggggcagcctgggcagggagggcagccccaggccccaccaactctagaggcagatggagcccccagaaccaggtagcatcagaccagacaacagagcctccaggggtcagggactt

SEQ ID NO: 333103 - DNA, 120 bp, Artificial Sequence
  ENSG00000136944_16 (sequence is synthesized)
cagaagcacctgctgggcaccccatctgcaatgtggtcctctccccagccacctctgcctcccctcacatacctccagtgacaaggagctcactaggtcagcgagcccacagcagctgtg

SEQ ID NO: 333104 - DNA, 120 bp, Artificial Sequence
  ENSG00000136944_17 (sequence is synthesized)
ctgtcctgcatcccagagccaggcttccccagctctccctcttaacactgtcccccagcaggcctccggctgtccctctaaaggtgtggggcaggtatcacttcaccttcccactgatgt

SEQ ID NO: 333105 - DNA, 120 bp, Artificial Sequence
  ENSG00000136944_18 (sequence is synthesized)
cagccggccagaagtgagcaggcacatcacctctcctgctgtggcacccttcctctgttaatttggcccaaaagacaatgatttggccacatgaccttagagattcaccctgccctgctg

SEQ ID NO: 333106 - DNA, 120 bp, Artificial Sequence
  ENSG00000136944_19 (sequence is synthesized)
cctgccctgctgtagctaaatccctgggccccacacgcaagtgacagctaagccacatctgttttctgtgtatatgcaggatgggggcacctactgttttgttttgttttgttttgtttt

SEQ ID NO: 333107 - DNA, 120 bp, Artificial Sequence
  ENSG00000136944_20 (sequence is synthesized)
gcgtgagccaccgcacccagtctgcacttactgtttagactgaatgagggaccgtgacctctttccttttccattccttcttactcgattcattccagcctgtggaatttctctgcaccc

SEQ ID NO: 333108 - DNA, 120 bp, Artificial Sequence
  ENSG00000136944_21 (sequence is synthesized)
tgattcagtgaccactgctctcctctctcccagcacatctgcccagtgaggagttggccctgggtctcacctgaggtgtgtggaccgggctggcctctccctgtttgacattggcccatt

SEQ ID NO: 333109 - DNA, 120 bp, Artificial Sequence
  ENSG00000136944_22 (sequence is synthesized)
aatgcatcctctttgggggacacattccaattgcatttcctgcccccttctcccagggcaattgcagaagattgtgtcaggcgccctgctggaagtcaggtgcactagatccatccccag

SEQ ID NO: 333110 - DNA, 120 bp, Artificial Sequence
  ENSG00000136944_23 (sequence is synthesized)
ccccagtctgctcaactctatccctgtcagagcaaggaggctgggctgctggggcctgactggtgagcccaccctgtcccctggtgatcactgtgtccccttgttcaggtgctcacaacc

SEQ ID NO: 333111 - DNA, 120 bp, Artificial Sequence
  ENSG00000136944_24 (sequence is synthesized)
ctacctttaactctgaggtcaagccctaggccaccaccctaaagtctgcctggtccaacctttgagcaagtaaggataatgaatgtcccttttccacctttggggccctctgcctggatc

SEQ ID NO: 333112 - DNA, 120 bp, Artificial Sequence
  ENSG00000136944_25 (sequence is synthesized)
tctggaatcctctaagttcaacctgttctgtggttttgctcccgtttgctgggaaattcagtccccccagaatgtcctgggccaacctccttgcctgacatgtggcctcgtgtcacccat

SEQ ID NO: 333113 - DNA, 120 bp, Artificial Sequence
  ENSG00000136944_26 (sequence is synthesized)
tgggccccagcagccagctagcccttctgcagctcttcttacaaacagagcctctccaaggacctcagttgatgttctggtccttctgccgcctcagcccaccagggtccgtgccaccat

SEQ ID NO: 333114 - DNA, 120 bp, Artificial Sequence
  ENSG00000136944_27 (sequence is synthesized)
gggtctcttgagcagcagctgcactggcttctggagagacacccctctttctccttttgcacatgcaccatctgaatcgtgccagggacatcctgggcagattcaggggcagatgcccta

SEQ ID NO: 333115 - DNA, 120 bp, Artificial Sequence
  ENSG00000136944_28 (sequence is synthesized)
tcccccaggagacctggcccttctctctcagacccaataagttggaagggacgtcagaagcggtcatctcatctgccccttattttatagttggaaaccctgaggcaagagagggaaaga

SEQ ID NO: 333116 - DNA, 120 bp, Artificial Sequence
  ENSG00000136944_29 (sequence is synthesized)
ggcctgtccaaggtccgggttagtgacagagctgagctgagaacagggacgttgtgccccactgtcccctgtggtttgtgaatgacctccaggtcagggggtcacaacttgttcttagta

SEQ ID NO: 333117 - DNA, 120 bp, Artificial Sequence
  ENSG00000136944_30 (sequence is synthesized)
aacttgccagctgttggggtcacatattcccattctggggcctcacaaacccccgaatccagccgggaccccatgccaggagctggtctagggacagcatgcttgtgacccacagactgt

SEQ ID NO: 333118 - DNA, 120 bp, Artificial Sequence
  ENSG00000136944_31 (sequence is synthesized)
taaagccagaagggacctcagagagtcccttatgctggaggcgccctgtcagccgtggctaggggccccttgctctatgctgtgccttgctgcccacaggctcccagacaccagtgccca

SEQ ID NO: 333119 - DNA, 120 bp, Artificial Sequence
  ENSG00000136944_32 (sequence is synthesized)
ctctgcccagccccggactgggtgtggctcgcagatgaacaagatgcagggcctgccttgaggggtgtctcctagaaggaaagccagactctccggcccagccagagagtccagacatgg

SEQ ID NO: 333120 - DNA, 120 bp, Artificial Sequence
  ENSG00000136944_33 (sequence is synthesized)
cagggacccgtttctcagatgaggagcctgaggctcagagaagggaggcgatgtgttcagggccacccagcagaagcctgtggggctgggcaaccttctcccactttatgggaggagctg

SEQ ID NO: 333121 - DNA, 120 bp, Artificial Sequence
  ENSG00000136944_34 (sequence is synthesized)
cagccttggctgggagctgggcggggagtagccaggaccaccccttgcccgtgccgtgacatggaaccttcatcactaagggggctggagtgggaagagggagataactgtgtggtctcc

SEQ ID NO: 333122 - DNA, 120 bp, Artificial Sequence
  ENSG00000136944_35 (sequence is synthesized)
agagcaaaagagaatgagaggtgggcagggggagtcttggcaaaagaccaagttccacttccctgctggggaagtcaaggctcagaaagaggaaataattgccccaggtaacacagggca

SEQ ID NO: 333123 - DNA, 120 bp, Artificial Sequence
  ENSG00000136944_36 (sequence is synthesized)
gaggagggacaaaaagctgggcatggccccagccagagcctcatctgcctactccgtgaagcctcccaggtactctgctatcctgggaaacgcacagggaggccacacagagacactgct

SEQ ID NO: 333124 - DNA, 120 bp, Artificial Sequence
  ENSG00000136944_37 (sequence is synthesized)
cacaagagtcagaccaaggtgccagcacagcctggaaagagctcagaaagggggttggtgcacgtggctgggcatcttaggaggcttcctgagggtgggtaaaggtgggaaggccctggc

SEQ ID NO: 333125 - DNA, 120 bp, Artificial Sequence
  ENSG00000136944_38 (sequence is synthesized)
gctgcatcagatgagcagggcctggcagggacaagcctcttctcctttgggaagccctgcagcctcctagcaagaggctgattccccactctgcccccatctgaatgtccttttcatgtt

SEQ ID NO: 333126 - DNA, 120 bp, Artificial Sequence
  ENSG00000136944_39 (sequence is synthesized)
gcacgcagggaacctcaggaaggaggattgcctgatgcctgcctggctccatccttgagctctgggcaccacctagggtgagggagagcctgcagctctggggctaagtctgccctgggg

SEQ ID NO: 333127 - DNA, 120 bp, Artificial Sequence
  ENSG00000136944_40 (sequence is synthesized)
ggaaagggctccacgctcacacgcacgcgctcgcacacacacactcacacctggacgcacacggaggcttgcggacccatactcacaggcacatgtggcctggggactgggggagcagga

SEQ ID NO: 333128 - DNA, 120 bp, Artificial Sequence
  ENSG00000136944_41 (sequence is synthesized)
aagacccctccaacatttggcccttggaaggcaccattgccaatgagcctctttgctggttcccccgaccccacctgggggtcccatgggagcccagcccagccaggtgtggggatgggc

SEQ ID NO: 333129 - DNA, 120 bp, Artificial Sequence
  ENSG00000136944_42 (sequence is synthesized)
caccggccattcctgttttccttgtacagacagattctcactacccacccgccatccccagacacattttatttaataacttgtcattgttaaattatttattagcgtttaccacaccac

SEQ ID NO: 333130 - DNA, 120 bp, Artificial Sequence
  ENSG00000136944_43 (sequence is synthesized)
cacccccaccctgccctccactctcaccttccacctcttcccacaacagcagaaaatggaaacaacaacaaaaaaagatgagacatcagtatatttgtaaataaaccgacctgtacactc

SEQ ID NO: 333131 - DNA, 120 bp, Artificial Sequence
  ENSG00000136944_44 (sequence is synthesized)
gcggcggcaccagcagcagcaggagcagcagaactcccagcggctgggccagggtgagccggggccggggcagggcctgggccaggaggtcctgtccagccgcatggagggcatgatggc

SEQ ID NO: 333132 - DNA, 120 bp, Artificial Sequence
  ENSG00000136950_0 (sequence is synthesized)
gcccccgagcaggagccggtgcgagcggagcagagccgaggtcgggccgcgagcggagccggctgagcgggcgccgagctcccgccatggcccggaacacgctgtcctcgcgcttccgcc

SEQ ID NO: 333133 - DNA, 120 bp, Artificial Sequence
  ENSG00000136950_1 (sequence is synthesized)
gggtggacatcgacgaatttgacgagaacaaatttgtggacgagcaggaggaggcggcggcggcggcggcggagccaggcccggacccgagcgaggtggacgggctcctgcggcaagggg

SEQ ID NO: 333134 - DNA, 120 bp, Artificial Sequence
  ENSG00000136950_2 (sequence is synthesized)
acatgcttcgggcattccatgcagccttgcggaactctcccgtcaacaccaagaatcaagctgtgaaggagcgagcccagggcgtggtgctgaaagtgctcacaaacttcaagagcagtg

SEQ ID NO: 333135 - DNA, 120 bp, Artificial Sequence
  ENSG00000136950_3 (sequence is synthesized)
agattgagcaggctgtgcagtcactggacagaaacggcgttgacttgttaatgaagtacatttataaaggctttgagaagcccacagaaaatagcagcgcagtgttactccagtggcacg

SEQ ID NO: 333136 - DNA, 120 bp, Artificial Sequence
  ENSG00000136950_4 (sequence is synthesized)
aaaaggccttagcagtaggaggactaggctccattataagagttcttacagcaagaaagactgtttaaaaaaaataaaaagactcatgttaccttgagaagaattctggatgcccaggct

SEQ ID NO: 333137 - DNA, 120 bp, Artificial Sequence
  ENSG00000136950_5 (sequence is synthesized)
agaagggattgacaatggaccatcttcctaggaactcccaagtaaactatttcaggacatgtatctgctgaaatgtattttattttcaaggtggaggggaaaatcgtctgtttcctaaat

SEQ ID NO: 333138 - DNA, 120 bp, Artificial Sequence
  ENSG00000136950_6 (sequence is synthesized)
cctgtttaggatctgatagtctatgcctttgtctccgagtactgcagaactgacattttgacggtctaccagcgtggcggctggtgttggtcagatgcacctgtgtgcactgggggaggg

SEQ ID NO: 333139 - DNA, 120 bp, Artificial Sequence
  ENSG00000136950_7 (sequence is synthesized)
atggtttgggcaggtgcagatccaagggctgtggtaaacgggagagcttgtgtttttgaagtggaaaaaaacccaagagtttgtacagacatcctgtcttcccagagaaggtggacactc

SEQ ID NO: 333140 - DNA, 120 bp, Artificial Sequence
  ENSG00000136950_8 (sequence is synthesized)
ttgggctcattgtaaagtgcctgctgcatcaataaagctcttggcttattagtctatacattgcggtgtgtttcgtgtatgtaaaaaaaaatggtaatgaatgggatggtaatgaatgag

SEQ ID NO: 333141 - DNA, 120 bp, Artificial Sequence
  ENSG00000136950_9 (sequence is synthesized)
agttcagttgttgttccggaaacccgatgtggaaggagtagacctgtgtccctgttgagccacccctgggagcgagcatggcaatccacaggccctctgccacaggacgccagcctcggc

SEQ ID NO: 333142 - DNA, 120 bp, Artificial Sequence
  ENSG00000136950_10 (sequence is synthesized)
ctcagagctgccggctgctgcagagaggtgtttgctgaataaactatttattgtttcttattcctttgatttgtatgtaattaattttggagcttatttaattaatttaataaagtgcca

SEQ ID NO: 333143 - DNA, 120 bp, Artificial Sequence
  ENSG00000136950_11 (sequence is synthesized)
attcacggcacccctgatagcgaggtcggcgtcacggtgtaggcgcgcagttggggaaaccgaggcccaacgtgggcggcagctaccagagatggcacacggaggactcaaattcgtcca

SEQ ID NO: 333144 - DNA, 120 bp, Artificial Sequence
  ENSG00000136950_12 (sequence is synthesized)
ttcagtcattcgttcattcattccttcgggaaaccttgcagatctcccaatctgggcaactctgagctgggcgccagtagtctgggggtgctgacgggaggaggggccagagttttcaaa

SEQ ID NO: 333145 - DNA, 120 bp, Artificial Sequence
  ENSG00000136950_13 (sequence is synthesized)
gacgattaaccgaggctcacgtcgcggagccaacctagaagttctctggggacagaaccttggcggacaactgaattaattgttctagtctccaggcccagtacatggatgcttgttgga

SEQ ID NO: 333146 - DNA, 120 bp, Artificial Sequence
  ENSG00000136950_14 (sequence is synthesized)
tgaattaatgaaccttgacccacaccaagattctgagaatttggtttctgtcaagatgtgcctctccagccaggcctctcctgccaggacggtggccacagggccatctccctctcctgg

SEQ ID NO: 333147 - DNA, 120 bp, Artificial Sequence
  ENSG00000136950_15 (sequence is synthesized)
cgcccccaactgcctggccaaggtgactgctacacacgtggggtcgcagaatccctcgagtcacaacgtcttcaacgtcttgtcagtcccgtgatcgcactaaacgtatttaaagccccc

SEQ ID NO: 333148 - DNA, 120 bp, Artificial Sequence
  ENSG00000136950_16 (sequence is synthesized)
tactcctttaagagggtcacctctgtgtacaggcggcctcctcgtactaagtgtggtggcgttcaaggctccgagacacaggcgcctcccgcgccactccccgggcacaggaactcctac

SEQ ID NO: 333149 - DNA, 120 bp, Artificial Sequence
  ENSG00000136950_17 (sequence is synthesized)
tcatccctcagtcatcagctcgaaggtttcttctccaagaagcctgcccggcactcgagaagtagagccgcgagccttctcccgggggcccagccttccccagtaccggcagggatcacc

SEQ ID NO: 333150 - DNA, 120 bp, Artificial Sequence
  ENSG00000136950_18 (sequence is synthesized)
ccgggagcacgcgcccggccccgctgaggccaggggctcctcggaggcgcgggaaagccggggaaccagcgcagttacggcacacacgaggcggggcctgcacagatgccgggcgcccga

SEQ ID NO: 333151 - DNA, 120 bp, Artificial Sequence
  ENSG00000136950_19 (sequence is synthesized)
tcctcagtgacaaaatagagactccgtggaagggacactgaggtgggggaggctgcggtgatcccataccgcactccaggtgccaggctccgccccgcccctgacggcgcttccggatcc

SEQ ID NO: 333152 - DNA, 120 bp, Artificial Sequence
  ENSG00000136950_20 (sequence is synthesized)
tccgtctcaaaaaaaaaaaggagttacaaagtagaggttatcagtggctgatatcaggctggccttgtttggatggggaaaaggaactccagaactgaaagacagagggactggactgcc

SEQ ID NO: 333153 - DNA, 120 bp, Artificial Sequence
  ENSG00000136950_21 (sequence is synthesized)
tcttgagtgtggaaggtggatcagagccaagcagggagctggggaaccagcgctgggagtggcttgcctggtggcgcagacccagctcactcaagatggatctcatactggggaagccag

SEQ ID NO: 333154 - DNA, 120 bp, Artificial Sequence
  ENSG00000136950_22 (sequence is synthesized)
gagattcagctctgctccgaaggcccttcctgtctgcacgtgggtatcactgcatgaagaggagtagagacccgattgggcagaagccattccttgttctatttttgaagctttttggct

SEQ ID NO: 333155 - DNA, 120 bp, Artificial Sequence
  ENSG00000136950_23 (sequence is synthesized)
gaagccagtgtttcatacgaggaaatgaaagttggctgatgtaattcagtttaaaataggtgtcacctttggggacctaacccagattgtaattttcttttgcatgctgggtattcagaa

SEQ ID NO: 333156 - DNA, 120 bp, Artificial Sequence
  ENSG00000136950_24 (sequence is synthesized)
ctcagcaaagaatgtgttgtcaggattgcaactgaggttggggggtaagggtggagactggctcattgttggcaaaagcttctgttagattgataaactctttccaggtaacagttggga

SEQ ID NO: 333157 - DNA, 120 bp, Artificial Sequence
  ENSG00000136950_25 (sequence is synthesized)
cctcattgatcccgatagatcttagaagttctagcacatcttaatttccttaatagtttaattgatgaagagcattgatgaagagttaggaggtctccctttgtacctacattttccgct

SEQ ID NO: 333158 - DNA, 120 bp, Artificial Sequence
  ENSG00000136950_26 (sequence is synthesized)
tttttagaatgagaagatgagaacgacctccagttcacatgtacgggtgctgtgaggatccagtaggggagatacagtgctcagcaccaagcaggtgcaagtgagcacaatccaatttta

SEQ ID NO: 333159 - DNA, 120 bp, Artificial Sequence
  ENSG00000136950_27 (sequence is synthesized)
gcagaggtgccctgcagcctccctgtgcaggctgtaaaccgtctctgcccccctggaagccgtggaaggtgggtggtatggatgagatcccatctgactctgttcctgagctgtttctga

SEQ ID NO: 333160 - DNA, 120 bp, Artificial Sequence
  ENSG00000136960_0 (sequence is synthesized)
cgtgaaggcaaagagaacacgctgcaaaaggctttccaagaatcctcgacatggcaaggaggagctcgttccagtcgtgtcagataatatccctgttcacttttgccgttggagtcaata

SEQ ID NO: 333161 - DNA, 120 bp, Artificial Sequence
  ENSG00000136960_1 (sequence is synthesized)
tctgcttaggattcactgcacatcgaattaagagagcagaaggatgggaggaaggtcctcctacagtgctatcagactccccctggaccaacatctccggatcttgcaagggcaggtgct

SEQ ID NO: 333162 - DNA, 120 bp, Artificial Sequence
  ENSG00000136960_2 (sequence is synthesized)
ttgaacttcaagaggctggacctcctgattgtcgctgtgacaacttgtgtaagagctataccagttgctgccatgactttgatgagctgtgtttgaagacagcccgtggctgggagtgta

SEQ ID NO: 333163 - DNA, 120 bp, Artificial Sequence
  ENSG00000136960_3 (sequence is synthesized)
ctaaggacagatgtggagaagtcagaaatgaagaaaatgcctgtcactgctcagaggactgcttggccaggggagactgctgtaccaattaccaagtggtttgcaaaggagagtcgcatt

SEQ ID NO: 333164 - DNA, 120 bp, Artificial Sequence
  ENSG00000136960_4 (sequence is synthesized)
gggttgatgatgactgtgaggaaataaaggccgcagaatgccctgcagggtttgttcgccctccattaatcatcttctccgtggatggcttccgtgcatcatacatgaagaaaggcagca

SEQ ID NO: 333165 - DNA, 120 bp, Artificial Sequence
  ENSG00000136960_5 (sequence is synthesized)
aagtcatgcctaatattgaaaaactaaggtcttgtggcacacactctccctacatgaggccggtgtacccaactaaaacctttcctaacttatacactttggccactgggctatatccag

SEQ ID NO: 333166 - DNA, 120 bp, Artificial Sequence
  ENSG00000136960_6 (sequence is synthesized)
aatcacatggaattgttggcaattcaatgtatgatcctgtatttgatgccacttttcatctgcgagggcgagagaaatttaatcatagatggtggggaggtcaaccgctatggattacag

SEQ ID NO: 333167 - DNA, 120 bp, Artificial Sequence
  ENSG00000136960_7 (sequence is synthesized)
ccaccaagcaaggggtgaaagctggaacattcttttggtctgttgtcatccctcacgagcggagaatattaaccatattgcagtggctcaccctgccagatcatgagaggccttcggtct

SEQ ID NO: 333168 - DNA, 120 bp, Artificial Sequence
  ENSG00000136960_8 (sequence is synthesized)
atgccttctattctgagcaacctgatttctctggacacaaatatggccctttcggccctgaggagagtagttatggctcaccttttactccggctaagagacctaagaggaaagttgccc

SEQ ID NO: 333169 - DNA, 120 bp, Artificial Sequence
  ENSG00000136960_9 (sequence is synthesized)
ctaagaggagacaggaaagaccagttgctcctccaaagaaaagaagaagaaaaatacataggatggatcattatgctgcggaaactcgtcaggacaaaatgacaaatcctctgagggaaa

SEQ ID NO: 333170 - DNA, 120 bp, Artificial Sequence
  ENSG00000136960_10 (sequence is synthesized)
tcgacaaaattgtggggcaattaatggatggactgaaacaactaaaactgcatcggtgtgtcaacgtcatctttgtcggagaccatggaatggaagatgtcacatgtgatagaactgagt

SEQ ID NO: 333171 - DNA, 120 bp, Artificial Sequence
  ENSG00000136960_11 (sequence is synthesized)
tcttgagtaattacctaactaatgtggatgatattactttagtgcctggaactctaggaagaattcgatccaaatttagcaacaatgctaaatatgaccccaaagccattattgccaatc

SEQ ID NO: 333172 - DNA, 120 bp, Artificial Sequence
  ENSG00000136960_12 (sequence is synthesized)
tcacgtgtaaaaaaccagatcagcactttaagccttacttgaaacagcaccttcccaaacgtttgcactatgccaacaacagaagaattgaggatatccatttattggtggaacgcagat

SEQ ID NO: 333173 - DNA, 120 bp, Artificial Sequence
  ENSG00000136960_13 (sequence is synthesized)
ggttatggctcaacatttaagtacaagactaaagtgcctccatttgaaaacattgaactttacaatgttatgtgtgatctcctgggattgaagccagctcctaataatgggacccatgga

SEQ ID NO: 333174 - DNA, 120 bp, Artificial Sequence
  ENSG00000136960_14 (sequence is synthesized)
agtttgaatcatctcctgcgcactaataccttcaggccaaccatgccagaggaagttaccagacccaattatccagggattatgtaccttcagtctgattttgacctgggctgcacttgt

SEQ ID NO: 333175 - DNA, 120 bp, Artificial Sequence
  ENSG00000136960_15 (sequence is synthesized)
gatgataaggtagagccaaagaacaagttggatgaactcaacaaacggcttcatacaaaagggtctacagaagagagacacctcctctatgggcgacctgcagtgctttatcggactaga

SEQ ID NO: 333176 - DNA, 120 bp, Artificial Sequence
  ENSG00000136960_16 (sequence is synthesized)
tatgatatcttatatcacactgactttgaaagtggttatagtgaaatattcctaatgccactctggacatcatatactgtttccaaacaggctgaggtttccagcgttcctgaccatctg

SEQ ID NO: 333177 - DNA, 120 bp, Artificial Sequence
  ENSG00000136960_17 (sequence is synthesized)
accagttgcgtccggcctgatgtccgtgtttctccgagtttcagtcagaactgtttggcctacaaaaatgataagcagatgtcctacggattcctctttcctccttatctgagctcttca

SEQ ID NO: 333178 - DNA, 120 bp, Artificial Sequence
  ENSG00000136960_18 (sequence is synthesized)
ccagaggctaaatatgatgcattccttgtaaccaatatggttccaatgtatcctgctttcaaacgggtctggaattatttccaaagggtattggtgaagaaatatgcttcggaaagaaat

SEQ ID NO: 333179 - DNA, 120 bp, Artificial Sequence
  ENSG00000136960_19 (sequence is synthesized)
ggagttaacgtgataagtggaccaatcttcgactatgactatgatggcttacatgacacagaagacaaaataaaacagtacgtggaaggcagttccattcctgttccaactcactactac

SEQ ID NO: 333180 - DNA, 120 bp, Artificial Sequence
  ENSG00000136960_20 (sequence is synthesized)
agcatcatcaccagctgtctggatttcactcagcctgccgacaagtgtgacggccctctctctgtgtcctccttcatcctgcctcaccggcctgacaacgaggagagctgcaatagctca

SEQ ID NO: 333181 - DNA, 120 bp, Artificial Sequence
  ENSG00000136960_21 (sequence is synthesized)
gaggacgaatcaaaatgggtagaagaactcatgaagatgcacacagctagggtgcgtgacattgaacatctcaccagcctggacttcttccgaaagaccagccgcagctacccagaaatc

SEQ ID NO: 333182 - DNA, 120 bp, Artificial Sequence
  ENSG00000136960_22 (sequence is synthesized)
ctgacactcaagacatacctgcatacatatgagagcgagatttaactttctgagcatctgcagtacagtcttatcaactggttgtatatttttatattgtttttgtatttattaatttga

SEQ ID NO: 333183 - DNA, 120 bp, Artificial Sequence
  ENSG00000136960_23 (sequence is synthesized)
aaccaggacattaaaaatgttagtattttaatcctgtaccaaatctgacatattatgcctgaatgactccactgtttttctctaatgcttgatttaggtagccttgtgttctgagtagag

SEQ ID NO: 333184 - DNA, 120 bp, Artificial Sequence
  ENSG00000136960_24 (sequence is synthesized)
cttgtaataaatactgcagcttgagtttttagtggaagcttctaaatggtgctgcagatttgatatttgcattgaggaaatattaattttccaatgcacagttgccacatttagtcctgt

SEQ ID NO: 333185 - DNA, 120 bp, Artificial Sequence
  ENSG00000136960_25 (sequence is synthesized)
actgtatggaaacactgattttgtaaagttgcctttatttgctgttaactgttaactatgacagatatatttaagccttataaaccaatcttaaacataataaatcacacattcagtttt

SEQ ID NO: 333186 - DNA, 120 bp, Artificial Sequence
  ENSG00000136960_26 (sequence is synthesized)
tgtgcctggccttatatatttattaaataacgtatgaagtaatcttttgtatagtttcctaaaataacctatactatagttttgcatgttgtaaaatttttaataaatgctattatacta

SEQ ID NO: 333187 - DNA, 120 bp, Artificial Sequence
  ENSG00000136960_27 (sequence is synthesized)
tatcctgcaattattttatcattatgtttttgagacttaatgtatattagtacatgaagttttagctcacttatttttactgctaatacagtagttaatatttaattgtataaatgtacc

SEQ ID NO: 333188 - DNA, 120 bp, Artificial Sequence
  ENSG00000136960_28 (sequence is synthesized)
gaatttttttccattttcctacttgagaacatttagtaatttgcaaatgttagctcttacaacaatgttgccacagacattactggaaatgtcttcttgcacgcatatgctagggtatac

SEQ ID NO: 333189 - DNA, 120 bp, Artificial Sequence
  ENSG00000136960_29 (sequence is synthesized)
agtgaagggtagagttgctgactcatgctgtttcagaattgctgagtcattacgttttagctttggtgaaaagtgatttcataaattagtttgggaatcacttcagtgtgcctagagatt

SEQ ID NO: 333190 - DNA, 120 bp, Artificial Sequence
  ENSG00000136960_30 (sequence is synthesized)
aatctgaaacatttaggcgctatcctaatttacttacacatatatgcccaagtcatcatcagtacccacatgggaaattggtactgtggtgactatccacagttttaaggaaggaaacag

SEQ ID NO: 333191 - DNA, 120 bp, Artificial Sequence
  ENSG00000136960_31 (sequence is synthesized)
agattgaagaaggtgcttacaaacatagaactgctagaggtggagcccagaatgtcagtttgagagaaaacagttaattcctcgaaagaatgtatgatatagatggagtttagagttcgc

SEQ ID NO: 333192 - DNA, 120 bp, Artificial Sequence
  ENSG00000136960_32 (sequence is synthesized)
ttttgaatttagcagggtgctaagtcgacagaagggcacagagggaaagaacatttctgatttgctttcttttttcctttactggttttcacacatgaagaacaagttggatgaactcaa

SEQ ID NO: 333193 - DNA, 120 bp, Artificial Sequence
  ENSG00000136960_33 (sequence is synthesized)
caaacggcttcatacaaaagggtctacagaagctgaaaccaggaaattcagaggcagcagaaatgaaaacaaggaaaacattaatggaaattttgaacctagaaaaggtttggtttgagt

SEQ ID NO: 333194 - DNA, 120 bp, Artificial Sequence
  ENSG00000136960_34 (sequence is synthesized)
tttgaaggaaagtctgggttgttttactgcccctaagtactactgttacgatttgctggtgttttatttgtttattatatttcatttatttaatattgtcagattatgttctaatcctta

SEQ ID NO: 333195 - DNA, 120 bp, Artificial Sequence
  ENSG00000136960_35 (sequence is synthesized)
ggggtgggtccccaaatttggcagcttaactaaggcttctacatttactgcaatgctggagcagccgaactacccagaacaggcttgtgttgtaatagtgtgggccgctttgtctcaaat

SEQ ID NO: 333196 - DNA, 120 bp, Artificial Sequence
  ENSG00000136960_36 (sequence is synthesized)
ccgcagttctatctgggagggtcttgcaaagtattctacgaagacttttctccattacttgcatagaatggtaagactttaattaaagcaacatgtatacattatttaataagtgttttt

SEQ ID NO: 333197 - DNA, 120 bp, Artificial Sequence
  ENSG00000136960_37 (sequence is synthesized)
cagaactgattttctctagtagaaaaaatagtacaagaatttatttttttttaaatttatcacttaaggaattgtgaattgcctaagcctcagtctctaaatattttggtctgtagggcc

SEQ ID NO: 333198 - DNA, 120 bp, Artificial Sequence
  ENSG00000136960_38 (sequence is synthesized)
ccacatttccaagaatctgtggaagttttgactttagcctatccaaagtgggcagatcaagctccaggtatttattgcagagtgtggaatgaagattttcatactgaactcccatctctt

SEQ ID NO: 333199 - DNA, 120 bp, Artificial Sequence
  ENSG00000136960_39 (sequence is synthesized)
cttccgcaaagagtaaagcttcagacctttttttttcctaagaagagagctttcctttggaggtctgaatctgcactgggggtcttcattgagttctttggtaactgatgaacttccctc

SEQ ID NO: 333200 - DNA, 120 bp, Artificial Sequence
  ENSG00000136960_40 (sequence is synthesized)
catgttcctttaagttcttacctaaagacttttcctctgtatgacaaagctgcttactttaaatgctcattactactcactttttatgctgaaggaatgcatatttgagttgctgtatgc

SEQ ID NO: 333201 - DNA, 120 bp, Artificial Sequence
  ENSG00000136960_41 (sequence is synthesized)
atataatgatcaatgtgtgccttcttcttaattaaatcattggtgtacctgataagcctcttcaggggtcaaaataattaattctacagaaatccaatcctattggctttccattcagct

SEQ ID NO: 333202 - DNA, 120 bp, Artificial Sequence
  ENSG00000136960_42 (sequence is synthesized)
gaatcatttcaaaatttattacataatgtttcctttatatacaaattgtaaattctttacaactaaaaaaagcattctgtaaatacagcatttacattatggttttgataactgtaaagc

SEQ ID NO: 333203 - DNA, 120 bp, Artificial Sequence
  ENSG00000136960_43 (sequence is synthesized)
ttgacccatggttaggtgatcagatcaaccacaaaagtgttaggaaaactagcttgattaaattaaggagaaggtgctatattaataataagtaagctagccattttaggtaacttgact

SEQ ID NO: 333204 - DNA, 120 bp, Artificial Sequence
  ENSG00000136960_44 (sequence is synthesized)
cttccaacatttctttaacatttgatgtaaaatttaatatgcacctaacacagtttattttttttcttttttagagagacacctcctctatgggcgacctgcagtgctttatcggactag

SEQ ID NO: 333205 - DNA, 120 bp, Artificial Sequence
  ENSG00000136960_45 (sequence is synthesized)
atgccctgcaggaggcccataagaacaaaagcatctcctggggagaggatacactcatggagtatttggagaatcccaagaagcacatccccggaacaaaaatgatcttcgcaggcatga

SEQ ID NO: 333206 - DNA, 120 bp, Artificial Sequence
  ENSG00000136960_46 (sequence is synthesized)
gtcccccgggacagcggccccctgactacatctgcactggagaaatcccaaaagcaaacggccagtgcaaacaagagcagtccgcagcagccgtcccgagcacagctcccaggtcgcggg

SEQ ID NO: 333207 - DNA, 120 bp, Artificial Sequence
  ENSG00000136960_47 (sequence is synthesized)
tgattcaaagtctgactgttcatggtactaaagcatttctgtctgagaaaaacattcctgcatttaatttgttggtggcagtgtccttatatgacaaaaccagtctcacaattcattata

SEQ ID NO: 333208 - DNA, 120 bp, Artificial Sequence
  ENSG00000136960_48 (sequence is synthesized)
aacaataacctcagccgggcatgatccaccatgcccggcagagaaaatgaatcttaagatatctctgcccctcttgggcccctcgccctttcttcttcatgtctcttccatgagggctga

SEQ ID NO: 333209 - DNA, 120 bp, Artificial Sequence
  ENSG00000136960_49 (sequence is synthesized)
taaaactgtaacatggggccagcctggtttaacttcatatgctccttaaaggactttattgatgccaccttcactccatttccagtattcatcatcctctgcattcccatcacactctgt

SEQ ID NO: 333210 - DNA, 120 bp, Artificial Sequence
  ENSG00000136960_50 (sequence is synthesized)
aactatctttaatatggtgcagaccacatggcatctgttatttgtgctatgtttgtctctccctttgacttgtgagctctttgagggtaagagctctatcttaatcatctttgcccagta

SEQ ID NO: 333211 - DNA, 120 bp, Artificial Sequence
  ENSG00000136960_51 (sequence is synthesized)
cctccattctacagcgcaaggtctggcacaaccaaggcgctcaatgtttgatgatgaagaataatggatacatttggaaggagataggtgacagacttggcgaagactggagaagttatt

SEQ ID NO: 333212 - DNA, 120 bp, Artificial Sequence
  ENSG00000136982_0 (sequence is synthesized)
gctcaggtttcctaccttccggctgcttgggaacttctttcttgcccgccaagcccgcagccacccgggcgcggcgggactcctagacccggcgctgcgatgaagaggacccgcgacgag

SEQ ID NO: 333213 - DNA, 120 bp, Artificial Sequence
  ENSG00000136982_1 (sequence is synthesized)
gtggatgcgacgctgcagatcgccaagctgaatgcggccgagctgctgccggcggtgcactgcctgggcttcggccctggggccagcggcgctgcagccggcgacttctgcctgctggag

SEQ ID NO: 333214 - DNA, 120 bp, Artificial Sequence
  ENSG00000136982_2 (sequence is synthesized)
ctggagcccacgctgtgccagcagctggaggatggacacagtcttgtgattcgtggtgataaagacgagcaagctgtgctgtgcagtaaagacaaaacatacgacttgaagatagcagac

SEQ ID NO: 333215 - DNA, 120 bp, Artificial Sequence
  ENSG00000136982_3 (sequence is synthesized)
acttccaatatgttgcttttcattcctggttgtaaaactccggaccagttgaagaaggaagattcacactgtaacattattcacactgagatctttggtttttctaataattattgggaa

SEQ ID NO: 333216 - DNA, 120 bp, Artificial Sequence
  ENSG00000136982_4 (sequence is synthesized)
ttaagaagacgtagacccaagttaaagaagctaaagaaacttttgatggaaaatccatatgaaggacctgacagtcaaaaagagaaggattcaaatagctcaaaatatacaactgaagat

SEQ ID NO: 333217 - DNA, 120 bp, Artificial Sequence
  ENSG00000136982_5 (sequence is synthesized)
ttgcttgatcaaattcaggcaagtgaggaagaaataatgacccaattacaagttctaaatgcctgtaagattggaggttattggaggattcttgaatttgattatgagatgaaacttctg

SEQ ID NO: 333218 - DNA, 120 bp, Artificial Sequence
  ENSG00000136982_6 (sequence is synthesized)
aatcatgtaactcagcttgtggattctgaatcatggtcttttggtaaagttcctttgaacacatgccttcaggaactcggaccattggagccagaggaaatgatagaacactgtcttaaa

SEQ ID NO: 333219 - DNA, 120 bp, Artificial Sequence
  ENSG00000136982_7 (sequence is synthesized)
tgttatgggaagaaatatgtagatgaaggcgaagtttattttgagttggatgctgataaaatatgtagagcagcagcacgaatgctacttcagaatgcggtgaaattcaatctcgctgag

SEQ ID NO: 333220 - DNA, 120 bp, Artificial Sequence
  ENSG00000136982_8 (sequence is synthesized)
tttcaagaagtgtggcagcagagtgttcctgaaggaatggtaactagtcttgatcagcttaagggtttagcgctggtggatagacactcgagaccagaaatcatatttttgctgaaagta

SEQ ID NO: 333221 - DNA, 120 bp, Artificial Sequence
  ENSG00000136982_9 (sequence is synthesized)
ccttttctctctaagggagaagtggacagaagaagatattgctccatatattcaagatttgtgtggagagaagcaaaccataggtgcattactcactaaatattctcattcttcgatgca

SEQ ID NO: 333222 - DNA, 120 bp, Artificial Sequence
  ENSG00000136982_10 (sequence is synthesized)
aaatggtgttaaagtttataattcgagaagacccatttcttaaaagaacaacggtcttttcttcaggactcaagttgctttataaagttgctggatagaagaaaaataacttgtactttt

SEQ ID NO: 333223 - DNA, 120 bp, Artificial Sequence
  ENSG00000136982_11 (sequence is synthesized)
atttctgacttttagaaacctagtcttctaaggcatttttctcctcatcttaagcattttgaaactactgttatttcttaaatgttataggatgtagctttaaaattatatttgtactat

SEQ ID NO: 333224 - DNA, 120 bp, Artificial Sequence
  ENSG00000136982_12 (sequence is synthesized)
gtacacagtgtaaacaaggacaaaagaattctttcctatattatgtctgaggtctctatgatttatttaaagtttggctttttatatttaaaatgtcatttctttacttaggatttgatg

SEQ ID NO: 333225 - DNA, 120 bp, Artificial Sequence
  ENSG00000136982_13 (sequence is synthesized)
ttctaatcattaatacacttaagttttccagagaactaaatagtaatagtttcatagaagagaactatttattcacttaaatatcatttctcaagtgagtgagttcccctctacttttag

SEQ ID NO: 333226 - DNA, 120 bp, Artificial Sequence
  ENSG00000136982_14 (sequence is synthesized)
ccttccacccaaactggaagcctctaggtgctatcaattatttatatccatcgtttacatccatgaaattggctgaataattactcctctgcctggcgtagacatgcgctttgggaaaaa

SEQ ID NO: 333227 - DNA, 120 bp, Artificial Sequence
  ENSG00000136982_15 (sequence is synthesized)
aacgagtttataatcctataatgaagaatactggcacaggcaatgctcactcgaaaacttcaagtaatttctagttggttttggaatgcttgataaagttcctttacagctttattttcc

SEQ ID NO: 333228 - DNA, 120 bp, Artificial Sequence
  ENSG00000136982_16 (sequence is synthesized)
tgatttgttttggtttagatcaaagttcaaattaattttaacttagctaatgaactcatcaccaggacagttggagggggtaggccgaggttaaatggtccacgtttcaaaaatgttaat

SEQ ID NO: 333229 - DNA, 120 bp, Artificial Sequence
  ENSG00000136982_17 (sequence is synthesized)
ggctaatccataattaaagaaggtttaactgttactgaagtttacaagttttattgtcatgaacatgaaatacaaacacgatggcttcgaaatgtctttcaataaatgtttctgcattta

SEQ ID NO: 333230 - DNA, 120 bp, Artificial Sequence
  ENSG00000136982_18 (sequence is synthesized)
tatggtaatttgatctttagttaaaaagtttacgtgtaaaatctataatcagggagaatctaagaagttctttaaagaaatttgaatttctcagcattattattattattattgcttgtt

SEQ ID NO: 333231 - DNA, 120 bp, Artificial Sequence
  ENSG00000136982_19 (sequence is synthesized)
tgttggagtcttgtgaacttgtctgttttttcctgttttgattttcaagtcccaatttgatcttttttctataatgtgcaaagtttgttattcaatgagtcattctaaaaattctaccca

SEQ ID NO: 333232 - DNA, 120 bp, Artificial Sequence
  ENSG00000136986_0 (sequence is synthesized)
agaaggctgcctcgctggtccgaattcggtggcgccacgtccgcccgtctccgccttctgcatcgcggcttcggcggcttccacctagacacctaacagtcgcggagccggccgcgtcgt

SEQ ID NO: 333233 - DNA, 120 bp, Artificial Sequence
  ENSG00000136986_1 (sequence is synthesized)
gagggggtcggcacggggagtcgggcggtcttgtgcatcttggctacctgtgggtcgaagatgtcggacatcggagactggttcaggagcatcccggcgatcacgcgctattggttcgcc

SEQ ID NO: 333234 - DNA, 120 bp, Artificial Sequence
  ENSG00000136986_2 (sequence is synthesized)
gccaccgtcgccgtgcccttggtcggcaaactcggcctcatcagcccggcctacctcttcctctggcccgaagccttcctttatcgctttcagatttggaggccaatcactgccaccttt

SEQ ID NO: 333235 - DNA, 120 bp, Artificial Sequence
  ENSG00000136986_3 (sequence is synthesized)
tatttccctgtgggtccaggaactggatttctttatttggtcaatttatatttcttatatcagtattctacgcgacttgaaacaggagcttttgatgggaggccagcagactatttattc

SEQ ID NO: 333236 - DNA, 120 bp, Artificial Sequence
  ENSG00000136986_4 (sequence is synthesized)
atgctcctctttaactggatttgcatcgtgattactggcttagcaatggatatgcagttgctgatgattcctctgatcatgtcagtactttatgtctgggcccagctgaacagagacatg

SEQ ID NO: 333237 - DNA, 120 bp, Artificial Sequence
  ENSG00000136986_5 (sequence is synthesized)
attgtatcattttggtttggaacacgatttaaggcctgctatttaccctgggttatccttggattcaactatatcatcggaggctcggtaatcaatgagcttattggaaatctggttgga

SEQ ID NO: 333238 - DNA, 120 bp, Artificial Sequence
  ENSG00000136986_6 (sequence is synthesized)
catctttattttttcctaatgttcagatacccaatggacttgggaggaagaaattttctatccacacctcagtttttgtaccgctggctgcccagtaggagaggaggagtatcaggattt

SEQ ID NO: 333239 - DNA, 120 bp, Artificial Sequence
  ENSG00000136986_7 (sequence is synthesized)
ggtgtgccccctgctagcatgaggcgagctgctgatcagaatggcggaggcgggagacacaactggggccagggctttcgacttggagaccagtgaaggggcggcctcgggcagccgctc

SEQ ID NO: 333240 - DNA, 120 bp, Artificial Sequence
  ENSG00000136986_8 (sequence is synthesized)
ctctcaagccacatttcctcccagtgctgggtgcacttaacaactgcgttctggctaacactgttggacctgacccacactgaatgtagtctttcagtacgagacaaagtttcttaaatc

SEQ ID NO: 333241 - DNA, 120 bp, Artificial Sequence
  ENSG00000136986_9 (sequence is synthesized)
ccgaagaaaaatataagtgttccacaagtttcacgattctcattcaagtccttactgctgtgaagaacaaataccaactgtgcaaattgcaaaactgactacattttttggtgtcttctc

SEQ ID NO: 333242 - DNA, 120 bp, Artificial Sequence
  ENSG00000136986_10 (sequence is synthesized)
ttctcccctttccgtctgaataatgggttttagcgggtcctagtctgctggcattgagctggggctgggtcaccaaacccttcccaaaaggacccttatctctttcttgcacacatgcct

SEQ ID NO: 333243 - DNA, 120 bp, Artificial Sequence
  ENSG00000136986_11 (sequence is synthesized)
ctctcccacttttcccaacccccacatttgcaactagaagaggttgcccataaaattgctctgcccttgacaggttctgttatttattgacttttgccaaggcttggtcacaacaatcat

SEQ ID NO: 333244 - DNA, 120 bp, Artificial Sequence
  ENSG00000136986_12 (sequence is synthesized)
attcacgtaattttccccctttggtggcagaactgtagcaatagggggagaagacaagcagcggatgaagcgttttctcagcttttggaattgcttcgacctgacatccgttgtaaccgt

SEQ ID NO: 333245 - DNA, 120 bp, Artificial Sequence
  ENSG00000136986_13 (sequence is synthesized)
tgtttgtttcctgagctaagtgatcaagactgtagtggagttgcagctaacatgggttaggtttaaaccatgggggatgcaacccctttgcgtttcatatgtaggcctactggctttgtg

SEQ ID NO: 333246 - DNA, 120 bp, Artificial Sequence
  ENSG00000136986_14 (sequence is synthesized)
tagctggagtagttgggttgctttgtgttaggaggatccagatcatgttggctacagggagatgctctctttgagaggctcctgggcattgattccatttcaatctcattctggatatgt

SEQ ID NO: 333247 - DNA, 120 bp, Artificial Sequence
  ENSG00000136986_15 (sequence is synthesized)
gttcattgagtaaaggaggagagaccctcatacgctatttaaatgtcacttttttgcctatcccccgttttttggtcatgtttcaattaattgtgaggaaggcgcagctcctctctgcac

SEQ ID NO: 333248 - DNA, 120 bp, Artificial Sequence
  ENSG00000136986_16 (sequence is synthesized)
gtagatcattttttaaagctaatgtaagcacatctaagggaataacatgatttaaggttgaaatggctttagaatcatttgggtttgagggtgtgttattttgagtcatgaatgtacaag

SEQ ID NO: 333249 - DNA, 120 bp, Artificial Sequence
  ENSG00000136986_17 (sequence is synthesized)
ctctgtgaatcagaccagcttaaatacccacacctttttttcgtaggtgggcttttcctatcagagcttggctcataaccaaataaagttttttgaaggccatggcttttcacacagtta

SEQ ID NO: 333250 - DNA, 120 bp, Artificial Sequence
  ENSG00000136986_18 (sequence is synthesized)
ttttattttatgacgttatctgaaagcagactgttaggagcagtattgagtggctgtcacactttgaggcaactaaaaaggcttcaaacgttttgatcagtttcttttcaggaaacattg

SEQ ID NO: 333251 - DNA, 120 bp, Artificial Sequence
  ENSG00000136986_19 (sequence is synthesized)
tgctctaacagtatgactattctttcccccactcttaaacagtgtgatgtgtgttatcctaggaaatgagagttggcaaacaacttctcattttgaatagagtttgtgtgtacctctcca

SEQ ID NO: 333252 - DNA, 120 bp, Artificial Sequence
  ENSG00000136986_20 (sequence is synthesized)
tatttaatttatatgataaaataggtggggagagtctgaaccttaactgtcatgttttgttgttcatctgtggccacaataaagtttacttgtaaaattttagaggccattactccaatt

SEQ ID NO: 333253 - DNA, 120 bp, Artificial Sequence
  ENSG00000136986_21 (sequence is synthesized)
atgttgcacgtacactcattgtacaggcgtggagactcattgtatgtataagaatattctgacagtgagtgacccggagtctctggtgtaccctcttaccagtcagctgcctgcgagcag

SEQ ID NO: 333254 - DNA, 120 bp, Artificial Sequence
  ENSG00000136986_22 (sequence is synthesized)
tcattttttcctaaaggtttacaagtatttagaactcttcagttcagggcaaaatgttcatgaagttattcctcttaaacatggttaggaagctgatgacgttattgattttgtctggat

SEQ ID NO: 333255 - DNA, 120 bp, Artificial Sequence
  ENSG00000136986_23 (sequence is synthesized)
tatgtttctggaataattttaccaaaacaagctatttgagttttgacttgacaaggcaaaacatgacagtggattctctttacaaatggaaaaaaaaaatccttattttgtataaaggac

SEQ ID NO: 333256 - DNA, 120 bp, Artificial Sequence
  ENSG00000136986_24 (sequence is synthesized)
ttccctttttgtaaactaatcctttttattggtaaaaattgtaaattaaaatgtgcaacttgaaggttgtctgtgttaagtttccatgtccctgctctgctgtctcttagatatcacata

SEQ ID NO: 333257 - DNA, 120 bp, Artificial Sequence
  ENSG00000136986_25 (sequence is synthesized)
atttgtgtaaccaattatctcttgaagagcatttaggaagtacccagtattttttgctggattaattcctggatgcagaattcctgggttttcattttaatgaaggaggatgcttgctaa

SEQ ID NO: 333258 - DNA, 120 bp, Artificial Sequence
  ENSG00000136986_26 (sequence is synthesized)
tcctgtctcatctaacattttactgcctgtgttcttagtgcatcctaatgagagctccatgaggagtatgatttacccctatgccccatctgctggagaaacctgaggcaacaagtgact

SEQ ID NO: 333259 - DNA, 120 bp, Artificial Sequence
  ENSG00000136986_27 (sequence is synthesized)
taccctagtcacacagtcacaggaagttagggattaaagcttaggctcagttgccttcctgttactcttttagccagggaccactgacaactagattccaacattacaggaggcatctca

SEQ ID NO: 333260 - DNA, 120 bp, Artificial Sequence
  ENSG00000136986_28 (sequence is synthesized)
gctctctgagcctgctgagggacctgatgcaactccagagtgcgaaacagtaggctggtgaatgggcagagtcacaggttagtggggtgtcttttcttggcccatcagtttttacccatg

SEQ ID NO: 333261 - DNA, 120 bp, Artificial Sequence
  ENSG00000136986_29 (sequence is synthesized)
attttgcccaaggaagggtaagttagcgtgttggtcagcaattttaaacatttttatattaaatactatggagtagacattttacaggactgttcagagttaaaatgagagacttgaggt

SEQ ID NO: 333262 - DNA, 120 bp, Artificial Sequence
  ENSG00000136986_30 (sequence is synthesized)
ttgtataggcccaaccccctgggagtttgtgctctttatctgcttttagggtttactgaagtgggctggtaagggcaacagctttgatttttgagacaaacttggatttgaatcccagtc

SEQ ID NO: 333263 - DNA, 120 bp, Artificial Sequence
  ENSG00000136986_31 (sequence is synthesized)
ccctcagatagcagtttttatactgggaaagttacttaatcaaacctccaagcttcagtttgcaagcctgtaaattgtgggagaagcccctgtctcacaggactgcatgaggtaagatac

SEQ ID NO: 333264 - DNA, 120 bp, Artificial Sequence
  ENSG00000136986_32 (sequence is synthesized)
actgttgggaagcacagtagcgggttctcggtaagtaaagctagctgccatattcctaaaggtgggggtaggagagcaggattttgacgatctgagaggagacgcgcacacacccagaag

SEQ ID NO: 333265 - DNA, 120 bp, Artificial Sequence
  ENSG00000136986_33 (sequence is synthesized)
catgtaatagtcgtgtgaccgttctgtcagtgaggcaaaaggctgtcgaagaacgggccagttaaatcaccatctgggtgtcacagcctgcctgacaatcatgcctaatctcatatcagg

SEQ ID NO: 333266 - DNA, 120 bp, Artificial Sequence
  ENSG00000136986_34 (sequence is synthesized)
gatatgcagtaatagcttgcatttgaaagctttaaaaaaacaaacaaaccaaacccttccacatcttgctaattttaatgttttgcagttctgtcattcctctaagggatcagtgagggc

SEQ ID NO: 333267 - DNA, 120 bp, Artificial Sequence
  ENSG00000136986_35 (sequence is synthesized)
agtaaaacttgagcaggcctcctctttctccccttccttttatagggtaggggtatgtttttcaaagacttttcaaattgtgaactgtaatatacagagatataccatattggtggttgt

SEQ ID NO: 333268 - DNA, 120 bp, Artificial Sequence
  ENSG00000136986_36 (sequence is synthesized)
ggtgtgtgtgtttttctttaagagaataaaaagaaacttgtttctcttctgagccttgaattgccttcaggctaaaaaaacaaatgaccaatctggtttctaattatcaaaggacataat

SEQ ID NO: 333269 - DNA, 120 bp, Artificial Sequence
  ENSG00000136986_37 (sequence is synthesized)
aacagcaggtttggctttctgatctaggtttatcaagtaggatggcagatgcatcaattaaaaaaagcttggtgcttttggggggcagccaacagttactttactttaaatggccatatt

SEQ ID NO: 333270 - DNA, 120 bp, Artificial Sequence
  ENSG00000136986_38 (sequence is synthesized)
ctaacttaacggcttgtagctacttctcagttgtgggcaacacaggatacaagattctagtggcaaaatcagcgagccctggagcctgccttccacttgaactttctctgttgggggaag

SEQ ID NO: 333271 - DNA, 120 bp, Artificial Sequence
  ENSG00000136986_39 (sequence is synthesized)
tccttctgctaaattttgcataaagatcagatgacaaaatacagctccttgcaaaagcagtaactgctttgaaattaccataaatttttgttgattatgtataattgggtatctttttat

SEQ ID NO: 333272 - DNA, 120 bp, Artificial Sequence
  ENSG00000136986_40 (sequence is synthesized)
actaattatttgcatttaatttcactatctacttaagcagtggagatggcttccatattgtcttagagtgagtagcaaagcaagacagccctagcattttctccagcaagtgttctattt

SEQ ID NO: 333273 - DNA, 120 bp, Artificial Sequence
  ENSG00000136986_41 (sequence is synthesized)
tattatgtactttggaggaatattattgtaccagaaggcatggatgttgagaaaccagcacttggaaaatacattttgatttaatggtaaagctgtatttgtttaaaatggaggaggtga

SEQ ID NO: 333274 - DNA, 120 bp, Artificial Sequence
  ENSG00000136986_42 (sequence is synthesized)
gtataggaaggtataactgcttttctaaatggaatgctgatacatttgtatcaccattttccattccatttagagtagttatatcttctctgtacacactaaattttgtgtttaaaaggg

SEQ ID NO: 333275 - DNA, 120 bp, Artificial Sequence
  ENSG00000136986_43 (sequence is synthesized)
atatcttctctgtacacactaaattttgtgtttaaaaggggtttttggccaggcgtggttgctcacgtcggtaatcccagcattttgggaggccgacgggtggatcacgaggtcaggaga

SEQ ID NO: 333276 - DNA, 120 bp, Artificial Sequence
  ENSG00000136986_44 (sequence is synthesized)
tgagactccgtctcaaaaaaaaacaaaaaaacaaaaacccgagttgttgtctgttttgggaagaggcatgaaggtatcgagtatgatgtaaacagactccagtcactgactgctgtccct

SEQ ID NO: 333277 - DNA, 120 bp, Artificial Sequence
  ENSG00000136986_45 (sequence is synthesized)
gatgtaaacagactccagtcactgactgctgtcccttcccaggcaggatgcatgtagtataacaagtagtgcagggcgcaggctctggaaccaggctgactaggttggaatcctgtcact

SEQ ID NO: 333278 - DNA, 120 bp, Artificial Sequence
  ENSG00000136986_46 (sequence is synthesized)
ttcgaagcgcttcactcagtgttggctcaattttcttgtttataaaacaggagtaatagtaatgcctacctcatggggttattgtgaagatcagatgaatttataagcaggcagcaccta

SEQ ID NO: 333279 - DNA, 120 bp, Artificial Sequence
  ENSG00000136986_47 (sequence is synthesized)
gtgtaaggcaataatcactgagtaaattcacatagtaactgctctagtataaggtcaagtataaagcctgtcctcttcagggtttctgctgtggacaagtcacctgtcatgacttactct

SEQ ID NO: 333280 - DNA, 120 bp, Artificial Sequence
  ENSG00000136986_48 (sequence is synthesized)
tgctgccaagaagggtttaagcggaggtatcagatcatgctctctgccttcaagcaaaattttaaacattaggatctgctaagtggaataggtttaaacacattctcagtttactaataa

SEQ ID NO: 333281 - DNA, 120 bp, Artificial Sequence
  ENSG00000136986_49 (sequence is synthesized)
aagagtcaaagatgggaaatagttggaaaatactattgagagtgtaggcttgggtttaagttctcttagctgttctgtgaactcttagtttattaattttaaggtgggaaatcatctaac

SEQ ID NO: 333282 - DNA, 120 bp, Artificial Sequence
  ENSG00000136986_50 (sequence is synthesized)
cgtctggggccccagctctcccaccatctgtgagaagggaagaatgtacctggaaggcagattctgaataaattttaaaacatacccatacttccaacatagaaagccttcttcccctgt

SEQ ID NO: 333283 - DNA, 120 bp, Artificial Sequence
  ENSG00000136986_51 (sequence is synthesized)
ctcctttgatgggctcagctgagagccttttagaaatgctgtgcaaggctcaaacatgcaggctgtggatttggcctttgaaagtgaatgtattttgtatcctttgatccagtttgagcc

SEQ ID NO: 333284 - DNA, 120 bp, Artificial Sequence
  ENSG00000136986_52 (sequence is synthesized)
atatttagatataccaagatgctatcagtcattctttggttgctgggcttgtgggtgtaatatttttgtttccatactgttctgcatggattacttttataagcagagaaaaaaacgttc

SEQ ID NO: 333285 - DNA, 120 bp, Artificial Sequence
  ENSG00000136986_53 (sequence is synthesized)
agagtgtgaatttagctgaaatctgaatacatttaagaaacatgaaaaacgaatgccgtctgtggtcaggtcatggggctgagtacagaaaagacaaagttaaataagacgtccctcgct

SEQ ID NO: 333286 - DNA, 120 bp, Artificial Sequence
  ENSG00000136986_54 (sequence is synthesized)
gccttcaacatgacaagtgccatgggaacagcaggagagggaggtgttctcggaggtcagataactatgtggaagtgactttgttctcttctctccgtttgtgtccccgtctttctgcac

SEQ ID NO: 333287 - DNA, 120 bp, Artificial Sequence
  ENSG00000136997_0 (sequence is synthesized)
ctggatttttttcgggtagtggaaaaccagcagcctcccgcgacgatgcccctcaacgttagcttcaccaacaggaactatgacctcgactacgactcggtgcagccgtatttctactgc

SEQ ID NO: 333288 - DNA, 120 bp, Artificial Sequence
  ENSG00000136997_1 (sequence is synthesized)
gacgaggaggagaacttctaccagcagcagcagcagagcgagctgcagcccccggcgcccagcgaggatatctggaagaaattcgagctgctgcccaccccgcccctgtcccctagccgc

SEQ ID NO: 333289 - DNA, 120 bp, Artificial Sequence
  ENSG00000136997_2 (sequence is synthesized)
cgctccgggctctgctcgccctcctacgttgcggtcacacccttctcccttcggggagacaacgacggcggtggcgggagcttctccacggccgaccagctggagatggtgaccgagctg

SEQ ID NO: 333290 - DNA, 120 bp, Artificial Sequence
  ENSG00000136997_3 (sequence is synthesized)
ctgggaggagacatggtgaaccagagtttcatctgcgacccggacgacgagaccttcatcaaaaacatcatcatccaggactgtatgtggagcggcttctcggccgccgccaagctcgtc

SEQ ID NO: 333291 - DNA, 120 bp, Artificial Sequence
  ENSG00000136997_4 (sequence is synthesized)
tcagagaagctggcctcctaccaggctgcgcgcaaagacagcggcagcccgaaccccgcccgcggccacagcgtctgctccacctccagcttgtacctgcaggatctgagcgccgccgcc

SEQ ID NO: 333292 - DNA, 120 bp, Artificial Sequence
  ENSG00000136997_5 (sequence is synthesized)
gacagcagctcgcccaagtcctgcgcctcgcaagactccagcgccttctctccgtcctcggattctctgctctcctcgacggagtcctccccgcagggcagccccgagcccctggtgctc

SEQ ID NO: 333293 - DNA, 120 bp, Artificial Sequence
  ENSG00000136997_6 (sequence is synthesized)
catgaggagacaccgcccaccaccagcagcgactctgaggaggaacaagaagatgaggaagaaatcgatgttgtttctgtggaaaagaggcaggctcctggcaaaaggtcagagtctgga

SEQ ID NO: 333294 - DNA, 120 bp, Artificial Sequence
  ENSG00000136997_7 (sequence is synthesized)
tcaccttctgctggaggccacagcaaacctcctcacagcccactggtcctcaagaggtgccacgtctccacacatcagcacaactacgcagcgcctccctccactcggaaggactatcct

SEQ ID NO: 333295 - DNA, 120 bp, Artificial Sequence
  ENSG00000136997_8 (sequence is synthesized)
gctgccaagagggtcaagttggacagtgtcagagtcctgagacagatcagcaacaaccgaaaatgcaccagccccaggtcctcggacaccgaggagaatgtcaagaggcgaacacacaac

SEQ ID NO: 333296 - DNA, 120 bp, Artificial Sequence
  ENSG00000136997_9 (sequence is synthesized)
gtcttggagcgccagaggaggaacgagctaaaacggagcttttttgccctgcgtgaccagatcccggagttggaaaacaatgaaaaggcccccaaggtagttatccttaaaaaagccaca

SEQ ID NO: 333297 - DNA, 120 bp, Artificial Sequence
  ENSG00000136997_10 (sequence is synthesized)
gcatacatcctgtccgtccaagcagaggagcaaaagctcatttctgaagaggacttgttgcggaaacgacgagaacagttgaaacacaaacttgaacagctacggaactcttgtgcgtaa

SEQ ID NO: 333298 - DNA, 120 bp, Artificial Sequence
  ENSG00000136997_11 (sequence is synthesized)
gggctttatctaactcgctgtagtaattccagcgagaggcagagggagcgagcgggcggccggctagggtggaagagccgggcgagcagagctgcgctgcgggcgtcctgggaagggaga

SEQ ID NO: 333299 - DNA, 120 bp, Artificial Sequence
  ENSG00000136997_12 (sequence is synthesized)
tccggagcgaatagggggcttcgcctctggcccagccctcccgctgatcccccagccagcggtccgcaacccttgccgcatccacgaaactttgcccatagcagcgggcgggcactttgc

SEQ ID NO: 333300 - DNA, 120 bp, Artificial Sequence
  ENSG00000136997_13 (sequence is synthesized)
actggaacttacaacacccgagcaaggacgcgactctcccgacgcggggaggctattctgcccatttggggacacttccccgccgctgccaggacccgcttctctgaaaggctctccttg

SEQ ID NO: 333301 - DNA, 120 bp, Artificial Sequence
  ENSG00000136997_14 (sequence is synthesized)
tgaacttgtttcaaatgcatgatcaaatgcaacctcacaaccttggctgagtcttgagactgaaagatttagccataatgtaaactgcctcaaattggactttgggcataaaagaacttt

SEQ ID NO: 333302 - DNA, 120 bp, Artificial Sequence
  ENSG00000136997_15 (sequence is synthesized)
agaacttttttatgcttaccatcttttttttttctttaacagatttgtatttaagaattgtttttaaaaaattttaagatttacacaatgtttctctgtaaatattgccattaaatgtaa

SEQ ID NO: 333303 - DNA, 120 bp, Artificial Sequence
  ENSG00000136997_16 (sequence is synthesized)
aataaaacgtttatagcagttacacagaatttcaatcctagtatatagtacctagtattataggtactataaaccctaattttttttatttaagtacattttgctttttaaagttgattt

SEQ ID NO: 333304 - DNA, 120 bp, Artificial Sequence
  ENSG00000136997_17 (sequence is synthesized)
aaaataaaataactggcaaatatatcattgagccaaatcttaagttgtgaatgttttgtttcgtttcttccccctcccaaccaccaccatccctgtttgttttcatcaattgccccttca

SEQ ID NO: 333305 - DNA, 120 bp, Artificial Sequence
  ENSG00000136997_18 (sequence is synthesized)
gagggtggtcttaagaaaggcaagagttttcctctgttgaaatgggtctgggggccttaaggtctttaagttcttggaggttctaagatgcttcctggagactatgataacagccagagt

SEQ ID NO: 333306 - DNA, 120 bp, Artificial Sequence
  ENSG00000136997_19 (sequence is synthesized)
tgacagttagaaggaatggcagaaggcaggtgagaaggtgagaggtaggcaaaggagatacaagaggtcaaaggtagcagttaagtacacaaagaggcataaggactggggagttgggag

SEQ ID NO: 333307 - DNA, 120 bp, Artificial Sequence
  ENSG00000136997_20 (sequence is synthesized)
gaaggtgaggaagaaactcctgttactttagttaaccagtgccagtcccctgctcactccaaacccaggaattctgcccagttgatggggacacggtgggaaccagcttctgctgccttc

SEQ ID NO: 333308 - DNA, 120 bp, Artificial Sequence
  ENSG00000136997_21 (sequence is synthesized)
acaaccaggcgccagtcctgtccatgggttatctcgcaaaccccagaggatctctgggaggaatgctactattaaccctatttcacaaacaaggaaatagaagagctcaaagaggttatg

SEQ ID NO: 333309 - DNA, 120 bp, Artificial Sequence
  ENSG00000136997_22 (sequence is synthesized)
taacttatctgtagccacgcagataatacaaagcagcaatctggacccattctgttcaaaacacttaacccttcgctatcatgccttggttcatctgggtctaatgtgctgagatcaaga

SEQ ID NO: 333310 - DNA, 120 bp, Artificial Sequence
  ENSG00000136997_23 (sequence is synthesized)
aggtttaggacctaatggacagactcaagtcataacaatgctaagctctatttgtgtcccaagcactcctaagcattttatccctaactctacatcaaccccatgaaggagatactgttg

SEQ ID NO: 333311 - DNA, 120 bp, Artificial Sequence
  ENSG00000136997_24 (sequence is synthesized)
atttccccatattagaagtagagagggaagctgaggcacacaaagactcatccacatgcccaagattcactgatagggaaaagtggaagcgagatttgaacccaggctgtttactcctaa

SEQ ID NO: 333312 - DNA, 120 bp, Artificial Sequence
  ENSG00000136997_25 (sequence is synthesized)
cctgtccaagccacctctcagacgacggtaggaatcagctggctgcttgtgagtacaggagttacagtccagtgggttatgttttttaagtctcaacatctaagcctggtcaggcatcag

SEQ ID NO: 333313 - DNA, 120 bp, Artificial Sequence
  ENSG00000136997_26 (sequence is synthesized)
ttcccctttttttgtgatttattttgtttttattttgttgttcattgtttaatttttccttttacaatgagaaggtcaccatcttgactcctaccttagccatttgttgaatcagactca

SEQ ID NO: 333314 - DNA, 120 bp, Artificial Sequence
  ENSG00000136997_27 (sequence is synthesized)
tgacggctcctgggaagaagccagttcagatcataaaataaaacatatttattctttgtcatgggagtcattattttagaaactacaaactctccttgcttccatccttttttacatact

SEQ ID NO: 333315 - DNA, 120 bp, Artificial Sequence
  ENSG00000136997_28 (sequence is synthesized)
catgacacatgctcatcctgagtccttgaaaaggtatttttgaacatgtgtattaattataagcctctgaaaacctatggcccaaaccagaaatgatgttgattatataggtaaatgaag

SEQ ID NO: 333316 - DNA, 120 bp, Artificial Sequence
  ENSG00000136997_29 (sequence is synthesized)
gatgctattgctgttctaattacctcattgtctcagtctcaaagtaggtcttcagctccctgtactttgggattttaatctaccaccacccataaatcaataaataattactttctttga

SEQ ID NO: 333317 - DNA, 120 bp, Artificial Sequence
  ENSG00000136997_30 (sequence is synthesized)
ttatgcctctatcattcctccctatctacactaacatcccacgctctgaacgcgcgcccattaatacccttctttcctccactctccctgggactcttgatcaaagcgcggccctttccc

SEQ ID NO: 333318 - DNA, 120 bp, Artificial Sequence
  ENSG00000136997_31 (sequence is synthesized)
cagccttagcgaggcgccctgcagcctggtacgcgcgtggcgtggcggtgggcgcgcagtgcgttctcggtgtggagggcagctgttccgcctgcgatgatttatactcacaggacaagg

SEQ ID NO: 333319 - DNA, 120 bp, Artificial Sequence
  ENSG00000136997_32 (sequence is synthesized)
atgcgagggtctggacggctgaggacccccgagctgtgctgctcgcggccgccaccgccgggccccggccgtccctggctcccctcctgcctcgagaagggcagggcttctcagaggctt

SEQ ID NO: 333320 - DNA, 120 bp, Artificial Sequence
  ENSG00000136997_33 (sequence is synthesized)
agcagagaaagggagagggtttgagagggagcaaaagaaaatggtaggcgcgcgtagttaattcatgcggctctcttactctgtttacatcctagagctagagtgctcggctgcccggct

SEQ ID NO: 333321 - DNA, 120 bp, Artificial Sequence
  ENSG00000136997_34 (sequence is synthesized)
gagtctcctccccaccttccccaccctccccaccctccccataagcgcccctcccgggttcccaaagcagagggcgtgggggaaaagaaaaaagatcctctctcgctaatctccgcccac

SEQ ID NO: 333322 - DNA, 120 bp, Artificial Sequence
  ENSG00000136999_0 (sequence is synthesized)
aagcaccggaccagggggaaggcgagcagtgccaatctacagcgaagaaagtctcgtttggtaaaagcgagaggggaaagcctgagcatgcagagtgtgcagagcacgagcttttgtctc

SEQ ID NO: 333323 - DNA, 120 bp, Artificial Sequence
  ENSG00000136999_1 (sequence is synthesized)
cgaaagcagtgcctttgcctgaccttcctgcttctccatctcctgggacaggtcgctgcgactcagcgctgccctccccagtgcccgggccggtgccctgcgacgccgccgacctgcgcc

SEQ ID NO: 333324 - DNA, 120 bp, Artificial Sequence
  ENSG00000136999_2 (sequence is synthesized)
cccggggtgcgcgcggtgctggacggctgctcatgctgtctggtgtgtgcccgccagcgtggcgagagctgctcagatctggagccatgcgacgagagcagtggcctctactgtgatcgc

SEQ ID NO: 333325 - DNA, 120 bp, Artificial Sequence
  ENSG00000136999_3 (sequence is synthesized)
agcgcggaccccagcaaccagactggcatctgcacggcggtagagggagataactgtgtgttcgatggggtcatctaccgcagtggagagaaatttcagccaagctgcaaattccagtgc

SEQ ID NO: 333326 - DNA, 120 bp, Artificial Sequence
  ENSG00000136999_4 (sequence is synthesized)
acctgcagagatgggcagattggctgtgtgccccgctgtcagctggatgtgctactgcctgagcctaactgcccagctccaagaaaagttgaggtgcctggagagtgctgtgaaaagtgg

SEQ ID NO: 333327 - DNA, 120 bp, Artificial Sequence
  ENSG00000136999_5 (sequence is synthesized)
atctgtggcccagatgaggaggattcactgggaggccttacccttgcagcttacaggccagaagccaccctaggagtagaagtctctgactcaagtgtcaactgcattgaacagaccaca

SEQ ID NO: 333328 - DNA, 120 bp, Artificial Sequence
  ENSG00000136999_6 (sequence is synthesized)
gagtggacagcatgctccaagagctgtggtatggggttctccacccgggtcaccaataggaaccgtcaatgtgagatgctgaaacagactcggctctgcatggtgcggccctgtgaacaa

SEQ ID NO: 333329 - DNA, 120 bp, Artificial Sequence
  ENSG00000136999_7 (sequence is synthesized)
gagccagagcagccaacagataagaaaggaaaaaagtgtctccgcaccaagaagtcactcaaagccatccacctgcagttcaagaactgcaccagcctgcacacctacaagcccaggttc

SEQ ID NO: 333330 - DNA, 120 bp, Artificial Sequence
  ENSG00000136999_8 (sequence is synthesized)
tgtggggtctgcagtgatggccgctgctgcactccccacaataccaaaaccatccaggcagagtttcagtgctccccagggcaaatagtcaagaagccagtgatggtcattgggacctgc

SEQ ID NO: 333331 - DNA, 120 bp, Artificial Sequence
  ENSG00000136999_9 (sequence is synthesized)
acctgtcacaccaactgtcctaagaacaatgaggccttcctccaggagctggagctgaagactaccagagggaaaatgtaacctgtcactcaagaagcacacctacagagcacctgtagc

SEQ ID NO: 333332 - DNA, 120 bp, Artificial Sequence
  ENSG00000136999_10 (sequence is synthesized)
gaatcctatgtattttcctaatgtgatcatatgaggacctttatatctgtcttttatttaacaaaaaatgtaattaactgtaaacttggaatcaaggtaagctcaggatatggcttagga

SEQ ID NO: 333333 - DNA, 120 bp, Artificial Sequence
  ENSG00000136999_11 (sequence is synthesized)
atgacttactttcctgtggttttattacaaatgcaaatttctataaatttaagaaaacaagtatataatttactttgtagactgtttcacattgcactcatcatattttgttgtgcacta

SEQ ID NO: 333334 - DNA, 120 bp, Artificial Sequence
  ENSG00000136999_12 (sequence is synthesized)
gtgcaattccaagaaaatatcactgtaatgagtcagtgaagtctagaatcatacttaacatttcattgtacaagtattacaaccatatattgaggttcattgggaagattctctattggc

SEQ ID NO: 333335 - DNA, 120 bp, Artificial Sequence
  ENSG00000136999_13 (sequence is synthesized)
tccctttttgggtaaaccagctctgaacttccaagctccaaatccaaggaaacatgcagctcttcaacatgacatccagagatgactattacttttctgtttagttttacactaggaaac

SEQ ID NO: 333336 - DNA, 120 bp, Artificial Sequence
  ENSG00000136999_14 (sequence is synthesized)
gtgttgtatctacagtaatgaaatgtttactaagtggactggtgtcataaactttctccatttaagacacattgactcctttccaatagaaagaaactaaacagaaaactcccaatacaa

SEQ ID NO: 333337 - DNA, 120 bp, Artificial Sequence
  ENSG00000136999_15 (sequence is synthesized)
agatgactggtccctcatagccctcagacatttatatattggaagctgctgaggcccccaagttttttaattaagcagaaacagcatattagcagggattctctcatctaactgatgagt

SEQ ID NO: 333338 - DNA, 120 bp, Artificial Sequence
  ENSG00000136999_16 (sequence is synthesized)
aaactgaggcccaaagcacttgcttacatcctctgatagctgtttcaaatgtgcattttgtggaattttgagaaaaatagagcaaaatcaacatgactggtggtgagagaccacacattt

SEQ ID NO: 333339 - DNA, 120 bp, Artificial Sequence
  ENSG00000136999_17 (sequence is synthesized)
tatgagagtttggaattattgtagacatgcccaaaacttatccttgggccataattatgaaaactcatgatcaagatatatgtgtatacatacatgtatctggtttgtcaggctacaagg

SEQ ID NO: 333340 - DNA, 120 bp, Artificial Sequence
  ENSG00000136999_18 (sequence is synthesized)
taggctgcaaaattaaatctagacattcttttaatgccaccacacgtgttccgcttctctcttttaaagtatttataaaaatataaattgtacattttgtaaaatattatgtttgatttc

SEQ ID NO: 333341 - DNA, 120 bp, Artificial Sequence
  ENSG00000136999_19 (sequence is synthesized)
tctacttgtcatatcactaaataaacacgattttattgctgcgtgactctgtattactttggtgcataaaagttgaacattgttgtttactgaaaataaaattaaaatttatgaattaaa

SEQ ID NO: 333342 - DNA, 120 bp, Artificial Sequence
  ENSG00000136999_20 (sequence is synthesized)
tctcctgcagctaagtgaagctgcttcctcccttctcttttgtattccccttcccagagggcgataagcaaataataataatgcaataaatgacatgtatagagcacttactgtgtgtca

SEQ ID NO: 333343 - DNA, 120 bp, Artificial Sequence
  ENSG00000137033_0 (sequence is synthesized)
agaatactgaaaaatgaagcctaaaatgaagtattcaaccaacaaaatttccacagcaaagtggaagaacacagcaagcaaagccttgtgtttcaagctgggaaaatcccaacagaaggc

SEQ ID NO: 333344 - DNA, 120 bp, Artificial Sequence
  ENSG00000137033_1 (sequence is synthesized)
caaagaagtttgccccatgtactttatgaagctccgctctggccttatgataaaaaaggaggcctgttactttaggagagaaaccaccaaaaggccttcactgaaaacaggtagaaagca

SEQ ID NO: 333345 - DNA, 120 bp, Artificial Sequence
  ENSG00000137033_2 (sequence is synthesized)
caaaagacatctggtactcgctgcctgtcaacagcagtctactgtggagtgctttgcctttggtatatcaggggtccagaaatatactagagcacttcatgattcaagtatcacaggaat

SEQ ID NO: 333346 - DNA, 120 bp, Artificial Sequence
  ENSG00000137033_3 (sequence is synthesized)
ttcacctattacagagtatcttgcttctctaagcacatacaatgatcaatccattacttttgctttggaggatgaaagttatgagatatatgttgaagacttgaaaaaagatgaaaagaa

SEQ ID NO: 333347 - DNA, 120 bp, Artificial Sequence
  ENSG00000137033_4 (sequence is synthesized)
agataaggtgttactgagttactatgagtctcaacacccctcaaatgaatcaggtgacggtgttgatggtaagatgttaatggtaaccctgagtcctacaaaagacttctggttgcatgc

SEQ ID NO: 333348 - DNA, 120 bp, Artificial Sequence
  ENSG00000137033_5 (sequence is synthesized)
caacaacaaggaacactctgtggagctccataagtgtgaaaaaccactgccagaccaggccttctttgtccttcataatatgcactccaactgtgtttcatttgaatgcaagactgatcc

SEQ ID NO: 333349 - DNA, 120 bp, Artificial Sequence
  ENSG00000137033_6 (sequence is synthesized)
tggagtgtttataggtgtaaaggataatcatcttgctctgattaaagtagactcttctgagaatttgtgtactgaaaatatcttgtttaagctctctgaaacttagttgatggaaacctg

SEQ ID NO: 333350 - DNA, 120 bp, Artificial Sequence
  ENSG00000137033_7 (sequence is synthesized)
tgagtcttgggttgagtacccaaatgctaccactggagaaggaatgagagataaagaaagagacaggtgacatctaagggaaatgaagagtgcttagcatgtgtggaatgttttccatat

SEQ ID NO: 333351 - DNA, 120 bp, Artificial Sequence
  ENSG00000137033_8 (sequence is synthesized)
tatgtataaaaatattttttctaatcctccagttattcttttatttccctctgtataactgcatcttcaatacaagtatcagtatattaaatagggtattggtaaagaaacggtcaacat

SEQ ID NO: 333352 - DNA, 120 bp, Artificial Sequence
  ENSG00000137033_9 (sequence is synthesized)
tctaaagagatacagtctgacctttacttttctctagtttcagtccagaaagaacttcatatttagagctaaggccactgaggaaagagccatagcttaagtctctatgtagacagggat

SEQ ID NO: 333353 - DNA, 120 bp, Artificial Sequence
  ENSG00000137033_10 (sequence is synthesized)
ccattttaaagagctacttagagaaataattttccacagttccaaacgataggctcaaacactagagctgctagtaaaaagaagaccagatgcttcacagaattatcattttttcaactg

SEQ ID NO: 333354 - DNA, 120 bp, Artificial Sequence
  ENSG00000137033_11 (sequence is synthesized)
aataaaacaccaggtttgtttgtagatgtcttaggcaacactcagagcagatctcccttactgtcaggggatatggaacttcaaaggcccacatggcaagccaggtaacataaatgtgtg

SEQ ID NO: 333355 - DNA, 120 bp, Artificial Sequence
  ENSG00000137033_12 (sequence is synthesized)
taaaaaatttagaaaaataaatccagtatttgtaaagtgaataacttcatttctaattgtttaatttttaaaattctgatttttatatattgagtttaagcaaggcattcttacacgagg

SEQ ID NO: 333356 - DNA, 120 bp, Artificial Sequence
  ENSG00000137033_13 (sequence is synthesized)
gcattcttacacgaggaagtgaagtaaattttagttcagacataaaatttcacttattaggaatatgtaacatgctaaaacttttttttttttaaagagtactgagtcacaacatgtttt

SEQ ID NO: 333357 - DNA, 120 bp, Artificial Sequence
  ENSG00000137033_14 (sequence is synthesized)
agagcatccaagtaccatataatccaactatcatggtaaggccagaaatcttctaacctaccagagcctagatgagacaccgaattaacattaaaatttcagtaactgactgtccctcat

SEQ ID NO: 333358 - DNA, 120 bp, Artificial Sequence
  ENSG00000137033_15 (sequence is synthesized)
gtccatggcctaccatcccttctgaccctggcttccagggacctatgtcttttaatactcactgtcacattgggcaaagttgcttctaatccttatttcccatgtgcacaagtctttttg

SEQ ID NO: 333359 - DNA, 120 bp, Artificial Sequence
  ENSG00000137033_16 (sequence is synthesized)
tattccagcttcctgataacactgcttactgtggaatattcatttgacatctgtctcttttcatttcttttaactaccatgcccttgatatatcttttgcacctgctgaacttcatttct

SEQ ID NO: 333360 - DNA, 120 bp, Artificial Sequence
  ENSG00000137033_17 (sequence is synthesized)
gtatcacctgacctctggatgccaaaacgtttattctgctttgtctgttgtagaattttagataaagctattaatggcaatatttttttgctaaacgtttttgttttttactgtcactag

SEQ ID NO: 333361 - DNA, 120 bp, Artificial Sequence
  ENSG00000137033_18 (sequence is synthesized)
ctagggcaataaaatttatactcaaccatataataacattttttaactactaaaggagtagtttttattttaaagtcttagcaatttctattacaacttttcttagacttaacacttatg

SEQ ID NO: 333362 - DNA, 120 bp, Artificial Sequence
  ENSG00000137033_19 (sequence is synthesized)
atgactaacatagtaacagaatctttatgaaatatgaccttttctgaaaatacatacttttacatttctactttattgagacctattagatgtaagtgctagtagaatataagataaaag

SEQ ID NO: 333363 - DNA, 120 bp, Artificial Sequence
  ENSG00000137033_20 (sequence is synthesized)
aggctgagaattaccatacaagggtattacaactgtaaaacaatttatctttgtttcattgttctgtcaataattgttaccaaagagataaaaataaaagcagaatgtatatcatcccat

SEQ ID NO: 333364 - DNA, 120 bp, Artificial Sequence
  ENSG00000137033_21 (sequence is synthesized)
aaagcagaatgtatatcatcccatctgaaaaacactaattattgacatgtgcatctgtacaataaacttaaaatgattattaaataatcaaatatatctactacattgtttatattattg

SEQ ID NO: 333365 - DNA, 120 bp, Artificial Sequence
  ENSG00000137033_22 (sequence is synthesized)
aaatgaagcctaaaatgaagtattcaaccaacaaaatttccacagcaaagtggaagaacacagcaagcaaagccttgtgtttcaagctgggaagcatgtggtcttaacttgcgactactg

SEQ ID NO: 333366 - DNA, 120 bp, Artificial Sequence
  ENSG00000137033_23 (sequence is synthesized)
atgaagaagagaataacagatgaagatatttgaataatcatcttagtcaatttgtgttaccatagaaatatacctgaagctgggtaatttaaccctttttccatttagaaaaaaaagtgc

SEQ ID NO: 333367 - DNA, 120 bp, Artificial Sequence
  ENSG00000137033_24 (sequence is synthesized)
atctctttgaggctgaagcaaatctgattttcaatgcaaaaatagaatacaaaaactgttcttggagttatttctaaacagaactaccatcagcattgtctatttcagaaaaaatgagat

SEQ ID NO: 333368 - DNA, 120 bp, Artificial Sequence
  ENSG00000137033_25 (sequence is synthesized)
tcaccaaatgaaacttcagcaagcaactaactgttcaagaagtgttcaagaatgttaacatcacatgtaggaatgctacattttccaggatttgacattttcagcgatcaagaattacta

SEQ ID NO: 333369 - DNA, 75 bp, Artificial Sequence
  ENSG00000137033_26 (sequence is synthesized)
ttttccaggatttgacattttcagcgatcaagaattactatattttatcaatgaaaataccactactaaaaacag

SEQ ID NO: 333370 - DNA, 120 bp, Artificial Sequence
  ENSG00000137033_27 (sequence is synthesized)
agtctacagactcctccgaacacagagctgcagctcttcagggaagaaatcaaaacaagatcacaagaatactgaaaaatgaagcctaaaatgaagtattcaaccaacaaaatttccaca

SEQ ID NO: 333371 - DNA, 120 bp, Artificial Sequence
  ENSG00000137038_0 (sequence is synthesized)
agtttgaaccaaagacgcccaaggttgaggccgagttccagagcatggggtctcggttgtcccagccttttgagtcctatatcactgcgcctcccggtaccgccgccgcgcccgccaaac

SEQ ID NO: 333372 - DNA, 120 bp, Artificial Sequence
  ENSG00000137038_1 (sequence is synthesized)
ctgcgcccccagctacacccggagcgccgacctccccagcagaacaccgcctgttgaagacctgctggagctgtcgcgtgctttctgggttggggctgatgggggcgggcgggtacgtgt

SEQ ID NO: 333373 - DNA, 120 bp, Artificial Sequence
  ENSG00000137038_2 (sequence is synthesized)
actgggtggcacggaagcccatgaagatgggataccccccgagtccatggaccattacgcagatggtcatcggcctcagcattgccacctggggtatcgttgtcatggcagaccccaaag

SEQ ID NO: 333374 - DNA, 120 bp, Artificial Sequence
  ENSG00000137038_3 (sequence is synthesized)
ggaaggcctaccgcgttgtttgaaagtaccaccagtgaatctgtcttctgtctctgtccctttccccgtgacacacacagcaggcatggaatttaatgggtgttctggacagacacttgt

SEQ ID NO: 333375 - DNA, 120 bp, Artificial Sequence
  ENSG00000137038_4 (sequence is synthesized)
acatggacagacatcactactgtggatactacaagactgagaagaaaatcgtatgttgtcattctctggctatggagtgtttgtggccttcacagatttcacaggaaccaataaatccct

SEQ ID NO: 333376 - DNA, 120 bp, Artificial Sequence
  ENSG00000137038_5 (sequence is synthesized)
cagagaagtaaacaggttctttgtcttatctggggaaggaaagtataacttatatttaaatataattgcttaattaagcattatatataaacataatagtatgtcttatataattgcatg

SEQ ID NO: 333377 - DNA, 120 bp, Artificial Sequence
  ENSG00000137038_6 (sequence is synthesized)
agttatatagttagtataatttttaaaacttttaaatacagcatatggtaaaccaacgggaaaattagctattttacttcattattttaaagagttctttttatttctttcataattgga

SEQ ID NO: 333378 - DNA, 120 bp, Artificial Sequence
  ENSG00000137038_7 (sequence is synthesized)
aaagagttctttttatttctttcataattggatcaacaactgttaacctaaccctgggtgggcatcatgcaatatatagaagtacgtgaaattttctgtgtatgaattgctgatactttg

SEQ ID NO: 333379 - DNA, 120 bp, Artificial Sequence
  ENSG00000137038_8 (sequence is synthesized)
caaggcattttcaaatccatcaccttatgagagcttcacagctagtctgaggtagttacttcattggaggtaaaacttaaaacacaagaaagagcccacatgatttgcctagggtcattc

SEQ ID NO: 333380 - DNA, 120 bp, Artificial Sequence
  ENSG00000137038_9 (sequence is synthesized)
agtaagtccgtgatggagctagaacttgttcttgtcagttttttgttctagtcttccctttcatggaggcaagaataaccattatgaaacagttagataatcataaaaatcagcatacaa

SEQ ID NO: 333381 - DNA, 120 bp, Artificial Sequence
  ENSG00000137038_10 (sequence is synthesized)
atcttttgattctttttccacaagcactagatatgtttctgtgatgattttgagataagtactcaaaattacatagttcatttctaagagaaggccatgttttctacctattgggttttt

SEQ ID NO: 333382 - DNA, 120 bp, Artificial Sequence
  ENSG00000137038_11 (sequence is synthesized)
ctaccctgagatactatggcttctttgtaaaggtatataaagtgtttttcaaagcggaaagatactgttaaattcagctgctaatcatagtgtatttgtttggaatgacatgttgagcag

SEQ ID NO: 333383 - DNA, 120 bp, Artificial Sequence
  ENSG00000137038_12 (sequence is synthesized)
gtagtacctttacggctgttgctttttgcagcattatgtggaagtgcctaagtctatttagcctcacagatgactttagaatcttgtattttctacatcagagttcatagcggggatggt

SEQ ID NO: 333384 - DNA, 120 bp, Artificial Sequence
  ENSG00000137038_13 (sequence is synthesized)
gctacatatatctatgcaactgaaaaagaaaacatttcaaacctaaagtacgcaacaagatattatttatatgaaatccatagctcagttatgctatgttcatgaatagagaagttttaa

SEQ ID NO: 333385 - DNA, 120 bp, Artificial Sequence
  ENSG00000137038_14 (sequence is synthesized)
gttggaagggaccatggatgacccaaagcagatacatatggtcattcatatacctaaaatacctacaaagacaagttgttccctggtttaaaaggcagtctgttctattgatggactgct

SEQ ID NO: 333386 - DNA, 120 bp, Artificial Sequence
  ENSG00000137038_15 (sequence is synthesized)
ttagtccctgaacattttctttggttaaaccaaaaacacataaacctaacttggtcttggcttgatctactgggtaaataataactcttaaatatatatacagttgacccttggacaaca

SEQ ID NO: 333387 - DNA, 120 bp, Artificial Sequence
  ENSG00000137038_16 (sequence is synthesized)
caggagttaagagcgctgaacatttgctcagtggagaatctgcatataacctgactcctcaaaaacttaattagtagttagtttacaattgactggaagccttattgataacataaagca

SEQ ID NO: 333388 - DNA, 120 bp, Artificial Sequence
  ENSG00000137038_17 (sequence is synthesized)
gttgattaacacattttttgtgttgtatgtattatattccgtattcttacaagaaggtaagctagagaaaaaaaaaatgttattaaggaagtaatatattcactattcgttaggtagaag

SEQ ID NO: 333389 - DNA, 120 bp, Artificial Sequence
  ENSG00000137038_18 (sequence is synthesized)
tgaatcatcctaaaggtcttcatcctcatcttcacgctgagtagtctgaggagcaagaggagttggtctttctgtcccagtggcagaggtggaagaaaatccacagatacgtggacctgc

SEQ ID NO: 333390 - DNA, 120 bp, Artificial Sequence
  ENSG00000137038_19 (sequence is synthesized)
gcagttcaaacctgtgttgtttgggtcaactgtattgtaatagcattttaatgtttttctcagacttttacgagtatgaatctgagctttttctgaataaacctgcctgctcaccattaa

SEQ ID NO: 333391 - DNA, 120 bp, Artificial Sequence
  ENSG00000137038_20 (sequence is synthesized)
aggcctctggataggagatatgacatgcccaaggtctcgcagttcatgtgaggcaggaaacttaagagagccagacttctttaaggagactgaaaggtgattcatttagcattgccacct

SEQ ID NO: 333392 - DNA, 88 bp, Artificial Sequence
  ENSG00000137038_21 (sequence is synthesized)
aaccacgattatgcacccagagcaacaggcagatactacactgcactatgggcttccctcatggccatgactctttcactatgtcctg

SEQ ID NO: 333393 - DNA, 120 bp, Artificial Sequence
  ENSG00000137040_0 (sequence is synthesized)
agctttgacagagcgcaatggcggcaaccgcgtctgcaggggtgccggcgaccgtgtcagaaaagcaagagttttaccagcttctgaagaacctgatcaatccaagctgtatggtgcgga

SEQ ID NO: 333394 - DNA, 120 bp, Artificial Sequence
  ENSG00000137040_1 (sequence is synthesized)
ggcaagcagaggaaatctatgaaaatatcccaggtctgtgtaagactaccttcctcttagatgccgtcagaaatagaagagcaggttatgaggtgagacaaatggctgccgcactgctac

SEQ ID NO: 333395 - DNA, 120 bp, Artificial Sequence
  ENSG00000137040_2 (sequence is synthesized)
gacggcttttgtcctctgggtttgaggaggtttatccaaatctgcctgctgatgttcagagagatgtcaagattgaactgattctggctgttaagttagaaacacatgctagcatgagga

SEQ ID NO: 333396 - DNA, 120 bp, Artificial Sequence
  ENSG00000137040_3 (sequence is synthesized)
aaaaactttgtgatatttttgcagtgctggccaggaatttgatagatgaggatggcactaaccactggccggaaggtctgaagtttcttattgattcaatctactccaaaaatgtggttc

SEQ ID NO: 333397 - DNA, 120 bp, Artificial Sequence
  ENSG00000137040_4 (sequence is synthesized)
tatgggaagttgcacttcacgttttctggcactttcctgggatttttgggacccaagagcggcatgatttggatatcatcaaacggttgttggaccagtgtattcaagatcaagaacatc

SEQ ID NO: 333398 - DNA, 120 bp, Artificial Sequence
  ENSG00000137040_5 (sequence is synthesized)
cagcaatcaggacattatccgctagagctgcagctgcatttgtacttgctaatgagaataatattgctcttttcaaagactttgcagacttgcttcctggaatcttacaggctgtgaatg

SEQ ID NO: 333399 - DNA, 120 bp, Artificial Sequence
  ENSG00000137040_6 (sequence is synthesized)
actcatgctaccaggatgatgattcagtgctagaatcccttgttgagattgcagataccgtacctaagtacttgggtccttatttagaagatactctacagttgagtttgaagttatgtg

SEQ ID NO: 333400 - DNA, 120 bp, Artificial Sequence
  ENSG00000137040_7 (sequence is synthesized)
gagactctaggcttagtaatctgcagcgccagctggccctcgaagttatagtgaccttgtctgaaactgccactccgatgttgaaaaaacatacaaatattattgcacaggcagttcctc

SEQ ID NO: 333401 - DNA, 120 bp, Artificial Sequence
  ENSG00000137040_8 (sequence is synthesized)
atatattagcaatgatggttgatctacaagatgatgaggactgggtaaatgctgatgaaatggaagaagatgattttgacagcaatgcagttgctgcggagagtgcactagacagactgg

SEQ ID NO: 333402 - DNA, 120 bp, Artificial Sequence
  ENSG00000137040_9 (sequence is synthesized)
cttgtgggcttggtggaaaagttgttttaccaatgaccaaggagcatatcatgcagatgcttcagagccctgactggaagtatcgacatgctggattaatggccttatctgccattggag

SEQ ID NO: 333403 - DNA, 120 bp, Artificial Sequence
  ENSG00000137040_10 (sequence is synthesized)
aaggatgccatcaacaaatggaatcaattctagatgaaacagttaactccgttttgctttttcttcaggatcctcatccaagggtgagggctgcagcctgtactacacttggacagatgg

SEQ ID NO: 333404 - DNA, 120 bp, Artificial Sequence
  ENSG00000137040_11 (sequence is synthesized)
ctacagattttgcacctaatttccaaaagaaatttcatgaaacagtgattgcagctctgttacgtaccatggaaaatcaaggtaatcagcgtgtgcaatcacatgcagcttctgctctta

SEQ ID NO: 333405 - DNA, 120 bp, Artificial Sequence
  ENSG00000137040_12 (sequence is synthesized)
ttatttttattgaagactgccctaaatcattgctagttctatatgtggatagtatggtgaaaaatctacattccgtcttggtgattaaacttcaagagttgattcggaatggaactaagt

SEQ ID NO: 333406 - DNA, 120 bp, Artificial Sequence
  ENSG00000137040_13 (sequence is synthesized)
tggctttggaacaacttgtgacaaccattgcatcagttgcagatacaatagaagaaaaatttgtcccatattatgatatattcatgccctcactaaagcacattgttgagcttgctgttc

SEQ ID NO: 333407 - DNA, 120 bp, Artificial Sequence
  ENSG00000137040_14 (sequence is synthesized)
agaaggaactcaagcttctgagaggaaaaactatcgagtgcattagccatattggtcttgctgttgggaaggaaaaatttatgcaagatgcatcaaatgtgatgcagctgttgttgaaga

SEQ ID NO: 333408 - DNA, 120 bp, Artificial Sequence
  ENSG00000137040_15 (sequence is synthesized)
cacaatcagacttaaataatatggaagatgatgaccctcagacctcttacatggtttcagcatgggctagaatgtgtaaaattcttggaaaagattttcaacagtaccttccactggtta

SEQ ID NO: 333409 - DNA, 120 bp, Artificial Sequence
  ENSG00000137040_16 (sequence is synthesized)
tcgagcctcttattaagactgcttcagctaaacctgatgttgctctcttagacacacaggatgtggaaaatatgagtgacgatgatggctggcaatttgtaaatcttggagaccagcaga

SEQ ID NO: 333410 - DNA, 120 bp, Artificial Sequence
  ENSG00000137040_17 (sequence is synthesized)
gttttggaattaaaacttcaggacttgaagcaaaagcaactgcttgccaaatgttggtttactatgctaaggagttaagggaagggtttgtggaatatacagaacaagttgtgaagctga

SEQ ID NO: 333411 - DNA, 120 bp, Artificial Sequence
  ENSG00000137040_18 (sequence is synthesized)
tggttcctttactgaaattttatttccatgacaatgttcgagtggcagcagcagagtccatgccttttctcctggaatgtgcaagaattcgtggcccagagtatcttgcacagatgtggc

SEQ ID NO: 333412 - DNA, 120 bp, Artificial Sequence
  ENSG00000137040_19 (sequence is synthesized)
accagatacagatgtgctctcagaaataatgaattcttttgcaaagtccattgaagttatgggagatggttgccttaatgatgaacacttggaagaactgggaggaatactgaaagcaaa

SEQ ID NO: 333413 - DNA, 120 bp, Artificial Sequence
  ENSG00000137040_20 (sequence is synthesized)
acttgaagggcactttaaaaaccaagaattgagacaggtgaaaagacaggaagaaaactatgatcaacaggttgagatgtctctgcaagatgaggatgaatgtgatgtttatattctgac

SEQ ID NO: 333414 - DNA, 120 bp, Artificial Sequence
  ENSG00000137040_21 (sequence is synthesized)
caaagtatcagatattttgcactcattatttagtacttataaggaaaagattttaccatggtttgaacaactacttccattaattgtaaatctaatttgttcaagtaggccatggccaga

SEQ ID NO: 333415 - DNA, 120 bp, Artificial Sequence
  ENSG00000137040_22 (sequence is synthesized)
cagacagtggggattgtgcatatttgatgacatcatagagcactgcagtccaacttcatttaaatatgtagaatattttcggtggccaatgctactaaatatgcgagataacaaccctga

SEQ ID NO: 333416 - DNA, 120 bp, Artificial Sequence
  ENSG00000137040_23 (sequence is synthesized)
agtcaggcaagctgctgcttatggcctgggtgtcatggcacagtttggtggagatgattatcgttctttatgttcagaagctgttccacttctggtaaaagttattaagtgtgcaaattc

SEQ ID NO: 333417 - DNA, 120 bp, Artificial Sequence
  ENSG00000137040_24 (sequence is synthesized)
caaaaccaaaaaaaatgtcattgctacagagaactgtatctcagcaatagggaagattttgaagtttaagcctaactgtgtaaatgtagatgaagttcttccacactggttatcatggct

SEQ ID NO: 333418 - DNA, 120 bp, Artificial Sequence
  ENSG00000137040_25 (sequence is synthesized)
tccactgcatgaagataaagaggaagctattcagactttgagttttctctgtgacctaattgaaagtaaccacccagttgtaattggtccaaataattccaatcttcccaaaataatcag

SEQ ID NO: 333419 - DNA, 120 bp, Artificial Sequence
  ENSG00000137040_26 (sequence is synthesized)
tataattgcagaaggaaaaattaatgagactattaactatgaggatccttgtgccaaacgcctagctaatgtcgtgcgtcaggtacagacttctgaagatttatggttggaatgtgtatc

SEQ ID NO: 333420 - DNA, 120 bp, Artificial Sequence
  ENSG00000137040_27 (sequence is synthesized)
acaacttgatgatgaacagcaggaagccttacaggagttgctaaattttgcttgaagcactttaatataacttgaatattatctattataaaagtaactacaaataagtgttgtgaatag

SEQ ID NO: 333421 - DNA, 120 bp, Artificial Sequence
  ENSG00000137040_28 (sequence is synthesized)
attttattataaatcagagaactgttttctccctgctaagcagtttatagttcttctccatgtttctccagaattaatcagtgttagtcctctgtttatctcgcatgttttatcttccaa

SEQ ID NO: 333422 - DNA, 120 bp, Artificial Sequence
  ENSG00000137040_29 (sequence is synthesized)
acacagaccttggtgataacctgtgcttcaaactgtcttaaacaatgtttgtcacctttcccctagttgatgtaaagtatataaattgttgctatttgtttgaactattattgatgctag

SEQ ID NO: 333423 - DNA, 120 bp, Artificial Sequence
  ENSG00000137040_30 (sequence is synthesized)
ccaagcagtatacttgatgtgaagatgtcatgctatcacaatatgctaagagctcacaaaaataagatagaatttccaggacaaacatctttggaattgtgagtgaaggatatagtggca

SEQ ID NO: 333424 - DNA, 120 bp, Artificial Sequence
  ENSG00000137040_31 (sequence is synthesized)
ggcttgtccctctttaattaatactcttggtatttgtggtgatgggaggatgctgttactaggagagttttgagatactgcagtggatgtgggatgtatatgaacttcttcataatgtac

SEQ ID NO: 333425 - DNA, 120 bp, Artificial Sequence
  ENSG00000137040_32 (sequence is synthesized)
tcctgggaactgggtaggacatatccatattgtagttcccaaggtgtctggttgagagttagagaacttttaaatttctttagccagacaggtctctatttttttaagttatccaggact

SEQ ID NO: 333426 - DNA, 120 bp, Artificial Sequence
  ENSG00000137040_33 (sequence is synthesized)
ccaagaaccatagttactgaaaagggagtcctgatacatctaatattggtagcatgtaacagtgtttgacaaagagtaagtaagcagtattcttgggagtcagtgttatgtgtttcagca

SEQ ID NO: 333427 - DNA, 120 bp, Artificial Sequence
  ENSG00000137040_34 (sequence is synthesized)
gagtattattttgtatatgtatgccattttctccctgcaaagcagctcaacaagagaaaaagctctagttatagggcttaaattgatttctatttcaaataatttcctaagagattctag

SEQ ID NO: 333428 - DNA, 120 bp, Artificial Sequence
  ENSG00000137040_35 (sequence is synthesized)
agtagaactgaagagtattctattggaaaagtgaaaggaaagaaatgtaattttctttgaacatgaaaaagaaaacaactttgagagtagtcatttagcagtagatgtgcattattatga

SEQ ID NO: 333429 - DNA, 120 bp, Artificial Sequence
  ENSG00000137040_36 (sequence is synthesized)
gaaaacagttctataagtccagggttaattatattaattggaatgtcagtctttaatgtcgagcttattgtagggtagaaaagagctttctactcagctaacgattactcattgatccaa

SEQ ID NO: 333430 - DNA, 120 bp, Artificial Sequence
  ENSG00000137040_37 (sequence is synthesized)
aacttaaatacatctataatttcctggggctattgtgagtactgtgtatgtatttagcaaatatttaagacctagtaagtgctcaataaattgtagctgttattgctgttgttgtttgta

SEQ ID NO: 333431 - DNA, 120 bp, Artificial Sequence
  ENSG00000137054_0 (sequence is synthesized)
cttttccggcccgcagcgcggcctgggctcccgcgtgtttaaaagtgcgcttgtggctgctgctgtcttaactcctgtgcttggcggacagacaggcgagatggcggcggaggtgttgcc

SEQ ID NO: 333432 - DNA, 120 bp, Artificial Sequence
  ENSG00000137054_1 (sequence is synthesized)
gagtgcgaggtggcagtattgtggggcgcccgacgggagccagagagctgtactggtccagttctccaacgggaagctacagagtccaggcaacatgcgctttaccttgtatgagaacaa

SEQ ID NO: 333433 - DNA, 120 bp, Artificial Sequence
  ENSG00000137054_2 (sequence is synthesized)
agattccaccaaccccaggaagaggaatcaacggatcctggcagctgaaacagataggctctcctatgtgggaaacaattttgggactggagccctcaaatgcaacactttgtgcaggca

SEQ ID NO: 333434 - DNA, 120 bp, Artificial Sequence
  ENSG00000137054_3 (sequence is synthesized)
ctttgtgggaattttgaacaagacctctggccaaatggaagtatatgatgctgaattgttcaacatgcagccactattttcagatgtatcagttgagagtgaactggcgctagagagtca

SEQ ID NO: 333435 - DNA, 120 bp, Artificial Sequence
  ENSG00000137054_4 (sequence is synthesized)
gaccaaaacttacagagaaaagatggattcttgtattgaagcctttggtaccaccaaacagaagcgagctctgaacaccaggagaatgaacagagttggcaatgaatctttgaatcgtgc

SEQ ID NO: 333436 - DNA, 120 bp, Artificial Sequence
  ENSG00000137054_5 (sequence is synthesized)
agtggctaaagctgcagagactatcattgatacgaagggtgtgactgctctggtcagcgatgctatccacaatgacttgcaagatgactccctctaccttcctccctgctatgatgatgc

SEQ ID NO: 333437 - DNA, 120 bp, Artificial Sequence
  ENSG00000137054_6 (sequence is synthesized)
agccaagcctgaagacgtgtataaatttgaagatcttctttcccctgcggagtatgaagctcttcagagcccatctgaagctttcaggaacgtcacgtcagaagaaatactgaagatgat

SEQ ID NO: 333438 - DNA, 120 bp, Artificial Sequence
  ENSG00000137054_7 (sequence is synthesized)
gatgtggagagccgagaccgccaggcccgatgcatatggtttctggataccctcatcaaatttcgagctcatagggtagttaagcggaaaagtgctctgggacctggagttccccacatc

SEQ ID NO: 333439 - DNA, 120 bp, Artificial Sequence
  ENSG00000137054_8 (sequence is synthesized)
atcaacaccaaactgctgaagcactttacttgcttgacctacaacaatggcagattacggaacttaatttcggattctatgaaggcgaagattactgcatatgtgatcatacttgccttg

SEQ ID NO: 333440 - DNA, 120 bp, Artificial Sequence
  ENSG00000137054_9 (sequence is synthesized)
cacatacatgacttccaaattgacctgacagtgttacagagggacttgaagctcagtgagaaaaggatgatggagatagccaaagccatgaggctgaagatctccaaaagaagggtgtct

SEQ ID NO: 333441 - DNA, 120 bp, Artificial Sequence
  ENSG00000137054_10 (sequence is synthesized)
gtggccgccggcagtgaagaagatcacaagctgggcaccctgtccctcccgctgcctccagcccagacctcagaccgcctggcaaagcggaggaagattacctagacgcatgctttccag

SEQ ID NO: 333442 - DNA, 120 bp, Artificial Sequence
  ENSG00000137054_11 (sequence is synthesized)
ctttccagacagggcgttttggctgcatcacagccactggctggtcctattcatttccatttttatgtatgttttgaaaagaaaaggtccggggatggtggctcacacctgaaatcccag

SEQ ID NO: 333443 - DNA, 120 bp, Artificial Sequence
  ENSG00000137054_12 (sequence is synthesized)
gaggccgaggcaggaagatcattgagctcaggagtttgaaaccagtctggacaacatagggagaccccatctctaccggaggaaaaaaaaaagagtcaggcctggtggtgtgcgcctgta

SEQ ID NO: 333444 - DNA, 120 bp, Artificial Sequence
  ENSG00000137054_13 (sequence is synthesized)
cagctactcgggaggctgaggcaggacgattacttgagcttgggaaatcaaggttgcagtgagctatgattgtgtggccacactccatcctgggtcacagagtgagaccttgtctcaaaa

SEQ ID NO: 333445 - DNA, 120 bp, Artificial Sequence
  ENSG00000137054_14 (sequence is synthesized)
aaaaaagtaacataaggaaaaaagaagccttgctttagcacaggtatgaagccagaagccagcatctcaactgtgcttgtcttatgcagaaatataaagcgatggccaggttggacttca

SEQ ID NO: 333446 - DNA, 120 bp, Artificial Sequence
  ENSG00000137054_15 (sequence is synthesized)
ctctaaccctctccccttccgtctcggtacctcagctgtcctctcgccctccgttgggcttctccccagcggggccgggacccctctagtctccaccactcccctgggctctgtcagggc

SEQ ID NO: 333447 - DNA, 120 bp, Artificial Sequence
  ENSG00000137054_16 (sequence is synthesized)
tcccctgtccgtctttctgtcactacctcccagccagattgggacatcccactcacccgctccccagagctgtgtccaggaccctgctgaccccctcacccaccaggtctcccgcctccc

SEQ ID NO: 333448 - DNA, 120 bp, Artificial Sequence
  ENSG00000137054_17 (sequence is synthesized)
ccatttccctctcttcactgggcaggggttccttctgtcactttaggtatgtaccaggcctctgctgtcagcctccttccgcgagacattccctcctgtcacagcccctccccagggttc

SEQ ID NO: 333449 - DNA, 120 bp, Artificial Sequence
  ENSG00000137054_18 (sequence is synthesized)
tcccacctccctacctcctcttctcagctggccccggatctcctccagttccctttgggtcaggacccgagcttccttgccatccccattctgacactccctcccagtgacagtctagtc

SEQ ID NO: 333450 - DNA, 120 bp, Artificial Sequence
  ENSG00000137054_19 (sequence is synthesized)
ccaccgtacattgtgtggtacattgtgtggccttctgctctcatctcattcttgggctgcactcttacagtccagttctccaacgggaagctacagagtccaggcaacatgcgctttacc

SEQ ID NO: 333451 - DNA, 120 bp, Artificial Sequence
  ENSG00000137055_0 (sequence is synthesized)
aggcttgctgtgtcactcggcccgctcggcgcgccccttcccagccgcccttccgtaccggctctcgggctcttccggtctccggccgccccttacctgcaggctcttctcccgccgcgg

SEQ ID NO: 333452 - DNA, 120 bp, Artificial Sequence
  ENSG00000137055_1 (sequence is synthesized)
cccggcgctctccgagtcgcccctgcggactggtctcgcacagtgcctgggcaccgggcgccagacagacactggccatgacgagcggcgcaaccaggtaccggctgagctgctcgctcc

SEQ ID NO: 333453 - DNA, 120 bp, Artificial Sequence
  ENSG00000137055_2 (sequence is synthesized)
ggggccacgagctggacgtacggggcctggtgtgctgcgcctatccgccgggagcctttgtgtccgtgtcccgagaccgcaccacccgcctctgggccccagacagtccaaacaggagct

SEQ ID NO: 333454 - DNA, 120 bp, Artificial Sequence
  ENSG00000137055_3 (sequence is synthesized)
ttacagaaatgcactgtatgagtggccattccaattttgtatcttgtgtatgcatcataccctcaagtgacatctaccctcatggcctaattgccaccggtggaaatgaccacaatatat

SEQ ID NO: 333455 - DNA, 120 bp, Artificial Sequence
  ENSG00000137055_4 (sequence is synthesized)
gcattttctcactggacagtccaatgccactttatattctaaaaggccacaaaaatactgtttgtagtctatcatctggaaaatttgggacattacttagtggttcatgggacaccactg

SEQ ID NO: 333456 - DNA, 120 bp, Artificial Sequence
  ENSG00000137055_5 (sequence is synthesized)
ctaaagtctggctgaatgacaagtgcatgatgaccttgcagggtcatacagctgcagtgtgggcggtaaagatcttacctgaacagggcttaatgttgactggatcagcagacaagactg

SEQ ID NO: 333457 - DNA, 120 bp, Artificial Sequence
  ENSG00000137055_6 (sequence is synthesized)
ttaaactgtggaaggctggaagatgtgagaggactttttcagggcatgaagactgtgtaagaggtttggcaattttgagtgaaacagaatttctttcctgtgcaaatgatgctagtatta

SEQ ID NO: 333458 - DNA, 120 bp, Artificial Sequence
  ENSG00000137055_7 (sequence is synthesized)
gaaggtggcaaatcactggcgagtgtcttgaagtatattatggacatacaaattatatttatagcatatccgtttttccaaattgtagagactttgtgacaacagcagaggacagatctc

SEQ ID NO: 333459 - DNA, 120 bp, Artificial Sequence
  ENSG00000137055_8 (sequence is synthesized)
tgagaatctggaaacatggggaatgtgctcaaactatccgacttccagctcagtctatatggtgctgctgtgtgctcgacaatggtgacattgtggttggtgcgagtgatggcattatta

SEQ ID NO: 333460 - DNA, 120 bp, Artificial Sequence
  ENSG00000137055_9 (sequence is synthesized)
gagtgtttacagaatcagaagatcgaacagcaagtgctgaagaaatcaaggcttttgaaaaagaactgtctcacgcaaccattgattctaaaactggcgatttaggggacatcaatgctg

SEQ ID NO: 333461 - DNA, 120 bp, Artificial Sequence
  ENSG00000137055_10 (sequence is synthesized)
agcagcttcctgggagggaacatcttaatgaacctggtactagagaaggacagactcgtctaatcagagatggggagaaagtcgaagcctatcagtggagtgttagtgaagggaggtgga

SEQ ID NO: 333462 - DNA, 120 bp, Artificial Sequence
  ENSG00000137055_11 (sequence is synthesized)
taaaaattggtgatgttgttggctcatctggtgctaatcagcaaacatctggaaaagttttatatgaagggaaagaatttgattatgttttctcaattgatgtcaatgaaggtggaccat

SEQ ID NO: 333463 - DNA, 120 bp, Artificial Sequence
  ENSG00000137055_12 (sequence is synthesized)
catataaattgccatataataccagtgatgacccttggttaactgcatacaacttcttacagaagaatgatttgaatcctatgtttctggatcaagtagctaaatttattattgataaca

SEQ ID NO: 333464 - DNA, 120 bp, Artificial Sequence
  ENSG00000137055_13 (sequence is synthesized)
caaaaggtcaaatgttgggacttgggaatcccagcttttcagatccatttacaggtggtggtcggtatgttccgggctcttcgggatcttctaacacactacccacagcagatcctttta

SEQ ID NO: 333465 - DNA, 120 bp, Artificial Sequence
  ENSG00000137055_14 (sequence is synthesized)
caggtgctggtcgttatgtaccaggttctgcaagtatgggaactaccatggccggagttgatccatttacagggaatagtgcctaccgatcagctgcatctaaaacaatgaatatttatt

SEQ ID NO: 333466 - DNA, 120 bp, Artificial Sequence
  ENSG00000137055_15 (sequence is synthesized)
tccctaaaaaagaggctgtcacatttgaccaagcaaaccctacacaaatattaggtaaactgaaggaacttaatggaactgcacctgaagagaagaagttaactgaggatgacttgatac

SEQ ID NO: 333467 - DNA, 120 bp, Artificial Sequence
  ENSG00000137055_16 (sequence is synthesized)
ttcttgagaagatactgtctctaatatgtaatagttcttcagaaaaacccacagtccagcaacttcagattttgtggaaagctattaactgtcctgaagatattgtctttcctgcacttg

SEQ ID NO: 333468 - DNA, 120 bp, Artificial Sequence
  ENSG00000137055_17 (sequence is synthesized)
acattcttcggttgtcaattaaacaccccagtgtgaatgagaacttctgcaatgaaaaggaaggggctcagttcagcagtcatcttatcaatcttctgaaccctaaaggaaagccagcaa

SEQ ID NO: 333469 - DNA, 120 bp, Artificial Sequence
  ENSG00000137055_18 (sequence is synthesized)
accagctgcttgctctcaggactttttgcaattgttttgttggccaggcaggacaaaaactcatgatgtcccagagggaatcactgatgtcccatgcaatagaactgaaatcagggagca

SEQ ID NO: 333470 - DNA, 120 bp, Artificial Sequence
  ENSG00000137055_19 (sequence is synthesized)
tctgtttgttttcataaagaccataacattgaagggaaagcccaatgtttgtcactaattagcacaatcttggaagtagtacaagacctagaagccacttttagacttcttgtggctctt

SEQ ID NO: 333471 - DNA, 120 bp, Artificial Sequence
  ENSG00000137055_20 (sequence is synthesized)
ggaacacttatcagtgatgattcaaatgctgtacaattagccaagtctttaggtgttgattctcaaataaaaaagtattcctcagtatcagaaccagctaaagtaagtgaatgctgtaga

SEQ ID NO: 333472 - DNA, 120 bp, Artificial Sequence
  ENSG00000137055_21 (sequence is synthesized)
tttatcctaaatttgctgtagcagtggggaagagggacggatatttttaattgattagtgtttttttcctcacatttgacatgactgataacagataattaaaaaaagagaatacggtgg

SEQ ID NO: 333473 - DNA, 120 bp, Artificial Sequence
  ENSG00000137055_22 (sequence is synthesized)
attaagtaaaattttacatcttgtaaagtggtggggaggggaaacagaaataaaatttttgcactgctgaactgtgagattttcctgtgtaatttgggtagattttcaagagtgtgaaca

SEQ ID NO: 333474 - DNA, 120 bp, Artificial Sequence
  ENSG00000137055_23 (sequence is synthesized)
caaatttaaaataagctataatcagcaacaacacaatgacaatgacatcttccccttaccttagccactaagaagacaagggctgttactcatataacttgcttttattacttaatgtac

SEQ ID NO: 333475 - DNA, 120 bp, Artificial Sequence
  ENSG00000137055_24 (sequence is synthesized)
accaaactgttgttgtcaattatcttttatttaacttctccaccttcattgctagatccttcgaacagcactgatacatttcaaggtcttgttttaggataactactttaaaatttttta

SEQ ID NO: 333476 - DNA, 120 bp, Artificial Sequence
  ENSG00000137055_25 (sequence is synthesized)
tttataaattcatatattaaaacaatataagataatttcttgatttgtcatttataaatcctaaagtatatttgtttaatggcctatttttagatgaagaaaaagccagttggtaagctg

SEQ ID NO: 333477 - DNA, 120 bp, Artificial Sequence
  ENSG00000137055_26 (sequence is synthesized)
aagaaaaagccagttggtaagctgtgttagtcatgtatcagttcagacagacgaggtctcaatttaactccaggcttagatccagtttcttttgcccttcactatttgaggtaacttcat

SEQ ID NO: 333478 - DNA, 120 bp, Artificial Sequence
  ENSG00000137055_27 (sequence is synthesized)
ttttcattctagttttgatatttggctgtttatttttgtcattttccattatttcaaagggaatttggaacatgttgaattttatcaggtggttacataagcaagagtacatcaaactgt

SEQ ID NO: 333479 - DNA, 120 bp, Artificial Sequence
  ENSG00000137055_28 (sequence is synthesized)
attatttgaaagtctagaacctgtcatgtgaaattactatttttgagccctctatgtggtccaggcagaatagtagacacactgatatttaatccttaaaacccctttaaatgagggcca

SEQ ID NO: 333480 - DNA, 120 bp, Artificial Sequence
  ENSG00000137055_29 (sequence is synthesized)
gtattatctctgctttcagaagtagacataataggatgaatcatataacagaaaaaaaaaagtgaagccaagagggagttaactacttaaagtacatgctatgctatactttctagagag

SEQ ID NO: 333481 - DNA, 120 bp, Artificial Sequence
  ENSG00000137055_30 (sequence is synthesized)
atcacagatgtgtgtgaacatcctagcaattaacacaaagaaggaaccatcacattaattacacaatttattgtgtctgaggtaacccagtttcttgagagaagcgtaactattttcaaa

SEQ ID NO: 333482 - DNA, 120 bp, Artificial Sequence
  ENSG00000137055_31 (sequence is synthesized)
agtgggaaagatcttttcataaagacgttgccagaaatagcaacattctcaatactcgtggtgtaaaaaccatgaatcccctggcttaatgccaaattatagccttagaagaataattgt

SEQ ID NO: 333483 - DNA, 120 bp, Artificial Sequence
  ENSG00000137055_32 (sequence is synthesized)
tccccaaatgggcaagaaaggttctaattgtcaagagtaacccaagtaagaacttttggaatatcaaaaggaaatgagcaaaatgtaaatagaggggatatgtactttgctgagtattaa

SEQ ID NO: 333484 - DNA, 120 bp, Artificial Sequence
  ENSG00000137055_33 (sequence is synthesized)
attggaactacctggtgtgtacctggactaaatattctgttcactggctcagttgagtacctatacttttcgttttttgattgggtttaggtggttatgtcaaagttaaatggcaaaatt

SEQ ID NO: 333485 - DNA, 120 bp, Artificial Sequence
  ENSG00000137055_34 (sequence is synthesized)
aggaatttaacccaggtctggctggttcctttacaatacactgctttcttaagtacaaataatttaattgcaatatttaggaaaagtaggtacctttgaataatgataagaaacagtctt

SEQ ID NO: 333486 - DNA, 120 bp, Artificial Sequence
  ENSG00000137055_35 (sequence is synthesized)
ggttaagaatatgagttccctcttcaaaatgtaaggggtggcaaaatgtaaacactgcttcctattactgtgcaagtttttttatgtcaactttactatttcatgtttgttgtggagatt

SEQ ID NO: 333487 - DNA, 120 bp, Artificial Sequence
  ENSG00000137055_36 (sequence is synthesized)
acaaaatatagcttagcaaaaggaaacaatctcacttgaaggatatgttaaataatttaatgatattttaaagattttcttttttagttaaactttcctatgattctcttaatgtttttt

SEQ ID NO: 333488 - DNA, 120 bp, Artificial Sequence
  ENSG00000137055_37 (sequence is synthesized)
ctgaatacaaaagtaataaatatttattgagtaaaacacacacaccccaaataaaaattgcctgtaaggccactatctagagaaaactattcttaacatcttgtggcatagtgactatgt

SEQ ID NO: 333489 - DNA, 120 bp, Artificial Sequence
  ENSG00000137055_38 (sequence is synthesized)
atgtaaatgtattttattttattaaaaaagcgttgtatcatacatactctttgataacctgatttttaaacttatatttggtacaaagagctccacattaataaatacaatattctatca

SEQ ID NO: 333490 - DNA, 120 bp, Artificial Sequence
  ENSG00000137055_39 (sequence is synthesized)
attaactgtcctgaaggtaaataaacactcttcaaaaatgtaaccagaaagcaagaagttttatcttcatttctatcaatattactggtatttgtggattaaatgaaagttaacttcggt

SEQ ID NO: 333491 - DNA, 120 bp, Artificial Sequence
  ENSG00000137055_40 (sequence is synthesized)
agttctaaatcactatggaaaatcttcacgaaaagggttcactacactactggaattgatgatcttgtttccgttacatgccttttgagaatctgaaggtaatatatgatccccatatat

SEQ ID NO: 333492 - DNA, 120 bp, Artificial Sequence
  ENSG00000137055_41 (sequence is synthesized)
caggtaagttagtgtttatattgagtcttatgtagttccattagtgttgattgatttttttgatgttttcaaatagtcatgtgattagctttttcaataaataccaatatctacagcagg

SEQ ID NO: 333493 - DNA, 120 bp, Artificial Sequence
  ENSG00000137055_42 (sequence is synthesized)
aacccaccaaccaagacacagcatgagtgctatcactggcgagatgctaccaatcacgagcagagaaggagccatgtgagccctgatattggatggagcagtacaatcaagaagtctccc

SEQ ID NO: 333494 - DNA, 120 bp, Artificial Sequence
  ENSG00000137055_43 (sequence is synthesized)
caggcatattttgacttaacatggaaggagacattccacccaactacccaggagtagtcttcctaatctaagttattaatgtccttcttgaagcccttgaagtgttggtgtatctcttca

SEQ ID NO: 333495 - DNA, 120 bp, Artificial Sequence
  ENSG00000137070_0 (sequence is synthesized)
gggggctgtagctggtgagaggaagtcctagaggctatggacactctgctgctgggatcaccgagatgagcagcagctgctcagggctgagcagggtcctggtggccgtggctacagccc

SEQ ID NO: 333496 - DNA, 120 bp, Artificial Sequence
  ENSG00000137070_1 (sequence is synthesized)
tggtgtctgcctcctccccctgcccccaggcctggggccccccaggggtccagtatgggcagccaggcaggtccgtgaagctgtgttgtcctggagtgactgccggggacccagtgtcct

SEQ ID NO: 333497 - DNA, 120 bp, Artificial Sequence
  ENSG00000137070_2 (sequence is synthesized)
ggtttcgggatggggagccaaagctgctccagggacctgactctgggctagggcatgaactggtcctggcccaggcagacagcactgatgagggcacctacatctgccagaccctggatg

SEQ ID NO: 333498 - DNA, 120 bp, Artificial Sequence
  ENSG00000137070_3 (sequence is synthesized)
gtgcacttgggggcacagtgaccctgcagctgggctaccctccagcccgccctgttgtctcctgccaagcagccgactatgagaacttctcttgcacttggagtcccagccagatcagcg

SEQ ID NO: 333499 - DNA, 120 bp, Artificial Sequence
  ENSG00000137070_4 (sequence is synthesized)
gtttacccacccgctacctcacctcctacaggaagaagacagtcctaggagctgatagccagaggaggagtccatccacagggccctggccatgcccacaggatcccctaggggctgccc

SEQ ID NO: 333500 - DNA, 120 bp, Artificial Sequence
  ENSG00000137070_5 (sequence is synthesized)
gctgtgttgtccacggggctgagttctggagccagtaccggattaatgtgactgaggtgaacccactgggtgccagcacacgcctgctggatgtgagcttgcagagcatcttgcgccctg

SEQ ID NO: 333501 - DNA, 120 bp, Artificial Sequence
  ENSG00000137070_6 (sequence is synthesized)
acccaccccagggcctgcgggtagagtcagtaccaggttacccccgacgcctgcgagccagctggacataccctgcctcctggccgtgccagccccacttcctgctcaagttccgtttgc

SEQ ID NO: 333502 - DNA, 120 bp, Artificial Sequence
  ENSG00000137070_7 (sequence is synthesized)
gactggaggaggtgatcacagatgctgtggctgggctgccccatgctgtacgagtcagtgcccgggactttctagatgctggcacctggagcacctggagcccggaggcctggggaactc

SEQ ID NO: 333503 - DNA, 120 bp, Artificial Sequence
  ENSG00000137070_8 (sequence is synthesized)
cgagcactgggaccataccaaaggagataccagcatggggccagctacacacgcagccagaggtggagcctcaggtggacagccctgctcctccaaggccctccctccaaccacaccctc

SEQ ID NO: 333504 - DNA, 120 bp, Artificial Sequence
  ENSG00000137070_9 (sequence is synthesized)
ggctacttgatcacagggactctgtggagcaggtagctgtgctggcgtctttgggaatcctttctttcctgggactggtggctggggccctggcactggggctctggctgaggctgagac

SEQ ID NO: 333505 - DNA, 120 bp, Artificial Sequence
  ENSG00000137070_10 (sequence is synthesized)
ggggtgggaaggatggatccccaaagcctgggttcttggcctcagtgattccagtggacaggcgtccaggagctccaaacctgtagaggacccaggagggcttcggcagattccacctat

SEQ ID NO: 333506 - DNA, 120 bp, Artificial Sequence
  ENSG00000137070_11 (sequence is synthesized)
aattctgtcttgctggtgtggatagaaaccaggcaggacagtagatccctatggttggatctcagctggaagttctgtttggagcccatttctgtgagaccctgtatttcaaatttgcag

SEQ ID NO: 333507 - DNA, 120 bp, Artificial Sequence
  ENSG00000137070_12 (sequence is synthesized)
ctgaaaggtgcttgtacctctgatttcaccccagagttggagttctgctcaaggaacgtgtgtaatgtgtacatctgtgtccatgtgtgaccatgtgtctgtgaggcagggaacatgtat

SEQ ID NO: 333508 - DNA, 120 bp, Artificial Sequence
  ENSG00000137070_13 (sequence is synthesized)
tctctgcatgcatgtatgtaggtgcctggggagtgtgtgtgggtccttggctcttggcctttccccttgcaggggttgtgcaggtgtgaataaagagaataaggaagttcttggagatta

SEQ ID NO: 333509 - DNA, 120 bp, Artificial Sequence
  ENSG00000137070_14 (sequence is synthesized)
atctaccccaaatttctgaacaaaattaatattcagtattatatctagcctatagattctcttactcttggtgtaatgacagcattcccagtttaggaaactgttttaaaatcttgtgtc

SEQ ID NO: 333510 - DNA, 120 bp, Artificial Sequence
  ENSG00000137070_15 (sequence is synthesized)
ttggttgtggctgaggctttgggaaggccagagccccctttgccaccacccctagggtgtcagctccaagcctgggcctgagggtttgatggggagcgggtgagctggatcctgatccca

SEQ ID NO: 333511 - DNA, 120 bp, Artificial Sequence
  ENSG00000137070_16 (sequence is synthesized)
gtggtcagtggccagatcctgggctgctggccagaaccctggctttgtgagtggctgcagcttggctctgctccagcccacaggggctaaaggggcgggtagggagtgtgtagggagcgt

SEQ ID NO: 333512 - DNA, 120 bp, Artificial Sequence
  ENSG00000137070_17 (sequence is synthesized)
gtacgtggctttgtgtccttggctcctccagactctcacatgtgcgggcaccatatacttctgctgcccttgtgccccaatcattgcacaaacagaaacagctctgacagagaagggact

SEQ ID NO: 333513 - DNA, 120 bp, Artificial Sequence
  ENSG00000137070_18 (sequence is synthesized)
gctagagttaggaaccctagggcctggaaggaaggtatggctctcagagtgacctggggtctattcagtcccctctggacctgtttccctggcaacgctgtgggaacaacagtctatgca

SEQ ID NO: 333514 - DNA, 120 bp, Artificial Sequence
  ENSG00000137070_19 (sequence is synthesized)
acacaggagacctgatgccactggtgtcctccaaattttaaggcgaaggcaggcattgtgaatgatgcagggatggccagaatggtttttgccttcgttctttccccaggggaaccaagc

SEQ ID NO: 333515 - DNA, 120 bp, Artificial Sequence
  ENSG00000137070_20 (sequence is synthesized)
ctgtgggtggggaaatcacactaaggctggacagtgactgaatctggcccaggagaaacttggctgcctgccttccagaccagggtttttcttccctgagatcctggaggggaagtacct

SEQ ID NO: 333516 - DNA, 120 bp, Artificial Sequence
  ENSG00000137070_21 (sequence is synthesized)
ggaacttgggagtgttgccctggtctggaagatctgatagacatagtatgcacacatttccctcgagcttcccatgactggggagtagatgagaaccctgagtgggtggctggtttcttg

SEQ ID NO: 333517 - DNA, 120 bp, Artificial Sequence
  ENSG00000137070_22 (sequence is synthesized)
aggcatacatatacccgacacaccttacacctctgatttggctgcattttggaatcatctgggaagttttaaacaatactggtgcctaggtccaacctccagagactctgatttaattgg

SEQ ID NO: 333518 - DNA, 120 bp, Artificial Sequence
  ENSG00000137070_23 (sequence is synthesized)
tatggggtggggttttgcagttttcaaaccacaatatccagcaaagtttgagaaccactgccctacacagccctccttcttctttatcttatctggagtcaggggcaccttcagcttctc

SEQ ID NO: 333519 - DNA, 120 bp, Artificial Sequence
  ENSG00000137070_24 (sequence is synthesized)
caatcacctggccagtggctcttgtttccagtcctgctgttccagggtggataggccttcaggcggagacccaggaatccagctccagactctgtcccaagcagcctcttcagtccggga

SEQ ID NO: 333520 - DNA, 120 bp, Artificial Sequence
  ENSG00000137070_25 (sequence is synthesized)
aggaagcctcagttttggagaggaagagccaggctttagcctcccatctcaggggtcggggatttttgactctacctctccccacagatgagcagcagctgctcagggctgagcagggtc

SEQ ID NO: 333521 - DNA, 120 bp, Artificial Sequence
  ENSG00000137070_26 (sequence is synthesized)
tcatgaccctttcttgactctgcctagtcctcatgtcccgcccctcccatccttgcccgctctgtccgtaatcctcacctctctatctgtcctaaccgtctaactatccttattcaacag

SEQ ID NO: 333522 - DNA, 120 bp, Artificial Sequence
  ENSG00000137070_27 (sequence is synthesized)
aaaattcaactggtatgttttgagcatctgccaagtgccaggtctattctaggctctgggatacagcagtgctaatgccaggcaaggtgcctgccttcaaagagcttacatcttagtggg

SEQ ID NO: 333523 - DNA, 120 bp, Artificial Sequence
  ENSG00000137070_28 (sequence is synthesized)
cgggagggagtagaggccggggcagagggcgagggcgagggcagagggcgctggcggcagcggccgcggaagatgagcagcagctgctcagggctgagcagggtcctggtggccgtggct

SEQ ID NO: 333524 - DNA, 120 bp, Artificial Sequence
  ENSG00000137070_29 (sequence is synthesized)
cctgctcctgtcatccaacctgggtcctctctctaccctgttctctgacctctgtctccagattataacatgatgctttgatccagtgagccccccaccacccaggttttaacagtctgc

SEQ ID NO: 333525 - DNA, 120 bp, Artificial Sequence
  ENSG00000137070_30 (sequence is synthesized)
ctgtctgattctggaactacctccccatacctccatcccccatgccccacttgattttaactgattcctctcctgaccctttactaataaaccctttggcggagactgagataacccaca

SEQ ID NO: 333526 - DNA, 120 bp, Artificial Sequence
  ENSG00000137070_31 (sequence is synthesized)
tgcctcctccccctgcccccaggcctggggccccccaggtgagaagaaccctgctctacaacctcccaactctgacttgtgacttgccaccctcactgtggccccttcccatgcctaact

SEQ ID NO: 333527 - DNA, 120 bp, Artificial Sequence
  ENSG00000137070_32 (sequence is synthesized)
agagggggcggggcagggaaggggaaggaggggatggctctggggtcccagaactgagtggagtaggagacgggggctgtagctggtgagaggaagtcctagaggctatggacactctgc

SEQ ID NO: 333528 - DNA, 120 bp, Artificial Sequence
  ENSG00000137073_0 (sequence is synthesized)
gtgacgcgaggtcacgtgacgggttgggcagcctgtgccgccgccgccgctttgtaagaggcacattggcagattttctattttgtacatacattattttgtatatactgtatatgatga

SEQ ID NO: 333529 - DNA, 120 bp, Artificial Sequence
  ENSG00000137073_1 (sequence is synthesized)
cttcagtgagcagtgaccattgtcgaggtgctcgggaaaaaccacagatttcagcagcacaatcaacgcaaccacagaaacaagtggtacaggcaacagctgaacagatgcgtctcgctc

SEQ ID NO: 333530 - DNA, 120 bp, Artificial Sequence
  ENSG00000137073_2 (sequence is synthesized)
aagtgatctttgataagaatgattcagattttgaagctaaagttaagcagcttatggaagtgacagggaaaaatcaggatgaatgcatagtggccctacatgattgtaatggagatgtga

SEQ ID NO: 333531 - DNA, 120 bp, Artificial Sequence
  ENSG00000137073_3 (sequence is synthesized)
acaaagctatcaatatattgctggaagggaattcagacacaacttcatgggagactgtagggtgtaagaaaaagaattttgcaaaagaaaattcagaaaacaaagagaatagagagaaga

SEQ ID NO: 333532 - DNA, 120 bp, Artificial Sequence
  ENSG00000137073_4 (sequence is synthesized)
aaagcgagaaagaatcgagtcgtggacgtggaaacaacaaccggaaaggaagaggcggcaatcgtggcagagaatttagaggtgaagaaaatggaattgattgcaatcaagtggacaaac

SEQ ID NO: 333533 - DNA, 120 bp, Artificial Sequence
  ENSG00000137073_5 (sequence is synthesized)
cttcagatcgtggcaagcgagcccggggtagaggatttggacgtggcagagggagaggggcaggaaggttctcaacccaaggcatggggacatttaatcctgcagactattcagattcta

SEQ ID NO: 333534 - DNA, 120 bp, Artificial Sequence
  ENSG00000137073_6 (sequence is synthesized)
catctacagatgtgtgtgggacaaagctagtagtttgggaagctgctcagaatggtgcagatgagggaactgaactggcatcaaatactcacaacatagctcaggatctgtcaaacaaaa

SEQ ID NO: 333535 - DNA, 120 bp, Artificial Sequence
  ENSG00000137073_7 (sequence is synthesized)
gttcttatggactcaaaggggcttggaagaattctgtggaagagtggacaacagaagactggactgaagatctttctgaaacaaaggtcttcactgcctcatctgctccagcagagaatc

SEQ ID NO: 333536 - DNA, 120 bp, Artificial Sequence
  ENSG00000137073_8 (sequence is synthesized)
acatcttacctgggcaaagcattgatctggtagccttgctccagaagcctgttcctcacagtcaagcctcagaagccaactcctttgaaacttcccaacagcagggctttggccaagccc

SEQ ID NO: 333537 - DNA, 120 bp, Artificial Sequence
  ENSG00000137073_9 (sequence is synthesized)
ttgtcttcacaaattcgcaacacaacaatcagatggcaccagggactggcagctccactgccgtcaactcctgttctcctcagagcctgtcatccgtccttggctcaggatttggagagc

SEQ ID NO: 333538 - DNA, 120 bp, Artificial Sequence
  ENSG00000137073_10 (sequence is synthesized)
ttgcaccaccaaaaatggcaaacatcaccagctcccagattttggaccagttgaaagctccgagtttgggccagtttaccaccaccccaagtacacagcagaatagtacaagtcacccta

SEQ ID NO: 333539 - DNA, 120 bp, Artificial Sequence
  ENSG00000137073_11 (sequence is synthesized)
caactactacttcttgggacctcaagcccccaacatcccagtcctcagtcctcagtcatcttgacttcaaatctcaacctgagccatccccagttcttagccagttgagccagcgacaac

SEQ ID NO: 333540 - DNA, 120 bp, Artificial Sequence
  ENSG00000137073_12 (sequence is synthesized)
agcaccagagccaggcagtcactgttcctcctcctggtttggagtcctttccttcccaggcaaaacttcgagaatcaacacctggagacagtccctccactgtgaacaagcttttgcagc

SEQ ID NO: 333541 - DNA, 120 bp, Artificial Sequence
  ENSG00000137073_13 (sequence is synthesized)
ttcccagcacgaccattgaaaatatctctgtgtctgtccaccagccacagcccaaacacatcaaacttgctaagcggcggatacccccagcttctaagatcccagcttctgcagtggaaa

SEQ ID NO: 333542 - DNA, 120 bp, Artificial Sequence
  ENSG00000137073_14 (sequence is synthesized)
tgcctggttcagcagatgtcacaggattaaatgtgcagtttggggctctggaatttgggtcagaaccttctctctctgaatttggatcagctccaagcagtgaaaatagtaatcagattc

SEQ ID NO: 333543 - DNA, 120 bp, Artificial Sequence
  ENSG00000137073_15 (sequence is synthesized)
ccatcagcttgtattcgaagtctttaagtgagcctttgaatacatctttatcaatgaccagtgcagtacagaactccacatatacaacttccgtcattacctcctgcagtctgacaagct

SEQ ID NO: 333544 - DNA, 120 bp, Artificial Sequence
  ENSG00000137073_16 (sequence is synthesized)
catcactgaattctgctagtccagtagcaatgtcttcctcttatgaccagagttctgtgcataacaggatcccataccaaagccctgtgagttcatcagagtcagctccaggaaccatca

SEQ ID NO: 333545 - DNA, 120 bp, Artificial Sequence
  ENSG00000137073_17 (sequence is synthesized)
gctccctgcccagcaccacctcctgcactgcacttctgccgtccacatcccagcacactggcgacctgactagcagccctctctctcagcttagcagttcgctctccagccaccagagca

SEQ ID NO: 333546 - DNA, 120 bp, Artificial Sequence
  ENSG00000137073_18 (sequence is synthesized)
gcctctctgcacatgcagccctctcctcgagcacgtcacacacacatgccagtgtggagagcgcctcttcccaccagtcctcagccaccttctccacggcagcgacctccgtctcaagtt

SEQ ID NO: 333547 - DNA, 120 bp, Artificial Sequence
  ENSG00000137073_19 (sequence is synthesized)
ccgcatcctcaggcgccagcctgtccagtagcatgaacaccgcgaacagcctctgtctgggtgggacccccgcgagtgcatccagcagcagtagcagggccgcgcccttggtgacctcag

SEQ ID NO: 333548 - DNA, 120 bp, Artificial Sequence
  ENSG00000137073_20 (sequence is synthesized)
gcaaagcacccccaaacttacctcagggggtgcctcccctgctgcacaaccagtacctcgtaggtcccggaggactgcttcctgcctacccgatctatggctatgacgagctccagatgc

SEQ ID NO: 333549 - DNA, 120 bp, Artificial Sequence
  ENSG00000137073_21 (sequence is synthesized)
tgcagtcacggctgccagtggactactatggaattccctttgctgcacccacagcgcttgccagccgagatgggagcctagctaataatccatatccaggtgatgtcacaaagtttggcc

SEQ ID NO: 333550 - DNA, 120 bp, Artificial Sequence
  ENSG00000137073_22 (sequence is synthesized)
gtggggactctgcatcccctgcacccgctaccacaccagctcagccacagcagagccaatcacagacccaccacacagcccagcagcccttcgtgaatcctgcactgccacctggctata

SEQ ID NO: 333551 - DNA, 120 bp, Artificial Sequence
  ENSG00000137073_23 (sequence is synthesized)
gctacactggtcttccctactacacaggcatgcccagtgccttccagtatggccccaccatgtttgtccctccagcctcagccaagcaacatggggtgaacctcagcactcccacacctc

SEQ ID NO: 333552 - DNA, 120 bp, Artificial Sequence
  ENSG00000137073_24 (sequence is synthesized)
ccttccagcaggccagtggttatggccagcacggctacagtacaggttatgacgacctgacccaggggacagcagcaggagactactccaaaggtggctatgctggatcatcgcaggcac

SEQ ID NO: 333553 - DNA, 120 bp, Artificial Sequence
  ENSG00000137073_25 (sequence is synthesized)
caaacaagtctgcaggttctgggcctggcaaaggagtatcagtgtcttcaagcaccactggtctacctgatatgactggttctgtctacaataagacacagacttttgacaagcagggat

SEQ ID NO: 333554 - DNA, 120 bp, Artificial Sequence
  ENSG00000137073_26 (sequence is synthesized)
ttcatgcagggacgcctccacctttcagcctgccctcggtcttgggctccactgggcccctggcctcgggagcggcccctggctatgcacccccaccattcctacacatcttgccagccc

SEQ ID NO: 333555 - DNA, 120 bp, Artificial Sequence
  ENSG00000137073_27 (sequence is synthesized)
accagcagccccactcacagctgctgcaccaccaccttccgcaggatgcacagagtggctcgggtcagcgcagccagcccagctccctgcagcccaagtctcaagcctccaaacctgcct

SEQ ID NO: 333556 - DNA, 120 bp, Artificial Sequence
  ENSG00000137073_28 (sequence is synthesized)
acggcaactctccatactggacaaactaaacccagaagagaggggtgggctggggcaaggcttatcctgggcaggagagaacacacgagcacgtatttgggagcccagtgccctttccta

SEQ ID NO: 333557 - DNA, 120 bp, Artificial Sequence
  ENSG00000137073_29 (sequence is synthesized)
gaattcccgacatgtgtcagccatgcctctgtggggagtctgcctcccagactggctactgtatgtaatgtatttatgtatgtatttgtaaatgtgatagaagtctgggggggagttggg

SEQ ID NO: 333558 - DNA, 120 bp, Artificial Sequence
  ENSG00000137073_30 (sequence is synthesized)
ggatggcggcagatgttagccaggtctgccctccccattcaagccccttctccactgtagcaaaataagcacccccaccccatctgccttcaggtcttcttcacagcctgcactgcccag

SEQ ID NO: 333559 - DNA, 120 bp, Artificial Sequence
  ENSG00000137073_31 (sequence is synthesized)
tgggccactaggggcagtctctggaagggctggttcaaggctgtttgggtataggggtcaggtaccaatgaagaatcacgacttgtctcactcctttggaaattgttttctttcctgtgt

SEQ ID NO: 333560 - DNA, 120 bp, Artificial Sequence
  ENSG00000137073_32 (sequence is synthesized)
aattacttcatacctctgtttttgagaaactgttccgtttgtcatctgtcatggtctccttccaccaaatcttcatctgggaatagcagcggtatccctccacccaagtatggccacctg

SEQ ID NO: 333561 - DNA, 120 bp, Artificial Sequence
  ENSG00000137073_33 (sequence is synthesized)
tttgtcttcatatagaacaggggcttctggtctggtcatgtccctagagacttactagagactggctgaccatgaaaaaaaaaaaaataatctgagttattcagccagtcagctcccctt

SEQ ID NO: 333562 - DNA, 120 bp, Artificial Sequence
  ENSG00000137073_34 (sequence is synthesized)
taaaaatctaaggtatctccaagcaacacatctccattctagttgtcttgaaccacgtgggcaactgtttcaggggttttctcttgcccaatccccacctaataaagttctgagagcatg

SEQ ID NO: 333563 - DNA, 120 bp, Artificial Sequence
  ENSG00000137073_35 (sequence is synthesized)
gctttgtaagaggcacattggcaggtaacgagcggcggcggcggcagcgggtcttgggtcctccgagagcagcagcgattttctattttgtacatacattattttgtatatactgtatat

SEQ ID NO: 333564 - DNA, 120 bp, Artificial Sequence
  ENSG00000137073_36 (sequence is synthesized)
ttatatgctgctttctatgtcctggtttggagactggtctccctcttacagagcttttcttcccttttttgagacttgccttgtccacctaggtgtgccccccacctacctgctcggagc

SEQ ID NO: 333565 - DNA, 120 bp, Artificial Sequence
  ENSG00000137073_37 (sequence is synthesized)
ttgaagttcttcataggaccctgttgctagggttgggcagctaggcagggcttctgggactcggggctgatggagcatccgctggttcactctttcttcacaggggtaccttgtcaaaca

SEQ ID NO: 333566 - DNA, 120 bp, Artificial Sequence
  ENSG00000137073_38 (sequence is synthesized)
ggcataagtggcaggccatgcccttttaggtgggcactggtgaggcattggtggactgaaaggtgtcaccaggttttggagcaaaggcctctctcagcctcctgtttccagaccacagtg

SEQ ID NO: 333567 - DNA, 120 bp, Artificial Sequence
  ENSG00000137073_39 (sequence is synthesized)
gctgagaatcccaatagaagggaaatctccaaaagattgagacttacgctgggcttcctgtggcctgtgctcgcctcttctcagactgtttgctttgctctgaggtaggtacttgtccca

SEQ ID NO: 333568 - DNA, 120 bp, Artificial Sequence
  ENSG00000137073_40 (sequence is synthesized)
tattcagatagtctgtgttcatttatgatccgaagttatcttgggatttctatgccctcattttggatgccaagcatgagcaacttgaaggatttttacagagagttgtggtcattaaag

SEQ ID NO: 333569 - DNA, 120 bp, Artificial Sequence
  ENSG00000137073_41 (sequence is synthesized)
cttaatgttaatagttttgatgttcagtttatgtattgtatcctgatggctggaaccagctgctatgtgaggggccgcagtgagcactgagcacagagcctctcaccttaagggagcctg

SEQ ID NO: 333570 - DNA, 120 bp, Artificial Sequence
  ENSG00000137073_42 (sequence is synthesized)
ggtggttacatcattgcctgcctgctcagccttgagacttgggcccaagcgccaggccaggctctccccagcaccctcctcctctgcctccagatccatgtgtcctggcttttcttttgc

SEQ ID NO: 333571 - DNA, 120 bp, Artificial Sequence
  ENSG00000137073_43 (sequence is synthesized)
cagattttgaagctaaagttaagcaggtatgtttctggcaaaggatatcatcatttttataatctattttgattgtgcttaaaaagataatttcagtaaagatttttgttttaaagtatt

SEQ ID NO: 333572 - DNA, 120 bp, Artificial Sequence
  ENSG00000137073_44 (sequence is synthesized)
acttctagcttctagtctcacctgaaatctgtatattggattttggacttgtgattaaaaatacctttattggtgggcaagtgaaggaattgaatacgttcacctgccttacaatataat

SEQ ID NO: 333573 - DNA, 120 bp, Artificial Sequence
  ENSG00000137073_45 (sequence is synthesized)
ctttctgagttactagtgtttacatgtgaacattgaaccagacatttctgtaagcacactgaggttttccgatacctgtgcatagaaagtatatctaacatttggcacagtctctgggaa

SEQ ID NO: 333574 - DNA, 120 bp, Artificial Sequence
  ENSG00000137073_46 (sequence is synthesized)
gtatatctaacatttggcacagtctctgggaattgtgtttaatgttagagatgaactgaattacctttaaaaaatttttttttcatagagacgtggtctcactctgttgcccaggctgga

SEQ ID NO: 333575 - DNA, 120 bp, Artificial Sequence
  ENSG00000137073_47 (sequence is synthesized)
tcaaactcctaggctcacgctatcctgctgcctcggtctcctgagtagctatgacgacagatgttcatcaccatgcccagctaatttttaaaatatttgtagagacagagtcctgcagtg

SEQ ID NO: 333576 - DNA, 88 bp, Artificial Sequence
  ENSG00000137073_48 (sequence is synthesized)
attactggcctgaattgccatttcaaacatggttgtgatttcatactcttgttggaaaagtataaaattaaattttaaggcaatgtct

SEQ ID NO: 333577 - DNA, 120 bp, Artificial Sequence
  ENSG00000137073_49 (sequence is synthesized)
ttgttggaaaagtataaaattaaattttaaggcaatgtcttcattttgaactttaataagaggtatttttgataacttagtcttaatttctaactcttctttgctgaccctttctcatca

SEQ ID NO: 333578 - DNA, 120 bp, Artificial Sequence
  ENSG00000137073_50 (sequence is synthesized)
agatcctagaaaccaagctgtaaccgctacctcagtgccagatattccaactcttggtagatgtcgtctaataattgttctttggagtaaaggtctcacaatgaaatcttgttttgtctc

SEQ ID NO: 333579 - DNA, 120 bp, Artificial Sequence
  ENSG00000137073_51 (sequence is synthesized)
acaagaaatcatagatttctttctctggaatgagatcttcatacagtttgagatatacttctgtatattacattgccttttatctgaatagtatagatagaacactggcccaggagttca

SEQ ID NO: 333580 - DNA, 120 bp, Artificial Sequence
  ENSG00000137073_52 (sequence is synthesized)
gagatttaagttctaattttagttctgtctgtcaataatctgatcactggggaaattttgatgttgactgtgtgtcttaaaaattgtatgttgcaggcattcacttagtacagatcattg

SEQ ID NO: 333581 - DNA, 120 bp, Artificial Sequence
  ENSG00000137073_53 (sequence is synthesized)
ataaaaatgagacatttattagtagctatccaaagactgaagcatcagaaagctatagagtatgcagaacttttgctgcttgataaaatgaaaagatgaaagcagggaggccaaatggta

SEQ ID NO: 333582 - DNA, 120 bp, Artificial Sequence
  ENSG00000137073_54 (sequence is synthesized)
tagtgcagagagctgtgattatgagatcaggaggcctgggttctagatgggctttgctattaattacctttgtgaccatagacaaatcacttgatatgttgggatcaagctgttttgaac

SEQ ID NO: 333583 - DNA, 120 bp, Artificial Sequence
  ENSG00000137073_55 (sequence is synthesized)
ttcagctagtacatgttaaaatagttaaatgtagttaaaatgcaatagatattaaatcatagatttattcactgatacttgagaaacctgcattttgcctagtctgtgatcgttctagtg

SEQ ID NO: 333584 - DNA, 120 bp, Artificial Sequence
  ENSG00000137073_56 (sequence is synthesized)
atgaaaatgctaagtaacaagtatctcttgctaatgagaataaactgaagagtttctttcatcattacttcaagcatagcaccatgttgaagatccttgagaaaatatgtctaggagtgt

SEQ ID NO: 333585 - DNA, 120 bp, Artificial Sequence
  ENSG00000137073_57 (sequence is synthesized)
gttttgtgatagtagcagaattccacttgtaagactttagggtgtcatataacttagtatgtacatggaatgatgttttttcttcttttttttgaggggggagacagggtctcgctctgt

SEQ ID NO: 333586 - DNA, 120 bp, Artificial Sequence
  ENSG00000137073_58 (sequence is synthesized)
ctcctgtgctagagtgcagtggcacaatcatggcttattgcaaccttcacctccagggctgaagcaatcctcctaccactacgctcggttaattttttgtaaagatgaggtctcactata

SEQ ID NO: 333587 - DNA, 120 bp, Artificial Sequence
  ENSG00000137073_59 (sequence is synthesized)
gaactcctgggctcaagcaatcctctcgtctctgcctcccaaagtgttgattatagttgtgagccactgcggctggcctttgaagtgttctaatccaaatggtgaaagccagcatatgga

SEQ ID NO: 333588 - DNA, 120 bp, Artificial Sequence
  ENSG00000137073_60 (sequence is synthesized)
atattgtccctgacaaaaaatttgtattggattttccatgaatgatgaccgtgtactcatatagttccacctcatatttaagtttaggaatcctgtgtgcttgaattaaatttgattatt

SEQ ID NO: 333589 - DNA, 120 bp, Artificial Sequence
  ENSG00000137073_61 (sequence is synthesized)
cagatacttgatcttgggtattctgagaatgttggtacgtatgtgtgtgctgctgattaatgatctgctccttggtcaacttggaggaagattgatttgtagttagattctaccagtgtt

SEQ ID NO: 333590 - DNA, 120 bp, Artificial Sequence
  ENSG00000137073_62 (sequence is synthesized)
agtgaaaagacatgcatggaatggccacaaaaaaataagtaaacatgtcctcattgtaaactcaagagtctagaagaggccatcttcatgtagaaggattatgtaattctgtatttgtat

SEQ ID NO: 333591 - DNA, 120 bp, Artificial Sequence
  ENSG00000137073_63 (sequence is synthesized)
agaagaatcttaatatcaagtgccagttttttgtttgcctctaaccattttctgatatgttcactagcttatggaagtgacagggaaaaatcaggatgaatgcatagtggccctacatga

SEQ ID NO: 333592 - DNA, 120 bp, Artificial Sequence
  ENSG00000137073_64 (sequence is synthesized)
ttgtaatggagatgtgaacaaagctatcaatatattgctggaagggaattcagacacagtaagtattattaattgatttgcattgtttacatttgtctccaattccgtagcacattttca

SEQ ID NO: 333593 - DNA, 120 bp, Artificial Sequence
  ENSG00000137073_65 (sequence is synthesized)
acttcaccttgtttgggggtagggatggaatggattatggtgccattccatatttgttttaagttccagaaagaacgattacctgaaaagactgtttttgttatgtatggtttcttcatg

SEQ ID NO: 333594 - DNA, 120 bp, Artificial Sequence
  ENSG00000137073_66 (sequence is synthesized)
aagtcgtagaatctgatgacttgaaagagaacttggtgatctactccagccttacagtttccaaaaatctctgtgcctgtgtatattttcaccacccccacctgaaaagcatctcttggc

SEQ ID NO: 333595 - DNA, 120 bp, Artificial Sequence
  ENSG00000137073_67 (sequence is synthesized)
tctgttgcttatgtttcttcatctcagtcctcacctctgattacttcttacatctctattataacagaaaaccaggatttgctggtatatgtatttgcttatgtggaatattaagttttc

SEQ ID NO: 333596 - DNA, 120 bp, Artificial Sequence
  ENSG00000137073_68 (sequence is synthesized)
ttttttttttttaatattgggttaagtttggtgagcttgcaggctcatgagctcaggccttggattttaagaaggatacagctaaagctacaccaggcacttgtcagccctaaaattttg

SEQ ID NO: 333597 - DNA, 80 bp, Artificial Sequence
  ENSG00000137073_69 (sequence is synthesized)
tacaccaggcacttgtcagccctaaaattttgctgtgtgtatatatttatatttatatattatagtttttatacatatgt

SEQ ID NO: 333598 - DNA, 80 bp, Artificial Sequence
  ENSG00000137073_70 (sequence is synthesized)
tatatttatatttaatatatatatttatatatttatttatttttttgagacagcctcactctgccacccaggctggagtg

SEQ ID NO: 333599 - DNA, 120 bp, Artificial Sequence
  ENSG00000137073_71 (sequence is synthesized)
ctgacctgtgtttatgtttcttaaattgaggaaactattttagagtagattaaaaaaaaatgactcacctaaaagaggatacaaagatgaacacatcaataactacctttccttggaaaa

SEQ ID NO: 333600 - DNA, 120 bp, Artificial Sequence
  ENSG00000137073_72 (sequence is synthesized)
tttaaaacaaacaaactgaccgtgtcagtgttcagatttaattgaagtctcattttagggtcatgctgcattaggtacaagaaatacaaaaatgaactctgagaaactgaaagctaaaat

SEQ ID NO: 333601 - DNA, 120 bp, Artificial Sequence
  ENSG00000137073_73 (sequence is synthesized)
gactgtgtttttagttgatgtgaaacaaagagaatgaattcttttaaagtaaaaattaactaatgtggaaaagatttcactgtttgagtgtagcagtaattgttggtaaaattccatgta

SEQ ID NO: 333602 - DNA, 120 bp, Artificial Sequence
  ENSG00000137073_74 (sequence is synthesized)
agagaacactggtacacaagacaaaccatcaaatttgtgattttttttttttgggaaaaccatattatatgataaattaaaattttgaatagtttttgtttactgacctgggactaagta

SEQ ID NO: 333603 - DNA, 120 bp, Artificial Sequence
  ENSG00000137073_75 (sequence is synthesized)
tcctgggttttgcaaaatatggaggatctgtttaccttatcgctaatgggtacagcagagagtggctttcagttattttcaaagtgaactgaagagcctaaccgccctctttgtttaggg

SEQ ID NO: 333604 - DNA, 120 bp, Artificial Sequence
  ENSG00000137073_76 (sequence is synthesized)
gatttcttcaaattcatggcaaatatttcccttccctttaacttcttatgtcagaatgaggaaggatagctgcatttatttagtcagttttcattgcatagtaatattttcatgtagtat

SEQ ID NO: 333605 - DNA, 120 bp, Artificial Sequence
  ENSG00000137073_77 (sequence is synthesized)
tttctaagttatattttagtaattcatatgttttagattataggttttaacatacttgtgaaaatacttgatatgttttaaagccttgggcagaaattctgtattgttgaggatttgttc

SEQ ID NO: 333606 - DNA, 120 bp, Artificial Sequence
  ENSG00000137073_78 (sequence is synthesized)
gccaaccaaacagaggaagaggatagctcacgtgatgtggaaaacaccagttggtcaatggcttattcgttaaaaagcagcccttttgcttttttgtttttggaccaggtgttggctgtg

SEQ ID NO: 333607 - DNA, 120 bp, Artificial Sequence
  ENSG00000137073_79 (sequence is synthesized)
gtgttattagaaatgtcttaaccacagcaagaaggaggtggtggtctcatattcttctgccctaatcagactgcaccacaagtgcagcatacagtatgcattttaaagatgcttgggcca

SEQ ID NO: 333608 - DNA, 120 bp, Artificial Sequence
  ENSG00000137073_80 (sequence is synthesized)
atacagtatgcattttaaagatgcttgggccaggcggggtggctgatgcccataatcccagtgctttggggggccaaggcaggcagattgcccaagctcaggagtttgagaccaccctgg

SEQ ID NO: 333609 - DNA, 62 bp, Artificial Sequence
  ENSG00000137073_81 (sequence is synthesized)
catggtgaaactctgtctctactaaaatacgaaaaactagccgggtgtggtggcagcttggg

SEQ ID NO: 333610 - DNA, 120 bp, Artificial Sequence
  ENSG00000137073_82 (sequence is synthesized)
atgatgttttatttccaagcacatatctgagttgtatgtgtggacagcactgagactgagtctttccacagctaggactgagtgtctccacatcctttctgaagcctacgaagctcattt

SEQ ID NO: 333611 - DNA, 120 bp, Artificial Sequence
  ENSG00000137073_83 (sequence is synthesized)
atgtgctctgagatacatctattcaagcacataccaaggaaatgctcactgtgcatttggaagtaggtgttggacagttggactgcagatgttaggtgtctgtgtctctccacaacatag

SEQ ID NO: 333612 - DNA, 120 bp, Artificial Sequence
  ENSG00000137074_0 (sequence is synthesized)
gggtgttggtgctagcgcggcttcccggcgctcgtggaatcttctggagcccttttctccactcagcgagcctgagagtgcggaagtctccggctgagtgatgatgcgggtgtgctggtt

SEQ ID NO: 333613 - DNA, 120 bp, Artificial Sequence
  ENSG00000137074_1 (sequence is synthesized)
ggtgagacaggacagccggcaccagcgaatcagacttccacatttggaagcagttgtgattgggcgtggcccagagaccaagatcactgataagaaatgttctcgacagcaagagtttga

SEQ ID NO: 333614 - DNA, 120 bp, Artificial Sequence
  ENSG00000137074_2 (sequence is synthesized)
ggaagaggcaaagaaccctggcctggaaacacacaggaagagaaagagatcaggcaacagtgattctatagaaagggatgctgctcaggaagctgaggctgggacagggctggaacctgg

SEQ ID NO: 333615 - DNA, 120 bp, Artificial Sequence
  ENSG00000137074_3 (sequence is synthesized)
gagcaactctggccaatgctctgtgcccctaaagaagggaaaagatgcacctatcaaaaaggaatccctgggccactggagtcaaggcttgaagatttctatgcaggaccccaaaatgca

SEQ ID NO: 333616 - DNA, 120 bp, Artificial Sequence
  ENSG00000137074_4 (sequence is synthesized)
ggtttacaaagatgagcaggtggtggtgataaaggataaatacccaaaggcccgttaccattggctggtcttaccgtggacctccatttccagtctgaaggctgtggccagggaacacct

SEQ ID NO: 333617 - DNA, 120 bp, Artificial Sequence
  ENSG00000137074_5 (sequence is synthesized)
tgaactccttaagcatatgcacactgtgggggaaaaggtgattgtagattttgctgggtccagcaaactccgcttccgattgggctaccacgccattccgagtatgagccatgtacatct

SEQ ID NO: 333618 - DNA, 120 bp, Artificial Sequence
  ENSG00000137074_6 (sequence is synthesized)
tcatgtgatcagccaggattttgattctccttgccttaaaaacaaaaaacattggaattctttcaatacagaatacttcctagaatcacaagctgtgatcgagatggtacaagaggctgg

SEQ ID NO: 333619 - DNA, 120 bp, Artificial Sequence
  ENSG00000137074_7 (sequence is synthesized)
cttcgttgtcatgagtgccagcagctgctgccttccattcctcagctgaaagaacatctcaggaagcactggacacagtgattctgcagagcctgagctgctgctgtggtgtggcccact

SEQ ID NO: 333620 - DNA, 120 bp, Artificial Sequence
  ENSG00000137074_8 (sequence is synthesized)
ggagcaaactgctggcacctattctgggttgcttgtgaacttctactcatttcctaaattaaaacatgcagctttttcacaaatttattctattattgagtggccacaatgtagagtggc

SEQ ID NO: 333621 - DNA, 120 bp, Artificial Sequence
  ENSG00000137074_9 (sequence is synthesized)
tcaaagtacttcaggattaggaatttgggtttgtcatagatgtattctctggtgagggtggctgggatatacctgacccaccatcttcagaaggacccatgtcaggtctgaccattggga

SEQ ID NO: 333622 - DNA, 120 bp, Artificial Sequence
  ENSG00000137074_10 (sequence is synthesized)
gcaaagccatgttcacactgacctaatgcagagtatggaagcattgggctggttatacatttctgtttcttagatttatcctccgcctctgtaggcatggacaacctttaatcagagcat

SEQ ID NO: 333623 - DNA, 120 bp, Artificial Sequence
  ENSG00000137074_11 (sequence is synthesized)
ctagagtggcctcttgtttatcctgaagatactgatgggtcttgttttctgttagtctgttttgtaatattcttttcccttccttcatggggaggcttagtttgtccagtccttccatgc

SEQ ID NO: 333624 - DNA, 120 bp, Artificial Sequence
  ENSG00000137074_12 (sequence is synthesized)
ccttctatcccagattacctaaatgttcccttctcaggaattctgtctcatcagttcttcacagtgagaaaagaggctagatgatggtgtggggggttggagttttcttctaataccgag

SEQ ID NO: 333625 - DNA, 120 bp, Artificial Sequence
  ENSG00000137074_13 (sequence is synthesized)
ggttcctggctgtgaggaaacagccacatgttcgtcatgattgagctgtgaagtcttcttggacctgttgtctgaaaataaagttaatttgtttgaggcatctctcttaagtaggtggaa

SEQ ID NO: 333626 - DNA, 120 bp, Artificial Sequence
  ENSG00000137074_14 (sequence is synthesized)
actattgaagttcagctaacaatcacagcataggttctgatgcatggaaaggtggttggtgaatgaaaaagttgcgtagagccactactttctttttccctgagaataaatttggataaa

SEQ ID NO: 333627 - DNA, 120 bp, Artificial Sequence
  ENSG00000137074_15 (sequence is synthesized)
aagcaggtaggagtcaatcccaccagcattgactcagtcgtaattgggaaggaccaagaggtgaagctgcagcctggccaggttctccacatggtgaatgaactttatccatatattgta

SEQ ID NO: 333628 - DNA, 120 bp, Artificial Sequence
  ENSG00000137074_16 (sequence is synthesized)
aagcggtgaggcacagatgagtaacgtgaatttgtccgtctccgacttctggagatttattttttttagatgaggtgttgctgtgttgcccaagctggacttgaacccctaggctcaagc

SEQ ID NO: 333629 - DNA, 120 bp, Artificial Sequence
  ENSG00000137074_17 (sequence is synthesized)
gccgcgggtgagcgttcggccgaggctgctcctacccttgagtgatgtgccttgaatgacgctgctttcatgcgctgctctcacggctgctttctccgtcctcccctgttactaccttgg

SEQ ID NO: 333630 - DNA, 120 bp, Artificial Sequence
  ENSG00000137074_18 (sequence is synthesized)
tttgtatttttttgtagagacggggtattgccatgctgcccaggctgggagaaacaggtcttcttttctggcggcagagtctgtgatcatgagcaggccaggggttctggaatagggaaa

SEQ ID NO: 333631 - DNA, 120 bp, Artificial Sequence
  ENSG00000137074_19 (sequence is synthesized)
ggaatagggaaacttgtggggattaattgaagctgcctcatagggatcttggcaatagctaagggagtatgtacgctgttggacattttatggaaggatttaaacctttagaaattggta

SEQ ID NO: 333632 - DNA, 120 bp, Artificial Sequence
  ENSG00000137074_20 (sequence is synthesized)
ggatttggagctccagccacctgcaataacaggtgattgctaataggcctttaaggaaacaccacctgttcagctgccgcctgtagtgaagcttgttttctttagggaagataggagcaa

SEQ ID NO: 333633 - DNA, 120 bp, Artificial Sequence
  ENSG00000137074_21 (sequence is synthesized)
attttcacaacagcctcctgagtcccatcattatcatggtttataggtgaggaaattgagactagggtggtgaagtcacttgcctcaagatgaacagctggtagatcacatgcgtggtgg

SEQ ID NO: 333634 - DNA, 120 bp, Artificial Sequence
  ENSG00000137074_22 (sequence is synthesized)
agagtgtaacaagggatatgtcaaggtaaagcaggtaggtgtatttataacttggaattttatactcgatgattttcttatgctgttgactttagagtgtctgtgccagccagtgaaggc

SEQ ID NO: 333635 - DNA, 120 bp, Artificial Sequence
  ENSG00000137074_23 (sequence is synthesized)
ttctctgtcatgtatggaagtgatggagtaatataggtgaacataaggcaaggtgcttggcatatagtaagtggttaacatagcagtggctatcttactgtaggtgctgttgctattatt

SEQ ID NO: 333636 - DNA, 120 bp, Artificial Sequence
  ENSG00000137074_24 (sequence is synthesized)
agattcattttattgggctgttctgtgagaacaagaggcttttcacattggcaataaagtagcagctgtcattgtttggagagaaagctgagttcttcaaatgaatatcccctctgcctt

SEQ ID NO: 333637 - DNA, 120 bp, Artificial Sequence
  ENSG00000137074_25 (sequence is synthesized)
gtgccttttaaacttctgggtactttaagggaagttgcattaaccttagtatggttcctttcaggggagcatcagagataatacactgtgacagtagtactgtgctgccctggcattaac

SEQ ID NO: 333638 - DNA, 120 bp, Artificial Sequence
  ENSG00000137074_26 (sequence is synthesized)
ctttggggatgtgacttttcactcaagttgtgagaaaaaaggaaacacccttaacaaaagcttcttctggagagaaaaagccacagtccatagagacatttgacctcaatgtctttcaca

SEQ ID NO: 333639 - DNA, 120 bp, Artificial Sequence
  ENSG00000137074_27 (sequence is synthesized)
aacaaacaagatgccacagtggttacttagtgaacataggtatagtaataattatataattaatgatcatagcagctcacatttgtctgactcctgtgtgtcctgcattatgctaaacac

SEQ ID NO: 333640 - DNA, 120 bp, Artificial Sequence
  ENSG00000137074_28 (sequence is synthesized)
tgtactcaagtgatctcattgaattctcactgtacataactctatgaggttacgtgctattgttatgcccctttagtggatgagcatctaatattctacaatggttcctgggcactatcc

SEQ ID NO: 333641 - DNA, 120 bp, Artificial Sequence
  ENSG00000137074_29 (sequence is synthesized)
aaagttggtattgattctgatgcatcaactcattatttttcttatcaattgaacagtataaatgcaagactaacagcagaagccatagaacccaggggccttggacctgtgctgatcaaa

SEQ ID NO: 333642 - DNA, 120 bp, Artificial Sequence
  ENSG00000137074_30 (sequence is synthesized)
agctttccgtggcatttcattgatttccctgagatcagccagttcctttagccctttttgtccatctctcattcccaacatctttcatctcttttctctgctccttctgcactccaggat

SEQ ID NO: 333643 - DNA, 120 bp, Artificial Sequence
  ENSG00000137074_31 (sequence is synthesized)
tgtaatccttaggtcattagtccatccatccatagttcttctatctggcttgatgctggacctttgggcctgcttgattgtctgcttcgtctcctgaggtggttgtctacatacactgtg

SEQ ID NO: 333644 - DNA, 120 bp, Artificial Sequence
  ENSG00000137074_32 (sequence is synthesized)
gctcctggacgttcttccccaacccagctgcagagggcatgtggcttcatagccttttatttgctgtcatcaggtaccaggcacagaaactcttgaaaattgtctgggcacggtggctca

SEQ ID NO: 333645 - DNA, 120 bp, Artificial Sequence
  ENSG00000137074_33 (sequence is synthesized)
gcggcttcccggcgctcgtggaatcttctggagcccttttctccactcagcgagcctgagagtgcggaagtctccggctggtggggcatggcccaggagcactagtgatgatgcgggtgt

SEQ ID NO: 333646 - DNA, 120 bp, Artificial Sequence
  ENSG00000137074_34 (sequence is synthesized)
agtatgagttttacacacttctcacctccagctggctgggtgtggggaagacctgccagagccacattggacaaggtggttcccattgccaagtagatggacaagatggtgcagaagaat

SEQ ID NO: 333647 - DNA, 120 bp, Artificial Sequence
  ENSG00000137074_35 (sequence is synthesized)
acagctggagcattggatttgccaaaggagcttaaaaatattcccatgaccatggaattattacagcccccagaagaatcagaatatcagttaatgctaatggcaagcagcataaagatg

SEQ ID NO: 333648 - DNA, 120 bp, Artificial Sequence
  ENSG00000137074_36 (sequence is synthesized)
aagaagttacatctttaacagtctgtcatgaaatctgggaaaaagttactatcaaccgagaaagaccctgaagaaaagaaaaaagaacctgcagttacattgcagaataactctgaagcg

SEQ ID NO: 333649 - DNA, 120 bp, Artificial Sequence
  ENSG00000137074_37 (sequence is synthesized)
gcactgagacccagggaagtgggatggagtttttccaaagcaggtgggctgaagcttccacctctctgcctgacttgcatgcaagctttgagttcccacttctgcctataattcagtcat

SEQ ID NO: 333650 - DNA, 120 bp, Artificial Sequence
  ENSG00000137074_38 (sequence is synthesized)
atttggttctttgttcctctcaaaatataaatcttcgagagcctaatatatgaactagatgaagcagcttcattatcctcagataaagaattgtggtcagtggcttttatcagattcttc

SEQ ID NO: 333651 - DNA, 120 bp, Artificial Sequence
  ENSG00000137074_39 (sequence is synthesized)
aaaagcgtctataaccccagaatgattaaggaccattactctgaaggaaacaaacatcatagacttctgtaatgacagcgtagtagatccaggatttgaaaataaaatgagagaaaagta

SEQ ID NO: 333652 - DNA, 120 bp, Artificial Sequence
  ENSG00000137074_40 (sequence is synthesized)
atttgttttcctgtggcttatgcccagaaggattcagaaaggaatgactgatttctttcaaagaatacaagcaaggtggatctccgtgatttctttgatttaagcaataagatgataagt

SEQ ID NO: 333653 - DNA, 120 bp, Artificial Sequence
  ENSG00000137074_41 (sequence is synthesized)
tagagtttttattttgtttttaaaaaactgtgatataatatacataacaaaatttacattttagtcatctttaagtgtacaattcattggcattactatattcatattactatgcaacca

SEQ ID NO: 333654 - DNA, 120 bp, Artificial Sequence
  ENSG00000137074_42 (sequence is synthesized)
tgcaaccattactaccatctatctccagaactgttttctcttcccaaattgaaactctgtaccttaaataataactctccatttccccctcccactcctggcaaccaccattgtactttc

SEQ ID NO: 333655 - DNA, 120 bp, Artificial Sequence
  ENSG00000137074_43 (sequence is synthesized)
cttccctgtgaatttgactactctaggtacctcatattagaggaatcatacaaggacatatttgtccttttgtgactggcttattttacttatttacttacttattttactttacataat

SEQ ID NO: 333656 - DNA, 120 bp, Artificial Sequence
  ENSG00000137074_44 (sequence is synthesized)
gtcttcaagtcttatccatgttgtagcatgtgacaggattttctctgcttatttttttttaactaccaacactcacattttatttaggtgaataattatgacttaggttactggccactt

SEQ ID NO: 333657 - DNA, 120 bp, Artificial Sequence
  ENSG00000137074_45 (sequence is synthesized)
gaaccaaatgaaatctttgtgccagatttttccctagtcagtactgattcttttaagttgaggcataacttacatacaataaagtgcataataagatgcatagtttgatcagttttcata

SEQ ID NO: 333658 - DNA, 120 bp, Artificial Sequence
  ENSG00000137074_46 (sequence is synthesized)
agcgtgtataatcttttcactatcattctgattaagatacagaagatgtctatcctttcatcccagaaagttcccttgtgcccctttccagttaatcctccctcaagcattgcttttatt

SEQ ID NO: 333659 - DNA, 120 bp, Artificial Sequence
  ENSG00000137074_47 (sequence is synthesized)
tccttcagcatagatagtttttgtctcttctagagctaccatgtataaatggaatcatacattgcatactcttttttggtctggcttttttgggtcagcataattttgagattcatgtgt

SEQ ID NO: 333660 - DNA, 120 bp, Artificial Sequence
  ENSG00000137074_48 (sequence is synthesized)
gttattgtgtatatcatagacatatgtactttatttatttttttccccttgagtaaatatttagggatcccagtctgggcaacatggcaaaacctgtctctacaaaaaatacaaaaaatt

SEQ ID NO: 333661 - DNA, 82 bp, Artificial Sequence
  ENSG00000137074_49 (sequence is synthesized)
tctctacaaaaaatacaaaaaattagccaagggtggtggtgcacacctgctacttgggaggttgagttaagctatgatcacg

SEQ ID NO: 333662 - DNA, 120 bp, Artificial Sequence
  ENSG00000137074_50 (sequence is synthesized)
gttcccaaacctgtggggtggccgcctgggcccgcgagggcgggaagggctcgagtacagtgacccagcgggagctgtgtgtgaacgggaaagctcttggaacagtcttgcccccccccc

SEQ ID NO: 333663 - DNA, 120 bp, Artificial Sequence
  ENSG00000137074_51 (sequence is synthesized)
gtggcgagcaaaaaatgcttgagccagtttacaaagaaaaggagtcggagccagggcggttatgtgggacgtggatgcagacgcaggcggaggcgccaactgcggggatggctagggtga

SEQ ID NO: 333664 - DNA, 120 bp, Artificial Sequence
  ENSG00000137074_52 (sequence is synthesized)
tcacagctgccccgggggcgcggacaccccggcagctccggccagcggagctcccccaccgcacgtgtcaggtcctagcagaaacgcagcgtctgtggccaagggccaggaatgcggccg

SEQ ID NO: 333665 - DNA, 120 bp, Artificial Sequence
  ENSG00000137074_53 (sequence is synthesized)
gtgctagcgcggcttcccggcgctcgtggaatcttctggagcccttttctccactcagcgagcctgagagtgcggaagtctccggctggtggggcatggcccaggagcactgcaagtcct

SEQ ID NO: 333666 - DNA, 120 bp, Artificial Sequence
  ENSG00000137074_54 (sequence is synthesized)
gagcaaaaaatgcttgagccaggcaatcacaccatcacgggaaactccaaggttgggaatatacctgaaaagtggaaagaattcgggaagaatactgctgcacagatatgagactgaaca

SEQ ID NO: 333667 - DNA, 120 bp, Artificial Sequence
  ENSG00000137074_55 (sequence is synthesized)
aaatgacttttaatagcccttcaaaatctcagactcttggtctagataatacgaactcctagataccatttggcaacgtttatttaaaaaaattcagttgataacattttgtgtatatac

SEQ ID NO: 333668 - DNA, 120 bp, Artificial Sequence
  ENSG00000137074_56 (sequence is synthesized)
atcttctagataattattttaattcttcacctcaccttgtcaaatgtattctaacttaagtttgatatttcatctgaatttccttccctgcacaaaaattcagatgcggatatgaattgt

SEQ ID NO: 333669 - DNA, 120 bp, Artificial Sequence
  ENSG00000137074_57 (sequence is synthesized)
gaggcacagatgagtaacgtgaatttgtccgtctccgacttctggaggtaaggcggtcgtcagcctatctcttctgctggctgggctcaatgccgcggagtgatgatgcgggtgtgctgg

SEQ ID NO: 333670 - DNA, 120 bp, Artificial Sequence
  ENSG00000137074_58 (sequence is synthesized)
agctgcccccacccttcccttcgatgacgacgtttgcagggttcagggcgaccagggaacaaagctggggcctggcagacccactatgctgccagctggagaaaacaagtcacaatgaca

SEQ ID NO: 333671 - DNA, 120 bp, Artificial Sequence
  ENSG00000137074_59 (sequence is synthesized)
aattatcacaattagcacctgtacttgggggaaaaaatctgcaaattggggaagccccagctcctcattgtacaggggtctgtttggcagtgaccttgctctggagatgacattccttca

SEQ ID NO: 333672 - DNA, 120 bp, Artificial Sequence
  ENSG00000137074_60 (sequence is synthesized)
gcctgagggaatcgacgttgatgaacccgtggcatcaatcggctcataatccccctgcacgttcatgctcaccagctcctcgttgtagagagacagtggggactcccgaccgaggatata

SEQ ID NO: 333673 - DNA, 120 bp, Artificial Sequence
  ENSG00000137074_61 (sequence is synthesized)
cacctggcccttgaggacagacacctgcactttcccttccactcattcctgggacttggcattacagtggcggacaaattcacactcagggctatgccagaaaccggtatacaccagctc

SEQ ID NO: 333674 - DNA, 120 bp, Artificial Sequence
  ENSG00000137074_62 (sequence is synthesized)
agcaaatttcaagctcaggccttgtttgattttgcgcacttctcggtacatggtgaaggccttgatgtctaaatgagtgtggtgaaggatggtccctgctggggcctcgcagatacctca

SEQ ID NO: 333675 - DNA, 120 bp, Artificial Sequence
  ENSG00000137074_63 (sequence is synthesized)
ggacttcattccaatgaagcggttctccacgatgtcaatacggcccacgccgtgcttgcctgcaacttcattcaggtacacgaaaagctccaaggaggtctggtgggtggtgccatcctt

SEQ ID NO: 333676 - DNA, 120 bp, Artificial Sequence
  ENSG00000137074_64 (sequence is synthesized)
gacgttggtcaccttcacggggaccccttttttgaacttgatctcgagaatgtcaggggtgttgagggctttggctgggtcctgggtcttcatgtagagacctggaggcacttggttctt

SEQ ID NO: 333677 - DNA, 120 bp, Artificial Sequence
  ENSG00000137074_65 (sequence is synthesized)
ggggttccaggattccagcctcatagctgatgtgcatgaggttctcgtctatgcttcacgggctctggggagtgactggaatgggaacccgatgttgctttgcctatttcatcaggtcat

SEQ ID NO: 333678 - DNA, 120 bp, Artificial Sequence
  ENSG00000137074_66 (sequence is synthesized)
tgcagcccttgaaccggttgtagaactcgggcatcctccagggagcggtgacctttatctggggggccagcaaatagcaggtgagctcaaaccggacctgatcatttccttttcccgtgg

SEQ ID NO: 333679 - DNA, 120 bp, Artificial Sequence
  ENSG00000137074_67 (sequence is synthesized)
tgccgtggaacacatacttggcctcctcctgcttggcgatttccacttgtttgccggcgatgccgggcctggccagagaggtgcccaggaggtagcggttctcatacagtgcgctggact

SEQ ID NO: 333680 - DNA, 120 bp, Artificial Sequence
  ENSG00000137074_68 (sequence is synthesized)
ggatggccggccagatgaactcctccacaaactccctgctggcatcctcaatgaacacctttttggtcccaagcttcagtgccttcttccaggcttcctcgaagtcttccttctggccag

SEQ ID NO: 333681 - DNA, 120 bp, Artificial Sequence
  ENSG00000137074_69 (sequence is synthesized)
caagaggtgtccgggctgccactgtaggccagaaccactgagcctttgctggacatagcatctgggattggaggctcgagttcctggcatctgccatctgtcttcatggtacggtgaacc

SEQ ID NO: 333682 - DNA, 120 bp, Artificial Sequence
  ENSG00000137074_70 (sequence is synthesized)
actcgggctcagggagcggtggcaggcgacagagcagggagtataatttcaaaataccaaaccatccacaaaaacccagagaatagtacccataaccagcttcaacaatcgtcaatattc

SEQ ID NO: 333683 - DNA, 120 bp, Artificial Sequence
  ENSG00000137074_71 (sequence is synthesized)
tgcccttcttgtttcatcctgcctctccaccttacctactgtagtactactttaaagcaaatttcagaaatcaaaatagtttcaccttgacagtaaaattaataagatataagacctatt

SEQ ID NO: 333684 - DNA, 120 bp, Artificial Sequence
  ENSG00000137074_72 (sequence is synthesized)
gacctatttaaagttataaaagctcaattaaaattataaatgttatctgaacaaatggaaagacatctcatgttctttaatgacttggaaacataaaatctatttaaagatttttaaaaa

SEQ ID NO: 333685 - DNA, 90 bp, Artificial Sequence
  ENSG00000137074_73 (sequence is synthesized)
gttgcccaggctggagtgcagtggcaggagcatagctgtactgcagcctcatagtttcccaagtaataaggaatacaggcacgcaccact

SEQ ID NO: 333686 - DNA, 120 bp, Artificial Sequence
  ENSG00000137074_74 (sequence is synthesized)
aagggatcctcctgccttagtttcccaagtaataaggaatacaggcacgcaccactatacccagctaattttttttaaagacgaggccttgctatgttgcccaggatggtctcaaactcc

SEQ ID NO: 333687 - DNA, 120 bp, Artificial Sequence
  ENSG00000137074_75 (sequence is synthesized)
tggcctcctgaagtgttaggattagaggcatgagccacggtacccaggcctgaatttttaaatataaacccaaaagcacaggcaacaaaagtaataatagacaaatgggattgtatcaaa

SEQ ID NO: 333688 - DNA, 81 bp, Artificial Sequence
  ENSG00000137074_76 (sequence is synthesized)
ggcaacaaaagtaataatagacaaatgggattgtatcaaactaaaaagcttctgcacagccaaggaaataatctacacagt

SEQ ID NO: 333689 - DNA, 120 bp, Artificial Sequence
  ENSG00000137074_77 (sequence is synthesized)
aactgaaacaactcaattgtaagaaaacaaataatgcaattaaaaaatggtcaaaggatttgaatagacatttgtcaaaaaaagacaaacaagtgaccaagcacagttatcttttgggat

SEQ ID NO: 333690 - DNA, 120 bp, Artificial Sequence
  ENSG00000137074_78 (sequence is synthesized)
ctgtaggggattaattccagaacaccctgcggatacccaaatctgctgatgctcaagtccctgatataaaatgataacagtatttgcatataacctacacacatcctcccatatactttt

SEQ ID NO: 333691 - DNA, 120 bp, Artificial Sequence
  ENSG00000137074_79 (sequence is synthesized)
ttggccaggctggtcttgaactcctagtcccaagtgatcctcccgtctcggcctcccaaaatgcagtgattacaggtgtgagacatcatgcccagccccctcccatatactttaaatcat

SEQ ID NO: 333692 - DNA, 120 bp, Artificial Sequence
  ENSG00000137074_80 (sequence is synthesized)
tgcccagccccctcccatatactttaaatcatctctggattacttataatacctaataaaatgtaaatgctatatatgaatactatccagcttcaagaaggaaggaaatcctgccatttg

SEQ ID NO: 333693 - DNA, 120 bp, Artificial Sequence
  ENSG00000137074_81 (sequence is synthesized)
tgacaccctggatgaatccagaggacattatattaagtgaaataagtcagatacagagagacaaatactgcataatctcgtttgtacgtgaattctaaagaagttgaactcatagaagca

SEQ ID NO: 333694 - DNA, 82 bp, Artificial Sequence
  ENSG00000137074_82 (sequence is synthesized)
gaggaataaattcaggagatctattgtacggtatggtgaatacagttaatatcaatgcattgtgttcttgaaaattgctaaa

SEQ ID NO: 333695 - DNA, 120 bp, Artificial Sequence
  ENSG00000137074_83 (sequence is synthesized)
cagttaatatcaatgcattgtgttcttgaaaattgctaaaagattagattttaagtgttcttacctcaaaaaaaataggtatgtgaagtaatacgttaataagctcaatttagctacccc

SEQ ID NO: 333696 - DNA, 120 bp, Artificial Sequence
  ENSG00000137074_84 (sequence is synthesized)
acagtgtatacatatttcaaaacaatatattgtacacaataaattatataatttttgtcaattaaaaatattagaaaaaaatacattgggccaggcatgatggtttatgcttgtaatccc

SEQ ID NO: 333697 - DNA, 120 bp, Artificial Sequence
  ENSG00000137074_85 (sequence is synthesized)
aggagttcaagtccagcctgggcaacatagacccagtctctacaaaaattaaaaaactaggtgagtgtgatggcatgtgcctatagccccagcttactcaggaggttgaagtgggaggat

SEQ ID NO: 333698 - DNA, 120 bp, Artificial Sequence
  ENSG00000137074_86 (sequence is synthesized)
ctatagccccagcttactcaggaggttgaagtgggaggatcacttgaacccaggcgatcaaggctgcagtgagccatgttcatgccactccactttagcctgggcagtacagccagagcc

SEQ ID NO: 333699 - DNA, 120 bp, Artificial Sequence
  ENSG00000137074_87 (sequence is synthesized)
ataaagcgagccctgtgaaaagaaactggattatttggattgtagtattattgccactttgctgtgagttgtcttcttgggggacctagaaagctattatgtcagggtcagtgttttatt

SEQ ID NO: 333700 - DNA, 120 bp, Artificial Sequence
  ENSG00000137074_88 (sequence is synthesized)
gtgacaaaaggggacttaaaggctgccgtgagaattagtggagttcatggataagaaagctgtggacaattctttgtctcttctgccatcagttgggtgggagctttggggctgcctcct

SEQ ID NO: 333701 - DNA, 120 bp, Artificial Sequence
  ENSG00000137074_89 (sequence is synthesized)
gtcaggagtggtgaattagcagggggaaccctgtgtatatgtagaagaaagcattttctggtgtgtgatgctttcttacacaccaggaaagcatttcctggtgtgtaagaacttaagcat

SEQ ID NO: 333702 - DNA, 120 bp, Artificial Sequence
  ENSG00000137074_90 (sequence is synthesized)
tgatggggtgttcacaatggcagctggcatttaccaagggccaaccagaggtaaagcactctgatgagctcttgacagagtaacatggattgcctagagtgtgtcctgaaggagtgtatt

SEQ ID NO: 333703 - DNA, 120 bp, Artificial Sequence
  ENSG00000137074_91 (sequence is synthesized)
atttcaaaggtgggttgctcatatttataatctgattaagctcattttgcctgagggaagtctaaactaagcttacggagctgtagaatacctggcctggcatactgattggagtcacgt

SEQ ID NO: 333704 - DNA, 120 bp, Artificial Sequence
  ENSG00000137074_92 (sequence is synthesized)
ttttgattttttttttttttttttggtatctcatattggttttccagagtagctgggatttgacttttcttccttgcctgcagctgtgatcgagatggtacaagaggctggtagagtaac

SEQ ID NO: 333705 - DNA, 120 bp, Artificial Sequence
  ENSG00000137074_93 (sequence is synthesized)
catcctgcaaggccagatttcaagaccaaatttgcttgagtctgagaatgacacacgtgaaggcttagagatggcctggatccagaggccccctgtgagtgcagtcagtgcgagcccttc

SEQ ID NO: 333706 - DNA, 120 bp, Artificial Sequence
  ENSG00000137074_94 (sequence is synthesized)
aacatgccctatatggtgtctgcttcagacaactctcatgcctatgctgtcaggaccggaatcctccccaccagctgcaacttcatggatctgtgctgaagatacccatagatcctgggg

SEQ ID NO: 333707 - DNA, 120 bp, Artificial Sequence
  ENSG00000137074_95 (sequence is synthesized)
ttcccagagcaacaatgcataaactagaaagaatcagctggaagggatggaatgtaccttggttgtctgatcccttgttttattgctattcccggtggtgttggtccacacaggtgtgac

SEQ ID NO: 333708 - DNA, 120 bp, Artificial Sequence
  ENSG00000137074_96 (sequence is synthesized)
ttctcttattgcccatatcagaactggaaagaggtaagctgccctggaagcctaaacaccatgctaccagcagaaggtaaggaagcggagtgtctgttcagcaggtctgaaggtgactct

SEQ ID NO: 333709 - DNA, 120 bp, Artificial Sequence
  ENSG00000137074_97 (sequence is synthesized)
aagctctgtgaaggcagagcttgctgtacccacagtgcctagcaccattccacaggcacccaataagtgctgttgagtttctaaaggtggtttattgtttcatggccaaacttgtctccc

SEQ ID NO: 333710 - DNA, 120 bp, Artificial Sequence
  ENSG00000137074_98 (sequence is synthesized)
ttcttcaagggtcttggctgagtctctacatagaagctctagtgatctctgcattacagcattcagagtttttgcctggacaaccagagatggtgaagctctgcaggcctggctgggttt

SEQ ID NO: 333711 - DNA, 120 bp, Artificial Sequence
  ENSG00000137074_99 (sequence is synthesized)
tagagtcaggactggctttgggagtacagggaagcctgcagacagcatcagagaagccagagactagacccaagctgatctgaacatcaatctgaagggctgggacagaggcaaactcag

SEQ ID NO: 333712 - DNA, 120 bp, Artificial Sequence
  ENSG00000137074_100 (sequence is synthesized)
gcatattttctgggtgatcttgatggaaaatctattgtctgccaaaaatacagctcaggaactgagctcttttagccaacaccagggccctatttattcctgattctgccctcccaatgt

SEQ ID NO: 333713 - DNA, 120 bp, Artificial Sequence
  ENSG00000137074_101 (sequence is synthesized)
gataatgttcaaggcagggtgggtgaaggttgggagcagtcaagttcatactgttaccatgggatggtggaattgagtcctgccctcctttccccagggacattgctcaatgggcagcaa

SEQ ID NO: 333714 - DNA, 120 bp, Artificial Sequence
  ENSG00000137074_102 (sequence is synthesized)
gatgtaaactctggagtctacaggtgaaaccatgtctttctgagaagtaatggggtagtgccgtcctttacatattgcttcacgcaaagtattatgagacagtggcatctagcacttgtc

SEQ ID NO: 333715 - DNA, 120 bp, Artificial Sequence
  ENSG00000137074_103 (sequence is synthesized)
catgaaagtccttgccctcagaaaaaaatccttaccatgtaccttgttttttcctgtaaacatgcacactgctggctggagtgtgacccccccacagcaaggtttcccaagggttctgaa

SEQ ID NO: 333716 - DNA, 120 bp, Artificial Sequence
  ENSG00000137074_104 (sequence is synthesized)
cttagagagttggcatctgcagcactgattatgatctttcctatatgagttaatctaagtggagggatacaaagccatgcttgagctgagtaggcccaagatgcagaagcagtggctgct

SEQ ID NO: 333717 - DNA, 120 bp, Artificial Sequence
  ENSG00000137074_105 (sequence is synthesized)
tctctctctgttcccttcctcacaacagcaactgaaggggcatgtatgtggcaccctgtcctctctggggagcagctatggtggttcttctttcctccctgtctcaactccagatacctt

SEQ ID NO: 333718 - DNA, 120 bp, Artificial Sequence
  ENSG00000137074_106 (sequence is synthesized)
gttcatttatcagaacaggaatgcttaatgttaccacttctcacacatgctcagattgttctgtctctgcaatcatctttctagaacattctttccactccttctacccaaagccacctg

SEQ ID NO: 333719 - DNA, 120 bp, Artificial Sequence
  ENSG00000137074_107 (sequence is synthesized)
agtttctgttttccaggaatgtgtcttttactgttttatcttttaaagcatctaatagttgttgtttttccaaaataatagtggaagcctgatttaatccttggtcaagagttcgtgtga

SEQ ID NO: 333720 - DNA, 120 bp, Artificial Sequence
  ENSG00000137074_108 (sequence is synthesized)
tgctttgcactctgctttgctccccttttccaatttcctattgcaaatcattttgatgtaatacagaaaaaacagcatttaaatatctacatgaagagttgacccactaatgtcagccga

SEQ ID NO: 333721 - DNA, 120 bp, Artificial Sequence
  ENSG00000137074_109 (sequence is synthesized)
cctctactttgtcagctcatagttaaatcttttatcatttcaaaaataaagtgcattttctttttctttttcttctttttttagtgatggagtctaactttgtcacccaggttggagtgc

SEQ ID NO: 333722 - DNA, 66 bp, Artificial Sequence
  ENSG00000137074_110 (sequence is synthesized)
acaggcacctgccaccacgcccagttagttttttgtatttttagtagttagtttcaccatgttggg

SEQ ID NO: 333723 - DNA, 120 bp, Artificial Sequence
  ENSG00000137074_111 (sequence is synthesized)
ttgcattttcaaaagaatgaatttaagaataataaaattaaaataggcccacttttaaattgtggtccattttataattcaatttttattgttaacaaaaaaaaagagtataaatcagat

SEQ ID NO: 333724 - DNA, 120 bp, Artificial Sequence
  ENSG00000137074_112 (sequence is synthesized)
agtagcactcttcggctgaaaatccttcaatggcttcccagtagattcagaatagaatgcaaaccctttgtcacctttaagaggctttatgacctggctcctgcctcgtttctgctgctt

SEQ ID NO: 333725 - DNA, 120 bp, Artificial Sequence
  ENSG00000137074_113 (sequence is synthesized)
gcctcctcactttctgagacactcttcccacagacctagcttgcttgggtgctgtctccgttcaaatcacttcccgggagatgctttccctgaacactgttaactaaagagggcagcttc

SEQ ID NO: 333726 - DNA, 120 bp, Artificial Sequence
  ENSG00000137074_114 (sequence is synthesized)
tacccctgggcactctatcccattttccttgtttattttttcttggcaatgttaattctttaagtttttttttgtttgtttatttgtttgcttatttattatttgtctttcctcattagc

SEQ ID NO: 333727 - DNA, 120 bp, Artificial Sequence
  ENSG00000137074_115 (sequence is synthesized)
gtacaatttctataagggcagaggcttttcccattttgtttcttgctaaagtctcagtgcctggaacagtgtttggccatagtacatacttattgagcattaaatattcttaagtaaatg

SEQ ID NO: 333728 - DNA, 120 bp, Artificial Sequence
  ENSG00000137074_116 (sequence is synthesized)
aatgaatcaattgaattaaatggacacactatcacttcaatagtatgaatattcaaagagtattcaatagtatgaatatacaatgtactcatactctttgtcattttgattaagccatag

SEQ ID NO: 333729 - DNA, 120 bp, Artificial Sequence
  ENSG00000137074_117 (sequence is synthesized)
atgacctccagggaggagaaaggggctggatattaccagtgggcaatggcctaatcaatcatgcttacctaatgaagcctcaataaaaaaaccctaaccaaaggagtttggagagcttcc

SEQ ID NO: 333730 - DNA, 120 bp, Artificial Sequence
  ENSG00000137075_0 (sequence is synthesized)
gtccttctgcttccgtgggtttctggataggctgcgttttgttctcaggggatgcaagttcttcctttcagggttgaagcgtgagagaggttggtttttgaaacgggagtgtttcaggtt

SEQ ID NO: 333731 - DNA, 120 bp, Artificial Sequence
  ENSG00000137075_1 (sequence is synthesized)
attgaggtccaaaaagaaataaagtttttgtttacgtctgtatggcttgtaagatatctcccggggccaattcagcatctctacctggccatcctaacaaggtgatttgtgaaagggtga

SEQ ID NO: 333732 - DNA, 120 bp, Artificial Sequence
  ENSG00000137075_2 (sequence is synthesized)
gacttcagagcctgttccctctcctcccaagtgatcagaacactaccgttcaagaggatgctcacttcaaagctttcttccagagtgaagatagtccaagtcctaagagacagcgcctct

SEQ ID NO: 333733 - DNA, 120 bp, Artificial Sequence
  ENSG00000137075_3 (sequence is synthesized)
ctcattcagtctttgattatacatcagcatcaccagctccctcaccaccaatgcgaccatgggagatgacatcaaataggcagcccccttcagttcgaccaagccaacatcacttctcag

SEQ ID NO: 333734 - DNA, 120 bp, Artificial Sequence
  ENSG00000137075_4 (sequence is synthesized)
gggaacgatgcaacacacctgcacgcaacagaagaagtcctcctgtcaggcgccagagaggaagaagggatcgtctgtctcgacataattccattagtcaagatgaaaactatcaccatc

SEQ ID NO: 333735 - DNA, 120 bp, Artificial Sequence
  ENSG00000137075_5 (sequence is synthesized)
tcccttacgcacagcagcaagcaatagaggagcctcgagccttccaccctccgaatgtatctccccgtctgctacatcctgctgctcatccaccccagcagaatgcagtcatggttgaca

SEQ ID NO: 333736 - DNA, 120 bp, Artificial Sequence
  ENSG00000137075_6 (sequence is synthesized)
tacatgatcagctccatcaaggaacagtccctgtttcttacacagtaacaacagtggcaccacatgggattccactctgcacaggccagcacatccctgcttgtagtacacagcaggtcc

SEQ ID NO: 333737 - DNA, 120 bp, Artificial Sequence
  ENSG00000137075_7 (sequence is synthesized)
caggatgctctgtggttttcagtggacagcacctccctgtctgtagtgtgcctcctccaatgcttcaggcatgttcagttcagcacttaccagtaccatatgctgcattcccacccctta

SEQ ID NO: 333738 - DNA, 120 bp, Artificial Sequence
  ENSG00000137075_8 (sequence is synthesized)
tttctagtgatccatttcttatacatcctcctcacctttctccccatcatcctcctcatttgccaccaccaggccagtttgtccctttccaaacacagcaatcacgatcgcctctgcaaa

SEQ ID NO: 333739 - DNA, 120 bp, Artificial Sequence
  ENSG00000137075_9 (sequence is synthesized)
ggatagaaaatgaagtggaactcttaggagaacatcttccagtaggaggttttacttaccctccatcagcccaccccccaacattacctccatcagctcccttgcagttcttaacacatg

SEQ ID NO: 333740 - DNA, 120 bp, Artificial Sequence
  ENSG00000137075_10 (sequence is synthesized)
atcctttgcatcaggaggtgtcctttggagtaccttatcctccatttatgcctcggaggcttacaggacgtagtagataccgatcccagcagccaataccacctcccccttatcatccca

SEQ ID NO: 333741 - DNA, 120 bp, Artificial Sequence
  ENSG00000137075_11 (sequence is synthesized)
gcttactgccatatgtgttatcaatgcttccagtgccacctgcagtgggcccaactttcagctttgaattagatgtagaagatggagaagtagaaaattacgaggccctgttaaacctgg

SEQ ID NO: 333742 - DNA, 120 bp, Artificial Sequence
  ENSG00000137075_12 (sequence is synthesized)
cagagcgactgggagaggcaaagcctcgtggactgactaaagcagatattgaacaacttccttcttatcggttcaatcctaacaaccaccagtcagaacagactttgtgtgtagtatgca

SEQ ID NO: 333743 - DNA, 120 bp, Artificial Sequence
  ENSG00000137075_13 (sequence is synthesized)
tgtgtgattttgagtcaaggcagctacttagagtcttaccctgtaaccacgagttccatgccaagtgtgttgacaaatggcttaaggcaaatcgtacttgcccaatttgccgagctgatg

SEQ ID NO: 333744 - DNA, 120 bp, Artificial Sequence
  ENSG00000137075_14 (sequence is synthesized)
cttcagaagtgcatcgggattcagaatgaccaacctaagaagcacaaatttagtttgggtgttcctcatcacatgtatatacggactatccattgaacttaatctgtgtggcttccagcc

SEQ ID NO: 333745 - DNA, 120 bp, Artificial Sequence
  ENSG00000137075_15 (sequence is synthesized)
ctccctttaccaaaagggtcaatggacctttctttgcactgtgtgacttaatcaactataaaagcttacaattagtcttcacagttatgggattgttatactaaccgtgtgattggaact

SEQ ID NO: 333746 - DNA, 120 bp, Artificial Sequence
  ENSG00000137075_16 (sequence is synthesized)
ccaaagactttttctttagcttaattttgtgtgtgcactaacattccctggtttttgtgtgatcattccgagtgttgctgcaagattacagtggacgtgatcttttagcatgtgctttta

SEQ ID NO: 333747 - DNA, 120 bp, Artificial Sequence
  ENSG00000137075_17 (sequence is synthesized)
taaaaagtggtagctacagatgatatagcaatctaccttatatagagccttcagaaactgtgagtggaaatgaatgcgcagcgtatgactgttggtgataagtgtatctgtgtgagtgtg

SEQ ID NO: 333748 - DNA, 120 bp, Artificial Sequence
  ENSG00000137075_18 (sequence is synthesized)
tgcaactacttgtgtgagggcatggtagctaacgtgtgtatgagatcctatataccagcatgtaccaagaatgtgtgtgtagttttaattatgctgcaatgtataatctggtgtgttatt

SEQ ID NO: 333749 - DNA, 120 bp, Artificial Sequence
  ENSG00000137075_19 (sequence is synthesized)
taaacagcactagtactgtacactggtttttttcccttgtgtttgctgttgcacactgattgctgagggtgcatcaattacaagcattgaatactccatccccttccctcccagtgaatg

SEQ ID NO: 333750 - DNA, 120 bp, Artificial Sequence
  ENSG00000137075_20 (sequence is synthesized)
gaatgagaaaagccttcttcctttgcttcaggcagctgtcaccttctctttattggtggtcctaagtgggtcacttaagaaaaaaaagtgtaacaaattctcgctccatgaacctggttt

SEQ ID NO: 333751 - DNA, 120 bp, Artificial Sequence
  ENSG00000137075_21 (sequence is synthesized)
tttttaaatctccaacttgctgtttccaaaaagaaggtgcaatatcatatatcatcagttagcaatattagcatttcaatcagtgatttgaatgttgatacttttttttcctttacattt

SEQ ID NO: 333752 - DNA, 120 bp, Artificial Sequence
  ENSG00000137075_22 (sequence is synthesized)
ccagtaagtttcttacagaaagtacctgtgattttttttaatgtttagatttgtagtctagtctattctgaagatatttgattaatatatttctaagaagaccactagtcccatgaagtc

SEQ ID NO: 333753 - DNA, 120 bp, Artificial Sequence
  ENSG00000137075_23 (sequence is synthesized)
tcaccttgttgacttccaccagaacaaaacctgttaattcagcttgacttctcatatgtgttctgtgttcaagctcctgtgggcaactcaattgttttaagaaaactctatttctgttca

SEQ ID NO: 333754 - DNA, 120 bp, Artificial Sequence
  ENSG00000137075_24 (sequence is synthesized)
tattaattcacttgccagactccaattctgaaagttgtctagttcttccttcatcacacgtgcttctcatcgaaaccctggtttcaggatggatcaagtgctgttacagctcatgttcct

SEQ ID NO: 333755 - DNA, 120 bp, Artificial Sequence
  ENSG00000137075_25 (sequence is synthesized)
tagacctgatttgttttgatattttactgcctttccttttaatttttgtttgaatgagaaaagtttaatacaacaggtgtccagaatacttgcagtataaatgaagatttggtttttgta

SEQ ID NO: 333756 - DNA, 120 bp, Artificial Sequence
  ENSG00000137075_26 (sequence is synthesized)
taaaaaaataatgctgttaaacaggagttgaccttcatttagttgatgtaatacatagctgtatggggttttttttagtaagttctttgagcataattcactttaaagtcatttttccag

SEQ ID NO: 333757 - DNA, 120 bp, Artificial Sequence
  ENSG00000137075_27 (sequence is synthesized)
caatgtttaaattactttctcattcttttagtgtattcaacattgtctgcctcttcctgcagttgatgtaattgctttgtttgcaatagcacaagctgcattattccagtcaggactgtg

SEQ ID NO: 333758 - DNA, 120 bp, Artificial Sequence
  ENSG00000137075_28 (sequence is synthesized)
ataacttgctgccagccccactcaactttcagttggctctgtgtcagttttccattcagtgttaactacttgttactgccatgctgcttgccctcccttgaagtgtctataagctcatca

SEQ ID NO: 333759 - DNA, 120 bp, Artificial Sequence
  ENSG00000137075_29 (sequence is synthesized)
cagcctagagttaagtaaagtcaattcacagaagcacaattttgccctttgcgagacattgttgcctctatctagtcctacaagtagggttttgcatactgtgtttgcccctagggttgt

SEQ ID NO: 333760 - DNA, 120 bp, Artificial Sequence
  ENSG00000137075_30 (sequence is synthesized)
cagtgcatcagaaatacttctaaatagtggtaaaaatgcacatggttaatgcacatgttacttttaaatcattaggatatccctcacctgttcctgatgaataaaaagtgtgttaaagac

SEQ ID NO: 333761 - DNA, 120 bp, Artificial Sequence
  ENSG00000137075_31 (sequence is synthesized)
caaaattcttggcataataatcagctacatacaaatcacatatagtttaatcttttttaatgaaaaaaaatcatgtttaaaatggcaaaagcccatcttatacacttttatatagctgca

SEQ ID NO: 333762 - DNA, 120 bp, Artificial Sequence
  ENSG00000137075_32 (sequence is synthesized)
aaaaatttatatctgtacagatctaacactacgacactcagtattcattttattgaagcatgcaagtaaagcactttttctaatttatatagaggtatctaattaacacagcacattgta

SEQ ID NO: 333763 - DNA, 120 bp, Artificial Sequence
  ENSG00000137075_33 (sequence is synthesized)
ctaatgactaggagtagcagctttttcttctctccctctatgaattcttataatgtccctttttctgtaagtttttgagaggcaattggcaatttaggaggcagcagggtctgttttggt

SEQ ID NO: 333764 - DNA, 120 bp, Artificial Sequence
  ENSG00000137075_34 (sequence is synthesized)
caaatcttgaatttcgttgttgcactctagtgactgatctttgggaatgtcttgtctttgcatggggctcatagagatgtgtgcagacttgcttattgtggttagtgtgtatcaggaaca

SEQ ID NO: 333765 - DNA, 120 bp, Artificial Sequence
  ENSG00000137075_35 (sequence is synthesized)
cacacacaggtgttctgaccagctcaggcttgccacagtgagcaactctgtggctagcaaaagagaagtttatttgtgcccagccattggtcaccttgggtgatgcaccagatagcaggc

SEQ ID NO: 333766 - DNA, 120 bp, Artificial Sequence
  ENSG00000137075_36 (sequence is synthesized)
agatgttggttcattggccttcgtcctctttcctcctaaaataatattggctttaccatcttaactcagctgtgggttttttgtgggttcttgtttgttttttggcatgaattgtcatct

SEQ ID NO: 333767 - DNA, 120 bp, Artificial Sequence
  ENSG00000137075_37 (sequence is synthesized)
ttggtgtttttttaacccccagcccctcaaaaaaataaggcctccaggtatcaagatctcatattaggattttctgtccttaattttttgagcaaaatctggaaaatgtgaaagcatatt

SEQ ID NO: 333768 - DNA, 120 bp, Artificial Sequence
  ENSG00000137075_38 (sequence is synthesized)
tagattttatatactatctgaaatgtgatttgttaagattcttaaatttgggcctcttagaataattttgaatgagatctaccgactcacttgtgagaatatttttcacagattatcttt

SEQ ID NO: 333769 - DNA, 120 bp, Artificial Sequence
  ENSG00000137075_39 (sequence is synthesized)
gggccttttcattagaaagctgtttgtttgtccccctgttggtacatttggttacctcattttgccgtttcagattgtgaaagctcacaggggtgttttttggaatcatttgctgagtca

SEQ ID NO: 333770 - DNA, 120 bp, Artificial Sequence
  ENSG00000137075_40 (sequence is synthesized)
ttttctcaaatcatattccattgtatcagttaacatatagttttaaatgtatgtattataaatatctgtaaccaaatcatttgaaggcttgataaatttttaacaaagtttgtacatttt

SEQ ID NO: 333771 - DNA, 120 bp, Artificial Sequence
  ENSG00000137075_41 (sequence is synthesized)
ttatgaaagttactagtaatgctttactaagtagtgcaatgaatttttatttttaatccctgtgcccaattttggagttgagagggttgttggtaataaatgtatgatgtacacttaaaa

SEQ ID NO: 333772 - DNA, 120 bp, Artificial Sequence
  ENSG00000137075_42 (sequence is synthesized)
cttccccctcggggtggaaacaaagggggttcggcgcgcggtgcggagcctgggggaaaagggaggagcgctccggtggtctggcgcgctgggctcgctaggtttgtgctggcgagggga

SEQ ID NO: 333773 - DNA, 120 bp, Artificial Sequence
  ENSG00000137075_43 (sequence is synthesized)
cggggtgggacgggcgacccggacccaagaagtgggaggaccgcgcgtgtcgcggcctagcggcgaggggagtcgcctgcgcgcgcagcggaggccagtgcgccggcgcatagggagccc

SEQ ID NO: 333774 - DNA, 120 bp, Artificial Sequence
  ENSG00000137075_44 (sequence is synthesized)
ggggaggggcgtggccgggccgggcccctagtgcggtgttgcgggacggggccgaggcccggtcggttggggcgtgggggcggagaggatggagcctccgaggcgttaggcgactctgtc

SEQ ID NO: 333775 - DNA, 120 bp, Artificial Sequence
  ENSG00000137075_45 (sequence is synthesized)
aggcgttaggcgactctgtcatctctgggcgtgcagccgtcgtttcctggcgcggcccgtgtgatggtgccgggaggaaggaagcgcagtgacagtgcctaagttggagccggggttccg

SEQ ID NO: 333776 - DNA, 120 bp, Artificial Sequence
  ENSG00000137075_46 (sequence is synthesized)
ggggtgaggaggcccgcggacggcggatctggcgagctggccgcgggctgggcgagcagtcacaataggaggcggcggcccagcgaggatccgcgggagctgcccggcagggcggagcct

SEQ ID NO: 333777 - DNA, 120 bp, Artificial Sequence
  ENSG00000137075_47 (sequence is synthesized)
cttccccctcggggtggaaacaaagggggttcggcgcgcggtgcggagcctgggggaaaagggaggagcgctccggtggtctggcgcgctgggctcgctagatatctcccggggccaatt

SEQ ID NO: 333778 - DNA, 120 bp, Artificial Sequence
  ENSG00000137075_48 (sequence is synthesized)
acgatgcaacacacctgcacgcaacagaagaaggttacctataagcatattgccagattttctcccagaaacaggctgtgccaagcagatgcagtttttaacaataatctagcaggattt

SEQ ID NO: 333779 - DNA, 80 bp, Artificial Sequence
  ENSG00000137075_49 (sequence is synthesized)
gcggccgccgcggtcgctgccgccgccgcctcagcagccgccgccgccgcgcactttcagcctcagtcgtcgtctcccag

SEQ ID NO: 333780 - DNA, 120 bp, Artificial Sequence
  ENSG00000137075_50 (sequence is synthesized)
gagcccgccgccacggaccgcctcagccctccgggccacgggcctctccgggcgggagcccagggtggcggcgcctgcggccgagcgccgggagcaggtagtgttggtgcttcttttcag

SEQ ID NO: 333781 - DNA, 120 bp, Artificial Sequence
  ENSG00000137076_0 (sequence is synthesized)
gttcccaggacggaagtggccgagagagtgtcgaagggagggcgaggccggagcccgagggcgacccgagaagcggcggggcggcgggccggcgggcggggcgcagagccaggcagcgca

SEQ ID NO: 333782 - DNA, 120 bp, Artificial Sequence
  ENSG00000137076_1 (sequence is synthesized)
ggtatagccaggctggagaaaagaagctgccaccatggttgcactttcactgaagatcagcattgggaatgtggtgaagacgatgcagtttgagccgtctaccatggtgtacgacgcctg

SEQ ID NO: 333783 - DNA, 120 bp, Artificial Sequence
  ENSG00000137076_2 (sequence is synthesized)
ccgcatcattcgtgagcggatcccagaggccccagctggtcctcccagcgactttgggctctttctgtcagatgatgaccccaaaaagggtatatggctggaggctgggaaagctttgga

SEQ ID NO: 333784 - DNA, 120 bp, Artificial Sequence
  ENSG00000137076_3 (sequence is synthesized)
ctactacatgctccgaaatggggacactatggagtacaggaagaaacagagacccctgaagatccgtatgctggatggaactgtgaagacgatcatggtggatgactctaagactgtcac

SEQ ID NO: 333785 - DNA, 120 bp, Artificial Sequence
  ENSG00000137076_4 (sequence is synthesized)
tgacatgctcatgaccatctgtgcccgcattggcatcaccaatcatgatgaatattcattggttcgagagctgatggaagagaaaaaggaggaaataacagggaccttaagaaaggacaa

SEQ ID NO: 333786 - DNA, 120 bp, Artificial Sequence
  ENSG00000137076_5 (sequence is synthesized)
gacattgctgcgagatgaaaagaagatggagaaactaaagcagaaattgcacacagatgatgagttgaactggctggaccatggtcggacactgagggagcagggtgtagaggagcacga

SEQ ID NO: 333787 - DNA, 120 bp, Artificial Sequence
  ENSG00000137076_6 (sequence is synthesized)
gacgctgctgctgcggaggaagttcttttactcagaccagaatgtggattcccgggaccctgtacagctgaacctcctgtatgtgcaggcacgagatgacatcctgaatggctcccaccc

SEQ ID NO: 333788 - DNA, 120 bp, Artificial Sequence
  ENSG00000137076_7 (sequence is synthesized)
tgtctcctttgacaaggcctgtgagtttgctggcttccaatgccagatccagtttgggccccacaatgagcagaagcacaaggctggcttccttgacctgaaggacttcctgcccaagga

SEQ ID NO: 333789 - DNA, 120 bp, Artificial Sequence
  ENSG00000137076_8 (sequence is synthesized)
gtatgtgaagcagaagggagagcgtaagatcttccaggcacacaagaattgtgggcagatgagtgagattgaggccaaggtccgctacgtgaagctagcccgttctctcaagacttacgg

SEQ ID NO: 333790 - DNA, 120 bp, Artificial Sequence
  ENSG00000137076_9 (sequence is synthesized)
tgtctccttcttcctggtgaaggaaaaaatgaaagggaagaacaagctagtgcccaggcttctgggcatcaccaaggagtgtgtgatgcgagtggatgagaagaccaaggaagtgatcca

SEQ ID NO: 333791 - DNA, 120 bp, Artificial Sequence
  ENSG00000137076_10 (sequence is synthesized)
ggagtggaacctcaccaacatcaaacgctgggctgcgtctcccaaaagcttcaccctggattttggagattaccaagatggctattactcagtacagacaactgaaggggagcagattgc

SEQ ID NO: 333792 - DNA, 120 bp, Artificial Sequence
  ENSG00000137076_11 (sequence is synthesized)
acagctcattgccggctacatcgatatcatcctgaagaagaaaaaaagcaaggatcactttgggctggaaggagatgaggagtctactatgctggaggactcagtgtcccccaaaaagtc

SEQ ID NO: 333793 - DNA, 120 bp, Artificial Sequence
  ENSG00000137076_12 (sequence is synthesized)
aacagtcctgcagcagcaatacaaccgggtggggaaagtggagcatggctctgtggccctgcctgccatcatgcgctctggagcctctggtcctgagaatttccaggtgggcagcatgcc

SEQ ID NO: 333794 - DNA, 120 bp, Artificial Sequence
  ENSG00000137076_13 (sequence is synthesized)
ccctgcccagcagcagattaccagcggccagatgcaccgaggacacatgcctcctctgacttcagcccagcaggcactcactggaaccattaactccagcatgcaggccgtgcaggctgc

SEQ ID NO: 333795 - DNA, 120 bp, Artificial Sequence
  ENSG00000137076_14 (sequence is synthesized)
ccaggccaccctggatgactttgacactctgccgcctcttggccaggatgctgcctctaaggcctggcgtaaaaacaagatggatgaatcaaagcatgagatccactctcaggtagatgc

SEQ ID NO: 333796 - DNA, 120 bp, Artificial Sequence
  ENSG00000137076_15 (sequence is synthesized)
catcacagctggtactgcgtctgtggtgaacctgacagcaggggaccctgctgagacagactataccgcagtgggctgtgcagtcaccacaatctcctccaacctgacggagatgtcccg

SEQ ID NO: 333797 - DNA, 120 bp, Artificial Sequence
  ENSG00000137076_16 (sequence is synthesized)
tggggtgaagctgctggctgccttgctggaggacgaaggcggcagtggtcggcccctgttgcaggcagcaaagggccttgcgggagcagtgtcagaactgctgcgcagtgcccaaccagc

SEQ ID NO: 333798 - DNA, 120 bp, Artificial Sequence
  ENSG00000137076_17 (sequence is synthesized)
cagtgctgagccccgtcagaacctgctgcaagcagctgggaacgtgggccaggccagtggggagctgttgcaacaaattggggaaagtgatactgacccccacttccaggatgcgctaat

SEQ ID NO: 333799 - DNA, 120 bp, Artificial Sequence
  ENSG00000137076_18 (sequence is synthesized)
gcagctcgccaaagctgtggcaagtgctgcagctgccctggtcctcaaggccaagagtgtggcccagcggacagaggactcgggacttcagacccaagttattgctgcagcaacacagtg

SEQ ID NO: 333800 - DNA, 120 bp, Artificial Sequence
  ENSG00000137076_19 (sequence is synthesized)
tgccctatccacttcccaactagtggcctgtactaaggtggtggcacctacaatcagctcacctgtctgccaagagcaactggtggaggctggacgactggtagccaaagccgtggaggg

SEQ ID NO: 333801 - DNA, 120 bp, Artificial Sequence
  ENSG00000137076_20 (sequence is synthesized)
ctgtgtgtctgcctcccaggcagctacagaggatgggcaactgttgcgaggggtaggagcagcagccacagctgtcacccaggccctaaatgagctgctgcagcatgtgaaagcccatgc

SEQ ID NO: 333802 - DNA, 120 bp, Artificial Sequence
  ENSG00000137076_21 (sequence is synthesized)
cacaggggctgggcctgctggccgttatgaccaggctactgacaccatcctaaccgtcactgagaacatctttagctccatgggtgatgctggggagatggtgcgacaggcccgcatcct

SEQ ID NO: 333803 - DNA, 120 bp, Artificial Sequence
  ENSG00000137076_22 (sequence is synthesized)
ggcccaagccacatctgacctggtcaatgccatcaaggctgatgctgagggggaaagtgatctggagaactcccgcaagctcttaagtgctgccaagatcctagctgatgccacagccaa

SEQ ID NO: 333804 - DNA, 120 bp, Artificial Sequence
  ENSG00000137076_23 (sequence is synthesized)
gatggtagaggctgccaagggagcagctgcccaccctgacagtgaggagcagcagcagcggctgcgggaggcagctgaggggctgcgcatggccaccaatgcagctgcgcagaatgccat

SEQ ID NO: 333805 - DNA, 120 bp, Artificial Sequence
  ENSG00000137076_24 (sequence is synthesized)
caagaaaaagctggtgcagcgcctggagcatgcagccaagcaggctgcagcctcagccacacagaccatcgctgcagctcagcacgcagcctctacccccaaggcctctgccggccccca

SEQ ID NO: 333806 - DNA, 120 bp, Artificial Sequence
  ENSG00000137076_25 (sequence is synthesized)
gcccctgctggtgcagagctgcaaggcagtggcagagcagattccactgctggtgcagggcgtccgaggaagccaagcccagcctgacagccccagcgctcagcttgccctcattgctgc

SEQ ID NO: 333807 - DNA, 120 bp, Artificial Sequence
  ENSG00000137076_26 (sequence is synthesized)
cagccagagcttcctgcagccaggtgggaagatggtggcagctgcaaaggcctcagtgccaacgattcaggaccaggcttcagccatgcagctgagtcagtgtgccaagaacctgggcac

SEQ ID NO: 333808 - DNA, 120 bp, Artificial Sequence
  ENSG00000137076_27 (sequence is synthesized)
cgcgctggctgaactccggacggctgcccagaaggctcaggaagcatgtggacctttggagatggattctgcactgagtgtggtacagaatctagagaaagatctacaggaagtgaaggc

SEQ ID NO: 333809 - DNA, 120 bp, Artificial Sequence
  ENSG00000137076_28 (sequence is synthesized)
agcagctcgagatggcaagcttaaacccttacctggggagacaatggagaagtgtacccaggacctgggcaacagcaccaaagccgtgagctcagccatcgcccagctactgggagaggt

SEQ ID NO: 333810 - DNA, 120 bp, Artificial Sequence
  ENSG00000137076_29 (sequence is synthesized)
tgcccagggcaatgagaattatgcaggtattgcagctcgggatgtggcaggtgggctgcggtcactggcccaggccgctaggggagtcgctgcactgacgtcagatcctgcagtgcaggc

SEQ ID NO: 333811 - DNA, 120 bp, Artificial Sequence
  ENSG00000137076_30 (sequence is synthesized)
cattgtacttgatacggccagtgatgtgctggacaaggccagcagcctcattgaggaggcgaaaaaggcagctggccatccaggggaccctgagagccagcagcggcttgcccaggtggc

SEQ ID NO: 333812 - DNA, 120 bp, Artificial Sequence
  ENSG00000137076_31 (sequence is synthesized)
taaagcagtgacccaggctctgaaccgctgtgtcagctgcctacctggccagcgcgatgtggataatgccctgagggcagttggagatgccagcaagcgactcctgagtgactcgcttcc

SEQ ID NO: 333813 - DNA, 120 bp, Artificial Sequence
  ENSG00000137076_32 (sequence is synthesized)
tcctagcactgggacatttcaagaagctcagagccggttgaatgaagctgctgctgggctgaatcaggcagccacagaactggtgcaggcctctcggggaacccctcaggacctggctcg

SEQ ID NO: 333814 - DNA, 120 bp, Artificial Sequence
  ENSG00000137076_33 (sequence is synthesized)
agcctcaggccgatttggacaggacttcagcaccttcctggaagctggtgtggagatggcaggccaggctccgagccaggaggaccgagcccaagttgtgtccaacttgaagggcatctc

SEQ ID NO: 333815 - DNA, 120 bp, Artificial Sequence
  ENSG00000137076_34 (sequence is synthesized)
catgtcttcaagcaaacttcttctggctgccaaggccctgtccacggaccctgctgcccctaacctcaagagtcagctggctgcagctgccagggcagtaactgacagcatcaatcagct

SEQ ID NO: 333816 - DNA, 120 bp, Artificial Sequence
  ENSG00000137076_35 (sequence is synthesized)
atcaatgacatgtcctactttggttgcctggacagtgtaatggagaactcaaaggtgctgggcgaggccatgactggcatctcccaaaatgccaagaacggaaacctgccagagtttgga

SEQ ID NO: 333817 - DNA, 120 bp, Artificial Sequence
  ENSG00000137076_36 (sequence is synthesized)
gatgccatttccacagcctcaaaggcactttgtggcttcaccgaggcagctgcacaggctgcatatctggttggtgtctctgaccccaatagccaagctggacagcaagggctagtggag

SEQ ID NO: 333818 - DNA, 120 bp, Artificial Sequence
  ENSG00000137076_37 (sequence is synthesized)
cccacacagtttgcccgtgcaaaccaggcaattcagatggcctgccagagtttgggagagcctggctgtacccaggcccaggtgctctctgcagccaccattgtggctaaacacacctct

SEQ ID NO: 333819 - DNA, 120 bp, Artificial Sequence
  ENSG00000137076_38 (sequence is synthesized)
gcactgtgtaacagctgtcgcctggcttctgcccgtaccaccaatcctactgccaagcgccagtttgtacagtcagccaaggaggtggccaacagcacagctaatcttgtcaagaccatc

SEQ ID NO: 333820 - DNA, 120 bp, Artificial Sequence
  ENSG00000137076_39 (sequence is synthesized)
aaggcgctagatggggccttcacagaggagaaccgtgcccagtgccgagcagcaacagcccctctgctggaggctgtggacaatctgagtgcctttgcgtccaaccctgagttctccagc

SEQ ID NO: 333821 - DNA, 120 bp, Artificial Sequence
  ENSG00000137076_40 (sequence is synthesized)
attcctgcccagatcagccctgagggtcgggctgccatggagcccattgtgatctctgccaagacaatgttagagagtgccgggggactcatccagacagcccgggccctcgcagtcaat

SEQ ID NO: 333822 - DNA, 120 bp, Artificial Sequence
  ENSG00000137076_41 (sequence is synthesized)
ccccgggaccccccgagctggtcggtgctggccggccactcccgtactgtctcagactccatcaagaagctaattacaagcatgagggacaaggctccagggcagctggagtgtgaaacg

SEQ ID NO: 333823 - DNA, 120 bp, Artificial Sequence
  ENSG00000137076_42 (sequence is synthesized)
gccattgcagctctgaacagttgtctacgggacctagaccaggcttccctcgctgcagtcagccagcagcttgctccccgtgagggaatctctcaagaggccttgcacactcagatgctc

SEQ ID NO: 333824 - DNA, 120 bp, Artificial Sequence
  ENSG00000137076_43 (sequence is synthesized)
actgcagtccaagagatctcccatctcattgagccgctggccaatgctgcccgggctgaagcctcccagctgggacacaaggtgtcccagatggcgcagtactttgagccgctcaccctg

SEQ ID NO: 333825 - DNA, 120 bp, Artificial Sequence
  ENSG00000137076_44 (sequence is synthesized)
gctgcagtgggtgctgcctccaagaccctgagccacccgcagcagatggcactcctggaccagactaaaacattggcagagtctgccctgcagttgctatacactgccaaggaggctggt

SEQ ID NO: 333826 - DNA, 120 bp, Artificial Sequence
  ENSG00000137076_45 (sequence is synthesized)
ggtaacccaaagcaagcagctcacacccaggaagccctggaggaggctgtgcagatgatgaccgaggccgtagaggacctgacaacaaccctcaacgaggcagccagtgctgctggggtc

SEQ ID NO: 333827 - DNA, 120 bp, Artificial Sequence
  ENSG00000137076_46 (sequence is synthesized)
gtgggtggcatggtggactccatcacccaggccatcaaccagctagatgaaggaccaatgggtgaaccagaaggttccttcgtggattaccaaacaactatggtgcggacagccaaggcc

SEQ ID NO: 333828 - DNA, 120 bp, Artificial Sequence
  ENSG00000137076_47 (sequence is synthesized)
attgcagtgaccgttcaggagatggttaccaagtcaaacaccagcccagaggagctgggccctcttgctaaccagctgaccagtgactatggccgtctggcctcggaggccaagcctgca

SEQ ID NO: 333829 - DNA, 120 bp, Artificial Sequence
  ENSG00000137076_48 (sequence is synthesized)
gcggtggctgctgaaaatgaagagataggttcccatatcaaacaccgggtacaggagctgggccatggctgtgccgctctggtcaccaaggcaggcgccctgcagtgcagccccagtgat

SEQ ID NO: 333830 - DNA, 120 bp, Artificial Sequence
  ENSG00000137076_49 (sequence is synthesized)
gcctacaccaagaaggagctcatagagtgtgcccggagagtctctgagaaggtctcccacgtcctggctgcgctccaggctgggaatcgtggcacccaggcctgcatcacagcagccagc

SEQ ID NO: 333831 - DNA, 120 bp, Artificial Sequence
  ENSG00000137076_50 (sequence is synthesized)
gctgtgtctggtatcattgctgacctcgacaccaccatcatgttcgccactgctggcacgctcaatcgtgagggtactgaaactttcgctgaccaccgggagggcatcctgaagactgcg

SEQ ID NO: 333832 - DNA, 120 bp, Artificial Sequence
  ENSG00000137076_51 (sequence is synthesized)
aaggtgctggtggaggacaccaaggtcctggtgcaaaacgcagctgggagccaggagaagttggcgcaggctgcccagtcctccgtggcgaccatcacccgcctcgctgatgtggtcaag

SEQ ID NO: 333833 - DNA, 120 bp, Artificial Sequence
  ENSG00000137076_52 (sequence is synthesized)
ctgggtgcagccagcctgggagctgaggaccctgagacccaggtggtactaatcaacgcagtgaaagatgtagccaaagccctgggagacctcatcagtgcaacgaaggctgcagctggc

SEQ ID NO: 333834 - DNA, 120 bp, Artificial Sequence
  ENSG00000137076_53 (sequence is synthesized)
aaagttggagatgaccctgctgtgtggcagctaaagaactctgccaaggtgatggtgaccaatgtgacatcattgcttaagacagtaaaagccgtggaagatgaggccaccaaaggcact

SEQ ID NO: 333835 - DNA, 120 bp, Artificial Sequence
  ENSG00000137076_54 (sequence is synthesized)
cgggccctggaggcaaccacagaacacatacggcaggagctggcggttttctgttccccagagccacctgccaagacctctaccccagaagacttcatccgaatgaccaagggtatcacc

SEQ ID NO: 333836 - DNA, 120 bp, Artificial Sequence
  ENSG00000137076_55 (sequence is synthesized)
atggcaaccgccaaggccgttgctgctggcaattcctgtcgccaggaagatgtcattgccacagccaatctgagccgccgtgctattgcagatatgcttcgggcttgcaaggaagcagct

SEQ ID NO: 333837 - DNA, 120 bp, Artificial Sequence
  ENSG00000137076_56 (sequence is synthesized)
taccacccagaagtggcccctgatgtgcggcttcgagccctgcactatggccgggagtgtgccaatggctacctggaactgctggaccatgtactgctgaccctgcagaagccaagccca

SEQ ID NO: 333838 - DNA, 120 bp, Artificial Sequence
  ENSG00000137076_57 (sequence is synthesized)
gaactgaagcagcagttgacaggacattcaaagcgtgtggctggttccgtcactgagctcatccaggctgctgaagccatgaagggaacagaatgggtagacccagaggaccccacagtc

SEQ ID NO: 333839 - DNA, 120 bp, Artificial Sequence
  ENSG00000137076_58 (sequence is synthesized)
attgctgagaatgagctcctgggagctgcagccgccattgaggctgcagccaaaaagctagagcagctgaagccccgggccaaacccaaggaggcagatgagtccttgaactttgaggag

SEQ ID NO: 333840 - DNA, 120 bp, Artificial Sequence
  ENSG00000137076_59 (sequence is synthesized)
cagatactagaagctgccaagtccattgcagcagccaccagtgcactggtaaaggctgcgtcggctgcccagagagaactagtggcccaagggaaggtgggtgccattccagccaatgca

SEQ ID NO: 333841 - DNA, 120 bp, Artificial Sequence
  ENSG00000137076_60 (sequence is synthesized)
ctggacgatgggcagtggtcccagggcctcatttctgctgcccggatggtggctgcggccaccaacaatctgtgtgaggcagccaatgcagctgtacaaggccatgccagccaggagaag

SEQ ID NO: 333842 - DNA, 120 bp, Artificial Sequence
  ENSG00000137076_61 (sequence is synthesized)
ctcatctcatcagccaagcaggtagctgcctccacagcccagctccttgtggcctgcaaggtcaaggctgaccaggactcggaggcaatgaaacgacttcaggctgctggcaacgcagtg

SEQ ID NO: 333843 - DNA, 120 bp, Artificial Sequence
  ENSG00000137076_62 (sequence is synthesized)
aagcgagcctcagataatctggtgaaagcagcacagaaggctgcagcctttgaagagcaggagaatgagacagtggtggtgaaagagaagatggttggcggcattgcccagatcatcgca

SEQ ID NO: 333844 - DNA, 120 bp, Artificial Sequence
  ENSG00000137076_63 (sequence is synthesized)
gcacaggaagaaatgcttcggaaggaacgagagctggaagaggcgcggaagaaactggcccagatccggcagcagcagtacaagtttctgccttcagagcttcgagatgagcactaaaga

SEQ ID NO: 333845 - DNA, 120 bp, Artificial Sequence
  ENSG00000137076_64 (sequence is synthesized)
agcctcttctatttaatgcagacccggcccagagactgtgcgtgccactaccaaagccttctgggctgtcggggcccaacctgcccaaccccagcactccccaaagtgcctgccaaaccc

SEQ ID NO: 333846 - DNA, 120 bp, Artificial Sequence
  ENSG00000137076_65 (sequence is synthesized)
cagggcctggccccgcccagtcccgcagtacatcccctgtcccctccccaaccccaagtgccttcatgccctagggccccccaagtgcctgcccctccccagagtattaacgctccaaga

SEQ ID NO: 333847 - DNA, 120 bp, Artificial Sequence
  ENSG00000137076_66 (sequence is synthesized)
gtattattaacgctgctgtacctcgatctgaatctgccggggccccagcccactccaccctgccagcagcttccggccagtccccacagcctcatcagctctcttcaccgttttttgata

SEQ ID NO: 333848 - DNA, 120 bp, Artificial Sequence
  ENSG00000137076_67 (sequence is synthesized)
ctatcttcccccacccccagctacccataggggctgcagagttataagccccaaacaggtcatgctccaataaaaatgattctacctacaacctctgcctggcttcaagggagatacaag

SEQ ID NO: 333849 - DNA, 120 bp, Artificial Sequence
  ENSG00000137076_68 (sequence is synthesized)
ttttctcccagggcagtaggagagacagtggggttgaattctgtcacccagcttgatccagcttgaaatgggagaggggaagactggcagtctgcacctgaggtcccttcctccttgcac

SEQ ID NO: 333850 - DNA, 120 bp, Artificial Sequence
  ENSG00000137076_69 (sequence is synthesized)
ccggaccctaaagttatccaatggggaagttgtgcctgagaagtcatactcctgttatcctcacctccctggccagcacctaagcctcacaaagtgtcgttctgctgctgctgggacagc

SEQ ID NO: 333851 - DNA, 120 bp, Artificial Sequence
  ENSG00000137076_70 (sequence is synthesized)
agctaccacagttccttgtggctaccaggacattctgttcttcatagctactcagggtatgtcaacaaatccagtccttgaccaaattcaaattttcaaaagaagctttgctaaaaataa

SEQ ID NO: 333852 - DNA, 120 bp, Artificial Sequence
  ENSG00000137076_71 (sequence is synthesized)
cattgctgacctcgacaccaccatcatgttcgccactgctggcacgctcaatcgtgagggtactgaaactttcgctgaccaccggtaagacaggaactgggcctaagggaggcagacagg

SEQ ID NO: 333853 - DNA, 120 bp, Artificial Sequence
  ENSG00000137076_72 (sequence is synthesized)
tcggggcacggggctggaagaggcaggatagcattcgctggaatggggaagacctggaccaggcaccttggacgggctggagcgggtaggggagatctgactaagctgggccctccctca

SEQ ID NO: 333854 - DNA, 120 bp, Artificial Sequence
  ENSG00000137076_73 (sequence is synthesized)
cccacatcctataccctgtcagggcccaggactccctgccattgtgaccccagtgggcctgtctccattccaagcctgccccccactatttcttcttccgaggtaccagggtttgaccaa

SEQ ID NO: 333855 - DNA, 120 bp, Artificial Sequence
  ENSG00000137076_74 (sequence is synthesized)
catagctacccttttagttgccatcatccattgtctcttctctgcctctggaatatgaatgtagttcagtatctctgcccctacccccatctctgaagcaagcatgtcactcttttttga

SEQ ID NO: 333856 - DNA, 120 bp, Artificial Sequence
  ENSG00000137076_75 (sequence is synthesized)
gattatctgaagaattttgctgcagtagccagagggaaaccgggtaaaattttccctatagggaacatgggttaaaagtctcacaagcctcatctgctggtgtttcttggaatgcagagt

SEQ ID NO: 333857 - DNA, 120 bp, Artificial Sequence
  ENSG00000137076_76 (sequence is synthesized)
ttggcgtggctttctcagcttcctaagtgcatgttcatccttctagaaagctctttctcctcttggttccctgaaatggtgctctagacccactttccctcagggactgagcctctaact

SEQ ID NO: 333858 - DNA, 120 bp, Artificial Sequence
  ENSG00000137076_77 (sequence is synthesized)
cccactttccctcagggactgagcctctaacttaattttcctcagtccctttccctacagggagagacacaggtcacattaagaattcatactggccaggctcggtggctcacacctgta

SEQ ID NO: 333859 - DNA, 120 bp, Artificial Sequence
  ENSG00000137076_78 (sequence is synthesized)
atggaaaacccttatcatggtgtgatctctgcttcctggctggacagctctgtgctagcctctgaccatagtccccacagatgccagggcctgatgatactaaccatgctccctggtgct

SEQ ID NO: 333860 - DNA, 120 bp, Artificial Sequence
  ENSG00000137076_79 (sequence is synthesized)
attgtggctaaacacacctctgcactgtgtaacagctgtcgcctggcttctgcccgtaccaccaatcctactgccaagcgccagtttgtacagtcagccaaggagctgggccatggctgt

SEQ ID NO: 333861 - DNA, 120 bp, Artificial Sequence
  ENSG00000137077_0 (sequence is synthesized)
acagacccccaacttgcagctgcccacctcaccctcagctctggcctcttactcaccctctaccacagacatggctcagtcactggctctgagcctccttatcctggttctggcctttgg

SEQ ID NO: 333862 - DNA, 120 bp, Artificial Sequence
  ENSG00000137077_1 (sequence is synthesized)
catccccaggacccaaggcagtgatggaggggctcaggactgttgcctcaagtacagccaaaggaagattcccgccaaggttgtccgcagctaccggaagcaggaaccaagcttaggctg

SEQ ID NO: 333863 - DNA, 120 bp, Artificial Sequence
  ENSG00000137077_2 (sequence is synthesized)
ctccatcccagctatcctgttcttgccccgcaagcgctctcaggcagagctatgtgcagacccaaaggagctctgggtgcagcagctgatgcagcatctggacaagacaccatccccaca

SEQ ID NO: 333864 - DNA, 120 bp, Artificial Sequence
  ENSG00000137077_3 (sequence is synthesized)
ggacaggggggcctccaagactggcaagaaaggaaagggctccaaaggctgcaagaggactgagcggtcacagacccctaaagggccatagcccagtgagcagcctggagccctggagac

SEQ ID NO: 333865 - DNA, 120 bp, Artificial Sequence
  ENSG00000137077_4 (sequence is synthesized)
cccaccagcctcaccagcgcttgaagcctgaacccaagatgcaagaaggaggctatgctcaggggccctggagcagccaccccatgctggccttgccacactctttctcctgctttaacc

SEQ ID NO: 333866 - DNA, 120 bp, Artificial Sequence
  ENSG00000137077_5 (sequence is synthesized)
accccatctgcattcccagctctaccctgcatggctgagctgcccacagcaggccaggtccagagagaccgaggagggagagtctcccagggagcatgagaggaggcagcaggactgtcc

SEQ ID NO: 333867 - DNA, 120 bp, Artificial Sequence
  ENSG00000137077_6 (sequence is synthesized)
ccttgaaggagaatcatcaggaccctggacctgatacggctccccagtacaccccacctcttccttgtaaatatgatttatacctaactgaataaaaagctgttctgtcttcccacccaa

SEQ ID NO: 333868 - DNA, 120 bp, Artificial Sequence
  ENSG00000137077_7 (sequence is synthesized)
caaaggctgcaagaggtgaggaatctgagggatgtgggtaaaggggagcctcagtcagcccctcacacccctcttctgccctcacaggactgagcggtcacagacccctaaagggccata

SEQ ID NO: 333869 - DNA, 120 bp, Artificial Sequence
  ENSG00000137078_0 (sequence is synthesized)
agtattggggatgctgagctgcggggtacgggcctgaggagggatgggagtaagaagtgctgtggaaaccgtcaggccatgaaccaggctgaccctcggctcagagcagtgtgcttgtgg

SEQ ID NO: 333870 - DNA, 120 bp, Artificial Sequence
  ENSG00000137078_1 (sequence is synthesized)
actctcacatctgcagccatgagcagaggcgacaactgcacggatctactcgcactgggaatcccctccataacccaggcctggggactgtgggtcctcttaggggctgtgacgctgcta

SEQ ID NO: 333871 - DNA, 120 bp, Artificial Sequence
  ENSG00000137078_2 (sequence is synthesized)
tttctcatctcgctggctgcacacttgtcccagtggaccaggggccggagcaggagccatccggggcagggacgctctggagagtctgtggaagaggtcccgctgtatgggaacctgcat

SEQ ID NO: 333872 - DNA, 120 bp, Artificial Sequence
  ENSG00000137078_3 (sequence is synthesized)
tatctacagacaggacggctgtctcaagacccagagccagaccagcaggatccaactcttggaggccctgccagggctgcagaggaggtgatgtgctataccagcctgcagctgcggcct

SEQ ID NO: 333873 - DNA, 120 bp, Artificial Sequence
  ENSG00000137078_4 (sequence is synthesized)
cctcagggtcggatccccggtcctggaacccccgtcaagtactcggaggtggtgctggactctgagccaaagtcccaggcctcgggccccgagccggagctctatgcctcagtatgtgcc

SEQ ID NO: 333874 - DNA, 120 bp, Artificial Sequence
  ENSG00000137078_5 (sequence is synthesized)
ccttcccggatcaggcctatgccaacagccagcctgcagccagctgagatggagggcctggcacagcggggcgtgcactgccccagccccccgtagcaggggcatgactgtttcccaacc

SEQ ID NO: 333875 - DNA, 120 bp, Artificial Sequence
  ENSG00000137078_6 (sequence is synthesized)
agcacccaaagacgggcgccattgccaagtcacaggatgtgatctaccccggacttcctatctgagcttcaagggagacatctcagggcaaagctttcgtgatggaggaggcaaagacag

SEQ ID NO: 333876 - DNA, 120 bp, Artificial Sequence
  ENSG00000137078_7 (sequence is synthesized)
tagccccctccttatttcttttttctatctgttcctcttagcccccaaactcccaggttctcacttccttcttctggagtttaaccagatcctccccacccccgctccctcatagtctac

SEQ ID NO: 333877 - DNA, 120 bp, Artificial Sequence
  ENSG00000137078_8 (sequence is synthesized)
ccccacgcctcagtgtctcctcaggcacaggaagtgggcggtgggggaggggtaagggcctgacagtgggtgggtgggtatattcctcaggagtccacagactggagtggacctggaact

SEQ ID NO: 333878 - DNA, 120 bp, Artificial Sequence
  ENSG00000137078_9 (sequence is synthesized)
tagagacgggagggacccgagcctggcttttgacctaagaaccctagcaggagaatacagtctccatcctgctgtctctgtcctgtccccaagttttcaaataaaactttccaaaaagtg

SEQ ID NO: 333879 - DNA, 120 bp, Artificial Sequence
  ENSG00000137080_0 (sequence is synthesized)
ttcaaggttacccatctcaagtagcctagcaatattggcaacatcccaatggccctgtccttttctttactgatggccgtgctggtgctcagctacaaatccatctgttctctgggctgt

SEQ ID NO: 333880 - DNA, 120 bp, Artificial Sequence
  ENSG00000137080_1 (sequence is synthesized)
gatctgcctcagacccacagcctgggtaataggagggccttgatactcctggcacaaatgggaagaatctctcctttctcctgcctgaaggacagacatgactttggattcccccaggag

SEQ ID NO: 333881 - DNA, 120 bp, Artificial Sequence
  ENSG00000137080_2 (sequence is synthesized)
gagtttgatggcaaccagttccagaaggctcaagccatctctgtcctccatgagatgatccagcagaccttcaatctcttcagcacaaaggactcatctgctacttgggaacagagcctc

SEQ ID NO: 333882 - DNA, 120 bp, Artificial Sequence
  ENSG00000137080_3 (sequence is synthesized)
ctagaaaaattttccactgaacttaaccagcagctgaatgacctggaagcctgcgtgatacaggaggttggggtggaagagactcccctgatgaatgtggactccatcctggctgtgaag

SEQ ID NO: 333883 - DNA, 120 bp, Artificial Sequence
  ENSG00000137080_4 (sequence is synthesized)
ttgtcagagcagaaatcatgagatccttctctttatcaaaaatttttcaagaaagattaaggaggaaggaatgaaacctgtttcaacatggaaatgatctgtattgactaatacaccagt

SEQ ID NO: 333884 - DNA, 120 bp, Artificial Sequence
  ENSG00000137080_5 (sequence is synthesized)
ccacacttctatgacttctgccatttcaaagactcatttctcctataaccaccgcatgagttgaatcaaaattttcagatcttttcaggagtgtaaggaaacatcatgtttacctgtgca

SEQ ID NO: 333885 - DNA, 120 bp, Artificial Sequence
  ENSG00000137080_6 (sequence is synthesized)
ggcactagtcctttacagatgaccatgctgatagatctaattatctatctattgaaatatttatttatttattagatttaaattatttttgtccatgtaatattatgtgtacttttacat

SEQ ID NO: 333886 - DNA, 120 bp, Artificial Sequence
  ENSG00000137090_0 (sequence is synthesized)
actccagctgcgcctccggctgcagcgcacacgtctcctgcgcctcctcctccggagcgtcgctgtccgtcgggttcatccctcgcagcagtctccaggcgagagagggggccagagtgc

SEQ ID NO: 333887 - DNA, 120 bp, Artificial Sequence
  ENSG00000137090_1 (sequence is synthesized)
tcgcacttctcctaggggcaccatgcccaacgacgaggcattcagcaagccctctacaccgtcggaagcccctcacgcccccggggtaccgccgcagggcagagccgggggctttggcaa

SEQ ID NO: 333888 - DNA, 120 bp, Artificial Sequence
  ENSG00000137090_2 (sequence is synthesized)
gcaaagcgtctggggcgctagtgggggcggccagcggctcgagcgccgggggcagcagcagaggaggcggctccggctccggggcgtcggacctgggtgccgggagcaagaagtccccgc

SEQ ID NO: 333889 - DNA, 120 bp, Artificial Sequence
  ENSG00000137090_3 (sequence is synthesized)
gcccaagtgcgcacgctgcaggaaccacggctacgcctcgccgctcaagggccacaagcgcttctgcatgtggcgcgactgccagtgcaagaagtgcaacctgatcgccgagaggcagcg

SEQ ID NO: 333890 - DNA, 120 bp, Artificial Sequence
  ENSG00000137090_4 (sequence is synthesized)
cgtgatggccgcgcaggtggccctgagaaggcagcaggcccaggaggaggaattgggtatcagccaccccatcccactgcccagtgcggccgagctgcttgtcaaaagagagaacaatgg

SEQ ID NO: 333891 - DNA, 120 bp, Artificial Sequence
  ENSG00000137090_5 (sequence is synthesized)
cagtaacccgtgcctcatgactgagtgcagtggcacctctcagccaccgccggccagtgtccccaccactgcagcttcagagggacgtatggtcatccaggatattcctgctgtcaccag

SEQ ID NO: 333892 - DNA, 120 bp, Artificial Sequence
  ENSG00000137090_6 (sequence is synthesized)
cagagggcatgtggagaacacacctgacctggtttcagactccacctactacagcagcttctaccagccgtctctgtttccttattacaacaatctatacaactgcccgcagtactccat

SEQ ID NO: 333893 - DNA, 120 bp, Artificial Sequence
  ENSG00000137090_7 (sequence is synthesized)
ggccttggctgctgattctgcttctggggaggtgggaaatcccctcgggggatcccctgtgaagaacagccttcggggcctccccggaccttatgtgcctggtcagacaggaaaccagtg

SEQ ID NO: 333894 - DNA, 120 bp, Artificial Sequence
  ENSG00000137090_8 (sequence is synthesized)
gcagatgaagaacatggagaaccgccatgcaatgagctcccagtacaggatgcattcttactacccgcctccctcttacctgggccagagcgtgccccagttcttcacttttgaggatgc

SEQ ID NO: 333895 - DNA, 120 bp, Artificial Sequence
  ENSG00000137090_9 (sequence is synthesized)
tctggcttggtttccctctcgagcagctctcctattagtaacaagagcacaaaggcagtgcttgaatgtgagcctgcgtcggagcccagcagcttcacagtcactcccgtcatcgaggag

SEQ ID NO: 333896 - DNA, 120 bp, Artificial Sequence
  ENSG00000137090_10 (sequence is synthesized)
gacgagtgagcagtgcctgctgccgatggcggttcacttggagtaacaggcttattccactttccatggggtttgttaatattttgcattgactcatactatcttaactgttgagaacgt

SEQ ID NO: 333897 - DNA, 120 bp, Artificial Sequence
  ENSG00000137090_11 (sequence is synthesized)
atttggtttatattccttagagtttagtccagaggctgtaacacatttgtaatactttagggtccgtgactaccatctgcatggtttaagtgctttactcacggagtttaaataatagtg

SEQ ID NO: 333898 - DNA, 120 bp, Artificial Sequence
  ENSG00000137090_12 (sequence is synthesized)
ttcatttttttaatgacactggtttcatgtagttttcaagaaataaaagaattcattcaagtgaagccatttgtgtgcctctaaatgagtcatctaattagatgttacttttagttttaa

SEQ ID NO: 333899 - DNA, 120 bp, Artificial Sequence
  ENSG00000137090_13 (sequence is synthesized)
aatgaaatcttaggtgccttaggggttttttttttttttaagtattttttaaaaacctgcaaagatataaatttagccaagttacctgacgggtgagaagaaaagagcaggcaaaattag

SEQ ID NO: 333900 - DNA, 120 bp, Artificial Sequence
  ENSG00000137090_14 (sequence is synthesized)
tgatttttttagaagtctgctaaatggatatattgtgtgtgttgctgttggaaatagccccaccccatcctcccaatccaaaacgtaactgaaatataatcagaaacattaaagcctgta

SEQ ID NO: 333901 - DNA, 120 bp, Artificial Sequence
  ENSG00000137090_15 (sequence is synthesized)
aaaaaaaattgctgcgtttttggtaaagggtgtaatttgtaaacagtgcaatttaaagtgaccttagtgatgcagagttcctgagtggtgtttgtagaatgagtttatcatacattcttt

SEQ ID NO: 333902 - DNA, 120 bp, Artificial Sequence
  ENSG00000137090_16 (sequence is synthesized)
ctactactggaaaaaaatggatgcagtctggactgttgtaaccttaggttgtaatctgatttggaaataagtacatctttaaaagttgctacagatttgagttcatgattttgttaaaaa

SEQ ID NO: 333903 - DNA, 120 bp, Artificial Sequence
  ENSG00000137090_17 (sequence is synthesized)
ttgctatggagtactttgttatataacagaagccatcctgaaatgaaactagtctaaaaaaattcattgttctacttagttgcagctgtacctgaaataaaaatgttattgatgactgaa

SEQ ID NO: 333904 - DNA, 120 bp, Artificial Sequence
  ENSG00000137090_18 (sequence is synthesized)
tacacacagaggcacacacgcacttgtgcgcccagaggcacacacaggtgacacacacaggtacacacacatatgtgtgtgtgccattttgcacacatgtaggcacaatatgcaaaatgt

SEQ ID NO: 333905 - DNA, 120 bp, Artificial Sequence
  ENSG00000137090_19 (sequence is synthesized)
gtaaggaattttttactctgtcaataatgccctttagcctcaaaggttggctgcaaggaattggaaagaaataatgtacaaacttgttttctttttcaaattttacttttctcatttttt

SEQ ID NO: 333906 - DNA, 120 bp, Artificial Sequence
  ENSG00000137090_20 (sequence is synthesized)
gaatgttgcataaataaccagttgggcacaggcagatcacaagtactgaatgaggtaccacctcctccagctttgtccccactttcgttgggcaccttagaaaatgctgggtaaagcctt

SEQ ID NO: 333907 - DNA, 120 bp, Artificial Sequence
  ENSG00000137090_21 (sequence is synthesized)
ctgggtggcagtaatctgcgtgatgaatttgcaccttgggaaggaaacaggtcataatctgtatggaagaaaggtaagaaaaggaattcggtcactgttgagctggacccaacctgggtg

SEQ ID NO: 333908 - DNA, 88 bp, Artificial Sequence
  ENSG00000137090_22 (sequence is synthesized)
aaggaattcggtcactgttgagctggacccaacctgggtgcatttttcgctaggaatagaggtcagtctttcattctccaagggtttg

SEQ ID NO: 333909 - DNA, 120 bp, Artificial Sequence
  ENSG00000137090_23 (sequence is synthesized)
agagttgcgggcttcgctcggctcggggttccccacgatctctcaccctgtgtttcggcggagttgcgggggttccctctgctcccgggtccctgagatccctgatcccgctctcagggc

SEQ ID NO: 333910 - DNA, 120 bp, Artificial Sequence
  ENSG00000137090_24 (sequence is synthesized)
agggaattccggggttcgcccctctgggcttccccgcgatcccagagcccgcgttccaacagaattgggagggtttattgcgctagaggagtcttcaggatcttcgctcccgccctccga

SEQ ID NO: 333911 - DNA, 120 bp, Artificial Sequence
  ENSG00000137094_0 (sequence is synthesized)
ctgagctgagtgacaggaagacggttcaatgggcggcgcggaggcggagccgtgggggcgggctcccggtcccgctatcggcggccggcgggcaggcgactcctgtcccgggtggaggcg

SEQ ID NO: 333912 - DNA, 120 bp, Artificial Sequence
  ENSG00000137094_1 (sequence is synthesized)
gcggagccggagccgggggagggggcagcggctgtctcacggaccacggcggcgcccgcagctcctcaccgcagcacccccactgcaggcccgaggagctttccggagcttcccacactc

SEQ ID NO: 333913 - DNA, 120 bp, Artificial Sequence
  ENSG00000137094_2 (sequence is synthesized)
ctggggagaagacttcttagccagcttgatgtttaaaattcagctggagcccttaaaacttcgagcgtggacgctgaatgggtttgtaaagtttcgaaacaaggagaccagtgctggtcc

SEQ ID NO: 333914 - DNA, 120 bp, Artificial Sequence
  ENSG00000137094_3 (sequence is synthesized)
agtggctgtgatgggaaaagattattacaagattcttgggatcccatcgggggccaacgaggatgagatcaagaaagcctaccggaagatggccttgaagtaccacccagacaagaataa

SEQ ID NO: 333915 - DNA, 120 bp, Artificial Sequence
  ENSG00000137094_4 (sequence is synthesized)
agaacccaacgctgaggagaagtttaaggagattgcagaggcctatgatgtgctaagtgaccccaagaaacggggcctgtatgaccagtatggggaggaaggcctgaagaccggcggtgg

SEQ ID NO: 333916 - DNA, 120 bp, Artificial Sequence
  ENSG00000137094_5 (sequence is synthesized)
cacatcaggtggctccagtggctcctttcactacacctttcatggggacccccatgccacctttgcctccttctttggtggctccaaccccttcgatatcttctttgccagcagccgctc

SEQ ID NO: 333917 - DNA, 120 bp, Artificial Sequence
  ENSG00000137094_6 (sequence is synthesized)
cactcggcccttcagtggctttgacccagatgacatggatgtggatgaagatgaggacccatttggcgctttcggccgttttggcttcaatgggctgagtaggggtccaaggcgagcccc

SEQ ID NO: 333918 - DNA, 120 bp, Artificial Sequence
  ENSG00000137094_7 (sequence is synthesized)
agaaccactgtaccctcggcgcaaggtgcaggaccccccagtggtgcacgagctgcgggtgtccctggaggagatctaccatggctccaccaagcgcatgaagatcacaaggcgtcgcct

SEQ ID NO: 333919 - DNA, 120 bp, Artificial Sequence
  ENSG00000137094_8 (sequence is synthesized)
caaccctgatgggcgaactgtgcgcaccgaggacaagatcctgcacatagtcatcaagcgtggctggaaggaaggcaccaagatcaccttccccaaagaaggcgacgccacacctgacaa

SEQ ID NO: 333920 - DNA, 120 bp, Artificial Sequence
  ENSG00000137094_9 (sequence is synthesized)
catccctgctgacatcgtctttgtgctcaaagacaagccccatgcacacttccgccgagatggcaccaacgtgctctacagtgccctgatcagcctcaaggaggcgctgtgtggctgcac

SEQ ID NO: 333921 - DNA, 120 bp, Artificial Sequence
  ENSG00000137094_10 (sequence is synthesized)
cgtgaagagactccgtggggagggccttcccttccccaaagtgccaactcagcgaggagacctcattgttgagttcaaagttcgcttcccagacagattaacaccacagacaagacagat

SEQ ID NO: 333922 - DNA, 120 bp, Artificial Sequence
  ENSG00000137094_11 (sequence is synthesized)
ccttaagcagcacctaccctgttcctaggctctgccccagccagtccagagcctaccacagcaatacccccaacactcactccactcaatgtgcacccagcttgatgtccactggacact

SEQ ID NO: 333923 - DNA, 120 bp, Artificial Sequence
  ENSG00000137094_12 (sequence is synthesized)
ggcaactttttctaaaatgcaaaaaaaagccactggttttcaggaaaatgttcctgtccctgaccccttttagagctgggctgcctggggggagtgggagggaggtggggagagctagcc

SEQ ID NO: 333924 - DNA, 120 bp, Artificial Sequence
  ENSG00000137094_13 (sequence is synthesized)
caggccaggggtcaatgttcatgtcactagctttcaatccagtttccactgcagtggctggagagtgacctgagtgctacttgaagatatgtagagattccttatccatgcctgtacata

SEQ ID NO: 333925 - DNA, 120 bp, Artificial Sequence
  ENSG00000137094_14 (sequence is synthesized)
gcatgtcctcctcccctcagctttgctaataccagtcccctcccttccctttggcttcctgctgttgggggtggaaaagactagaaaggacattgctttctcagccccacccccaggtcc

SEQ ID NO: 333926 - DNA, 120 bp, Artificial Sequence
  ENSG00000137094_15 (sequence is synthesized)
acagtgtccaaggtaatggcacacatattcatgcacaagaagcactcacctagagctgtctgtgcctctctgggagaaaggagagaggataagaagggaaagttcacaacctgtgaacag

SEQ ID NO: 333927 - DNA, 120 bp, Artificial Sequence
  ENSG00000137094_16 (sequence is synthesized)
ggacttgagcacgagacacttttcatctggagcaggggggtgagctcctcagcagcctccgtaacagctgccctgcctacacctgcagagctggaggttctgtcctccctgctgctctca

SEQ ID NO: 333928 - DNA, 120 bp, Artificial Sequence
  ENSG00000137094_17 (sequence is synthesized)
ggagtgttcaagggtggagggcagggaatggggcctgaggtattaaggctaagaggtgggggacagggcccatctaccagccttcatcaggaagggaaagggctttggggtcaggtggca

SEQ ID NO: 333929 - DNA, 120 bp, Artificial Sequence
  ENSG00000137094_18 (sequence is synthesized)
gctattccccaccaagagattcagggtcacaggtttttccccacacctctgaactcagggcctagccacccccaaacttccaaatcccacttttgtgatatgtgaagctactcatttctt

SEQ ID NO: 333930 - DNA, 120 bp, Artificial Sequence
  ENSG00000137094_19 (sequence is synthesized)
acccttggaggctgtgtggggaatttccagcccttttatgcctgtgtgatcccaccccacccccatagttgtataaaggtcatagtgaagaagctgggggaagactgcttcagccagatc

SEQ ID NO: 333931 - DNA, 120 bp, Artificial Sequence
  ENSG00000137094_20 (sequence is synthesized)
ctggggtggggtctttaggttttctcactttgacaacccccgaatgtttttatagtagtttttttgtatttttttgtaatgacagtattatgtaaaaaataaagtattttaaaaatatgg

SEQ ID NO: 333932 - DNA, 120 bp, Artificial Sequence
  ENSG00000137094_21 (sequence is synthesized)
cattgagtaggttcttggggattggggtcgggtcctccccagtgagaggcgacaggagctcactgcctctcgggccctcacaatcacacctgtcacaggtatacacgctgccactcacaa

SEQ ID NO: 333933 - DNA, 120 bp, Artificial Sequence
  ENSG00000137094_22 (sequence is synthesized)
acacacgcttgcactcccagcctcactgacacgctgccatacagccgctcacagccagccagacactgctgcacctgagagcaggtggccgcgggtcttctcccttcactctccacattt

SEQ ID NO: 333934 - DNA, 120 bp, Artificial Sequence
  ENSG00000137094_23 (sequence is synthesized)
ggggatcaggtccggcacctgctgcgccagacaggccttgctgggcacgcgcctctgagagtccaaggaggtggcttccagagctgcagcacttcaggccggctccggtggagcgatcag

SEQ ID NO: 333935 - DNA, 120 bp, Artificial Sequence
  ENSG00000137094_24 (sequence is synthesized)
tccggagaagggcactcacacccatacccagtcaaaccctccacgcggccatcccctccattgccttcctgcttcctccaactcatcctcatcccctctgtgacatacaggaacccccct

SEQ ID NO: 333936 - DNA, 120 bp, Artificial Sequence
  ENSG00000137094_25 (sequence is synthesized)
ccggcctcacccacatatttgaatgaattgcaccccttatcattccttttctcaaacccttcaggtatccattttccacagacatttcctccattatttcaactctccacattcctccct

SEQ ID NO: 333937 - DNA, 120 bp, Artificial Sequence
  ENSG00000137094_26 (sequence is synthesized)
ttcaacccatcattaacccattttccacctcagccatttccatctgtcactcatccccctccatcagtacctcattttctgtatcagccatctcccctccctgtacctcaacagtccccc

SEQ ID NO: 333938 - DNA, 120 bp, Artificial Sequence
  ENSG00000137094_27 (sequence is synthesized)
tcgccattttctccccatttttccttcctgcctctaccttaacatcctcctcattcttctccatcaaaggcagtgccatgccatggggctcctttgtcattccaacacgtggcctgtggg

SEQ ID NO: 333939 - DNA, 120 bp, Artificial Sequence
  ENSG00000137094_28 (sequence is synthesized)
taggggggaagggaaggagggaggaaagcagaaagagaaaaaggaggcagatcctgaaagagcttgccctgtgtctgcggaggcaagagatgtatgggcctagagcagctagcaggtggg

SEQ ID NO: 333940 - DNA, 120 bp, Artificial Sequence
  ENSG00000137094_29 (sequence is synthesized)
taccagggaggaagctggccgggtgtggaggtaatgcagggacaccaaaaggaggtgggtggttggtgagccgttccactggccctctgcctggaagctgctctcgttctctaggggcac

SEQ ID NO: 333941 - DNA, 120 bp, Artificial Sequence
  ENSG00000137094_30 (sequence is synthesized)
cctcttggtgtgctagggttctttcccagtcccaggggaaagaaggtgtgggttgaggcagaaatggcagaccacccccccccgctccctctcagacggcttttgctgccatttccgaaa

SEQ ID NO: 333942 - DNA, 120 bp, Artificial Sequence
  ENSG00000137094_31 (sequence is synthesized)
acggttgcccccccccccaacgaggtgctctttcttctctgcctctcccaaccccaccccccaccccatctcccccacagacgtgacatgctggtggggggcaatgggggagtacccgcc

SEQ ID NO: 333943 - DNA, 120 bp, Artificial Sequence
  ENSG00000137094_32 (sequence is synthesized)
tttgtggagccttttcttcgtcagagaaaggtgactcccagaaccatgagtcaacccagccacctgcagcagggcctgtgggggcagcagtgagggccattgtccctgcccacctagggc

SEQ ID NO: 333944 - DNA, 120 bp, Artificial Sequence
  ENSG00000137094_33 (sequence is synthesized)
cttgggcgcctcccccttacccggttacaggcctcactcctggaaggacaccctgtacacctccctgctgtgaagcagtcagaggcagaaaggcaggtctcagctgtggctgccagccta

SEQ ID NO: 333945 - DNA, 120 bp, Artificial Sequence
  ENSG00000137094_34 (sequence is synthesized)
ggacattgctagaaagactctggttctcctggctttggcaggggttggccaagtctcagaagggctgagaatggcttctggccatcccccagagagctctagctacaggaaagtccccct

SEQ ID NO: 333946 - DNA, 120 bp, Artificial Sequence
  ENSG00000137094_35 (sequence is synthesized)
tcccctgatatccaccacagacacaccgatagagggagactggaatggaagaattcgggttgtacgtttctcttataacaaatgctcctgcacccaccttaaaagggactcagaggaata

SEQ ID NO: 333947 - DNA, 120 bp, Artificial Sequence
  ENSG00000137094_36 (sequence is synthesized)
tgggtctgatgatgggccggatcctaaaccacagggtggactgggggcgtagggtgaggctaggagaggtattaaggaaatggtggttggttagtgcccaattgtctcctaacagctggg

SEQ ID NO: 333948 - DNA, 120 bp, Artificial Sequence
  ENSG00000137094_37 (sequence is synthesized)
gttgaaaaagtcctgtccccaggatgcttttgttcactcacactggtgcttaggcggcacagccctcacagttttgtgtgtagacgctggcaaatgagtaaagggaactgttgccctggt

SEQ ID NO: 333949 - DNA, 120 bp, Artificial Sequence
  ENSG00000137094_38 (sequence is synthesized)
tgggggaaggatagtgtcgccccccctgctaatgagggagttggaaacagcagtttccaaaggctgtgagtcaccctgtgatctgagtcacacgtgaggcttagcatcgtcagaggggtg

SEQ ID NO: 333950 - DNA, 120 bp, Artificial Sequence
  ENSG00000137094_39 (sequence is synthesized)
ggggcggggaggcctggggtctccgatggcagacaggactccagacacccattccctgactcagtctggctggccaggacagctggcggaagacccaggcctgttcccggtcctgggcca

SEQ ID NO: 333951 - DNA, 120 bp, Artificial Sequence
  ENSG00000137094_40 (sequence is synthesized)
gacctcacccgttacactgaccttcgccagctcctgtgtgtgggtcgctcagtccatggtgccacctcgctcagcagggcctctcaggggtcctcagtctggcccaaggaccagggcctc

SEQ ID NO: 333952 - DNA, 120 bp, Artificial Sequence
  ENSG00000137094_41 (sequence is synthesized)
agcctagccccaagagtgggccacaaccttcagcttcctgctgggaaaacccaggaggtgaggacggaatcacagaattctagaatgtcagagccagaagagatcatctagtccaaacct

SEQ ID NO: 333953 - DNA, 120 bp, Artificial Sequence
  ENSG00000137094_42 (sequence is synthesized)
ttcattttacagatggggggacgcaggcccacagaacaggcatgacctgctgaaggttacccagggagtcatttagggattgcaagatcatcaggaacagggctggggcagaagagaagg

SEQ ID NO: 333954 - DNA, 120 bp, Artificial Sequence
  ENSG00000137094_43 (sequence is synthesized)
cacctcgctcagcagggcctctcaggggtcctcagtctggcccaaggaccagggcctcagcctagccccaagagtgggccacaaccttcagcttcctgctgggaaaacccaggagaaaca

SEQ ID NO: 333955 - DNA, 120 bp, Artificial Sequence
  ENSG00000137094_44 (sequence is synthesized)
taagctgaagctgacctctgccttcctcgaagcctcctgggatttctaaaacttatacttcaaacacagcacagacagaaagtaccactcagctattagaagaaacatctatttgggaag

SEQ ID NO: 333956 - DNA, 120 bp, Artificial Sequence
  ENSG00000137094_45 (sequence is synthesized)
gaaaaatatccctgctcatgagagacagagaccattgtcttcagatgtgctagcatgaaaacagattttctcttcttgtctaaattttctctgagtcagacaaattttccttctaggaga

SEQ ID NO: 333957 - DNA, 68 bp, Artificial Sequence
  ENSG00000137094_46 (sequence is synthesized)
taaattttctctgagtcagacaaattttccttctaggagaaaatttttttctaggagggggtggagaa

SEQ ID NO: 333958 - DNA, 120 bp, Artificial Sequence
  ENSG00000137098_0 (sequence is synthesized)
gaagacttccgccccgcagaggacttgcctccaccgccacctgcaagtccgcccagctgtacttctgcgcaggctccaggagttgtttgctgtctctatggcaacccagtagctggagtc

SEQ ID NO: 333959 - DNA, 120 bp, Artificial Sequence
  ENSG00000137098_1 (sequence is synthesized)
tgaagatggagaccaacgagtctacggagggatcgcggtcgcggtcgcgatctttagacatacagcccagctccgaaggactggggcccacttcggaaccgtttccttcttcagatgaca

SEQ ID NO: 333960 - DNA, 120 bp, Artificial Sequence
  ENSG00000137098_2 (sequence is synthesized)
gtcccaggtcggccctggcagctgcaaccgcagcagctgcagcggctgcatcagctgctgcagctactgcagccttcaccactgccaaagcagctgcattatctacaaagaccccagcgc

SEQ ID NO: 333961 - DNA, 120 bp, Artificial Sequence
  ENSG00000137098_3 (sequence is synthesized)
cctgttctgagttcatggagccgtcctctgaccccagccttcttggggagccctgtgcgggacccggctttacccacaatatagcccatgggagtcttggctttgagcccgtctatgttt

SEQ ID NO: 333962 - DNA, 120 bp, Artificial Sequence
  ENSG00000137098_4 (sequence is synthesized)
cctgtattgctcaggacacttgcactacaactgaccatagttctaatcctggccctgttccaggctctagctctgggcctgttcttggttccagctcaggtgctggccatggctctggct

SEQ ID NO: 333963 - DNA, 120 bp, Artificial Sequence
  ENSG00000137098_5 (sequence is synthesized)
ctggctctggtcctggctgtggctctgtccctggctctggctctggtcctggtcctggctctggtcctggctctggtcctggtcatggctctggctctcatcctggtcctgcctctgggc

SEQ ID NO: 333964 - DNA, 120 bp, Artificial Sequence
  ENSG00000137098_6 (sequence is synthesized)
ctggtccagacactggccctgactctgagctcagcccctgtattcctccagggttcagaaacctggtggcagatcgggtccctaactatacctcctggagtcagcactgcccctgggagc

SEQ ID NO: 333965 - DNA, 120 bp, Artificial Sequence
  ENSG00000137098_7 (sequence is synthesized)
agggaagcttatggtttgctatgaaactttgccgcggggccagtgcctcctctacaactgggaggaagagagagccaccaaccacctggatcaagtcccaagcatgcaggatggctctga

SEQ ID NO: 333966 - DNA, 120 bp, Artificial Sequence
  ENSG00000137098_8 (sequence is synthesized)
gagttttttcttccgacacggacaccggggactgctgactatgcaactaaagtcacccatgccctccagcaccacccagaaagactcgtaccagccaccaggaaacgtctattggccact

SEQ ID NO: 333967 - DNA, 120 bp, Artificial Sequence
  ENSG00000137098_9 (sequence is synthesized)
tcgagggaagcgtgaagccatgctggagatgctcctgcagcatcagatctgtaaagaggtgcaggcagaacaggaacccacaaggaagctcttcgaggttgagtctgtgacacaccatga

SEQ ID NO: 333968 - DNA, 120 bp, Artificial Sequence
  ENSG00000137098_10 (sequence is synthesized)
ctaccgaatggagctggcacaagcagggactcctgccccaacaaagcctcacgactaccgccaggagcaacctgagaccttctggatacagagggcaccacagctgccgacatggtggcc

SEQ ID NO: 333969 - DNA, 120 bp, Artificial Sequence
  ENSG00000137098_11 (sequence is synthesized)
attgcccacccaggtaccagcagcagaagactatctgacttggaaagaatgggggtttacaggagtccaggaggtcctttccgctctcctaagagccacacctggtgaatactcagtaaa

SEQ ID NO: 333970 - DNA, 120 bp, Artificial Sequence
  ENSG00000137098_12 (sequence is synthesized)
catttgcggaatgaatgaacaccctgtctgcagcaggacatggacaaataggctctgccatcaggaaatgggaagcaagaaaacggtaactcaagaggacagaggctggtgaggaggtaa

SEQ ID NO: 333971 - DNA, 120 bp, Artificial Sequence
  ENSG00000137098_13 (sequence is synthesized)
agcaggcccagtgaaatggacctgacagcccaaactgtcagagaggaggaaagcaggcatttgattttggtaattgtgccaaagctatgtaagagaataaatgccattgttttaaggaaa

SEQ ID NO: 333972 - DNA, 120 bp, Artificial Sequence
  ENSG00000137098_14 (sequence is synthesized)
acctgagaattacccctaccaattgggagaaatatcttcccttccctgtcccggaggaaggctgggtggtggaggggggagaatgactcctttctgaggggtgaggagggaagtggggta

SEQ ID NO: 333973 - DNA, 120 bp, Artificial Sequence
  ENSG00000137098_15 (sequence is synthesized)
tggaatatggaatctatttctgtctgcactagagaggtcgggaggaagttaattctcactgtacttgaagaggctttacataaagggttctctctcatcccaagactgctaatttagtga

SEQ ID NO: 333974 - DNA, 120 bp, Artificial Sequence
  ENSG00000137098_16 (sequence is synthesized)
tcgagggaagcgtgaagccatgctggagatgctcctgcagcatcagatctggtaagggattgggtaaaggggaagagggatggggaggagaaaaattgggtgagaatggccttgacaccc

SEQ ID NO: 333975 - DNA, 120 bp, Artificial Sequence
  ENSG00000137098_17 (sequence is synthesized)
ccaacaaaggtgagaacccaccccccatcccccgccacttgcaccagctgggctctgacaggctgtggccaagtaccaagcccagaggttgagagagagggctgaaggccaggagttact

SEQ ID NO: 333976 - DNA, 120 bp, Artificial Sequence
  ENSG00000137098_18 (sequence is synthesized)
cagtaccctccctcacagcctcacgactaccgccaggagcaacctgagaccttctggatacagagggcaccacagctgccggtgtgtgagggtgactaggtgttgggggcagagcggggc

SEQ ID NO: 333977 - DNA, 120 bp, Artificial Sequence
  ENSG00000137098_19 (sequence is synthesized)
cttgggattgcccctatcccacactatgacatcagaactttttttattattgttttatatttgaccaaaatattctggtttagatacagatatttacagaaagtagggaggaaggggacc

SEQ ID NO: 333978 - DNA, 120 bp, Artificial Sequence
  ENSG00000137098_20 (sequence is synthesized)
gggggcagagcggggcaggaaaggtagggcagagttgttttgttctggcttggggagagtgggatccatcctcatcctggcactcctccagggtgtcagtaacatcaggacattggacac

SEQ ID NO: 333979 - DNA, 120 bp, Artificial Sequence
  ENSG00000137098_21 (sequence is synthesized)
caggtatatgtacagggctgagctgcagagggctacaacttccatataaggtaggtttttttgtggctgttttccattgcatatgaaaatgtccatttctggtgtgtgcagacatggtgg

SEQ ID NO: 333980 - DNA, 120 bp, Artificial Sequence
  ENSG00000137100_0 (sequence is synthesized)
gtttcctggccgaggtgggtcggtagtagcgatggcgggtctgactgacttgcagcggctacaggcccgagtggaagagctggagcgctgggtgtacgggccgggcggggcgcgcggctc

SEQ ID NO: 333981 - DNA, 120 bp, Artificial Sequence
  ENSG00000137100_1 (sequence is synthesized)
acggaaggtggctgacggcctggtcaaggtgcaggtggctttggggaacatttccagcaagagggagagggtgaagattctctacaaaaagattgaagatctgatcaagtacctggatcc

SEQ ID NO: 333982 - DNA, 120 bp, Artificial Sequence
  ENSG00000137100_2 (sequence is synthesized)
tgagtacatcgaccgcattgccatacctgatgcctctaagctgcaattcatcctagcagaggagcagtttatcctttcccaggttgcactcctggagcaggtgaatgccttggtgcccat

SEQ ID NO: 333983 - DNA, 120 bp, Artificial Sequence
  ENSG00000137100_3 (sequence is synthesized)
gtccaaggctctcctggaggaatacaacaagactacaatgcttctctccaagcaattcgtgcagtgggatgagctactttgccagctagaggccgccacgcaagtgaagccagcagagga

SEQ ID NO: 333984 - DNA, 120 bp, Artificial Sequence
  ENSG00000137100_4 (sequence is synthesized)
gtgatagctgctccccatcccaaagtgggcctgggcagtcaggctccagggccctatgccaacctgcctttgttacaaggcagaggaagctttgtatttattggcttcaaggcccacctc

SEQ ID NO: 333985 - DNA, 120 bp, Artificial Sequence
  ENSG00000137100_5 (sequence is synthesized)
tctgtactctgggctctaaagttggaggtcaggttacctgaggtttgcaatttgcaacacccaccctccccccaatcagtgttcttatttcagtgacaataaaccatagagatgactgga

SEQ ID NO: 333986 - DNA, 120 bp, Artificial Sequence
  ENSG00000137100_6 (sequence is synthesized)
caagtctgaagtattttgtattttgtggcctaggaggtgctccctgagtttgttgataggaggctagaagaagaggtcttgaagttaaaccttggagaaaggtgggatttggagaaattg

SEQ ID NO: 333987 - DNA, 120 bp, Artificial Sequence
  ENSG00000137100_7 (sequence is synthesized)
agaggctcattaggctcagatgggtcagacctgaggcatccaggagagttgggggcaggatggaaatgtgcacctagagaagggggcagtggacagagtcactgtccaaagctctaggac

SEQ ID NO: 333988 - DNA, 120 bp, Artificial Sequence
  ENSG00000137100_8 (sequence is synthesized)
aagccgttcctgagcatgctgcccgcctgcagcgcttggcccagatccacattcagcagcagattcctattctcaccttgacctacaaccagacaatgcttctctccaagcaattcgtgc

SEQ ID NO: 333989 - DNA, 120 bp, Artificial Sequence
  ENSG00000137100_9 (sequence is synthesized)
tctttctcctctactaattgacaggcattcctgcctctaagcatttgcacgtaacagtcctctctcttgaatacccttcccactctatggatttcagtgcattgaaatcccgtgtgcata

SEQ ID NO: 333990 - DNA, 120 bp, Artificial Sequence
  ENSG00000137100_10 (sequence is synthesized)
cagggcctagcccagatcctgctctcctcactggactcttccattactgtcccagctctcctccagcatataattgtctatgcctctgagagccactgagcagaacctgcctggcgtagt

SEQ ID NO: 333991 - DNA, 120 bp, Artificial Sequence
  ENSG00000137100_11 (sequence is synthesized)
ctctggggttatagcttcactactctggttggggaggtaggtggatggatgggcaagactttcctgtgtttcaggttgtgtggattcgggttgggtctgttccttatctttttttttttt

SEQ ID NO: 333992 - DNA, 71 bp, Artificial Sequence
  ENSG00000137100_12 (sequence is synthesized)
agtggcatgatcttgactcactgcaaccgctgcctcctggttcaaacaaacttcccaccttttttagtaga

SEQ ID NO: 333993 - DNA, 60 bp, Artificial Sequence
  ENSG00000137100_13 (sequence is synthesized)
gtgtgccaccacacctggccatgtgatccacctgcctcggcctctcagagtgctgggatt

SEQ ID NO: 333994 - DNA, 120 bp, Artificial Sequence
  ENSG00000137100_14 (sequence is synthesized)
acaggcgtgagctactgtgcctggcctgttccttatctttatcctcaccctgaggtacttgccacatccaccaattaaaattaccaggatagagagcccagttttaggacctcaggcaat

SEQ ID NO: 333995 - DNA, 120 bp, Artificial Sequence
  ENSG00000137100_15 (sequence is synthesized)
caggcaatttgggcctgagaacactagcctaagctctagcagtccccagctctggggattccttctgccttctacctacccccaagcatctcttcttcaaggtgctgcagaacccagatt

SEQ ID NO: 333996 - DNA, 120 bp, Artificial Sequence
  ENSG00000137100_16 (sequence is synthesized)
ttactatcagagtctctgccaggtccatgaatgtatgtgaattctttctgctgcactgctgagagcagtccctgggcctggactttgacaagcagatagtggctttaattgaatccagat

SEQ ID NO: 333997 - DNA, 120 bp, Artificial Sequence
  ENSG00000137100_17 (sequence is synthesized)
gtatttttcccagctccccctccctacccctgatcagctgcccgctgagtatctgacagccttaagctttgagcccagcatggtggccaagccttggcgtgttggattccagcttaggga

SEQ ID NO: 333998 - DNA, 120 bp, Artificial Sequence
  ENSG00000137100_18 (sequence is synthesized)
cctggcatccatcttcagactccctgttccctaagccaggcagacctgcccccgctgggctgagagcaaagggacaggtcctataatagccaaagctctctttacctggtcctgcttata

SEQ ID NO: 333999 - DNA, 120 bp, Artificial Sequence
  ENSG00000137100_19 (sequence is synthesized)
gcactggggtgggggtagggagcaacactgggaaccccaaggttttgtcttctcctcgggacatgtatcttcccctcccctatgggtcctggagtaagactggagtgggcagggagcccc

SEQ ID NO: 334000 - DNA, 120 bp, Artificial Sequence
  ENSG00000137100_20 (sequence is synthesized)
actgccacctccagctgcagcagtcgatgaagtctggcgtttgtttagcttctccactcaatactctaatcctgccaaagacctaatagactattgagcagtcccgggggagggcacaag

SEQ ID NO: 334001 - DNA, 120 bp, Artificial Sequence
  ENSG00000137100_21 (sequence is synthesized)
catcatccagcagtgtgtgttgtgttttacagccgttcctgagcatgctgcccgcctgcagcgcttggcccagatccacattcagcagcaggtatgggaggggagatgactagaagcgaa

SEQ ID NO: 334002 - DNA, 120 bp, Artificial Sequence
  ENSG00000137100_22 (sequence is synthesized)
gatggaggtggcgcagcacctcatcccaactcatgccacctggggaagcagcttcaggcctttctgttgtaacctcagcagaaactttggggtttatcctttatcttgcatatgccccag

SEQ ID NO: 334003 - DNA, 120 bp, Artificial Sequence
  ENSG00000137100_23 (sequence is synthesized)
ggaggtaaagggacttgcctaggttcatgtacaaactttctgcttccagagcaggactttattgggacaccataaggttgaggctgggaggtacccaagaattcctggggatggtatgtc

SEQ ID NO: 334004 - DNA, 120 bp, Artificial Sequence
  ENSG00000137100_24 (sequence is synthesized)
attgactgtgggtagaggggctcttttttcactattcccaggccctagtgtaaagttcaaagagagttcagaaataaggacagaagaagagacatacactagggggaatgtttacttaat

SEQ ID NO: 334005 - DNA, 120 bp, Artificial Sequence
  ENSG00000137100_25 (sequence is synthesized)
gtatggccactcccttttccatccgtctttggactgctgttagggcacccatcctggagcctgaaagtgctcccatagccatttgctcctttggctttggggttaagcgtcatctttttt

SEQ ID NO: 334006 - DNA, 120 bp, Artificial Sequence
  ENSG00000137100_26 (sequence is synthesized)
aggctccatggggagtgggagtccgtgatgaggcaggaagtttagtggaagatgtgggctttgcccagttcctttctgtgctacactttggccctacaggaccagtgtgtggaaatcact

SEQ ID NO: 334007 - DNA, 120 bp, Artificial Sequence
  ENSG00000137100_27 (sequence is synthesized)
ctctaagctgcaattcatcctagcaggtaatgctggactacatgtgtacatgcatctgaggatgtgggtcgtcggggaggttaagcacagagatggcctctccatccagtcttctggtgg

SEQ ID NO: 334008 - DNA, 120 bp, Artificial Sequence
  ENSG00000137100_28 (sequence is synthesized)
atacaagccctggatgctgctctctggaattgtggcctggttctgggttgaggatcctatggatcctctagtagacattgagtacagtatacctctgcaccagctgcaggccatggtgcc

SEQ ID NO: 334009 - DNA, 120 bp, Artificial Sequence
  ENSG00000137100_29 (sequence is synthesized)
gcgcttggcccagatccacattcagcagcaggaccagtgtgtggaaatcactgaggagtccaaggctctcctggaggaatacaacaagactgtatcctttctgctcaactaggaccctaa

SEQ ID NO: 334010 - DNA, 120 bp, Artificial Sequence
  ENSG00000137100_30 (sequence is synthesized)
gctctctctcatcctatcctacccacctatgtttgcctgttccccactttccatgaacttcctcactcagattcctattctcaccttgacctacaaccagacaatgcttctctccaagca

SEQ ID NO: 334011 - DNA, 120 bp, Artificial Sequence
  ENSG00000137101_0 (sequence is synthesized)
aattgctaagccgtgcagtcacagagggaacacagagcctagttgtaaacggacagagacgagaggggcaagggaggacagtggatgacagggaagacgagtgggggcagagctgctcag

SEQ ID NO: 334012 - DNA, 120 bp, Artificial Sequence
  ENSG00000137101_1 (sequence is synthesized)
gaccatggctgaggccatcacctatgcagatctgaggtttgtgaaggctcccctgaagaagagcatctccagccggttaggacaggacccaggggctgatgatgatggggaaatcaccta

SEQ ID NO: 334013 - DNA, 120 bp, Artificial Sequence
  ENSG00000137101_2 (sequence is synthesized)
cgagaatgttcaagtgcccgcagtcctaggggtgccctcaagcttggcttcttctgtactaggggacaaagcagcggtcaagtcggagcagccaactgcgtcctggagagccgtgacgtc

SEQ ID NO: 334014 - DNA, 120 bp, Artificial Sequence
  ENSG00000137101_3 (sequence is synthesized)
accagctgtcgggcggattctcccctgccgcacaacctgcctgcgatacctcctgctcggcctgctcctcacctgcctgctgttaggagtgaccgccatctgcctgggagtgcgctatct

SEQ ID NO: 334015 - DNA, 120 bp, Artificial Sequence
  ENSG00000137101_4 (sequence is synthesized)
gcaggtgtctcagcagctccagcagacgaacagggttctggaagtcactaacagcagcctgaggcagcagctccgcctcaagataacgcagctgggacagagtgcagaggatctgcaggg

SEQ ID NO: 334016 - DNA, 120 bp, Artificial Sequence
  ENSG00000137101_5 (sequence is synthesized)
gtccaggagagagctggcgcagagtcaggaagcactacaggtggaacagagggctcatcaggcggccgaagggcagctacaggcctgccaggcagacagacagaagacgaaggagacctt

SEQ ID NO: 334017 - DNA, 120 bp, Artificial Sequence
  ENSG00000137101_6 (sequence is synthesized)
gggatggataatgcatcagaaaagctgcttttacatctcacttacttcaaaaaattggcaggagagccaaaaacaatgtgaaactctgtcttccaagctggccacattcagtgaaattta

SEQ ID NO: 334018 - DNA, 120 bp, Artificial Sequence
  ENSG00000137101_7 (sequence is synthesized)
tccacaatcacactcttactacttcttaaattcactgttgccaaatggtggttcagggaattcatattggactggcctcagctctaacaaggattggaagttgactgatgatacacaacg

SEQ ID NO: 334019 - DNA, 120 bp, Artificial Sequence
  ENSG00000137101_8 (sequence is synthesized)
cactaggacttatgctcaaagctcaaaatgtaacaaggtacataaaacttggtcatggtggacactggagtcagagtcatgtagaagttctcttccctacatctgtgagatgacagcttt

SEQ ID NO: 334020 - DNA, 120 bp, Artificial Sequence
  ENSG00000137101_9 (sequence is synthesized)
caggtttccagattaggacagtcctttgcactgagttgacactcatgccaacaagaacctgtgcccctccttcctaacctgaggcctggggttcctcagaccatctccttcattctgggc

SEQ ID NO: 334021 - DNA, 120 bp, Artificial Sequence
  ENSG00000137101_10 (sequence is synthesized)
agtgcccagccaccggctgacccacacctgacacttccagccagtctgctgcctgctccctcttcctgaaactggactgttcctgggaaaagggtgaagccacctctagaagggactttg

SEQ ID NO: 334022 - DNA, 120 bp, Artificial Sequence
  ENSG00000137101_11 (sequence is synthesized)
gcctccccccaagaacttcccatggtagaatggggtgggggaggagggcgcacgggctgagcggataggggcggcccggagccagccaggcagttttattgaaatctttttaaataattg

SEQ ID NO: 334023 - DNA, 120 bp, Artificial Sequence
  ENSG00000137101_12 (sequence is synthesized)
tctgtcccttgagtccatgctggggctcccctacacggggagaagagccggtcagcccatctggaactggcactgtccagcaagtgtgctctgttcttacagggtgtcctgaaggccaaa

SEQ ID NO: 334024 - DNA, 120 bp, Artificial Sequence
  ENSG00000137101_13 (sequence is synthesized)
gttggaggcctgagaccacgggctccactgctaagagcgtgccccaggcagctgcaggctgggtgtgggtggcttggcgtggtgccctcggtggcagaggagactgcccgcctcacagtt

SEQ ID NO: 334025 - DNA, 120 bp, Artificial Sequence
  ENSG00000137101_14 (sequence is synthesized)
caggttgcggtagcgggcaacagctggtgtggggcgggggcacatggacaggaagccaaagctgaaggggccgaggcagcagccaggacagggcagcccctcatcgggctcccggggagc

SEQ ID NO: 334026 - DNA, 120 bp, Artificial Sequence
  ENSG00000137101_15 (sequence is synthesized)
atcatccgagctgttggcatgtggcctgttcctgaacccccagttactggaacccccaggatgatgagaagcgagggatgcaaaccaggaacccccagtctcatggggagaacggagcct

SEQ ID NO: 334027 - DNA, 120 bp, Artificial Sequence
  ENSG00000137101_16 (sequence is synthesized)
ctgccgtgccacattcaccttcatccggtgcgcctgaatccgacgtgcaccgcccccctgcggatggtcccaattcacctacctgccccccttcccctctctccgtctgatatttccttc

SEQ ID NO: 334028 - DNA, 120 bp, Artificial Sequence
  ENSG00000137101_17 (sequence is synthesized)
cccttctcccaggtaacgcccccgagtccccaccagcactgattctggaacaccctctcccctacctgcgaaacaccccgctacccgacagaaaccaccatgcttgccccctcagctctg

SEQ ID NO: 334029 - DNA, 120 bp, Artificial Sequence
  ENSG00000137101_18 (sequence is synthesized)
caccgccctcctcttagggatgccttccccaggggtctcccccacggacctgtcccttcctctctacattctttacgggggctgactgccctcatccatcccactgtccccctaaggccg

SEQ ID NO: 334030 - DNA, 120 bp, Artificial Sequence
  ENSG00000137101_19 (sequence is synthesized)
gcagtgagggccccgccgctaccccagcagtcgcctcccaagttcgcggaacgcagctgaccggctccctctggactgggtgacatgactgctcccaagcagtcgtttgtaaactgagtt

SEQ ID NO: 334031 - DNA, 120 bp, Artificial Sequence
  ENSG00000137101_20 (sequence is synthesized)
tctgtaaaacaattttatttttcatatgtgactgtagcggggtatgatttgaactttgttttccgtcccccagcccggattctctgtcttctcctgtacagccgttccgttttcttacct

SEQ ID NO: 334032 - DNA, 120 bp, Artificial Sequence
  ENSG00000137101_21 (sequence is synthesized)
ttaagacatcttccgaggggcccccccttgccacaccctctagctgatcgactcacaaatacctgtgatttctctccccgtctccacctccagacccaggggctgatgatgatggggaaa

SEQ ID NO: 334033 - DNA, 120 bp, Artificial Sequence
  ENSG00000137101_22 (sequence is synthesized)
cctgtgagtgtgcctgtgcggggcagccgcggggccaagtgctcgcgcctgtcccggctgcggatggcgctgggccccgcggggtgcagctccttccgggataaacccgggcgcagtcct

SEQ ID NO: 334034 - DNA, 120 bp, Artificial Sequence
  ENSG00000137101_23 (sequence is synthesized)
gatcttcctcagcagggatcatagtcactaccaccacctccttagctttgggtttggtttccagccagggctgttgtcttcctgaattgtcctcacctaatccagtacctccttacgctt

SEQ ID NO: 334035 - DNA, 120 bp, Artificial Sequence
  ENSG00000137101_24 (sequence is synthesized)
tagtcagtcaaatcttgtatttcagcctgtgatgcaaaaagttgcaagaagcagaaaaagggctgatgctgcagtctcagggcactagggcagggctggagaagacatccaccaaatctc

SEQ ID NO: 334036 - DNA, 120 bp, Artificial Sequence
  ENSG00000137103_0 (sequence is synthesized)
ccagccccgccctcgccccgcttcccacatcggccccagcccctgcctgggtccccatccaggacccccttccagtctctgcccctggcctggcccccatcccggcctcggccctcgttc

SEQ ID NO: 334037 - DNA, 120 bp, Artificial Sequence
  ENSG00000137103_1 (sequence is synthesized)
gttccaccccctgtcacaaatcccagcccaggccctgtcccagccccattcccagtgtttgcttaaggccctggctcaaccccgtcccttgctgcagtccccatcacagcccttccttcc

SEQ ID NO: 334038 - DNA, 120 bp, Artificial Sequence
  ENSG00000137103_2 (sequence is synthesized)
atcccactccctgcccttgttcaagccccagtgtccagcccagcccaacccattatctcagcctttgccctcatctctgtgtttacccaagtctctccctctagtcccccctatctctca

SEQ ID NO: 334039 - DNA, 120 bp, Artificial Sequence
  ENSG00000137103_3 (sequence is synthesized)
tactctgcccctctcccagcctagactcaagtctgggtttcagctgccgccagccctattgctgctgttgctgttctctgtccttggcccaggggctggaggccttttcctgactgatta

SEQ ID NO: 334040 - DNA, 120 bp, Artificial Sequence
  ENSG00000137103_4 (sequence is synthesized)
ctccacctgctcaccccgcaagctgagtcctttccgctcctttgccagcaccgagctcttccacttccatgttcctgaggacacattcctggctgtttggaacctcatcatcttcaagga

SEQ ID NO: 334041 - DNA, 120 bp, Artificial Sequence
  ENSG00000137103_5 (sequence is synthesized)
gcaagggggaacttttggggaccactgcccagaccaaagtgtgactgtgtatttccggtccggggcaccccctgtcatcaatcccctgcatacacacttcccaggggacacagctgtgcc

SEQ ID NO: 334042 - DNA, 120 bp, Artificial Sequence
  ENSG00000137103_6 (sequence is synthesized)
tggggttttctcactgaccctcagctggacactgcccaaccgcacctcaggcatctttaacgtcagcagccccttacctggggactggttcttggctgcccaccttccccaggcccacgg

SEQ ID NO: 334043 - DNA, 120 bp, Artificial Sequence
  ENSG00000137103_7 (sequence is synthesized)
ccacatctctgtcaagggtctccaggatgagtgtcagtacctccttcagccgcagctgattgtccggcgtttgctggacgtcgctgtgctggttcctggccggccctcagagcaaaccct

SEQ ID NO: 334044 - DNA, 120 bp, Artificial Sequence
  ENSG00000137103_8 (sequence is synthesized)
ctccccacacaatcgctcagccctgtacaaggtctttgtgcccagcttcacttacagggtttcagcacagctggtgtgtgtggggggccgtggggtatctgcctgccccctgtcactgcg

SEQ ID NO: 334045 - DNA, 120 bp, Artificial Sequence
  ENSG00000137103_9 (sequence is synthesized)
tctgcgtcccaaagccccacccctgcacaactcaagctctgtggcctgtggaggtgcctcaggatgccagctggagctggcactgcccccctgggggcactgggtctacgtgcgtgtgga

SEQ ID NO: 334046 - DNA, 120 bp, Artificial Sequence
  ENSG00000137103_10 (sequence is synthesized)
aacatcatcccggggccctggtaggaccatccgcttccagctgtgtgtgcggttgcaagagtgcccacagcccggcctgctccgagccctggtccctggagctgccatgaacatgcccca

SEQ ID NO: 334047 - DNA, 120 bp, Artificial Sequence
  ENSG00000137103_11 (sequence is synthesized)
gtccctgggcaaccagccactgcccccagaaccgccatcccttggaacccctgcggaggggcctgggaccacgtccccacccgagcactgctggccagtgcgcccgactctgcgcaacga

SEQ ID NO: 334048 - DNA, 120 bp, Artificial Sequence
  ENSG00000137103_12 (sequence is synthesized)
gctggacaccttctctgtccacttctacatcttctttggcccaagtgtggcccttccccctgagcgcccagccgtgttcgccatgaggctgttgccagtgctggacagtggaggcgtcct

SEQ ID NO: 334049 - DNA, 120 bp, Artificial Sequence
  ENSG00000137103_13 (sequence is synthesized)
cagcctggagctccagctcaatgcgagctccgtgcgccaggaaaacgtgacggtgtttggatgcttgactcacgaggtgcccttgagcctgggggatgcagcagtgacctgttccaaaga

SEQ ID NO: 334050 - DNA, 120 bp, Artificial Sequence
  ENSG00000137103_14 (sequence is synthesized)
gtccctggccggcttcctcctctctgtcagtgccaccaccagggttgccaggctgcgaatcccattcccgcagacggggacctggttcctggccctccgctccctgtgcggggtggggcc

SEQ ID NO: 334051 - DNA, 120 bp, Artificial Sequence
  ENSG00000137103_15 (sequence is synthesized)
ggtgccgcaacgcgacggccgaggtgcggatgcgcaccttcctgtccccatgcgtggacgactgcgggccctacggccagtgcaagctgctgcgcacacacaattatctgtacgcagcct

SEQ ID NO: 334052 - DNA, 120 bp, Artificial Sequence
  ENSG00000137103_16 (sequence is synthesized)
gcgagtgcaaggccgggtggagaggctggggctgcaccgacagtgcagatgcgctcacctatggattccagctgctgtccacactcctgctctgcctgagcaacctcatgtttctgccac

SEQ ID NO: 334053 - DNA, 120 bp, Artificial Sequence
  ENSG00000137103_17 (sequence is synthesized)
ctgtggtcctggccattcggagtcgatatgtgctggaagctgcagtctacaccttcaccatgttcttctccacgttctatcatgcctgtgaccagccaggcatcgtggttttctgcatca

SEQ ID NO: 334054 - DNA, 120 bp, Artificial Sequence
  ENSG00000137103_18 (sequence is synthesized)
tggactacgatgtgctgcagttctgtgatttcctgggctccttaatgtccgtgtgggtcactgtcattgccatggctcgtttacagcccgtggtcaagcaggtgctgtatttgctgggag

SEQ ID NO: 334055 - DNA, 120 bp, Artificial Sequence
  ENSG00000137103_19 (sequence is synthesized)
ctatgctgctgtccatggctctgcagcttgaccgacatggactctggaacctgcttggacccagtctcttcgccctggggatcttggccacagcctggacagtacgcagcgtccgccgcc

SEQ ID NO: 334056 - DNA, 120 bp, Artificial Sequence
  ENSG00000137103_20 (sequence is synthesized)
ggcactgctacccacccacgtggcgccgctggcttttctacttgtgccctggcagccttattgcaggcagtgccgtcctgctttatgcttttgtggagacccgggacaactacttctaca

SEQ ID NO: 334057 - DNA, 120 bp, Artificial Sequence
  ENSG00000137103_21 (sequence is synthesized)
ttcacagcatttggcatatgctcattgcgggcagtgtgggcttcctgctgccccctcgtgccaagactgaccacggggtcccatctggagcccgggcccggggctgtggttaccagctat

SEQ ID NO: 334058 - DNA, 120 bp, Artificial Sequence
  ENSG00000137103_22 (sequence is synthesized)
gcatcaacgagcaggaggagctgggcctcgtgggcccaggaggggccactgtcagcagcatctgtgccagctgagaggggctttgggcctggccctgaggggatatgaatgcttcctaga

SEQ ID NO: 334059 - DNA, 120 bp, Artificial Sequence
  ENSG00000137103_23 (sequence is synthesized)
gttctttctgggggtgtggagccctcttagaaggagacaggctgtatttcttgaggacatggagtctttctcaaggacacaaaactcttccagggacctggagcccttcccaggacatgg

SEQ ID NO: 334060 - DNA, 120 bp, Artificial Sequence
  ENSG00000137103_24 (sequence is synthesized)
agaacttcctgagggcctggagtccccctgcatcatggagtccttcttaaggactggagcctatgcaggcacagagtccctcaggaccaaggagtccctcctgcaggtgtggagcctttc

SEQ ID NO: 334061 - DNA, 120 bp, Artificial Sequence
  ENSG00000137103_25 (sequence is synthesized)
ctgggatgcagagccttcccaagacatggattccttcccagggagacaaagccctgtcaggagcacagcatctttccagaggaggtggagtctatcttggggaaaccaaatttccagatt

SEQ ID NO: 334062 - DNA, 120 bp, Artificial Sequence
  ENSG00000137103_26 (sequence is synthesized)
ttcccagaggctcagcaactctggcctcaggcttccttcccagaggcagcgtctgggctgtgctgtgctgtggaggagggattgcaggatggatggagctgggactggggctgtctgggt

SEQ ID NO: 334063 - DNA, 120 bp, Artificial Sequence
  ENSG00000137103_27 (sequence is synthesized)
ggctggtatcctcgtttgatacaggtggagtctgtgtgtctccagtgattgattggttcagaatggttctgtgatgccttttttccccctggggtcaggggtgtggggaagtggggaaag

SEQ ID NO: 334064 - DNA, 120 bp, Artificial Sequence
  ENSG00000137103_28 (sequence is synthesized)
agggcccctcagggaatcagcagggctgatgggagctactgccggaggcttttgtcacaccctgtacacagtctgatcccgctcatctgggccctgcattcatttctaaacagtttctaa

SEQ ID NO: 334065 - DNA, 120 bp, Artificial Sequence
  ENSG00000137103_29 (sequence is synthesized)
tgcctattccccaattcctattgagcccgatttgcagtatctgaggggtgtgtgtgtgtgtgtgtgtgtttatgtatgtatacgtatgctgagatgatttaaatcagtgagacagacttt

SEQ ID NO: 334066 - DNA, 120 bp, Artificial Sequence
  ENSG00000137103_30 (sequence is synthesized)
ccttatgatgcccacacccaacacagaaggaagccgaggtcccaggaaattggaatagcaggtacacgtctcaggtgtgcaagaaatatcacaagaatgtaacttctgttttgagccccc

SEQ ID NO: 334067 - DNA, 120 bp, Artificial Sequence
  ENSG00000137103_31 (sequence is synthesized)
gattccttctctttccatgagggtcatagctgagttctgagggtcttacataatgccaagaagttgggagagcattctcactgatcaccagtgtccatacttcatccatccccgggattt

SEQ ID NO: 334068 - DNA, 120 bp, Artificial Sequence
  ENSG00000137103_32 (sequence is synthesized)
ccatcattccatctggtccccagtcagaggtccagacagttcatctgggatgcagagagatttcttgttcccatttgcattactctctcagtcctaaggttctctctgccacttctgggc

SEQ ID NO: 334069 - DNA, 120 bp, Artificial Sequence
  ENSG00000137103_33 (sequence is synthesized)
catatgtggagacccgtaaagttgtctaaggccttggctatgcagacacaccttgaagctgtttctgctctgggttttgacagacaaggcatgagttgctgcatctgttaaaactgcaaa

SEQ ID NO: 334070 - DNA, 120 bp, Artificial Sequence
  ENSG00000137103_34 (sequence is synthesized)
tctatcttggcctggggtgtggagctcagggactcttccttttgggaccctctgtgtcagtattctcactacatcctctcctcctctctcttctttccccctttcgttaatattggaggt

SEQ ID NO: 334071 - DNA, 71 bp, Artificial Sequence
  ENSG00000137103_35 (sequence is synthesized)
ctcctctctcttctttccccctttcgttaatattggaggtgaggaagccttacttaatgttttctcctgaa

SEQ ID NO: 334072 - DNA, 78 bp, Artificial Sequence
  ENSG00000137103_36 (sequence is synthesized)
tggcctctcctgaatcttttatctatgccttaagccttttctgttcccttcaggacctaggcttttgaaacccaaaag

SEQ ID NO: 334073 - DNA, 120 bp, Artificial Sequence
  ENSG00000137103_37 (sequence is synthesized)
ttctgttcccttcaggacctaggcttttgaaacccaaaagccaggaaaacatgcctttgttatctgctttctgcaatcacgtctcttccatggggcactgagcagagaatggtgtggcca

SEQ ID NO: 334074 - DNA, 120 bp, Artificial Sequence
  ENSG00000137103_38 (sequence is synthesized)
agtgagtagtgagaagcagtgaggaggtgtgagctaggtgtctgttcccattttagaaaatactgttcctacatcagaaataccacattaagacgtatagagccaggtcactgggatgct

SEQ ID NO: 334075 - DNA, 120 bp, Artificial Sequence
  ENSG00000137103_39 (sequence is synthesized)
tgaacccaaatagctgggattctggacagagtcagcagagtacagaaggctctgaagtgggagacggagctggggtgcatccctcccagtgaggaggggtcatgaggggcgtctgggaag

SEQ ID NO: 334076 - DNA, 120 bp, Artificial Sequence
  ENSG00000137103_40 (sequence is synthesized)
agggacatttgaactaggattagctgagttgccatgatgctaagataatgggagagtgttctttgtggtcaccagtgtccacatggcatcccttccctgagattttcatcactccctgtg

SEQ ID NO: 334077 - DNA, 120 bp, Artificial Sequence
  ENSG00000137103_41 (sequence is synthesized)
gtcttcagtcagtaaagctcttagaacacttgtatagtgcctagtctggtatgtgatgtggtccaatatatgttagcttaaggtcaccacgtgtttggacatggagagggaacagcaagg

SEQ ID NO: 334078 - DNA, 120 bp, Artificial Sequence
  ENSG00000137103_42 (sequence is synthesized)
gggaatgcagaggcaggaaagactgatatttactccgggcactgaatagttcagtgtgcctgggccagtgcatgtgcgcatgcttttgtgtgtggagtggggtggtggaggtaagcagcc

SEQ ID NO: 334079 - DNA, 120 bp, Artificial Sequence
  ENSG00000137103_43 (sequence is synthesized)
aatgatatgattagatagataagtggaggttgggtctttattctatgggaaatgaggagccattggagagattaagcaggagaggaacatcagattggggttttgatggctggggcagag

SEQ ID NO: 334080 - DNA, 120 bp, Artificial Sequence
  ENSG00000137103_44 (sequence is synthesized)
gatggactttgggagaccttggaggacaaagtgcagtgaccacagctattggaacatttgaaagagaaatggtgaagccttcttaaagcaatatcggtggaaaggaggggaccaatttaa

SEQ ID NO: 334081 - DNA, 120 bp, Artificial Sequence
  ENSG00000137103_45 (sequence is synthesized)
gagctgttaggagtgaactctttaggacttggtgactgattgggtgtgtggggtggtgaggtatgagagagcctaggatgatggtgatattctgatttggggatggtggtgccattccct

SEQ ID NO: 334082 - DNA, 120 bp, Artificial Sequence
  ENSG00000137103_46 (sequence is synthesized)
gagatggtgacaccactttgggtggggggaagatgagctccactttggacagtttgaggtgcatgtgggattcccggagggaagggggccagcaatatgacagtgctggacgtagccgct

SEQ ID NO: 334083 - DNA, 120 bp, Artificial Sequence
  ENSG00000137103_47 (sequence is synthesized)
gaaccaggcctgtctccaggctcccaaaatgggaatccttggttgtctcctgacttgtctcagtgggggagatcccaagattcaaacagcccttccttgccttgaatacagggctgtggc

SEQ ID NO: 334084 - DNA, 120 bp, Artificial Sequence
  ENSG00000137103_48 (sequence is synthesized)
tggcagatattgctgtacccttgcatgtatctgtacatacgactggactgagacccctgagcacttgcagctgcctggggcatgttcagcagcacagggctcaatccccacagggtgatg

SEQ ID NO: 334085 - DNA, 120 bp, Artificial Sequence
  ENSG00000137103_49 (sequence is synthesized)
ttctgaaagcttctgagtgacaattcagtcccgcaaaccttccatagggaacatgctgtgggagctacagagatgagccagacccgactgaatcctgccctgaaggagctcacacggtgg

SEQ ID NO: 334086 - DNA, 120 bp, Artificial Sequence
  ENSG00000137103_50 (sequence is synthesized)
tgaagtgtcatgaatgcaagttagatgggacaagtgtgaagtggaagatcctgacaaagtgctgtaggatgtaaagagagcgatctcaaagtgcaatgggaaaggatgcatgagagagat

SEQ ID NO: 334087 - DNA, 120 bp, Artificial Sequence
  ENSG00000137103_51 (sequence is synthesized)
ggtgtctaacctagctttgaaaactagtcccagctattatcagagaacagcacaatacatacaagggtgcgaagacatgggggtgcggcagtacagataatgtagcgaggggacagccat

SEQ ID NO: 334088 - DNA, 120 bp, Artificial Sequence
  ENSG00000137103_52 (sequence is synthesized)
gtgaagggcatagtggaaaatcaggctgaagaagcaggtgggggcagattctggagggccttgaggattcaactgaagaatttggacttaatggtaatgggagctgtcaaaagtccttga

SEQ ID NO: 334089 - DNA, 120 bp, Artificial Sequence
  ENSG00000137103_53 (sequence is synthesized)
tcagaagagtgatgaatcaatccaggtttgaccaaagtaacagaaccactatgagtgataaaaagattagacctttacagtcatgggagcagttggagaaatctgtgcaaaactgttact

SEQ ID NO: 334090 - DNA, 120 bp, Artificial Sequence
  ENSG00000137103_54 (sequence is synthesized)
tctgcatttggtgttgggcctgaagctgttacagctcagctgggccagcagttaggaaagaaggctgagtgtgaagtgaggggcagtaagggcacactagaatccagaaggacaaactgg

SEQ ID NO: 334091 - DNA, 120 bp, Artificial Sequence
  ENSG00000137103_55 (sequence is synthesized)
aacctgtgcctggctcttatgccttcaatctcagtgactggtgacctgcaggagaagctgtcacctttgccatggagcttgcacttggcccagcactcagcacagtggaaggaggtgacc

SEQ ID NO: 334092 - DNA, 120 bp, Artificial Sequence
  ENSG00000137103_56 (sequence is synthesized)
aggtgacctggtggggactggacaggctgtgctaatggggagccagcagatgagcaacatgggggtgccctcactgtgtctggtgctgttccattttttttctttctttctttttttttt

SEQ ID NO: 334093 - DNA, 120 bp, Artificial Sequence
  ENSG00000137103_57 (sequence is synthesized)
acccacaccctctaacctagtttggttgactcagtataaagctaccacacgtgagctaaccagagctttcttgggacgattaacttggcagcagcccgtgaaggatagatggtcaggata

SEQ ID NO: 334094 - DNA, 120 bp, Artificial Sequence
  ENSG00000137103_58 (sequence is synthesized)
aagaaagccaaacctcccatagctcttgggttgacactgtcagctggtgtggtagtcattaggccattcacaaatctctctgtccctctcgtttgccatccagacacacgatagtgtgct

SEQ ID NO: 334095 - DNA, 120 bp, Artificial Sequence
  ENSG00000137103_59 (sequence is synthesized)
tttcccccttaacaataggtgtggtcctgtgccttcctgttgccattgtgttggccactgaaatgtaggtggaggcaacacagccacttctgagtagaagctttaagagtcagtgtaggc

SEQ ID NO: 334096 - DNA, 120 bp, Artificial Sequence
  ENSG00000137103_60 (sequence is synthesized)
tttgttactttcccttttctttttgtcatggtgaccagcagtgttcccaatggtagctgttttgtcatcctgagtcccagaggggtgaagaccatgatgcggagcagaagccccaccagc

SEQ ID NO: 334097 - DNA, 120 bp, Artificial Sequence
  ENSG00000137103_61 (sequence is synthesized)
ctctggtggacctgcatcaggagcaagaaacaaaccttaatggctttaagcctctcaaggtttgaggtcatgaccacagcacaacctagcctatgccagctgacaggggcagagggcagc

SEQ ID NO: 334098 - DNA, 120 bp, Artificial Sequence
  ENSG00000137103_62 (sequence is synthesized)
agtagcagtgggatgctttcctggagagcaaacctcctctcagcagagttaggacggcagctttcacctctgcattcctcaggctgtaaatgatggggttcagcgagggcgtcacaaccc

SEQ ID NO: 334099 - DNA, 120 bp, Artificial Sequence
  ENSG00000137103_63 (sequence is synthesized)
cgtagaacaatgcgacagtcttatccacgttgggatccttggccttgggtttgaagtacatgaaggagattgtcccataaaaaaccaccaccactgtgcggtgggctgagcaggtggaga

SEQ ID NO: 334100 - DNA, 120 bp, Artificial Sequence
  ENSG00000137103_64 (sequence is synthesized)
aggctttgcaccggcctgcagcagagggtaccctaaggatggcagacaggatgaaaaggtaagacaggcagatgagcaagaggggggccagtgtcaggacggctgtggccaccattaatg

SEQ ID NO: 334101 - DNA, 120 bp, Artificial Sequence
  ENSG00000137103_65 (sequence is synthesized)
ccagcgcattgagggagatgtccccacaggccagttttagcactgccaagatctcatagaagtagttgatgacgtggccacagaaggggaggtgccagacaaggatggactgtagcagtg

SEQ ID NO: 334102 - DNA, 120 bp, Artificial Sequence
  ENSG00000137103_66 (sequence is synthesized)
agttggcaaagcctgtcccccagctcagcgctgccatctgcatgcaggtctgcccactcatgagctctgggtacctaagcggctggcagatagccacataacggtcatatgccatcacag

SEQ ID NO: 334103 - DNA, 120 bp, Artificial Sequence
  ENSG00000137103_67 (sequence is synthesized)
ccagcagcaggcactccgttgatcccagcgccagggtcaggtacatctgcagggcacagccagggaaggaaatggtcctctgggtttccaggaaattgtctagcatgagaggcacaaagg

SEQ ID NO: 334104 - DNA, 120 bp, Artificial Sequence
  ENSG00000137103_68 (sequence is synthesized)
aggaggtgccgcagatgtccatgagggagaggttgctgagaagtacatggggttgtgcaggcgagggtgcagcacgttcagccctatgaggagggcgttccccaacacattcacggagta

SEQ ID NO: 334105 - DNA, 120 bp, Artificial Sequence
  ENSG00000137103_69 (sequence is synthesized)
gatgcccaggcagaacacaaacaggaccacctccaggttacagtgctcgtgtagccccatcaggacgtattccgtcacagctgtctggtttgcccacttcatctcattctctctcctttt

SEQ ID NO: 334106 - DNA, 120 bp, Artificial Sequence
  ENSG00000137103_70 (sequence is synthesized)
ccatctggaccacccagctttttggaaaaagctccaactggcctgggagcccagtgacctgatgtctgagctgcagcaggtcagcctccctctctggaatttagtttcaccatctgtata

SEQ ID NO: 334107 - DNA, 120 bp, Artificial Sequence
  ENSG00000137103_71 (sequence is synthesized)
atgagggagttggacttcagatctgcaatctggccttctcagcgctgcagttctgtggacgtcactgaggggaggatggggcacattctagtcccctaggctcctctctgctctccccag

SEQ ID NO: 334108 - DNA, 120 bp, Artificial Sequence
  ENSG00000137103_72 (sequence is synthesized)
gatggggtcagaggagacagcagagaaagattcatgtttaaaatgatcgtttggaatccaaagtgtttttggtcattaacaggaagcatcttttctacattacggtttcatgtgaccaaa

SEQ ID NO: 334109 - DNA, 120 bp, Artificial Sequence
  ENSG00000137103_73 (sequence is synthesized)
ttatggccatagtatttcagatttattcatccactaagtatttattaagtacctattctgtgctaggtatcaggtgctggggctatagcagtaaggaaagtaagtggacaaaaggattcc

SEQ ID NO: 334110 - DNA, 120 bp, Artificial Sequence
  ENSG00000137103_74 (sequence is synthesized)
acacctgtcacaggcgctgccccactccctgagtcaggtgagatgagctccggaaggcaggtgggtaatggatgatgctcacctagtgttccttgggccatgaagatcaaatatttcagc

SEQ ID NO: 334111 - DNA, 120 bp, Artificial Sequence
  ENSG00000137103_75 (sequence is synthesized)
cccataggatgtgtaagcttgatttctggtcatctctccttaaggaatcatggaccattcattattttgtttaaaaggacacataagaacgtacatgtctcaatagagttactggtcaca

SEQ ID NO: 334112 - DNA, 120 bp, Artificial Sequence
  ENSG00000137103_76 (sequence is synthesized)
ggactgaactgtggtcatgaaagccaagcaacttactttctggcctccatattgctttgtaggagaaatgatactgacaatgatgtcacacgaggagggaagccaggcacgaatctggtg

SEQ ID NO: 334113 - DNA, 120 bp, Artificial Sequence
  ENSG00000137103_77 (sequence is synthesized)
gaggtgcggtcagttgtgaccagctttgcaaagggagcggtgggcgaggctgtggtctctcccaggtgacctccatcgccatgcagagctgctctcacttctcctcgggaaaggccagcg

SEQ ID NO: 334114 - DNA, 120 bp, Artificial Sequence
  ENSG00000137103_78 (sequence is synthesized)
tcaggtattcctaggaggaagcccaggtgtgtccagagaacagtagtcttgttagaactggaaaaatgtcttatggccaggtggcccctggtctgaaggaaaaataggagctgagtgtga

SEQ ID NO: 334115 - DNA, 120 bp, Artificial Sequence
  ENSG00000137103_79 (sequence is synthesized)
acttttatcactcagaagatataatccacctctcccctcctgcccttcgctcctgggttggttgtgaggacagtgctttgtgacagcagtggagccctgtctgtccttccgggctagatt

SEQ ID NO: 334116 - DNA, 120 bp, Artificial Sequence
  ENSG00000137103_80 (sequence is synthesized)
tcttctttctcttattcctcctgtttcgttgtatccacgatttgtcgagttgcagggctcaccctttcctgaagaaaccatctcttttcccagctccgcacctttgtccgagatggaggc

SEQ ID NO: 334117 - DNA, 120 bp, Artificial Sequence
  ENSG00000137103_81 (sequence is synthesized)
gtgtcctcccgcccatccccagtggggggtgttctgcccattctccagagcccagcactgctccatctcttttcctccctctccttccccttgctgttacctgctgccttcttgtgctcc

SEQ ID NO: 334118 - DNA, 120 bp, Artificial Sequence
  ENSG00000137103_82 (sequence is synthesized)
cactgcccttggccatccctctgtgtcattgtgcgctgtggtgcacctgtcttctctactacaccttaagagcaggactctgcctccttcctaccagcacctcatgcagcaagtgctgcc

SEQ ID NO: 334119 - DNA, 120 bp, Artificial Sequence
  ENSG00000137103_83 (sequence is synthesized)
aatagcaggcacccagcagatagcgaatgcacgactccaaaacccagctttgcctcctggctgtagttcagactagctgtgtgacactgaccaagacacttgacctctctcagactcagc

SEQ ID NO: 334120 - DNA, 120 bp, Artificial Sequence
  ENSG00000137103_84 (sequence is synthesized)
ttcctccttgaagactgggatgctatgtagctcagaggaaacatacacctgaaggtgctgccccggggggtgcaatgacctgttactgaggctggatggaggatggcatccatcatcagc

SEQ ID NO: 334121 - DNA, 120 bp, Artificial Sequence
  ENSG00000137103_85 (sequence is synthesized)
tacaggtgcctcctctatctacaggttcctgctccatctatactagccacctcctggacaagggctccagtgtcctccatgacaccagctttctccagagcctgtgcaggatttccttcc

SEQ ID NO: 334122 - DNA, 120 bp, Artificial Sequence
  ENSG00000137103_86 (sequence is synthesized)
tctaccctgaatcagggtgattcttaaaggacagtttcaggaacatataggggcacttgggtaatcttggtcagtaactgacctttaactatcatccatgtgaacatctacagttaggga

SEQ ID NO: 334123 - DNA, 120 bp, Artificial Sequence
  ENSG00000137103_87 (sequence is synthesized)
ttttcttggtgatgtttggcaaaaagtaaagaattccccaagtgtgaagcctcattcattcacttattcaacaaatagttattgagcacctactatgtgttaggccctgggccaggtgct

SEQ ID NO: 334124 - DNA, 120 bp, Artificial Sequence
  ENSG00000137103_88 (sequence is synthesized)
gggaatacagcagagacagacctggctcctgccctcatggagtttgcagtcattcattcactcactcggtgactttggacacctccccctcctctctccaggctttagatctctgagatt

SEQ ID NO: 334125 - DNA, 120 bp, Artificial Sequence
  ENSG00000137103_89 (sequence is synthesized)
ctctctgagtctgggatgtaaagacaaagtaaaacctgaaatctggaaagcagaactataagagctttgtttctgatgggggtgttgctgcagacagaactatgtccatctcaaattctg

SEQ ID NO: 334126 - DNA, 120 bp, Artificial Sequence
  ENSG00000137103_90 (sequence is synthesized)
acactggacacaggcgtgggggtttcaagcaggccaagggtgggaaaccacctgactgcatttttctttatcactcacacctctaacagtaagaccaagtgggcctggcggaggcatttg

SEQ ID NO: 334127 - DNA, 120 bp, Artificial Sequence
  ENSG00000137103_91 (sequence is synthesized)
agggcttttgtgtgtgcaggctctggcccgtcctcctgccttgcctccaccgcatccctcatgcacacctgctgcagcctcatcagaccactccctgtcttttggacaaagcctgtgtgc

SEQ ID NO: 334128 - DNA, 120 bp, Artificial Sequence
  ENSG00000137103_92 (sequence is synthesized)
tccagtcccatccctcttcttgggcagtttcttcaggctggagtgcctttcttttctactcatccttcaaggctcagttcacacaccactgtctcgtgcagccttctctcagatggcttc

SEQ ID NO: 334129 - DNA, 120 bp, Artificial Sequence
  ENSG00000137103_93 (sequence is synthesized)
ataaaactgaccacccggacaacaagatggtcacacagctattagtggaggttaagttcattctgccttcattatagttcatttttcttgtatatctctctctgactagactatgagcta

SEQ ID NO: 334130 - DNA, 120 bp, Artificial Sequence
  ENSG00000137103_94 (sequence is synthesized)
ttgcagtgaaagggctgtgtccttcatcactgtcaccctccagtgacccgcagccaggaggtgtcagtgattgccatttgagttgaactatttattgacatccagtgttgttctgccaaa

SEQ ID NO: 334131 - DNA, 120 bp, Artificial Sequence
  ENSG00000137103_95 (sequence is synthesized)
tccagtgttgttctgccaaaaatcctgatcctaggcatggtggtttgcacctgtggtcacagctactcagaaggctgaggtgggaggagtacttgagcccaggagttcgaggttacagtg

SEQ ID NO: 334132 - DNA, 120 bp, Artificial Sequence
  ENSG00000137103_96 (sequence is synthesized)
cagcctgggcaacagagtgaggccctttctctaaaaaagcaaacgaagaacgctgaacccaaggtcttgcctcaaaatcaattcccccttccccctccaacacatacaccgcaacagaat

SEQ ID NO: 334133 - DNA, 120 bp, Artificial Sequence
  ENSG00000137103_97 (sequence is synthesized)
gaatgatacagctattgtgattgctaggagaagggctttgggcagtgccagtctcctgtttgcagtaacacctgctctttctgaagagctacatcagtaacatggtgggttttcctcaca

SEQ ID NO: 334134 - DNA, 120 bp, Artificial Sequence
  ENSG00000137103_98 (sequence is synthesized)
acttaaaagtctgatcgtaacacattcatggaaactagaaccagcacacgaaaccattggcttgtggccctaaagaaataactctgtgtccagaaaatgccatgttaccaggttgcctac

SEQ ID NO: 334135 - DNA, 120 bp, Artificial Sequence
  ENSG00000137103_99 (sequence is synthesized)
agctttgcctgtaacatgggcacaggctgggacatcagatagaagctggttcccatggtggctgggttgggatgggctaagttatgttgcagtaacgtacaacctcatcattttagtggc

SEQ ID NO: 334136 - DNA, 120 bp, Artificial Sequence
  ENSG00000137103_100 (sequence is synthesized)
tagcatgacgaagttttatttctcatgctacatgtctactgtggctttcccggtggctcagggttctcagagcccctggcagatggaggctccaccctgtgggacgtcaccagttgttat

SEQ ID NO: 334137 - DNA, 120 bp, Artificial Sequence
  ENSG00000137103_101 (sequence is synthesized)
ggctggggaaggacacactggaggctcttgctgctctgagccacaggagacatttgtcatatctgcacacagcccactggccctgcggcatcctaccacctgcccagaaggaggagaacc

SEQ ID NO: 334138 - DNA, 120 bp, Artificial Sequence
  ENSG00000137103_102 (sequence is synthesized)
agaattactgctgagcagctcctctgcatgtgggtgcaatggcgtcttatgactctcagaaagctactctagtggccatctaccagtgtcacgcagtgtcacgctcggtcatggcctgga

SEQ ID NO: 334139 - DNA, 120 bp, Artificial Sequence
  ENSG00000137103_103 (sequence is synthesized)
agatcagagtcacagagggataggacctggagtgtctctgaaaatagctgcctggtttcactccccggttttacgcctcttgagaagcagagtgatgcctagaatgagccctggactggg

SEQ ID NO: 334140 - DNA, 120 bp, Artificial Sequence
  ENSG00000137103_104 (sequence is synthesized)
agggcacgtcccaggtttgaatcggggcctttgttccttttctgctgtatgactttggtcagatttctccttctgagaagtggagccaattaagcgatctccgatatgctgtaatctctg

SEQ ID NO: 334141 - DNA, 120 bp, Artificial Sequence
  ENSG00000137103_105 (sequence is synthesized)
aaacatttcctcatatgtttctagcaacttccaacctgaggtctgatagacccagggttactttgcaagctaactgacatatcagtctcattgtctggtaaatctaattttaaccactta

SEQ ID NO: 334142 - DNA, 120 bp, Artificial Sequence
  ENSG00000137103_106 (sequence is synthesized)
atacttattttaggcttcacaaattattttaaaagaaaagataggggcataacaagaagaaagcttcggttacaatttccccgaaatgcctggatctgggattcctgcttcctggctgtg

SEQ ID NO: 334143 - DNA, 120 bp, Artificial Sequence
  ENSG00000137103_107 (sequence is synthesized)
tggcagagaagatgaggatggccctggagtcagacgggactagggtccaagccccagctcttccacttgttaacaatgttctcagcctcagcttccttacctataccatggagacggcag

SEQ ID NO: 334144 - DNA, 120 bp, Artificial Sequence
  ENSG00000137103_108 (sequence is synthesized)
tatttccttgtgggcttgttttaaggatccagtgacaggaagcatgcgaagctcttagaacagagcctggcactggtaaatagtcagtgagcagtagatgatattattaccatcctgtcc

SEQ ID NO: 334145 - DNA, 120 bp, Artificial Sequence
  ENSG00000137103_109 (sequence is synthesized)
ctatccctgtcccccagcaaatattttggcttttaaatgttttaaatgatttcttgagaataagcaatgggtcagatgaaatctccttacctctcacctactggccatggcctaaatgtc

SEQ ID NO: 334146 - DNA, 120 bp, Artificial Sequence
  ENSG00000137103_110 (sequence is synthesized)
tgtagggagctggagccaggtgaggggagctgtggtttgggaagtgccgagttcattatgagcaagtgcacggtgctgggatgggctaggttccccgcacctcgccctgccactgcctcc

SEQ ID NO: 334147 - DNA, 120 bp, Artificial Sequence
  ENSG00000137103_111 (sequence is synthesized)
caggacctgcctcttgctcccctgccacatagacagtctgcttgccccctgctttcagggacctcatggtccctgcccaatttaaagttcaaactctgcaactgcacaaagttgcaggct

SEQ ID NO: 334148 - DNA, 120 bp, Artificial Sequence
  ENSG00000137103_112 (sequence is synthesized)
tggcagctgtgggacctgggcttcagagactccaggttcctcggcctgccccaggagggccctgctgaggtgaagtgggcataggagagagagtggacagagaatctgaatactgggtca

SEQ ID NO: 334149 - DNA, 120 bp, Artificial Sequence
  ENSG00000137103_113 (sequence is synthesized)
cgttgcagttctgcgccttggatgccataggctccaggcccataagcccggcttcactaggcctgggtgtctgggttgtgaaatggggtgtctccttccaggattgccgtaaggacctgg

SEQ ID NO: 334150 - DNA, 120 bp, Artificial Sequence
  ENSG00000137103_114 (sequence is synthesized)
attcatcaaagcttaaagtaaattgctttgtaaggtgggagacaccgagtacaggcgagggactttattaggtcagggatttaatcaggcatctgtttttacagatttctttattcctgt

SEQ ID NO: 334151 - DNA, 120 bp, Artificial Sequence
  ENSG00000137103_115 (sequence is synthesized)
tccctcccctccccttcctgtcctttcacaataaagaataacaacttgacacagcttagagactaaaaatcatccttcaataaagcagcagaagttgcaaagtttcctatgatgctataa

SEQ ID NO: 334152 - DNA, 120 bp, Artificial Sequence
  ENSG00000137103_116 (sequence is synthesized)
gccggttcagcgcagcccggagtcgcccaggcctgaactcctacccaggctctctggcacaccagccttgtgtcagggtgggcagcagcacaagggtggctggggcggggcatggctaaa

SEQ ID NO: 334153 - DNA, 120 bp, Artificial Sequence
  ENSG00000137103_117 (sequence is synthesized)
ttgcatcacgttgggggagaacgggacggaatgaattctctgacctccgagccgcttctggcaagtgcagaagagaggttaacactagtgctcattaggaggccagaagcctgaggaggg

SEQ ID NO: 334154 - DNA, 120 bp, Artificial Sequence
  ENSG00000137103_118 (sequence is synthesized)
cagagcactggctccaagaagagaaagctcatttcctgcagggggcatcgggccagctgggctgcaggcagtggaaagaaggcggcagccgctgcactgaccctgtcccgacctcggcgc

SEQ ID NO: 334155 - DNA, 120 bp, Artificial Sequence
  ENSG00000137103_119 (sequence is synthesized)
cccggcctgcgcagggcgggaatcagcaccagctcgttctccggagccaccagttcgacctcaccacacagccccggagcttgtgcctcggaggggcagaggccacaggcaggagctctg

SEQ ID NO: 334156 - DNA, 120 bp, Artificial Sequence
  ENSG00000137103_120 (sequence is synthesized)
gctctgcgcgccttcgggaccccctggccccggatggcttcggagcccgcaggaccccctactcgctcccgcgccacttctcacctgccccccgcgcacccccgtggccgccacggctct

SEQ ID NO: 334157 - DNA, 120 bp, Artificial Sequence
  ENSG00000137103_121 (sequence is synthesized)
ctctgcgcgccgcgcgcaacccagcagccagcaccacggctgccgccatcttccctgagccgcgggaacctctcacccgggtcagcactcggctccgcggccggccgtgggtggggactc

SEQ ID NO: 334158 - DNA, 120 bp, Artificial Sequence
  ENSG00000137103_122 (sequence is synthesized)
cgggcgcggggaagcggggtagtggcggccgggcgagccctgctaccccattggagcgcgcctctgagcacgattcaccccattgcctctgcagccactttggaggcgggctcttttcat

SEQ ID NO: 334159 - DNA, 120 bp, Artificial Sequence
  ENSG00000137103_123 (sequence is synthesized)
ctcattggctgcttctaccaacgcgaggacaattttccattccattggtttcgtcttctagtccgtgtgaacgttcttttcccattggatccccttactagtttctctgtgagagaaact

SEQ ID NO: 334160 - DNA, 70 bp, Artificial Sequence
  ENSG00000137103_124 (sequence is synthesized)
cccattggatccccttactagtttctctgtgagagaaacttccactccattggaaggattaatggagcct

SEQ ID NO: 334161 - DNA, 120 bp, Artificial Sequence
  ENSG00000137103_125 (sequence is synthesized)
ggtatgcggtggtgtctgcatcttatcactgggtgcttgtgcatggtggtgggtcacagtctgtatttccaccacgttctccgagggtttgggaatgtctgtgccttcactgtgtcttct

SEQ ID NO: 334162 - DNA, 120 bp, Artificial Sequence
  ENSG00000137103_126 (sequence is synthesized)
acagacagagacagcagtgcttcccaaactgtcatgcatagataatggtcatttttgtaagacacattggagtaaatgaacaaaactgtttgcaacttaataaagtaagtttgggcctcc

SEQ ID NO: 334163 - DNA, 120 bp, Artificial Sequence
  ENSG00000137103_127 (sequence is synthesized)
acgccgacgtcaagtcgaggccgccgccgcggggcctggttatcgccggttcagcgcagcccggagtcgcccaggcctgaactcctacccaggtccccggcccccgccccgggcccgcga

SEQ ID NO: 334164 - DNA, 80 bp, Artificial Sequence
  ENSG00000137103_128 (sequence is synthesized)
ccccgcgctggcctgtccggccccgcccccgccccgggccatggcccagcccttgtcccggcccctcgtcctatcccaat

SEQ ID NO: 334165 - DNA, 84 bp, Artificial Sequence
  ENSG00000137103_129 (sequence is synthesized)
acttttgccttccaaatcacatgcaaacttctctgtggccaaccctaacccacaccctctaacctagtttggttgactcagtat

SEQ ID NO: 334166 - DNA, 120 bp, Artificial Sequence
  ENSG00000137103_130 (sequence is synthesized)
atggaggaatgataggctagggttccgggaagtgggagcaggtgggtgagggttcttgggttctgacccctcctccctctcactgactccttccttctcccttcagagtccctggccggc

SEQ ID NO: 334167 - DNA, 120 bp, Artificial Sequence
  ENSG00000137106_0 (sequence is synthesized)
acattcccgggccagcttctgtactgccaggtccgggtcggcggctgcactgcggatgagaccggtgcgactcatgaaggtgttcgtcacccgcaggatacccgccgagggtagggtcgc

SEQ ID NO: 334168 - DNA, 120 bp, Artificial Sequence
  ENSG00000137106_1 (sequence is synthesized)
gctcgcccgggcggcagactgtgaggtggagcagtgggactcggatgagcccatccctgccaaggagctagagcgaggtgtggcgggggcccacggcctgctctgcctcctctccgacca

SEQ ID NO: 334169 - DNA, 120 bp, Artificial Sequence
  ENSG00000137106_2 (sequence is synthesized)
cgtggacaagaggatcctggatgctgcaggggccaatctcaaagtcatcagcaccatgtctgtgggcatcgaccacttggctttggatgaaatcaagaagcgtgggatccgagttggcta

SEQ ID NO: 334170 - DNA, 120 bp, Artificial Sequence
  ENSG00000137106_3 (sequence is synthesized)
caccccagatgtcctgacagataccaccgccgaactcgcagtctccctgctacttaccacctgccgccggttgccggaggccatcgaggaagtgaagaatggtggctggacctcgtggaa

SEQ ID NO: 334171 - DNA, 120 bp, Artificial Sequence
  ENSG00000137106_4 (sequence is synthesized)
gcccctctggctgtgtggctatggactcacgcagagcactgtcggcatcatcgggctggggcgcataggccaggccattgctcggcgtctgaaaccattcggtgtccagagatttctgta

SEQ ID NO: 334172 - DNA, 120 bp, Artificial Sequence
  ENSG00000137106_5 (sequence is synthesized)
ttgtgtctacccctgagctggctgcccaatctgatttcatcgtcgtggcctgctccttaacacctgcaaccgagggactctgcaacaaggacttcttccagaagatgaaggaaacagctg

SEQ ID NO: 334173 - DNA, 120 bp, Artificial Sequence
  ENSG00000137106_6 (sequence is synthesized)
tgttcatcaacatcagcaggggcgacgtcgtaaaccaggacgacctgtaccaggccttggccagtggtaagattgcagctgctggactggatgtgacgagcccagaaccactgcctacaa

SEQ ID NO: 334174 - DNA, 120 bp, Artificial Sequence
  ENSG00000137106_7 (sequence is synthesized)
accaccctctcctgaccctgaagaactgtgtgattctgccccacattggcagtgccacccacagaacccgcaacaccatgtccttgttggcagctaacaacttgctggctggcctgagag

SEQ ID NO: 334175 - DNA, 120 bp, Artificial Sequence
  ENSG00000137106_8 (sequence is synthesized)
gggagccgatgcctagtgaactcaagctgtagccaaacagtagagatggagggccgggaagcaaaccgtgccctggtattgtcagacacacccaggcttgatttggatccacaggcagag

SEQ ID NO: 334176 - DNA, 120 bp, Artificial Sequence
  ENSG00000137106_9 (sequence is synthesized)
ccaagggaaggtgtgattctctgaggaaagagtgattctgatatatgtacttgtcacattggtgttggacacatttgcgccaaaagtatggtaattctattattaaataattctctgaga

SEQ ID NO: 334177 - DNA, 120 bp, Artificial Sequence
  ENSG00000137106_10 (sequence is synthesized)
gtttccataaaccaaacaaccaactcagaaattcgtgggaatacacgagacctccgtacagggaagaagagccgtcagagtgggcctggcctgtctgcttctcagcagtggcccccaccc

SEQ ID NO: 334178 - DNA, 120 bp, Artificial Sequence
  ENSG00000137106_11 (sequence is synthesized)
ggcggggcctggcacacagcagcgtggcttcagggagtgttcccagggagcctctgcaggcccattatcctccaccacaaagggctggacttgaggatctgaagggccctctggaggccg

SEQ ID NO: 334179 - DNA, 120 bp, Artificial Sequence
  ENSG00000137106_12 (sequence is synthesized)
cctcccacactgctgagcctggctttgtctggctgtggttcagtgatactttgaaccttatgctcctgggcggacagaccctaaaactcacgtggtcgtagctcctcacactgtccctag

SEQ ID NO: 334180 - DNA, 120 bp, Artificial Sequence
  ENSG00000137106_13 (sequence is synthesized)
gggtgccttcaggccactgggcatgtatggaggtcagaccttccttctctgccactccaagcccttcctagctggtgccccttgagcctgtttacatcagtttaggggaagggggattgg

SEQ ID NO: 334181 - DNA, 120 bp, Artificial Sequence
  ENSG00000137106_14 (sequence is synthesized)
gtgaggtcatcctgaggactcgtccaccccaaaggtacctgtaattaccaacatttagctacaaaacaggtgacctgggaatggaagagtgaaacatgcaggaccacagggctcgcactg

SEQ ID NO: 334182 - DNA, 120 bp, Artificial Sequence
  ENSG00000137106_15 (sequence is synthesized)
ctggctggcagcagtcacagctgccgtgtactgggtgcctgcatgtacccaggacagcccaggaccgtgtattactcattagtgcacaagtattacttagtgcacaatatacagtctcta

SEQ ID NO: 334183 - DNA, 120 bp, Artificial Sequence
  ENSG00000137106_16 (sequence is synthesized)
gaagatgacttcttgccttcagtcgccgctccctttgatggctgtggttaggggtgtgctcgttcctctgccctggtttagacaggtacctgatagcacactgtggtgcttctcagtggg

SEQ ID NO: 334184 - DNA, 120 bp, Artificial Sequence
  ENSG00000137106_17 (sequence is synthesized)
ggtctgggggtcaaccagatcagaaacacttggatggggcctaacacagatgcccttctgggccctgttcatgcagtagagcatgtaagaaagctttaatcctcccaacatgcctgggag

SEQ ID NO: 334185 - DNA, 120 bp, Artificial Sequence
  ENSG00000137106_18 (sequence is synthesized)
ttctgcagatgaggcagagacacttttcttccagtggcccttatttggagaagcctggcagaagggcgtgagcctagccaagcagctatctattggtggttctctgtcatcctgcctggt

SEQ ID NO: 334186 - DNA, 120 bp, Artificial Sequence
  ENSG00000137106_19 (sequence is synthesized)
gcaggggtgcgggtgagggtggagagtgtggagaacctgtctagccaacgaacagccctgcctctcactagagagttgcttggaggaacccaacagctttggggcacgttctgagcctga

SEQ ID NO: 334187 - DNA, 120 bp, Artificial Sequence
  ENSG00000137106_20 (sequence is synthesized)
aaatccaactgtacaaatctgtctcagcagcagcttacatgaaaattgtaagtttggggtgagctggcagtttggcagtgccaccaaaaagtcaaatggggtctgagactgcattcacag

SEQ ID NO: 334188 - DNA, 120 bp, Artificial Sequence
  ENSG00000137106_21 (sequence is synthesized)
aagcagagggtccaggacaaaggaggggactgcttgaccaggtgtctcccttgtgaaaacctctccagttctcagaggttaggaaaaacctgagtggctttccagatggcttggaccatg

SEQ ID NO: 334189 - DNA, 120 bp, Artificial Sequence
  ENSG00000137106_22 (sequence is synthesized)
tgaggacagcatcagccagtcacagcctcaggggagctgaggtgctgtctccagatccctggggcagtgtgggctggctgggggctagttacagtggggcagccagccccccacccgctt

SEQ ID NO: 334190 - DNA, 120 bp, Artificial Sequence
  ENSG00000137106_23 (sequence is synthesized)
tggaggagacaggagcaggcaactcgggctgtgctgatgaaaagggtctgccctgagggccgctgttccagaaatgctgggtggtgtccctaccctttgcgggactgggaacgagacatg

SEQ ID NO: 334191 - DNA, 120 bp, Artificial Sequence
  ENSG00000137106_24 (sequence is synthesized)
atgtatggaggtgtgattctctgaggaaagagtgattctgatatatgtacttgtcacattggtgttggacacatttgcgccaaaagtatggtaattctattattaaataattctctgaga

SEQ ID NO: 334192 - DNA, 66 bp, Artificial Sequence
  ENSG00000137106_25 (sequence is synthesized)
accgagatcatgtcactgtactccagtctgggcgacacagcaagaccctgtctccaaaaaaaaaaa

SEQ ID NO: 334193 - DNA, 120 bp, Artificial Sequence
  ENSG00000137106_26 (sequence is synthesized)
cctgtctccaaaaaaaaaaaaaaaaaaagttgggggaagcattccatgtgcagatggagggactggcccgagtcaaggtgggaggcgtgcaaacgcaggctctcacagtgcgtggccagc

SEQ ID NO: 334194 - DNA, 120 bp, Artificial Sequence
  ENSG00000137106_27 (sequence is synthesized)
cagcagcgtgggccccggcacggggcatggagcagagtagacagtgctgagtcctgctcactgtcctgtctggggagtcatcacatctactggaggtggctcagggcaggctccatctct

SEQ ID NO: 334195 - DNA, 120 bp, Artificial Sequence
  ENSG00000137106_28 (sequence is synthesized)
tgcccagggcagcagggtgggccctgtggctgtactctttgttgctgccctaaagtgccaagagaacttgttttggaatcataaatcctgagtttgcagcctgttgctctcaactcttcc

SEQ ID NO: 334196 - DNA, 120 bp, Artificial Sequence
  ENSG00000137106_29 (sequence is synthesized)
ctggttgtgtgacctcaggcaagtcaccctttctggtttgttttcccatctgcaaaacaggatgagagccagtaaggccccttcccgccctcaagttctatgtctctggtggctttaaag

SEQ ID NO: 334197 - DNA, 120 bp, Artificial Sequence
  ENSG00000137106_30 (sequence is synthesized)
gtggagtcgtttctgctgctcatctgcagtgccgagtggcagtgcctcatcccactctcagtccgtgacctggagggtgggtttataccttggaccacagtcagaggtgccgggttctca

SEQ ID NO: 334198 - DNA, 120 bp, Artificial Sequence
  ENSG00000137106_31 (sequence is synthesized)
gcggcccccatcttggtccaaggctgggcctctcacctgcccctctctctcccctcagtggtggctggacctcgtggaagcccctctggctgtgtggctatggactcacgcagagcactg

SEQ ID NO: 334199 - DNA, 120 bp, Artificial Sequence
  ENSG00000137106_32 (sequence is synthesized)
tcggcatcatcgggctggggcgcataggtgaggctcccaccggcccgcttgcccgccccggctctcacagcgtggtttgcatccctggcaccacgtgtctgaaggctgagaagacccaca

SEQ ID NO: 334200 - DNA, 120 bp, Artificial Sequence
  ENSG00000137106_33 (sequence is synthesized)
tgctgtcagggcactttgcttgcagtagagatatctctaatgagggatacagctttgtaaaacacaggcaaatacataaataaaccaaagcaggattccttaagaactcaccaggtgata

SEQ ID NO: 334201 - DNA, 120 bp, Artificial Sequence
  ENSG00000137106_34 (sequence is synthesized)
aaagcaagttgcctaagggtcagggggcttcatgattccggctccataaagaacagatgaagactacaaatgtgttggggccgttaggagtggttaccgtgagagagcccattcccccga

SEQ ID NO: 334202 - DNA, 120 bp, Artificial Sequence
  ENSG00000137106_35 (sequence is synthesized)
ctatctgtgcccagttgagaggctgtattttctctcaatggtggcattttcaggcagagggcaggagctccaggcatgtccaggggctgctgtctggtagatgtttaatctacctgcccc

SEQ ID NO: 334203 - DNA, 120 bp, Artificial Sequence
  ENSG00000137106_36 (sequence is synthesized)
cagagtcctttgttaccattccccattgtgggcggagcagcggggatggtggtgggtgtgaggaagggctgggcactttcactgtcttttccttcataaactggcaagcactaccctagc

SEQ ID NO: 334204 - DNA, 120 bp, Artificial Sequence
  ENSG00000137106_37 (sequence is synthesized)
ctttgtgtgcgccccttagtccaggcggatccagcacctggcgggtccacagcctggtgagcagatggcaggctggatctcaagcattccccacgcccctgggcactttgggccctgaag

SEQ ID NO: 334205 - DNA, 120 bp, Artificial Sequence
  ENSG00000137106_38 (sequence is synthesized)
gtagttaaagccagagtggtccagatcccactgtgtgtgatttgactttgtgcactcatgagagttgtccaggtagagactcggccttcaggaagcatcttgggagtttctgttagggag

SEQ ID NO: 334206 - DNA, 120 bp, Artificial Sequence
  ENSG00000137106_39 (sequence is synthesized)
gtagataatttgagacacagataattcgaggcacagagaatttgagacacttgcccaaggtcacacagctagaaggaggcagggctggagttctctgagtatataagacttacagacata

SEQ ID NO: 334207 - DNA, 120 bp, Artificial Sequence
  ENSG00000137106_40 (sequence is synthesized)
ctgtaagtatacctaagacttactgctttaaaagtcagtgccaagtgagtggaaaaattcattctgtaggttgttctgcctcaaaggtggcctgggcggagggatcttcggggtacccat

SEQ ID NO: 334208 - DNA, 120 bp, Artificial Sequence
  ENSG00000137106_41 (sequence is synthesized)
acattcccgggccagcttctgtactgccaggtccgggtcggcggctgcactgcggatgagaccggtgcgactcatgaaggtgttcgtcacccgcaggatacccgccgaggctgtgaggtg

SEQ ID NO: 334209 - DNA, 120 bp, Artificial Sequence
  ENSG00000137106_42 (sequence is synthesized)
agaaacagtgggtaacttctgtgtaggtggcaccctttcacattcattatcttttttgatccccacaacaataccttgaagtagcaaaggcaggtgttattctttctgtttcagatgagg

SEQ ID NO: 334210 - DNA, 120 bp, Artificial Sequence
  ENSG00000137106_43 (sequence is synthesized)
aaattcagaaaggttaagttacttgttcagtccctgaaccctgatcttccatcttcatatccttccaaagtgggagataatctaaataggaatgaggactgcccgtttttgagtgctcat

SEQ ID NO: 334211 - DNA, 120 bp, Artificial Sequence
  ENSG00000137106_44 (sequence is synthesized)
ttatagttctgagcttcctggcaggcagatcaaagagggagcaaagtaactccatggaaatgtcccagcagtagacattggtaaatatggttgaggctgatgttaccaccagatgtctga

SEQ ID NO: 334212 - DNA, 120 bp, Artificial Sequence
  ENSG00000137106_45 (sequence is synthesized)
ttcgtagtgggatccgagttggctacaccccagatgtcctgacagataccaccgccgaactcgcagtctccctgctacttaccacctgccgccggttgccggaggccatcgaggaagtga

SEQ ID NO: 334213 - DNA, 120 bp, Artificial Sequence
  ENSG00000137106_46 (sequence is synthesized)
agcccagaaccactgcctacaaaccaccctctcctgaccctgaagaactgtggtaagaactgcactttctgatgcaaactccctgctgccctgcaggaccagtgtttttgagggggtccc

SEQ ID NO: 334214 - DNA, 120 bp, Artificial Sequence
  ENSG00000137106_47 (sequence is synthesized)
gtgtggagctagtgtgagcaggtgttgaacccaaagggacacaccagggatcgtaaatgtttatgttgtcagtgacatgggtgtatgacaggagcagtcctcttgcgcatgctctgctgg

SEQ ID NO: 334215 - DNA, 120 bp, Artificial Sequence
  ENSG00000137106_48 (sequence is synthesized)
gtctctgtccctaaaggaacagaatgtaggtgtgagtggatttgtttaaaaaaaaagagtgggccaggcgtggttgtccgggccagtctctgcccttaatttggattctggaatggaaac

SEQ ID NO: 334216 - DNA, 65 bp, Artificial Sequence
  ENSG00000137106_49 (sequence is synthesized)
aggttgcagtacaaaacaacaacaacaacaaagtgggctgactacatgtctccatgtgttacacc

SEQ ID NO: 334217 - DNA, 120 bp, Artificial Sequence
  ENSG00000137106_50 (sequence is synthesized)
caacaaagtgggctgactacatgtctccatgtgttacaccacagtgactcgtgtaaaacctgttactataaattgctattaccagtttagctgtgaaaaattaaaagtgtaatgacaatg

SEQ ID NO: 334218 - DNA, 120 bp, Artificial Sequence
  ENSG00000137106_51 (sequence is synthesized)
ggtccgggtcggcggctgcactgcggatgagaccggtgcgactcatgaaggtgttcgtcacccgcaggatacccgccgagggtagggtcgcgctcgcccgggcggcagatggtggctgga

SEQ ID NO: 334219 - DNA, 120 bp, Artificial Sequence
  ENSG00000137106_52 (sequence is synthesized)
actgtggtcctggaattcagctcacggcctggggactgcttcaaaaggcaggtcttggtctgaggagagggcagtcagggcatgaagctgcagccgccaccgctgcttctacaaaatcta

SEQ ID NO: 334220 - DNA, 120 bp, Artificial Sequence
  ENSG00000137106_53 (sequence is synthesized)
agcactgggctgcagccatgtcctactgccagcaggaagggaaggatgcaatcatttgtgatgtaaaaagaccatgcagctccaagcaacacagctgatgaccccagtgatccctatggg

SEQ ID NO: 334221 - DNA, 120 bp, Artificial Sequence
  ENSG00000137106_54 (sequence is synthesized)
gggagcacggattgaggctgccaaatggagacattaactggaactgcctgtgccttgggggaagggccagcggcccctgtggggaacaattcaagctggacttttcctgcttccactata

SEQ ID NO: 334222 - DNA, 120 bp, Artificial Sequence
  ENSG00000137106_55 (sequence is synthesized)
gtatggagaatgtcaaggggtcagactgtgtagaccaattggggccatgcaggaatgcatgcagaaatacccagatctttgtccccaagaaggtgaggcagaggtagaggaaaagcccgc

SEQ ID NO: 334223 - DNA, 120 bp, Artificial Sequence
  ENSG00000137106_56 (sequence is synthesized)
agaacatgtagaagtagcagctcccactgaggccactgcaaccaaagaggaggaggggtcaagttaatgaaggccataggactccagtccttccaccccttcagagtgacacggaccttt

SEQ ID NO: 334224 - DNA, 120 bp, Artificial Sequence
  ENSG00000137106_57 (sequence is synthesized)
tgcaaaatgccatttagtcaccctccaacaaagtgtctttccctctgttgtcctgtaaactgtaatgtacgaaataacatattttgatgatcggggtcttggcctcttgacatatacgct

SEQ ID NO: 334225 - DNA, 120 bp, Artificial Sequence
  ENSG00000137106_58 (sequence is synthesized)
aaaaaaatgggggttgttttatatgtgtcctgtgtaaacctgtcggcaaatatagccaccacttttgaattctcctagatggccctgaattttgccactttgaaataatgtgctactcaa

SEQ ID NO: 334226 - DNA, 120 bp, Artificial Sequence
  ENSG00000137124_0 (sequence is synthesized)
ggaggcgggacctgcggccagccctgggcggccatgtggacagagctgggagggccggaaccagaacccaagcgtgatcctgaaccggagcccgagcctgctgcagagtgtcagcatgct

SEQ ID NO: 334227 - DNA, 120 bp, Artificial Sequence
  ENSG00000137124_1 (sequence is synthesized)
gcgcttcctggcaccccggctgcttagcctccagggcaggaccgcccgctactcctcggcagcagccctcccaagccccattctgaacccagacatcccctacaaccagctgttcatcaa

SEQ ID NO: 334228 - DNA, 120 bp, Artificial Sequence
  ENSG00000137124_2 (sequence is synthesized)
caatgaatggcaagatgcagtcagcaagaagaccttcccgacggtcaaccctaccaccggggaggtcattgggcacgtggctgaaggtgaccgggctgatgtggatcgggccgtgaaagc

SEQ ID NO: 334229 - DNA, 120 bp, Artificial Sequence
  ENSG00000137124_3 (sequence is synthesized)
agcccgggaagccttccgcctggggtccccatggcgccggatggatgcctctgagcggggccggctgctgaaccgcctggcagacctagtggagcgggatcgagtctacttggcctcact

SEQ ID NO: 334230 - DNA, 120 bp, Artificial Sequence
  ENSG00000137124_4 (sequence is synthesized)
cgagaccttggacaatgggaagcctttccaagagtcttacgccttggacttggatgaggtcatcaaggtgtatcggtactttgctggctgggctgacaagtggcatggcaagaccatccc

SEQ ID NO: 334231 - DNA, 120 bp, Artificial Sequence
  ENSG00000137124_5 (sequence is synthesized)
catggatggccagcatttctgcttcacccggcatgagcccgttggtgtctgtggccagatcatcccgtggaacttccccttggtcatgcagggttggaaacttgccccggcactcgccac

SEQ ID NO: 334232 - DNA, 120 bp, Artificial Sequence
  ENSG00000137124_6 (sequence is synthesized)
aggcaacactgtggttatgaaggtggcagagcagacccccctctctgccctgtatttggcctccctcatcaaggaggcaggctttccccctggggtggtgaacatcatcacggggtatgg

SEQ ID NO: 334233 - DNA, 120 bp, Artificial Sequence
  ENSG00000137124_7 (sequence is synthesized)
cccaacagcaggtgcggccatcgcccagcacgtggatgttgacaaagttgccttcaccggttccaccgaggtgggccacctgatccagaaagcagctggcgattccaacctcaagagagt

SEQ ID NO: 334234 - DNA, 120 bp, Artificial Sequence
  ENSG00000137124_8 (sequence is synthesized)
caccctggagctgggtggtaagagccccagcatcgtgctggccgatgctgacatggagcatgccgtggagcagtgccacgaagccctgttcttcaacatgggccagtgctgctgtgctgg

SEQ ID NO: 334235 - DNA, 120 bp, Artificial Sequence
  ENSG00000137124_9 (sequence is synthesized)
ctcccggaccttcgtggaagaatccatctacaatgagtttctcgagagaaccgtggagaaagcaaagcagaggaaagtggggaacccctttgagctggacacccagcaggggcctcaggt

SEQ ID NO: 334236 - DNA, 120 bp, Artificial Sequence
  ENSG00000137124_10 (sequence is synthesized)
ggacaaggagcagtttgaacgagtcctaggctacatccagcttggccagaaggagggcgcaaaactcctctgtggcggagagcgtttcggggagcgtggtttcttcatcaagcctactgt

SEQ ID NO: 334237 - DNA, 120 bp, Artificial Sequence
  ENSG00000137124_11 (sequence is synthesized)
ctttggtggcgtgcaggatgacatgagaattgccaaagaggagatctttgggcctgtgcagcccctgttcaagttcaagaagattgaggaggtggttgagagggccaacaacaccaggta

SEQ ID NO: 334238 - DNA, 120 bp, Artificial Sequence
  ENSG00000137124_12 (sequence is synthesized)
gatctggacaaggccatgtacttcacccaggcactccaggccgggaccgtgtgggtaaacacctacaacatcgtcacctgccacacgccatttggagggtttaaggaatctggaaacggg

SEQ ID NO: 334239 - DNA, 120 bp, Artificial Sequence
  ENSG00000137124_13 (sequence is synthesized)
agggagctgggtgaggatgggcttaaggcctacacagaggtaaagacggtcaccatcaaggttcctcagaagaactcgtaagagcagctgtcagggaggcccagtcacagtccagcaatt

SEQ ID NO: 334240 - DNA, 120 bp, Artificial Sequence
  ENSG00000137124_14 (sequence is synthesized)
ccacaaccaccttgacgaatgcttgccaagctgttttaaagccaagaacaccctttctttgttccaaattaactcttagaagaaaccccacaaataaagcaattcaatcaaggctgttct

SEQ ID NO: 334241 - DNA, 120 bp, Artificial Sequence
  ENSG00000137124_15 (sequence is synthesized)
atttaaatcagagatggggaccaggctcagagttctacctatctaacccccaaccacagcccccttggtggcccatgagttgcttccatgaaatcttaggagtctctggaggacagatta

SEQ ID NO: 334242 - DNA, 120 bp, Artificial Sequence
  ENSG00000137124_16 (sequence is synthesized)
aaaaccagtgatctgtaatttgtagctcttcctgctgatccaaggactttcccatgggtgcgcttgatggtttagtggatcgactcaactcagaacacaagcttggaaagtgttaggggt

SEQ ID NO: 334243 - DNA, 120 bp, Artificial Sequence
  ENSG00000137124_17 (sequence is synthesized)
tttgaactaggtggatactaaatctcggccccactcttcattggcttaacctaaaaaccagaggtgcttttccttgtctgtgtgccagttgctggctgttttagttgcttgcccttcatt

SEQ ID NO: 334244 - DNA, 120 bp, Artificial Sequence
  ENSG00000137124_18 (sequence is synthesized)
ttgctactgattttccttaatttgtgggaaggagtaggcaaagaatatgcttacatgattacacctgtaaagtaagcccaaacatcccaaatgtccgtcaactgatgagtggattaataa

SEQ ID NO: 334245 - DNA, 120 bp, Artificial Sequence
  ENSG00000137124_19 (sequence is synthesized)
aatgtttccatggaatattccttggattactcagccataaaaaggaatgaagtactgacacatgctgtgacatcagtgaaccctgaaaacatccttctcagtgaaacaagccagagagat

SEQ ID NO: 334246 - DNA, 120 bp, Artificial Sequence
  ENSG00000137124_20 (sequence is synthesized)
gtacaaggctacagactgtatgattccatttatatgaaatatacatactaggcaaatccatggagatggaacatagattagtggttgccaggggatagaggagtaattgttagtgggcat

SEQ ID NO: 334247 - DNA, 120 bp, Artificial Sequence
  ENSG00000137124_21 (sequence is synthesized)
gggatttgtttttgggaggttttgaaaatgttctggagttgaacaatagtaatggttgcatgatttggtaaaaatactaaaaactatggaattgtttaattatggtatatgaattaattt

SEQ ID NO: 334248 - DNA, 120 bp, Artificial Sequence
  ENSG00000137124_22 (sequence is synthesized)
cctgcggccagccctgggcggccatgtggacagagctgggagggccggaaccagaacccaagcgtgatcctgaaccggagcccgagcctgctgcagagacacggttcttgctatgtgctc

SEQ ID NO: 334249 - DNA, 120 bp, Artificial Sequence
  ENSG00000137133_0 (sequence is synthesized)
acccacggccggccgcggagccgagtgctgacccgggtgagaggttcccgcggctcagggaagatggcggcagccgtggtgctggctgctgggttgcgcgcggcgcgcagagccgtggcg

SEQ ID NO: 334250 - DNA, 120 bp, Artificial Sequence
  ENSG00000137133_1 (sequence is synthesized)
gccacgggggtgcgcggggggcaggtccgaggagctgcaggtgtgactgatgggaatgaagtggccaaggcccagcaggcaactcctgggggagcagccccaaccatcttctcccggatc

SEQ ID NO: 334251 - DNA, 120 bp, Artificial Sequence
  ENSG00000137133_2 (sequence is synthesized)
ttgtgttccgtgatgtggcccctcaggctcctgtgcacttcctggtcattcctaagaagcccattcctcggattagccaggctgaagaagaagaccagcagcttctaggacacctactcc

SEQ ID NO: 334252 - DNA, 120 bp, Artificial Sequence
  ENSG00000137133_3 (sequence is synthesized)
ttgtggccaagcagacagcaaaggctgagggcctgggagatggataccgacttgtgatcaacgatgggaagctgggtgcacaatctgtgtatcatctgcacattcatgtacttgggggcc

SEQ ID NO: 334253 - DNA, 120 bp, Artificial Sequence
  ENSG00000137133_4 (sequence is synthesized)
ggcagctccagtggcctccaggttgaacctgccaactgattaaaggacaccagactctggatgcttggatggaaagggaaaaatggaccctgtgatgctaataaaactgttctcccttaa

SEQ ID NO: 334254 - DNA, 120 bp, Artificial Sequence
  ENSG00000137133_5 (sequence is synthesized)
ttgtggccaagcagacagcaaaggctgagggcctgggagatggataccgacttggtgagtgacttttggcccttggtccctcacctatgaattctcattcctacttctcaatatgatctt

SEQ ID NO: 334255 - DNA, 120 bp, Artificial Sequence
  ENSG00000137133_6 (sequence is synthesized)
gtatcagattcaactaggagaaaatcccacctccaggctccattaatccttccaatggagtggaagtttctctcacagagaaactagtaaggggatccaatgggaaaagaacgttcacac

SEQ ID NO: 334256 - DNA, 120 bp, Artificial Sequence
  ENSG00000137133_7 (sequence is synthesized)
ggactagaagacgaaaccaatggaatggaaaattgtcctcgcgttggtagaagcagccaatgagatgaaaagagcccgcctccaaagtggctgcagaggcaatggggtgaatcgtgctca

SEQ ID NO: 334257 - DNA, 120 bp, Artificial Sequence
  ENSG00000137133_8 (sequence is synthesized)
ggggtcctgcgggctccgaagccatccggggccagggggtcccgaaggcgcgcagagccgcgcagagctcctgcctgtggcctctgcccctccgaggcacaagctccggggctgtgtggt

SEQ ID NO: 334258 - DNA, 120 bp, Artificial Sequence
  ENSG00000137133_9 (sequence is synthesized)
gaggtcgaactggtggctccggagaacgagctggtgctgattcccgccctgcgcaggccggggcgccgaggtcgggacagggtcagtgcagcggctgccgccttctttccactgcctgca

SEQ ID NO: 334259 - DNA, 120 bp, Artificial Sequence
  ENSG00000137133_10 (sequence is synthesized)
gcccagctggcccgatgccccctgcaggaaatgagctttctcttcttggagccagtgctctgccctcctcaggcttctggcctcctaatgagcactagtgttaacctctcttctgcactt

SEQ ID NO: 334260 - DNA, 120 bp, Artificial Sequence
  ENSG00000137133_11 (sequence is synthesized)
gccagaagcggctcggaggtcagagaattcattccgtcccgttctcccccaacgtgatgcaatgacatcagccttctctgaatcccttacccgaagttccctggggctaggggagcagag

SEQ ID NO: 334261 - DNA, 120 bp, Artificial Sequence
  ENSG00000137133_12 (sequence is synthesized)
gtcacttagctgaactcttacctccactcattcaagggacaagagttaaaattcacagagtcacatgtgacacccagatgaggggtcaactagtgtcaaacagggcgattgcattaaaac

SEQ ID NO: 334262 - DNA, 120 bp, Artificial Sequence
  ENSG00000137133_13 (sequence is synthesized)
aaacaggcgacaaggcttaaagatcagaaaacaagtaacggaaataagtggaaatgtactaacaaggtgagagtggaaagagattcaagccatcgcaagagattatggaaaccatccctt

SEQ ID NO: 334263 - DNA, 120 bp, Artificial Sequence
  ENSG00000137133_14 (sequence is synthesized)
tattttatattagaagctgagagaaggaatttatctgaggtaattcagtggtatggtaaggtaggaactgagaccaaaatccccagtctctcattctagatcctttccctaaacagtgct

SEQ ID NO: 334264 - DNA, 120 bp, Artificial Sequence
  ENSG00000137133_15 (sequence is synthesized)
atatttcgtggacacatgagcaggaatcaattgcactgctgaatcctgataataataccgcctgttatctaaccaggtccagcaccttctggccctaccctttgctgctggtgctctgaa

SEQ ID NO: 334265 - DNA, 120 bp, Artificial Sequence
  ENSG00000137133_16 (sequence is synthesized)
attcaggaactttcctcctgggtgggaacgatgaataggttattagaaggacgaaattaacaactatcagagcccagcttctgccagctccctcctttgaatatggtcgatccaccttca

SEQ ID NO: 334266 - DNA, 120 bp, Artificial Sequence
  ENSG00000137133_17 (sequence is synthesized)
cattctctatgaggaccagcaggtggggtgctcttaggacctatccccttaggaatgttgtagataccatccaacctgttgaagtaacgtggcctctggcctgtcacttcccccagtgtc

SEQ ID NO: 334267 - DNA, 120 bp, Artificial Sequence
  ENSG00000137135_0 (sequence is synthesized)
ggaagtgtcgatccctcagccagggcatggagctctcctgccccggttcgcggtgcccggtgcaagagcagcgtgcccgctgggagcggaaacgcgcctgcaccgcccgggagctgctag

SEQ ID NO: 334268 - DNA, 120 bp, Artificial Sequence
  ENSG00000137135_1 (sequence is synthesized)
agaccgagcggcgctaccaagaacagctggggctggtggccacgtactttttggggatcctgaaagccaaggggaccctgcgaccacctgagcgccaggccctgtttggctcctgggagc

SEQ ID NO: 334269 - DNA, 120 bp, Artificial Sequence
  ENSG00000137135_2 (sequence is synthesized)
tcatctacggcgccagccaggagctgcttccctacctggaaggaggatgctggggccaagggctggagggcttctgccgccacttggagctctataaccaatttgctgccaactcagaga

SEQ ID NO: 334270 - DNA, 120 bp, Artificial Sequence
  ENSG00000137135_3 (sequence is synthesized)
ggtcccagaccaccctgcaggagcagctaaagaaaaataaaggtttccggaggtttgtacggcttcaggaaggccgccctgagtttgggggccttcagctccaggacctgctccctctgc

SEQ ID NO: 334271 - DNA, 120 bp, Artificial Sequence
  ENSG00000137135_4 (sequence is synthesized)
ctctgcaacggctccagcagtatgagaatctcgtcgtagctttggctgaaaacacaggtcccaacagccctgaccatcaacagctcacacgggctgcccgactgataagtgagactgccc

SEQ ID NO: 334272 - DNA, 120 bp, Artificial Sequence
  ENSG00000137135_5 (sequence is synthesized)
agagagtccatactattggtcagaaacagaagaatgaccagcaccttcggcgtgtccaggctctgctcagtggacgccaggcaaaggggctgacctcagggcgctggttcctacgccagg

SEQ ID NO: 334273 - DNA, 120 bp, Artificial Sequence
  ENSG00000137135_6 (sequence is synthesized)
gctggctgttagtggtgcctccccatggggagcctcggccccgcatgttcttcctcttcactgatgtgctcctcatggccaagcctcggcctccactgcacctgctgcggagtggcacct

SEQ ID NO: 334274 - DNA, 120 bp, Artificial Sequence
  ENSG00000137135_7 (sequence is synthesized)
ttgcctgcaaggccctctaccccatggcccagtgtcatctcagcagggtctttggccactcaggaggcccttgtggtgggttgctcagtctgtccttccctcatgagaagctactgctta

SEQ ID NO: 334275 - DNA, 120 bp, Artificial Sequence
  ENSG00000137135_8 (sequence is synthesized)
tgtccacagaccaggaggagctgtcacgctggtaccacagtctgacttgggctatcagcagccagaaaaactagaggaatcttatagattccagaactcaggatacctcagggataggtc

SEQ ID NO: 334276 - DNA, 120 bp, Artificial Sequence
  ENSG00000137135_9 (sequence is synthesized)
acagccaagagtacaaaggaatcttcagtactgaacaaaacagaacccttcatgatttgacaaaggtcactttctgtttgcctggaccaagctactccagatcatctgaccaactcttaa

SEQ ID NO: 334277 - DNA, 80 bp, Artificial Sequence
  ENSG00000137135_10 (sequence is synthesized)
gcactttgggaagcagaggtggcaggatcattctgagaccctgtctctatttaagaaaaaataattaagaaattttatta

SEQ ID NO: 334278 - DNA, 120 bp, Artificial Sequence
  ENSG00000137135_11 (sequence is synthesized)
ctgtctctatttaagaaaaaataattaagaaattttattaaaaaagaagaatcaggaaaccaagtccaacccaactaaacctcaaatgaaccagcccctaacacagatgaggggatttgg

SEQ ID NO: 334279 - DNA, 120 bp, Artificial Sequence
  ENSG00000137135_12 (sequence is synthesized)
gactgataagctctgtgctgtgtccatggcccgtcatttatcaaggctgcagctttgtaaatgtggctatttttatgttgtgtatagtttctatcatttatttttccactggatttgagt

SEQ ID NO: 334280 - DNA, 120 bp, Artificial Sequence
  ENSG00000137135_13 (sequence is synthesized)
aaagttttttttcttttttttgggaaagacccttctgtctcagttttgctatgagaaaagggatttttgggccctgaacgcgggcatgctggtggcctcaggaatacgaggaaaagagct

SEQ ID NO: 334281 - DNA, 120 bp, Artificial Sequence
  ENSG00000137135_14 (sequence is synthesized)
ggagctccctctatcttctctgctgtcacactggaaggcagcctctttttgtcctaataaggacagctcttcaagaaggcccagttgtccttaggcacctagtatgggtgtgtacaacca

SEQ ID NO: 334282 - DNA, 120 bp, Artificial Sequence
  ENSG00000137135_15 (sequence is synthesized)
tccttcccagccaaggctgtgactggggccctttgccacagcctggctgcaccttctccgtagtccccgccccacctcccaggaagtagctaggttccatgtctctgtgctccagtttgt

SEQ ID NO: 334283 - DNA, 120 bp, Artificial Sequence
  ENSG00000137135_16 (sequence is synthesized)
gggctcctcccaggcctgactgtcaccaatctcctcctcgtcctcctttaaacagaagtcctcaggaagaggtctgctggcctctgtgtggggagagatcaggaatgttccagtttcaga

SEQ ID NO: 334284 - DNA, 120 bp, Artificial Sequence
  ENSG00000137135_17 (sequence is synthesized)
gactttgtctccacctccagcagactcgcctcccgagccttcacctggttctgaagcctccatatccttgtccggcttgctatcttgcagcagctcgtggatggtccatagcttcatgtt

SEQ ID NO: 334285 - DNA, 120 bp, Artificial Sequence
  ENSG00000137135_18 (sequence is synthesized)
cagaagctcctgctgggctccagccagagtagtcacactgaagaaatgtccactcagtggctcccaacctatgtccccattcctccctcctgccacaaattccccaaaaattcacagaat

SEQ ID NO: 334286 - DNA, 120 bp, Artificial Sequence
  ENSG00000137135_19 (sequence is synthesized)
cattgctctcctcaccgctcaaaaagggggtccagctgggccatcaggttgttcaggtgctgctctgtctgggccagctgttgtgtcaactgggccagctgttgctctggggataaggga

SEQ ID NO: 334287 - DNA, 120 bp, Artificial Sequence
  ENSG00000137135_20 (sequence is synthesized)
aaaaagggggcagaagtggttatgtatcttctgctgtcccctaaactcccccgacccagcacagacttctgctaaacccacctgactgcagtggctgctgcttgcttgcctcctcgtgga

SEQ ID NO: 334288 - DNA, 120 bp, Artificial Sequence
  ENSG00000137135_21 (sequence is synthesized)
gaaccgcagtttcatctttcccctgttgtggaagaaggaaagggcagtactgaagcaacaaggttctgctccatcacctcagtctccagagccagccaagagagagtgcaatttgagatg

SEQ ID NO: 334289 - DNA, 120 bp, Artificial Sequence
  ENSG00000137135_22 (sequence is synthesized)
gagacagtgattgggtttttacctcagagaatcacaatcctagtctatctagctcctcacccagcatatgaagcgacgtcctatgtcccacacatggtcagtttgctgaaacacctccag

SEQ ID NO: 334290 - DNA, 84 bp, Artificial Sequence
  ENSG00000137135_23 (sequence is synthesized)
ctatgtcccacacatggtcagtttgctgaaacacctccaggaatgagcaactccctccggtttgaaaaaagctctggtggctga

SEQ ID NO: 334291 - DNA, 72 bp, Artificial Sequence
  ENSG00000137135_24 (sequence is synthesized)
caaaaactttggttgttagacagttcatgcacaaagccaaaatttgtcctttatgtatcttctttccatagt

SEQ ID NO: 334292 - DNA, 120 bp, Artificial Sequence
  ENSG00000137135_25 (sequence is synthesized)
aaagccaaaatttgtcctttatgtatcttctttccatagtgcttactggagccttccaaaataatgtctcctcaaggtgacagcccctcaggaatttgaaggcaatggtcacaccctcac

SEQ ID NO: 334293 - DNA, 120 bp, Artificial Sequence
  ENSG00000137135_26 (sequence is synthesized)
ccactttcctgagttttttctggtttattaacgtcagtctttacagtcagtgctcattgacggtggttttctctggttgtttcctgaacacgtagtgctcttaaagcaatgccctgagga

SEQ ID NO: 334294 - DNA, 120 bp, Artificial Sequence
  ENSG00000137135_27 (sequence is synthesized)
gaatacaattctccaggggcattctgattggcaggtgaagcacagtgccatgttcccagcactgatttgggaagtggcttgtcacatcccacagtgaactcagtcaactggaatgcctaa

SEQ ID NO: 334295 - DNA, 120 bp, Artificial Sequence
  ENSG00000137135_28 (sequence is synthesized)
ctctctttcataagacctcctgctacattatgtttctcccagactgtactcaggtccaagaacagaatttactagtctatccttctcaaagttcatcattaaattcagtcattcatccta

SEQ ID NO: 334296 - DNA, 120 bp, Artificial Sequence
  ENSG00000137135_29 (sequence is synthesized)
ggcgcagggccgggcagaaggcggcgagctgggggcggatatccaccggggactggaagcggcccgcgcaggctggggacacccggggccagggcgggtcgcctggggtgggagagtata

SEQ ID NO: 334297 - DNA, 120 bp, Artificial Sequence
  ENSG00000137135_30 (sequence is synthesized)
tatagtgaggaagtctgacgcctaggtcaggaacttagggaacccgggtagaaaaggtgagggggtgggacggtgggcggcgggtgggacgcccgggaccagtgttcagggacggctgta

SEQ ID NO: 334298 - DNA, 120 bp, Artificial Sequence
  ENSG00000137135_31 (sequence is synthesized)
ggggagatccacagagctgggttcccagattgggtctgtgcagcgggtgggtgtctcacctccatagcgccaatgactctggtcatcccctgtataaatgaaaaggatgaaccgctcaag

SEQ ID NO: 334299 - DNA, 120 bp, Artificial Sequence
  ENSG00000137135_32 (sequence is synthesized)
cttagagccccaatcccttcctggcgaccaaaacgatgtcacaaacgcagatgccttacaggagcattacgggtaacaaatgccttaagcgggccaggtgcaaagcacaggagaccgcac

SEQ ID NO: 334300 - DNA, 120 bp, Artificial Sequence
  ENSG00000137135_33 (sequence is synthesized)
ccaaactcaacaccgcagctgggtgggccaaacagcaatcctaccagcttgcaatcattgtcttagggtctgtaaaagtgagtggctgcttcaggccaggcgctgtggctcacgcctata

SEQ ID NO: 334301 - DNA, 120 bp, Artificial Sequence
  ENSG00000137135_34 (sequence is synthesized)
aaaagtgaaagtttgtctcaaaaaaaaaaaaaaaaaaagtgagtgggcacttcagtcctgagtcccaaatgagtgagtacaccatctttcctttctcccttctttcttctccccactcat

SEQ ID NO: 334302 - DNA, 120 bp, Artificial Sequence
  ENSG00000137135_35 (sequence is synthesized)
ccctctgccttgtatggtctccaacccctttccccaaattcctggcttgggagtcaagaagccacgtttctctacctgctgtgtcccttcttcctaggtctcaatttcctcattgtagcc

SEQ ID NO: 334303 - DNA, 120 bp, Artificial Sequence
  ENSG00000137135_36 (sequence is synthesized)
taagatgagatgacttctaccagctcttcttgcttgtctctggtacccacttcacctcccaagctttccttttctcttcccctcaaactctctgactctccttctccacctatttttttc

SEQ ID NO: 334304 - DNA, 120 bp, Artificial Sequence
  ENSG00000137135_37 (sequence is synthesized)
ctctgtctgcacattttttctctcatctgcagttctcatccctttctcttctccagcctcccccttctctcccatctcatccagctcacctctctccttttgcaccctttttattttctc

SEQ ID NO: 334305 - DNA, 120 bp, Artificial Sequence
  ENSG00000137135_38 (sequence is synthesized)
tccacatctgtccctttctacctccgagagtggggatggggatattggtatgggacctctggaagggcttctgtggggagtacagtctcccctccttccctgagtgaacagagcctaggc

SEQ ID NO: 334306 - DNA, 120 bp, Artificial Sequence
  ENSG00000137135_39 (sequence is synthesized)
tggggtatgggaggggagtcatgaacctcctggaacctggatttggagattgatgaccacttaccttctttgtccctgtgggcattattctggggttcttgaggatctccaggagcctca

SEQ ID NO: 334307 - DNA, 120 bp, Artificial Sequence
  ENSG00000137135_40 (sequence is synthesized)
acagtaggtagatcctctaacttcagggagccctcttcttctgatttaggcttaacttcaggtagatcctcctctccaggtagatcctcctctccaggtagatcctcctctccgggtgga

SEQ ID NO: 334308 - DNA, 120 bp, Artificial Sequence
  ENSG00000137135_41 (sequence is synthesized)
tcctcctctctgggtgaatcctcttcactgggcagatcctcctcgcccagtgggtcatcttccccagaagagcctcctcccaagggggaatcctcctgcatccggggcaacctctgggga

SEQ ID NO: 334309 - DNA, 120 bp, Artificial Sequence
  ENSG00000137135_42 (sequence is synthesized)
tggacaggcaccagaagcagcagtgacagcagcagttgcacagtgaggcctggagcaggggccgggatcaacagagggagccaggggctggggcacaggggagccatgcggctgactgtg

SEQ ID NO: 334310 - DNA, 120 bp, Artificial Sequence
  ENSG00000137135_43 (sequence is synthesized)
gggtgtcccagcacacggtgtgtacgggctgtacgtgcattggaaacgagagctgggtgggggaggagcaagcctggaggggagcaggctgactcacagagcgcccttttgcagagatgg

SEQ ID NO: 334311 - DNA, 120 bp, Artificial Sequence
  ENSG00000137135_44 (sequence is synthesized)
agccaaagtctcacagctcactcatttttcaaatgcgattccctatggctctgtttctctgtctctctcgtctctggtctgagtggagaatgtggactctgaccctggatcatgctggga

SEQ ID NO: 334312 - DNA, 120 bp, Artificial Sequence
  ENSG00000137135_45 (sequence is synthesized)
tgcagcaatcaacctcctgtgccaaggctggccccactcttgtagcatggacactgctagctgggttcaaatcccagctccagcagttgccagcgctgggtgacctcgagcaagtgacta

SEQ ID NO: 334313 - DNA, 120 bp, Artificial Sequence
  ENSG00000137135_46 (sequence is synthesized)
ctcctcactggattgtaggagaactaaatgtgatagtcattatttacagttcaccacacgctcttcacatccgttacctccctggatcctcaaaataacctcataatattggaaggccaa

SEQ ID NO: 334314 - DNA, 120 bp, Artificial Sequence
  ENSG00000137135_47 (sequence is synthesized)
cacacgtaggttcttgctcctcggcaacgcaggctggaggcttcctctcctgtattcctttctgattctgacctccaacaatgtctggtatgaccctatcttccactgacatgtatacag

SEQ ID NO: 334315 - DNA, 120 bp, Artificial Sequence
  ENSG00000137135_48 (sequence is synthesized)
tgtccctactgctctgccttttcttcaagaagtcagaccctgaccctggtcccttccagaataacctctttcacaaccatggcacccaaagtcaaagttgtatggggagtaaggtgggag

SEQ ID NO: 334316 - DNA, 120 bp, Artificial Sequence
  ENSG00000137135_49 (sequence is synthesized)
atgttattccaggggctgcccgactgataagtgagactgcccagagagtccatactattggtcagaaacagaagaatgaccagcaccttcggcgtgtccaggctctgctcagtggacgcc

SEQ ID NO: 334317 - DNA, 120 bp, Artificial Sequence
  ENSG00000137142_0 (sequence is synthesized)
agaggcgccgccgctgtcccggagcaagccatgccgcgcttgtctctgctcttgccgctgctgcttctgctgctgctgccgctgctgccgccgctgtccccgagccttgggatccgcgac

SEQ ID NO: 334318 - DNA, 80 bp, Artificial Sequence
  ENSG00000137142_1 (sequence is synthesized)
ccagagggctgcccggcgcctgcgccctgcccggcgcccgggatctcggcgctcgacgagtgcggctgctgcgcccgctg

SEQ ID NO: 334319 - DNA, 120 bp, Artificial Sequence
  ENSG00000137142_2 (sequence is synthesized)
gggcgctgtggccccggcctggtatgcgcgagccaggccgctggggcagcgcccgagggcaccgggctctgcgtgtgcgcgcagcgcggcaccgtctgcggctccgacggtcgctcgtac

SEQ ID NO: 334320 - DNA, 120 bp, Artificial Sequence
  ENSG00000137142_3 (sequence is synthesized)
gcagcgcggcaccgtctgcggctccgacggtcgctcgtaccccagcgtctgcgcgctgcgcctgcgcgctcggcacacgccccgcgcgcaccccggtcacctgcacaaggcgcgcgacgg

SEQ ID NO: 334321 - DNA, 120 bp, Artificial Sequence
  ENSG00000137142_4 (sequence is synthesized)
tgcgagttcgctcctgtggtcgtcgttcctccccgaagtgttcacaacgtcaccggggcgcaggtgggcctgtcctgtgaagtgagggctgtgcctaccccagtcatcacgtggagaaag

SEQ ID NO: 334322 - DNA, 120 bp, Artificial Sequence
  ENSG00000137142_5 (sequence is synthesized)
gtcacgaagtcccctgagggcacccaagcactggaggagctgcctggggaccatgtcaatatagctgtccaagtgcgagggggcccttctgaccatgaggccacggcctggattttgatc

SEQ ID NO: 334323 - DNA, 120 bp, Artificial Sequence
  ENSG00000137142_6 (sequence is synthesized)
aaccccctgcgaaaggaggatgagggtgtgtaccagtgccatgcagccaacatggtgggagaggctgagtcccacagcacagtgacggttctagatctgagtaaatacaggagcttccac

SEQ ID NO: 334324 - DNA, 120 bp, Artificial Sequence
  ENSG00000137142_7 (sequence is synthesized)
ttcccagctcccgatgaccgcatgtgatggagaaatggtcttagaaacattgatcatgggatgatggaaaagtcaaataacggatctttgtgcttcatgaagagttggaaaacctgtgtg

SEQ ID NO: 334325 - DNA, 120 bp, Artificial Sequence
  ENSG00000137142_8 (sequence is synthesized)
tgtagatgaccccttttgtgtgtttttaaaaattagatgcaaactagatctgtatgcagatgtagtttttagcagggcaaacagtgagaaacggatttgcatgtggcttttttatacttt

SEQ ID NO: 334326 - DNA, 120 bp, Artificial Sequence
  ENSG00000137142_9 (sequence is synthesized)
tgaaatgaattgttccatgagaagtctttttgtaattattctcttccagggagatcacagaacggcatgtttgcaatttcgaaagggctcgtgtcagctgtgactctttacctcatttgt

SEQ ID NO: 334327 - DNA, 120 bp, Artificial Sequence
  ENSG00000137142_10 (sequence is synthesized)
ctatgacctattagtggtgctctgtgacttagtgtgtgttgtagaaggagggatgagggtcccagctgtcctctgcctgactgtaacttgctgtgtgacctgaacagatcccttcccctc

SEQ ID NO: 334328 - DNA, 120 bp, Artificial Sequence
  ENSG00000137142_11 (sequence is synthesized)
tctgggccctggtcccttcatctgtgagtatggcattttaactggatgttatcaatgtcccttttagccctgccatcctagattaagatggccttttgggaaaataacaggaagtgtggt

SEQ ID NO: 334329 - DNA, 120 bp, Artificial Sequence
  ENSG00000137142_12 (sequence is synthesized)
cttagtgttctttctaaaatggtattccctcagaaacaaattccattgctttaccccaacgtgtggacagctggctgtagctcttctattcctaactttttccctttgaaggagatttag

SEQ ID NO: 334330 - DNA, 120 bp, Artificial Sequence
  ENSG00000137142_13 (sequence is synthesized)
ttttaggtgggatgctttaccagactcaggagcgccttggctgggtctttggagaccagagcatccatttgttagcctagcattctcttttttaaaattttattttgagacagggtctcg

SEQ ID NO: 334331 - DNA, 120 bp, Artificial Sequence
  ENSG00000137142_14 (sequence is synthesized)
aaagtgctgggattataggcatcagccactgtgcttggcctagcctagcattctctaaacaggtggttagaagcggtggataccaggcttctgacgatcaaattgtaaaaaaaggggtca

SEQ ID NO: 334332 - DNA, 120 bp, Artificial Sequence
  ENSG00000137142_15 (sequence is synthesized)
aggcttctgacgatcaaattgtaaaaaaaggggtcaggtgttatctccagactgtggaattagattgtagtagaatatattttacctacaaacattttgacctcacccaagagtaaggct

SEQ ID NO: 334333 - DNA, 120 bp, Artificial Sequence
  ENSG00000137142_16 (sequence is synthesized)
ctcttttttttcttttttaatgaaaaaagaaaggagaatatttgctatcttatcttaaaaaaatagatccttaggtgattacaattttaaaataagaattgagagcccttactatgcaca

SEQ ID NO: 334334 - DNA, 120 bp, Artificial Sequence
  ENSG00000137142_17 (sequence is synthesized)
gtcctttaagttcataaagcttgatcccaactctgggagatggggcaggacaggtgttaatgtccctgcctttagcagatgaagaaaccaggctctgagaggagaagctacttgcccaag

SEQ ID NO: 334335 - DNA, 120 bp, Artificial Sequence
  ENSG00000137142_18 (sequence is synthesized)
gcctgaaggcctctgaaagaggagcagagctcagggcacctggccctccttggtcccctctctactccacggtgctgctactcagggtcatctcaaaactatgtaaaggcagatgttgcc

SEQ ID NO: 334336 - DNA, 120 bp, Artificial Sequence
  ENSG00000137142_19 (sequence is synthesized)
aatccacaggcttcagggactcttatcaagactcatcccaacttttaaggcacactttcacaccgctcacattgtgcattacattttggagtccttgttggaagtgaactttccgcctgt

SEQ ID NO: 334337 - DNA, 120 bp, Artificial Sequence
  ENSG00000137142_20 (sequence is synthesized)
aagcctgccattccatgtctaatatattgggatggcatcaccttctgtactatgcagcagaaggagactggcctgggattctggaaacatgagatccatttgcatattaatccccggctc

SEQ ID NO: 334338 - DNA, 120 bp, Artificial Sequence
  ENSG00000137142_21 (sequence is synthesized)
gctgtgtgaccctgagcaagtctccttcactttctgtgcctcagtgtccttatttgagtaaaaagggaataaaactagatgagtggttttcaaactttaaaacactggaagctctctttg

SEQ ID NO: 334339 - DNA, 120 bp, Artificial Sequence
  ENSG00000137142_22 (sequence is synthesized)
aaaacaaaagatgagaattgaaatggatggcactggaagctgttcttgtctactggggtttggagctgccaggggacctgctcacatccactcctcactcagcccctcccgcccctccct

SEQ ID NO: 334340 - DNA, 120 bp, Artificial Sequence
  ENSG00000137142_23 (sequence is synthesized)
tctccacgcactgtgactgacttccatgtgtgaaggcctgcagttaattctcctgtgtcttgaatggttgggagatgagttggtcagacccttagtgaaatgatgtgggaaggaacagga

SEQ ID NO: 334341 - DNA, 120 bp, Artificial Sequence
  ENSG00000137142_24 (sequence is synthesized)
atgctgtggctctgaagaaggtagtagaacatcccacacctgctaataagcacattttgcaaactcagttgactcacctcagatttgcctagtgaaaactgaagggctggatgtagaccc

SEQ ID NO: 334342 - DNA, 120 bp, Artificial Sequence
  ENSG00000137142_25 (sequence is synthesized)
agagagcagggtggacagagcccatgctggaagtactgagcatcaggactgtatggggctggctttagcatcatcattctgtgcaaagacaaataattaatgtcacactgtctgaaattt

SEQ ID NO: 334343 - DNA, 120 bp, Artificial Sequence
  ENSG00000137142_26 (sequence is synthesized)
tcaccaaaaccaaaaaggcgcattaacatgattgttccaacctcatggtttttcaagtgtgagcgcccagagacctcttcagaggctaagagagcatgcgctgccacagctgttagcatt

SEQ ID NO: 334344 - DNA, 120 bp, Artificial Sequence
  ENSG00000137142_27 (sequence is synthesized)
tggagacgtaattacaatgcccccactccccgcaccaaacctgggtttttctaccgtttttgtagatgtcatgatgtcacgacccctgcaccctgaaaaaaataaatgtttttaaggaca

SEQ ID NO: 334345 - DNA, 120 bp, Artificial Sequence
  ENSG00000137145_0 (sequence is synthesized)
ggaggaaagggagagggagggggaaaagaaagtgctgttttgtggaaaggggcggaaggcgggggagaaaaagggaacagaaacatggcggtcaggtcttgggacggctgcgccgcgggc

SEQ ID NO: 334346 - DNA, 120 bp, Artificial Sequence
  ENSG00000137145_1 (sequence is synthesized)
tcttgggacggctgcgccgcgggcagctcctaggcgacgcgccgcccgcactgtccgacggctcacagcgcggaggcacccgcgcgggccagcgctccggccatcgcccctggctgtagg

SEQ ID NO: 334347 - DNA, 120 bp, Artificial Sequence
  ENSG00000137145_2 (sequence is synthesized)
gcgaggcggcgcaggcgcagaccggactgaggcggcggcggccgctggagctagtcccccgccctgccctgccgagcgcgcccagtccgcgaatccggtgctttcttgccccaggaagaa

SEQ ID NO: 334348 - DNA, 120 bp, Artificial Sequence
  ENSG00000137145_3 (sequence is synthesized)
gccgtgtcggggctgcgctgacagaggagcaggcagcagaaaatacagtagcagccatgatagaagacaaaggaccaagagtgacagactactttgtcgtagctggtctcactgacacat

SEQ ID NO: 334349 - DNA, 120 bp, Artificial Sequence
  ENSG00000137145_4 (sequence is synthesized)
ctactcttttggatcaagaaataaatcgtttagatactaagtcaactggacctaaagctccaattacagacattgccattattatcaaatcagctggagaaacagtacctgaaggttaca

SEQ ID NO: 334350 - DNA, 120 bp, Artificial Sequence
  ENSG00000137145_5 (sequence is synthesized)
cctgtgtagaagccactccatcagctctccaagcaaacttgaactatggaagtctgaaaagcccagaacttttcctctgttataagagagggagagataaaccaccgcttacagatattg

SEQ ID NO: 334351 - DNA, 120 bp, Artificial Sequence
  ENSG00000137145_6 (sequence is synthesized)
gagttctatatgaagggaaagaacggcttattccaggatgtgaagtgatcctagccacaccctatggtcgctgtgccaatgtcaacaatagttcaactacttcacaaagaatctttatca

SEQ ID NO: 334352 - DNA, 120 bp, Artificial Sequence
  ENSG00000137145_7 (sequence is synthesized)
cttatcgaagggctcctccagttcgaccccagaattccttggctgtaactgatatctgtgttattgtaaccagtaaaggagaaactcctcctcataccttctgcaaagttgacaaaaact

SEQ ID NO: 334353 - DNA, 120 bp, Artificial Sequence
  ENSG00000137145_8 (sequence is synthesized)
taaattgtggaatgtggggttccagcgtgtttctgtgttataagaagtctgtacctgcttcaaatgcaatagcatataaggctggtttaatttttagatatccagaagaggactatgagt

SEQ ID NO: 334354 - DNA, 120 bp, Artificial Sequence
  ENSG00000137145_9 (sequence is synthesized)
catttccactctcagaatcagatgtacctcttttctgccttcctatgggagctactattgagtgctgggatcctgaaaccaaatatccacttccagttttttcaacttttgtcttgacag

SEQ ID NO: 334355 - DNA, 120 bp, Artificial Sequence
  ENSG00000137145_10 (sequence is synthesized)
gttcttcagccaaaaaggtatatggagctgccattcagttttatgaaccttactctcgggaacttctatcagagaaacagcttatgcacctgggcttgttgacgcctgtggagagaaaaa

SEQ ID NO: 334356 - DNA, 120 bp, Artificial Sequence
  ENSG00000137145_11 (sequence is synthesized)
tggtctccaaatccatcaatacaaacaaatgcatttgtttactctcacactggcctttttttgaagcttttaggaaatttcttatgtttatctacaaactttctgtgtctggaccacatc

SEQ ID NO: 334357 - DNA, 120 bp, Artificial Sequence
  ENSG00000137145_12 (sequence is synthesized)
ctcttcccattgaaaagcacatttcacattttatgcaaaacatcccttttccttcaccacaaagaccgagaatccttgtccagctgtcagtccatgatgcattaatattatcacagccag

SEQ ID NO: 334358 - DNA, 120 bp, Artificial Sequence
  ENSG00000137145_13 (sequence is synthesized)
tttctacacctttaccactaagtggagccaactttagcaccttgctaatgaatctgggtcctgagaattgtgcaacactgctgctctttgttttacttgagagtaaaattctgctgcatt

SEQ ID NO: 334359 - DNA, 120 bp, Artificial Sequence
  ENSG00000137145_14 (sequence is synthesized)
ctcttaggccagctgtcttgactggggtagctgaagctgttgtagctatgatctttccatttcagtggcaatgcccatatattcccctttgtcctctttcactggctgcagtgcttagtg

SEQ ID NO: 334360 - DNA, 120 bp, Artificial Sequence
  ENSG00000137145_15 (sequence is synthesized)
cacctttaccatttatagttggagttgactcaaggtattttgatcttcatgacccaccacaagatgttgtttgcattgacttggatacgaacatgttatatgtatcagatgaaaagaaga

SEQ ID NO: 334361 - DNA, 120 bp, Artificial Sequence
  ENSG00000137145_16 (sequence is synthesized)
acatgaactggaagcaacttcccaaaaagccgtgcaaaaatctacttagcaccttaaagaaattgtatccccagctgtcttcagttcaccaaaaaactcaagaaggctcagcgattgaca

SEQ ID NO: 334362 - DNA, 120 bp, Artificial Sequence
  ENSG00000137145_17 (sequence is synthesized)
tgactccaattgaagcagatttctcctggcaaaagaagatgacacagcttgagatggaaattcaagaggcatttttgcgctttatggcgtctattttaaaaggatatagaacatatctca

SEQ ID NO: 334363 - DNA, 120 bp, Artificial Sequence
  ENSG00000137145_18 (sequence is synthesized)
gaccaatcacagaggctccttcaaataaagccacagctgctgattcattgtttgaccgacagggatttttaaaaagtcgagatcgtgcctatgcaaaattctatacccttttatccaaaa

SEQ ID NO: 334364 - DNA, 120 bp, Artificial Sequence
  ENSG00000137145_19 (sequence is synthesized)
cacagatttttattcgtttcattgaagaatgcagttttgtaagtgataaagatactggattagcattttttgatgactgcatagaaaagttgtttcctgataaaggcacagagaaaacag

SEQ ID NO: 334365 - DNA, 120 bp, Artificial Sequence
  ENSG00000137145_20 (sequence is synthesized)
ataaggttgattttgattcagcagaagataccagattgatagaactagatgattcacagaaaagtgagcatactgtatttataatgccgccagagccacctcctgatgatggaaaggacc

SEQ ID NO: 334366 - DNA, 120 bp, Artificial Sequence
  ENSG00000137145_21 (sequence is synthesized)
tgtcaccaaagtacagttacaaatactttccaagactggaccttaagctttttgacagaccgcaggagttgaaactttgttttagtagacaccctactgggaatagcattacaaagagtc

SEQ ID NO: 334367 - DNA, 120 bp, Artificial Sequence
  ENSG00000137145_22 (sequence is synthesized)
cacctctcatggctaagagaactaaacaggaaataaaaacagctcataaattggcgaagagatgttatacaaatccaccacagtgggccaagtgtctgtttagtcattgttacagtttat

SEQ ID NO: 334368 - DNA, 120 bp, Artificial Sequence
  ENSG00000137145_23 (sequence is synthesized)
ggtttatttgtcttccggcctatgttagagtttctcatcctaaagtcagagcacttcagcaggcatatgatgtacttattaagatgaggaaaacagatgtggatcccttagatgaggtgt

SEQ ID NO: 334369 - DNA, 120 bp, Artificial Sequence
  ENSG00000137145_24 (sequence is synthesized)
gctatcgagtagtgatgcagctttgtggactttggggtcatcctgttttagcagtgagagtcttatttgaaatgaaaactgctaggataaagcctaatgctattacttatggttattata

SEQ ID NO: 334370 - DNA, 120 bp, Artificial Sequence
  ENSG00000137145_25 (sequence is synthesized)
ataaggtagtcttggagagcccgtggcctagcagtacccgcagtggtattttcttatggacgaaggtacggaatgtggtacgtggcttggcacagtttaggcagccgcttaaaaagactg

SEQ ID NO: 334371 - DNA, 120 bp, Artificial Sequence
  ENSG00000137145_26 (sequence is synthesized)
tgcaaaggtcacaggtctcctcaatatcaggtggtcagtctgaccaaggatacgggtctaaggatgaacttataaaggatgatgcagaaattcatgtgcctgaagaacaggcagcaagag

SEQ ID NO: 334372 - DNA, 120 bp, Artificial Sequence
  ENSG00000137145_27 (sequence is synthesized)
aattgataactaaaacaaaaatgcaaacagaagaggtgtgtgatgcctctgctattgtggcaaaacattcacaacctagtccagagcctcacagtcctactgaacctcctgcatggggca

SEQ ID NO: 334373 - DNA, 120 bp, Artificial Sequence
  ENSG00000137145_28 (sequence is synthesized)
tctttggcgaagctactaatctcaagaagaatggtgatagaggagaaaaaagacaaaagcattttcctgagaggagttgtagttttagttctgaaagtcgagcaggaatgttgcttaaga

SEQ ID NO: 334374 - DNA, 120 bp, Artificial Sequence
  ENSG00000137145_29 (sequence is synthesized)
agagtagtttggattcgaattcaagtgaaatggctatcatgatgggagcagatgccaagattctcacagcagcattgacatgtcctaagacttctctacttcatattgcaagaacccata

SEQ ID NO: 334375 - DNA, 120 bp, Artificial Sequence
  ENSG00000137145_30 (sequence is synthesized)
gctttgagaatgttagctgtcacctacctgatagtaggacttgtatgtctgaaagcacttggaatcctgagcacagatcatctccggtgccagagatgcttgaggaaagccaagaactcc

SEQ ID NO: 334376 - DNA, 120 bp, Artificial Sequence
  ENSG00000137145_31 (sequence is synthesized)
ttgagcctgtggttgatgacgtacctaaaactactgcaacagtagatacatatgagagtctactaagtgatagtaacagtaatcagtccagagacttgaaaacagtatccaaagatctga

SEQ ID NO: 334377 - DNA, 120 bp, Artificial Sequence
  ENSG00000137145_32 (sequence is synthesized)
ggaataagagaagtagtttatatggtattgctaaggtggttcagagggaagatgttgaaactggactagatcctttgtctcttttagccactgaatgtacaggaggaaaaactcctgatt

SEQ ID NO: 334378 - DNA, 120 bp, Artificial Sequence
  ENSG00000137145_33 (sequence is synthesized)
ctgaagataagttgttttctccagttattgcacgtaatctggctgatgaaatagaaagctatatgaacctaaaaagtcccctaggtagtaaatcttctagtatggaattacacagagagg

SEQ ID NO: 334379 - DNA, 120 bp, Artificial Sequence
  ENSG00000137145_34 (sequence is synthesized)
aaaacagagagtctggcatgactactgcatttattcatgctctagagaggagatcaagcctacctttagatcatggttcaccagcacaggaaaatcctgaaagtgaaaagagctcacctg

SEQ ID NO: 334380 - DNA, 120 bp, Artificial Sequence
  ENSG00000137145_35 (sequence is synthesized)
cagtgtccaggtctaaaacttttactgggcgtttcaagcagcaaaccccctctcgaactcataaagaacgttcaacttctttgtcagcactggtgcgttcttcgccacatggctcgttgg

SEQ ID NO: 334381 - DNA, 120 bp, Artificial Sequence
  ENSG00000137145_36 (sequence is synthesized)
gttctgtagtaaattctttgtcagggctaaagctggataatatactctcagggcccaagatagatgtcctgaaatctggtatgaaacaagcagcgacagtagccagtaagatgtgggtag

SEQ ID NO: 334382 - DNA, 120 bp, Artificial Sequence
  ENSG00000137145_37 (sequence is synthesized)
ctgttgcgtctgcctacagctactcagatgatgaggaagaaactaatagagactacagcttcccagctggcctagaagaccatattttgggggagaatatatcgcctaacacaagtatct

SEQ ID NO: 334383 - DNA, 120 bp, Artificial Sequence
  ENSG00000137145_38 (sequence is synthesized)
cagggttggtccccagtgaacttacccagagcaacacaagtcttggcagtagcagcagtagtggagatgtaggaaaactgcattatccaacaggtgaagttccatttccaagaggcatga

SEQ ID NO: 334384 - DNA, 120 bp, Artificial Sequence
  ENSG00000137145_39 (sequence is synthesized)
aagggcaagactttgaaaaatcagatcatggttcttctcaaaataccagcatgtctagcatctatcagaattgtgcaatggaggttttgatgtccagttgttcacagtgtagagcttgtg

SEQ ID NO: 334385 - DNA, 120 bp, Artificial Sequence
  ENSG00000137145_40 (sequence is synthesized)
gagctttagtttatgatgaagaaattatggctggatggacagcagatgactcaaatttgaatacagcttgtccattctgtaaaagcaacttcttgcctcttctcaatatagaattcaaag

SEQ ID NO: 334386 - DNA, 120 bp, Artificial Sequence
  ENSG00000137145_41 (sequence is synthesized)
atttgagaggttctgcaagctttttcctgaaaccaagtacctctggtgacagtttacaaagtggaagcattccattggcaaatgaatccttggagcacaaacctgtatccagtttagcag

SEQ ID NO: 334387 - DNA, 120 bp, Artificial Sequence
  ENSG00000137145_42 (sequence is synthesized)
aacctgacttgatcaactttatggacttcccaaaacataaccagatcataactgaagaaacaggctctgcagttgaaccaagtgatgaaataaagagagccagtggagatgtccaaacta

SEQ ID NO: 334388 - DNA, 120 bp, Artificial Sequence
  ENSG00000137145_43 (sequence is synthesized)
tgaaaatttcatctgtgcctaatagtttatcaaagcgaaatgtgtctttgactcgaagtcacagtgttggaggcccattgcagaatattgactttacccagcgaccgtttcatggcatct

SEQ ID NO: 334389 - DNA, 120 bp, Artificial Sequence
  ENSG00000137145_44 (sequence is synthesized)
caacagttagtcttccaaatagtctgcaggaagttgtggatcctttaggaaaaagacccaatcctccccctgtttctgtgccctacttgagtcctctagtactccgtaaagaacttgaat

SEQ ID NO: 334390 - DNA, 120 bp, Artificial Sequence
  ENSG00000137145_45 (sequence is synthesized)
ctttgctagaaaatgaaggtgatcaggtgattcatacatcttctttcatcaatcaacatccaatcattttctggaacctcgtttggtatttcagacgtttggaccttcctagtaacttgc

SEQ ID NO: 334391 - DNA, 120 bp, Artificial Sequence
  ENSG00000137145_46 (sequence is synthesized)
caggacttatcctcacatctgaacattgtaatgaaggtgtacagcttcctctgtcatctctgtcccaggatagcaaacttgtgtatattcagctgttatgggataatatcaaccttcatc

SEQ ID NO: 334392 - DNA, 120 bp, Artificial Sequence
  ENSG00000137145_47 (sequence is synthesized)
aggaaccaagagaacctctgtatgtctcatggaggaattttaattctgaaaagaaatcatctctcctgtcagaggaacaacaagaaacaagcactttagtagaaaccatcaggcagagta

SEQ ID NO: 334393 - DNA, 120 bp, Artificial Sequence
  ENSG00000137145_48 (sequence is synthesized)
ttcagcacaataatgttcttaaacccatcaacctactttcacagcaaatgaagccaggcatgaaaagacaaaggagtttatacagagaaatcctcttcttatcattagtgtctctaggaa

SEQ ID NO: 334394 - DNA, 120 bp, Artificial Sequence
  ENSG00000137145_49 (sequence is synthesized)
gagagaatattgatattgaggcatttgacaatgaatatggaattgcatacaatagtctgtcttcagagattcttgaaaggttgcagaaaattgatgctccaccaagtgccagtgtcgagt

SEQ ID NO: 334395 - DNA, 120 bp, Artificial Sequence
  ENSG00000137145_50 (sequence is synthesized)
ggtgcaggaagtgttttggagcgcctctcatttaaatagagattcactagaatgttgacacacaaggcttggggattagatttcatctggaaacattcaagtttttttttccaaatcgta

SEQ ID NO: 334396 - DNA, 120 bp, Artificial Sequence
  ENSG00000137145_51 (sequence is synthesized)
agaactggtgaatacggaattgaagtaactcttggggacaatatataatgaattatgattcatattgcattaccttgaaatatgaagtgccatttgaatgtcccagggcttattaatatt

SEQ ID NO: 334397 - DNA, 120 bp, Artificial Sequence
  ENSG00000137145_52 (sequence is synthesized)
gaagattttcaacccctgaactgcttttctgcctctgtggaaaactactttgggattcttcagtatttgtagtagtttgatagaaataatgaggaaccatattcattctaggcattgttt

SEQ ID NO: 334398 - DNA, 120 bp, Artificial Sequence
  ENSG00000137145_53 (sequence is synthesized)
gtttatatttgaagttactgagtttgaggaatggcaaattaaatttgcctaacccccaaaacaaatgaaatatctcaattataaaagcaacatggccgggcacggtggctcaggcctgta

SEQ ID NO: 334399 - DNA, 90 bp, Artificial Sequence
  ENSG00000137145_54 (sequence is synthesized)
cactgtagtcccagctactaggcagaggctacagtgagtggagatcacgccactgcaactccagcttgggtgacagagtgagaccgtctc

SEQ ID NO: 334400 - DNA, 120 bp, Artificial Sequence
  ENSG00000137145_55 (sequence is synthesized)
tgcaaaggtcacaggtctcctcaatatcagctcttcaaaatgtcacaggtggaagtgatggggacacggtgagccacggtagtgtggatagttctaatgatgctaacaatggggagcaca

SEQ ID NO: 334401 - DNA, 120 bp, Artificial Sequence
  ENSG00000137145_56 (sequence is synthesized)
aaatccttgatagttttattattactgatagtttattattattgatagttttatggttacttcaggattcattatagtaatatattacatgccagtatccacccttactgaatttctttg

SEQ ID NO: 334402 - DNA, 120 bp, Artificial Sequence
  ENSG00000137145_57 (sequence is synthesized)
gtctcctcaatatcaggtaatacatgtgattagaaatataattccttactgaaccatgagctttataggcatatgaatttttagctatgtgaagtagaaaacttaaattccggtagacat

SEQ ID NO: 334403 - DNA, 120 bp, Artificial Sequence
  ENSG00000137145_58 (sequence is synthesized)
tttcacatacatttaaagacagattgtcttagtccaaaattatttttgtttttttccagaaatttagaaagtgttctgcaactataaatgaactgtgggtcaatcatgtttagtttaaga

SEQ ID NO: 334404 - DNA, 120 bp, Artificial Sequence
  ENSG00000137145_59 (sequence is synthesized)
tgtctctaaagacaacctgactcatataggcataagttctggcatttaagagtacatcttaacttattaccacatagtgtttaacgagctaatgaatgaatctgatgataaaccattttt

SEQ ID NO: 334405 - DNA, 120 bp, Artificial Sequence
  ENSG00000137145_60 (sequence is synthesized)
gaactaagtttaatattttacagttgtcttttacaaaatgaacttctcaacagtaaaatatttcccttttaatatagtcattgccagtttccagaggcgaaatgttctctttctgtgaaa

SEQ ID NO: 334406 - DNA, 120 bp, Artificial Sequence
  ENSG00000137145_61 (sequence is synthesized)
tgtacacttggcccttaaatactaattgaatcaaacatttattgagactctattgtatgctaaatattatgctaagctctaaaaataaaaaagtaaatatgactgggtctctctccttag

SEQ ID NO: 334407 - DNA, 120 bp, Artificial Sequence
  ENSG00000137145_62 (sequence is synthesized)
gtggatcgtggcctagtagagattaaatacttgtcagtgtctttattgtacttatttgcatatagcatacttctaggtaattttgtttaataaagatgaaataatatttgagtaaagcaa

SEQ ID NO: 334408 - DNA, 120 bp, Artificial Sequence
  ENSG00000137145_63 (sequence is synthesized)
agagatttaatcaggcttgagtccattgataatcactctagcacagacagacttatatgacgtgaagctatggatacacgtgtgcattaattctacccttgaatgttaaccacatcaggt

SEQ ID NO: 334409 - DNA, 120 bp, Artificial Sequence
  ENSG00000137145_64 (sequence is synthesized)
atattctaagtgtatatttattaaaatagattgcatgttgcaatacggttttctgaaaggggtctcattgactattaaataaatgactactactaaacttgtctgtagtcattaatctta

SEQ ID NO: 334410 - DNA, 120 bp, Artificial Sequence
  ENSG00000137145_65 (sequence is synthesized)
aaattacctgaaaatctgatgacagctgccttccctaactttaatgtattaggttggcacaaaattaattgtagtttttgccactattaatggcaaaaaccgcaattatttttgtaccaa

SEQ ID NO: 334411 - DNA, 120 bp, Artificial Sequence
  ENSG00000137145_66 (sequence is synthesized)
cataatacacctttcatattatgtattatcttgcttaatgggttttatcttgattatccagttacttccatcctcttcccaatgttaatttgcaatagttttaaaatgggaacaaatgaa

SEQ ID NO: 334412 - DNA, 120 bp, Artificial Sequence
  ENSG00000137145_67 (sequence is synthesized)
tcaatcatcagatagttaaaatgaaattaaatcagctgcctaataatttatggaattcattggaatgtgcttaaaatgctaaagtgtatgtcattgaacatgaaatcttttttcaggcac

SEQ ID NO: 334413 - DNA, 120 bp, Artificial Sequence
  ENSG00000137145_68 (sequence is synthesized)
atacattgttggtattgatgactttttaaaacctgtgggataaacttgcactgcacacggaagttttattcttgtatatttagatttgtatgcttgtgagtaaaaatgtgcatttgtaaa

SEQ ID NO: 334414 - DNA, 120 bp, Artificial Sequence
  ENSG00000137154_0 (sequence is synthesized)
ctcttttccgtggcgcctcggaggcgttcagctgcttcaagatgaagctgaacatctccttcccagccactggctgccagaaactcattgaagtggacgatgaacgcaaacttcgtactt

SEQ ID NO: 334415 - DNA, 120 bp, Artificial Sequence
  ENSG00000137154_1 (sequence is synthesized)
tctatgagaagcgtatggccacagaagttgctgctgacgctctgggtgaagaatggaagggttatgtggtccgaatcagtggtgggaacgacaaacaaggtttccccatgaagcagggtg

SEQ ID NO: 334416 - DNA, 120 bp, Artificial Sequence
  ENSG00000137154_2 (sequence is synthesized)
tcttgacccatggccgtgtccgcctgctactgagtaaggggcattcctgttacagaccaaggagaactggagaaagaaagagaaaatcagttcgtggttgcattgtggatgcaaatctga

SEQ ID NO: 334417 - DNA, 120 bp, Artificial Sequence
  ENSG00000137154_3 (sequence is synthesized)
gcgttctcaacttggttattgtaaaaaaaggagagaaggatattcctggactgactgatactacagtgcctcgccgcctgggccccaaaagagctagcagaatccgcaaacttttcaatc

SEQ ID NO: 334418 - DNA, 120 bp, Artificial Sequence
  ENSG00000137154_4 (sequence is synthesized)
tctctaaagaagatgatgtccgccagtatgttgtaagaaagcccttaaataaagaaggtaagaaacctaggaccaaagcacccaagattcagcgtcttgttactccacgtgtcctgcagc

SEQ ID NO: 334419 - DNA, 120 bp, Artificial Sequence
  ENSG00000137154_5 (sequence is synthesized)
agaagaggctgcagaatatgctaaacttttggccaagagaatgaaggaggctaaggagaagcgccaggaacaaattgcgaagagacgcagactttcctctctgcgagcttctacttctaa

SEQ ID NO: 334420 - DNA, 120 bp, Artificial Sequence
  ENSG00000137154_6 (sequence is synthesized)
gtctgaatccagtcagaaataagattttttgagtaacaaataaataagatcagactctgatctctgttgacttttcattgctgatagaaaactacataaatgaagagagggaaagttagg

SEQ ID NO: 334421 - DNA, 120 bp, Artificial Sequence
  ENSG00000137154_7 (sequence is synthesized)
tcatagaaaatggggatatgtatatatggtattccaatggtggataaagtcagacctattgtgtgtggtagtggaagacaaggtcagtgtacaggggttcctttcaggggatgggtggca

SEQ ID NO: 334422 - DNA, 120 bp, Artificial Sequence
  ENSG00000137154_8 (sequence is synthesized)
caggaagggattctgagcataagacacctgcctcttcagaatggcatggaacttaggggaaatgatgaggactattaatcttttttatatagtttatttttgaggaatatagctctttaa

SEQ ID NO: 334423 - DNA, 120 bp, Artificial Sequence
  ENSG00000137154_9 (sequence is synthesized)
agcactatacacaatttaatacatgaaaattgaccttgtgaagatgaacatgtcttttttaaaaggtaacttttaaggcatagttttagtggatacctagttttagtggataccatccac

SEQ ID NO: 334424 - DNA, 120 bp, Artificial Sequence
  ENSG00000137154_10 (sequence is synthesized)
taaatggtttttaagccatttcaaatttgttttaacaaagcttttcaactccagtgaattgttaggctgttcacacactgaaaaggaaatgactaaaaacattcttggatcagtgaaaaa

SEQ ID NO: 334425 - DNA, 120 bp, Artificial Sequence
  ENSG00000137154_11 (sequence is synthesized)
tctatgagaagcgtatggccacagaagttgctgctgacgctctgggtgaagaatggaaggtaaaagttgacaaattgttgcaggtatttaagtcagagacggtaaacgccattggtaact

SEQ ID NO: 334426 - DNA, 120 bp, Artificial Sequence
  ENSG00000137154_12 (sequence is synthesized)
ggtatttggaatggggttcagactccgggttctggcttctgacctttggtaagttgcttccgaatgccactttataaagttagaggtattaccttggagggggggacgtagagtaagcca

SEQ ID NO: 334427 - DNA, 120 bp, Artificial Sequence
  ENSG00000137154_13 (sequence is synthesized)
ttggcaatatgtcacatagctgtcctcataatccccaaagtgccaaaaagggttgtatctgatttgtttgttgctgtttgatattttatcttcttagtgctgttatctctaataaaacat

SEQ ID NO: 334428 - DNA, 120 bp, Artificial Sequence
  ENSG00000137154_14 (sequence is synthesized)
cggttagaaatgcgacttgaaagacatttgataattgaacttgacaagttgggaatatagacaaaactcactgaacagagaaaacgtgcttaagttcaaattggttttcataattatact

SEQ ID NO: 334429 - DNA, 120 bp, Artificial Sequence
  ENSG00000137154_15 (sequence is synthesized)
ttctcatataggtgtgttcacagaggtcacaatcctgtactgtataattttggaatagaaatagtaaatgtgtcattcattgtatgctcttgcagggttatgtggtccgaatcagtggtg

SEQ ID NO: 334430 - DNA, 120 bp, Artificial Sequence
  ENSG00000137154_16 (sequence is synthesized)
ttaaccaatcttctagatttctgtggaggggcaaaaagcattttagaatagttctgatttgattttaaaggcctcattataggttttcatagatgctgttaagcttacgtttatttctga

SEQ ID NO: 334431 - DNA, 120 bp, Artificial Sequence
  ENSG00000137154_17 (sequence is synthesized)
tgtttttaaagtagatgtggattctaacaaaacaaatattgaaatgattgagtcctttgaatttttaggtaagaaacctaggaccaaagcacccaagattcagcgtcttgttactccacg

SEQ ID NO: 334432 - DNA, 120 bp, Artificial Sequence
  ENSG00000137154_18 (sequence is synthesized)
aagatgaaggtaggtgatggtggcgagtgttagactgggtttggggaacgtgaatcgagtcccagaacgcggcattgcctcagttccagcactccaggatcctggctttagctgaacatc

SEQ ID NO: 334433 - DNA, 120 bp, Artificial Sequence
  ENSG00000137154_19 (sequence is synthesized)
gctgcttcaagatgaaggtaggtgatggtggcgagtgttagactgggtttggggaacgtgaatcgagtcccagaacgcggcattgcctcagttccagcactccaggatcctggctttagg

SEQ ID NO: 334434 - DNA, 120 bp, Artificial Sequence
  ENSG00000137154_20 (sequence is synthesized)
tggagaagggtctcaagtaggagaaggctcgcctttctggggcatggagctttttggccgaacggatggcaggcgattgcggctggagccgcggcgggccgggagcgccatggtggcgtc

SEQ ID NO: 334435 - DNA, 120 bp, Artificial Sequence
  ENSG00000137154_21 (sequence is synthesized)
cccgcgcccagccgggacggatgcggcgtgttgcccagtttgcggcaggcctgtggtgcggctcttgaccccggctttcttgcttcgggagggtgaacggctgcggagtgccctcgcccc

SEQ ID NO: 334436 - DNA, 120 bp, Artificial Sequence
  ENSG00000137154_22 (sequence is synthesized)
cagagtcattccgcggggcttgaggggaaaacgtcctgctgagtgcggcgcttcttgactgctactctgctttcacgtgcttttagtgagtacagtcggcatcttatatttcctgcttgt

SEQ ID NO: 334437 - DNA, 120 bp, Artificial Sequence
  ENSG00000137154_23 (sequence is synthesized)
gtggaggcaacatgaaaggctttttgcagtggaattaactttgtagatggctctacaattacctgtatagatagtttcgtaaactatttccccccttttaatccttagctgaacatctcc

SEQ ID NO: 334438 - DNA, 120 bp, Artificial Sequence
  ENSG00000137161_0 (sequence is synthesized)
gcagtcccggaagcggcgaggggaaactgctccgcgcgcgccgcgggaggaggaaccgcccggtcctttagggtccgggcccggccgggccatggattcaatgcctgagcccgcgtcccg

SEQ ID NO: 334439 - DNA, 120 bp, Artificial Sequence
  ENSG00000137161_1 (sequence is synthesized)
ctgtcttctgcttcttcccttgctgctgctgctgctgctgctgctgccggccccggagctgggcccgagccaggccggagctgaggagaacgactgggttcgcctgcccagcaaatgcga

SEQ ID NO: 334440 - DNA, 120 bp, Artificial Sequence
  ENSG00000137161_2 (sequence is synthesized)
agtgtgtaaatatgttgctgtggagctgaagtcagcctttgaggaaaccggcaagaccaaggaggtgattggcacgggctatggcatcctggaccagaaggcctctggagtcaaatacac

SEQ ID NO: 334441 - DNA, 120 bp, Artificial Sequence
  ENSG00000137161_3 (sequence is synthesized)
caagtcggacttgcggttaatcgaagtcactgagaccatttgcaagaggctcctggattatagcctgcacaaggagaggaccggcagcaatcgatttgccaagggcatgtcagagacctt

SEQ ID NO: 334442 - DNA, 120 bp, Artificial Sequence
  ENSG00000137161_4 (sequence is synthesized)
tgagacattacacaacctggtacacaaaggggtcaaggtggtgatggacatcccctatgagctgtggaacgagacttctgcagaggtggctgacctcaagaagcagtgtgatgtgctggt

SEQ ID NO: 334443 - DNA, 120 bp, Artificial Sequence
  ENSG00000137161_5 (sequence is synthesized)
ggcagagcagtggtccggcaagaagggagacacagctgccctgggagggaagaagtccaagaagaagagcagcagggccaaggcagcaggcggcaggagtagcagcagcaaacaaaggaa

SEQ ID NO: 334444 - DNA, 120 bp, Artificial Sequence
  ENSG00000137161_6 (sequence is synthesized)
ggagctgggtggccttgagggagaccccagccccgaggaggatgagggcatccagaaggcatcccctctcacacacagcccccctgatgagctctgagcccacccagcatcctctgtcct

SEQ ID NO: 334445 - DNA, 120 bp, Artificial Sequence
  ENSG00000137161_7 (sequence is synthesized)
gagacccctgattttgaagctgaggagtcaggggcatggctctggcaggccgggatggccccgcagccttcagcccctccttgccttggctgtgccctcttctgccaaggaaagacacaa

SEQ ID NO: 334446 - DNA, 120 bp, Artificial Sequence
  ENSG00000137161_8 (sequence is synthesized)
gccccaggaagaactcagagccgtcatgggtagcccacgccgtcctttcccctccccaagtgtttctctcctgacccagggttcaggcaggccttgtggtttcaggactgcaaggactcc

SEQ ID NO: 334447 - DNA, 120 bp, Artificial Sequence
  ENSG00000137161_9 (sequence is synthesized)
agtgtgaactcaggaggggcaggtgtcagaactgggcaccaggactggagccccctccggagaccaaactcaccatccctcagtcctccccaacagggtactaggactgcagccccctgt

SEQ ID NO: 334448 - DNA, 120 bp, Artificial Sequence
  ENSG00000137161_10 (sequence is synthesized)
agctcctctctgcttacccctcctgtggacaccttgcactctgcctggcccttcccagagcccaaagagtaaaaatgttctggttctgatttctgagtcctctgcagccctcagaggtgc

SEQ ID NO: 334449 - DNA, 120 bp, Artificial Sequence
  ENSG00000137161_11 (sequence is synthesized)
gcccagacgcaggcttcttctcgggtcttggtcctgcatcctctctctcccagagcctccgttagggggtgggaaaggactttgccataggtcgctgaggccaccatctgctctcttact

SEQ ID NO: 334450 - DNA, 120 bp, Artificial Sequence
  ENSG00000137161_12 (sequence is synthesized)
ggccaagggcgtaaaaagatagtcttcccattagctagagagcaaaccccagaaagcctattggctgcgccgtccgcgggccttggtccgctttgaaggcgggctgcggctgcgagagga

SEQ ID NO: 334451 - DNA, 120 bp, Artificial Sequence
  ENSG00000137166_0 (sequence is synthesized)
cagggctgggccgggggcggggacgccggggtccgggagcccgggagccggagcgagctgacgagcgtcgcggaaggaccgggaaggaagagcggagccggagcgagccaagcagcccac

SEQ ID NO: 334452 - DNA, 120 bp, Artificial Sequence
  ENSG00000137166_1 (sequence is synthesized)
gggaaggaagagcggagccggagcgagccaagcagcccacaaagtgccatgccccggcggggttgaggcgcgcggcggtcggcccggcgcgctgggaggacgcccgggagctgcgcgacg

SEQ ID NO: 334453 - DNA, 120 bp, Artificial Sequence
  ENSG00000137166_2 (sequence is synthesized)
gcccgggctgcgaccggagcgagccccatgccccgcgcgggctgacgggccggagcccgcacggagcggccgggcgggacaggtaccgctagagcgacatgatggtggaatctgcctcgg

SEQ ID NO: 334454 - DNA, 120 bp, Artificial Sequence
  ENSG00000137166_3 (sequence is synthesized)
agacaatcaggtcggctccatctggtcagaatggcgtgggcagcctctctgggcaagccgatggcagcagcggcggggccacagggacaactgcaagtggcacgggcagggaagtgacca

SEQ ID NO: 334455 - DNA, 120 bp, Artificial Sequence
  ENSG00000137166_4 (sequence is synthesized)
cgggtgcagacagcaatggtgagatgagtcccgcagagctgctgcacttccagcagcaacaggctctccaagtggcccggcagttcctgctgcagcaggcctcaggcctgagctccccag

SEQ ID NO: 334456 - DNA, 120 bp, Artificial Sequence
  ENSG00000137166_5 (sequence is synthesized)
ggaacaatgacagcaaacagtctgcctctgctgtgcaggtgcctgtgtcggtggccatgatgtcgccgcagatgcttaccccgcaacagatgcagcagatcctgtcgcccccgcagctgc

SEQ ID NO: 334457 - DNA, 120 bp, Artificial Sequence
  ENSG00000137166_6 (sequence is synthesized)
aggccttgctccagcagcagcaagccctcatgctccagcagctacaggagtactacaagaagcagcaggagcagctccacctgcagctcctcacccagcagcaggctgggaaaccgcagc

SEQ ID NO: 334458 - DNA, 120 bp, Artificial Sequence
  ENSG00000137166_7 (sequence is synthesized)
ccaaagaggcactggggaacaagcagctggccttccagcagcagctcctgcaaatgcaacagttgcagcagcagcacctgctcaacctgcagaggcaggggctggtcagcctgcagccca

SEQ ID NO: 334459 - DNA, 120 bp, Artificial Sequence
  ENSG00000137166_8 (sequence is synthesized)
accaagcctcggggcccctccagacccttccgcaagctgtttgcccaacagacctgccccagctgtggaagggcgagggtgcccccgggcagcctgccgaggacagcgtcaagcaggagg

SEQ ID NO: 334460 - DNA, 120 bp, Artificial Sequence
  ENSG00000137166_9 (sequence is synthesized)
ggctggacctcactggcacggccgccaccgctacctcgtttgccgctccccccaaggtctcaccccccctctcccaccataccctgcccaacggacagcctactgtgctcacatctcgga

SEQ ID NO: 334461 - DNA, 120 bp, Artificial Sequence
  ENSG00000137166_10 (sequence is synthesized)
gagacagctcttcccacgaggagacccccggctcccaccccctgtacggacacggagagtgcaagtggccaggctgtgagaccctgtgtgaagacctgggccagtttatcaaacacctca

SEQ ID NO: 334462 - DNA, 120 bp, Artificial Sequence
  ENSG00000137166_11 (sequence is synthesized)
acacagagcacgccctggatgaccggagtacagcccagtgccgggtacagatgcaggtggtgcagcagctggagatccagctcgccaaggagagcgagcggctgcaggccatgatggccc

SEQ ID NO: 334463 - DNA, 120 bp, Artificial Sequence
  ENSG00000137166_12 (sequence is synthesized)
acctgcacatgcggccctcggagcccaagcccttcagccagccagtgaccgtctctgcagcagactcattcccagatggtctcgtgcaccccccgacctcggccgcagcccctgtcaccc

SEQ ID NO: 334464 - DNA, 120 bp, Artificial Sequence
  ENSG00000137166_13 (sequence is synthesized)
ctctacggccccctggcctgggctctgcctccctgcatggtgggggcccagcccgtcggagaagcagtgacaagttctgctcccccatctcctcagagctggcccagaatcatgagttct

SEQ ID NO: 334465 - DNA, 120 bp, Artificial Sequence
  ENSG00000137166_14 (sequence is synthesized)
acaagaacgccgacgtccggccccccttcacctacgcctccctcatccgccaggccatcctggaaacccctgacaggcagctgaccctgaatgagatctataactggttcaccaggatgt

SEQ ID NO: 334466 - DNA, 120 bp, Artificial Sequence
  ENSG00000137166_15 (sequence is synthesized)
tcgcctatttccgcagaaacactgccacctggaagaacgccgtgcgccacaacctcagcctgcacaagtgcttcgtccgcgtggagaacgtcaagggtgccgtgtggactgtggacgagc

SEQ ID NO: 334467 - DNA, 120 bp, Artificial Sequence
  ENSG00000137166_16 (sequence is synthesized)
gggagtatcagaagcggagaccgccaaagatgacagggagccccaccctggtgaagaacatgatctctggcctcagctatggagcacttaatgccagctaccaggccgccctggccgaga

SEQ ID NO: 334468 - DNA, 120 bp, Artificial Sequence
  ENSG00000137166_17 (sequence is synthesized)
gcagcttccccctcctcaacagccctggcatgctgaaccctggctccgccagcagcctgctgcccctcagccacgatgacgtgggtgcccccgtggagccgctgcccagcaacggcagca

SEQ ID NO: 334469 - DNA, 120 bp, Artificial Sequence
  ENSG00000137166_18 (sequence is synthesized)
gcagccctcctcgcctctccccgccccagtacagccaccaggtgcaggtgaaggaggagccagcagaggcagaggaagacaggcagcccgggcctcccctgggcgcccctaaccccagcg

SEQ ID NO: 334470 - DNA, 120 bp, Artificial Sequence
  ENSG00000137166_19 (sequence is synthesized)
cctcggggcctccggaagacagggacctggaggaggagctgccgggagaagaactgtcctaagggcctgtagtgaccggcagggctggggtgagacccctcccttccagaatccaggccc

SEQ ID NO: 334471 - DNA, 120 bp, Artificial Sequence
  ENSG00000137166_20 (sequence is synthesized)
catctcccccaactccacagcccctcccgagcctcaaggcaagtccaggactcagaccggggaggcccgggccagcagctcccagtgtgacctgacaaaaacacgtaggggcagggacgg

SEQ ID NO: 334472 - DNA, 120 bp, Artificial Sequence
  ENSG00000137166_21 (sequence is synthesized)
tccccacccccagggacacaacccctggtcttggaccagtagaggacacggagggttcagacccctcctcagaccctccccacatctgaaactgcctccccccaaccaccagcagcagca

SEQ ID NO: 334473 - DNA, 120 bp, Artificial Sequence
  ENSG00000137166_22 (sequence is synthesized)
gggccctcctcccccaccagctctccccacagggcccctcagcatcatggagacccgcaggcggggcttagccacccctcaaacccagggccccctggcacctggctctggccgtgtttt

SEQ ID NO: 334474 - DNA, 120 bp, Artificial Sequence
  ENSG00000137166_23 (sequence is synthesized)
tgctcccttccgccttcttttccgtactgtgaagaaagaactctccaccccagctcccaccctgccctggcctgggtggaggaactgtgcctccatccccagaagaaacagccccctctg

SEQ ID NO: 334475 - DNA, 120 bp, Artificial Sequence
  ENSG00000137166_24 (sequence is synthesized)
ctgctggggtgggactgtctgtgtgccctgtgggggtccgtgtgagcaggcccacctggctccagacccgcccccaacctgagacagaaccaggctgagccaggcctccacccccacccc

SEQ ID NO: 334476 - DNA, 120 bp, Artificial Sequence
  ENSG00000137166_25 (sequence is synthesized)
cgtttgctgggggctcctccagccgcccccatgggaagaggcctggtaccgcctcacccacagaggtctgtgccaggtgcgcttctgcaggtggagccaagctctccctgaggccagagg

SEQ ID NO: 334477 - DNA, 120 bp, Artificial Sequence
  ENSG00000137166_26 (sequence is synthesized)
cggggcctgggccgggagcccaggggaaggccaggctggaccccggctccacacccacatccagcctgcaggcctctctgcagtcctctcaccctccctcagctccccttcctctgcagt

SEQ ID NO: 334478 - DNA, 120 bp, Artificial Sequence
  ENSG00000137166_27 (sequence is synthesized)
caccctcagctccccttccttgcccgcctctccccccgccgccccaccagttaaacggatgaccaaagacctttcttatgccggaagcaaaaaccaaaactttttgttggctttttcctt

SEQ ID NO: 334479 - DNA, 120 bp, Artificial Sequence
  ENSG00000137166_28 (sequence is synthesized)
tgtcgcctccccagcacctgccctcccagtctcccaccccggccccaggctggaagccctccctccacttaagttattgttttaaaccaaagtttacagtgtctgttggtggccaagacc

SEQ ID NO: 334480 - DNA, 120 bp, Artificial Sequence
  ENSG00000137166_29 (sequence is synthesized)
ttctctctccacccctcctccatccaccctgaggaccctggggctcagtggaggcagggccctgcccccctcccttccgctcctgcccagcctgggggaaggagaaaggaggggagaaag

SEQ ID NO: 334481 - DNA, 120 bp, Artificial Sequence
  ENSG00000137166_30 (sequence is synthesized)
cgggctctcaccccctcaggagtgggcacgggagcccttctccctgaccctgggctgcttcctgggggctctccagacccctctctaggaccaagtcacccgtcgtgctgggagtgtgga

SEQ ID NO: 334482 - DNA, 120 bp, Artificial Sequence
  ENSG00000137166_31 (sequence is synthesized)
ttctagcaaaagagctggaaaaaagtcagactctccacagaccccctatgggggacccccaactcaaggccaaggactgggcgtatcggatgctcataacacccctggcctggccccttt

SEQ ID NO: 334483 - DNA, 120 bp, Artificial Sequence
  ENSG00000137166_32 (sequence is synthesized)
actgagaagactccttggatatttcccaagaaccccccacatacacccctcacaagccacccctcctgagaggcagggggccctccgccccctccccatgtattccccacctgtgttccg

SEQ ID NO: 334484 - DNA, 120 bp, Artificial Sequence
  ENSG00000137166_33 (sequence is synthesized)
tttgaccagcacagaaatattaaacgtcctctattcaccgggccctgtgtgtgtcaccgaggtgcgggaggggaggagcattaaagctgaaagatcgctctgctcggggagcctgggcag

SEQ ID NO: 334485 - DNA, 120 bp, Artificial Sequence
  ENSG00000137166_34 (sequence is synthesized)
agcagcagcaacgtgagggtcgctgtggtggtggtttctgtgagtggatggaatgagcagccctgcaggggcgctgggcatgtgccctcactgtggacagggcccacccacctccggttc

SEQ ID NO: 334486 - DNA, 120 bp, Artificial Sequence
  ENSG00000137166_35 (sequence is synthesized)
ccctgtgcctcctgtcccttccacgcttaaacagggttctctgtcattttcctgttttcttccagagtcccaatcctttgccctagttctttcactagtttgaaatccaagttcttgcca

SEQ ID NO: 334487 - DNA, 120 bp, Artificial Sequence
  ENSG00000137166_36 (sequence is synthesized)
gagtgttggagcaaggcagctgatttgctgcagggatggagaggaccaccgccgcagggttcttttacctgtgccaccagctctggagacatccacacccattcccaggtgtccttccag

SEQ ID NO: 334488 - DNA, 120 bp, Artificial Sequence
  ENSG00000137166_37 (sequence is synthesized)
gcccattgtccacgtcttcaagggggctgcctggataggcgtgtgtgtgtgtagtgcccaggtgtggtggtggcatcctgaagcagtaggaccattagtgtgcgtgcacacccacgtggc

SEQ ID NO: 334489 - DNA, 120 bp, Artificial Sequence
  ENSG00000137166_38 (sequence is synthesized)
acactgtgtggtgaccatggtcatcatagtgggctcacggcggaaacgggatcattcaacctatacaaaggggaccctggataggctgcaaggaaagaggccaagggccaagctgctaag

SEQ ID NO: 334490 - DNA, 120 bp, Artificial Sequence
  ENSG00000137166_39 (sequence is synthesized)
ccaaagatggcccctgacacctcccccagccccagcacaccagcctgcacctcttatcccgtgttaagtcctggttccccacctgctgcccctcctcaacacagagcccctcccgccgcc

SEQ ID NO: 334491 - DNA, 120 bp, Artificial Sequence
  ENSG00000137166_40 (sequence is synthesized)
tcagacccctgtgcacatccccagggcctcagccgtctcattggtctttattttttattttttttaagatggagtttcgctcttattgcccagactggagtgcagtgatgctatctcggc

SEQ ID NO: 334492 - DNA, 120 bp, Artificial Sequence
  ENSG00000137166_41 (sequence is synthesized)
cttacgccaccttctggacactccctccttgagggcagaaaggagtcccaggcctgtccctagggacaaggcccagggaagagtgtatttggggagcaggggaggggagggtgttgagaa

SEQ ID NO: 334493 - DNA, 120 bp, Artificial Sequence
  ENSG00000137166_42 (sequence is synthesized)
agctgaactggagtcaatcacccttcccacaaatcaccaaactgctggaactctccagccaaatgctgggagaaggacctggagggtgagtctttgctgacctctctctactctcaggca

SEQ ID NO: 334494 - DNA, 120 bp, Artificial Sequence
  ENSG00000137166_43 (sequence is synthesized)
tgtcttttgtccttttcgtccatctatttctgtctgtcgctcactcgccccgctttctctgtctcaccttcatccactctgcaggcctgctccaccacagccctaatcctctggacgctt

SEQ ID NO: 334495 - DNA, 120 bp, Artificial Sequence
  ENSG00000137166_44 (sequence is synthesized)
gtgtagggcctggggtgaattccctgtcccccatggtacctcgagaggggctggggagctcagcttggtctcagagtctccccaccagatactgtttaaaaaagtagcactgatgtgttt

SEQ ID NO: 334496 - DNA, 120 bp, Artificial Sequence
  ENSG00000137166_45 (sequence is synthesized)
tgtaatctgcccctcccagccctccgtggaggctgccagggccttgtacggtaaacctagctgcatgtaatctgtggacaatggcattctctacaatgcaataaaaacaattacccatga

SEQ ID NO: 334497 - DNA, 120 bp, Artificial Sequence
  ENSG00000137166_46 (sequence is synthesized)
ctggctgtgtgccccagattctactgtttcctgtctgatcccacaccttctgcattctcctttttcttctggagaatgagcccctcccgtggaggagccatggcatggagggagagttgg

SEQ ID NO: 334498 - DNA, 120 bp, Artificial Sequence
  ENSG00000137166_47 (sequence is synthesized)
actctccagaggggaggcttacggacatcacaccagttcataccagctgctggggaatgctcagaaactgccctttcctccttggcctgacacagctctccaagtggcccggcagttcct

SEQ ID NO: 334499 - DNA, 120 bp, Artificial Sequence
  ENSG00000137166_48 (sequence is synthesized)
tgcgtgcgtgcgtgcatgcgtgtgtttactgcgaggaggcatgcagccttatggaagctgggccgggagcagagacactgcagctgcagacgccacaacgacagctccaggggctgacag

SEQ ID NO: 334500 - DNA, 120 bp, Artificial Sequence
  ENSG00000137168_0 (sequence is synthesized)
actagacaagcattccgccgccggcttcgctatggcggcaattcccccagattcctggcagccacccaacgtttacttggagaccagcatgggaatcattgtgctggagctgtactggaa

SEQ ID NO: 334501 - DNA, 120 bp, Artificial Sequence
  ENSG00000137168_1 (sequence is synthesized)
gcatgctccaaagacctgtaagaactttgctgagttggctcgtcgaggttactacaatggcacaaaattccacagaattatcaaagacttcatgatccaaggaggtgacccaacagggac

SEQ ID NO: 334502 - DNA, 120 bp, Artificial Sequence
  ENSG00000137168_2 (sequence is synthesized)
aggtcgaggtggtgcatctatctatggcaaacagtttgaagatgaacttcatccagacttgaaattcacgggggctggaattctcgcaatggccaatgcggggccagataccaatggcag

SEQ ID NO: 334503 - DNA, 120 bp, Artificial Sequence
  ENSG00000137168_3 (sequence is synthesized)
ccagttctttgtgaccctcgcccccacccagtggcttgacggcaaacacaccatttttggccgagtgtgtcagggcataggaatggtgaatcgcgtgggaatggtagaaacaaactccca

SEQ ID NO: 334504 - DNA, 120 bp, Artificial Sequence
  ENSG00000137168_4 (sequence is synthesized)
ggaccgccctgtggacgacgtgaagatcattaaggcatacccttctgggtagacttgctaccctcttgagcagctcttctgagatggccccagtgaaccagcttctagatgacatagaat

SEQ ID NO: 334505 - DNA, 120 bp, Artificial Sequence
  ENSG00000137168_5 (sequence is synthesized)
gacatgtaatgctaaattcattttggctttgcaagtcatgaagcttaggaggcctggcatcttgggtgagttagagatggaagtacattttaataggatgcttcttttctcttcccccag

SEQ ID NO: 334506 - DNA, 120 bp, Artificial Sequence
  ENSG00000137168_6 (sequence is synthesized)
tgctgcttcttgtgcatgtctgctctgatatacgtcgaacaatgtagcagccactgtcatttctcagtggttttgcctaaccaaacttcttcctaaggagatttatattctggcctacac

SEQ ID NO: 334507 - DNA, 120 bp, Artificial Sequence
  ENSG00000137168_7 (sequence is synthesized)
agcagtccttgatggctgacagccacagaattccaaaccaagtagtgtctgtcagccctcttaactctgtgcacgccctatttcagtcttttacatttgttcttctagggaatgtatgca

SEQ ID NO: 334508 - DNA, 120 bp, Artificial Sequence
  ENSG00000137168_8 (sequence is synthesized)
tctctatatatattttccctctcaaaaccagaacatcaacagtgctgtttctgacacttcagacatcccacgcaaagccacattgaatttttgccaaatgaaaaacacatccaacaatca

SEQ ID NO: 334509 - DNA, 120 bp, Artificial Sequence
  ENSG00000137168_9 (sequence is synthesized)
agtttctaagaaggtgtcaagtggggaataataataatgtataataatcaagaaattagtttattaaaaggaagcagaagcattgaccattttttcccagagaagaggagaaatctgtag

SEQ ID NO: 334510 - DNA, 120 bp, Artificial Sequence
  ENSG00000137168_10 (sequence is synthesized)
tgagcaaaggacagaccatgaatcctccttgagaagtagtactctcagaaaggagaagcgccactcaagttcttttaacccaagactttagagaaattaggtccaagatttttatatgtt

SEQ ID NO: 334511 - DNA, 120 bp, Artificial Sequence
  ENSG00000137168_11 (sequence is synthesized)
cagttgtttatgtataaaaataactttctggattttgtggggaggagcaggagaggaaggaagttaatacctatgtaatacatagaaacttccacaataaaatgccattgatggttgaaa

SEQ ID NO: 334512 - DNA, 120 bp, Artificial Sequence
  ENSG00000137171_0 (sequence is synthesized)
atggatttaaaggggcagtaccggcaagagcggcagccacaccggcagattgcagaccgggcaaggtcccccaggccaggatgtcaggcctggtgttggggcagcgggatgagcctgcag

SEQ ID NO: 334513 - DNA, 120 bp, Artificial Sequence
  ENSG00000137171_1 (sequence is synthesized)
gccaccggctcagccaagaggagatcctggggagcacacggctggtcagccaagggctagaggccctacgcagtgaacaccaggccgtgctgcaaagcctgtcccagaccattgagtgtc

SEQ ID NO: 334514 - DNA, 120 bp, Artificial Sequence
  ENSG00000137171_2 (sequence is synthesized)
tgcagcagggaggccatgaggaagggctggtgcatgagaaggcccggcagcttcgccgttctatggaaaacattgagctcgggctgagtgaggcccaggtgatgctggctctagccagcc

SEQ ID NO: 334515 - DNA, 120 bp, Artificial Sequence
  ENSG00000137171_3 (sequence is synthesized)
acctgagcacagtggagtcggagaaacagaagctgcgggctcaggtgcggcggctatgccaggagaaccagtggctgcgggatgagctggctggcacccagcagcggctacagcgcagtg

SEQ ID NO: 334516 - DNA, 120 bp, Artificial Sequence
  ENSG00000137171_4 (sequence is synthesized)
aacaggctgtggctcagctggaggaggaaaagaagcacctggagttcctggggcagctgcggcagtatgatgaggatggacatacctcggaggagaaagaaggcgatgccaccaaggatt

SEQ ID NO: 334517 - DNA, 120 bp, Artificial Sequence
  ENSG00000137171_5 (sequence is synthesized)
ccctggatgacctctttcctaatgaggaggaagaggaccccagcaatggcttgtcccgtggtcaaggtgctacagcagctcagcagggtggatatgagatcccagcaaggttgcggacgt

SEQ ID NO: 334518 - DNA, 120 bp, Artificial Sequence
  ENSG00000137171_6 (sequence is synthesized)
tgcacaacctggtgatccagtacgcagcccaaggtcgctatgaggtggccgtgccactctgtaagcaggcactagaggacctggagcgcacatcaggccgtggccaccctgatgtcgcca

SEQ ID NO: 334519 - DNA, 120 bp, Artificial Sequence
  ENSG00000137171_7 (sequence is synthesized)
ccatgctcaacatccttgctttggtgtatcgtgaccagaataagtataaggaagctgcccacctgctgaatgatgcccttagcatccgggagagcaccttgggacctgaccatcctgctg

SEQ ID NO: 334520 - DNA, 120 bp, Artificial Sequence
  ENSG00000137171_8 (sequence is synthesized)
tggctgccacactcaacaatttggctgtgctctatggcaaaaggggcaagtacaaggaggcagagcctctgtgccagcgggcactggagattcgagaaaaggtcctgggcacgaatcatc

SEQ ID NO: 334521 - DNA, 120 bp, Artificial Sequence
  ENSG00000137171_9 (sequence is synthesized)
agcgagcactggccatctacgaggggcagctggggccggacaaccctaatgtagcccggaccaagaacaacctggcttcctgttacctgaaacagggcaaatatgctgaggctgagacac

SEQ ID NO: 334522 - DNA, 120 bp, Artificial Sequence
  ENSG00000137171_10 (sequence is synthesized)
tatacaaagagatcctgacccgtgcccatgtacaggagtttgggtctgtggatgatgaccacaagcccatctggatgcatgcagaggagcgggaggaaatgagcaaaagccggcaccatg

SEQ ID NO: 334523 - DNA, 120 bp, Artificial Sequence
  ENSG00000137171_11 (sequence is synthesized)
agggtgggacaccctatgctgagtatggaggctggtacaaggcctgcaaagtgagcagccccacagtgaacactactctgagaaacctgggagctctgtataggcgccagggaaagctgg

SEQ ID NO: 334524 - DNA, 120 bp, Artificial Sequence
  ENSG00000137171_12 (sequence is synthesized)
aggctgctgagaccctggaggaatgtgccctgcggtcccggagacagggcactgaccctatcagccagacgaaggtggcagagctgcttggggagagtgatggtagaaggacctcccagg

SEQ ID NO: 334525 - DNA, 120 bp, Artificial Sequence
  ENSG00000137171_13 (sequence is synthesized)
agggccctggagacagtgtgaaattcgagggaggtgaagatgcttctgtggctgtggagtggtccggggatggcagtgggaccctgcagaggagtggctctcttggcaagatccgggatg

SEQ ID NO: 334526 - DNA, 120 bp, Artificial Sequence
  ENSG00000137171_14 (sequence is synthesized)
tgctccgcagaagcagtgaactcttggtgaggaagctccaggggactgagcctcggccctccagcagcaacatgaagcgagcagcctccttgaactatctgaaccaacctagtgcagcac

SEQ ID NO: 334527 - DNA, 120 bp, Artificial Sequence
  ENSG00000137171_15 (sequence is synthesized)
ccctccaggtctcccggggcctcagtgccagcaccatggacctctcttcaagcagctgacattcaacccggcccccaggtctgctgggtccccccacccccacagccctcacagcattcc

SEQ ID NO: 334528 - DNA, 120 bp, Artificial Sequence
  ENSG00000137171_16 (sequence is synthesized)
ccattgctcctggctcttccccacccctaggtgggacagtgaaggggagcagtttaaccagaagattgctgctgcccttagggtctcagctccctcctcaggaatccctcttaggaagga

SEQ ID NO: 334529 - DNA, 120 bp, Artificial Sequence
  ENSG00000137171_17 (sequence is synthesized)
ccctcaggacaccctctctgcaccctgtggtcctctagagtagctagctctgaggccccaaggtgggtacaaagcaggtatggccctcagagatgcagcctgctgctggcttttcagtca

SEQ ID NO: 334530 - DNA, 120 bp, Artificial Sequence
  ENSG00000137171_18 (sequence is synthesized)
gagggttgggggctggccagccaagctgccttgccctggccgctcttactccctccctctgctgtctcacttcaggtccatgtatttcacttttcttaaataaaagaatcaggtaacctt

SEQ ID NO: 334531 - DNA, 120 bp, Artificial Sequence
  ENSG00000137171_19 (sequence is synthesized)
agtgacctcggggtcgttaggcctccacgtcctcgctggagctgcggacctcagtcgtccatccacacctcccccctgccgcccccgcccatctcactctcccaaccctgggcaccaggg

SEQ ID NO: 334532 - DNA, 120 bp, Artificial Sequence
  ENSG00000137171_20 (sequence is synthesized)
caggtcgacagcccgaggcactcctctactgcgtttccaggcccaggagacccactccagcgccgcggttccttgcgacccggcagccgttcagcagacctcccattctttcctgcatca

SEQ ID NO: 334533 - DNA, 120 bp, Artificial Sequence
  ENSG00000137171_21 (sequence is synthesized)
tcgggcattgtggaggcaccctacggtgattcctctcagagcctgtttgtaggtgaccgtgacagagacaaaaccatggaagtgactgggtttggagtgaccaggtgttcctccctcccc

SEQ ID NO: 334534 - DNA, 120 bp, Artificial Sequence
  ENSG00000137171_22 (sequence is synthesized)
tttcccagacacgcctcttgctggcagatcctctgactctctggctgcagaacagtttcttccgtgctctggcctgagtgccacagccagggcctctgctctgtacacagaccgggcaag

SEQ ID NO: 334535 - DNA, 120 bp, Artificial Sequence
  ENSG00000137171_23 (sequence is synthesized)
ccatctgctgccctcagtccactcactaagggtgctgaggaaggaggcataagaagtcctttcttccaggcactgtccagtgatcctaatgattctcaattctctgagactcagtgactc

SEQ ID NO: 334536 - DNA, 120 bp, Artificial Sequence
  ENSG00000137171_24 (sequence is synthesized)
actcagtgactcctttttataacaaatattttgcttgaatttaattaatagataagtcataggtaaatccacatatgatttctacaaaacttaatatgctactctaataaatataaaaga

SEQ ID NO: 334537 - DNA, 120 bp, Artificial Sequence
  ENSG00000137171_25 (sequence is synthesized)
cttcataggtggctgccacactcaacaatttggctgtgctctatggcaaaaggggcaagtacaaggaggcagagcctctgtgccagcgggcactggagattcgagaaaaggtacccatgc

SEQ ID NO: 334538 - DNA, 120 bp, Artificial Sequence
  ENSG00000137171_26 (sequence is synthesized)
cctctctcccttcttctcttgtcgctgtgacccttctctacatggctcctctggtctaaccctcctccttcactttttttttctcacccccatctctgctttgttctctcttccttcatt

SEQ ID NO: 334539 - DNA, 120 bp, Artificial Sequence
  ENSG00000137171_27 (sequence is synthesized)
ccctttcctctgctttccacatgtgtgtgcctacatgcaaacacacgtgtgcttgtgcacacacatgttatcatagccatttatccactcctttgttccctttcaggtcctgggcacgaa

SEQ ID NO: 334540 - DNA, 120 bp, Artificial Sequence
  ENSG00000137171_28 (sequence is synthesized)
agcacctttgttcctactatagtcttcctttatttaagtcagttcatctccctctcgctttgcccacaaccttagctttgagtttagtgatctaagctccctgcctgctggtcactctct

SEQ ID NO: 334541 - DNA, 120 bp, Artificial Sequence
  ENSG00000137171_29 (sequence is synthesized)
ctctccagctaagccacagggtcactcttacttttgtcccttcacttggattcccaccactctctgagaaagttgctcagcttctctgtctcatctttacaccagctgaactctgttgtt

SEQ ID NO: 334542 - DNA, 120 bp, Artificial Sequence
  ENSG00000137171_30 (sequence is synthesized)
tgcggtcccggagacagtggctgatggtgaaaaaaatttgaaagccccatcctgaggagttaaggagtaggaagtcccaggtccttccttttccttccagggcactgaccctatcagcca

SEQ ID NO: 334543 - DNA, 120 bp, Artificial Sequence
  ENSG00000137171_31 (sequence is synthesized)
gacgggaattgggcgtctttgaagacctgtgggcagagggagggagggagggtgtttgtcctgggtggggctctgggccaggtcctctgggtagctgtgaagtggtgaaagaaggggtgg

SEQ ID NO: 334544 - DNA, 120 bp, Artificial Sequence
  ENSG00000137171_32 (sequence is synthesized)
atgagaaggaggggaagtcttgagattttgtccaaagcatctctggctgttacaaacaagaggcctgagcttggctgggccacttgctagcctttccaggggcagagacaggaacaacag

SEQ ID NO: 334545 - DNA, 120 bp, Artificial Sequence
  ENSG00000137171_33 (sequence is synthesized)
tcttctcctaggtcccatctgtctgtgatttcatggcttagaggggtcactgagaaggctactaggtagggatatcttggcccttatatgttgcttcttcccttccaggaggagaaagaa

SEQ ID NO: 334546 - DNA, 120 bp, Artificial Sequence
  ENSG00000137171_34 (sequence is synthesized)
gccactgtgcctggccctgattttactttgagcgagatggaaactattggaatgtttttagaagaggagtgatgtggtctaacttggcatcatcaggttgttgggttacaaatagacaat

SEQ ID NO: 334547 - DNA, 120 bp, Artificial Sequence
  ENSG00000137171_35 (sequence is synthesized)
aggggaacaagggcagaaacgaggccagtgaggaagttattgtaataatttgggtaggaattgatagtggcttggtccagggtgacagcagtggaggtagtgggaaattggattcagggt

SEQ ID NO: 334548 - DNA, 120 bp, Artificial Sequence
  ENSG00000137171_36 (sequence is synthesized)
atgttttgaaggtagcaccactgctacacccccaccttctggctcctctgtgcccctgccagtcttgccacgtcccagtaggctccccttccacctgttcctgaatactcccacccagaa

SEQ ID NO: 334549 - DNA, 120 bp, Artificial Sequence
  ENSG00000137171_37 (sequence is synthesized)
caggcaagtaaagtaagcccttgcctccaactcctcttggctcctgatctctggagaagtatctcggagagaaacagggaggaagtcaacgggccagccatggagagagagtttgggtag

SEQ ID NO: 334550 - DNA, 120 bp, Artificial Sequence
  ENSG00000137171_38 (sequence is synthesized)
aatgggtgccccagtgtggcagtgctcaagaggcccacagccttaaggccactcaggaggaagagaggaggcctcaattcttccgttttccattgtagcagcaacatgaagcgagcagcc

SEQ ID NO: 334551 - DNA, 120 bp, Artificial Sequence
  ENSG00000137171_39 (sequence is synthesized)
agtgtgggcaccagtgtggcccagcctcccactccaaggctccagcctgcctctatcccagacttccaggcccatgagctggctctgccaccatcatcctgcctcccgccagctcccgct

SEQ ID NO: 334552 - DNA, 120 bp, Artificial Sequence
  ENSG00000137171_40 (sequence is synthesized)
ccttaggtccacactcactggtaataatgctcaaaagtggtggctatctccaagccggagaaaatcaggacagcttgcaggcattgctgcagctgtgccagcctctccatttcctgggct

SEQ ID NO: 334553 - DNA, 120 bp, Artificial Sequence
  ENSG00000137171_41 (sequence is synthesized)
ccaccgatccggctgccctggatctgctggtcaatgtgccgggcgaactgctcactcacctgagcaatggcagagcacaggaaagccatgaatgagcgagcagagcaggcctgctcctgc

SEQ ID NO: 334554 - DNA, 120 bp, Artificial Sequence
  ENSG00000137171_42 (sequence is synthesized)
ccacctgcttctccaccacggcccgccaacagcgcgtcaggtttctcatgatgctgcttggaaggccccgggtagccaaggagctccagtcgtggcttctgtttctgccttctgtagaga

SEQ ID NO: 334555 - DNA, 120 bp, Artificial Sequence
  ENSG00000137171_43 (sequence is synthesized)
ccaagaaagtggcagaggcaaggagggtgcagcccctccactcccaagtccccatccaagggggttccctgaggcctttcctgacatgctgccacccaaaatgatgttcatggatggagg

SEQ ID NO: 334556 - DNA, 120 bp, Artificial Sequence
  ENSG00000137171_44 (sequence is synthesized)
tgacacaaacctggaagatgaacaggctgagcccatagggaggggaaggatggggatggacagaagcctgtggtgtacacatggggcccaggaaaacgctcctgactagagctccccacc

SEQ ID NO: 334557 - DNA, 120 bp, Artificial Sequence
  ENSG00000137171_45 (sequence is synthesized)
tgaatctccactactcactgggccgaggagtggccaccacaggagggggtgcctcacagggctcgacatgcaccagcaggcactcgaaacgttattactgaaacctgcacaaccggtgat

SEQ ID NO: 334558 - DNA, 120 bp, Artificial Sequence
  ENSG00000137171_46 (sequence is synthesized)
ctgcaaagcactttcaccttaagtatctcgtctgaagaatttcgccctatgagaaagcaacacttgtagaggaaaaagctgaggctaagtgtgccttatccaaggtcacggacctgcatg

SEQ ID NO: 334559 - DNA, 120 bp, Artificial Sequence
  ENSG00000137171_47 (sequence is synthesized)
actcctgaccagactcgcaactcccgcctcgcatgcccgcagaccccatctccggcagcccgaatggaagcagccttcttcccggccaagctgctcggtgctcctagatgacgttgactg

SEQ ID NO: 334560 - DNA, 120 bp, Artificial Sequence
  ENSG00000137171_48 (sequence is synthesized)
tccggcgccgtcgctccgcaataacgtaaaaggaggcgggcagaaaactggagcccaagctggatacacacctcctttcctacctgaacgccgtgagagccaatccgcgggcagctctaa

SEQ ID NO: 334561 - DNA, 120 bp, Artificial Sequence
  ENSG00000137177_0 (sequence is synthesized)
ggccgcctaaggccgagcgggcgcggcgagcggccgggcgagcgcagccaacatgtcggataccaaggtaaaagttgccgtccgggtccggcccatgaaccgacgagaactggaactgaa

SEQ ID NO: 334562 - DNA, 120 bp, Artificial Sequence
  ENSG00000137177_1 (sequence is synthesized)
caccaagtgcgtggtggagatggaagggaatcaaacggtcctgcaccctcctccttctaacaccaaacagggagaaaggaaacctcccaaggtatttgcctttgattattgcttttggtc

SEQ ID NO: 334563 - DNA, 120 bp, Artificial Sequence
  ENSG00000137177_2 (sequence is synthesized)
catggatgaatctaacactacaaaatacgctggtcaagaagtggttttcaagtgccttggggaaggaattcttgaaaaagcctttcaggggtataatgcgtgtatttttgcatatggaca

SEQ ID NO: 334564 - DNA, 120 bp, Artificial Sequence
  ENSG00000137177_3 (sequence is synthesized)
gacaggttcgggaaaatccttttccatgatgggccatgctgagcagctgggccttattccaaggctctgctgtgctttatttaaaaggatctctttggagcaaaatgagtcacagacctt

SEQ ID NO: 334565 - DNA, 120 bp, Artificial Sequence
  ENSG00000137177_4 (sequence is synthesized)
taaagttgaagtgtcctatatggaaatttataatgagaaagttcgggatcttttagaccccaaagggagtagacagtctcttaaagttcgagaacataaagttttgggaccatatgtaga

SEQ ID NO: 334566 - DNA, 120 bp, Artificial Sequence
  ENSG00000137177_5 (sequence is synthesized)
tggtttatctcaactagctgtcactagttttgaggatattgagtcattgatgtctgagggaaataagtctcgaacggtagctgctaccaacatgaacgaagaaagcagccgctcccatgc

SEQ ID NO: 334567 - DNA, 120 bp, Artificial Sequence
  ENSG00000137177_6 (sequence is synthesized)
tgtgttcaacatcataatcacacagacactttatgacctgcagtctgggaattccggggagaaagtcagtaaggtcagcttggtagacctggcgggtagcgaaagagtatctaaaacagg

SEQ ID NO: 334568 - DNA, 120 bp, Artificial Sequence
  ENSG00000137177_7 (sequence is synthesized)
agctgcaggagagcgactgaaagaaggcagcaacattaacaaatcgcttacaaccttggggttggttatatcatcactggctgaccaggcagctggcaagggtaaaagcaaatttgtgcc

SEQ ID NO: 334569 - DNA, 120 bp, Artificial Sequence
  ENSG00000137177_8 (sequence is synthesized)
ttatcgagattcagtcctcacttggctgcttaaggacaacttggggggcaacagccaaacctctatgatagccacaatcagcccagccgcagacaactatgaagagaccctctccacatt

SEQ ID NO: 334570 - DNA, 120 bp, Artificial Sequence
  ENSG00000137177_9 (sequence is synthesized)
aagatatgcagaccgagccaaaaggattgtgaaccatgctgttgtgaatgaggaccccaacgcaaaagtgatccgagaactgcgggaggaagtcgagaaactgagagagcagctctctca

SEQ ID NO: 334571 - DNA, 120 bp, Artificial Sequence
  ENSG00000137177_10 (sequence is synthesized)
ggcagaggccatgaaggcccctgaactgaaggagaagctcgaagagtctgaaaagctgataaaagaactaacagtgacttgggaagagaagctgagaaaaacagaagagatagcacagga

SEQ ID NO: 334572 - DNA, 120 bp, Artificial Sequence
  ENSG00000137177_11 (sequence is synthesized)
aagacaacgacaacttgaaagcatggggatttccctggagatgtccggtatcaaggtgggggatgacaaatgctacttagtcaatctgaatgcagaccctgctcttaacgaacttctggt

SEQ ID NO: 334573 - DNA, 120 bp, Artificial Sequence
  ENSG00000137177_12 (sequence is synthesized)
ttattatttaaaggatcacaccagggtgggtgcagatacctctcaagatatccagctttttggcataggaattcagcctcagcactgtgagattgacattgcatctgatggagacgtcac

SEQ ID NO: 334574 - DNA, 120 bp, Artificial Sequence
  ENSG00000137177_13 (sequence is synthesized)
tctcactccaaaagaaaatgcaaggtcctgtgtgaacggcacccttgtgtgcagtaccacccagctgtggcatggtgaccgaatcctatggggaaataatcacttttttagaataaactt

SEQ ID NO: 334575 - DNA, 120 bp, Artificial Sequence
  ENSG00000137177_14 (sequence is synthesized)
acctaagaggaaacgtcgagattggttgaaagactttgaaaaagaaacgggcccgccagagcatgacctggatgcagccagtgaggcttcctctgaaccagactataactatgaatttgc

SEQ ID NO: 334576 - DNA, 120 bp, Artificial Sequence
  ENSG00000137177_15 (sequence is synthesized)
acagatggaagttatcatgaaaaccctgaatagtaatgacccagttcaaaatgtggttcaggtcctggagaaacaatacctagaagaaaagagaagtgccctagaggagcagcggctcat

SEQ ID NO: 334577 - DNA, 120 bp, Artificial Sequence
  ENSG00000137177_16 (sequence is synthesized)
gtatgagcgggaactggagcaactccgccagcagctctcccccgacaggcagccacagagtagcggccctgaccgcctggcctacagcagccagacagcgcagcagaaggtgacccagtg

SEQ ID NO: 334578 - DNA, 120 bp, Artificial Sequence
  ENSG00000137177_17 (sequence is synthesized)
ggcagaagagagggatgaactcttccgacaaagcctggcaaaactgcgagagcagctggttaaagctaataccttggtgagggaagcaaacttcctggctgaggaaatgagcaaactcac

SEQ ID NO: 334579 - DNA, 120 bp, Artificial Sequence
  ENSG00000137177_18 (sequence is synthesized)
cgattaccaagtgactcttcagatccctgctgcaaacctcagtgccaataggaagagaggtgcaatagtgagtgaaccagctatccaagtgaggaggaaaggaaagagcacccaagtgtg

SEQ ID NO: 334580 - DNA, 120 bp, Artificial Sequence
  ENSG00000137177_19 (sequence is synthesized)
gaccattgagaagctggagaataaattaattgacatgagagacctttaccaagaatggaaggaaaaagttcctgaggcaaagagactctacggaaaacgaggtgaccctttctatgaagc

SEQ ID NO: 334581 - DNA, 120 bp, Artificial Sequence
  ENSG00000137177_20 (sequence is synthesized)
ccaagaaaatcacaacctcatcggggtggcgaatgtattcttggaatgcctcttctgtgatgtgaaacttcagtatgcagtccctatcatcagccagcagggggaggttgcagggcgtct

SEQ ID NO: 334582 - DNA, 120 bp, Artificial Sequence
  ENSG00000137177_21 (sequence is synthesized)
ccacgtggaagtgatgcgtgttacaggagctgttccagagcgtgtggtggaggatgactcttcggagaattccagtgaaagtgggagccttgaagtcgtagacagcagcggggaaatcat

SEQ ID NO: 334583 - DNA, 120 bp, Artificial Sequence
  ENSG00000137177_22 (sequence is synthesized)
tcaccgagtcaaaaagctgacatgtcgggtaaaaattaaagaagcaacggggctgcccttaaacctctcaaattttgtcttctgtcaatacacattctgggaccagtgtgagtctacggt

SEQ ID NO: 334584 - DNA, 120 bp, Artificial Sequence
  ENSG00000137177_23 (sequence is synthesized)
ggctgccccggtggtggaccccgaggtgccttcaccacagtccaaggatgcccagtacacagtgaccttctcccactgtaaggactatgtggtgaatgtaacagaagaatttctggagtt

SEQ ID NO: 334585 - DNA, 120 bp, Artificial Sequence
  ENSG00000137177_24 (sequence is synthesized)
gatggagcactggccattgaagtatggggccaccggtgtgctggaaatggcagctccatctgggaggtcgattctcttcatgctaagacaagaacactgcatgacaggtggaatgaagta

SEQ ID NO: 334586 - DNA, 120 bp, Artificial Sequence
  ENSG00000137177_25 (sequence is synthesized)
acgcgaagaatagaaatgtggatctccatattagaattgaatgagttaggagagtatgctgcagtggaacttcatcaggcaaaagatgtcaacacaggaggcatctttcaacttagacag

SEQ ID NO: 334587 - DNA, 120 bp, Artificial Sequence
  ENSG00000137177_26 (sequence is synthesized)
ggtcattcccgtagagtacaagtcacggtgaaacctgtgcagcattcagggacactgccacttatggttgaagccatcctgtcagtatccatcggctgtgtaactgccaggtccaccaaa

SEQ ID NO: 334588 - DNA, 120 bp, Artificial Sequence
  ENSG00000137177_27 (sequence is synthesized)
ctccaaagagggctggacagttaccagagagatgatgaggatggtgatgatatggatagttatcaggaagaagacttaaactgcgtaagggagaggtggtcagatgcactcattaaacga

SEQ ID NO: 334589 - DNA, 120 bp, Artificial Sequence
  ENSG00000137177_28 (sequence is synthesized)
cgagaatacctggatgaacagataaaaaaagtcagcaataaaacagagaaaacagaggacgatgtggagcgggaagcccagcttgtggagcagtgggtagggctgactgaggaaaggaat

SEQ ID NO: 334590 - DNA, 120 bp, Artificial Sequence
  ENSG00000137177_29 (sequence is synthesized)
gctgtgctggtgccagccccaggcagtgggattcctggggcacctgccgactggatcccacctcctggaatggaaacccacataccagttctcttcctcgatttgaatgcggatgacctc

SEQ ID NO: 334591 - DNA, 120 bp, Artificial Sequence
  ENSG00000137177_30 (sequence is synthesized)
agtgccaatgagcagcttgttggcccccatgcatccggcgtgaactccatcctgcccaaggagcatggcagccagtttttctacctgcccatcataaagcacagtgatgatgaggtttca

SEQ ID NO: 334592 - DNA, 120 bp, Artificial Sequence
  ENSG00000137177_31 (sequence is synthesized)
gccacagcctcttgggattcctcggtgcatgattctgttcacttgaatagggtcacaccacagaatgaaaggatttacctaattgtgaaaaccacagttcaactcagccaccctgctgct

SEQ ID NO: 334593 - DNA, 120 bp, Artificial Sequence
  ENSG00000137177_32 (sequence is synthesized)
atggagttagtattacgaaaacgaattgcagccaatatttacaacaaacagagtttcacgcagagtttgaagaggagaatatccctgaaaaatatattttattcctgtggtgtaacctat

SEQ ID NO: 334594 - DNA, 120 bp, Artificial Sequence
  ENSG00000137177_33 (sequence is synthesized)
gaaatagtatccaatataccaaaggcaactgaggagatagaggaccgggaaacgctggctctcctggcagcaaggagtgaaaacgaaggcacatcagatggggagacgtacattgagaag

SEQ ID NO: 334595 - DNA, 120 bp, Artificial Sequence
  ENSG00000137177_34 (sequence is synthesized)
tacactcgaggcgtgctgcaggtggaaaacattctgagtcttgaacggctccggcaggccgtcacagtcaaagaagcactttccaccaaagcccggcacattcggaggagcctcagtaca

SEQ ID NO: 334596 - DNA, 120 bp, Artificial Sequence
  ENSG00000137177_35 (sequence is synthesized)
ccaaatgttcataatgtctcttccagccgaccggacctttctggctttgatgaagatgacaagggttggccagagaaccagttggacatgtctgactatagctccagttaccaagatgta

SEQ ID NO: 334597 - DNA, 120 bp, Artificial Sequence
  ENSG00000137177_36 (sequence is synthesized)
gcatgttatggaactttacccagggattctcctcgaaggaataaagaaggttgtacatcagagactcctcatgccttaaccgtcagcccttttaaagcattctctcctcagccaccaaag

SEQ ID NO: 334598 - DNA, 120 bp, Artificial Sequence
  ENSG00000137177_37 (sequence is synthesized)
tttttcaagcccctaatgcctgtaaaagaggagcataagaaaaggatagccctggaagcaaggcctcttctaagccaggagagcatgcctccacctcaggcacataaccctggctgcatt

SEQ ID NO: 334599 - DNA, 120 bp, Artificial Sequence
  ENSG00000137177_38 (sequence is synthesized)
gtaccctcaggaagcaatggcagcagcatgccagtagaacacaatagcaaacgtgagaagaagattgactctgaggaggaagaaaatgagctggaagctattaacaggaagctaataagt

SEQ ID NO: 334600 - DNA, 120 bp, Artificial Sequence
  ENSG00000137177_39 (sequence is synthesized)
tcacagccttatgtacctgtggagtttgctgacttcagtgtttacaatgccagcttggagaacagggaatggttttcctctaaagtagatctgtcaaactcacgggtcttggagaaagaa

SEQ ID NO: 334601 - DNA, 120 bp, Artificial Sequence
  ENSG00000137177_40 (sequence is synthesized)
gtgtcccgtagccctaccaccagcagtattaccagtggctacttttcccacagtgcctccaatgccaccctgtctgacatggtggtcccttctagtgacagctcagaccagctggccatt

SEQ ID NO: 334602 - DNA, 120 bp, Artificial Sequence
  ENSG00000137177_41 (sequence is synthesized)
cagacgaaggatgcagactccaccgagcactccacaccatcgcttgtgcatgatttcaggccgtcctcaaacaaagagttgacagaagtcgaaaaaggcttggtaaaggacaagataatt

SEQ ID NO: 334603 - DNA, 120 bp, Artificial Sequence
  ENSG00000137177_42 (sequence is synthesized)
gtggtgccactcaaggaaaacagtgccttagccaaagggagcccatcatcccagagcatccctgagaaaaactccaaatcactgtgcaggactggctcatgttcagaactagatgcctgc

SEQ ID NO: 334604 - DNA, 120 bp, Artificial Sequence
  ENSG00000137177_43 (sequence is synthesized)
cccagcaaaattagccagccagccaggggattctgccccagggaggtgacggtagaacacaccaccaacatccttgaagaccattctttcacagaatttatgggagtgtcagagggaaaa

SEQ ID NO: 334605 - DNA, 120 bp, Artificial Sequence
  ENSG00000137177_44 (sequence is synthesized)
gattttgatggtttgacagattcttctgctggagagctttccagtaggaggagtctaccaaataaaacaggcggcaagactgtctccgatgggctccaccaccccagccagctgcattcc

SEQ ID NO: 334606 - DNA, 120 bp, Artificial Sequence
  ENSG00000137177_45 (sequence is synthesized)
aagttagagaatgaccaggtaataattccagaggcagccttttgggttctgtgctgtcaatgagtatgtctaactgtatgtcaaccccagaggcccttcaccgcaacaacttggtaggaa

SEQ ID NO: 334607 - DNA, 120 bp, Artificial Sequence
  ENSG00000137177_46 (sequence is synthesized)
agattcatccagttgtttgtgacagcaaagatgagcccacagagaagcaggctcacttcctgcacagctgtctctgtcggagagcaagtctgttttgggaactagaacgcaattgtgaaa

SEQ ID NO: 334608 - DNA, 120 bp, Artificial Sequence
  ENSG00000137177_47 (sequence is synthesized)
ttataagaccagtggatttttttacctggcacatgggttggtgttgaatgaagtgttcagatggataaggatcaatctcatattcattccctgggatgtttagttaccagttttcccaaa

SEQ ID NO: 334609 - DNA, 120 bp, Artificial Sequence
  ENSG00000137177_48 (sequence is synthesized)
gtgttctggtagcatctaccatatttcatcaaatctgtgattcctttgattattatatgaaccattattttatgtatcattaagaaaaaatactgccaattaaactctgtcatatcaaca

SEQ ID NO: 334610 - DNA, 120 bp, Artificial Sequence
  ENSG00000137177_49 (sequence is synthesized)
cggtgagagcagcaagcacccctcctcaggccacagcttggcgtctttgttcgcctggtcaccttgggcaagcaccagccccatctctaaaacatgctgccgcctggctggacctcagac

SEQ ID NO: 334611 - DNA, 120 bp, Artificial Sequence
  ENSG00000137177_50 (sequence is synthesized)
cagaagctggagaatccacaccgtgcacttcctgggccacctcctttcccctccccagtgggagaagcggcactttgtcacttgggtgaatcaacagcctctgctttttccagaaagcaa

SEQ ID NO: 334612 - DNA, 120 bp, Artificial Sequence
  ENSG00000137177_51 (sequence is synthesized)
gagaactgaaaatcctggattaactaagtgacagtatttttttttgcacttactacacacctccactgtatagaaacctctacagattccaacagactttattcttgtacaattttaatc

SEQ ID NO: 334613 - DNA, 120 bp, Artificial Sequence
  ENSG00000137177_52 (sequence is synthesized)
agttcttactgtagaatctggagtcaatgctctaatctgttttttataaataatatatattatgtatatgaaatgtgtatctatagtatgtctggagacagacaaggctgcacactaaaa

SEQ ID NO: 334614 - DNA, 120 bp, Artificial Sequence
  ENSG00000137177_53 (sequence is synthesized)
tgcagataaaggtgatttgtagaaaatcataaggtactggacttcgttacaaagcaacttgggcgatctcttatacatgagcagatgaaaaatattttattgcctaagaatgagcttgca

SEQ ID NO: 334615 - DNA, 120 bp, Artificial Sequence
  ENSG00000137177_54 (sequence is synthesized)
aatccctctttgcagaaaaggttatagaatgctgttctttataaccaaagaacttacataagacaacatttttgctgtccactcttttgtgtgaacatgtatgtttgactgcaagtttgg

SEQ ID NO: 334616 - DNA, 120 bp, Artificial Sequence
  ENSG00000137177_55 (sequence is synthesized)
tgccataattcccttggctaccaagccacgtgctgccattctctgtcctttgtttcataagcacactgagaaatctcacagctatattctttggtcttccacctgcccctccacctgctg

SEQ ID NO: 334617 - DNA, 120 bp, Artificial Sequence
  ENSG00000137177_56 (sequence is synthesized)
acttgacattgtattataactgttgacaatgactggggtcctgactccacagttgcctggaccgtggctcagcccagctgggcaggtggaatgaagagagccgtattactgtaagaaaac

SEQ ID NO: 334618 - DNA, 120 bp, Artificial Sequence
  ENSG00000137177_57 (sequence is synthesized)
acaaggacagccaggagtagtggtggggtgggtggggtgggaggtgttgatttttgtgtgtttctgtgtgtgtggttttgttttggattggtaggtttcactgtggcgtggttttgctgt

SEQ ID NO: 334619 - DNA, 120 bp, Artificial Sequence
  ENSG00000137177_58 (sequence is synthesized)
tgttattttgcttgattctggaaaatgctgaggagatggactgagctatgaagttcaatggttcaccctttaccatgtttgcaggagatgatcgaatacagatgaccctgctgtcgtgtc

SEQ ID NO: 334620 - DNA, 120 bp, Artificial Sequence
  ENSG00000137177_59 (sequence is synthesized)
ttcatttgtaaaattctcctacaaatggagacattgaaggattatgtgtatggaaatttttacaaaattcctttctgtacctattctgtagatgcctgtataatcggtctggatgtacag

SEQ ID NO: 334621 - DNA, 120 bp, Artificial Sequence
  ENSG00000137177_60 (sequence is synthesized)
ctataaatgtgttgtgagagcaagagagagagaatgggtagagcctgctgtaccttttttcttttaaattcttcgagttggtaaatgagtaagatattggaaaccttaatgaaaagctgc

SEQ ID NO: 334622 - DNA, 120 bp, Artificial Sequence
  ENSG00000137177_61 (sequence is synthesized)
tgttcatgatttgtgtgtatagtgagctgactgtagtattttactattgtctgttaaaaaaagaaaaactgtaatttatatcccctttgaactttattgtgtttaattggtacacatttc

SEQ ID NO: 334623 - DNA, 120 bp, Artificial Sequence
  ENSG00000137177_62 (sequence is synthesized)
tgtgtgtgtgtgtgtgtatgtgttttagaatacaaactgtgtaattcagattttaaaacactaatcatttgtctttaataaccctgcctttagtttcaaatctaacttaccatatttcta

SEQ ID NO: 334624 - DNA, 120 bp, Artificial Sequence
  ENSG00000137177_63 (sequence is synthesized)
ataagcctgtctgcctggtggtcatccccttggtggtcttatttgaagatcctctttcctctcatgtggtttcagacgaagctcctccacaaacactgggataaagacccagttcaaaat

SEQ ID NO: 334625 - DNA, 120 bp, Artificial Sequence
  ENSG00000137177_64 (sequence is synthesized)
ctcttctaagccaggaggtaaatgcttgacttgtctgtactatgcagaatagagcagagttgtgtcacctgtgaagcagcagtgtgcattaacaagctgagtgctgcatgtggacatgca

SEQ ID NO: 334626 - DNA, 120 bp, Artificial Sequence
  ENSG00000137177_65 (sequence is synthesized)
cggtcatcactccatggttcccgttctcgaattcctctttctcaagcatgcagagtcatggtagaatctcttgtttgttgttgctgctgtggttttatttctttgtgtttatggcttttc

SEQ ID NO: 334627 - DNA, 120 bp, Artificial Sequence
  ENSG00000137177_66 (sequence is synthesized)
aaagtatttttttatgtttcaagtgagaaagatgttttctaggtgttttgaaaagattaaaggccttttttaaaattatttttcttttttgtctttttggggatttctgattttgttttt

SEQ ID NO: 334628 - DNA, 120 bp, Artificial Sequence
  ENSG00000137177_67 (sequence is synthesized)
ctggtctgaaactcctggcctcaagtgattcttttgccccagcctcccaaggcactgggattgcaggcatgagccgttgtacctggtcaaaaggctgttttttaaataagactaattatg

SEQ ID NO: 334629 - DNA, 120 bp, Artificial Sequence
  ENSG00000137177_68 (sequence is synthesized)
aaaaggctgttttttaaataagactaattatgctttttgccacagaatctgtttattcctgtcatatctctccagtagtttaactctggcctgcagaattggctgctgcattactcacat

SEQ ID NO: 334630 - DNA, 120 bp, Artificial Sequence
  ENSG00000137177_69 (sequence is synthesized)
gtaataagagtgttagcattgcttttctaacttgcatgtacttaatatgtattttggccgttgtcgtctttgtgtgtgatgcatctgtgtgtcttaacctttgcagagcatgcctccacc

SEQ ID NO: 334631 - DNA, 120 bp, Artificial Sequence
  ENSG00000137177_70 (sequence is synthesized)
tcaggcacataaccctggctgcattgtaccctcaggaagcaatggcagcagcatgccagtagaacacaatagcaaacgtgagaagaagattgtaagttccggaaccatttctgtcatatt

SEQ ID NO: 334632 - DNA, 120 bp, Artificial Sequence
  ENSG00000137177_71 (sequence is synthesized)
gcctggtggtgggtttaaggccctttcacagacaatcatccaaatgctagaagaaattaagacatgtattgggtctttgtcttaaagaaaataaaaatgtgaccattggtaatgatattt

SEQ ID NO: 334633 - DNA, 120 bp, Artificial Sequence
  ENSG00000137177_72 (sequence is synthesized)
tgcatggatgtggccatgacctacaattttatcttatttatttatttattttttgcttaagtttgcttagaaaaagggagaaaggcacttttattgcttctggcctttataaaaagtgta

SEQ ID NO: 334634 - DNA, 120 bp, Artificial Sequence
  ENSG00000137177_73 (sequence is synthesized)
acaaagagatctttttaataccaaaatctttctaatgtgcctatacatattgcctagattctgaagttaatctacctagaggaagtgcacttacttggagtaagtaatcatgcatttaat

SEQ ID NO: 334635 - DNA, 120 bp, Artificial Sequence
  ENSG00000137177_74 (sequence is synthesized)
gcatttagctgtggatatgtttggaagcttttttatgttgcctgatgctattgccaagataattctgtagttagagctgcactacaatctatcataatcacccttcatcgtctcactgtc

SEQ ID NO: 334636 - DNA, 120 bp, Artificial Sequence
  ENSG00000137177_75 (sequence is synthesized)
tagggtagcctttgttaattagctggcaaaatatattccaataccttggtgccagccttgcattcaggatggcttatatatattttgccacaggtaggctgaaactctacccacaaaacc

SEQ ID NO: 334637 - DNA, 120 bp, Artificial Sequence
  ENSG00000137177_76 (sequence is synthesized)
tcattccttagcacttggttttaaaattattaatttgagatacagttttaaaaacactgcataccaggcaccttaggttataaattatacctcaatttacaaaaaaaaaaaaaaaaaaaa

SEQ ID NO: 334638 - DNA, 86 bp, Artificial Sequence
  ENSG00000137177_77 (sequence is synthesized)
agccgaggatttcaagaccagccttttgtttaaaattagctggacgtggtggcgcatacctgtggtcccagctactcaggagactg

SEQ ID NO: 334639 - DNA, 89 bp, Artificial Sequence
  ENSG00000137177_78 (sequence is synthesized)
gccactgcacgtcaaaaaaataaaaaattaaagtggcgtgaggtgaattgcatcagaccccacatatgaataaatggatggttggcaaa

SEQ ID NO: 334640 - DNA, 120 bp, Artificial Sequence
  ENSG00000137177_79 (sequence is synthesized)
ccacatatgaataaatggatggttggcaaagtgttatatataataagtacaattccttaggtgtccttaggtgtactactaaagtgggtttgtgatagcccatatatttagtcatttatg

SEQ ID NO: 334641 - DNA, 120 bp, Artificial Sequence
  ENSG00000137177_80 (sequence is synthesized)
ttcaatagtgttatattcatttgagaaattattttaagaaatttaaaattaagaaagttttaaaagtcctttagtaattagagatttctctgggtgggtggatacggttgtttctaatta

SEQ ID NO: 334642 - DNA, 120 bp, Artificial Sequence
  ENSG00000137177_81 (sequence is synthesized)
tcccacacatttaatcatttatgttcaatagtgttgtattttttgagaaattattttaagaaatgcaaaattaagaaagatttaaaagtcctttagtaattagagatttttctagttggg

SEQ ID NO: 334643 - DNA, 120 bp, Artificial Sequence
  ENSG00000137177_82 (sequence is synthesized)
tggataagggttatttctaagtatcttttgagtattttttgtcatatatttcgttttttaggcatgattaaaagtgtatttgaggactcttagacacataaagttgaattcctcagattg

SEQ ID NO: 334644 - DNA, 120 bp, Artificial Sequence
  ENSG00000137177_83 (sequence is synthesized)
agagatagttattgctttttaattttgttaagatgctcagctgttggataaataatgcttttgttaaaatcctgtggggcattcatccaacaaatggggtataagaaaggaatgtgtgtt

SEQ ID NO: 334645 - DNA, 120 bp, Artificial Sequence
  ENSG00000137177_84 (sequence is synthesized)
tgtgtacatgttcttctatctgttggtcctaaagagtgtaagaaggtaaatttgaccagtgaaattcataattacagagttttatttggtaatccattaataaatcattttctgaaagca

SEQ ID NO: 334646 - DNA, 120 bp, Artificial Sequence
  ENSG00000137177_85 (sequence is synthesized)
acgctggtaagttttctccctctacacctgacagttgggcttctggcctcttcttccattgagtttattttctttaattcctctggagttttactttccctgtgtaattcacacctgttc

SEQ ID NO: 334647 - DNA, 120 bp, Artificial Sequence
  ENSG00000137177_86 (sequence is synthesized)
ctttgcaggaacatggatggaactggcggccatcattcttagaaaacgaatgcaggaacagaacaccagataccgcgtgttctcactaataagtgagagctaaatcatgggaaccgatgg

SEQ ID NO: 334648 - DNA, 120 bp, Artificial Sequence
  ENSG00000137177_87 (sequence is synthesized)
gctaaatcatgggaaccgatggacagaaaggggaacaacagacactggggcctgtgggaggaggagggagaggctcaggaaaaaaaaacaaaaacctgccaagtactatgcttactaccc

SEQ ID NO: 334649 - DNA, 120 bp, Artificial Sequence
  ENSG00000137177_88 (sequence is synthesized)
gggtaatgaaataatccatacatcaaaccccttagtcatgagttgacctgtataacaaacctgtgcatgtacccctgaacctaaaataagtcaaaatatttaaattttaaaaaacaaaag

SEQ ID NO: 334650 - DNA, 120 bp, Artificial Sequence
  ENSG00000137177_89 (sequence is synthesized)
tatctgataaagaaggtggtttgcttttaaccatagtgtttttcagttaaatagttaaaaatatttttttgatttcccttaattccagattgattttctttggggcttaaattcttaaaa

SEQ ID NO: 334651 - DNA, 120 bp, Artificial Sequence
  ENSG00000137177_90 (sequence is synthesized)
agttgctacgggaatgtggggattgaatgggaatgcatatgagcaaactttctgaggtgatagggcaggttacactcatatgtgcatttctcaaaactcatcgagctctatactcaagat

SEQ ID NO: 334652 - DNA, 120 bp, Artificial Sequence
  ENSG00000137185_0 (sequence is synthesized)
ggccattgttcgtgccgcgcttctagcaacgccgggccggtaaccccctctccctccttgcgcgttccgggtctcgcaagcgcctccaaggtttgtcttgaagcatagctccagctggag

SEQ ID NO: 334653 - DNA, 120 bp, Artificial Sequence
  ENSG00000137185_1 (sequence is synthesized)
ggtaccttttaagctgttcaaggtcaagatgaatacaaactcaaaggaggttttatccctgggtgttcaagttcccgaggcatgggaagaacttctgacaatgaaagtggaagcaaaaag

SEQ ID NO: 334654 - DNA, 120 bp, Artificial Sequence
  ENSG00000137185_2 (sequence is synthesized)
tcaccttcaatggcaggaatccagactgaaacgcagtaatccactggcaagggaaatcttccgaaggcactttcgacagctgtgctaccaagagacccctggaccaagggaggctcttac

SEQ ID NO: 334655 - DNA, 120 bp, Artificial Sequence
  ENSG00000137185_3 (sequence is synthesized)
tcgactccaggaactttgctaccagtggttgaggccacatgtgagcacaaaggagcagattttggatctgctggtgctggagcagtttctatccattctgcccaaggagctccagggctg

SEQ ID NO: 334656 - DNA, 120 bp, Artificial Sequence
  ENSG00000137185_4 (sequence is synthesized)
ggtgagggaacactgtccagagagtggagaagaggctgtgattttgctggaggatctggagagagagctcgatgaaccacaacatgagatggtggcccacagacacagacaagaagtcct

SEQ ID NO: 334657 - DNA, 120 bp, Artificial Sequence
  ENSG00000137185_5 (sequence is synthesized)
ctgtaaagagatggtgcctctagcagagcagacaccactgacccttcagtcccagcctaaggagccacagctcacatgtgactctgctcagaagtgccattctattggagagacagatga

SEQ ID NO: 334658 - DNA, 120 bp, Artificial Sequence
  ENSG00000137185_6 (sequence is synthesized)
ccacatgggaaaatgtttaatgagcagacctgggaggtatcacagcaggatccctcacatggagaagttggtgaacataaggataggatagagaggcagtggggaaacctcttaggagag

SEQ ID NO: 334659 - DNA, 120 bp, Artificial Sequence
  ENSG00000137185_7 (sequence is synthesized)
gggcaacacaaatgtgatgaatgtgggaagagctttactcagagctcaggtctcattcgacatcaaagaattcatactggagaaagaccttatgaatgtaatgaatgtgggaaagccttc

SEQ ID NO: 334660 - DNA, 120 bp, Artificial Sequence
  ENSG00000137185_8 (sequence is synthesized)
agtcgaagttctggtctttttaatcaccgaggaatccacaatatacagaaacggtaccactgcaaggagtgtgggaaggtcttcagtcagagtgcgggtcttatccagcatcagagaatc

SEQ ID NO: 334661 - DNA, 120 bp, Artificial Sequence
  ENSG00000137185_9 (sequence is synthesized)
cacaaaggagaaaagccgtatcagtgcagccagtgcagtaagagctacagtcggcgttcatttctcattgaacatcagagaagccacacaggggagcgacctcaccagtgcattgaatgt

SEQ ID NO: 334662 - DNA, 120 bp, Artificial Sequence
  ENSG00000137185_10 (sequence is synthesized)
gggaaaagctttaatcgacactgcaacctcattcgccatcagaagatccacacagtggctgagctggtctagggcttggctatgagcaagttttccagatcaccacccaagttgtgtggg

SEQ ID NO: 334663 - DNA, 120 bp, Artificial Sequence
  ENSG00000137185_11 (sequence is synthesized)
gcaggttgagactagaaaatgcctctttcttcctttctccatgaaatgtgtttgaaacaaatcctgacttaaggcccagggacttccttaaaggaaagttgggtgtttgaagctactgtt

SEQ ID NO: 334664 - DNA, 120 bp, Artificial Sequence
  ENSG00000137185_12 (sequence is synthesized)
ttctcttttgttcattttacctctttcttactcttactagctgtgtccctcttatttataatttatttatttttttgagatggctgctaaacccttctaataatataataaatggcactg

SEQ ID NO: 334665 - DNA, 120 bp, Artificial Sequence
  ENSG00000137185_13 (sequence is synthesized)
gatagcagtaatggtcagttcttctgagagcctagtgtgctcatctttgacccttctccctgcgtgcagacttctccctgagtaccaccctggaagctttctggacttctgatgcatggt

SEQ ID NO: 334666 - DNA, 120 bp, Artificial Sequence
  ENSG00000137185_14 (sequence is synthesized)
acatgaggaaggctttcagggatcgctgtggagcacagcttcagagaatggacttcaaggtttgacagacaggttcagatcctggcatcgcctcatggaagctgcttgtattgggcagat

SEQ ID NO: 334667 - DNA, 120 bp, Artificial Sequence
  ENSG00000137185_15 (sequence is synthesized)
ttgacctcagatccctcatctacaaaatggggttgataatagctttggtttagtctacttgcgctgccttaagagaataccacagactggttgtctttaacagaaatttattttctcaca

SEQ ID NO: 334668 - DNA, 120 bp, Artificial Sequence
  ENSG00000137185_16 (sequence is synthesized)
tggccatcttcttgctgtatcctcacatggcctttcttctgtatgcatacagagagagagcaagctctctcatcttataaggacagataccattcctacccgatagggcccttccttata

SEQ ID NO: 334669 - DNA, 120 bp, Artificial Sequence
  ENSG00000137185_17 (sequence is synthesized)
acctcatttaacttttaataccttcctcaaggccctatctccaaatataatcatattgaggggttaggacctcagcatatgtgagggaatacaatttagtccgtaaccagtatgtacctc

SEQ ID NO: 334670 - DNA, 120 bp, Artificial Sequence
  ENSG00000137185_18 (sequence is synthesized)
agaaagtcattgtgagtatcaaatacaatttatgaaaagcacttggcatgcattatgcttaatacatggtcactattgtcacaaatcaccagtgccacccttgctgatttgggttcatac

SEQ ID NO: 334671 - DNA, 120 bp, Artificial Sequence
  ENSG00000137185_19 (sequence is synthesized)
ttggagtagaaagatatcagatatgcttagtaagtggcagaactgtatgggagaatccagtgaaatcagactttgccatttccttctctgtaatcttctgagtggtggcagtgaccaccc

SEQ ID NO: 334672 - DNA, 120 bp, Artificial Sequence
  ENSG00000137185_20 (sequence is synthesized)
ttgtggatatagtactgagcacttgggactgagtcagctgctttcccattctagccctccctgcaggaattggctctagcttgtctgatttcccacacataaaatcatgccctcttactg

SEQ ID NO: 334673 - DNA, 120 bp, Artificial Sequence
  ENSG00000137185_21 (sequence is synthesized)
actttttgttaatgttctgacaatcaatctgtagcaaggttctactgttttcagtttcatattacccctatatgcatcaaagctgcaacttcccttgcctctttgtccctaggttctgtt

SEQ ID NO: 334674 - DNA, 120 bp, Artificial Sequence
  ENSG00000137185_22 (sequence is synthesized)
tatttcatttaccctagcaattatggatttctattacatggaactcatctcttgatttaaattaaagtgtatgtgttgagtaaattctgtgcagaccttcttatagcttctgtgacttta

SEQ ID NO: 334675 - DNA, 120 bp, Artificial Sequence
  ENSG00000137185_23 (sequence is synthesized)
atacaaattccaggctaacggtgacagtggctgcctcggggagtgggactaaggaggggtaggtggggtttgacattttactttattaattttggtattgtctgagggtttttaaaccat

SEQ ID NO: 334676 - DNA, 120 bp, Artificial Sequence
  ENSG00000137185_24 (sequence is synthesized)
aaataatgtattaattttaaaaatgcttttaaaaatcatcattttcaatagttaacggtctatgcttcatcaacgttttccgtttaaaacctgtgtgcggcccacacacgtatgacattc

SEQ ID NO: 334677 - DNA, 120 bp, Artificial Sequence
  ENSG00000137185_25 (sequence is synthesized)
ctttagggcctatgataattgcttgtattatcagtttctgtcatcagctattatcatttttctatataaataatttatttttactgcttaggcaagcgcctccaaggtttgtcttgaagc

SEQ ID NO: 334678 - DNA, 120 bp, Artificial Sequence
  ENSG00000137193_0 (sequence is synthesized)
ctggctgcggggcgagccgggcgtctgctgcagcggccgcggtggctgaggaggcccgagaggagtcggtggcagcggcggcggcgggaccggcagcagcagcagcagcagcagcagcag

SEQ ID NO: 334679 - DNA, 120 bp, Artificial Sequence
  ENSG00000137193_1 (sequence is synthesized)
cagcagcagcagcaaccactagcctcctgccccgcggcgctgccgcacgagccccacgagccgctcaccccgccgttctcagcgctgcccgaccccgctggcgcgccctcccgccgccag

SEQ ID NO: 334680 - DNA, 120 bp, Artificial Sequence
  ENSG00000137193_2 (sequence is synthesized)
gcgccctcagttgtcctccgactcgccctcggccttccgcgccagccgcagccacagccgcaacgccacccgcagccacagccacagccacagccccaggcatagccttcggcacagccc

SEQ ID NO: 334681 - DNA, 120 bp, Artificial Sequence
  ENSG00000137193_3 (sequence is synthesized)
cggctccggctcctgcggcagctcctctgggcaccgtccctgcgccgacatcctggaggttgggatgctcttgtccaaaatcaactcgcttgcccacctgcgcgccgcgccctgcaacga

SEQ ID NO: 334682 - DNA, 120 bp, Artificial Sequence
  ENSG00000137193_4 (sequence is synthesized)
cctgcacgccaccaagctggcgcccggcaaggagaaggagcccctggagtcgcagtaccaggtgggcccgctactgggcagcggcggcttcggctcggtctactcaggcatccgcgtctc

SEQ ID NO: 334683 - DNA, 120 bp, Artificial Sequence
  ENSG00000137193_5 (sequence is synthesized)
cgacaacttgccggtggccatcaaacacgtggagaaggaccggatttccgactggggagagctgcctaatggcactcgagtgcccatggaagtggtcctgctgaagaaggtgagctcggg

SEQ ID NO: 334684 - DNA, 120 bp, Artificial Sequence
  ENSG00000137193_6 (sequence is synthesized)
tttctccggcgtcattaggctcctggactggttcgagaggcccgacagtttcgtcctgatcctggagaggcccgagccggtgcaagatctcttcgacttcatcacggaaaggggagccct

SEQ ID NO: 334685 - DNA, 120 bp, Artificial Sequence
  ENSG00000137193_7 (sequence is synthesized)
gcaagaggagctggcccgcagcttcttctggcaggtgctggaggccgtgcggcactgccacaactgcggggtgctccaccgcgacatcaaggacgaaaacatccttatcgacctcaatcg

SEQ ID NO: 334686 - DNA, 120 bp, Artificial Sequence
  ENSG00000137193_8 (sequence is synthesized)
cggcgagctcaagctcatcgacttcgggtcgggggcgctgctcaaggacaccgtctacacggacttcgatgggacccgagtgtatagccctccagagtggatccgctaccatcgctacca

SEQ ID NO: 334687 - DNA, 120 bp, Artificial Sequence
  ENSG00000137193_9 (sequence is synthesized)
tggcaggtcggcggcagtctggtccctggggatcctgctgtatgatatggtgtgtggagatattcctttcgagcatgacgaagagatcatcaggggccaggttttcttcaggcagagggt

SEQ ID NO: 334688 - DNA, 120 bp, Artificial Sequence
  ENSG00000137193_10 (sequence is synthesized)
ctcttcagaatgtcagcatctcattagatggtgcttggccctgagaccatcagataggccaaccttcgaagaaatccagaaccatccatggatgcaagatgttctcctgccccaggaaac

SEQ ID NO: 334689 - DNA, 120 bp, Artificial Sequence
  ENSG00000137193_11 (sequence is synthesized)
cctcccctctcttgtcagatgcccgagggaggggaagcttctgtctccagcttcccgagtaccagtgacacgtctcgccaagcaggacagtgcttgatacaggaacaacatttacaactc

SEQ ID NO: 334690 - DNA, 120 bp, Artificial Sequence
  ENSG00000137193_12 (sequence is synthesized)
attccagatcccaggcccctggaggctgcctcccaacagtggggaagagtgactctccaggggtcctaggcctcaactcctcccatagatactctcttcttctcataggtgtccagcatt

SEQ ID NO: 334691 - DNA, 120 bp, Artificial Sequence
  ENSG00000137193_13 (sequence is synthesized)
gctggactctgaaatatcccgggggtggggggtgggggtgggtcagaaccctgccatggaactgtttccttcatcatgagttctgctgaatgccgcgatgggtcaggtaggggggaaaca

SEQ ID NO: 334692 - DNA, 120 bp, Artificial Sequence
  ENSG00000137193_14 (sequence is synthesized)
ggttgggatgggataggactagcaccattttaagtccctgtcacctcttccgactctttctgagtgccttctgtggggactccggctgtgctgggagaaatacttgaacttgcctctttt

SEQ ID NO: 334693 - DNA, 120 bp, Artificial Sequence
  ENSG00000137193_15 (sequence is synthesized)
acctgctgcttctccaaaaatctgcctgggttttgttccctatttttctctcctgtcctccctcaccccctccttcatatgaaaggtgccatggaagaggctacagggccaaacgctgag

SEQ ID NO: 334694 - DNA, 120 bp, Artificial Sequence
  ENSG00000137193_16 (sequence is synthesized)
ccacctgcccttttttctgcctcctttagtaaaactccgagtgaactggtcttcctttttggtttttacttaactgtttcaaagccaagacctcacacacacaaaaaatgcacaaacaat

SEQ ID NO: 334695 - DNA, 120 bp, Artificial Sequence
  ENSG00000137193_17 (sequence is synthesized)
gcaatcaacagaaaagctgtaaatgtgtgtacagttggcatggtagtatacaaaaagattgtagtggatctaatttttaagaaattttgcctttaagttattttacctgtttttgtttct

SEQ ID NO: 334696 - DNA, 120 bp, Artificial Sequence
  ENSG00000137193_18 (sequence is synthesized)
tgttttgaaagatgcgcattctaacctggaggtcaatgttatgtatttatttatttatttatttggttcccttcctattccaagcttccatagctgctgccctagttttctttcctcctt

SEQ ID NO: 334697 - DNA, 120 bp, Artificial Sequence
  ENSG00000137193_19 (sequence is synthesized)
tcctcctctgacttggggaccttttgggggagggctgcgacgcttgctctgtttgtggggtgacgggactcaggcgggacagtgctgcagctccctggcttctgtggggcccctcaccta

SEQ ID NO: 334698 - DNA, 120 bp, Artificial Sequence
  ENSG00000137193_20 (sequence is synthesized)
cttacccaggtgggtcccggctctgtgggtgatggggaggggcattgctgactgtgtatataggataattatgaaaagcagttctggatggtgtgccttccagatcctctctggggctgt

SEQ ID NO: 334699 - DNA, 120 bp, Artificial Sequence
  ENSG00000137193_21 (sequence is synthesized)
gttttgagcagcaggtagcctgctggttttatctgagtgaaatactgtacaggggaataaaagagatcttatttttttttttatacttggcgttttttgaataaaaaccttttgtcttaa

SEQ ID NO: 334700 - DNA, 120 bp, Artificial Sequence
  ENSG00000137193_22 (sequence is synthesized)
gaggaaagggtgtgggtgtctgctcctgcttgcatcgggtggggaggaaggcctcccaaagggcaccctgacttaggatgttgtgcaagcatccttgcttggatcctgtcggccatgaga

SEQ ID NO: 334701 - DNA, 120 bp, Artificial Sequence
  ENSG00000137193_23 (sequence is synthesized)
atctcacccgggctcctgggcagtggtgaatgcaatttaaggatagtctatgagatacctttcttggttgtgcagacatgcatcccttcatccttcgcaggcggtcctgcctcacagggc

SEQ ID NO: 334702 - DNA, 120 bp, Artificial Sequence
  ENSG00000137193_24 (sequence is synthesized)
ctcaagttttgggtctgcggccagctgtgtttgtttcttggagcagttcataaagaatttcagtttatggtttgggctagcagagagggacccgagtgtatagccctccagagtggatcc

SEQ ID NO: 334703 - DNA, 120 bp, Artificial Sequence
  ENSG00000137198_0 (sequence is synthesized)
ggcgctccccgcgccgccccgcgcaggcgcccccgccccgccgtcgccgccgccgcagccaggagccgctgcaccatgccccgcatagatgcggacctcaagctcgacttcaaggatgtc

SEQ ID NO: 334704 - DNA, 120 bp, Artificial Sequence
  ENSG00000137198_1 (sequence is synthesized)
atgcggacctcaagctcgacttcaaggatgtcctgctccgacctaagcggagcagcctcaagagccgagccgaggtggatcttgaacgcaccttcacgtttcgaaattcaaagcagacct

SEQ ID NO: 334705 - DNA, 120 bp, Artificial Sequence
  ENSG00000137198_2 (sequence is synthesized)
actcagggattcccatcatcgtggccaacatggacactgtgggcacgtttgagatggcagccgtgatgtcacagcactccatgtttacagcaattcataagcattactccctggatgact

SEQ ID NO: 334706 - DNA, 120 bp, Artificial Sequence
  ENSG00000137198_3 (sequence is synthesized)
ggaagctctttgccacaaatcacccagaatgcctgcagaatgtagccgtgagttcaggcagtgggcagaatgatctggaaaagatgaccagcatcctggaagctgtgccacaggttaagt

SEQ ID NO: 334707 - DNA, 120 bp, Artificial Sequence
  ENSG00000137198_4 (sequence is synthesized)
ttatttgcctggatgtggccaatgggtattcagaacattttgtggaattcgtgaaacttgtccgtgccaaatttcctgaacacaccattatggcagggaacgtggtgacaggagaaatgg

SEQ ID NO: 334708 - DNA, 120 bp, Artificial Sequence
  ENSG00000137198_5 (sequence is synthesized)
tagaagagcttattctttccggagcagatatcatcaaagtgggagttggaccaggttctgtgtgcaccacccgcaccaagacgggagtggggtacccccagctgagtgccgtcattgagt

SEQ ID NO: 334709 - DNA, 120 bp, Artificial Sequence
  ENSG00000137198_6 (sequence is synthesized)
gtcgccaaagcctttggagctggagcagattttgtcatgctgggaggaatgttttcgggtcatacggagtgtgctggagaagtgtttgagaggaacggacggaagctcaagctcttctac

SEQ ID NO: 334710 - DNA, 120 bp, Artificial Sequence
  ENSG00000137198_7 (sequence is synthesized)
gggatgagctctgacaccgccatgaacaagcacgcaggaggagttgctgagtacagagcctctgagggtaagactgtggaagttccttacaaaggagatgtggaaaacactatcctggat

SEQ ID NO: 334711 - DNA, 120 bp, Artificial Sequence
  ENSG00000137198_8 (sequence is synthesized)
attctcgggggactgaggtccacgtgcacctacgtgggggccgccaaactcaaggagctcagcaggagggcaacattcatccgggtgacccagcagcacaacaccgtgttcagctaaccc

SEQ ID NO: 334712 - DNA, 120 bp, Artificial Sequence
  ENSG00000137198_9 (sequence is synthesized)
tggggacaaagcagcgtctggctcgagtggaagcgtccaaacctgcttttcccatctccccccaagtctgttccgtcagagcttctggctgctcctgaatggtggaatgctgtgtcctct

SEQ ID NO: 334713 - DNA, 120 bp, Artificial Sequence
  ENSG00000137198_10 (sequence is synthesized)
cttctgtctcctgctgcctggaggcttcggggctctcccgcctgccttctcggggcccagacgcaaggcaccgattgggccaacatcagagccctgctgcccagaactcataacctcatt

SEQ ID NO: 334714 - DNA, 120 bp, Artificial Sequence
  ENSG00000137198_11 (sequence is synthesized)
gttcaaaccaacacttgcacctttctctttttctctttctctctccctttctttgtttttctttcttttttaaaagaagatggtttcactttaatataatgctattatcttaagacttaa

SEQ ID NO: 334715 - DNA, 120 bp, Artificial Sequence
  ENSG00000137198_12 (sequence is synthesized)
cctcccaaagtgctaggattacagggctgagccactgtgcctggcagaatactccccaatcttaatgtttctgtgattctaagagagttagatctgaggaaggtggtcgtagttagccat

SEQ ID NO: 334716 - DNA, 120 bp, Artificial Sequence
  ENSG00000137198_13 (sequence is synthesized)
ttagccattaaaagccattcagcatggtccagtatatgggacactagccttcagtaggctgcatttgtttctcgcagtgtcccatggccctttctccctgcatggaagccttctcccttt

SEQ ID NO: 334717 - DNA, 120 bp, Artificial Sequence
  ENSG00000137198_14 (sequence is synthesized)
cacactggggaaatcgcattctttctgaatctcactttcctcacctgtgaaaaggaggttgaggatcctcgtggctggagaatgactcgggctcagatgggatgctgttttgtaacagtg

SEQ ID NO: 334718 - DNA, 120 bp, Artificial Sequence
  ENSG00000137200_0 (sequence is synthesized)
gcagtactggacccgagcgcgacggtgcggctggcggacccgggctggcttgtggggaaacgaaactgagggaggaggcggcggctctggcagcggcggcgacagtgtcggcctgacccc

SEQ ID NO: 334719 - DNA, 120 bp, Artificial Sequence
  ENSG00000137200_1 (sequence is synthesized)
ccctccgctccccggcagctcgctctctcccctcagcttaacgatgaagaggagaactgacccagaatgcactgcccccatcaagaaacagaaaaaaagagttgcagagcttgccctgag

SEQ ID NO: 334720 - DNA, 120 bp, Artificial Sequence
  ENSG00000137200_2 (sequence is synthesized)
cctcagctccacgtccgatgatgaacctccctcctctgtcagtcatggagcaaaagcatctactacaagccttagtgggtctgatagtgagaccgaggggaaacaacacagctctgactc

SEQ ID NO: 334721 - DNA, 120 bp, Artificial Sequence
  ENSG00000137200_3 (sequence is synthesized)
ttttgacgatgcattcaaagcagactctcttgtggaaggaacttcttctcgctattccatgtataatagcgtctcccagaagcttatggccaagatgggcttcagggaaggtgaaggatt

SEQ ID NO: 334722 - DNA, 120 bp, Artificial Sequence
  ENSG00000137200_4 (sequence is synthesized)
gggtaaatacagccagggtcggaaggacatcgttgaggcttccagtcagaaaggtcgaagaggcttgggtctgacactccggggctttgaccaggagctgaacgtggactggcgagatga

SEQ ID NO: 334723 - DNA, 120 bp, Artificial Sequence
  ENSG00000137200_5 (sequence is synthesized)
gccagagcccagtgcttgtgagcaggtgtcatggtttccagaatgtaccactgaaattcctgacactcaggaaatgagcgattggatggtggtgggaaagagaaagatgattattgaaga

SEQ ID NO: 334724 - DNA, 120 bp, Artificial Sequence
  ENSG00000137200_6 (sequence is synthesized)
tgaaacagagttttgtggggaagagctgcttcacagtgtgttgcagtgtaagagcgtgtttgatgtcttggatggggaagagatgcggcgagctcggactcgggccaatccctatgagat

SEQ ID NO: 334725 - DNA, 120 bp, Artificial Sequence
  ENSG00000137200_7 (sequence is synthesized)
gatccgaggagtcttctttctaaacagggcagcaatgaagatggctaacatggattttgtatttgatcgcatgttcacaaatccgcgggactcttatgggaagccactggtgaaggaccg

SEQ ID NO: 334726 - DNA, 120 bp, Artificial Sequence
  ENSG00000137200_8 (sequence is synthesized)
ggaagctgagcttctgtactttgctgatgtctgcgcaggcccaggtggcttctcagagtatgtgctgtggaggaagaagtggcatgcaaagggctttggaatgactttgaagggccctaa

SEQ ID NO: 334727 - DNA, 120 bp, Artificial Sequence
  ENSG00000137200_9 (sequence is synthesized)
tgacttcaagctggaggacttctactctgcttccagtgaactcttcgaaccctactatggtgagggtgggattgatggagatggagatatcacccgcccagagaacatctctgcttttcg

SEQ ID NO: 334728 - DNA, 120 bp, Artificial Sequence
  ENSG00000137200_10 (sequence is synthesized)
gaattttgtcctggataacacagatcgcaagggtgtccattttctgatggctgatgggggtttctcggtggaggggcaggagaacctgcaggagatcctcagcaagcagctgcttctgtg

SEQ ID NO: 334729 - DNA, 120 bp, Artificial Sequence
  ENSG00000137200_11 (sequence is synthesized)
tcagttcctcatggcgctgtccattgtccggacaggaggccacttcatctgtaaaacctttgacctgttcacaccgtttagtgtggggcttgtctacctgctgtactgctgctttgaacg

SEQ ID NO: 334730 - DNA, 120 bp, Artificial Sequence
  ENSG00000137200_12 (sequence is synthesized)
agtttgtctcttcaagcctattaccagccgtcctgccaactcagagaggtatgtggtgtgcaagggcctgaaggtgggcatagatgatgttcgggattacctcttcgcagtgaatattaa

SEQ ID NO: 334731 - DNA, 120 bp, Artificial Sequence
  ENSG00000137200_13 (sequence is synthesized)
actcaatcagctgcggaacacggattccgacgtcaacttggtggtccccctggaggtgatcaagggagaccatgaatttactgactacatgatacggtccaatgagagccactgtagtct

SEQ ID NO: 334732 - DNA, 120 bp, Artificial Sequence
  ENSG00000137200_14 (sequence is synthesized)
gcagatcaaagctctggcgaaaatccatgcctttgttcaagacacgacactgagtgagcctcgacaggcagagatacggaaggagtgcctccgactctgggggatcccagaccaggctcg

SEQ ID NO: 334733 - DNA, 120 bp, Artificial Sequence
  ENSG00000137200_15 (sequence is synthesized)
tgtggctccttcttcctccgaccctaaatcgaagttctttgagctaatccagggcactgagattgacatcttcagctacaagcccacactgctcacctctaaaaccctggagaagatccg

SEQ ID NO: 334734 - DNA, 120 bp, Artificial Sequence
  ENSG00000137200_16 (sequence is synthesized)
tctacacatgggatggccgccagtcagaccgctggatcaagctagacctgaagacagagctgccccgggacactctgctatctgtggaaattgtgcatgagctgaaaggggaggggaagg

SEQ ID NO: 334735 - DNA, 120 bp, Artificial Sequence
  ENSG00000137200_17 (sequence is synthesized)
cccagaggaagatcagtgccatccacatcctcgatgtccttgtgctgaatggcaccgacgttcgggagcagcactttaaccagcgaattcagcttgccgagaaatttgtgaaagccgttt

SEQ ID NO: 334736 - DNA, 120 bp, Artificial Sequence
  ENSG00000137200_18 (sequence is synthesized)
ccaagcctagtcggcccgacatgaatcccatcagggtgaaggaggtgtacagactggaagagatggagaagatttttgtcaggttggagatgaagatcatcaagggctccagtggcaccc

SEQ ID NO: 334737 - DNA, 120 bp, Artificial Sequence
  ENSG00000137200_19 (sequence is synthesized)
caaagctcagctacacagggcgtgatgaccggcactttgtacccatgggcctctacatcgtcaggacagtgaatgagccctggactatgggattcagcaaaagcttcaagaagaagttct

SEQ ID NO: 334738 - DNA, 120 bp, Artificial Sequence
  ENSG00000137200_20 (sequence is synthesized)
tctacaacaagaaaaccaaggactctacttttgacctccctgcagactccattgccccatttcacatttgctactatggccggctcttctgggagtggggggatggcattcgtgtgcatg

SEQ ID NO: 334739 - DNA, 120 bp, Artificial Sequence
  ENSG00000137200_21 (sequence is synthesized)
actcccagaagccccaggaccaggacaagctgtccaaggaggacgtcctctccttcatccagatgcacagggcctaagagcctcagaatgtgccacccctgcagaatgccctgtcattcc

SEQ ID NO: 334740 - DNA, 120 bp, Artificial Sequence
  ENSG00000137200_22 (sequence is synthesized)
tgagatggggccacctggggcccacagtgctggcttcttccccctcttgaaaagggactggggagcattgcacctggcatgaggagtgggtggcctcctctccatcccctgaagagctca

SEQ ID NO: 334741 - DNA, 120 bp, Artificial Sequence
  ENSG00000137200_23 (sequence is synthesized)
ggcagggccctgcagagaacactcatgttccttctgggacacctgcctgggaactttcccctgccaggactcagcctgaaggaagctgctcctgaggcaggtatgaggtcagtgcctagg

SEQ ID NO: 334742 - DNA, 120 bp, Artificial Sequence
  ENSG00000137200_24 (sequence is synthesized)
gcacgtgggactgatggaggacatatcagagtggcagagctgtgggctctgctgttctctcctgcatcctgtagactcacttttctgagttccatgcactgccctgagggtagccatgcc

SEQ ID NO: 334743 - DNA, 120 bp, Artificial Sequence
  ENSG00000137200_25 (sequence is synthesized)
cttgctttgcccaactttttattgggccatccctgagtgggtggagacctgctgtcatgagctggccaggagaacctgctataaaaaaatcaaggttttgtttctttgaacttactctgt

SEQ ID NO: 334744 - DNA, 120 bp, Artificial Sequence
  ENSG00000137200_26 (sequence is synthesized)
tttgatgccaaattggagaccattttcttgtctccttcccccactcatcctggccttccctggagttcttcctagcccagagctctgacagtccagcagggtgggaaggagggagtttgg

SEQ ID NO: 334745 - DNA, 120 bp, Artificial Sequence
  ENSG00000137200_27 (sequence is synthesized)
gcaaactctcatccctgataccacattgagatcctgggagccctcttttcgtactgagtatggagttgtagagccatcctaggtgccatccccttttggtccaaacattgggcagcgcta

SEQ ID NO: 334746 - DNA, 120 bp, Artificial Sequence
  ENSG00000137200_28 (sequence is synthesized)
gatggcaggaagcagccttgaagacccgtctttcccccacagcagcaggggccccagcagtaacaaagggtacctccaggggtttgggtagcgctgccctctggcagtcatgcaccgctg

SEQ ID NO: 334747 - DNA, 120 bp, Artificial Sequence
  ENSG00000137200_29 (sequence is synthesized)
tctgccatagccgctctagggtcttggcagaattctgagcttgaagtgcagctcccttactaccctttcccttcctttttcttccctaataggaggtacaatctgcttttgtttgtcgtt

SEQ ID NO: 334748 - DNA, 120 bp, Artificial Sequence
  ENSG00000137200_30 (sequence is synthesized)
aagtggtcactcccatttcctttatcttggccgacaacacagagaggagggggagctgggcagtagcttggggtgggggtgggcacctgtggttgtttttaatgggaaatacctctcaga

SEQ ID NO: 334749 - DNA, 120 bp, Artificial Sequence
  ENSG00000137200_31 (sequence is synthesized)
gatgttcatgcaggctccctagggccccatcccagtgccaggctggtttccatggagatagggcactgaggctcccgtgaggttggaatcgacttcaccatgggggtccttcagccagca

SEQ ID NO: 334750 - DNA, 120 bp, Artificial Sequence
  ENSG00000137200_32 (sequence is synthesized)
tccagctccccacccccaggctggcagtagcactgctgagatgctgtatttccacccaattctgggtatatcagtgtgtcttgcagaatcttggatcattaaagataaacatatttttaa

SEQ ID NO: 334751 - DNA, 120 bp, Artificial Sequence
  ENSG00000137200_33 (sequence is synthesized)
taaccagcggtctgacctgggccccagggtagggagggtgggggtaggccagggcagcttgggaggacagcggcctcccgaggtgtggccccttatctaggccttctctgcttgttgaca

SEQ ID NO: 334752 - DNA, 120 bp, Artificial Sequence
  ENSG00000137200_34 (sequence is synthesized)
tcctgagagtttccccctcccacccactgactggtcccaaagtcagggtgagaattggagttgccacttcagagtttgctagggcttgggccctggttatcagagataccagcacactcc

SEQ ID NO: 334753 - DNA, 120 bp, Artificial Sequence
  ENSG00000137200_35 (sequence is synthesized)
gggtactccttggaagaaatatcctgtgcttgagtggtcccatttaagttgctcatctgagtgggtgcactgtagtttccatgctttggggtgacagggcagacacatacaataaagatg

SEQ ID NO: 334754 - DNA, 120 bp, Artificial Sequence
  ENSG00000137200_36 (sequence is synthesized)
tgcagactccattgccccatttcacctccccagccttgcctgcctgtcgaagatggattaactccgcactcccctgggatcgccacatgaccacttcaagtccccaagccgcccttcgct

SEQ ID NO: 334755 - DNA, 120 bp, Artificial Sequence
  ENSG00000137200_37 (sequence is synthesized)
gcacagactgcatttttttctgccataattacaagcaatggcactgactggagggcatgacagtgtgtggtggggggatggacaggtggcacaatgtctgctgctcaaccccagcagtgc

SEQ ID NO: 334756 - DNA, 120 bp, Artificial Sequence
  ENSG00000137200_38 (sequence is synthesized)
ccgagccctggaagtaactcccactatttggcttggaaagtgcttcccactgtctccttcccactcgagctgggggccttctcctctattctgaattgtaatccagagctttcccttgaa

SEQ ID NO: 334757 - DNA, 120 bp, Artificial Sequence
  ENSG00000137200_39 (sequence is synthesized)
taaaatgtctgggagcttgcctcaaatacctcaagcatctactacaagccttagtgggtctgatagtgagaccgaggggaaacaacacagctctgactcttttgacgatgcattcaaagc

SEQ ID NO: 334758 - DNA, 120 bp, Artificial Sequence
  ENSG00000137200_40 (sequence is synthesized)
caggtgacacttcctcagctgtctcctcaccccaggacccacttagaggccctattggacaagaacatgtacaaggggttggtggggaagttaaaaaaatctgcttatattagaggacag

SEQ ID NO: 334759 - DNA, 120 bp, Artificial Sequence
  ENSG00000137200_41 (sequence is synthesized)
ccccttaaattgtctctgagttttaacagacccaggtgctggtttccttgactttgtcatatttactcccaagactacttcacccatctcttggaatagacccattggctgcttttggtg

SEQ ID NO: 334760 - DNA, 120 bp, Artificial Sequence
  ENSG00000137200_42 (sequence is synthesized)
ttttctctctaatctaggaggccacttcatctgtaaaacctttgacctgttcacaccgtttagtgtggggcttgtctacctgctgtactgctgctttgaacgagtttgtctcttcaagcc

SEQ ID NO: 334761 - DNA, 120 bp, Artificial Sequence
  ENSG00000137203_0 (sequence is synthesized)
ggcagccagcactttgcgctcacccagagagtagctccacttgggtgcgagaccgagaggggcatatccgttcacgccgatccatgaaaatgctttggaaattgacggataatatcaagt

SEQ ID NO: 334762 - DNA, 120 bp, Artificial Sequence
  ENSG00000137203_1 (sequence is synthesized)
acgaggactgcgaggaccgtcacgacggcaccagcaacgggacggcacggttgccccagctgggcactgtaggtcaatctccctacacgagcgccccgccgctgtcccacacccccaatg

SEQ ID NO: 334763 - DNA, 120 bp, Artificial Sequence
  ENSG00000137203_2 (sequence is synthesized)
ccgacttccagcccccatacttccccccaccctaccagcctatctacccccagtcgcaagatccttactcccacgtcaacgacccctacagcctgaaccccctgcacgcccagccgcagc

SEQ ID NO: 334764 - DNA, 120 bp, Artificial Sequence
  ENSG00000137203_3 (sequence is synthesized)
cgcagcacccaggctggcccggccagaggcagagccaggagtctgggctcctgcacacgcaccgggggctgcctcaccagctgtcgggcctggatcctcgcagggactacaggcggcacg

SEQ ID NO: 334765 - DNA, 120 bp, Artificial Sequence
  ENSG00000137203_4 (sequence is synthesized)
aggacctcctgcacggcccacacgcgctcagctcaggactcggagacctctcgatccactccttacctcacgccatcgaggaggtcccgcatgtagaagacccgggtattaacatcccag

SEQ ID NO: 334766 - DNA, 120 bp, Artificial Sequence
  ENSG00000137203_5 (sequence is synthesized)
atcaaactgtaattaagaaaggccccgtgtccctgtccaagtccaacagcaatgccgtctccgccatccctattaacaaggacaacctcttcggcggcgtggtgaaccccaacgaagtct

SEQ ID NO: 334767 - DNA, 120 bp, Artificial Sequence
  ENSG00000137203_6 (sequence is synthesized)
tctgttcagttccgggtcgcctctcgctcctcagctccacctcgaagtacaaggtcacggtggcggaagtgcagcggcggctctcaccacccgagtgtctcaacgcgtcgctgctgggcg

SEQ ID NO: 334768 - DNA, 120 bp, Artificial Sequence
  ENSG00000137203_7 (sequence is synthesized)
gagtgctccggagggcgaagtctaaaaatggaggaagatctttaagagaaaaactggacaaaataggattaaatctgcctgcagggagacgtaaagctgccaacgttaccctgctcacat

SEQ ID NO: 334769 - DNA, 120 bp, Artificial Sequence
  ENSG00000137203_8 (sequence is synthesized)
cactagtagagggagaagctgtccacctagccagggactttgggtacgtgtgcgaaaccgaatttcctgccaaagcagtagctgaatttctcaaccgacaacattccgatcccaatgagc

SEQ ID NO: 334770 - DNA, 120 bp, Artificial Sequence
  ENSG00000137203_9 (sequence is synthesized)
aagtgacaagaaaaaacatgctcctggctacaaaacagatatgcaaagagttcaccgacctgctggctcaggaccgatctcccctggggaactcacggcccaaccccatcctggagcccg

SEQ ID NO: 334771 - DNA, 120 bp, Artificial Sequence
  ENSG00000137203_10 (sequence is synthesized)
gcatccagagctgcttgacccacttcaacctcatctcccacggcttcggcagccccgcggtgtgtgccgcggtcacggccctgcagaactatctcaccgaggccctcaaggccatggaca

SEQ ID NO: 334772 - DNA, 120 bp, Artificial Sequence
  ENSG00000137203_11 (sequence is synthesized)
aaatgtacctcagcaacaaccccaacagccacacggacaacaacgccaaaagcagtgacaaagaggagaagcacagaaagtgaggctctcctcccgccccgcccctcccacgcctcacca

SEQ ID NO: 334773 - DNA, 120 bp, Artificial Sequence
  ENSG00000137203_12 (sequence is synthesized)
accagccccccgcgcgcccaccctccggcgggtgacagctccgggatcagcaacccttcctgctgctgctactgctgctgctgctgccgccgccgccgccgccgctgcccttgggtcccc

SEQ ID NO: 334774 - DNA, 120 bp, Artificial Sequence
  ENSG00000137203_13 (sequence is synthesized)
tgtcagtggggcagcctctccgactctgcacccgcctcgacctccccacccgctcccacacccctgtgccctcatgtggagcctaagagaacagaacaggccgtgaagccagcagagaaa

SEQ ID NO: 334775 - DNA, 120 bp, Artificial Sequence
  ENSG00000137203_14 (sequence is synthesized)
agttctgccaagtttgtgaacccttttttttttaaacaaaacaacaaatcaacaacagcaacaacaacaacaaaaattaaaaacttttttctaaaaaaaaagtgaaaataaaaaaaatta

SEQ ID NO: 334776 - DNA, 120 bp, Artificial Sequence
  ENSG00000137203_15 (sequence is synthesized)
tatgcgcttcatgggactgagtcaccaccttcccttacatacttcagttcagattgtagccatacttaaaaaaaaaaaaaaagccaaaagatgatgacaacatttttatcagtattgtga

SEQ ID NO: 334777 - DNA, 120 bp, Artificial Sequence
  ENSG00000137203_16 (sequence is synthesized)
ataaacttgaacacaaatacacgaagttccatgtcatgtcttcagttgtagaagtttttcctctttaaggtaaagcgaccaacttgaactttctctggcaacacgattcgcagttatata

SEQ ID NO: 334778 - DNA, 120 bp, Artificial Sequence
  ENSG00000137203_17 (sequence is synthesized)
agggaatcagtgttcacgtctctgtatatatttatttatgtgtaatttaatgggaattgtaaatatggtgagtctgttttaagcctttttttttttatttatctgatcttgtttacctct

SEQ ID NO: 334779 - DNA, 120 bp, Artificial Sequence
  ENSG00000137203_18 (sequence is synthesized)
tgtttagtgggttttgaatcttccctattagttcttcatgtggttcatggtactgatttagaaatccagtgtttgggggatttttttctctgggattcatgaatttagccctgttgtagc

SEQ ID NO: 334780 - DNA, 120 bp, Artificial Sequence
  ENSG00000137203_19 (sequence is synthesized)
atgttaaaggtgacaaacagctggacaaatttttaaaaagtaaaataaaattttatctataattagtattattacatttagcttttcattgaaccgaaagaaaaaaagtgatattggacc

SEQ ID NO: 334781 - DNA, 120 bp, Artificial Sequence
  ENSG00000137203_20 (sequence is synthesized)
ctggaaagattttgaaacttgagtggtttgataacccttctatgtattgtagggagaaaaaaaaaagtttattttattccactgtcctcccttaaaagcatcatttgagcaataaatgaa

SEQ ID NO: 334782 - DNA, 120 bp, Artificial Sequence
  ENSG00000137203_21 (sequence is synthesized)
tattgtctttaaaccaagggttagggaattttcctctctctctctctctcctctctctttctgttcaaagaacttcaaacatttgggaccacctggtattctgtattttcactggccata

SEQ ID NO: 334783 - DNA, 120 bp, Artificial Sequence
  ENSG00000137203_22 (sequence is synthesized)
ttggaagcagttctagttgcattgtattgagttgtgctggcagtagtttccatgcctgtcaatgtatcatagtcctttgttgcccagataaataaatatttgatacgctttatgtcgatt

SEQ ID NO: 334784 - DNA, 120 bp, Artificial Sequence
  ENSG00000137203_23 (sequence is synthesized)
tttttttattcagtggctgtctttacccaggcgtatttttgttcttggcagtattttttattcagtatggttacagtaattgagtttaactctcccttggcaattgctccttgcaataag

SEQ ID NO: 334785 - DNA, 120 bp, Artificial Sequence
  ENSG00000137203_24 (sequence is synthesized)
cagctgaacccattgtttccctcaagtataataaaaacttactttcaacttggagttcagagcagggtatcatttagatattccactgtgtctgtattcagacaaatgacacaataaaac

SEQ ID NO: 334786 - DNA, 120 bp, Artificial Sequence
  ENSG00000137203_25 (sequence is synthesized)
ccaatgtattcttttggataaaagattgtttgtactgctaaaggaatgacatactgtcttttccttactagaaacattaattttattattaaaaataaagttttattttatttatgttga

SEQ ID NO: 334787 - DNA, 120 bp, Artificial Sequence
  ENSG00000137203_26 (sequence is synthesized)
gcagattaacacagctaaaagtcggttcccggtgatttattttgatgcacgcacgagacggtatctagacttgcaggcacacacacgtctgtttttaggctcaacttcagaagcgggtgt

SEQ ID NO: 334788 - DNA, 120 bp, Artificial Sequence
  ENSG00000137203_27 (sequence is synthesized)
gcagttccataggagttctgtattcgtgtccacgttgcacccaggaaaccttagcctgaacaccaatttgaactgtcagttggccctagcttcacacaaacaggagaaaaattgtttaac

SEQ ID NO: 334789 - DNA, 120 bp, Artificial Sequence
  ENSG00000137203_28 (sequence is synthesized)
tggcggagtgaattcctgggccagcgcgcatgcgtcggcaggtagcaacccagctctttatgaccaggtgagatgttggtgagcaggtaaaaaaggaggatttgcctaagcgattccagg

SEQ ID NO: 334790 - DNA, 120 bp, Artificial Sequence
  ENSG00000137203_29 (sequence is synthesized)
actttctttctcacacacgcacgcagacacattctccctctctgcgctctctccttcggtctccctctctgcctctttctctttcacttttgcatgccctgcaaccttttaaaatgttgc

SEQ ID NO: 334791 - DNA, 120 bp, Artificial Sequence
  ENSG00000137203_30 (sequence is synthesized)
cccttccctgtgattcgccagacgccgcgccgcggccccccgcgcgctcgcccgctccctctctcgctcgctttttgtctctcgcgctccctctccccactccgatttgctacactgaga

SEQ ID NO: 334792 - DNA, 120 bp, Artificial Sequence
  ENSG00000137203_31 (sequence is synthesized)
ctcccgtcaatggactgcattgagagccggctccggcgcgagttgcctctccgcttcacgctcgatttccaggcattcttcccttattaagtattcgtgtaatattaatagtcatgaata

SEQ ID NO: 334793 - DNA, 120 bp, Artificial Sequence
  ENSG00000137203_32 (sequence is synthesized)
tctgctattaggaggctccaggaacgctgcccagcgcggttattagaagctcaagcgaagccgccgctaagaaaagagggggagacacggattaaggaacacgcacgcacccacacactc

SEQ ID NO: 334794 - DNA, 120 bp, Artificial Sequence
  ENSG00000137203_33 (sequence is synthesized)
acacatactttttcctttttccttttttggggtttttcatttttaaagaactttgaatcataaccagtcgcggcaggatagagaccgtgggttcgaccagctgaaggcgccgcgcgaatc

SEQ ID NO: 334795 - DNA, 120 bp, Artificial Sequence
  ENSG00000137203_34 (sequence is synthesized)
ggtggttcaagttcggatggatccgagccgggctcccgcgctccggggagcgtcggcgccgtgactggagtcctgggtggcgcggggctctcggcgccttttgtgtggggcgcgctcggg

SEQ ID NO: 334796 - DNA, 120 bp, Artificial Sequence
  ENSG00000137203_35 (sequence is synthesized)
aagtcaagcagagaagaaaaaaataaaacccacgcatacctcagaaaagcccaattcaactcctaacatcacccaaccaccccatcccagaagaatgaaaccatggagcacaacaggtaa

SEQ ID NO: 334797 - DNA, 120 bp, Artificial Sequence
  ENSG00000137203_36 (sequence is synthesized)
tatcagttttcacacctctgcatccccttttaggatgctccgggatatttttccttgtgaatttcagtgaacgattcttttctatattaaacttggtttactacctgagttgcacaggta

SEQ ID NO: 334798 - DNA, 120 bp, Artificial Sequence
  ENSG00000137203_37 (sequence is synthesized)
ctttgcagagaatatagccagatgtgaatggaattatttcatggcaaaaagaaacatttgcatgtactcctatacctccatccttcttccttcttttcctctaccataaagttacacctc

SEQ ID NO: 334799 - DNA, 120 bp, Artificial Sequence
  ENSG00000137203_38 (sequence is synthesized)
cccagcctaattctgagctaaacaacgcacaagtttaagaactgcacattctccaagtttgtctcctttaaagggctcagcagtaaataacttaagttattctgacatctgcgtttgaga

SEQ ID NO: 334800 - DNA, 120 bp, Artificial Sequence
  ENSG00000137203_39 (sequence is synthesized)
aatgcgtgaccattacttcctgaattaatttgggaatctttgacctgcgtcctgatttaagaccatcctgaaagctcagggttatgtgccctttcaggtctttgttttccaaacatatgc

SEQ ID NO: 334801 - DNA, 120 bp, Artificial Sequence
  ENSG00000137203_40 (sequence is synthesized)
agccctccagcccatgcccggcggggaccagtcgccaggagcgcagagccgcgatgtccatacttgccaaaatgggggactggcaggccgcggacaccacaaggcatccaaggcttggct

SEQ ID NO: 334802 - DNA, 120 bp, Artificial Sequence
  ENSG00000137203_41 (sequence is synthesized)
ctctggccaggatggtggcggtaaaaggctctgcctgtcgccgatttcatcatcagaaccgcgaggccctgttttcgccccaaccaagaggcctggtgagggtgagattctgtgtgccca

SEQ ID NO: 334803 - DNA, 120 bp, Artificial Sequence
  ENSG00000137203_42 (sequence is synthesized)
aaagcccaggggacaattcgaatctaatgccctgaacttccccccaaaaatctgaggccttgctactcctggtcgagttctttctcttgtttcagatttaggccattaaaagtaaagttc

SEQ ID NO: 334804 - DNA, 120 bp, Artificial Sequence
  ENSG00000137203_43 (sequence is synthesized)
tgagaagtgcagtcttcactaagctacctggagttggagaaagaaaggccttttgcgttctgtacttttttcccttggatttattacttttatcaagagtgagctcttttatattcttct

SEQ ID NO: 334805 - DNA, 120 bp, Artificial Sequence
  ENSG00000137203_44 (sequence is synthesized)
ggggagcgcacggtgcccctgtccgaggaaagctcaagaggaggccgaggagaggaccagtgcagcgagcgggccggtcccgggcagggcgccgggtcatggaggagccgcgcagcagcg

SEQ ID NO: 334806 - DNA, 120 bp, Artificial Sequence
  ENSG00000137203_45 (sequence is synthesized)
ggcagccgagtcccgagtcccagactcggctgcgaagcggcggagcccgcggccagacagggccgggaagcgcctgccgcgccgagagccccacgagcgcccggacgcggtcccaagcag

SEQ ID NO: 334807 - DNA, 120 bp, Artificial Sequence
  ENSG00000137203_46 (sequence is synthesized)
cgcccttctcctcgccctcctcctcctcctcgccctcctcttcctcctcctcctccttgccctcctcctctccctcctccttctcctcctccacctcctctccctcctcctcctcctcct

SEQ ID NO: 334808 - DNA, 120 bp, Artificial Sequence
  ENSG00000137203_47 (sequence is synthesized)
ttaaacccaataaggctgaatctttctattttaaaccttgacttgacgtccccctttccctatccaaaccataaatcgactctgtcgagaaaaaggctcctaacagaggaagcgaaaaag

SEQ ID NO: 334809 - DNA, 120 bp, Artificial Sequence
  ENSG00000137203_48 (sequence is synthesized)
agaacttgcagagatgtgtttattttttccaaataggatttcctaaaggctcagaattagcaaatagataggcacagaacagcaatgcttaaataatcagccttcagtatgttggtaatg

SEQ ID NO: 334810 - DNA, 120 bp, Artificial Sequence
  ENSG00000137203_49 (sequence is synthesized)
ccaacaggctagctttgttctgactcatgatttgaccatttaatttagtttaatgatatttggacaaacacacaaaatgtacagtagttgaactgatttggaagtggcatttcaattttg

SEQ ID NO: 334811 - DNA, 120 bp, Artificial Sequence
  ENSG00000137203_50 (sequence is synthesized)
aaacagtttgatagtttaatccattgcctggatgaaggttaagaagtgtataatgctaaaatagtacaaataatttaacattaatgtaagaacagatgataagaagcactctttagtaga

SEQ ID NO: 334812 - DNA, 120 bp, Artificial Sequence
  ENSG00000137203_51 (sequence is synthesized)
ggaaaaaaacattcatgttcttcaatttagtttcttgttagctgtttaagggtcttagaactttgtgaattaggttaacaaaattttagcttttggttaaaattagtatcttgaagatgg

SEQ ID NO: 334813 - DNA, 120 bp, Artificial Sequence
  ENSG00000137203_52 (sequence is synthesized)
gaggaatattagcatacttgttcagaggagaaattgttagaaaagtgtcaagtgatttgcatggatttgtaatctgtattgtgtttagtgagtagaaataaagtttactgaattaaatgc

SEQ ID NO: 334814 - DNA, 120 bp, Artificial Sequence
  ENSG00000137203_53 (sequence is synthesized)
gagggcaagaaagcgaaacttggagttcccttaagcacaccgcggcgacgtctacggagtgtaaaaacccatgctctcaggcctagggtttggcctgctcaggctatggccgctgctggg

SEQ ID NO: 334815 - DNA, 120 bp, Artificial Sequence
  ENSG00000137203_54 (sequence is synthesized)
agggtgtcggtgctcctggcagcccagatcctgacttcaaaccactgcactggcgacaggctgggacagccctgcagggtctagccctggaaagtcgaccattttctggacggagggcgg

SEQ ID NO: 334816 - DNA, 120 bp, Artificial Sequence
  ENSG00000137203_55 (sequence is synthesized)
tctccctagtatttccttataaaaacattttattcggaggcggagagtgagggacgttttgaggaaccacacaaagtagttgcgagttctaccccagaacaatggtttctggagctccct

SEQ ID NO: 334817 - DNA, 120 bp, Artificial Sequence
  ENSG00000137203_56 (sequence is synthesized)
caaacaatgcctgcattaccatttccaccaacacagataaatcagacgaatgtcaccattaacaatatcttcctctcgacgacagtaaactgtctcaattgctaaaagatctacttccat

SEQ ID NO: 334818 - DNA, 120 bp, Artificial Sequence
  ENSG00000137203_57 (sequence is synthesized)
cgctgagtctggcgtggagatttctccctgtcctgggaatgatgttaaatgcaaccaaaagagctcattaaatgtcctcaaaatgtaaaaggaagtgtaaaagacacactaagatcattt

SEQ ID NO: 334819 - DNA, 120 bp, Artificial Sequence
  ENSG00000137203_58 (sequence is synthesized)
taaccggattttataagcacaagtgaaacctaaaagttatgtgtacaccctatcctgattaaagaaaaactaagtagcaaatccaagcagagggacattaaaatgcagccttcttcttac

SEQ ID NO: 334820 - DNA, 120 bp, Artificial Sequence
  ENSG00000137203_59 (sequence is synthesized)
taggggtgctaagtggtgacctcataaatcattagctaggttcccaacgcctatcagaacctgctacactccatattaaattaaatgtttcgagactattgggtaatacattatttgagt

SEQ ID NO: 334821 - DNA, 120 bp, Artificial Sequence
  ENSG00000137203_60 (sequence is synthesized)
tctaatttagttatcaataaatgcagtttaaaatgatttctaaataagcatggcattagcacatttactatttacaatgcaaaccaggctattgataatttgaaaatactttctggaatt

SEQ ID NO: 334822 - DNA, 120 bp, Artificial Sequence
  ENSG00000137204_0 (sequence is synthesized)
ccacctccagagtccaagggtctatgtggtgggcagtttgagctggctggatactagagggaggctgcacctgaagcatttggtgggtgagcagcatgggctttgaggagctgctggagc

SEQ ID NO: 334823 - DNA, 120 bp, Artificial Sequence
  ENSG00000137204_1 (sequence is synthesized)
aggtgggcggctttgggcccttccaactgcggaatgtggcactgctggccctgccccgagtgctgctaccactgcacttcctcctgcccatcttcctggctgccgtgcctgcccaccgat

SEQ ID NO: 334824 - DNA, 120 bp, Artificial Sequence
  ENSG00000137204_2 (sequence is synthesized)
gtgccctgccgggtgcccctgccaacttcagccatcaggatgtgtggctggaggcccatcttccccgggagcctgatggcacgctcagctcctgcctccgctttgcctatccccaggctc

SEQ ID NO: 334825 - DNA, 120 bp, Artificial Sequence
  ENSG00000137204_3 (sequence is synthesized)
tccccaacaccacgttgggggaagaaaggcagagccgtggggagctggaggatgaacctgccacagtgccctgctctcagggctgggagtacgaccactcagaattctcctctaccattg

SEQ ID NO: 334826 - DNA, 120 bp, Artificial Sequence
  ENSG00000137204_4 (sequence is synthesized)
caactgagtcccagtgggatctggtgtgtgagcagaaaggtctgaacagagctgcgtccactttcttcttcgccggtgtgctggtgggggctgtggcctttggatatctgtccgacaggt

SEQ ID NO: 334827 - DNA, 120 bp, Artificial Sequence
  ENSG00000137204_5 (sequence is synthesized)
ttgggcggcggcgtctgctgctggtagcctacgtgagtaccctggtgctgggcctggcatctgcagcctccgtcagctatgtaatgtttgccatcacccgcacccttactggctcagccc

SEQ ID NO: 334828 - DNA, 120 bp, Artificial Sequence
  ENSG00000137204_6 (sequence is synthesized)
tggctggttttaccatcatcgtgatgccactggagctggagtggctggatgtggagcaccgcaccgtggctggagtcctgagcagcaccttctggacagggggcgtgatgctgctggcac

SEQ ID NO: 334829 - DNA, 120 bp, Artificial Sequence
  ENSG00000137204_7 (sequence is synthesized)
tggttgggtacctgatacgggactggcgatggcttctgctagctgtcaccctgccttgtgccccaggcatcctcagcctctggtgggtgcctgagtctgcacgctggcttctgacccaag

SEQ ID NO: 334830 - DNA, 120 bp, Artificial Sequence
  ENSG00000137204_8 (sequence is synthesized)
gccatgtgaaagaggcccacaggtacttgctccactgtgccaggctcaatgggcggccagtgtgtgaggacagcttcagccaggaggctgtgagcaaagtggccgccggggaacgggtgg

SEQ ID NO: 334831 - DNA, 120 bp, Artificial Sequence
  ENSG00000137204_9 (sequence is synthesized)
tccgaagaccttcatacctagacctgttccgcacaccacggctccgacacatctcactgtgctgcgtggtggtgtggttcggagtgaacttctcctattacggcctgagtctggatgtgt

SEQ ID NO: 334832 - DNA, 120 bp, Artificial Sequence
  ENSG00000137204_10 (sequence is synthesized)
ttgttcggggctgtggaactgccctccaagctgctggtctacttgtcggtgcgctacgcaggacgccgcctcacgcaagccgggacactgctgggcacggccctggcgttcggcactaga

SEQ ID NO: 334833 - DNA, 120 bp, Artificial Sequence
  ENSG00000137204_11 (sequence is synthesized)
ctgctagtgtcctccgatatgaagtcctggagcactgtcctggcagtgatggggaaagctttttctgaagctgccttcaccactgcctacctgttcacttcagagttgtaccctacggtg

SEQ ID NO: 334834 - DNA, 120 bp, Artificial Sequence
  ENSG00000137204_12 (sequence is synthesized)
ctcagacagacagggatggggctgactgcactggtgggccggctggggggctctttggccccactggcggccttgctggatggagtgtggctgtcactgcccaagcttacttatgggggg

SEQ ID NO: 334835 - DNA, 120 bp, Artificial Sequence
  ENSG00000137204_13 (sequence is synthesized)
atcgccctgctggctgccggcaccgccctcctgctgccagagacgaggcaggcacagctgccagagaccatccaggacgtggagagaaagagtgccccaaccagtcttcaggaggaagag

SEQ ID NO: 334836 - DNA, 120 bp, Artificial Sequence
  ENSG00000137204_14 (sequence is synthesized)
atgcccatgaagcaggtccagaactaagtgggagtggaggcaggccctccacagaagctctgcagcaggggctgggagagcagaagggcaggccctgcaactcaggctgggagtatcgaa

SEQ ID NO: 334837 - DNA, 120 bp, Artificial Sequence
  ENSG00000137204_15 (sequence is synthesized)
ccctctgcctagggccggagttgctgccagtacccgctccctctgctcatccatccttgattatttggcttctaggaacagttgacttcccagaatgcagtgggctgctgggcacccctc

SEQ ID NO: 334838 - DNA, 120 bp, Artificial Sequence
  ENSG00000137204_16 (sequence is synthesized)
tcacggttggggaggattctgtaaataaaggtgccccttgggttggggcagtggtgacgagctgtgggaagagccctggataggaagccactgagtctgccctgggctctgataaaacct

SEQ ID NO: 334839 - DNA, 120 bp, Artificial Sequence
  ENSG00000137204_17 (sequence is synthesized)
tcaccattaacttgctgtgtgaccttgggcatgtggctttccctctctgggcctcagtctgttcatctcccaaatggataatgaagcctcttgggaggccctaccataggatctgttgcc

SEQ ID NO: 334840 - DNA, 120 bp, Artificial Sequence
  ENSG00000137204_18 (sequence is synthesized)
atgctcaaatgagttactgaataaggtgcttctgcttcttctagagatggtgctaaagaaaggactagcatatgagacttctggtaccaatggggctggtgggcatgctgtccactgtgt

SEQ ID NO: 334841 - DNA, 120 bp, Artificial Sequence
  ENSG00000137204_19 (sequence is synthesized)
ggtgctaggactgccaatgccaggcccaagggacaaaaagaacagagctttttgttctcatggctggccctgctacctccgaggcaccctgcagggcaatgcatgtcatcccaaccccca

SEQ ID NO: 334842 - DNA, 120 bp, Artificial Sequence
  ENSG00000137204_20 (sequence is synthesized)
cactccccatcctccaacccactggtctcatgcccaaagaagagttgaaggcatgggagccaacattttattgaagaagccacagaggctgaaattcaataaacacaagttttatgagta

SEQ ID NO: 334843 - DNA, 120 bp, Artificial Sequence
  ENSG00000137204_21 (sequence is synthesized)
gattcagagttgatctatccatcctctggttagactcagcatttcatacctgcctgtccagctccatcatcagccatcatggtcactgtcaccatcattcttcaatgacatcagagaaga

SEQ ID NO: 334844 - DNA, 120 bp, Artificial Sequence
  ENSG00000137204_22 (sequence is synthesized)
gcaggtcgaggccttccttgggaagaagctgaggctgcaggactggggagggacaaagtttcctattccccaagctggcgtgaatcgttgggaggtttattatctggcatggaggtacca

SEQ ID NO: 334845 - DNA, 120 bp, Artificial Sequence
  ENSG00000137204_23 (sequence is synthesized)
gaggactgcaggcagctggggagcgggagatacaggaagtgaaagatgagattaatcagagcctgagatttgaggatagagagattgagagatgaagggaaagagaaacgaagtgaccaa

SEQ ID NO: 334846 - DNA, 120 bp, Artificial Sequence
  ENSG00000137204_24 (sequence is synthesized)
agaggtgtgtgcacaggactgtgtctgtgtacgtgtgataacatgcatatggatgcaggtgctcagatacctgacaccttaggattcagacaggaaactatatctgcacatgtgtacttg

SEQ ID NO: 334847 - DNA, 120 bp, Artificial Sequence
  ENSG00000137204_25 (sequence is synthesized)
gtgcatgtatgtgtgcgtgcacaggtgagtgtttcagggtgcatgattgggggcatgtaaactgcaagcataaatgtgtacatgagtgtatgaacacaaatacataaggttgttcaggaa

SEQ ID NO: 334848 - DNA, 120 bp, Artificial Sequence
  ENSG00000137207_0 (sequence is synthesized)
gtgttccggccgatcccacctctcctcgaccctggacgtctaccttccggaggcccacatcttgcccactccgcgcgcggggctagcgcgggtttcagcgacgggagccctcaagggaca

SEQ ID NO: 334849 - DNA, 120 bp, Artificial Sequence
  ENSG00000137207_1 (sequence is synthesized)
tggcaactacagcggcgccggcgggcggcgcccgaaatggagctggcccggaatggggagggttcgaagaaaacatccagggcggaggctcagctgtgattgacatggagaacatggatg

SEQ ID NO: 334850 - DNA, 120 bp, Artificial Sequence
  ENSG00000137207_2 (sequence is synthesized)
atacctcaggctctagcttcgaggatatgggtgagctgcatcagcgcctgcgcgaggaagaagtagacgctgatgcagctgatgcagctgctgctgaagaggaggatggagagttcctgg

SEQ ID NO: 334851 - DNA, 120 bp, Artificial Sequence
  ENSG00000137207_3 (sequence is synthesized)
gcatgaagggctttaagggacagctgagccggcaggtggcagatcagatgtggcaggctgggaaaagacaagcctccagggccttcagcttgtacgccaacatcgacatcctcagaccct

SEQ ID NO: 334852 - DNA, 120 bp, Artificial Sequence
  ENSG00000137207_4 (sequence is synthesized)
actttgatgtggagcctgctcaggtgcgaagcaggctcctggagtccatgatccctatcaagatggtcaacttcccccagaaaattgcaggtgaactctatggacctctcatgctggtct

SEQ ID NO: 334853 - DNA, 120 bp, Artificial Sequence
  ENSG00000137207_5 (sequence is synthesized)
tcactctggttgctatcctactccatgggatgaagacgtctgacactattatccgggagggcaccctgatgggcacagccattggcacctgcttcggctactggctgggagtctcatcct

SEQ ID NO: 334854 - DNA, 120 bp, Artificial Sequence
  ENSG00000137207_6 (sequence is synthesized)
ctatggcctctttgggcattgcattgtcctgttcatcacctataatatccacctccacgccctcttctacctcttctggctgttggtgggtggactgtccacactgcgcatggtagcagt

SEQ ID NO: 334855 - DNA, 120 bp, Artificial Sequence
  ENSG00000137207_7 (sequence is synthesized)
gttggtgtctcggaccgtgggccccacacagcggctgctcctctgtggcaccctggctgccctacacatgctcttcctgctctatctgcattttgcctaccacaaagtggtagaggggat

SEQ ID NO: 334856 - DNA, 120 bp, Artificial Sequence
  ENSG00000137207_8 (sequence is synthesized)
cctggacacactggagggccccaacatcccgcccatccagagggtccccagagacatccctgccatgctccctgctgctcggcttcccaccaccgtcctcaacgccacagccaaagctgt

SEQ ID NO: 334857 - DNA, 120 bp, Artificial Sequence
  ENSG00000137207_9 (sequence is synthesized)
tgcggtgaccctgcagtcacactgaccccacctgaaattcttggccagtcctctttcccgcagctgcagagaggaggaagactattaaaggacagtcctgatgacatgtttcgtagatgg

SEQ ID NO: 334858 - DNA, 120 bp, Artificial Sequence
  ENSG00000137207_10 (sequence is synthesized)
ggtttgcagctgccactgagctgtagctgcgtaagtacctccttgatgcctgtcggcacttctgaaaggcacaaggccaagaactcctggccaggactgcaaggctctgcagccaatgca

SEQ ID NO: 334859 - DNA, 120 bp, Artificial Sequence
  ENSG00000137207_11 (sequence is synthesized)
gaaaatgggtcagctcctttgagaacccctccccacctaccccttccttcctctttatctctcccacattgtcttgctaaatatagacttggtaattaaaatgttgattgaagtctggaa

SEQ ID NO: 334860 - DNA, 120 bp, Artificial Sequence
  ENSG00000137207_12 (sequence is synthesized)
ggaaaagacaagcctccagggccttcagcttgtacgccaacatcgacatcctcagaccctactttgatgtggagcctgctcaggtgcgaagcagaactctgtgcttgccagccgggcatg

SEQ ID NO: 334861 - DNA, 120 bp, Artificial Sequence
  ENSG00000137207_13 (sequence is synthesized)
tctttgggtcttcgtgcacactaaagtcagtgggattaacattgacctgaaagggccagactactactccagcctgaggatctcgggtttcagggcccgcccgaggcattaggaagaagc

SEQ ID NO: 334862 - DNA, 120 bp, Artificial Sequence
  ENSG00000137207_14 (sequence is synthesized)
agtggaagaacaaagccctaaaccctgggatgagcagaggacttaatggatggaacagaaaagtcctgcactctaggagccattgtcttcacagggcggaggctcagctgtgattgacat

SEQ ID NO: 334863 - DNA, 120 bp, Artificial Sequence
  ENSG00000137207_15 (sequence is synthesized)
ttggggcttaggaaagaaggaaatgggcactttttcagccttttagtctttgataggtaacataggagaaagacatgaatggaagactagtaggtttcccaggctagaaaagatagccaa

SEQ ID NO: 334864 - DNA, 120 bp, Artificial Sequence
  ENSG00000137207_16 (sequence is synthesized)
tctggagagccgggggaagcaccagggcagagggtgggaccaccaggcaaatcctgggaagccataaacagatgagctgttgtaccctccagcctgaatgaattggtatattgacagaaa

SEQ ID NO: 334865 - DNA, 120 bp, Artificial Sequence
  ENSG00000137207_17 (sequence is synthesized)
tgaggatacaatggtggagtgagacaggaacagcccctgcggaaggccctaggtgaggctgagatcagaggcctcctaggactaaatagagccttcaccccacagcgggagggcaccctg

SEQ ID NO: 334866 - DNA, 120 bp, Artificial Sequence
  ENSG00000137207_18 (sequence is synthesized)
aggagccaggtgtggtgggcaagagtgatgttaaaaagagtagccaggccttggtcggcatctgtcctggggccccaaagcctggaatgggaggagtaggccaatggaccatgtgtttcc

SEQ ID NO: 334867 - DNA, 120 bp, Artificial Sequence
  ENSG00000137207_19 (sequence is synthesized)
gacagcctggagctgtccatctcacaaagagccctaaatgggagggaagagcccaaagatggttctgccctgggtgggggtgtcttgtccccactcctcactttggagccaggccctttg

SEQ ID NO: 334868 - DNA, 120 bp, Artificial Sequence
  ENSG00000137207_20 (sequence is synthesized)
agctgtattctcatggtcctaggtagcagtgttggtgtctcggaccgtgggccccacacagcggctgctcctctgtggcaccctggctgccctacacatgctcttcctgctctatctgca

SEQ ID NO: 334869 - DNA, 120 bp, Artificial Sequence
  ENSG00000137207_21 (sequence is synthesized)
cttcctggaagtaactttaggggcaaggaaatgatttcctcattccctatctgtctttactaccctgttctaccgtgtcatccaacatgtcttctaggccaggccccattccctggagtt

SEQ ID NO: 334870 - DNA, 120 bp, Artificial Sequence
  ENSG00000137210_0 (sequence is synthesized)
aatcgcgtttccggagagacctggctgctgtgtcccgcggcttgcgctccgtagtggactccgcgggccttcggcagatgcaggcctggggtagtctcctttctggactgagaagagaag

SEQ ID NO: 334871 - DNA, 120 bp, Artificial Sequence
  ENSG00000137210_1 (sequence is synthesized)
aatggagaagcccctcttcccattagtgcctttgcattggtttggctttggctacacagcactggttgtttctggtgggatcgttggctatgtaaaaacaggcagcgtgccgtccctggc

SEQ ID NO: 334872 - DNA, 120 bp, Artificial Sequence
  ENSG00000137210_2 (sequence is synthesized)
tgcagggctgctcttcggcagtctagccggcctgggtgcttaccagctgtatcaggatccaaggaacgtttggggtttcctagccgctacatctgttacttttgttggtgttatgggaat

SEQ ID NO: 334873 - DNA, 120 bp, Artificial Sequence
  ENSG00000137210_3 (sequence is synthesized)
tgatgacatctgattagcagaagtcatgttccagcttggactcatgaaggattaaaaatctgcatcttccactattttcaatgtattaagagaaataagtgcagcatttttgcatctgac

SEQ ID NO: 334874 - DNA, 120 bp, Artificial Sequence
  ENSG00000137210_4 (sequence is synthesized)
attttacctaaaaaaaaaaagacaccaaatttggcggaggggtggaaaatcagttgttaccattataaccctacagaggtggtgagcatgtaacatgagcttattgagaccatcatagag

SEQ ID NO: 334875 - DNA, 120 bp, Artificial Sequence
  ENSG00000137210_5 (sequence is synthesized)
atcgattcttgtatattgattttatctctttctgtatctataggtaaatctcaagggtaaaatgttaggtgttgacattgagaaccctgaaaccccattccctgctcagaggaacagtgt

SEQ ID NO: 334876 - DNA, 120 bp, Artificial Sequence
  ENSG00000137210_6 (sequence is synthesized)
gaaaaaaaatctcttgagagatttagaatatcttttcttttgctcatcttagaccacagactgactttgaaattatgttaagtgaaatatcaatgaaaataaagtttactataaataata

SEQ ID NO: 334877 - DNA, 120 bp, Artificial Sequence
  ENSG00000137210_7 (sequence is synthesized)
ttttgagaaaggaaggaatatatcctgactgattgatctggctctgttatccaggttggagtgcagtggagcaatcatggctcactacagcctcaccctcccgggctcaaaagatcctcc

SEQ ID NO: 334878 - DNA, 79 bp, Artificial Sequence
  ENSG00000137210_8 (sequence is synthesized)
cctcccgggctcaaaagatcctccttcacacctggctaatttttttttgtggagacggggtttcactatgttgcccagg

SEQ ID NO: 334879 - DNA, 120 bp, Artificial Sequence
  ENSG00000137210_9 (sequence is synthesized)
cattctattactcttctttaccatgtagagttcagtttattgcccagaatactttatgcattcaaaaccttacttgtttcagagtatctgatgctatgcatcaactgacgtttgacttat

SEQ ID NO: 334880 - DNA, 120 bp, Artificial Sequence
  ENSG00000137210_10 (sequence is synthesized)
acactaataggagatgcttcaaaaacaatagttgatttaatgtcaaatgacatgagtatatccattcactgtggagatggctttgttctctggtcctagctccttcctatatggtggcag

SEQ ID NO: 334881 - DNA, 120 bp, Artificial Sequence
  ENSG00000137210_11 (sequence is synthesized)
cctgccgcggccccggggcgcagcgcgcacgcaatcgcgtttccggagagacctggctgctgtgtcccgcggcttgcgctccgtagtggactccgcgggccttcggcagagtgcctttgc

SEQ ID NO: 334882 - DNA, 120 bp, Artificial Sequence
  ENSG00000137210_12 (sequence is synthesized)
atgagatcctactactatggaaaattcatgcctgtaggtttaattgcaggtgccagatggagtatggctcttgttgcccaagctggggtgcaatggtgcgatctcagctcattgcaacct

SEQ ID NO: 334883 - DNA, 120 bp, Artificial Sequence
  ENSG00000137210_13 (sequence is synthesized)
tggaattacaggcatgagccaccgcaccaggccaagatctaattctttttaatggcttttaagttgtacggatgattactatttagtttactattcccctactgatagaaatatgtcttg

SEQ ID NO: 334884 - DNA, 73 bp, Artificial Sequence
  ENSG00000137210_14 (sequence is synthesized)
ctgaggcctttgatattacaaaggatggtgtaccaagaaatatcctcatggaaatccccgtgaacatgtgcaa

SEQ ID NO: 334885 - DNA, 120 bp, Artificial Sequence
  ENSG00000137210_15 (sequence is synthesized)
caagaaatatcctcatggaaatccccgtgaacatgtgcaaaggaatctgtaggttacattcctaaatgctgagtcagagcatctcagcatttaaaattgtgattgccttcagaagaggat

SEQ ID NO: 334886 - DNA, 120 bp, Artificial Sequence
  ENSG00000137210_16 (sequence is synthesized)
gcaccaatttatcctcccactagtggtggctttgtgtaattggactttgtaaaaatctttgacacattaagctggaagtctgcaaacttgttctgtaaagggccagatagtgaatatttt

SEQ ID NO: 334887 - DNA, 120 bp, Artificial Sequence
  ENSG00000137210_17 (sequence is synthesized)
aggcttctcaggccatctgtgtcccagctgttcacctctgcctttgtagaatgaaagcagccacagccaatcaataaacgagtgtgactgttccaataaaactatgtatgggccctgaaa

SEQ ID NO: 334888 - DNA, 120 bp, Artificial Sequence
  ENSG00000137210_18 (sequence is synthesized)
aaaattcatgcctgtaggtttaattgcaggtgccaggaatctagaaaactgtatctgaagttgttcctacctgaagccgttgcattgagaggtgctaagtggatcctctggccagctgac

SEQ ID NO: 334889 - DNA, 120 bp, Artificial Sequence
  ENSG00000137210_19 (sequence is synthesized)
acttcttttttgagaaaggaaggaatatatcctgactgattcagccctagcaaaccaagagtgagccaccttggaagtagatcctgcagtcccagtcaagccttcggatgactgaaactt

SEQ ID NO: 334890 - DNA, 120 bp, Artificial Sequence
  ENSG00000137210_20 (sequence is synthesized)
cggccaattatctgactgccatcagagaacccaagccagaactacccagctaagctacttctaaattcctgacccacagaaactatgtgaattaataaatgtttcttcttattttaaatc

SEQ ID NO: 334891 - DNA, 120 bp, Artificial Sequence
  ENSG00000137210_21 (sequence is synthesized)
cctgccgcggccccggggcgcagcgcgcacgcaatcgcgtttccggagagacctggctgctgtgtcccgcggcttgcgctccgtagtggactccgcgggccttcggcaggtcggcagcgt

SEQ ID NO: 334892 - DNA, 120 bp, Artificial Sequence
  ENSG00000137210_22 (sequence is synthesized)
tttgctgtaggtccccaagctggagtgcaggcttccttgtcagtcttgcagctcctgcccttgccttttgcttatctggtgaagctgagccaggcctcttgtggaattacttatttttgc

SEQ ID NO: 334893 - DNA, 120 bp, Artificial Sequence
  ENSG00000137210_23 (sequence is synthesized)
ctctttatctaaaggtaggcaggggtggttgtagtttgttattatcattgactgccattcatcagccatgacccccaagtgccatctctgggcttaagtaggagtcaacctctggcctac

SEQ ID NO: 334894 - DNA, 120 bp, Artificial Sequence
  ENSG00000137210_24 (sequence is synthesized)
ttgtagaaaattttgctaaaaggaaattttgattgaatcctgttttctaattttgattataatacctaaaccaaattgtggtttttaaaaaatgtagttgtaggccaggcacggtggctc

SEQ ID NO: 334895 - DNA, 60 bp, Artificial Sequence
  ENSG00000137210_25 (sequence is synthesized)
ccaggcacggtggctcacacctgtaatccaagcacagtgggaggccatggctctatgaaa

SEQ ID NO: 334896 - DNA, 120 bp, Artificial Sequence
  ENSG00000137210_26 (sequence is synthesized)
gatcctctggccagctgactgcacttcttttttgagaaaggaaggaatatatcctgactgattacagagtctcactctgtcgccaggctggacaggctggagtgcagttgtgcgatctcg

SEQ ID NO: 334897 - DNA, 86 bp, Artificial Sequence
  ENSG00000137210_27 (sequence is synthesized)
agagcccagattggataatttctgaaaaattgtttgcaagtgcatggacactttcttctatcatctccaatctgctggtaagccta

SEQ ID NO: 334898 - DNA, 120 bp, Artificial Sequence
  ENSG00000137210_28 (sequence is synthesized)
tggtaagcctatcccatggtgttttattttattttaaagccttcgattttcagttctagacttttaaacttggatcatttaaatagtttccatattctgttgaaattctctatatctttt

SEQ ID NO: 334899 - DNA, 120 bp, Artificial Sequence
  ENSG00000137210_29 (sequence is synthesized)
tatttatgatgacaatattttccttaggtctttgaatatttataatagctgttttaaagttcttgtcagctatttccaacatctgagccatctcacatctttttctatagactgcttctc

SEQ ID NO: 334900 - DNA, 120 bp, Artificial Sequence
  ENSG00000137210_30 (sequence is synthesized)
ctcttaacctcatggtactagtcttatttacttaaatagctactattttgtttgtatattgtacatgatgaataatatgttgaagagttttggattttacctttcttaactgagtgttgc

SEQ ID NO: 334901 - DNA, 120 bp, Artificial Sequence
  ENSG00000137210_31 (sequence is synthesized)
tttctgttttaagtaatcaattgctttttcgacaaatcaccttaaatttgtggatgcttagtattaccctttctaaagatgcattcattttagctttggcactagttttagggtgaattc
